United States Patent Application Publication US 2013/0129668 A1 - sequence listing, part 23

SEQ ID NO: 379586 - DNA, 122 bp, Homo sapiens
gtgacttctcactgtctgactccactggccttattgagccagcactgcggccagcaaccgcgctgggtgtgtctgtgaatttcaagggagcccacacgtgggcggcagtcgccccgctggac

SEQ ID NO: 379587 - DNA, 122 bp, Homo sapiens
ttaccaacaggctgagtgcctggttatctgtccatgtttcccttgcagacaccaagtgcccggataaagtcagcttcacgggcccggactggcttacccaaggaggtgctgaaggtgccgtt

SEQ ID NO: 379588 - DNA, 122 bp, Homo sapiens
gtggcagtgggcaccacacaggcaggttcttcgtccctagggggcatatataatatgagacgattggagggggcagggtgactggcagtggtgggtaccagttggaccagttctgggttcct

SEQ ID NO: 379589 - DNA, 122 bp, Homo sapiens
agccacttacagcggcccggcaaaggctcggatgcaaaagttgtttggtggcggctgctacgagctgagaactggagtcgccccagaggggtgtgtgagggtgcgttcttagcagcatctta

SEQ ID NO: 379590 - DNA, 122 bp, Homo sapiens
gcaacagggacaggcccaccaggacgctggcgcccagcgaggtcagccgcgtctccttcacgttcacaatcctgcggtggcccgagccgcgagtgtcacctctgcgcccctgtccacagggc

SEQ ID NO: 379591 - DNA, 122 bp, Homo sapiens
ttttgcccttttacccctctggtaggcgccctagggcgggggtgctgccgcgcgcttcggcgcgccttggttctgtcaccagccccactggggcctcacaatcgctcagccgtccagtgcgc

SEQ ID NO: 379592 - DNA, 122 bp, Homo sapiens
gtggcgtgtagcattgccaatcatagtgtctgtatctctgtctgtctctccaccacggaccgttccaggcgaccaacacgcagtctccaagcttggagttgcctgctgtaggccccccaccg

SEQ ID NO: 379593 - DNA, 122 bp, Homo sapiens
caggtgcttctcaccacgggaaagccgccgacctgtgactcgcttgagatgggaaagcggcgccacagaccccgggtctccttggctgtctgtgggccgcccctggccaccttgtcctggct

SEQ ID NO: 379594 - DNA, 122 bp, Homo sapiens
caaagccacggggaagcgtcaggattggcctgaaccatgaggagctcctggcgcttctgtcgctgcttcttttcaaacagccgccgctggggagatgggagaggtgggtgtccgggacagga

SEQ ID NO: 379595 - DNA, 122 bp, Homo sapiens
aattatctcacatgtcctatgtcctatgaaacttcggtatttatgaccccagcgtgggtccgcggcgccccggaactacacttcccacaaagcattgaggcgaaccccggcggcgggcgggg

SEQ ID NO: 379596 - DNA, 122 bp, Homo sapiens
catggagaacagggggacatggaaagatctgggaggatgatgaaaccccagggagggaaacgctcacacagagaggaaaaacaaaacccactagacgtgatttgttcctgctccaaatgaat

SEQ ID NO: 379597 - DNA, 122 bp, Homo sapiens
gagacattttgaagccaagtgatcctaatcaccgtcagacttcaggggcagcaaggctagcgagtgacgtcggaaaagccacaggacagagaccctgagccctcaggagcatatggccacaa

SEQ ID NO: 379598 - DNA, 122 bp, Homo sapiens
gcccacccggtccaccggggaaaggtccaggagactgtcccgcacagccggccgcccggccggtccaccctgggaaagtccaggcctctaggttcttactcccacgtgtgcatgtgtatgcc

SEQ ID NO: 379599 - DNA, 122 bp, Homo sapiens
ctttgggaatgggagtcattgatttacttatttatttacatcattatttacaggaatccgcgctcctggtccaggctccagcagaaaaggatttgtggcagtttacagtttatcttttaaaa

SEQ ID NO: 379600 - DNA, 122 bp, Homo sapiens
cgccctgctgcctgcgcgcacaccttgctatagacacagccaccacgctgcaccatgtaacgggctacctccaggtggttgttcaccacggcctccatcagtggcgtccgctgctgtttgtc

SEQ ID NO: 379601 - DNA, 122 bp, Homo sapiens
gtggggttaggccgctgcacgccggaagtggcagctgaacaggggcactgaggtgtcggccggcggggcagtggcccggagcggggggcgggggcgttgatcatgtttccctttgggcccca

SEQ ID NO: 379602 - DNA, 122 bp, Homo sapiens
gcgcggtgggggtggggcggggggcgccgcggggtgggctgcgggccggggtgggggtggcggtgcgtccgcgcgggagggccggccgcggggagggggcgccgcggatgctcctgcgcccg

SEQ ID NO: 379603 - DNA, 122 bp, Homo sapiens
ctctccatctctctatctcctacaggtgctgggccccaagccggctctgcctgcaggtaccgaggacaccgccaaggaggatgcggccaaccgcaagctggccaagctctacaaggtgagca

SEQ ID NO: 379604 - DNA, 122 bp, Homo sapiens
ttttgtgagctgggaaaagccggcgcctaaggccagtacccttacccgggttaaagagcacggtccccttgaggtaggcgtactccttggtactgatgttcagactccagcatttggaaaga

SEQ ID NO: 379605 - DNA, 122 bp, Homo sapiens
cggccctgcccgtgcgtatctcagctccggtcccgcctgtctgcggcgagcgggcgggggcgtctcccgggcctgcccatggacaaggtcagcatgcagccccctgggcgctcagagccgcg

SEQ ID NO: 379606 - DNA, 122 bp, Homo sapiens
caccttctcatttgctccccacccagggagtgtttatgtgttttggctaagattatatatcgaagttagtgacagggctgagtcagctgcctgccttcatgatactcactgcctccctgcac

SEQ ID NO: 379607 - DNA, 122 bp, Homo sapiens
agccagaaatggcatgtgacgagatgagacgtggatgctcccctgtcctcggcagccagtcgcccatcgctgggcctctgggacaccgaggcagctctggcatagcaacacccaatgtggaa

SEQ ID NO: 379608 - DNA, 122 bp, Homo sapiens
atgtaaaaatggcagggccaaatgggcttcagatctcttgctcctgcacttgcatggcttcggacagttaagtaatcactctcagtttcctcatctgtaaaatgtacgcaaaaataatgggt

SEQ ID NO: 379609 - DNA, 122 bp, Homo sapiens
agctgcagtggaggtggcagatgttctgggagcaagaatggggcccgtgggcactcaccccgccaaaaccgcgaaagcgctgcaggacctcgcggttaaggaaggaggcgcgggccgggtcc

SEQ ID NO: 379610 - DNA, 122 bp, Homo sapiens
tttcgccttgttgcctaggctggtctccaactcctgggctctagtgatctgcccacttcccgaagtgctaggaatacaggcatgagccactgggcctggcaggaaaattgtttttaaagagc

SEQ ID NO: 379611 - DNA, 122 bp, Homo sapiens
ggcagaattcaactgccggacttgggactggacgccaccaagtggataaaatatggagctcggaaaagattggattcccggccctgaactgaccacacagttgagaggaagttgaggcctag

SEQ ID NO: 379612 - DNA, 122 bp, Homo sapiens
tggggcctggtcttttattcccctgtctctgagcctactttccaggtcagcctttgccggcgctgacagcacgcttttctcatagcctctccttctcatagcctttggttgctttcaagttc

SEQ ID NO: 379613 - DNA, 122 bp, Homo sapiens
aaatgcttcccaacagaaaagcagatgggggcttgcattcagactgacctcagaggcagacgaggcgggatcccaaggcctagtcagacccagagcctcagatgccaagacggtaaactcca

SEQ ID NO: 379614 - DNA, 122 bp, Homo sapiens
ctccacatgaagggtggtcacacgttctccatctgttcctccagatggtgagacttctgtcggcctcgcttttcctgggccagtgtccatcagccaggtgctcagccccagtgcactgaagc

SEQ ID NO: 379615 - DNA, 122 bp, Homo sapiens
tttttacctaaataatttataccttgcctcacttcctttcctttatttctacagttacaccgaaggtggggaggagttatgtgatcttctagttgatcttttaagtcttcatcttgtaggtt

SEQ ID NO: 379616 - DNA, 122 bp, Homo sapiens
attccggagtgttccttaaagactgtgaacccaaactgctttcaggggtgaagtaagtgacgagaaggtttcctttactgccggcgagggaagaaaagacagcctaccttggctaagggagg

SEQ ID NO: 379617 - DNA, 122 bp, Homo sapiens
aatcttcatatgaaatagagacacaagcattctcagaaacctctttgggatgttagcattcgtgtcgcagagttgatcactccctttcatagagcaggtttgaaacactctttttgtcatat

SEQ ID NO: 379618 - DNA, 122 bp, Homo sapiens
aaccccatctctactaaacatacaaaaaagtagccaggctagtggcgtgcacctgtagctcggaggctgagacaggagaatcgtttcaaccccggggtcgggggttgcagtgagccaagatg

SEQ ID NO: 379619 - DNA, 122 bp, Homo sapiens
ggcgctgggcgcggggggcggtggcggcagcggtagtggcagcggcggtggctccagccccgcgttcccgggcaccttctgcctgcctagccccgcgccctccctgctttgcagcctggcgc

SEQ ID NO: 379620 - DNA, 122 bp, Homo sapiens
gtttgcatgcttcgtgccacacgcccgcggtgatcccagccagggccccgagcgcagaggcggagctgtgctcagcacaggcctgggacctcccccggcaggcacctgtggggggtgcagct

SEQ ID NO: 379621 - DNA, 122 bp, Homo sapiens
tgctaagatgatatctgaaagccatttgttccatcacctttcaagttcattttctgtttccgtatgtttatttctcagaacaaattgtctttgacgaacaaacccattggattggattaatt

SEQ ID NO: 379622 - DNA, 122 bp, Homo sapiens
aagttcaagcaattctgcctcagcctcctgagtagctgggattacaggtgcccaccaccgcgtctggctaattttggtatgtttagtagaaatgggggtttcaccctcttggccaggctggt

SEQ ID NO: 379623 - DNA, 122 bp, Homo sapiens
gtgaggagataacagccacatcagatattaaaacctaccacaaaatctgtataagtaaaacggtgtggtcctggaacatgaatgcacatgcaaatcaatgaagcagaacagcaagtccagca

SEQ ID NO: 379624 - DNA, 122 bp, Homo sapiens
gggtgaccgccccgtctgcccatccaccccaaaacagaaattgcttgctaggctcctagacgtcatccgaccaaggagaagggaccaggcggcaggcaggggagcgcctcgaccgcgttact

SEQ ID NO: 379625 - DNA, 122 bp, Homo sapiens
tccaggaagtctcagcgagctcacgccgcgcagtcgcagttttaatttatctgtaattcccgcgcttttccgttgccacggaaaccaaggggctaccgctaagcagcagcctctcagaatac

SEQ ID NO: 379626 - DNA, 122 bp, Homo sapiens
taacacgcagtgtttccaaactgcttcccgagcagagagctggttattaaataaacagaacgctattacatattattattttttgtaaagaactgagcggagaaagtgctttcatgctacat

SEQ ID NO: 379627 - DNA, 122 bp, Homo sapiens
tctggttaatgttttgtgactttattctagtggttttatcctggctctgtttcctgactccgactgtgttctgatccttatgtgaatacgcttcacagctttggccctgttaggttctttgc

SEQ ID NO: 379628 - DNA, 122 bp, Homo sapiens
tgcggattctagaacggaacctttttttaattcttcccagtagaaacgtaggaacaatttcgtgaacgcaatccggagtgcccaacatggcggcggccgtaaggtgcatgggtagaggtaag

SEQ ID NO: 379629 - DNA, 122 bp, Homo sapiens
ccaacccagcccagcactaggccccgcctctacctggtgcccaatgctcgagtgcctcctcgaatcctgcccctcgcgagacccgcccccagcgggcaccgcccctaactgccgacctcaga

SEQ ID NO: 379630 - DNA, 122 bp, Homo sapiens
cgttcccgtcggtgcccctccccgcggcagcctggccgagtccgcccagcctgcctaggacgtccctgacccgcgcgctcagtttcattcagtggccgtgggatgttgcatctgagtttttc

SEQ ID NO: 379631 - DNA, 122 bp, Homo sapiens
ccctgaaaacacaaatacatggactcattgcccgttccctgactttcaccccaatttcagcgttgcaaaccaaggactccagctttggaacgtctttttctgacatgtttttatcactctcc

SEQ ID NO: 379632 - DNA, 122 bp, Homo sapiens
cccagggccctgcccacatacccagaaaacccagctgggcattgtccaccatgaagtccacgctgtacacctccaggggcttggcatcctgggggcgggaagggggcgtcagaggtgccttg

SEQ ID NO: 379633 - DNA, 122 bp, Homo sapiens
agctagaactggactatgaagctaaggaaaagagacgagaaaggaaggttgatggagcaacgtaacgtgcctgtatggggagaaagtccttgagaaattgctagagatgggaatgcccaaaa

SEQ ID NO: 379634 - DNA, 122 bp, Homo sapiens
ctgcgtcctcccctctccccgcccgtcttcttaataagaagaaaaataacgtgggtgctccgaatggctctccagctctctggtcccagagagagaaagcaagaaagggccgttcgttcctt

SEQ ID NO: 379635 - DNA, 122 bp, Homo sapiens
caagagcgtgtacaggtggccctgctgacacacagaatccttgggagaacaaagcctccccggggttcggggacaggtggatgggaggtagtcctggccagaggtatctggggaggctgggg

SEQ ID NO: 379636 - DNA, 122 bp, Homo sapiens
gaactcctcctgccttggcctcccaaaatgctgagattacaggtgtgagccactgcacctcgccagatgtccaatgtctgactcctgcataccaaggtgttctgtatcaagggctttaaaac

SEQ ID NO: 379637 - DNA, 122 bp, Homo sapiens
caggagactggcgtcctggccaccccacaggctgaaggaagcctttttcctctggaatgccgatggctggtgtacacgccgttggctcatggggagaggcgacggccgtctgtctgcggatt

SEQ ID NO: 379638 - DNA, 122 bp, Homo sapiens
acctgtgggtgcaggccacacgcaggctgcacagacccgggacaggtctgagctctgaggcgtgcggcccatctccgcggcaggagcttctgtctgagcctggggaggaaaagcctccacct

SEQ ID NO: 379639 - DNA, 122 bp, Homo sapiens
tagaagattgtttctcttccagataagcgctagttaacaaatccatatggcctagtcacacggactaagccctgttagcacccctcagtgcctttcccttagcacaactcagcctttaaagt

SEQ ID NO: 379640 - DNA, 122 bp, Homo sapiens
gtgagtcatggtctttgccctcaatgcacaagggaccagcaggagagacaaaatgagacacgaggctgcacagtgtgctgagagcagcatctgaagcaactcacgggtacaggggcactgat

SEQ ID NO: 379641 - DNA, 122 bp, Homo sapiens
gcgagcactcgccgctggccttctagggcaggcagtattgccgctccaggcgtgcggagtcggggagaaaaaaaccgaacacgtgtgctacccagggcccccagataagcccctccgcgcgc

SEQ ID NO: 379642 - DNA, 122 bp, Homo sapiens
gcgctgggaagaggaagaagaacattcgccctcctcctaccagcgcgcgggcggcggcggcggcggcaccggggtcacgaactctgacctttcactgacaaaaacaataacaaaccccccct

SEQ ID NO: 379643 - DNA, 122 bp, Homo sapiens
acttggagaggcgctgcgtcgggggacggggctacaagccgtcgctgggggcggggcttgcggcccacctgtaggtcccggtgccacctcgtcagtgtcccgagagatccccagaagaacga

SEQ ID NO: 379644 - DNA, 122 bp, Homo sapiens
acttgtagtcaattgctgccattggcctagagacacacagaagagacggaaggcacaggccgggaggtgtgctgcatgcccacccagaagttcccagtccctgctgtggggcagctgtggct

SEQ ID NO: 379645 - DNA, 122 bp, Homo sapiens
gggcccctttctgccatcctcattctcaggcagcccctctccttggcccttcaaaacagccgcctccagagtgctgctgaccagttgccaaagccaggatcagggaggtctaaggctgtagt

SEQ ID NO: 379646 - DNA, 122 bp, Homo sapiens
ggaggcgctgggctcgcgtgcgtgcgggggacagcgcggagagagggcaccccgagcacgcgggcacctgtctgcgcccccgttactgagcgcacagaagccacctgcttgccacgcctggg

SEQ ID NO: 379647 - DNA, 122 bp, Homo sapiens
atgtgattctcttgtttcagcctcccgagtagctggtattacaggtgcctgccagcgtgccgggccaattttttgtgtttttagtagagatggagtttcaccatgttggtcaggctgttctc

SEQ ID NO: 379648 - DNA, 122 bp, Homo sapiens
gaagaaaaatgggattcccaggtatttaactttaggaatcttacagagatccaacatggacgctttcacgccacatcctgattttagctgtggctcttcttgctctgtctggaggcatctca

SEQ ID NO: 379649 - DNA, 122 bp, Homo sapiens
tgcactgtttggcacgagagtgcacgtgctgtgtgtggtctccaagtcccctgcactgttcgtttggcacacgcgcatgtgctgtgtgcagtcccgagccccctgcactgtttggcacaagc

SEQ ID NO: 379650 - DNA, 122 bp, Homo sapiens
gtttcttggcgcgttggcttctctcttcactggggcatttatttatttatttctggggatcgatcctccccacccgcgcgtacccgtcaggtgagccccccatcccgcgccttcggggccat

SEQ ID NO: 379651 - DNA, 122 bp, Homo sapiens
ctcaagagaaatgcaaaactagtgattaacagtaagagtcaggcagggcgcggtggctcacgcctgtaatcccagcactttgggaggccgaggcgggcggattatgaggtcaggagatcgag

SEQ ID NO: 379652 - DNA, 122 bp, Homo sapiens
aagagtaaagtcgcttttcctccgaattttccccattagtgcagcttgtctggacagctgcgatttcttgttgggtcacagggcatttttgacaatctgcacgctctgcacttctccctctg

SEQ ID NO: 379653 - DNA, 122 bp, Homo sapiens
tcccgagcgatgaggaagctagcaggatggaagaggacttgaggacttattgatgagatgcggacacacagcgagaggcatggagttaagcagaaatcggagagcacttgggaacgacgtgg

SEQ ID NO: 379654 - DNA, 122 bp, Homo sapiens
taagtaaaactaaatgcgggggcgggtgccaactaaggtctcttgcgtcgggccagtgaacgacgtcagccgcaactctaagtggcaaagttttcgaaaaacctcgccgatcctctgaagat

SEQ ID NO: 379655 - DNA, 122 bp, Homo sapiens
accgacggccggggccttctgacggtctgaggtcttgcttgggccagtcacctcctgtcacggtccgcggaggggggaaggataagagggcgaggagctcatcgctcgccacccccgtgggc

SEQ ID NO: 379656 - DNA, 122 bp, Homo sapiens
tctgattttctcctcccctttgtgtacccgacgggtgttgctctgagatcaggaccatcccggcgggctgcggatgggatcatcgtgtgtgtatggccacagccctccgccccgctcgctcg

SEQ ID NO: 379657 - DNA, 122 bp, Homo sapiens
cgtgagtggccgcggagttggggccaggagcactcttgctgctccggagccccacgtctgcgcgaggacgggcggggcagccgggactggggctgtgcaggaggggcccagactctggggcg

SEQ ID NO: 379658 - DNA, 122 bp, Homo sapiens
tcgcctccacctctctccaggccgctccccggaaccctcaccaacaaaacccccggtgtacggtgggtggaactcacctcggatgcagctatagccgccatcacaacctttctctcttccca

SEQ ID NO: 379659 - DNA, 122 bp, Homo sapiens
cctgctacctggccttcccttctccttcctagcgataaccagttttcttaatttgttgtgcgttgtatgtgcaaatttaagtatatcttcttattctaccatccctcccttcttacagaaaa

SEQ ID NO: 379660 - DNA, 122 bp, Homo sapiens
ccgcccggcgcccccagggatcaggaagccgagtggggtggggagcctctcttccagcctcgcccacccacaagggggtcaaggtcgccgaagcgaagaccgagaaactgcggcgaccatac

SEQ ID NO: 379661 - DNA, 122 bp, Homo sapiens
ctgccccgagaaagagggcgggatcctcacggctcacagtggggagggtctttcgtcggccgccggctcgcctcggagggcctggaccactggaccgcccttccccggggccctgccgcggg

SEQ ID NO: 379662 - DNA, 122 bp, Homo sapiens
cgggcggggccggtttgctcgcgggtgggcaggacgttctcaccccccgccccctacactcgcaaactcgcaggcacagcctccgtcatcgccccacccgaatctcagaatcggaacttggc

SEQ ID NO: 379663 - DNA, 122 bp, Homo sapiens
tttgtccttgttgttttaaaatgaggcttatacagagtgagttgagagtcaagtagccttcgctgtgagacggtaatgcagttatataatagatacccttgactttgccagattcatcacaa

SEQ ID NO: 379664 - DNA, 122 bp, Homo sapiens
aaacttgctctgcagaagttttgtggccattgaaagtagcggtttgtggaagccctaccacgtcatacggcttttcaaccacgttgcacagcagatcacggcttttcagtaaatgccatttt

SEQ ID NO: 379665 - DNA, 122 bp, Homo sapiens
ctcacaggctgacactggcggggacgactcggacgaggactatgagaaggcaaggctgagcggcaagcctgggtcccagtggccagtaggtggacaggtggtgggaaagccataggccaggg

SEQ ID NO: 379666 - DNA, 122 bp, Homo sapiens
gccggctcgaagtgtgggagaggaggttgggggcgaccccaggtgggcactgctggcgtccggctgtcaatccacagctcacgtcctcacaggtgcgcgcctagagtcacgcgtccagcacc

SEQ ID NO: 379667 - DNA, 122 bp, Homo sapiens
ggctcgccccgaattccttttctattttgaagtagtctgtccttttgctcagtcagtaggcgagtccaagtgacagacacggacaggggggactttagtaacgtaaactaaacggtttccct

SEQ ID NO: 379668 - DNA, 122 bp, Homo sapiens
atgccatcatccacttatgttctttaactatcaactttgtttttctaagagatgggatctcgttctgttgccaaagctggagtgctgagacatgatcatagctgcagtgagctatgattata

SEQ ID NO: 379669 - DNA, 122 bp, Homo sapiens
agccgtggtgcaggtgcatggtgcccagcacggcactgtcgtaccgctcctgcaccttcacggacttggaatgctcgaccacactgttcagttctgggatgctttcagcagtgtccccaaac

SEQ ID NO: 379670 - DNA, 122 bp, Homo sapiens
ataaacccagaattcagttggttggtaaaacaagagtgatctgagtcctgtgcttgtctacgtgatccaccattgaatggcaggccagccattgtgcaggcatctgcatatgaagtgactgg

SEQ ID NO: 379671 - DNA, 122 bp, Homo sapiens
cgccccgccgtctggggttgaagtggtttttcccaaaggccccggtcccggctgttagggcgcagggctcgccgggacgcgggcagtcactcaccgcggcgggctcatggcgtgcggggttt

SEQ ID NO: 379672 - DNA, 122 bp, Homo sapiens
ggagacgcgccagatcacgtggagccggggcgccgacaagatcgagggggccagtaagtgcgcccacttcctgcctgggcccgccccgcgcgggggtcgtgggagcccggcccgactgcttg

SEQ ID NO: 379673 - DNA, 122 bp, Homo sapiens
ggaggggagacgcgtgcaaatttagattctgctatgcgatgtggacagtgggaggagagacgcgtgcaaatttagattctgctacaggatgtggacagtggggagagagacgcatgcaaatt

SEQ ID NO: 379674 - DNA, 122 bp, Homo sapiens
ccggtgcccgcgatcggcggggcttggctgggcttggctgggcttggctgggctaacggccgggacggaggaaggtggccgacttccgccccgcgcgcgctcgccccgcctctgggcccgcg

SEQ ID NO: 379675 - DNA, 122 bp, Homo sapiens
aaaaataaagtgaatgagaagcagaagttgttaatactatatcccccggcaggtgctaaccgcacgccgacccgactgcagcgcgggaacggaaggaggaaacggaagatttgaaaagattc

SEQ ID NO: 379676 - DNA, 122 bp, Homo sapiens
gccacattccactgccgcagcagaaccggtgtccttcacctgcctgcgtcttctgcagttcgttaagcagcgcccttagctcctgtgacactttagggagaaagccgcagcaccggcgatgt

SEQ ID NO: 379677 - DNA, 122 bp, Homo sapiens
tctagctctgggaatcgaggcagcccccagaacacccttggggcgcaacttcccggtgaacgtcccgtctcctcagccacccacagatgctgccacagctgcaccctcagggcaacgagcgt

SEQ ID NO: 379678 - DNA, 122 bp, Homo sapiens
ctttgcggccacgcacactgcatcgcagtgaaaaaggctcccgttctcaaggcgcatgcgcgcaggccagcaactccaaagccaggcctccagccccggtttgctagagagaaaggtagccg

SEQ ID NO: 379679 - DNA, 122 bp, Homo sapiens
gcaaaggacaatgtcaaaactcatctgaggcatccatgtctgtcctacagcaagcttccccgtgacactggagggacctaggctcccggcagttttcaggagccagccctgggctaggggct

SEQ ID NO: 379680 - DNA, 122 bp, Homo sapiens
ccatggaaacagatgcgatcattttcaaagagaatgcagatgagaagagcaacagacctacgacagtgacactgaggaagggccaacatttagataaaaccaacaaagaaactgagaggtac

SEQ ID NO: 379681 - DNA, 122 bp, Homo sapiens
gggctctgaaggaaggcaagacaagcatgcatccgccgtactctttggggcagctggtcccggagaggcctcgacccaccccagtgcttgttcctctcatctccccaccggtgtcccccagc

SEQ ID NO: 379682 - DNA, 122 bp, Homo sapiens
tacttttttaagtaacttgtcactttagttcttgcagtccaccttctacactaacattaacgagtaaagctcgtcgcttttcgcccaattccccctcccccccgcataacgaatgcactgac

SEQ ID NO: 379683 - DNA, 122 bp, Homo sapiens
gatgtggtgggcagggggacaagggacaggaccggcgcgtgcagggcttggacgggcaaccgagaagggggcattcaggaacctgggctccacattgttactgcagggaacaaagtttgaga

SEQ ID NO: 379684 - DNA, 122 bp, Homo sapiens
cctgtggatcagtgcctggctcatggtaaatgcatgtcggtgttagctactgtttttattcggtctgaaaatgtttaataaatgcctttcgtgagcccggcaccatggatcagcagtaccca

SEQ ID NO: 379685 - DNA, 122 bp, Homo sapiens
ggcccggccccggggacacgcgtgccaggccctgctgcagcccccgagaggtcggaggcgcggagccagggctgaccctgtgcactgggtcgagggccacccctcgtctcagcctaagctgg

SEQ ID NO: 379686 - DNA, 122 bp, Homo sapiens
tggttggaggagagggtaaaatctcaacatgagtttcaaagtactgtctctgtgaggggccggtagatgccttgctgaggaggggatggctaagtttgaccatgccccatccccagctagga

SEQ ID NO: 379687 - DNA, 122 bp, Homo sapiens
tccccagcctcctgtccttcccattccaggtgctccgggtgctagcaaagctggggtgggcggcgccgggcaaggtctgaagactgcgaggacccagctgccaggcgcattgtgaagtggcc

SEQ ID NO: 379688 - DNA, 122 bp, Homo sapiens
cttgatgtttagggaagaaattacctttaaattctggagggctactctcaaagtgtattccgagattcaattggatatacgacagaggatcaccttagcgttctgtttttagtccatttaat

SEQ ID NO: 379689 - DNA, 122 bp, Homo sapiens
tttttccacgtctgtcctgggcttagggccctcctcagaggccagaggggtaggcgagtccggggcggtagggggctgcgtccggaagtccaggctgcgttctgtccaccctgcccaccctt

SEQ ID NO: 379690 - DNA, 122 bp, Homo sapiens
gcagactggaggtgcgtaaggccggcgggaccgtgacagtccagcgtggggccgcagctgcggcggggctctgccgtgcactctagcagccagtgccaaaagggaatcaggacccgtgggcc

SEQ ID NO: 379691 - DNA, 122 bp, Homo sapiens
tgcttgctgggagatgtagtccctgggttggccactttagttcatcgttgctaccgccggcgtccagaagactacagttcccagcaggcccagggaaagacaggataccctgggtcggctcc

SEQ ID NO: 379692 - DNA, 122 bp, Homo sapiens
tttttttttgagatggagtcttgctcttgttacctaggctggagtgaaatggcgctatctcggctaactgcaacctccacctcctgggttcaagcgattctcctgcctcagtctcccgagta

SEQ ID NO: 379693 - DNA, 122 bp, Homo sapiens
ctgaattctcacccctgttctggatggtactctcccacctgccttgccctgcccctcttccgtcagctccggacaggtcaactttagggaatagattgaggcagatggatgtgacttctgat

SEQ ID NO: 379694 - DNA, 122 bp, Homo sapiens
ttaaatgaagtcagtgagcttcaggcttgcctacattgatatctcctaatggtttgggcacgtgacccagagccagctcacaaatcaagcctcagaaagagctgacatcctagctcttcccg

SEQ ID NO: 379695 - DNA, 122 bp, Homo sapiens
tacactgggagaggccatcgcaggccacaggttgcagtggggtcctctggttaaaatcgacgatgccagcccaggctgctggtcacagtggggacgagtccccaaggcccctggtcagaata

SEQ ID NO: 379696 - DNA, 122 bp, Homo sapiens
ctatgtgtcctaggcactggagtgcagtagctattcacaggcacacttcagcctcaaactcgtgggctcaagcaatcctcccacctcagcctcccagatagctgagatttcgggtgtatgtc

SEQ ID NO: 379697 - DNA, 122 bp, Homo sapiens
agtggccttgagacgggtcccgggaggcagacacttatccagggggccgctgacccacctcggcatctggagggcagaggtggcccccggaatagcccctgggcctacccttgctcggccgc

SEQ ID NO: 379698 - DNA, 122 bp, Homo sapiens
tcaagttccttcaactcccttatataatggcgtggtatttgcatataaactacccacttccgtaatcttttaaatcgtttctagcttacttgtaatgccgaatgcaatgtaagtgatctgta

SEQ ID NO: 379699 - DNA, 122 bp, Homo sapiens
ctgactgctcagggacctggtctttgttccccacagtctccccgacgcctagcacagtgccgggcacacagtaaatgcttgtggaatgagtgagtggcaaagctggtgtccagcagcctgcc

SEQ ID NO: 379700 - DNA, 122 bp, Homo sapiens
gaaaaattacaacatataaagtacactgtatacaagactgcaaacaagatatgaggtaagcgatcaggagccaaagggaagataaacaaattaagtttagagaggaaggcagatgtgaaacc

SEQ ID NO: 379701 - DNA, 122 bp, Homo sapiens
agaccaacggctgggtggggttccctcggtggaggagccgcaggggcccagcttgggaaccgggttatcaggggtgtggctctgcagaaagcgtcctgccacgtctccctccctgtcaacct

SEQ ID NO: 379702 - DNA, 122 bp, Homo sapiens
cagatacatgcaggccaaaggggaccccatcacccgggaggcgatgcagctgaaagctctcgaaatcgcccaggaaatgaacattccagagaaagggttcaaggcaagcttgggttggtgtc

SEQ ID NO: 379703 - DNA, 122 bp, Homo sapiens
tgcgcggctctggcccggtgacccgctactgtctctccatgcgctgccgcttcacaaaggcgcatctctaggtcggtggtcaggttctgcccggacgctgcaactggctccgggacttgtgt

SEQ ID NO: 379704 - DNA, 122 bp, Homo sapiens
ctattcattatccttcccggccaaattaattggtttgtaagttcacttattctgcagaaacgtattggcatgtgcagaattccaagttctatgctagcatctgtgaggagtgcaaaaatgga

SEQ ID NO: 379705 - DNA, 122 bp, Homo sapiens
gctcccgacccgcttttggggcgtgcctgcttcctcctctctgttaggtgagtgagtaggcgtcattcttcacagtagtcctctgcctccaccgccccgggatctccttgcgctcggtcctc

SEQ ID NO: 379706 - DNA, 122 bp, Homo sapiens
gcggaggccggacaaagatggggctgcgcgatcgccgaggggaggctgcaaggcaggcaccgcccccgagctgcggctgctgcggaccgcctgcgctgcgctctcgcggttcgcggagggtg

SEQ ID NO: 379707 - DNA, 122 bp, Homo sapiens
actgtggcccgctgtggggagccgagtggctagcggagaactgtggcatcccaggcccaccgtcttcaccagtagcagcccgctttcccccaaagctctgacttccgggtaggcgggaaagc

SEQ ID NO: 379708 - DNA, 122 bp, Homo sapiens
ggcgagtgcgcagcaggtgcccagcagacctagggaaactggggcactgggctggggagccgcacagccccctttcaccttctcgactcctttccaacccctcgctctggtggatcccagcc

SEQ ID NO: 379709 - DNA, 122 bp, Homo sapiens
acctgagccccacttctcgcggccgtcccggggagctctcgcgagagctcgcggccccaccgcgctgacaggcatcagctgtctccgtctgtctgacgcgcgctctccttctcggcggcccc

SEQ ID NO: 379710 - DNA, 122 bp, Homo sapiens
tataacagtcagtgagtcccctcgccgagctattaatcaattgctcctcgctcagttagacggaaagtgttgctctaagtatttatgggcaggtcttcaatacccgtgacgtcgctgcccat

SEQ ID NO: 379711 - DNA, 122 bp, Homo sapiens
catgtaagtaatttctctgggcaccccagcaaaggagaacaaatcgctgacaaaggcgagcgctttcgattcagcggcgtcgttaaggcaaccccaaagtattcctcctataataagttcca

SEQ ID NO: 379712 - DNA, 122 bp, Homo sapiens
gttcaaatctttggtaatctcatttgctgtttgccacagctcagtgcaatagacttttaccgtgggcactgggcagctgaggcaccgggactcagggaaatcaagcgcctgacgctgtctca

SEQ ID NO: 379713 - DNA, 122 bp, Homo sapiens
ctaggtgggaagatgtctaggcgggggtctcctttccacgcttccttccagatgtcagaacggtccccggaacactgcggttcccgcctggtccacggggtggcgcgcgggtcacacagctg

SEQ ID NO: 379714 - DNA, 122 bp, Homo sapiens
tatgagttccagtgctttgagtcaatgccccggcacccgctgtcaacgggatttgggtcccggcacttggtctcaaaaaagtactgtttgaatacactgttgttaatgttcacctctcccaa

SEQ ID NO: 379715 - DNA, 122 bp, Homo sapiens
taacagctcgttgggatgtggttggtgtatccctcaattgagacctcagggggcggagcacgtgctcaagcagcttgtgctctggactgaggagagcaggtttcaaaatgcccatggacagg

SEQ ID NO: 379716 - DNA, 122 bp, Homo sapiens
tgagcgggtttggtgtccggctcgacctgggttcctgcaccaccgctgtgtgctcctcctcgagtgaatgtatggctcactgtgcattgtgctgccgagctcacgtgtgtgacgcggatatg

SEQ ID NO: 379717 - DNA, 122 bp, Homo sapiens
cgtggcttgtgattggctgggaggcacgcccccgccctccccttccagcccgtggctcggcgacttacagggagggagaacatggctgctggcttttagcacctggtgggtttcgcgccttg

SEQ ID NO: 379718 - DNA, 122 bp, Homo sapiens
tggcgcctgtcctgggagcagctgcagccgtgcctggatcgggctgccacgctggcctctcgccgggacctgttcttccgccaggccctgcataaggcgcggcacgtgctggaggcccggca

SEQ ID NO: 379719 - DNA, 122 bp, Homo sapiens
gggaaaatagttaatcccggaaaagaaagtcttatgcctgccttggcactgaactgtgcacgtctgagagtgaaaggagacactgtcaaaaattgtcccggggcaatcagaatcaataagaa

SEQ ID NO: 379720 - DNA, 122 bp, Homo sapiens
gctccataattaagtgggaagtcaaaagttcagcaagaggatttagtgactggcttctaacgaatacatcatggaaaggggaagatttacagtggataaacctgtaccacccggaccatgta

SEQ ID NO: 379721 - DNA, 122 bp, Homo sapiens
gtcttgggtgtccctgagttttcgtctgggggtagagagagaagcatctgtggtaacttacgccaattggcctgaagctgtccttactctggagggggcattcctagtgggttcaggactag

SEQ ID NO: 379722 - DNA, 122 bp, Homo sapiens
agtcaccacttccccagctgctccctatatcccgtgcaggagcagctgatgagccagatccgggagacgcagcagctctgccaccagaccctgttcatcttcgatgaagcggagaagctgca

SEQ ID NO: 379723 - DNA, 122 bp, Homo sapiens
gggatgcggctggggctgtctggcacggggaccttcgtggccagccacgtggccttgggacgcccgcgtccagccagggctgaggacccaggccagagcccctcccgcccagcacccgcgac

SEQ ID NO: 379724 - DNA, 122 bp, Homo sapiens
gaagtcccatggaaagtctcggtctcacagcaagacacgggtgtctaaaggagacccttccgacggttcacatctggatatcccagctgaaagagagtatgacttttgtgatcctcttacca

SEQ ID NO: 379725 - DNA, 122 bp, Homo sapiens
gccccgccccttttgttggtcctgcgaggcctccgtctggggtaactggatgtgacgccccggatttcctcttctgagtccgaggactgtgacgaccttatctgaggaaggtgcaccctagt

SEQ ID NO: 379726 - DNA, 122 bp, Homo sapiens
ggaggctgaggcaggagaatggcatgaacccaggacgcacaggttgcagtgagccaagagcgtgccactgcactccagcctgggcaacagagtgagactccatctcaaaaagaaaggaaaac

SEQ ID NO: 379727 - DNA, 122 bp, Homo sapiens
cccattatggagattaaccacttttcatcaggtttttaacttaagtcgtgaggaatacaacggtgaacacaaggtgtgtatgtgaattaatttagtagtaaactatgacatggaggggttct

SEQ ID NO: 379728 - DNA, 122 bp, Homo sapiens
gggttcccagcggacgcctctgccgcacccctggcggggacccagctgcgccccttcccgcggccctcctagggcctgggtgcttggaggctcgaggccccaagatccatgtcgcccggaat

SEQ ID NO: 379729 - DNA, 122 bp, Homo sapiens
ccctggagtctcggtggtttcgggttggggagcagagcgggtggggcaggaccgactcgccggtgccagtcaggatatcaaggtgacagcgcccggcactggccttggtcgaagggtgactc

SEQ ID NO: 379730 - DNA, 122 bp, Homo sapiens
ccaggacggtgaactggggcctttgggaacggactttgaaaggagtgagggggatgtgagcgagcatgaggggcggggagaggtcatcaaaatatactctttttgacacccacacaatgcag

SEQ ID NO: 379731 - DNA, 122 bp, Homo sapiens
cggctgttgctggggtgagcgaaggcgacgtggcagcgcggacgctgctgggtgcctgggcgccgctgaggcggacagggggcggctcttgagcggcgccggggagacgggacgggcggaga

SEQ ID NO: 379732 - DNA, 122 bp, Homo sapiens
catcagtgagggagagtcctccccgggaggggcttccgtgcctcccattctgggcacttccggactttctgcaggaagtgctgtctctgagtcattctgttttgtcccgaggctgctgtgag

SEQ ID NO: 379733 - DNA, 122 bp, Homo sapiens
tgacgtcgtgatccacctgcctcggcctcccaaagttctgggattacaggcatgagccaccgtgcccggcccatgagaggttttgtttgcacttcaagaaggacagaaaaaggcaggcaggc

SEQ ID NO: 379734 - DNA, 122 bp, Homo sapiens
tcacaaaagtgtgtacgagaaagtatgtacatcagcacttcagaaaaggggcccacaggacgtgtgcggggtgtgcagggtgtgcggggtgtgcggggtgtttgagggtccggatgtgcgtc

SEQ ID NO: 379735 - DNA, 122 bp, Homo sapiens
cttgtaggagaggagggggcactgcttggggtgccagggttgggggctattcccgggctgcgggtccccctgttgaaggcatcaccagcctcatcggggtccctaccctcggacgggggttt

SEQ ID NO: 379736 - DNA, 122 bp, Homo sapiens
acactcacccagcggtccctggcagggattctctgtgggttccatggcctggactcccgccgccgcggccggcccgtgatgcacaggcgcggcctaatgaagcctcgccgggcgggcaggtg

SEQ ID NO: 379737 - DNA, 122 bp, Homo sapiens
ttcagtccgcgcgtcgggcagcgcgaacgccgcctccccggggccctcccgcccgccgggcgctcacctgggacatctgcggccggaagttgatgtccttgaggtcgatggagccgggggag

SEQ ID NO: 379738 - DNA, 122 bp, Homo sapiens
agacccggagaccccggggcccagacgcactccagtgccagacgccgaccgacgacagagcgcagtgacagacgcgacccaaagacctgcagcggcggagtagacacccacgtgacagacag

SEQ ID NO: 379739 - DNA, 122 bp, Homo sapiens
ccccagcggccagctggtgcctcctggaaagtgacgtctcatctgcaccggacaaggaggcggggagggagcgcagagcactcagcgtccagcagcgcggcgggccagcctggagcggaagc

SEQ ID NO: 379740 - DNA, 122 bp, Homo sapiens
gctttcccagaactggcccagaggagccagttcagagtgtgaggtcgggtctgcattgaacgtacacaccgaggtctatcagactcccccgattttagcgaagggtgctgactgctgtgctg

SEQ ID NO: 379741 - DNA, 122 bp, Homo sapiens
tgccttaattaacattccctgtgacctagttggtgcagtggcttgaatgccaaaataaagcgtgtgcactggatagtgtgtgaaagtctttgctgaaagttccagagccattgagaataact

SEQ ID NO: 379742 - DNA, 122 bp, Homo sapiens
tctgcgtccctgggccactcccgctggctcaggagccgtgatcagctccgttaaggggaacgcgcgtcccggcccctctccatctgcttggcgcgatctggcgcagcagcagagcacgtggg

SEQ ID NO: 379743 - DNA, 122 bp, Homo sapiens
gggcattccttccgactgcccgcctcccactgtcggtaaaaatgagccgtcacaggttgccggcaatttcttgttgtgtcccgagccattccgcggatcttgttttgaaggggcgagtcagg

SEQ ID NO: 379744 - DNA, 122 bp, Homo sapiens
aaccaatggggaagagaacagatcactttcttcactgagaatggaaagcttagccaggcacggtggctcatgcctgtaatcccagcactttgggaggctgaggcaggaggatcacttgaggt

SEQ ID NO: 379745 - DNA, 122 bp, Homo sapiens
ctgaagaaggcactgattctctccatggtgcttggctagattagggccagagaaccctctcggcttacaagcaggtcctgggctcaaaaggatgcaaccttgaccacttgtaatttattcct

SEQ ID NO: 379746 - DNA, 122 bp, Homo sapiens
gccctgcacgcaggcggccggcccaggagtcttagcggatcaagttgtctacggcggactcgggccggtcccgcaggacccggccgcacttggccgagcgcgcaggcgggaaggaggccgtc

SEQ ID NO: 379747 - DNA, 122 bp, Homo sapiens
gtcccccggccagcagcatcggcattatgcggagactcactagaaatgcacagcctgggccgcgccccaaagctacagcatcggaaactgcggggttaacacaggccagagatccatgtttc

SEQ ID NO: 379748 - DNA, 122 bp, Homo sapiens
tgggattttggcaaacaatgtcactctaagattgctggtctgaccgttttatatagctgccgctgacatgtggcttccagatgtgggtgagaaggatccaactgcagtgtgtcattgcttaa

SEQ ID NO: 379749 - DNA, 122 bp, Homo sapiens
aatacaacacttgggtggtgattttacttaacattctggtacttcatcccaaaaagacatcggtagagattagtgtaactcaacaacaggcagaaaacatacaagaaagtttaagacggatg

SEQ ID NO: 379750 - DNA, 122 bp, Homo sapiens
aggccctgaatcctagagagagctgggcacaggggcaggccctgaatcttttaaggctgccgtgcttgtgccagggtgtggtggagggtaccaccctggggggcagtactggaaactcacag

SEQ ID NO: 379751 - DNA, 122 bp, Homo sapiens
ttccttaacggagaggtgcaggactcagacttcaccagcccactcggtcccagccttgtacgcaaagagacgccaaggacgcgctctcccgcgtccaggcagccccagcttgctggcttgcc

SEQ ID NO: 379752 - DNA, 122 bp, Homo sapiens
ggcacttagccctcgcaggaacaatggcgagcctctagcccgattgggagcggcagtgggcgctgcctcactgggtcagaagtgcagcagacaccctgccggatctagaggggtgaagtcag

SEQ ID NO: 379753 - DNA, 122 bp, Homo sapiens
ctaagcccctcactgcccggggccggcggggacggccgcggctccgagtgcgaggcccgccgagcccacgcccacctggaactcgccctggcccgcaagcaccgctcgcagctccggttccg

SEQ ID NO: 379754 - DNA, 122 bp, Homo sapiens
cttgaggcctttcctgtcatttgtgatcagacatctgccccatttccttaggtggcgaagcgccccctctttcagcctccaaatgtggaaaattgtggagcatgtgctcaaaaggaaaatgg

SEQ ID NO: 379755 - DNA, 122 bp, Homo sapiens
aagactccgtctcgaaaggtgcttgtcggactccttcaccggagtcctccaggcgactggcggccttcactggaaagctgaggccagggccctggaaatatctggtagccagggagggggaa

SEQ ID NO: 379756 - DNA, 122 bp, Homo sapiens
acagctcccagcgagagcgacgcagaagacgggtgatttctccatttccatctgaggtaccgggctcatctcactagggagtgccagacagtgggcacagctcagtgggtgcgcgcaccgtg

SEQ ID NO: 379757 - DNA, 122 bp, Homo sapiens
cgactcaggccatgccattagggggtgctgtaggcattcccttctcttctctgctcaatacggaggtcggaaagacctgccagggtcatcagtcagttccaaaggccaaaggcagtcctgga

SEQ ID NO: 379758 - DNA, 122 bp, Homo sapiens
acaagccagggacgcccagggtcccctggtccccaggcatgcgttatggggaggcactttcgcccatgggggggacctctgccatttagtttgtgttttcctttcacaccacagctgcctcg

SEQ ID NO: 379759 - DNA, 122 bp, Homo sapiens
agtgttgccctggtgacgtcaccagtgcgcgggagggacaatggggcattgttctggggtcggtgagaccgggagacagtctccccccacgagattcccccccctttccacagacactgtgt

SEQ ID NO: 379760 - DNA, 122 bp, Homo sapiens
ttttcttcaaacattcaccttatcttatgtaaaaatgtagatttaggccacctaggagggcggatcataaggtcaggagatcgagaccatcctggccaacatggtgaaaccctgtctctgct

SEQ ID NO: 379761 - DNA, 122 bp, Homo sapiens
ccgctgagggccgagctcactggcagaaggaaacaggacctcaggccctcaccgcatttccggaaggcggtagaatacgccatctaatgagaatgtgacatgaggaaaatatatggacacct

SEQ ID NO: 379762 - DNA, 122 bp, Homo sapiens
ccagtcacccgcctgctctgttcctccagggtttggtggcggggagggccaagggtgccccgcatccgtgacgactcagtaattcacatggatcacatcacatttttccttggagggcaagc

SEQ ID NO: 379763 - DNA, 122 bp, Homo sapiens
aaggtgcagcccatgcagaggcaccgagacctgggctcgttccgaccctgccgcagtgcccgcttggctcaggcccagcgcctctctacggaggaaatccagacgcaaaataatacccgctt

SEQ ID NO: 379764 - DNA, 122 bp, Homo sapiens
agttctcggtgtgtctccttcattcattggcctctgctggggcctcctatgggtgtcttacgtctgtccatccatctgtccgtggtcagaagtggggtcagtgtgtgagtgagagcaggagt

SEQ ID NO: 379765 - DNA, 122 bp, Homo sapiens
cgggggcgtgcagctcgagactcgcccgggcacctgctcctcgtgcgcacgcccggagcccgggtcaccttgtcgtctacaagaaccaaggtgtgcccggccaccccggcactccaggccac

SEQ ID NO: 379766 - DNA, 122 bp, Homo sapiens
gcgtttcacttcattcgatttccatgtgtatggatttgtttctacatagctgtggtaaaacgcacatactaaactgaatccagggttgttttccactttgtaacatgaacattttcaccgtg

SEQ ID NO: 379767 - DNA, 122 bp, Homo sapiens
gctcatggggaggaatctgctgagaagggaagatctggtggggaatcctttgggaggcttcggggatctgagggatccagaagagagttctgacaggctatctaaggaaatttctgtgctta

SEQ ID NO: 379768 - DNA, 122 bp, Homo sapiens
aatagaaatgaggattcaaagaccaacggaagcaggtcacatttgtcagcctggggtcaacgtcggcggtgtgatgaaggtgcccttttagctctggtcttggctaagaggttggaattact

SEQ ID NO: 379769 - DNA, 122 bp, Homo sapiens
atctcttgaattcataagcatttcggtcctgttgtgggaattgggaacttggagtctttacgctccaggacactcaaaccactccttaaaactctgcttgcaatttttagctcactacataa

SEQ ID NO: 379770 - DNA, 122 bp, Homo sapiens
ctgaattgtcatgaaaaacactccagcattttttaaacactttgacaaacatgtgtgcctcgctttctccctacatgtcccgatttctttatctggattttttgtgtcctctattaagacca

SEQ ID NO: 379771 - DNA, 122 bp, Homo sapiens
aagttgtcatcctcgctttacagtctacagaactcagaagagatcatctgcacaaggccacgcagccaatgggcacgaagtaggattccagtgcagctgtctcagagctcaaccctatctgg

SEQ ID NO: 379772 - DNA, 122 bp, Homo sapiens
tgtgtgaagcgtagcagggcacagagcaggcgagacgtttgcatctcacagcgggagggccggcgacatcacatgaagtgacaggcaggcccttggaagccggtgcttagatccttaattag

SEQ ID NO: 379773 - DNA, 122 bp, Homo sapiens
gccccactggggctgctgctgctacagtcaaaggaccgggccagacgctgggctggagtccgaggttctgcctgctcccggcctgacctttcctggggggccgccacagtgggccccatcac

SEQ ID NO: 379774 - DNA, 122 bp, Homo sapiens
ctctccccgcaaggatcctagcgctgtttccgagggctgcagggactgtgagcccaggaccggccagcagagcgggtgcgactcagcgagcccaccccggccggtcgccgctccggggtccc

SEQ ID NO: 379775 - DNA, 122 bp, Homo sapiens
ctgaataaggcttatgtggactctatcactgcatcgtgatgactggagtaaggtgccctccgtccatcatcgtcagctttctattctgtgtctgactgcagtggaacatcggcgtgatcaac

SEQ ID NO: 379776 - DNA, 122 bp, Homo sapiens
gggcggggccggggcgccgtgggcgcgcggggacaatgcggcgttgcccgccggcaggggcgcgctaccttgggccccgcccctcgcgcgcggaatttttgtccctggccccgcccacgcgc

SEQ ID NO: 379777 - DNA, 122 bp, Homo sapiens
aatacctttcctacaacagattggccatcgcggtggttggcctcgccccacaaagcgaggcgctggagaagacttgaagatcattggtggaagtggatgtccctcaaaggtctgcgctaact

SEQ ID NO: 379778 - DNA, 122 bp, Homo sapiens
ttttctccaactgtgttctccctctcccggcctaggtatctccatagacagctgctcatgcgcacttccagcccgcggccatgttggtgaggggcggaagtgtcgctctcgccccgcccata

SEQ ID NO: 379779 - DNA, 122 bp, Homo sapiens
catgccattttgtgatggagtgtcccagtttaacacggcaatgtgactgcagacttcatccgcctggtgggcactttgtccccatggctgagtttcaggcttcctgaccttcctggtgggca

SEQ ID NO: 379780 - DNA, 122 bp, Homo sapiens
gcctcggaaactcttggtgcctggacctggagcctggacagggaccgggcggggcgagaccggccgtcgggggcgcggcccgtctgggggcggggcctgtcctctctcgccccgccccgtcg

SEQ ID NO: 379781 - DNA, 122 bp, Homo sapiens
atgataaaggctagttcacaattatcaccaggtaaagataatgaaagtttaatttggaaacgtgcaaattgaagaagaacccaatttttaaaagttgccatcacattcaatttatagccttt

SEQ ID NO: 379782 - DNA, 122 bp, Homo sapiens
ggccaggatgcctgtctctccctaatcagcctggctgccccatcctaggattcggctgttcgactttgggcaagggggatgctcaggaggctgcttggggcttttgggagaagcaccatgag

SEQ ID NO: 379783 - DNA, 122 bp, Homo sapiens
cacctacgtgctccaggcctgtctgggcgccgccatcttgccccgcagagatcgcgtttccgccgccgccagattccagcttccgccccgcagcccagccccgcctctcccggtcttatctc

SEQ ID NO: 379784 - DNA, 122 bp, Homo sapiens
gagaagaaatcacgatcgcagggctctgaagtttatgtaaaactcatcggaacgggtggccgtgagaccgaaccaacagctcggagaacacccttctgcagctgcacagctttgctttgttt

SEQ ID NO: 379785 - DNA, 122 bp, Homo sapiens
cccggagagtcccccactccgcccgcccgctcgcctgcgcccgcctgaaggaggcggcggcggcagccctggcagctccagcccggagcaggagctaaagcagcctcagccgcctcggcctc

SEQ ID NO: 379786 - DNA, 122 bp, Homo sapiens
ccttctggggagtcctatccagatatatttttcagaaataacttgttctcaatctgataccgaatccaatgatccataaataacctccagaacacgggtcttctcagattccagccagtaga

SEQ ID NO: 379787 - DNA, 122 bp, Homo sapiens
tggggctggggctgccggacgcggtgctactcaccggatgaagtgagggtctcaccccaacgcggccttagcttcctcggaaggaccgaacaccttggcggcagccgaggaaaggggttcca

SEQ ID NO: 379788 - DNA, 122 bp, Homo sapiens
gcctgtttcccttttaggtcccctcccccaatgcagagggacttcccgccaaagctcttccggttttcagtctggtccgcagaggttacccataaaagaaagctgccatcacaggcagcaga

SEQ ID NO: 379789 - DNA, 122 bp, Homo sapiens
cccgcccgcgcatgtcggggaagctctgctccggcagccctcggggtggtgctgggaggtcgcgcagaactgaagggggctaggttcgagaagcgccgaggatggggtctgcgaccgcctcc

SEQ ID NO: 379790 - DNA, 122 bp, Homo sapiens
gaaggcaccagaatccggaggaaaaaacctctgggggaaagaccaaaggatgaggatgaacgcacagtgtatgtggtaagcttaagaacccgggtccccagtcagaaactggcacagaaaca

SEQ ID NO: 379791 - DNA, 122 bp, Homo sapiens
acacagctgctgcaggagcaggggcaggcggtcttgagatgttccttgtctgcatgcctgcgccacccacttgctcccccacggggtgcttttcgaccctgggagggctgtcccagggtcag

SEQ ID NO: 379792 - DNA, 122 bp, Homo sapiens
gcctcaggctgcggctgtgcgggccgcgctgcgctgctgcagctcggagcgaaaacaccacgcctctgtctgcgctttctattttaaaagcaccaagtgaaaagcagatctaaaacgagacc

SEQ ID NO: 379793 - DNA, 122 bp, Homo sapiens
tgaggcaggataaactcttgaacccgggatgtggaggttgcaggttgcacgtgacatagccgagatcgcgccattgcactccagcctgggcaacaaaagcgaaactccatctcaaaaaaaaa

SEQ ID NO: 379794 - DNA, 122 bp, Homo sapiens
accagggatttctcagttgatcgtgtccgtgtctgcttcgtgacaagcatgatgaccggccgtgctgcccgttgggcctcagcaaagctggagcgctcccactacctgatgcacaactaccc

SEQ ID NO: 379795 - DNA, 122 bp, Homo sapiens
ctgatgcagtgtggggtgggtccggaagcctggatttttatccgacgccccaaatgagatcggcggaaccagaactctaaacctccggtcatggctgatgcccccgcccaaggcccccatga

SEQ ID NO: 379796 - DNA, 122 bp, Homo sapiens
atcaatgctgtggtggagactggccggaggctggtgagcgatgggaacatcaactcagatcgcatccaggagaaggtggactctattgatgacaggtacagttttctgaggttcttaaggga

SEQ ID NO: 379797 - DNA, 122 bp, Homo sapiens
tccgccccctcccggtcacgtgctcccagccagggcaccgacggactatttccccctttccgcggaaggacataattgtcatcgcaaactctagtcgccgccgacttcagctgtaccacgcc

SEQ ID NO: 379798 - DNA, 122 bp, Homo sapiens
tcggacaaaatcaacactaatcaacatttattcgtctcttgcccttgggtctgaggcgcgcgcgggctgcgccattctcccgctcgtctcgccacgcttttcaccctccatccagcctcgcc

SEQ ID NO: 379799 - DNA, 122 bp, Homo sapiens
cacaccttctcccgggcactgaggcccaggtgagtaccgcgcgggcagctggggctgggacggcgggcggcagcggttctacagtcctacgcgagcccctggtacccggccgcgctccgggg

SEQ ID NO: 379800 - DNA, 122 bp, Homo sapiens
gggaactggctgctgctgccgctgcttctccccaggaagcactccccgaacgctgtcctgcgtggccaccacgtgctcctccctgctgcagccctgccctcccgccgggcctgcatgtccag

SEQ ID NO: 379801 - DNA, 122 bp, Homo sapiens
ccgctacacccaaatgcccacccacacccatgtggctccagttcccattcggcttcttggcgcccgcccctcacaccagtggagccaggggaaggggtgaccagtgctcaggcgcggagccc

SEQ ID NO: 379802 - DNA, 122 bp, Homo sapiens
aagtgaggagggatccatgcagcagaggcagcctggaatggggagtcagggcccatggagcgggaagaggtatctataaggtggaaaggacggagttagagagcggggattgattcatacag

SEQ ID NO: 379803 - DNA, 122 bp, Homo sapiens
ctaccctgctgccaccacgtgggtctctcacctaaatacctacctccacttctttgagaacggccctggtggttctggcggcccgtggggcccctccctgggtgctcggccacgtgtggctc

SEQ ID NO: 379804 - DNA, 122 bp, Homo sapiens
tgcctttttcttgtcactggactgcttcgtgctttgagggccctaactcctccagtgtcccgtgggaggggcagccgggcgcttcacccgcgactcgaggctcttttcccgcgcgtgcggtg

SEQ ID NO: 379805 - DNA, 122 bp, Homo sapiens
agctccctcggcgtgtccggggtggccaggccttgtttagagtagctccagcgtttgaatcgcgcaggcacaagaaggccgtctcctcaccgcgggccagcggggccggccagggcccgggc

SEQ ID NO: 379806 - DNA, 122 bp, Homo sapiens
ccgcttcctcgccatcacctccgtccccctgcccgccagccacctggggggcctcggccacgggcatcctgccagggaaacagaccaaagttggaaacagcctcgcatttgcaagggagcct

SEQ ID NO: 379807 - DNA, 122 bp, Homo sapiens
cctctcggtggtagggggacgccgcagcagggtactcgggtccagggcgcagggaagacccggggatggtgagcgttccagggtgccaagtcccgtgggtctaacgggcttgttggcgagcg

SEQ ID NO: 379808 - DNA, 122 bp, Homo sapiens
cacccattcactagacaccaaaatccggtgacgaattatttgcagatggacccctggggacgtatgtcacgaatgtacatccccaggtcccatggtcagagtcggcaggtgtgagtggggcc

SEQ ID NO: 379809 - DNA, 122 bp, Homo sapiens
cttcctcccaccagagcaggaccccagctgacagcgggtgagctgggcagaaacccatgccgggaagaggcggacccagtggaccgcagcgcccgcagtcgccgggccaggcgcagaggcga

SEQ ID NO: 379810 - DNA, 122 bp, Homo sapiens
tatatgccctttacctagattcaactattgttaatatttcaccccatttgctttatctttcgtgttctctctctctctctctatatatatatagatatatgtatataaaatacacccacaca

SEQ ID NO: 379811 - DNA, 122 bp, Homo sapiens
gccacaacgcctccctggatctcgggtagttggggccactgctctgaggctgaaggatcgcggagaaccgcacttttagcttggtttttaaagtacacgtgaagtttacacagagaaaaact

SEQ ID NO: 379812 - DNA, 122 bp, Homo sapiens
tccccatcaccaactaatcagttgactctttcaaaaaagggggcgtcccggaagctctaccgaccagtaagagacctgggtgctgagcacgtgaatcaacagatgcggatgactgtgtaggc

SEQ ID NO: 379813 - DNA, 122 bp, Homo sapiens
gagtccctcgggcaccgttggaggccgttgctcaccgttgggcaagtgctttaagaagcacgaggatgtcgagtgtcaaatgcggcaaagggctcagagctcgccgccaaggggcgtggcct

SEQ ID NO: 379814 - DNA, 122 bp, Homo sapiens
tcccaggctcaaactccagcacaaggcccgcgctgtggctagtgtggggcccagagggaacggaggtgggagagatgaggaccaaggaaccctcctgagtgctccctaggccagggcaggaa

SEQ ID NO: 379815 - DNA, 122 bp, Homo sapiens
ctcctggtacttctctttctggtctgcaaaatgggataatcactgagtcccaggcagcagcgttgctgggagggtcctatgaactgatgctgggtccgccccaagcacagagcctggcacac

SEQ ID NO: 379816 - DNA, 122 bp, Homo sapiens
atctttaaaaacacaattcccaaggtagactgtttaaggctgggtggaaaggttgcccttcgtatttcttacacacaatcagacagattattgttcatgtgaaagcctgtgaaccctcccac

SEQ ID NO: 379817 - DNA, 122 bp, Homo sapiens
acatcttttcttcccaggcgttcttctctgggtgctttattctcttctttttctttatttcgcccccacccccatcccctgccttttttttttttttttttttttttttttgtatagaaaca

SEQ ID NO: 379818 - DNA, 122 bp, Homo sapiens
ggagccgtcctgagggggtgaccggtgccttgggtccagagttccggacccccaggaaatcgcaggtcgcggggagcagcagagagaagggggtgggagagggggaaaagaaggcaaggaaa

SEQ ID NO: 379819 - DNA, 122 bp, Homo sapiens
gtccctggcattttgttttgttatatcaaaatgtcacgtgaataggctctgagtcatttgcgcaagctggggagaaagcggagagggatctgctcccagctggacatccctctgaagtctcc

SEQ ID NO: 379820 - DNA, 122 bp, Homo sapiens
gcggggtctgtttgagggccccggctgggcgacctccaggctgactgcgctgatgctggccgccagcggcacggaggagaacgtggcccggatcaggagctcatccaggtcggccagtgcca

SEQ ID NO: 379821 - DNA, 122 bp, Homo sapiens
cagagcctcggtggtttgcagcagtggaaccaggcaggcccagttgtgggtaggagaggccgtcacctgttgaggcctcccccccacacccccgcatcgccctgccctggcagagcccagcc

SEQ ID NO: 379822 - DNA, 122 bp, Homo sapiens
gtcagtttctaaagtgagatgatgaacaaactgtgttgacctggaggttccttctcaactcgagatgtcacattcactagaaggggcaggaacaaaccccaggttggtcagaactgtctctc

SEQ ID NO: 379823 - DNA, 122 bp, Homo sapiens
tccctgatttatgcctggttcctattggaagctcacaggggctgacatcacttaggaaagcgaagggggtagggctgccagatcagtttgtcaccacccaggctcccttgcctttggctggg

SEQ ID NO: 379824 - DNA, 122 bp, Homo sapiens
ttggcgaggcggcctgacaggcagctcagacgaccagtagtatccaggcaaaacggaccacgccggacgactcgagagccaatcgatgaagctgccggctgaaccaatgagggtgctcagcg

SEQ ID NO: 379825 - DNA, 122 bp, Homo sapiens
tcagggtccgagggcgctttgaggcgaaggtggcgctcgccaggtgctcaacatcaaatacgaagtccccgcccctaacgtggcctaaatttgcttccaggacaaagcaggattttagcaag

SEQ ID NO: 379826 - DNA, 122 bp, Homo sapiens
ctctcctcctcgcggcggatgggtgaccttttcctggcacgggcaggctgtgggaggcagcggagcaggcgatgaagaagaagcagcagcatcccggcggcggcgcggatccctggccccat

SEQ ID NO: 379827 - DNA, 122 bp, Homo sapiens
aggtcaaagtcctgccaacatcgaatcctgcagaatactcttataagtaaaacctcagtacgtaaatacaatccatatttaaccaaaacaaaagctgaggctcagagaagttaaatgaagtg

SEQ ID NO: 379828 - DNA, 122 bp, Homo sapiens
ggctgataacgtgacctttgcgcgcagctcaattattgcgcgggctgggggcggggcctgcggggaagggacagagccaagcccagccttgagccatcctcgcccctgtggcggaaatggga

SEQ ID NO: 379829 - DNA, 122 bp, Homo sapiens
ttcaacctcaactgctggtgagtgcgtctgcggagtgcggtctgggggccaccttccgttcgcacccatgcagccttcctccccctatcccgccccacgatctcagggtgtagggaaaaccc

SEQ ID NO: 379830 - DNA, 122 bp, Homo sapiens
atctaagtttactgaattaaaatctctcagatggagcctgaaactccacaatttaacaagcgccccaggtgatttgtgcccaacaaagataaaaaatgaatgggttgaaactcaagcaaaag

SEQ ID NO: 379831 - DNA, 122 bp, Homo sapiens
tcattgcccggggccggcatggcaggcaggcagctccgagtgtggggcccgccaagtccacgcccacccggaactccagctggcccgcaagcgcagcgcgcagccctggttcccgctcgcgc

SEQ ID NO: 379832 - DNA, 122 bp, Homo sapiens
gcagccggggagctgcaggaaccagactgggggcgagctgagcacctgtagtcaatcacacgcaggtaaagccacggccgagcgagctccgcggagcggggatcgcaccccggacccgtcga

SEQ ID NO: 379833 - DNA, 122 bp, Homo sapiens
atggaggccccggcggtgtagttagaaaccagctggaggtggctggcgggtgctgagcgccgggcctttcatgtggtcgcagcgctctgggtgcctggagcccgcagccctgggcagccccg

SEQ ID NO: 379834 - DNA, 122 bp, Homo sapiens
gcacggctctccctttgcttcttcggttgcagtcctcttgcttcttgcgcgtgcgtgtagcgcttttgcaaagccgcggaggtgaagtgaacttagaggttgtggggccgaggggtcgtctt

SEQ ID NO: 379835 - DNA, 122 bp, Homo sapiens
cccagcggctggaaacgcggcataaatatgtagggactgagccgtgagctcagcgagggtcgtgagggggaatttatttcttaatgtccctcctttatcctatcatcactgaaacgaattag

SEQ ID NO: 379836 - DNA, 122 bp, Homo sapiens
gccgccatggcaagcgacagcccgtgccgggctcggacacatcccccaggcgtgtatgtgcgggggcttggaggggcttccacgccccaacctccaggtccctgacagggccttttgcaccg

SEQ ID NO: 379837 - DNA, 122 bp, Homo sapiens
ggggtagcacagccacacatccaaccacggcgcgagaatcaaggtgccagaatcacaggacgcgggaatcacgggacgcaggaatcacgggacgcgggaatcacgggacgcgggaatcacgg

SEQ ID NO: 379838 - DNA, 122 bp, Homo sapiens
gcagacccgcaggcttcagaaggcagccccagctcccccgagaggtggccttaggtcactcgcaaaaacagtaaccaacgtgtcgatggcacttgtattttctaatttaaatttataacaca

SEQ ID NO: 379839 - DNA, 122 bp, Homo sapiens
ggagtggcccgcgagagtaggcgcgtggagggcgctcggccatctttgatcctgaccaggcgacttcgtcgcctgcggatcacggaagtggctgcggtcggcgccatgttatgttggggcag

SEQ ID NO: 379840 - DNA, 122 bp, Homo sapiens
aagctcgttcactacgctccagaaagcttgttcaccacaatccagaaagcgtgttcaccacgctccggaaagctcgttcacaatccagaaagcgcgttcaccacactccagaaagctcgttc

SEQ ID NO: 379841 - DNA, 122 bp, Homo sapiens
cacagcctcctctggaagccctggttgctgcccggtgcctgctgtgccctgcgagctccgcggttgtggagccaggcctgcactgcctgctctcggccccgcctgcggaccctctgcccttt

SEQ ID NO: 379842 - DNA, 122 bp, Homo sapiens
ctcctcggcgtacggtcctcccctgacccctccttccacccgccgagaggatgcgctccccggcgcccagcagcagaggccaccgctcccagaaatgcatgcgaccgatccccttctcccgg

SEQ ID NO: 379843 - DNA, 122 bp, Homo sapiens
acagtttgaaaagggagagctcaattcccagcgtcaccccatggcttgtgttgcctgctacgcattgacttggatctccaggagtcccctgcacataccttctccatcgtgtcagctgtgtt

SEQ ID NO: 379844 - DNA, 122 bp, Homo sapiens
agggactccactctgccctgctgctcgcttcttcctggcccctgctggactctcctcaagcgctcggcatgcctcccactgactctgaagagtggccagtgctctctgcagctcgggtccgg

SEQ ID NO: 379845 - DNA, 122 bp, Homo sapiens
cactgcttctgtctctgtgaattctgactactctaggcacttcacaaaagtggactcatacgatatctgtagttttgcgtctggcttctctatttaattcttaaaggggggtgggaactaaa

SEQ ID NO: 379846 - DNA, 122 bp, Homo sapiens
tcgcataccaaatggcaggcagtggttttaccagggtggaggaaagtggaatgggggtggcgagttgcaatatggtgttcacattttactttgtaatctcctgcattgtttcaacttcttac

SEQ ID NO: 379847 - DNA, 122 bp, Homo sapiens
cagtgtgggtgaacgtcaaaagccgtgcagtgagagaagccaatcacagtaggtccgtgccgcctgacagtgttcacatggaagttcggaaaagacggctctgtagagacagacagatttgt

SEQ ID NO: 379848 - DNA, 122 bp, Homo sapiens
gaaatcggcgctaagtgacggcgatggcttattccccctttcctaaacatcatctcccagcgggatccgggcctgtcgtgtgggtagttgtggaggagcggggggcgcttcagccgggccgc

SEQ ID NO: 379849 - DNA, 122 bp, Homo sapiens
tctataaagagtgaagctcagcgtgttggtcctgcagatgggacagcttggcctacagcccggcgggcatcagctcccttgacccagtggatatcggtgagtcttttccttgaacatgactg

SEQ ID NO: 379850 - DNA, 122 bp, Homo sapiens
ttcttttgcatgtggatatctagttgtctctgcaccgtttgttgaaaagactgtctttatcgaatggtcttgacggcttgattgaaagtcatatatgcaagggtttctttctggactctctg

SEQ ID NO: 379851 - DNA, 122 bp, Homo sapiens
cttgatcttctgacctcatgatccgcccacctcagcctcccaaagtgctgggattacaggcgtgagccaccgcacccggccaacactcagtgtctttatctgggccaaacagatcaggcttg

SEQ ID NO: 379852 - DNA, 122 bp, Homo sapiens
tcgtctcaccccagccagtgtgacggagtgagagcaaaagaaagttttgatagcagcgtacgatttatattcagctgtatgctgggcaggtaacctaacaactcagtgactcagtttcctta

SEQ ID NO: 379853 - DNA, 122 bp, Homo sapiens
gacagctgggagagactcacacgaagcagtttctgacctatcctgtcgtacacaagtcctcggcgtgctcggccggaccatcccctggaaagaaaggggcgtgtgacctttctctccccgat

SEQ ID NO: 379854 - DNA, 122 bp, Homo sapiens
cttgggactttgccaagcaactgtaggcagctcatgttgagaatgggtttccaggaaacccgttgtcttgtaatctctaaaaaaaaatttttttttttttgtggtggggggtctccatatct

SEQ ID NO: 379855 - DNA, 122 bp, Homo sapiens
tttctaaatgtcagggcactgttaaggaaatgtctgacaaacctgtagtaaacctcttcacgaaggaaaggagggctgttgtcttggcttttggttgtgtgtccctcatggcccccaagaaa

SEQ ID NO: 379856 - DNA, 122 bp, Homo sapiens
acaggcaggctctgcccagggggttggtgttcgggggtgtcaggcccagactggcccctccggaggggcctggctgccaaggtgggcagcatcccaggaggcccttgtgaccatctgggctg

SEQ ID NO: 379857 - DNA, 122 bp, Homo sapiens
tacagctctgttatttgttctttgtctgtaatctctagacacctttgcctctcgaaacaccgaactcggtctctataagtcactgagctgaacctgctttcttcttccctgtcctgaaacgt

SEQ ID NO: 379858 - DNA, 122 bp, Homo sapiens
agcctgggccccagacactcaggccggccagcgcagggcagggcccgggcaggtgggacgcgtagcccagtgctcctgctggccccggatcgccggtcagcctggaattccctccccacagt

SEQ ID NO: 379859 - DNA, 122 bp, Homo sapiens
ctgggggtgtcccccagcctcagcagacggagggcctcagggatgaggctgccaggatagcgccagagaagcagctcagagcaagggctcctagaagaggaaatgactgtcagggcatggag

SEQ ID NO: 379860 - DNA, 122 bp, Homo sapiens
ggagcgtgttactcagaaacggatccgtcagaggccaatgggagctgccggccttcagggcgcgcctggtggcgccgagcatcctgggaggtgtggtccgggcgctgtgccgaggattcggg

SEQ ID NO: 379861 - DNA, 122 bp, Homo sapiens
gaggaccacagatggctggtggtactgaggctcagaaatgttgtacagcttgagcagattcggaaaagcaatgcagctctggtgtatcatatgccagggtcctggcatgacaccctccacta

SEQ ID NO: 379862 - DNA, 122 bp, Homo sapiens
aaaacttgcaaaggtggaattagagcactaacttgaactttctcagtgacaaataagctgcgatccatcagcttactcagacacgtttttgtaacattttgtagacactgaggaatactttt

SEQ ID NO: 379863 - DNA, 122 bp, Homo sapiens
agagaccgaagtacaattacaatcccatcccacaaaaaggtcaagggctacctgaaagaccggtggccccaggatcctcaaagcatccaaaccatccctatactctcaggtatgttacagat

SEQ ID NO: 379864 - DNA, 122 bp, Homo sapiens
cactgagccgccccatgggccttccacagcactgccggtgccagagggcagaactcggaccgactcttgcctcatctgccctctgttccgaggagaacccttccggactgggccacagggag

SEQ ID NO: 379865 - DNA, 122 bp, Homo sapiens
gctacttattgattgaggaagatccactcaaaaaacacacctcacactgcaactgagagacgcagcgccaccacctcgggcttccttctcttttccacgcaggaggcggggccaatgtccct

SEQ ID NO: 379866 - DNA, 122 bp, Homo sapiens
acatgccacgtgaccagcatttgtctctgatttttcttttctttttctgagacagagtctcgccctgtcacccaggctggagtgcagtggtgtgatctcggctcactgcaacctccaccttc

SEQ ID NO: 379867 - DNA, 122 bp, Homo sapiens
cgcccgggaggctcctctgcaccagcacagagcgcgagcggaagtggtatttgaccaccacgttgctctggtacttgttatagaacagggagccgttgtacaccacgtggcccgtgcccgcc

SEQ ID NO: 379868 - DNA, 122 bp, Homo sapiens
gagcaggggggtctttcgagttgcagacagagcctgccgcttctggggcctcggggtgcccgtctttatatggaatccagctgcagagctgtgtgtttgcaagcaggtcgcagaacttactt

SEQ ID NO: 379869 - DNA, 122 bp, Homo sapiens
caactcttgtcactccaagatcacactggggaaccagactgacttctccaattctgaactcgccccggcctcgggcggctcaaagggcctcctctgccgcatccccgccaaaaccaaaccgc

SEQ ID NO: 379870 - DNA, 122 bp, Homo sapiens
agcccagagacgacatgtggcgctcgggcgaggtgagagcgggcgcgagtgcgccgggggcgctggggggctctgcggcgggcggcgcgcggcccggggcgcggcgcggagcggagctgcag

SEQ ID NO: 379871 - DNA, 122 bp, Homo sapiens
ggaagcaaggcgttcccggggcgagggatcgggtgacgcgctccagctggcctcgaccaccgaaccccagcgatttcagggcctagagtccgtcgtcgcctgacaggtgtagccagaggcgc

SEQ ID NO: 379872 - DNA, 122 bp, Homo sapiens
tcggagtctcatttcagcatgctgaagaaggggctgaattttaatgtagacctaccatctcgcagtatgtgcagctatggcaatgcattgatcctctggtagaaattagagatctctttcct

SEQ ID NO: 379873 - DNA, 122 bp, Homo sapiens
attttatcctccagcctcaacttccatatctgtaaactaggactattctgccaaatattacgaagggtcatgaaaaatgagagatcaggctgggcgtagtggctcacgattgtaatcccagc

SEQ ID NO: 379874 - DNA, 122 bp, Homo sapiens
acagcagctcccgctgggggcaccgccaggatatccacatttgtccaaggtctgggaacccgggaggtttctaggagaccccagagaccaagtgaggccaggcccaccccatggaaaccccc

SEQ ID NO: 379875 - DNA, 122 bp, Homo sapiens
gcctgccagccggctccggcctccacaccgcgggagcacgccccgcctcggcctcgccgccgctcgggctgacactctgcctccgggcccggggagacctttccatctgcaaataacactgg

SEQ ID NO: 379876 - DNA, 122 bp, Homo sapiens
ctacagccgcgctccacacaccctccagcaacgcgctgggcggagccagccgcctcgaagcgaggctcccgggtcggccgagccagcccccgctcaccctcaggttccctttagttcgctgc

SEQ ID NO: 379877 - DNA, 122 bp, Homo sapiens
gcctgcgtttccaagactcgcggccctgcgttcccagggatatctccgtgctcacgtgagcgtggtcctcggcttgggacagacaagggagccccagacaggacgataaggtttggagattc

SEQ ID NO: 379878 - DNA, 122 bp, Homo sapiens
atccgcagaatcaaggcccggcaagccaaagggcgctgcatcgccccgcgcccggagagtcgggacccatctggcccattgtgctgtgccctgctgtgcgttatcacatcaaggtgcgcgcc

SEQ ID NO: 379879 - DNA, 122 bp, Homo sapiens
tgacctcatgatctgcccgcctcggcctcccaaggtgttggagttacaggtataagccaccgcgcccagcccaggaggattttaagtaatgacaggatttgatttgtgatttaataggatca

SEQ ID NO: 379880 - DNA, 122 bp, Homo sapiens
atgcgcggcctaggggcgtctggcatgagcaggccctgcggaaatgatcattctcctgaccgctgctggggcatggctgaggactgtccccttcaggtctgtctaatctctgatttctggcc

SEQ ID NO: 379881 - DNA, 122 bp, Homo sapiens
tatagccaaaatagatgtgcaaaagacagcaaaacataaaaccaacacagaaaacttcctcgttcaatgtggcaattcattttgagggaactactaacaattccacttgctagactcttaag

SEQ ID NO: 379882 - DNA, 122 bp, Homo sapiens
gcgcgacagggccgctccccgccagtccccgcagctccgccgcgcccgcgaccccggtgccgcgctcaccatcttcgacacggctcggcctcttgtttctgcggctccggcggctgcagctt

SEQ ID NO: 379883 - DNA, 122 bp, Homo sapiens
cggagagttcggcatgagcgcggtgagctgcggcaacgggaagctccgccagtggctgatcgaccagatcgacagcggcaagtaccccgggctggtgtgggagaacgaggagaagagcatct

SEQ ID NO: 379884 - DNA, 122 bp, Homo sapiens
tggcgtcctgatgggtcgattcttgagggtctgctgagaaggcggcgtttcaggggagctcggcgaccccccatgaccccaaaccactctgcccccagcccacttaaccacagccccttttc

SEQ ID NO: 379885 - DNA, 122 bp, Homo sapiens
acattcaccctgctcataaaaggtcctttcatgagttttctaggctttcatcactgccagcgtctccacaggcattgtgaaagtattaaacttcctaccctcccccatgcttgtctcatgga

SEQ ID NO: 379886 - DNA, 122 bp, Homo sapiens
tagtcaccatctcttatgggcctggggctgggttttatcccgcgagggacacactgaacccgaccaaattgtaacccctgctggctcctgagaaagccccctcaggcatagccccccaggcc

SEQ ID NO: 379887 - DNA, 122 bp, Homo sapiens
gccgctgctccatgccgaacaccagcaggtgtgtgctggcctccgacgccaggaacctgccggccacctctggggacaagagcagggtcagcagggcctccccggactccagcggagctctg

SEQ ID NO: 379888 - DNA, 122 bp, Homo sapiens
ctccaaggtccatggagttgaccttctcaatgtccattccttgtattccactggagacagcgggacgtccagctcccctctcggtgagtgagtgacgctgtctcggctcactcggttatatc

SEQ ID NO: 379889 - DNA, 122 bp, Homo sapiens
gcgccagcgacccaccggctgatgcgcagcggggcgacccccgctctgtgccggaggcagcgtttctaactcaggcggcgtgggccgaggtagagaaccaccaaaattaccatctcggagcg

SEQ ID NO: 379890 - DNA, 122 bp, Homo sapiens
ccaataccacaaggggcatcaaaccacctgccaaattcgaaggaatgttatcctctcccccgcccccgcccccggatattagagacaataacacaggggtaacgtacacccactgctttatt

SEQ ID NO: 379891 - DNA, 122 bp, Homo sapiens
cccagcaaaatctaagcaatatgaaagcaaggacctttcccttttgcacactgctgtaaccgcagccgtacactatgtcttatgcagagtagattttaaatgagtgataaacaagggttctt

SEQ ID NO: 379892 - DNA, 122 bp, Homo sapiens
ccaggtcagcatgcgcttgatcagctccaccatgctcttgaggtcggcgtgctccgccagcgcctcccggtcagggaaggttagccgactggccacactgccaccattcactgtctcaatct

SEQ ID NO: 379893 - DNA, 122 bp, Homo sapiens
taaacccttggattaagttggtagtaattttagtacaactggcaactgcttgcttagtgccgagtcattgttgcctctctctgtccttaataggccaagaaacctactacagcagtgcttgt

SEQ ID NO: 379894 - DNA, 122 bp, Homo sapiens
cagtgatgatgggggcccggggttggtctgacagcagcagctccgtggggcgccggttcccgcggccccgcccggtgccccacaccgcacctccgggacgtagcttccccttcgcccccacc

SEQ ID NO: 379895 - DNA, 122 bp, Homo sapiens
tgttctctctcaggatgttccggagaacatacacctctgtgggccccacttactctactgcggttctcaactgtctcaaggtaatctctgggtttttgggaaagaggagaaagttaggggat

SEQ ID NO: 379896 - DNA, 122 bp, Homo sapiens
cacggcggcggggaaggggccggggccgctggggcttgcgcgaggcgcagtacgggaatccgtcccccccgggacagcgcggcgggaaacaaacaggacgagctccctcctctccgtgcccg

SEQ ID NO: 379897 - DNA, 122 bp, Homo sapiens
catctctcaccaaaaatggttttacataggaacaaagctgaagcctacttctttctataccgaaagatattttctttgcttatacaccctgtgctgcctctacctttagggagatttgggtt

SEQ ID NO: 379898 - DNA, 122 bp, Homo sapiens
tacactcctgtaacctagcgcaatttccggagagccttcaggttcatctcaacggatcctcgcaaaaacctgtggcctgggctgagcagagcgggaaatcagtctcactttacacaggaagc

SEQ ID NO: 379899 - DNA, 122 bp, Homo sapiens
gcagagagtggcctggcagtggctctgacctgaagctgataggccaggtcagcctgtgctcggcgggtgttgacctcgatgtcataggcggccttcttcagttcgtaatctctctgtgcctt

SEQ ID NO: 379900 - DNA, 122 bp, Homo sapiens
cacagagcctgagtgcttgggcccctgtgaacctggaactagcgtcaaccttgaaggcatcgtgtggcaggaaacagaagatggtaagtgtgatatgtggctttcccctcccttctcaacct

SEQ ID NO: 379901 - DNA, 122 bp, Homo sapiens
catgttgcagtaaaataacttatgcaaaggattttaacgttccagtgcttggagactctccgagctgccaaaaagcccttttttaaattccaaaaacctctttatcatttgctccaaaacgg

SEQ ID NO: 379902 - DNA, 122 bp, Homo sapiens
ttcaggtgatccacctgcctcagcctcccaaagtgcagggattacaggcgtgagccactgcgcccagtctgttgcaagtatttttatagtttattgatgtgtcaaaccttttgaaaaggttt

SEQ ID NO: 379903 - DNA, 122 bp, Homo sapiens
gtcgtgacctgcgccccgggccggggtcactcaccggcctcgctctggttgtagtagccgcgcaggttccgcaggctctctcggtcagtctgtgcctgggccttgtagatctgtgtgttccg

SEQ ID NO: 379904 - DNA, 122 bp, Homo sapiens
tcgcgccctcaagagacttccaggagggtttggagcccgggtttctctttcccccagccccggaacccgagtctgctccaagtgcgcatctgcgcggcggccgacggggacgcagcccggtg

SEQ ID NO: 379905 - DNA, 122 bp, Homo sapiens
atgattgccagtcggcttctgcgtctgtgtgccatgtgacctggacacgtgacttggagccggctgtggttgttacttgtatttgaataagaagatcaagcttattattgcagtaaaagcct

SEQ ID NO: 379906 - DNA, 122 bp, Homo sapiens
gcagagccaggaataaagtccggattgggactcgggtctgtgggtaatccaaggctgccccgcttacccttcaaatgctctttccccctccggaagccctcgcgtcctcatccttaccccac

SEQ ID NO: 379907 - DNA, 122 bp, Homo sapiens
ccgcccaccagcagggcaaccccaccaggaagccaacacagggcccttgccctaaatggccgcctgcccaaagctctggcctgggccttctttccagagtcctgagtgtagcaagccacacg

SEQ ID NO: 379908 - DNA, 122 bp, Homo sapiens
acattgcctttgattaataaatttctgaagtcactgagccaaggaacctggcaggtcctccggggctccgctgctctgcgactctgcagcaagcatcctcgccgccgtccagccttccctcc

SEQ ID NO: 379909 - DNA, 122 bp, Homo sapiens
tacccggccaagtccccttggtgcacacttgcacgtggccccatcacaggaacaacctgacgtgcaggcacagagcaaggactcgagagaacgagaagcagtggcagcagctaacccccgcc

SEQ ID NO: 379910 - DNA, 122 bp, Homo sapiens
atctattccccatcccaaggcaagcatgaataaaattaggttaaacgtagcatgtggcatcgcagtctcttagaatttgtttcatctattttattttattgaatactgtctgtatctttggt

SEQ ID NO: 379911 - DNA, 122 bp, Homo sapiens
aggatgaattagaagttgttcattagaatgtcctttatcgatagtcattatggcaggggccggattgatgttggagtttaagaatcaaggataaagtgacagtggggacgcgctggactctg

SEQ ID NO: 379912 - DNA, 122 bp, Homo sapiens
ctgtgatgggctgaatgcgcccccaagttcatgtggcagccttgacccccaggacctcagcgtgtggcgtcttggagacaggggctttacagaggcgatgaaggtaaaacaagctcttatgg

SEQ ID NO: 379913 - DNA, 122 bp, Homo sapiens
agctgacgtgtggtgcattccagttacctgacttacatcaagctgtcaatggcaatcaagcgtaatgagagcatggccaaaggtctgcagagggctctgctgcagcagcagccagaggatga

SEQ ID NO: 379914 - DNA, 122 bp, Homo sapiens
gccacgtctcatcctcagtggctgcacgtctgttccttgggagtggattagggaaataagcgtggcctgtaggaagctgagtttgaagcagtgagctgggcccactgaataatgatgtggaa

SEQ ID NO: 379915 - DNA, 122 bp, Homo sapiens
ggtaccttcccttaacgggaaaacgagaaatattgaggggaagatggactgcgatccaaacgccctggctctcaggcctggactctagggcttagccagatgcctaaaccgcccaagccgag

SEQ ID NO: 379916 - DNA, 122 bp, Homo sapiens
agaacctcttgcccctccgatctagcctcacacagccaccagaataatctttctaaaatgcgcacatgaacctatcaattccctccttaaatcctttcaatagctcccaggatatagtccag

SEQ ID NO: 379917 - DNA, 122 bp, Homo sapiens
ttgtgcctccgcccacctcgctgcgggcaacacccgttttcctaaagattgacaagaggacgtgttactcaaataaccacccgctcagaagaaaaaacctctgtgcagagccttttgtgttg

SEQ ID NO: 379918 - DNA, 122 bp, Homo sapiens
atagtaagaactccatgggtttgctgctccctttgtggagcggcgctgtgggtgaaggggcggtgatagaagttgcttgtctagattggaagccatgtggttctgacgccaaggcccggctg

SEQ ID NO: 379919 - DNA, 122 bp, Homo sapiens
tagcacggtggaaaagtgaggtaatccaggctctgggcccgttttcctaggagcccagggcgcttcacctgtctgcagtcagcccctttcttggacgtctcctcccctgagtttcctcctca

SEQ ID NO: 379920 - DNA, 122 bp, Homo sapiens
ttggcttgaggggcgggctggtaggtcagcccccttggggcgtcgttggtcctctccaggcgtgtcacattctgcccgcacatggtgccttggtactccccaaaagtcatgccttgattttt

SEQ ID NO: 379921 - DNA, 122 bp, Homo sapiens
gcggtcgcggggcgcacatctgtggttgtctgctggtctcaaaagtgttctctgtggctccgtgggaagggtggcgtcgcggcccacgtgttctggtcccctcgccctagtttggagactct

SEQ ID NO: 379922 - DNA, 122 bp, Homo sapiens
tcggtgcattaccgtgagcaccacctgtagggactctgttggcctccagccgtcgtcacacgttcctgacaaccacaaaagttcatttgagggtgcccagtcagctgactttgcttccacca

SEQ ID NO: 379923 - DNA, 122 bp, Homo sapiens
gagctccacgaagaggcaggcgaggaggccgaactgtgagccggccgggcccacctggggcggggcaggggagacgtggcttcaggcatcaggtgggtggcctgggccgggcctgcaccctg

SEQ ID NO: 379924 - DNA, 122 bp, Homo sapiens
gactattttaacacctacacaactttgtcactagagcattattaaaactataacaactcccggctggcgcacggtggctcacgcctgtactcccagcactttgggaggctgacgcgggcgga

SEQ ID NO: 379925 - DNA, 122 bp, Homo sapiens
ggtatgtatgtacaggaaaaaacataatgtatatggagtttggtactatctgaagtttcacgcatccatggggggggtcttggaatgtatcccccatggataagagtgtactactctgtgtg

SEQ ID NO: 379926 - DNA, 122 bp, Homo sapiens
cgcagagtgtggatcccagtgcctggagagagcagctccctttccttaggacgcggggagcgcactgcccccagcccagggcccaggacccagagccagaccccaaacgcagagtctcaggt

SEQ ID NO: 379927 - DNA, 122 bp, Homo sapiens
aatctttctttatttttagtagagacgtgttagccaggtttcaccgtgttaccgtgttaccgtattccagccgggctccgcccctggattcggtggacagaccagctttacctccagagact

SEQ ID NO: 379928 - DNA, 122 bp, Homo sapiens
ttagagttgtgctagattactgcttgactgactagctaggttaggcctaagagtgtttaccgaataatctgcactcactcagtagcccttcttcaggattaaaaacgatgatgacctcatct

SEQ ID NO: 379929 - DNA, 122 bp, Homo sapiens
gggaggggagcggagggcagagggctggcgggcggagctgttttctgcttttctcgccgacgcttcggagcgcgcggactcccaccccagcccgcccgtcagggacagtcccgagggtcccg

SEQ ID NO: 379930 - DNA, 122 bp, Homo sapiens
tcagccctttccccatcctctttcctaacacagtacatccatttacttacaatgcggctgcgggtggcattatcaaagaaggtgtccttttcctggatgttgtacctggagacaccaagaga

SEQ ID NO: 379931 - DNA, 122 bp, Homo sapiens
tcaagagcttggcgatacagaaatttctgctggtgttggggcgggtgcgggaactgaagacgggcgagtgcgagccgggggcgggtgctggggaagggtaagcgggaagcgagggcgagggg

SEQ ID NO: 379932 - DNA, 122 bp, Homo sapiens
gaagggattctttggagagaagggaacagaaggtgacatcggcttccctgggataacaggcgtgactggagtccaaggccctcctggacttaaaggacaaacaggtaaaatctcccgcagcc

SEQ ID NO: 379933 - DNA, 122 bp, Homo sapiens
gcgcggtggagtcatgccgctggcttgggcaccattggtcatgcctggaacacgcagcagcgagtacgcacatctggcggctatcccgggcggctccggtcctgatatggagagagagggcg

SEQ ID NO: 379934 - DNA, 122 bp, Homo sapiens
gaactagcagcagtgcccaatgagtcatctatgtaaactgcttcaagcctgggcactgagcggtgctcaagtcccccctccccaaccccaggcccccattttccctgtgtgacctcatctgt

SEQ ID NO: 379935 - DNA, 122 bp, Homo sapiens
ggagtctgcactagttcgggcctgcacagtaggtccagccaggagccagagatactcgggcggggcagagcataatggacccctggccccaagagaacttcagaaactaggcacctctcgag

SEQ ID NO: 379936 - DNA, 122 bp, Homo sapiens
gtggccctgtccatctaaactttacaaggttttgtaaacgttactgaacttgcttcttcccgactacattaaagcacttacttgagatattaaacattttctcattagtcctgtttgcctag

SEQ ID NO: 379937 - DNA, 122 bp, Homo sapiens
ggcccgcccccagcccagcgtgcacagaggccatagccaaggccttaaggctcatccaaccggggactcatatcccccccaccggcagcccggcgccccagcctctacccgtgcccgccgag

SEQ ID NO: 379938 - DNA, 122 bp, Homo sapiens
ggagatatggagcggggtcagcgaggcctggtggcgcctcctggagtctgggacgagcggcggtccgaggagcagcccaggtggggcgagggtacggagacgctatttccctccgaactctg

SEQ ID NO: 379939 - DNA, 122 bp, Homo sapiens
gaggcggatccccaacgtggggcttgtggggaaaaggcggggcctggcgtccacagcggacgacagctctgggtgggagacaggagcatgcatgggcggtgtcaccacactgaaggcgcgct

SEQ ID NO: 379940 - DNA, 122 bp, Homo sapiens
cttgactgtgggtctgattgtgcaataggaaaggcagtggcttgccgcagccccagcacccgcctctgtgactctgcagtcacaacttttctacaattggcagctgtttcccctgcattatt

SEQ ID NO: 379941 - DNA, 122 bp, Homo sapiens
cgcgcttcggccaaccccggaaagtcgcggggcccttgggtcagaggttagggggtcaggcgctccgctacctcagctcccagtggccgctgcccacgccggcgtctccgtccttgttgggg

SEQ ID NO: 379942 - DNA, 122 bp, Homo sapiens
ccttccagaagacctggtttataacagtgcataaggctttttctcaaaatagttatataccgcacaaggaagaggtgtggctgttgtgtcacaggagacctaggggccaggtttgggaaaag

SEQ ID NO: 379943 - DNA, 122 bp, Homo sapiens
ctgctgcggctcaggatcgctgatgaggcctgccgcagccattctcagctgcaccgggtccgggcatccacagccggctcacgcgctggtggtcgccaagcctcagctcttgctggctgttg

SEQ ID NO: 379944 - DNA, 122 bp, Homo sapiens
gaggcgggggtgtctgacaggggtcggggcaggatctcgccccggggggcgcaggtgcggcgtgaggaccgcgtcctgaggagggaggggcgagggccagggtcctggagaggatggagagc

SEQ ID NO: 379945 - DNA, 122 bp, Homo sapiens
agcgtctgcaaaggtccttctgcaaaggtcccggtccgtccagctcaacccacgttagcccggaccgtgacccaagggcagccccgagcctctgaccctctccgccgccctccgtcactgac

SEQ ID NO: 379946 - DNA, 122 bp, Homo sapiens
accccgggctggcttggggtgcctttgagtgtttttacaattaaggacaaatcggtaaaacgggagagaagaaaacgaattgtaagaaaactacaaaacattaggtctaaaactcacctgtt

SEQ ID NO: 379947 - DNA, 122 bp, Homo sapiens
atctgggaggtgaggagcgtctctgcccggccgccccgtctgagaagtgaggagcccctccgcccggcagctgccccgtctgagaagtgacgagcctctccaaccggcagccaccccatctg

SEQ ID NO: 379948 - DNA, 122 bp, Homo sapiens
ataacaagtcggtctgctgtttccaagcatctgaaaagcagggcaataatggacagcagtcgcaatgatgagggtgggtggattatatatatatacgtacatacacacacatacacacacac

SEQ ID NO: 379949 - DNA, 122 bp, Homo sapiens
tgccttcagacatttttacacattttttttgccatcagaatgggtgtggggcaggcagggcgggcaggtcactcgccgctgggataactgggctccccagcggccacaatggaagtctcagt

SEQ ID NO: 379950 - DNA, 122 bp, Homo sapiens
aaggcctcttctgagctggtgaatctttaacctacctgaatctttaacctgcctgcggaacgacctgctcgcagactctaggccgcagaggccggccccagcgctctctcggagcacagcct

SEQ ID NO: 379951 - DNA, 122 bp, Homo sapiens
tggattcctggcatttgttatttgctgcccaaatgaccctggcctctgggaatgaggccccggacctttgcttttatgtcccagagctcctgtgagttttacaaaattatcataattatatt

SEQ ID NO: 379952 - DNA, 122 bp, Homo sapiens
accatggagcatctgagaatcataatgatattagttaaattaaatactgtcactattacacgagaccaaatctctgtctgcaggtgttctctgtgtaaagtagtttaagtctgcctttgatg

SEQ ID NO: 379953 - DNA, 122 bp, Homo sapiens
ggaggctgagacaggagaactgcttgaacccgggaggtggaggttgcagtgagccagaatcgtgccacagcactccagcctgggcaagaagcgcgaaactccgtctcaaaataaaataatct

SEQ ID NO: 379954 - DNA, 122 bp, Homo sapiens
agcctccttctctgtctctgaatgataataggcatgggagtcatcattagtcttgttagacgatggttcctttaggaatctctacgtgttaccttttagagggaaggtcaaagaagccaccc

SEQ ID NO: 379955 - DNA, 122 bp, Homo sapiens
ttgccctgggacccgctcctccctccccccggcgccaggtgacccactccagtcgctgggcgtccctggcctgtgttcttgctcgcactccctgcaaaggaacctgctgtccacacacctgg

SEQ ID NO: 379956 - DNA, 122 bp, Homo sapiens
tggaagataaaatagtattttcacgatcatttatcagaaaataaagctgaagcccaaggacgacgagtgccttgtccaggtttctaggcaagtccagggcagagctgggaccaagacgcccg

SEQ ID NO: 379957 - DNA, 122 bp, Homo sapiens
ggccgtcccttccctgatgagcctctctacctttgctcagatgacccagctcatgaaggccgccaagagcgggaccaaggatgggctggagaagacacggatggccgtgatgcgcaaagtct

SEQ ID NO: 379958 - DNA, 122 bp, Homo sapiens
tccccaccccttgcctctgcccgttgccttttccacccctgcactgggtgtgcataggtgcgcagggcacgtgtgtgtcctctgcggtcactgacttgattgtctgcctttcccaggaggac

SEQ ID NO: 379959 - DNA, 122 bp, Homo sapiens
agccctcatcgacctcctcctctgggtagggctggctgaagttgaagttgggcttctcctcgcatgcgctctcagccagctcgctggaaaattcgcttcccaccgacagggaccgctcgata

SEQ ID NO: 379960 - DNA, 122 bp, Homo sapiens
cccaagtctgacaggctattaaacactcaagtggagatgtgaagtagacagtaggatagacgtctgaagctcaggggacaggccaagactgcagatataaatttaagagtcgactgcatgta

SEQ ID NO: 379961 - DNA, 122 bp, Homo sapiens
gtcctccagccctctcctgggggatcgcacggtgcaaccaaccccaaaaacgaagctgcgcgacgccccctcagccccgcgggcttcccattggccggttgccgctgtcactccctcctagc

SEQ ID NO: 379962 - DNA, 122 bp, Homo sapiens
cccgagggcttaataaaggaaactttgccttctttgccctgcctctcgaccctttttgtccgaggcactcttccattgcctttcacttttcacctcaaaagtaaggttcaaaatgtagatca

SEQ ID NO: 379963 - DNA, 122 bp, Homo sapiens
ctgccctcgaagggcatagagatgagaggttttagccactatttcaaaactaggtcaagacggctcttgggaaatgtgatgttacatcacaaaatggaatcatacaatatgtgacctttcaa

SEQ ID NO: 379964 - DNA, 122 bp, Homo sapiens
gaggagaagtcgtcaaaataataaagaggatgataaatgccttgtccggctccttttctccgacacattcaaagggcttaaacttgtcagagctgcccaaagcagcagagcctggagccccg

SEQ ID NO: 379965 - DNA, 122 bp, Homo sapiens
aaaaagtctacgtggaatttttaacagaccacttcaaattatccaagtcaatatctgactcgggacctcaggtccacaccatcaaacactgccctgttacggaaactcgatacatgtcggct

SEQ ID NO: 379966 - DNA, 122 bp, Homo sapiens
gcccccctggagtgtgaggcggtgttgcgtgcaggcctctttatctgcactgtataaagtcgttggtcacgctgtggagctgctcacggctgccggcgcgatgttattatccattacccgcc

SEQ ID NO: 379967 - DNA, 122 bp, Homo sapiens
gtagcatctactggtaccctggaactgtgctgaactttatagctacacagatgactaagacgcaatttggccttgccagttcatgactgagttatacatgaacagaacaagatcctcatgaa

SEQ ID NO: 379968 - DNA, 122 bp, Homo sapiens
gaggaggggagaaagaggtggtactaggggaagtagcacagaggaagaggcaatactacccgagactagatgcggaccgtctctggcaaccaggaaaaggcaaatacaaagagaggtgagtg

SEQ ID NO: 379969 - DNA, 122 bp, Homo sapiens
ggtgtttccgatttgccactattacacagcggcccgcgagaagcatctcttggctcgaagcgcgctgtaggtgaaccgcccttgacttaaacgccaacacatctaaaagggggcgagggacg

SEQ ID NO: 379970 - DNA, 122 bp, Homo sapiens
tgcaggggagttgtgcgcggtggctacagcctgttgatcccacttcctcctgctctagtccgggctagggagtggctctgccaggacttccaaggctttttgtctcgggtactggtgttcgc

SEQ ID NO: 379971 - DNA, 122 bp, Homo sapiens
cgagcgcgccggcgagtgagggaggaggcgcggcggcgggggaggaggcagggcgagcggcggcggcggcggctgcaatcccagcagcagcagcagcaacagcaacagcagcagcagaagca

SEQ ID NO: 379972 - DNA, 122 bp, Homo sapiens
gagaagccacctaggttagacaagaaagactaccacgagcggggagaaagagactctgagcgctggtccttgtgagccgacaagctaaaaatacgccggcccagtaaacaaatcccattcca

SEQ ID NO: 379973 - DNA, 122 bp, Homo sapiens
gcggcctctcaaccctaggtcagcgggttgcggaggatcgtgcgggtcgcaaagggaagccgagtgctcctgcggctcccagactgcaaccaggtgagtaccctgcggagcggtcggtgccc

SEQ ID NO: 379974 - DNA, 122 bp, Homo sapiens
aaaagaaaagatgggtcagcttaaagccattcgcatgacttggattagctgtcaagttcccgcaaaggccaaagccaggaatccttgctcactgtttcttcagggtacaaggatgggttcga

SEQ ID NO: 379975 - DNA, 122 bp, Homo sapiens
acccaccccggctcaagcacgacccgtggatccacgtgctttttcttgtccaatgggagccggctcccgggcgcgaaggggcggggaggaaaggaacgactgtgctacgttgccagaagggg

SEQ ID NO: 379976 - DNA, 122 bp, Homo sapiens
acccgactgaggagcactcagactgcttccaatgtttctccatgactgagctctgcaagacgcaaaaaggtgacaggcttttttaaaaactaccttttgaacctaattagctacaactgcag

SEQ ID NO: 379977 - DNA, 122 bp, Homo sapiens
tgtgtgggtgcgtgcgtgttccttaatccgtgtctccccctcttttcttagcggcggcttcgcttgagcttctaataaccgcgctgggcagcgttcctggagcctcctaatagcagatattc

SEQ ID NO: 379978 - DNA, 122 bp, Homo sapiens
agagtagggggaccgctgagctctgtccacagactagagcaggaaaggggggaaaggcggcgatagaggttagcaggaatgtttaattatcaggagcaggaacagaactgagggcatgccca

SEQ ID NO: 379979 - DNA, 122 bp, Homo sapiens
gccccaagcacagctcctgcgtcctcattggacatcatgggcaatccaagcactggagtccgagtccgcgcactcgttacctgaacaggcgttacaggccctttggcgcctgcgtattcgtg

SEQ ID NO: 379980 - DNA, 122 bp, Homo sapiens
ttgcctgttggggcttttctgggtttactgttcgggtttatgctcctgttttcctgccgccgttaaaagaagccgtagacgggaaagagggccttaaagagtgggtaaagtggcccctttga

SEQ ID NO: 379981 - DNA, 122 bp, Homo sapiens
aaatcctccaccagctgggctggagctgggattagcacagggattgggcctggggctgggcggggctgaggtcctttgctcccccagccttgggaggcggctgcgtcagggattccttggtg

SEQ ID NO: 379982 - DNA, 122 bp, Homo sapiens
tcctctcatctaattctcatggtccacgtgacgggaattccaagtcccattttacagatgcggaaacaaaggcttcgaggaatgaatcgtccaagtggaggaaacacaattcgccttcagct

SEQ ID NO: 379983 - DNA, 122 bp, Homo sapiens
gccgcgcgcgggaggagcgcgggggacgccggcgcgcgccgccccacctcccggcgcccgcgcccgcgccccgccccgcccccgagccccggaggacccgcccatatccccgcccacagccc

SEQ ID NO: 379984 - DNA, 122 bp, Homo sapiens
attaaatggatttggggagcaggaagacggaataggagcttgcttgttcacttcacgcatcgatctggtattgcagtacctccaggaacagtgcaccccctcaggggattaaaatttaatgt

SEQ ID NO: 379985 - DNA, 122 bp, Homo sapiens
ggatggctgggttcagacgcgagggtgcctgtggtccctggcagcctgctgagtgcctgccgtgtacgggccccacaccctgcggctcacgcgcatcccaggtcccctctcatccactctga

SEQ ID NO: 379986 - DNA, 122 bp, Homo sapiens
gagacgtcactgcaggcacattccctgctaggcagaggcatttattaagggcttcatacccgaaggccggatgcggggagtcgccctcaccccagccaccctgcgacaacccctggaggtca

SEQ ID NO: 379987 - DNA, 122 bp, Homo sapiens
aaaaggaacggcgcaccgctgacgtcatttacgctctccgcctcgggccaggcggggtttcgggactagggtttctgccgtgtaatacctcctcgaggcagaaaaattctactttccatctg

SEQ ID NO: 379988 - DNA, 122 bp, Homo sapiens
aactatctagtgcattgtagatcatttacacaatggtctctttccccacattgcccatgtcgtgattaagacattcatgatacaataagtttgacatctgcctacagtgccatctggccaca

SEQ ID NO: 379989 - DNA, 122 bp, Homo sapiens
ggaacctacttgtggcatgagagtcgcttcaccttcagtggctccttattgtccccagggcggaacgggctgcaggtggcacccaggcctctctgtgcctcggctccagctgtctcttgtgg

SEQ ID NO: 379990 - DNA, 122 bp, Homo sapiens
cttccaatgccagtgtgatctggcatcgatttacccctcccctcctcagcacccttccaccgtggaacagggcctatgtccctaggggtgcatgtgccttgggcctgccttctctcttagac

SEQ ID NO: 379991 - DNA, 122 bp, Homo sapiens
ctctcgcctcaggcagggccccggccccgggcccccccctgggccgcccccggcccccggcgccgccccctggccccccagctgctgccccggccccggctgctgctgcccctgcggctgcg

SEQ ID NO: 379992 - DNA, 122 bp, Homo sapiens
ccggagaatgggctgggaggctgcgtttcggagcttagggttctgtccctgcgatcgccgcgtctccctcccttggtgggcgcggctcccgggaagcggctcgtctcgtctcccctcacagg

SEQ ID NO: 379993 - DNA, 122 bp, Homo sapiens
tgcacttccactgaaacgaagcatttctgaccgctttttcttggttatgaatcttaatttcgaatataagatgataggtaagcgcagctttcttggataatctgaattcccaagtgccagga

SEQ ID NO: 379994 - DNA, 122 bp, Homo sapiens
gagaaggtaccccgagcacactgcttacaccgcacatcctcagtctctgtccctttcttccgcacaccccaacccacaggacacaccgtatggggggcacaggtagcgttagactggaacat

SEQ ID NO: 379995 - DNA, 122 bp, Homo sapiens
gagcccaggcggttagggctggggagctcgcagggccagggaggtcactgaggatggcggcgacagcatgacacggggatcccacataatcccagttggtcctgggaggacagcccaggaga

SEQ ID NO: 379996 - DNA, 122 bp, Homo sapiens
ttggacacctttgaaagatccttttactagaacatgtggcatacagtagtggaaaagaaccgtaactcctcaagatagatgagcaggggcaaaagtgtgtaatcatttggaggcagaataca

SEQ ID NO: 379997 - DNA, 122 bp, Homo sapiens
gtggggcaggggcgaggcgccgcgcggtggcctgggcccggccggcagcgtcaaggtcgccggccggcctcagagcctcttgggttctgctgggccctccaccccgccaccttgagtggtgg

SEQ ID NO: 379998 - DNA, 122 bp, Homo sapiens
ggcccggtttataacatggacagccctgccctctagtgtctgcaaccgggagccctaaggcgccatcagctccagaatttctcttttataacctaagcaagacctggagtacctcggagctg

SEQ ID NO: 379999 - DNA, 122 bp, Homo sapiens
gcccccagacgtgccacagcttggccactctgctctgaggagctgtctgtgcccagcacgcgttccagcttctgggatgcacaataggcgcccaggcctaggctgcgggacgaccatgcttg

SEQ ID NO: 380000 - DNA, 122 bp, Homo sapiens
accgcaggccccactacggaccggaagtcacagagtttccgccttcatgcaactaagcgccgccatattgtcgtacggaacacaggcttcctgtggccggaggtgacagtaggcccgccccg

SEQ ID NO: 380001 - DNA, 122 bp, Homo sapiens
catatagtattaaatacttatatcagtccttcaagataggtgatgctatctcccctttaccgataggggagatttattaacattgcagtgcacaagttaataagtgacagagcacagtctat

SEQ ID NO: 380002 - DNA, 122 bp, Homo sapiens
ctgcagcagggaggaggggctggaggccagcccgggtgggcgggagggagcggggtcgggcgtgttgggcgtctgatcctgggcggctcccctcagtgcttgtgcagcagggcacctgcgag

SEQ ID NO: 380003 - DNA, 122 bp, Homo sapiens
ggctgcttcgaatgagtcctgcgacgtcgaggcggggtagtccttctcgtcgcggaactccggcagcgtctccaggcagaagatgacaatggagatgaggatgaccagcacggacacgatgg

SEQ ID NO: 380004 - DNA, 122 bp, Homo sapiens
tacgagcggggctccagggccgcgtgattagggccgtgtccccttggatcacggccgtgtcgccaagcagcggtcccagcggcaatgactcctcaggtggcagttctagcagctgtagcccc

SEQ ID NO: 380005 - DNA, 122 bp, Homo sapiens
gttccttctgtgtctttggaatctccattattagggattttttttttcttttttgaagtgcggtctcactctgtccaccagggtggagggcagtggcaccaccatagatcaccacagcctgg

SEQ ID NO: 380006 - DNA, 122 bp, Homo sapiens
ctcgcccacagcctcgcggttacacaacggccacctccaacaacgccgctccaccggctccggcctcggcccagactcacgcccgctctggcccggagacctcccgaagccgcacgcgggga

SEQ ID NO: 380007 - DNA, 122 bp, Homo sapiens
gatggcctgacttctgatgagggataagtgtacctggtacttgctaacaggttttggagacgtcatgaggcactttcttaagtgcaatacagtatttgtagaagatatttgacaaccttagg

SEQ ID NO: 380008 - DNA, 122 bp, Homo sapiens
tcaaacaggtgttccccgcctcttggtttctttagcaacaactccagctttcttaaagagcgccccacccaccaccttagcccccaagagttgccaaatcctgtcccatctagccccatcaa

SEQ ID NO: 380009 - DNA, 122 bp, Homo sapiens
ctatgtttgctttcctgactaaacaagaaaacctaagggacattctctggggtctttgcccggtgtggggccaacagacggcactaccgataaggcagccgccaaatggttggttagagctg

SEQ ID NO: 380010 - DNA, 122 bp, Homo sapiens
tctgggatgttaaaacttcatgatgtatagtggccaaacagagaacccctgccaacacaacgagtttaaaaaagctcatctagaaaatgcatgtaagagctgatcactcagtgttttgagcc

SEQ ID NO: 380011 - DNA, 122 bp, Homo sapiens
gctcactgcgatttgcattcttcttctgatgccagcgggcaaggggaggtccccaaacgccggtgggacctcgactccagccagtgtccagattcttgatattgccggggaaattaattcaa

SEQ ID NO: 380012 - DNA, 122 bp, Homo sapiens
tcctcagatagcgttcatcgcccgtcgtggtcaacgggccagccgagtctggagtggttgcgaacccttctggctgcagatctggaggtggaggcagtaccctggactctattctgctgccc

SEQ ID NO: 380013 - DNA, 122 bp, Homo sapiens
ccaggtatgctcctgccttggcatcccaagtaactgggattacaggtgcataccaccgcccgaggtccatagtgttttatttaccctattccgattgggcactgagtttgcattttaacctt

SEQ ID NO: 380014 - DNA, 122 bp, Homo sapiens
gggttccatacccacatcgtcggtggtgggcagtgtggccacatgcccggatggcaaagccggctatctagcaggcagctatctccgcctggtttttgtgcttgggctcgctggccctttct

SEQ ID NO: 380015 - DNA, 122 bp, Homo sapiens
gatcaattcacgtgatcggaagtgcggaggggcagctgcagagagcgatgctggcagcagcgcggcggcttcagtcacacagggatgtggcgctgttcacccggagccaaagcactggagga

SEQ ID NO: 380016 - DNA, 122 bp, Homo sapiens
accttcgcactattggccagtgtggactattgatttgggggccaaataagtctttcttgtcgggggctgccccaggcattgtagggtgtttgtcagcatcactggactctacccagtaggta

SEQ ID NO: 380017 - DNA, 122 bp, Homo sapiens
tgagacccacattgtgttaccctgaacatgtgtgaggacgaacctttgtgttttcttatacgtgtgtctctgaggcgatttttgtggttttgtacgtggcggggggcactgattttgaatat

SEQ ID NO: 380018 - DNA, 122 bp, Homo sapiens
ccgccgctccggcgccccgggcaggcccgctccaggtacctggatgaactggatggtgagcgccgacttgcccacgccgcccccgccgaccaccacgagccggtacttctcctggccggagc

SEQ ID NO: 380019 - DNA, 122 bp, Homo sapiens
gcgagccccgctcacctcgagctctcagctcgctccatggatgcaacacccgatccgcctcggggactgggaaagttccctccagggctcccacaggcgctccgcctcctgaactcccattg

SEQ ID NO: 380020 - DNA, 122 bp, Homo sapiens
tatacaaggcaagagggcagggtaaggagtgtgagtcgtctccaatgataggtaaagtcacgcgagtcacgtgtccaccagacaaggggcgcttcgctatttggtagctgaggcggagagag

SEQ ID NO: 380021 - DNA, 122 bp, Homo sapiens
atggaaaatatctcagatatgaagtagtaagtattattagaataaaagcgttgcacccttcgtaggaacacaatcgctgactctacagtcaggtaagatgtattctctttgatccagaggca

SEQ ID NO: 380022 - DNA, 122 bp, Homo sapiens
aaagtgatccagttgatccagacaaggaaccagagaaagaagacgtgtctgcctctgggccgtccccagaagccacccagttagccaagcagatggagctggagcaggccgtggaacacatc

SEQ ID NO: 380023 - DNA, 122 bp, Homo sapiens
atttttttcacgctgtcatatgggttggcatcaaaggtcattaaatcccattcctcggaacggacatgcacctgggaagtgaaagccacaagacagttacctaggatgcctgcctcctttac

SEQ ID NO: 380024 - DNA, 122 bp, Homo sapiens
attttttccagcagaaatgcagtatccatttctaacctcccaaatatatatatatatgtacgtatgtgtatataaatgtatacgtagatatatatgtatttttggtgggtttaatttttttc

SEQ ID NO: 380025 - DNA, 122 bp, Homo sapiens
tgtctcgctagaggcattcaggagtcagatgctggagaagccttctatgctacaggagaacgtgaatatacttcagcaccctgatgctggagaagtttccacaggagtctgtagagaaaagc

SEQ ID NO: 380026 - DNA, 122 bp, Homo sapiens
cacaaatgtgttaggaaggaaaagaatgcagtgctatgagaacacagttcatattgtctgcgaccttggagcgtgcatttttgccatgggccaaagatggatatacatcagcattttaaact

SEQ ID NO: 380027 - DNA, 122 bp, Homo sapiens
ccatcctccgaaaacccaagctcacctctgggttccggctgggtgggggttgccaggagacggttgccaggtcaccactgttgtttcctggcccaggctcccaggaccttgtgggctgggca

SEQ ID NO: 380028 - DNA, 122 bp, Homo sapiens
agcacggtatacagcaacattgctagggagaagtgcagctgagacttcaaaccatgccatcgggaaaccacactcctcccactatgccatgcaggctaggctctctaacttggcaaaaatga

SEQ ID NO: 380029 - DNA, 122 bp, Homo sapiens
gggacgccgggcccccggcactcgaggccactccggagaaaaccaaaacaaagcaaaatgcgcaccgcctccagaaactgcccggcaggccctgcaccgtccccggccggtcgcgccctgcc

SEQ ID NO: 380030 - DNA, 122 bp, Homo sapiens
accgcgtccgcgcttcgggcaaactgaagagcggcggcgtcggagacatcttctcggctgcgcgtgcccgccactgcgctgcggcgcctgccgatgacgtcaagccaggagcaacgagactg

SEQ ID NO: 380031 - DNA, 122 bp, Homo sapiens
gcggcgagagaggagcaatagtttcccaccgctccctctcaggcgcagggtctagagaagcgcgaggggatctagagaagccggaggggaggaagcgcgagtccgcggcccgccccgttgcg

SEQ ID NO: 380032 - DNA, 122 bp, Homo sapiens
agaactggttcacgttgcatactggtaactagcagtggtgattaactgcatttttagtggcgaacaagagtgaacttaaaagtcaagggaaatttaagttttttgttgttttttttttcttg

SEQ ID NO: 380033 - DNA, 122 bp, Homo sapiens
ggcggggccaggcctctgtggggcggggccgctgcgaggctggagtcgaaggtgctgagtcgtcgcctcccactgaagcctgggagcaaatgggccccagtgtgcctatgggcctgaggtgg

SEQ ID NO: 380034 - DNA, 122 bp, Homo sapiens
gttctagtaggctggtgcaaaagtaatgcagtttttgccactgaaagtaataccaaagaccgcaattacttttgcaccagctaactattcactggctgcccacctgggccaggctcaggaat

SEQ ID NO: 380035 - DNA, 122 bp, Homo sapiens
gggattcacccgtcatgagagcagagctcctataccctggcatcctgcgccccaggcacccgagggatcctgggaaaacccaaagctatgtggctaaaactcctgctttggggctcagggtt

SEQ ID NO: 380036 - DNA, 122 bp, Homo sapiens
gcacctgttgaggtatacctccagtcgccggcacctgtacctgtagccaatcagcgccagcgctgctgggaacctacctgtcagcaaaatctcgacacccaaacctcaacataaatcaaaca

SEQ ID NO: 380037 - DNA, 122 bp, Homo sapiens
aggactcatgtctggggtaaacagttttttcacagaagatgcttaagttgggcatttggtcggtggggacccacgcgggttcaacatgcatatcgagaagtgttatttctgtttggggccca

SEQ ID NO: 380038 - DNA, 122 bp, Homo sapiens
ccttcccttggttttttggaaaagaaaacagcgccccttccccatgtctttgcctatgtccgctgcttcgtgtggacccatacctgtgttctatgtggttaccaagtgcatgcactgtgggt

SEQ ID NO: 380039 - DNA, 122 bp, Homo sapiens
taatgtgcagactgcagcattctctaggcatcgtgtggagaccccaaactcctcccctaacggctcctactagcagccggagcgtgcagccatgccagccggagcagaggtgccaaagcgga

SEQ ID NO: 380040 - DNA, 122 bp, Homo sapiens
ggtggacctgcacgccatgtgggtcaggggccagggctcagcggtcagggtgcacagtcccggcccacccacacagcggcctgcccacctggtgtacgcagtccaggaactgcaggaagacg

SEQ ID NO: 380041 - DNA, 122 bp, Homo sapiens
ttggtcaaacaagcaaacacgggatgagaaccattgcttgactgcgtctaccagggcacccgcggcaaaggaactgctgctacccgtgagccgtggagctgtgtgcatgacttgagccattt

SEQ ID NO: 380042 - DNA, 122 bp, Homo sapiens
agggcacagcagcatcacttaggggtctttttcagttgtccatcccacccagagattccacggtcctcactcctcctgcccctaccttcaccccagagtagggtttcttaatgaaattatat

SEQ ID NO: 380043 - DNA, 122 bp, Homo sapiens
gctgctgtccatgacactgagtccagatcttcacatgaggcatgggtcgattctcgcctgcgcagaagttgcttacgccttgtacaaacttgcagcccaagagaacaggtaggaagagtggg

SEQ ID NO: 380044 - DNA, 122 bp, Homo sapiens
ctcaccccacagtcctcgccagtgtagccggggttacacacgcagcgcccattctcacagcgccccctctgactgcaaccgcgagggcagctcctcatgccacagtcgtcaccagtgtagcc

SEQ ID NO: 380045 - DNA, 122 bp, Homo sapiens
acagccctccctgggtgacgggctcctgcatgggccacctgtagagtggtcttgcggaagcggtcgttgagcagctccatgttgctctgctcctcttccagctcctcctccagctgtgcgat

SEQ ID NO: 380046 - DNA, 122 bp, Homo sapiens
gacttcaatatgtatctttgatggtcatctaggttttgttccttcacctccgcgatctgccgtgactccattatccattctcctgtctggggacagtgaggccggttctagtttcttcttgc

SEQ ID NO: 380047 - DNA, 122 bp, Homo sapiens
cagtcccttccccaagcaaagacattcctatcaggcatgatatttccagggactagagatcgtctctcagtagctgaaggtaaaggccagacctctccttgagttaactgaattcttcactg

SEQ ID NO: 380048 - DNA, 122 bp, Homo sapiens
gctagtcacactgccccaaacttttttaaaacttgcatttccccagtgatgcttccctgacggggtgtggcttcacgggctctgcccgacgggccgtcctccctctgtctccccagtacctg

SEQ ID NO: 380049 - DNA, 122 bp, Homo sapiens
gcgacgcacccggaggcggcagggggaaggaaaggcccctggggcgacggttccgggctacgcgcctcccagaccccagtcgatagagtgagaaggaaacccatgcccaaccaccggctggg

SEQ ID NO: 380050 - DNA, 122 bp, Homo sapiens
agttcctccagcggccgggctgggcgtgtgtgcatttgtgtgtacagggagggctgcagccggggggcgtgggggccgcctgggcggcttgggtgtcggaatgggctagacagcagttcacc

SEQ ID NO: 380051 - DNA, 122 bp, Homo sapiens
tcctcacttcctagacgggatggtggccgggaagaggcgctccttacttcccagactgggcggccgggcagaggggctcctcacatcccagacgatgggcggccaggcagagacgctcctca

SEQ ID NO: 380052 - DNA, 122 bp, Homo sapiens
tcccgggtcgcaccgctacagttctcgcagtggcaaaggcggcggcggcggcggcggcagcggcagcagcaggtggagcgagctacagcgtttggcctgaaacccactgctgcagccacccg

SEQ ID NO: 380053 - DNA, 122 bp, Homo sapiens
agctccctgtgagtggctgactgctgcaaggatctaacgccggttcctggaagacatccacggatagctgactttggctggaggactcgctgacccttccttagagggcatgcagtctggga

SEQ ID NO: 380054 - DNA, 122 bp, Homo sapiens
aggtacgtgaacacactcctgaaactcatcccgctggtgctgggtctgcaggaacaactgcggcaggcagtgcagaatggggacatggagacctcccatggcatctgtcgcatcgctgtggc

SEQ ID NO: 380055 - DNA, 122 bp, Homo sapiens
cggggcttggggctggatctatgagccgggagcggggatccaggagcgaggagccgggagcggggaacagggagtcggggagccgggaaccagggctggcagcggccgccatgagcacggtg

SEQ ID NO: 380056 - DNA, 122 bp, Homo sapiens
ccacctagtctgtagtactttgttatggcaaccgtagcaaactattccaacagcaaagaacgttagtcctgggtatttcaagtgcaccaaatggctaactctgcaatcaagataaagcgtca

SEQ ID NO: 380057 - DNA, 122 bp, Homo sapiens
agtgccgcggcgttctggagccgggactgtatcctttgcccgcctgacagggggcgccggcgccctccacgggacggcgaggggcgagccgtcgcgtggcagtccgagagcggaggagaagc

SEQ ID NO: 380058 - DNA, 122 bp, Homo sapiens
agtgtttgcgttcggcctcagaggtgacgcttctttgggggcgggctggagttttctggccgtgaatggcagagcgctaatggccgcctccaatgtggcccaatcagaaagaaaggaaggct

SEQ ID NO: 380059 - DNA, 122 bp, Homo sapiens
aagcgcggcctttacctcaggccgccagcaataagaacggttggtaggaaccgcggcttccgggtggcgcgggtgaatgacgtaagtggcaagcgcgctggccaaccaaatagccagttggg

SEQ ID NO: 380060 - DNA, 122 bp, Homo sapiens
tacgtatacctcgttggcggccagcgtcactcgcctcaggcggaacagctgagaccgtgtcgcgcaaaaggagataacaggccgatactaactagactaactcgacttccggacagcgtcgg

SEQ ID NO: 380061 - DNA, 122 bp, Homo sapiens
gggccgccgggacgtcacgtggactggggccggataatggcgggcgctgcagaagatgcgcgagctcttttccgggctggggtctgcgcggccctggaggcctggccggccttgcaggtcag

SEQ ID NO: 380062 - DNA, 122 bp, Homo sapiens
gtggtggctgcaggagcctccctccctaatgttctgtggctggccactggtcttatttaccgcatcacatttacctccatctgaaaagttcttggttatttgtgtgctatgtctgccccctc

SEQ ID NO: 380063 - DNA, 122 bp, Homo sapiens
ttggataattaaaggtagtccattgtatgtgatattaaaggctgatatctttaaatacgtcgtgacaattttaagggtggaaatataatttagcttgacttttggcttttttttttttttaa

SEQ ID NO: 380064 - DNA, 122 bp, Homo sapiens
gtttcctaagctgtgcctcttggagcaaggacaggtcctctgtctctcagtgatgtaacacgcccctccccggacaatttcacatcctgagagatttgcgggacggaggagaaaagtgacta

SEQ ID NO: 380065 - DNA, 122 bp, Homo sapiens
atgaaatcagaggatatgtcatcatcaaacccttggtgtgggtctgaggtcttgactcaacgagagcacttgaaaatgaaatgactgtctaagagatctggtcaaagcaactggatactaga

SEQ ID NO: 380066 - DNA, 122 bp, Homo sapiens
atttttgccctgatgtatttttgcctctacatttcttgatctctggaacgttaatcccaacgatgcctggtctgcggtgctcacagtctgtgtctgtgctttctacacctgtcctgctcaga

SEQ ID NO: 380067 - DNA, 122 bp, Homo sapiens
tgtgagtcctgccatcttcaggactctaaattgaatgtcccacaggtggctcgaactccacgcgtgggaaattgaacttgctgtcttcaccctattctcctcctgcactgttccctttctca

SEQ ID NO: 380068 - DNA, 122 bp, Homo sapiens
cgcgcacgggcgctgcggagacctgtgtcctgccggggcgcggcgctaggggcccctgctcgggtttttattcccagacctaagcttacaggtgcgtggtcccagaaagtgagtaggaaagc

SEQ ID NO: 380069 - DNA, 122 bp, Homo sapiens
atttgaaatgctcccgacccccctgcctgccactttctgtctgatgcccctggctgcatgcgcttgcaggtgagccccccgcctgctgctttctgtctgacgcccccagctgcatacgcttg

SEQ ID NO: 380070 - DNA, 122 bp, Homo sapiens
cccttctctgggccttggcataaatcaagcacaaatcaaagtctcactccctcctcctgccgcgcaacggcgcggagagccagccagccagccagcggaaccacggcctggtaacccaaaac

SEQ ID NO: 380071 - DNA, 122 bp, Homo sapiens
gagcggtcgaggccccgagcagccccgagagcggcggcggcagcaagagcagccaacatccggggccgcgcacccggaactacttcccgacccgcatcccccgcccgccctcgccgccaccg

SEQ ID NO: 380072 - DNA, 122 bp, Homo sapiens
gaatttaaaaagttaactctaggcttatgaaatgaaaaatgcgactgtgagcttgcacaccggtagcaggccttggagaaaccacagttctaacccgaggcactttgtgcttctgttgcaag

SEQ ID NO: 380073 - DNA, 122 bp, Homo sapiens
atggctgatggaggaagccccttcctaggtcggagggactttgtctacccttcctcaacccgaggtaaggacccagccctgctctctttctcacggagatgcccacccaccaggcatgttgg

SEQ ID NO: 380074 - DNA, 122 bp, Homo sapiens
tcctggacagtgggtggggacatactcaacgccaggttcattcgaaacctgcaggaacgtcgcagcaccaggccttggtgaccgcagccccgtcaaacatcttcaaagtattatttctccct

SEQ ID NO: 380075 - DNA, 122 bp, Homo sapiens
ggcagcgccccctggggacaggcgctgggatctcaggcggccaagaggatggccgcctgccgcccacacttggtagctgccaacaaagttagaaaagtagttcgtggagcttttcgcgagga

SEQ ID NO: 380076 - DNA, 122 bp, Homo sapiens
tcatccctgcgaggccgtgtgcgagatcgaagccagggcctccttcttgcctccccagtccgactggaggctcctgaggtctcggtccgctccacggaggcctccctccagcatctttgctt

SEQ ID NO: 380077 - DNA, 122 bp, Homo sapiens
aataaagaggaggataagggcaggagcacgagggggtgggaggatgaggaataaaaccatcgacgtttgccaaagaacagatgcagcgttttctgccttctgatctgtacgcctctggaaat

SEQ ID NO: 380078 - DNA, 122 bp, Homo sapiens
gctcctggtcggtcctgcagagcgtcagctcgtccaggactcgccgtaatccgttgatgtcggcctctacgttttggtgaagggtgagctcattttcataccttggggggcatttaagtgaa

SEQ ID NO: 380079 - DNA, 122 bp, Homo sapiens
agttttcagaaagcattattttggattacaaatgagattgatttcaaggtccttttgacacgtcaaaaaggttaaatgtattttaaattatttcagttgctatgtttgttatgctaaatgca

SEQ ID NO: 380080 - DNA, 122 bp, Homo sapiens
cgcatgcgcgggggccatattagcagcggttattcggtgagcggtggtggtttattcttccgtggagttaagggctccgtggacatctcaggtcttcagggtcttccatctggtgagccttt

SEQ ID NO: 380081 - DNA, 122 bp, Homo sapiens
gctgaggcatgagagtcgcttcaacttggcaggtggagatttcattgagccgagacaatgcgactacattccagcctgggtgacagagtgagactctgtctcaaaaagaaaatatatatata

SEQ ID NO: 380082 - DNA, 122 bp, Homo sapiens
cggtggcctggaaaccgcttctagacaatcctgtattatttagatccacatagagatacacgaaaaccctttataccaaataagagtaaataattataccaatataaacagggccgttgacc

SEQ ID NO: 380083 - DNA, 122 bp, Homo sapiens
ggtatttttccacccagcaggatgggtgatgctgagagctgcctgctcagacaacagacacgcgaggtcaggaagaagccgcttataaattaccgcttccttcgcgccgccgccaacgccga

SEQ ID NO: 380084 - DNA, 122 bp, Homo sapiens
tgagacaccctgagttccagcgctggactctggaactgagaggagacacctctgctgccgcgagctgcccagcaggtggtactttcacagcagccccaggaaactaatacacaaagccatgc

SEQ ID NO: 380085 - DNA, 122 bp, Homo sapiens
gcggcgggcgccgcggggcccaccccctccccggtctccccgcgccctcgccgcctcccgcgctggctctcaccgcatgagcagcgttccctcggtctagcccttcatctcggtgctgcagt

SEQ ID NO: 380086 - DNA, 122 bp, Homo sapiens
agtgaaatttgggcttggagctcacgcctgcaccatccagaaagcagaaggcagctggcccgggctgtacgcttcatagaatcagagagaacactgcttgccttcatgtctgtaccacaata

SEQ ID NO: 380087 - DNA, 122 bp, Homo sapiens
ccggtgagtgaccccggccaggggagcaggtcacgacccctccccatcccccacggacggcgcgggtcccctcgaatcttcgggtcccagattcaccccaaggctgcggaacccgcccagac

SEQ ID NO: 380088 - DNA, 122 bp, Homo sapiens
tggactgtcacacacacacacacacacacacacacacacacacacacacacacacacacacgagtaaactgtaacacaaatgtgtgcccatgaaagtgcccactttaaaccaccacacagcc

SEQ ID NO: 380089 - DNA, 122 bp, Homo sapiens
gggcagccagcccagctccctggggatatcctgtcactgtggcccagagcctaggcccggcgtctgccaggtcaggcctaagcgctctgggttctttccaggtcctcagatggggcccggga

SEQ ID NO: 380090 - DNA, 122 bp, Homo sapiens
aatcccttgctggaggctagatgatgaaaaacaggattctagaggaatcctgtggcctcccgtgccaccatgctcattcttgggctgccaggggtcggggggtgctgggaggaggagtgcaa

SEQ ID NO: 380091 - DNA, 122 bp, Homo sapiens
ctcctggggaccaaaatatctcacctcccagatctaagggtcccgccaggagtgacgaaacgttcgaattcctgcgagaaaagtggcaggccaccaggccctctgggaaatgtagtccagag

SEQ ID NO: 380092 - DNA, 122 bp, Homo sapiens
attaattcagtgacatcaatattgacctcatacagacaaaagatgaaagctgggttttctcgtgtaccaagtacaaaacatgtgctaaaaagttaacatacacagttgtaagagatcaacgt

SEQ ID NO: 380093 - DNA, 122 bp, Homo sapiens
gtcggtggggcccgaggccgaggggcccaggcagagcccggagaaaagccacatggtgagcgcggcccctggatggggaggggcgccgggacccgcaggatttccccgcgctgcgctcagtg

SEQ ID NO: 380094 - DNA, 122 bp, Homo sapiens
agttaaattctaacacgaaatactacctcaaattagcatagaccccacaggttaaaggctcggttccacaggactgcccccactttagatggcagccaaaagtgggatctccaggcaaccaa

SEQ ID NO: 380095 - DNA, 122 bp, Homo sapiens
agattgaagaagagcctttatctgaagatctggaatgagaactgacttgtgaaacctcagcgtgaagggacatatcactgaccttcataaccactccacaaccatgaatatttgacaaattt

SEQ ID NO: 380096 - DNA, 122 bp, Homo sapiens
taaaaagaagccagctccacttcaagagatatggtgcattctacatccctgtgacccaagcggataagtaatgtcctcagagaaagccattattagtaggttggataatgataatagtatga

SEQ ID NO: 380097 - DNA, 122 bp, Homo sapiens
aaatcaaaagctctaacagcactccaggttgcttttacaagccagcctgtgaagctctaacgttctctagcgaaaccagcgaatcgccaacttccgagaagaaatgatgcgaaaatccctcc

SEQ ID NO: 380098 - DNA, 122 bp, Homo sapiens
gctgcgggtgatgagccccacgcggtccacggagctgtctagcggtgtgaagtgcacgggcgtcaggtccgacatgcgcaggggcttccctgacatggggcaggtcaccgtgcgggactgca

SEQ ID NO: 380099 - DNA, 122 bp, Homo sapiens
ggtaggactggaaaatgagcctctcgtgagcctgtcggggctaactgaaccgcacttccacgtggggcatcccgtcaatgaaaagggttccactcaggtctgctgagggactcaagtgcact

SEQ ID NO: 380100 - DNA, 122 bp, Homo sapiens
tgtgagtcgttgctaagtttgagggtcacattcctccaggtccaccccgccttgcaaaaccggctcaccagctgggtgctcaggttcgggatctccagcccgcccccttgaggtcccctggg

SEQ ID NO: 380101 - DNA, 122 bp, Homo sapiens
accagttgagggtggagcccagctgcacctggcattgctgaagagccctcgcagagccagcgctccagctgctgggcgcgcaacagctgtcccgggaggcaagggttcgcacggcagtgctt

SEQ ID NO: 380102 - DNA, 122 bp, Homo sapiens
actcctgacctcacctgccatggcctcccaaagtgctgagattataggcatgagccaccacgcccagcctgaccctcaataaaatgatactgctgtataggaaatggttttgatgtcctccc

SEQ ID NO: 380103 - DNA, 122 bp, Homo sapiens
ccgggacaggaacgtgagcaaagaaggtctgctggagcagagaaagagaaactgacaagacgaacgagaaaccctggaacaagtctgccggcagccaataaaaggtcagtgccctaaagagg

SEQ ID NO: 380104 - DNA, 122 bp, Homo sapiens
tggtgtttctctcctgcaggctgccgtggggtgtgtgtaggcttcagagacatgggatcacggaagactgaagcagaaacagtggattaagacttcctgagcgatagctggtgagtagtggg

SEQ ID NO: 380105 - DNA, 122 bp, Homo sapiens
tggggagcaggggtacaaaggtgtcctggccctgtgtgctctggaattccaggttctgggcgggatctaagggagttcccttccgacttgcagaaaacagcaatagtaacaggctggcttgt

SEQ ID NO: 380106 - DNA, 122 bp, Homo sapiens
attgcaatatgcagcggagtttgagaaccagcgccttggacccagcttcttaagctactgcgcgcaccggcgtcccgctgggggcgcgcgagccccacccccagagatgctgactcagcaag

SEQ ID NO: 380107 - DNA, 122 bp, Homo sapiens
tcctggggactcagcctccccgccgggaaatgacctgcgaggctgcagtgcaggaagttccggcccccaccgtggcggccgggagagttgccctctcccgtactgtcattggcctggcgcca

SEQ ID NO: 380108 - DNA, 122 bp, Homo sapiens
gccctgggactcaggatttttcccacacagggagatcatcagagagaaacctcctctttgcgtcaactacaatcacagacaactttttcattatatgacacatagacatggtatgcttgcag

SEQ ID NO: 380109 - DNA, 122 bp, Homo sapiens
cctttgtgggatttagaatttaaacgggccccagagcaagagattggctggggaaatgcccggatcgcggctgggctgctcgcatggcactgctcgggtacctccggccgggctccgtcgac

SEQ ID NO: 380110 - DNA, 122 bp, Homo sapiens
tgagccactgcgcccggctggtggggagttgatttctatgtaattcccgattattatctacggcttgtgtgatcttgggcagtaatgtctcatctctgagcctcagtttccctgtgtggagc

SEQ ID NO: 380111 - DNA, 122 bp, Homo sapiens
aggttgtggccttggcatatatccagcctctgcatcttggcctccaggggtgttccagtgcggccccgcttcggtcattggtgttcgagagggtgatgtgcagctgaacttcgacatgccct

SEQ ID NO: 380112 - DNA, 122 bp, Homo sapiens
ggcccaatttagaagtctgcagaaactcagagggtcaggtcattaggaatgttaacgcggcgaccaagaattataaacatgatctgaaagtctcttccaattcatttcttcaagtatttatt

SEQ ID NO: 380113 - DNA, 122 bp, Homo sapiens
cctttgttttcaatccctgctgctttgagcctttttctataatgtctgagtcatttgcagcggggtgggtaaagaggggagaaagaagaaagcaagcaagcaacagcctttgagctccggaa

SEQ ID NO: 380114 - DNA, 122 bp, Homo sapiens
ctccctccccgctccgcccgcggctggaccccgatccccgggacagggactgagtctgaccgtctgatttgtcctcccggcttctagcgccccgctcaggtcggggcttggggagggggcgc

SEQ ID NO: 380115 - DNA, 122 bp, Homo sapiens
ggagccgcggaggccgcgctcaccagagccagcgtgcccgggatctcggccaccgaccgacgccagaactacaattcccaacatcctcgcaggcttcggctcccattggccgccacagagcc

SEQ ID NO: 380116 - DNA, 122 bp, Homo sapiens
atcgggaaaacagactcccagaagctaagtaacttgtttattgtcagacatctagtgagtcgcagagccagggaactgaccacgggcattttcaccccattacccttccagcttattgccga

SEQ ID NO: 380117 - DNA, 122 bp, Homo sapiens
ctcctctctacctgggtttgccaccgtcacccttcaccccatccccacacctgagcaggccgcctcgcctgggtgccacctgtcttggttctctgttgacttgttgattgtctgtccttctc

SEQ ID NO: 380118 - DNA, 122 bp, Homo sapiens
acggcgacgtcacggaaggcagtgccgcaggcggccgggccgcgacaggctgtcggcaggcgtcgaggacctcaggaggagaacctgctcggtctgaactcggtttctcagcagcagtccac

SEQ ID NO: 380119 - DNA, 122 bp, Homo sapiens
caatggcccaaatatcagagtgttttttctggatcagggttcagttctccaagagggccacgcagtgaccttacagaaaatccccattcccaggcagcaggtagggatttaacgttcttagc

SEQ ID NO: 380120 - DNA, 122 bp, Homo sapiens
ttaacacttgtttctgtgtagaacatatgcagtaatgtcacctcaaaagagagttaagaacgtccaggcacaaaacaggacttcacaaggtagtagtagttttcagaccacgctttcagcct

SEQ ID NO: 380121 - DNA, 122 bp, Homo sapiens
tatgctgccccacaaaaccaagcgaggccaggccgctctggaccgtctcaaggtgtttgacggcatcccaccgccctacgacaaggtgagctatgccaaaccccacaggcagcggccttacc

SEQ ID NO: 380122 - DNA, 122 bp, Homo sapiens
tcagaaaccgttccggtaacagaaaaagctttttaacttcccgtgagatccacgaggatccgtgaggttgatacttcaagtcgaaggcacgagaatgtccttctgaacctgaaaatcacggt

SEQ ID NO: 380123 - DNA, 122 bp, Homo sapiens
gtggcaagatcaagctttggggccttgttggactttgctgctggacttctcagatacctccgtggtgctggctccctcctcagggaagaaagtggatatacgtgattggcagggttgattgt

SEQ ID NO: 380124 - DNA, 122 bp, Homo sapiens
tgtaacgctctaacgttagagcagctaacggctctgctcagaatttctcccgacagaggccggagtgttcaagagcttggcgatacagaaatttctgctggtgttggggcgggtgcgggaac

SEQ ID NO: 380125 - DNA, 122 bp, Homo sapiens
cagatagactttttttctttcccctttctgctacttcaactcctttattcttttatttgccgcatattactgtcctcacattcccgcccctgcccatttttagctcttacattggttctttg

SEQ ID NO: 380126 - DNA, 122 bp, Homo sapiens
cttctcctgagcctggctcatctcccatactaaccttgagcctcaagatgctttataaatcgcttggcaagtagtggtgatggtggtaatgtctcctttaggcatttgaggaaatgcctctc

SEQ ID NO: 380127 - DNA, 122 bp, Homo sapiens
cggaccagcagctgcggagggtgcgccgggtcccccggcactgctggcccgcctgtgccacgcttgaacgctcagccgcctccccctggggcagcgcttgggacctgcagcccaccatacac

SEQ ID NO: 380128 - DNA, 122 bp, Homo sapiens
gcgggaggttcgattgacccggtcttggcgggtcggtgagtcttggcggctgttaacgcgcgctttgggaacaggaaggttgagagagaggtgctggggtctgcgtctatctctgtcgctct

SEQ ID NO: 380129 - DNA, 122 bp, Homo sapiens
gcttaattgagaaggtgagatttgatcagggctttgaaggatgtgagtagcaactaactgcgagaagggggccaatgaaacagtaattcctagaggctctgttcagacttagggcttttgaa

SEQ ID NO: 380130 - DNA, 122 bp, Homo sapiens
tggggcggccgcgggtaccgggttattcattaccctggcgtggacttgcctcggggcggacgcgcaggcatttactttctcctatggtctcctctgatttttaacccgatgctatcattctt

SEQ ID NO: 380131 - DNA, 122 bp, Homo sapiens
aaagaggtggaaatctgtctgaagtttgcaggagacccgcgctgcctaggcaaagggacccggcgaccaagacacccccgcgagggcccagggcgcgtccctcccgccaggccccagactcc

SEQ ID NO: 380132 - DNA, 122 bp, Homo sapiens
tgctccaagctccgctgtcctcactccacaaggtccggggcggtggccaggatccacacccgcagagcatatttgctgcctgagttgcccaatcttctcagcggccagtccccacactgctc

SEQ ID NO: 380133 - DNA, 122 bp, Homo sapiens
attcggcgaggctctgagaactccagctccgagggcggtgcgctccggagagggccctaccggagggccaaggtgaggcttgcccaagacaaccccgccatccacacccccctccttggttc

SEQ ID NO: 380134 - DNA, 122 bp, Homo sapiens
cccaactccagctcaatcggggtctcttagaatgtaatggtaaactttaaacaatctttacgctacaggatagaaaacaaatctgacaagcatccattttctaagtgacttgttggactgtg

SEQ ID NO: 380135 - DNA, 122 bp, Homo sapiens
ctctccccgccccgggccgcctgcagggcgcgccgcgtcccgtccggtcccgtcccgttccgtcccgtcgggtcccagccccgccaactctcaccctgcccggcccttccagcggatccact

SEQ ID NO: 380136 - DNA, 122 bp, Homo sapiens
cccggcaatcgggacccgcacggattgcccaggggagacggcgcgggacgcggagggtggcgtgcgcggcgctagcccgctgtgcttcactctctcggttcccacttcctcgcggcgcctgg

SEQ ID NO: 380137 - DNA, 122 bp, Homo sapiens
agcaatcctcagttcattgccacatggagcccacctctgcaggcatcaagagggtggggccgtcaaccacatctaccagtgctaagcatcaaggacaatgaaggctgagaatagcctgctgg

SEQ ID NO: 380138 - DNA, 122 bp, Homo sapiens
ctggaggctgaggcaggtctcagatagcaacttgtcccgagagagcaagatgtccactgccgagctcttctcacagatggccgcttccacggggagcagcagggggtctaagcgacggaagc

SEQ ID NO: 380139 - DNA, 122 bp, Homo sapiens
agctctacctggtggagaaggagacacaggcgccttgagagcaaggggcgggcggcggagcgcggggtttagggcgagctcctcaggcgtattccagctgggccccctcacgccgcaaatac

SEQ ID NO: 380140 - DNA, 122 bp, Homo sapiens
gaggtcgagaagcagccattttgcttgtagtccggaaggactgcaaatcccggcatccctcgcggcagcggccctctacacacaacaaatcccggcatgcccccgagcggcctgaggtggag

SEQ ID NO: 380141 - DNA, 122 bp, Homo sapiens
caccacttcctagccatgtgcccgggacagaccatccctgaccgtctgctggctccacggcgtggggctctgtctggcgtcccgcctgctgtgtccccagcacccggcttggagcctggctc

SEQ ID NO: 380142 - DNA, 122 bp, Homo sapiens
tggggagataagtccaccttctctcttgcaccttacctcagctggtcagcagatggaagccgatttcagagacatatataaccatatggaacaagaaggctttcaggtgtcatctagatcaa

SEQ ID NO: 380143 - DNA, 122 bp, Homo sapiens
tgctgacaggggtcgggggtcactggcagggctcggcgcgggggaagctggcaggggttgcggggggtgctggcgggggtcggggggagccggcggggctcggcgttgggggaactggcggg

SEQ ID NO: 380144 - DNA, 122 bp, Homo sapiens
gccaaaatggttaaatcccgtctctactaaaaaatacaattagctgggcatggtggcgtgcgcctgtaatcccagctactcaggaggctggggtaggaaaatcgcttgacccccggaggcgg

SEQ ID NO: 380145 - DNA, 122 bp, Homo sapiens
gggggcggttctttccggaaattatgactgcagctgttttcactccgctgtgactcagagcgctccgggctgcaggagaggaaggtaggggaccaagctaccggtgcagggcctggatccaa

SEQ ID NO: 380146 - DNA, 122 bp, Homo sapiens
gcagtcctcagtctggccaggcacttgcggtttgcactgcgcggcgcacaaaatcctccccggcttaggtacaaagctctccccagcgtaccctcctccgaccagcagagggcgcgcaccgc

SEQ ID NO: 380147 - DNA, 122 bp, Homo sapiens
gttccctttttcctgctatatatcaagacctacagcccttgggaagtgcatttctgcattcgaagaagaatctgagagaaacctgtaagtaaactttcagaataatcttatttctaaaattg

SEQ ID NO: 380148 - DNA, 122 bp, Homo sapiens
ctgaagattaagaagaacccactctataagggtggcatggaagaagagctttccaggtagcgtgaacagcagctgcaaaggtcctgagattggattgtctgaggaacagaaaggaggcttac

SEQ ID NO: 380149 - DNA, 122 bp, Homo sapiens
tcataaacggaagggtgggttgatgagtttactcagattagagtggtacaacctttggggcggagcctctgactctgattggttggacaatgttttccaggcagtataaaaacgctggtgtc

SEQ ID NO: 380150 - DNA, 122 bp, Homo sapiens
ggcaaccagaactaggtgttgttggcacgatttggattgaagggtttgtttgggatgtggcgggaaatacagtacctttgatgaggtgggactaaatattcagcccttagaaatgaagcagg

SEQ ID NO: 380151 - DNA, 122 bp, Homo sapiens
gctgggcgatataaaggaaccagcccaggggcttcctacagccagagggacgagctagcccgacgatggcccaggggacattgatccgtgtgaccccagagcagcccacccatgccgtgtgt

SEQ ID NO: 380152 - DNA, 122 bp, Homo sapiens
acagcaccctggggacgcggccccgcctccgccgacacccaatacctgcctccgcgggcgcgcatctccagggcagcccccatacacccacaggagggggatgaaggtcccccattcggaag

SEQ ID NO: 380153 - DNA, 122 bp, Homo sapiens
tgcaggctactgcgtcaccctgaccaagagaggccggggaacctttcccgtttgcgccaacgcttggttaattcacgcagcactgtgaacgcatgcgtgtttccgtactttgttttccctgt

SEQ ID NO: 380154 - DNA, 122 bp, Homo sapiens
tagaagttgggtataccaaccaccaccaccaccgccccctattccagtttcaaagctcctcggctatgctaatgtcccctcagagatgaggtttgacttttaggcccgtatgactcctccat

SEQ ID NO: 380155 - DNA, 122 bp, Homo sapiens
ggtgcgttgttcgcgggggtgaattgtgaagaaccatcgcggggtccttcctgctgaggccgcggacaccgtgacctcgctgctctgggtctgcagggaaacgtaggaaaaaaagttgtcag

SEQ ID NO: 380156 - DNA, 122 bp, Homo sapiens
gctaaggagccgttatgtagtgccgtgtcagtgatccgtgcgttgaggactccccgagtacgcattgacacgatagaccggaacagctcagaagaagctgttatggtctatcatgccagtga

SEQ ID NO: 380157 - DNA, 122 bp, Homo sapiens
cctcccctttccccagcgcactgttgagggcagcctctccagctctcttgtttatgcaaacgccgagcgcctgggaggctcggtaggaggagtcttccacggccccgccccgcccctgtcgg

SEQ ID NO: 380158 - DNA, 122 bp, Homo sapiens
gtattcagcagcaagcctagctgtgtaatttgtgaggctcaatgcaaaatgaaaatgcagcgtcccttgttcaaaaagaaggggaaaagtgctattaaagggaaggaacatttaactcctaa

SEQ ID NO: 380159 - DNA, 122 bp, Homo sapiens
gttttccaggggacaggagcagacgatcaaactctgaattttaagtctgtcattagatgacgtgaggtaaactttagtcaacctttattatggttaggagggtggtgggggccagcaggcct

SEQ ID NO: 380160 - DNA, 122 bp, Homo sapiens
gccagccccagccggagcccgagctgcagctgccacctgcaagtggtgctctggctgcagcggtggcaaccccggatccagtccttccgcctcgcgcccatcagcgcggacccgggggcgac

SEQ ID NO: 380161 - DNA, 122 bp, Homo sapiens
ttgtggcatacacacgtgtgggtataaaatcgtaaatcctatgtagtcgcgtagtgcatgcgcagaaggcttagacacgaaatgtcatttcagcaatgtgcctagagaagctctgacgccgc

SEQ ID NO: 380162 - DNA, 122 bp, Homo sapiens
cccgggagagacttgggtatcaggaaactcggaggcggggctggggggtggtgcctggcccggaccgtctgcaggggcggggaccgacccccaggggtcgctgcgccttgcgcttcccccgc

SEQ ID NO: 380163 - DNA, 122 bp, Homo sapiens
gagctctggtggttggagacaacaacatagggctgcgagggagggaagtggtgagcccctcgcacctccactcggatcccgtacaggtatttgatgtggagcagcattagacgcaagatcct

SEQ ID NO: 380164 - DNA, 122 bp, Homo sapiens
taccacagaagccataggcccttcccagaatctcataacaggaagtatgtgatgtccatacgtcttattactggcaatgttaaccttcatcacttggttaaggtaatgtctgctgggtttac

SEQ ID NO: 380165 - DNA, 122 bp, Homo sapiens
tggtaataccgctttccttttggtccttttaggacttcttctactcatcgtcatggagatcgtcaactgtcatggcatggatgggagcgcaatttagcctggaaacgggattacaatgaagc

SEQ ID NO: 380166 - DNA, 122 bp, Homo sapiens
ttgcttcagaaagaaaaatggcctttcacggcgtttacggaatgtgggcagaaattggaccgggcagacatagagctccgcacagagatggaaaatattcagggtgaacacgcacactcgac

SEQ ID NO: 380167 - DNA, 122 bp, Homo sapiens
tttaggaggacgactctctgcttcacaggacctaccccagaatcctgtgactcagaagcgcgcttgtgaagtgcgcatgtgcgggcagggcctccagtggggctctcgtgggggcagcagcc

SEQ ID NO: 380168 - DNA, 122 bp, Homo sapiens
gccagcggcgttgagggaaggttctccggaagcagccgctgttctggcttggcgcaagtgcgtgtggacgacagcaggatttcctgcccagggacatctggataagaggcccaaggtcccca

SEQ ID NO: 380169 - DNA, 122 bp, Homo sapiens
cgcggccgcctgcagctgggtagcagcgcgcggcgcggcgcggcggtggcgggcagcgcgcggcaatgccggccccggggctggactgctgaacccacaccgcttcaccaccggactccaac

SEQ ID NO: 380170 - DNA, 122 bp, Homo sapiens
gggcggccgggggggcgggccgggggcgggccgaggatggggttacctgggcgggcccagcggcccgggacacccccccgggggcgggccggagcggcggcggctgccgccttagcccgcgg

SEQ ID NO: 380171 - DNA, 122 bp, Homo sapiens
ggcgcggactgcgcaggcgcactcaggccccgccccggacctgccacgcccctctcctctcgcgcctgcctcgcccatgcccagctcccgggccccgcccttcgctgcccggaccctcagtg

SEQ ID NO: 380172 - DNA, 122 bp, Homo sapiens
ccaggcgtgtctgcgcggtgcggaggcgcatccccgccaggggagggctgggagcggccgcgcacccagaggagagcaggctgtccttttagggagccggcattggtaaatgctctgtggtt

SEQ ID NO: 380173 - DNA, 122 bp, Homo sapiens
tgaccaacactaacagatgagcaaggagctggcagcaatggggcctggagcttcaggggacggggtcaggactgagacagctccacacatagcactggactccagagttggtctgcacgcct

SEQ ID NO: 380174 - DNA, 122 bp, Homo sapiens
tggcgccgacgctcgacatggctgtagtggcagtgttggtggtgcccgtctcgtgggtctcgcagggtgggtttgagcagccatgctgcccggccatgttggaggtggcggtggtggcggtg

SEQ ID NO: 380175 - DNA, 122 bp, Homo sapiens
gagacagggccggggggactggagctacctccagttgggacagcgcccaagcgagagggccggggcctggactcccaaaccactcatcctccaagcccctccgatgggaccccaaagctgca

SEQ ID NO: 380176 - DNA, 122 bp, Homo sapiens
atattgacattgataattttatctttctttagtctggtttctcctttgctactgatccttcgcaagtataaggattgaaatagcaaggacagatcaggggaactgactgaagagtgacctgt

SEQ ID NO: 380177 - DNA, 122 bp, Homo sapiens
tgtcccagagatctacactctggaaatgatgcctagaatcatgctggtccagagaggacccgacttccaccaatgctgggcctggatgtacagcgtgcaccacaagcttcagcactggctgt

SEQ ID NO: 380178 - DNA, 122 bp, Homo sapiens
tgcagcggcgccacctgtggcgtcctctgcagaaaggacctgccccgctgacctgttgaccgttgcccaggcatcctggcggcacaccccattggactgttcagagctcgccccagcgcccc

SEQ ID NO: 380179 - DNA, 122 bp, Homo sapiens
aagcttctgtggaaaaatattgtaatgatgagcttgagagtaccaataacttttctttttcgtgtaaggcaatttagagtccaatttctgaaggcacagagatgccagtggaattagagatg

SEQ ID NO: 380180 - DNA, 122 bp, Homo sapiens
gggttaaatacagtgttagatttaagtttggctcaaagtgtcctttgtactggggtaatacggtttgtcccctgttggtctccttactttgtgaactttaccttagttgatgtgtaaacaag

SEQ ID NO: 380181 - DNA, 122 bp, Homo sapiens
tcgataatttcatttctccttaagaccttgtcatctaaaactaattagaggccaggttcccgaggaattgtcagtattccaaaaaacaaaaacaaaagtactggaggtttcaaaggaaatca

SEQ ID NO: 380182 - DNA, 122 bp, Homo sapiens
gggagggctcttgatctgtgatttatagataggcacagctactcccgttcgggaacccaacggcagacaggtcctagtgcccatcagatacccgcggccgggactcggagctgtggggtgtg

SEQ ID NO: 380183 - DNA, 122 bp, Homo sapiens
cggcgcgcactccggccctcaactggtgatttgcggctccgcggccccaccccggcgagccgattcgcgctgccttgcggaaccccccgagacatttacattcggtgacctagccaggccct

SEQ ID NO: 380184 - DNA, 122 bp, Homo sapiens
ttaattatcatggccgtgataattatgtacattatagaaacattaaccaagcgctgggctcgtttcaggaccttcagtattgctgggaggcttggtatccgacaggtgttccaggagggcag

SEQ ID NO: 380185 - DNA, 122 bp, Homo sapiens
cctgagagaccgagggcagaggtcagggctggaggcagggactcattgggggtgcatgagcgtagacaggggaaaaggactctccctcctcctccagggctgagaggagcaagatggatggg

SEQ ID NO: 380186 - DNA, 122 bp, Homo sapiens
gagtgctgccctgttgaccggcatccccttctactggtggctggacatgtggagagacaccgactcacccagaacactggacgaggtcctcaagtgggctcactgtctcactgtctatttca

SEQ ID NO: 380187 - DNA, 122 bp, Homo sapiens
ggtgctcagtgatggtccacaggaccgggtgtgacccctggtcactgtctgcccaaggcacggctgagctcaatggggaccagcaccaccatcttgagacgtggggccacaagagtggccgt

SEQ ID NO: 380188 - DNA, 122 bp, Homo sapiens
cacttccggtgtgcgcgggaaatcttgggagagcggggtgggccttctgcccgcagttcccgcctcctcaggtccgggcgggtccctggccggggtagcacggaagggtctcccaggcggcg

SEQ ID NO: 380189 - DNA, 122 bp, Homo sapiens
ggctggcggcacggagcgcttggctttctgtgggggcgccggcttttccctggggccctgcgcgcccagggccacctcggcgcggcccaggctgcgagtcttgccgcgcacgtcagcggcca

SEQ ID NO: 380190 - DNA, 122 bp, Homo sapiens
cacgcgtccctctctgcatcccagacccccacagcccatgaggggtcccgcctccgtttccgcatcctgcgttccatggtacgacggatgggcttccctcggcaaaaccgtcatccacattg

SEQ ID NO: 380191 - DNA, 122 bp, Homo sapiens
gacaaggctcaggaccttggtcaccaccccacgcaccaccattttgcgttttgctagagacggtctgggctgatctcgctggtgtccatgttaggattaaaatcccttcatgacggcgagga

SEQ ID NO: 380192 - DNA, 122 bp, Homo sapiens
gacgggtgagttgtctggaagctgcatttgcctggcaaacactgggttaacaaagacttgcgttgcggggatgctggccttggacagggaatgcgaagggattatgctacggagaacggatc

SEQ ID NO: 380193 - DNA, 122 bp, Homo sapiens
acagtggtgtcagattttcatccttggcaggtcattttagaaacaatgaaattggaaatacgtttagtttgtgcctgtcagcctatgagaggacagtgatatttcaagacctacataaatat

SEQ ID NO: 380194 - DNA, 122 bp, Homo sapiens
gtcctcttgctcgagcaaacctcaagcaaaacctacatgatttaagactgactcttgaagcgaagtaaaaaaaaaaaaaaaaaaaaaaaagcagccatgcaaaatttgaaacttggagacga

SEQ ID NO: 380195 - DNA, 122 bp, Homo sapiens
aactcaggtgatccgcctgcctcggcctcccaaagtgctgggattacaggcatgagccaccgtgcctggcctggtgaaatagtctttagggtcaagcttaagccccagttttctccatctct

SEQ ID NO: 380196 - DNA, 122 bp, Homo sapiens
caatcatatcccctccagcatccatctccttaactacaattcttgtgatttcctcaaatacgctgaacattgcgcctggaccaactcagaaacagaagccaatttcagtttttgggaggagg

SEQ ID NO: 380197 - DNA, 122 bp, Homo sapiens
gaacaatacaagctctgtcccgttgtgaactcctgaagagcaccgtgcccacaccttacacggtggcctgaaccccgcagagccattctccaagggctcagtccctaaggcaggaatggcga

SEQ ID NO: 380198 - DNA, 122 bp, Homo sapiens
cgggacacctgcatctgccaacaagactggaagcaggtgaggcacacagagggggaggcccgcagctgcgtgggaggaggggtggtctgagggacgtgggatgccgggaatgaggctggttt

SEQ ID NO: 380199 - DNA, 122 bp, Homo sapiens
gaggaaaatacagggcactttttaaaaaaagtattgatgctgggctggcgcaggggctcacgcctgtaatcccagcactttcggaggctgaggcaggtgaatcatgagctcaggagattgag

SEQ ID NO: 380200 - DNA, 122 bp, Homo sapiens
gggttgagcgcatcagcgctaaacccaagacaaaggctgccctgtgtcttccgtactcagcgctctcctttggtaatcggtccccgtccccttcaagcccacactaggagcgcgtgagcctg

SEQ ID NO: 380201 - DNA, 122 bp, Homo sapiens
ggctgtggcggtttgggggcaccccaggccatcctccggcttcctctcaccaggcaccaacgtgtacatcacaagggcgcagctgatgaactgccacgtcagcgcaggcacgcggcacaagg

SEQ ID NO: 380202 - DNA, 122 bp, Homo sapiens
ccctcgcgcggcgctccctgattggctgctggcggcgggacggggcggggcgggatggcacgttgccgctgcgcctcgggcctgtgcgggcagtcctccttcacttccccaagtccaccctg

SEQ ID NO: 380203 - DNA, 122 bp, Homo sapiens
cctgtctgtactaataactggccaggtgacttctcgaggtcatctcccctctcgggaccccggttttcacatttgcaaaaagagggatttggactagatttggctttcttcagtggattctg

SEQ ID NO: 380204 - DNA, 122 bp, Homo sapiens
cgaggcttgccttaattcggaggaaacccaggacttgagagagccatacaatttgaaagacgaagcaccgtgaaatgcagaaagttgtggttcggatagctcagctgattaatttcatgttg

SEQ ID NO: 380205 - DNA, 122 bp, Homo sapiens
ccagagaggaaagaggtgtgcccagggatacgcggcccactagatgagcctccggcaaggcgaaggcccagctctgtgtggtgaggcctgcggctctagggaggaggcctgtgctgggagct

SEQ ID NO: 380206 - DNA, 122 bp, Homo sapiens
gccaagctgccgcttttgcagaaatgttctatctcttggtctcgcgcgatctcgcgcctccgaggaagccaactgtatcgcgcacgccatcaaatccccgcgggaatagaattccgcaggtc

SEQ ID NO: 380207 - DNA, 122 bp, Homo sapiens
gttatttataataaatgaaaaagggaagcgtcccccgctgtccctgcccatcgatggatacgtgcataagcaaatgtgggccatgcacactgtggaacattactcagcctttaaaaggaagg

SEQ ID NO: 380208 - DNA, 122 bp, Homo sapiens
gccgtgccgcagtaggaggcgcgccaggctgtggctcgcgtggccgcaggctttgtgcagcgggctgcgctcgtcctcgtcgcgcgcgtccgcctccgccccgcgccgcagcagcagcgcgc

SEQ ID NO: 380209 - DNA, 122 bp, Homo sapiens
ggtgctgaagacttctcaagccagtctcatggaagcacatttagttctcagatgtgttcacgctcagcatcatcttgttgcatccttgcttcctagcagtgggttcaacaactcctcattcc

SEQ ID NO: 380210 - DNA, 122 bp, Homo sapiens
tccccaagtcttcagacaagtgttctcccaaggtcttgaggccaccctggtttggggacacgtctggagtccccaccccttccctaatgctcctgatagagtggccaacatccaacctgctc

SEQ ID NO: 380211 - DNA, 122 bp, Homo sapiens
gtttattgggaagtgatgtaaaccatactgccagtgcttttgctcagcacttgggcacttcgtggccgtgtgtctcatatgatgttcataatgcttttttttccctctccttccccccgtaa

SEQ ID NO: 380212 - DNA, 122 bp, Homo sapiens
aaggattgattctacaactctgcttttcttttcaaaacttaaacaaaatatgttaacagtcgacactagtatctcttactccaacaccaaatttgattaatacaaaaacaaataattttcaa

SEQ ID NO: 380213 - DNA, 122 bp, Homo sapiens
ctttctgaaaagttcacttacaacatacacagaatgaaaaacacacgatgccccaactctcgccttcctagtgagttggttcaggggcctggatgttgtcaaatattgagatctttagaaat

SEQ ID NO: 380214 - DNA, 122 bp, Homo sapiens
tccctgtcaggacagctctggtgtggaggcagaatggggcatacagcctgcatgagcacgcgccctcccccaggcagggatccccagacacttatattatttacactggagaaagcaaacag

SEQ ID NO: 380215 - DNA, 122 bp, Homo sapiens
tgcgccccctctccttccgcccagcacctccatgccctcggtgcacgaacgcggcggcggcggccagaagtcccccgtggcttatgaatgacacggacaggcaagaaccagccgctgccctg

SEQ ID NO: 380216 - DNA, 122 bp, Homo sapiens
attcctccttctgaacatgggactttccagaaggaccacagctcctcccgtgcatccactcggcctgggaggttctggattttggctgtcgagggagtttgcctgcctctccagagaaagat

SEQ ID NO: 380217 - DNA, 122 bp, Homo sapiens
cctttaagagaggggatttgtggtcactttaaaaaaatcttcagctgtgctcatgtggtccggagtactgtgttagttttcctgcctgtggctcatgggccagtggtcaccatggaaatggt

SEQ ID NO: 380218 - DNA, 122 bp, Homo sapiens
catgcctgtaatcccagcactttgggaggccgaggagggcagatcacgaggtcagaagttcgagaccaggctgaccaacatggtgaaaccccgcctgttatgcttttgtctcagcctagact

SEQ ID NO: 380219 - DNA, 122 bp, Homo sapiens
ctgaatagcaccttaaataacaccactgctaatgcctcaataccaaggtgaaccaccagccggctttgatttcagagttttgagtgagtaattgaaaacaaagttaaaaatagttggccagc

SEQ ID NO: 380220 - DNA, 122 bp, Homo sapiens
ataggagtataatccattatattcacagtactgagggttatgcaggctatgtacaccagccgtcagggatctgcagggacatcttagaatcttgctggccacatattgtgccatggctggca

SEQ ID NO: 380221 - DNA, 122 bp, Homo sapiens
caaatgccaaagttgggggaggggtgctacattttttcacttgaaggaaggaggtcccaacgaggccttcagtgatcgggagttgggtaaataggacagagagagaccccaaccgtccttcc

SEQ ID NO: 380222 - DNA, 122 bp, Homo sapiens
gggcggggcactgggactgtggcgggcacccgcgccgggggtcggacggtgcttctgcaccggcgagataagggtcgcttctgcaccgcccgggtttccagcctttaactttttgtcctttc

SEQ ID NO: 380223 - DNA, 122 bp, Homo sapiens
agcctggaagtgaatgatatgggtataattaaaaaaaaaaaaaaaaacaaaaaacctttacgtaacgtttttgctgggagagaagactacgaagcacattttccaggaagtgtgggctgcaa

SEQ ID NO: 380224 - DNA, 122 bp, Homo sapiens
tactttgaagtgtttgaatggaccaaggcacgctctctcccgccaaactataaactcagtcgccccaaaacaccagccttccagcccatcaggtatattactccacgttttcctttctcccg

SEQ ID NO: 380225 - DNA, 122 bp, Homo sapiens
atgtttcctcaacttttctattttcctacttcctttgctctgctctcagtcactgggagacgaaagtgctgctggttagcacagaagaaactgctgctgctgcggcttctactgttgtctgc

SEQ ID NO: 380226 - DNA, 122 bp, Homo sapiens
ctacggaaagggtgaggttgaacaactgggcagaggagcccgaggccgcccacagccacacgtgcaccaagagccagagcagggagcgctgcgtcctggcgccgctgctgcctgaccgccca

SEQ ID NO: 380227 - DNA, 122 bp, Homo sapiens
ggccgaagcccagccatcgccaacttggaggggcggggcagaaccagggggcggggcctgcgtggtgcgtgcgtgcgcgttctggaggaggcgccgccgccgctcccgaggcccctgccgcc

SEQ ID NO: 380228 - DNA, 122 bp, Homo sapiens
tctactgagtattccatttatcttgaaacattcctttagctgtgctctaatctctccagtcgcaccttctcagtctctttggaaggcattgaaatattgcagctactcaacacttcatccca

SEQ ID NO: 380229 - DNA, 122 bp, Homo sapiens
agcgtcccttcccccagcccccttaccatgctgcagcccccggcccaggcgtgctgggtccgcaccgcggtgcgcccaggtggctttcttaaagggaaagttgcatcagcctcccgaggctc

SEQ ID NO: 380230 - DNA, 122 bp, Homo sapiens
agggtgtgtgtatttgcacacctttcattggtccttcagccacgtagactacctgtaactcgtatgtacccttggacttgtcagctgcacttctagggatttaatctaaggaaataatgtgc

SEQ ID NO: 380231 - DNA, 122 bp, Homo sapiens
atacctcacgaatgacaattatgttccaggtagagcgaagcgtgctgcagctcccatcaccgtcagagtgtttgatttctctctacatccacatcgacaaggaattgtccaccttcttaggc

SEQ ID NO: 380232 - DNA, 122 bp, Homo sapiens
acctggcctcgggagcctttagccatcttatcgctgtcctcggggccgatggtcagcgcacgcaggacaggaagaaacttctggatcactcctggaagacccagggcgcccctagagacagg

SEQ ID NO: 380233 - DNA, 122 bp, Homo sapiens
cgacttccccttcccacctagaactcacagtgttcacagggtcatggcaaggtggtggggcgtggctgaagcttcagggtaaatccatttgtgaagagcagactgagtttttgtttttgttt

SEQ ID NO: 380234 - DNA, 122 bp, Homo sapiens
aaagcaatgatggggggccagtggcacccggggggggggtacgcccctgcgcaagacacacgcgcgcgcgagacagacagacacacacacacacacacacacacacacacacacacacaccc

SEQ ID NO: 380235 - DNA, 122 bp, Homo sapiens
ggcaagggaaaaatgcctcaaatgagcacgcgcacaacttcagtaaacacactgtgagtgcggccactcccaagtgctggcagaccactgcataagtggacagcctgctccaagggaaggat

SEQ ID NO: 380236 - DNA, 122 bp, Homo sapiens
cgccggcagggagatcctaaccgtgtcatcttgcccctttctgaggcgtttcgtttgcgtcgcctgtcaggggacagctgcgtcctcagggatatgctgataagttcttggctgaagtttcc

SEQ ID NO: 380237 - DNA, 122 bp, Homo sapiens
ttgctaacatggagctctgagatcaccccacttccatcatttccttctcccccaacccaacgcttttttggatcagctcagacatatttcagtataaaacagttggaaccacacagcagtgt

SEQ ID NO: 380238 - DNA, 122 bp, Homo sapiens
actgctccatgcgttccacccgggcctgcgggcagggacggcctatcaactctggggagtcgtctgtcccttacccccgccccatacccaatccctgcaccggagatggccccaggaaaaag

SEQ ID NO: 380239 - DNA, 122 bp, Homo sapiens
aatgaaccacctaagggtgcagatttagcctcagggtgcagctcggatccctgggttcagcggaggtgggtgccgaagcccgaactgaattggcacgcaggtccctgcccagcgctgagccg

SEQ ID NO: 380240 - DNA, 122 bp, Homo sapiens
attctagtgatccaaagaatgagttcactcttcagtagaaggcagagaatccatatcctccgtagtataatggtcggcaacagctgaatccatagcctccgtagccacagccatagcccaac

SEQ ID NO: 380241 - DNA, 122 bp, Homo sapiens
gaagaggaaagaatggggaacgagtgacaccgggaccggagggcgagtcttccaggagcacgtctcggccttctttgcccggcccgaccggcccgacccgtgccgcagcgctcctccctccg

SEQ ID NO: 380242 - DNA, 122 bp, Homo sapiens
tccaccaacttctggtctgttggcaagtcaggtagatgcccaagggagctggcaggcacacgtgggtgcttcctgctccaccgggttctgtctgaggaacccagagatggttctccctctct

SEQ ID NO: 380243 - DNA, 122 bp, Homo sapiens
tggcgactctggccacgctcttaggacaaaggacatggattgacaagtggcgggcacggacggaggtgcagatgatgtccacggacacgacaagtccatgaggcctgggagggccccggcca

SEQ ID NO: 380244 - DNA, 122 bp, Homo sapiens
gtgcaggcggtgtcagctggcggcaagcggagcagcgaggcagggtagcttcatcacactcgcggcggatgcggattccgcgccgccccggctctagctgctcaggcgaccgccaccctcgc

SEQ ID NO: 380245 - DNA, 122 bp, Homo sapiens
cacctggccccgggctctggctgtattgatggggctgtggtggccacgcgaccagaaagccggggaggaagacctgcggttccgtgagaggcgtccagggctgcaggccacggcgacaggct

SEQ ID NO: 380246 - DNA, 122 bp, Homo sapiens
actacaggtgttcaccattacacccagctatttttttttttttttaactttcagtagagacgaagaatcgctatgtagatcaggatggtcttgaacttgtgagctcaagcagtcctcccacc

SEQ ID NO: 380247 - DNA, 122 bp, Homo sapiens
ccagccccacggtgctgagggaagcagaggctcggaagcggagggacctccccgagaacacggtgaatacgcgtcagagcaaacccggaacccgggcctattggctttgagtctgtccacgg

SEQ ID NO: 380248 - DNA, 122 bp, Homo sapiens
tgtgtgaccctgcttaaaaacgacagagtggttctgagaagcagtcccagcctaggaacccggggatccggcctgtggacccacgggcagggcctgcggggtgcaccggcgctttcgggcgg

SEQ ID NO: 380249 - DNA, 122 bp, Homo sapiens
tttcccaacgaaactcttctgccaggcggcataaggggcgcggccctccgctcttcagaacggctggtgtctgctttgaaaggtcctgactagaatctgtttatattttgactgcactggca

SEQ ID NO: 380250 - DNA, 122 bp, Homo sapiens
tggggctcagcgctggggctgggctgggctgggagaggtgtgcccagggagcctggatcccggtgcccttctccctcgtgtggagcggccagtgcggccagaggcgagctgacggcctggaa

SEQ ID NO: 380251 - DNA, 122 bp, Homo sapiens
gacaccacgatccgacccccaccctgaccccgacccagacccccaccgcccgaccccggccgtattccgttgcgtttgctccctgccagctccggggccaccactgagcacgcgctgtgagt

SEQ ID NO: 380252 - DNA, 122 bp, Homo sapiens
tagccgtgcccccagcctcttcccctgagcggagcttgagccccagacctctagtcctcccggtctttatctgagttcagcttagagatgaacggggagccgccctcctgtgctgggcttgg

SEQ ID NO: 380253 - DNA, 122 bp, Homo sapiens
gtgcctggctctcactgaaaaacaacacgtgctcacttgagatatttcagaagatacaaacgcaaagacaaacaaaaaaccacccagcacctcagtggtagatgcagttaccatcagcccgg

SEQ ID NO: 380254 - DNA, 122 bp, Homo sapiens
tgcccaggtttgcttagggcgtggcagcttcggataaacgcaggactccgcctggcagcccgatttctcccggaacctctgctcagcctggtgaaccacacaggtgagcagctggggcccct

SEQ ID NO: 380255 - DNA, 122 bp, Homo sapiens
tacagtacctgaaggggcagcgccacctccgcccgattgtgctggctgccccagtggcggcggtcacagctcgggcgccaatgacgcctcttataaaaacaacctgctcgcaggcgtctgca

SEQ ID NO: 380256 - DNA, 122 bp, Homo sapiens
tttgaggcgacggagatagcagtccatttccctgctctccatcgtcatgcgcccatttgtcgggttcggttcaaacagagagggcccgggtgaaaccccggccccactggaaactgcgctcc

SEQ ID NO: 380257 - DNA, 122 bp, Homo sapiens
cccccgcaggacagaaatgcaatctgcacacgtttgaggagcacagtttgaggcatttgacgcgtgcttgcctgaagccagcacatcctcctccgcccacacccgccagccacggatctgct

SEQ ID NO: 380258 - DNA, 122 bp, Homo sapiens
tattgtaatcaatgtggagagtgggaaaatgacctgccgcaggtcacatgggtctcagtccgatgttctcctgctacaccactagccatgtttgtgcaaaccataggcccagctgtctatgc

SEQ ID NO: 380259 - DNA, 122 bp, Homo sapiens
ccgtcacgcgccccgggtcacacgggggccgacaggcaacggtctccagtcctgggaccgcgtcccggccgcctggaagccagagccgttggtccaaaagggagaacaattgggggtgggag

SEQ ID NO: 380260 - DNA, 122 bp, Homo sapiens
cacactggggacaggtgggacctcctggagctgcctggggggcctggtgatgccagcctacggcagtcatactgcccacactgccaagagcccacatgggcaagggccaaagacctccagcc

SEQ ID NO: 380261 - DNA, 122 bp, Homo sapiens
ccagcttggaggtcaggaatgaattagaagactttgaaaagtccccactattcaggtaggcgatcctttccctggatgggcctcctgggctctttgctgagggtaaggacagcagccgctct

SEQ ID NO: 380262 - DNA, 122 bp, Homo sapiens
atacttggcagacggatgctggggcgggttctcttagaagaaatgccccccccattcccccggccccactcagctggaattgtctaagaactcattcttggcgttcactgcaagctataaac

SEQ ID NO: 380263 - DNA, 122 bp, Homo sapiens
gtccacagggtccacgagctggaggggcacggataaaaatgcttttcccacgacagagcgcgtgtggtgggctgactccggtttatctgtgagcacagaggtgtggcctgctcaccccacag

SEQ ID NO: 380264 - DNA, 122 bp, Homo sapiens
tacgagtgtgacgcgtgtgggaaagccttcagccagagcacgcacctgactcaacaccagcgcatccacaccggggagaagccctacaagtgtgacgcgtgtggccgagccttcagcgactg

SEQ ID NO: 380265 - DNA, 122 bp, Homo sapiens
tcagacctggcagaaataacagacatgttattggccacatactagacatgtcaccttaggcgagtaattttaactgttctgtactctgtttcctctctgttaaaaggatcaaaatgagtgtg

SEQ ID NO: 380266 - DNA, 122 bp, Homo sapiens
caccagctcctcagcagaggagcctgctagcttctgccggcagccgcagcacattcagagcgttgacagagcaggggctcctctcgctgtccctggaaggagtgcgcacacttccccgtgtg

SEQ ID NO: 380267 - DNA, 122 bp, Homo sapiens
ggcgctggaccgctcgagctcaggaaggtgcactctgcgcgccaggcttgggcttggccccgcccccggaggcgcccaatcagagagcgcagccaagcatgggccgccaccaaacgcacccg

SEQ ID NO: 380268 - DNA, 122 bp, Homo sapiens
gtgggcgggacggggcagtgggcggagctgagcctgcggggcacgtcgagcaggcggggtcgcagcgctgacggcctctctgcggctcccggttgggggcgtggctaagccagcggcggacc

SEQ ID NO: 380269 - DNA, 122 bp, Homo sapiens
aggtgtggcccctctgccctgaccccagcgctcccgccagccccgagccccatctgtgcccggctcctgggccctcctggagctgtccccctgccctgtgtgtgctttgctttcctgctcct

SEQ ID NO: 380270 - DNA, 122 bp, Homo sapiens
agggatgtgaccagaattagacttagccaagtaagtcccagaatttccaaaaagatgctccgcttcaatcatcaatagatttaaacaatctatttagagaaaatcatcctgttttcttctga

SEQ ID NO: 380271 - DNA, 122 bp, Homo sapiens
tttcctgccccttgggctgcccaccaggtcccctttctgctctgatcaagctggacaaaacgtcgtggggccacagcacagggggccaacgcaagctgggatcgtcagacgttaggaaatcc

SEQ ID NO: 380272 - DNA, 122 bp, Homo sapiens
gagtcggccctgcagcccccgccacgaacaagccccgggcgggtgccgggcggccgcaaccggctgcaggtcctgggactcaccgactttgtagggcagtttgtcagacatgctggcggcac

SEQ ID NO: 380273 - DNA, 122 bp, Homo sapiens
gtagtccccgaggtcacaaggcagtggcaggtgtctgtagtcctcgggttgactgcagctcgcggtggtccctctccgagcccaggaagccactccagtgccgagggagaggcctgggagcg

SEQ ID NO: 380274 - DNA, 122 bp, Homo sapiens
tgtggagtcctgcagcaaaggaagtgctcggcactgtgcagtgcagatccccaaatctctcggctctcaggagggtccccttccctgagcacctgcattctcacattcccccggggctggtc

SEQ ID NO: 380275 - DNA, 122 bp, Homo sapiens
gggcagccccaaactgaaatgtgagtgccagagtgcatcctttaagcgaggtctgccccacggacacccgctccctctgtgtccctgctttgacagatctatccatctggccatccatccgt

SEQ ID NO: 380276 - DNA, 122 bp, Homo sapiens
gggctcccgcccgcccgagccccctccccaaaatgcgaggcctgcacagtatgccttctccgcaaaacctcggcaagcgggttagtgaattcaggtcactaagaagctgagcccgcggaaag

SEQ ID NO: 380277 - DNA, 122 bp, Homo sapiens
gtaggagggccaagttgtttgggaaaagtaacccgagtttcaaagggctgacaggacttccgtcctcttttttttttttttttttttttttgagacagagtctcgctctgtctcccaggctg

SEQ ID NO: 380278 - DNA, 122 bp, Homo sapiens
agtcttctgcctgctgcttacagcccgagagcccttttccgagagaacaaaatctttgaccgttgccctttctcgccggagtttgctcgtgtcttctgatgaactgtgatgtctcacctatc

SEQ ID NO: 380279 - DNA, 122 bp, Homo sapiens
aggggaaatccaagcagtacatctgctatggggtacatggatctaagaatctgaccatcacggcttaaacaaataagatatagtttgctcatgcgacaagaaaagaggaagtaggcaaatat

SEQ ID NO: 380280 - DNA, 122 bp, Homo sapiens
cgctcgggggccagcgcgagttccgggtgggcgtgggctcggcgggctccgcactcggagcggtcgccccacgccacaggccctgggcagtaagaggcttagcagctgcggaaggtgtgcca

SEQ ID NO: 380281 - DNA, 122 bp, Homo sapiens
gccgcgcctcagtactggaggcctagagtccatctccgcgaactgggggctctcagggcccgcagaaatcccccttagccctccgaggcccctggaaggagtcgccccgggagaggaaatca

SEQ ID NO: 380282 - DNA, 122 bp, Homo sapiens
cggcatgtcgggaatgctgatactgtgaaacccagtcattgatggctctgggtccctgcccgccacccccaggccccggccgtgggacatctgctccctcactccactcgccacacccctca

SEQ ID NO: 380283 - DNA, 122 bp, Homo sapiens
aaacagacattggttctctttcctcttcccattcatacatttctgttggagtcctagggccgccgcgccgggagtcgcaatgaatggatggatgcccgcgcgctgggaccaccaggtccgca

SEQ ID NO: 380284 - DNA, 122 bp, Homo sapiens
ttgagtgcctcgaagttttcaatgatcattttagaaaccatccacagcggccctaaggcccgtcacactcctccgcccgcccaggtcgcggccgctacagccgccgctgcccccgccccctc

SEQ ID NO: 380285 - DNA, 122 bp, Homo sapiens
gcgcgtactgcgggccccacgggtgttagtggcgggggcggcagagtccgggtgggttgtcgcgacggagccgggcctcttcgccgtcttgagacggggctggcgagaagggcccctcacgg

SEQ ID NO: 380286 - DNA, 122 bp, Homo sapiens
agcctagcaccgctgagcaatgcccccagaccccagagccagcggggggcggagtctcaccgctcaccatcatccatgggaaccaatcactaggcaccgccgcgggatgccaaccaatcccc

SEQ ID NO: 380287 - DNA, 122 bp, Homo sapiens
gggaaggcgcatctcctcgattggagagcgcgctgctagcaagggggtgggcttgcttggcgaacgcgcagtggcaccagttgcatgttaggcgtcagacagctgctggttacttggcacgc

SEQ ID NO: 380288 - DNA, 122 bp, Homo sapiens
aacgtgagggaggcctgggcaccacgaggccaggttccggcaggggcatctgtccacaggcgggggtggagggaatggccggcctcacaccatctgccaggtgggcccagatgtctgtgaac

SEQ ID NO: 380289 - DNA, 122 bp, Homo sapiens
aaaaccagaagctagaaagagggcatccgggttgtgcaaatttcagacacacggatatcccgtggcgcctgcgtccggagcccggccctgctgctggactgtccccggccacgcccgccgcc

SEQ ID NO: 380290 - DNA, 122 bp, Homo sapiens
ctcaagactccagatattagaatgatcagataaacagtacagttggccatactctgtttccgtgggttcagcatctgtggattcaaccaacctcagatgagaaatactcaggggaaaaaaaa

SEQ ID NO: 380291 - DNA, 122 bp, Homo sapiens
ctctctgaatgcagatggaaacgatgacttaactgcagcttcggatgcatcagacacaaacgctggataaagctgctcattcacataaagcaccacctgctgccgctacctggaatatccac

SEQ ID NO: 380292 - DNA, 122 bp, Homo sapiens
agagtaagggaaagctcttttcattggcatcctgggccagtgccatgcagtaaacccctgcgagggaattgggcagaaggagactgcagatgcaggttggacgcgggaagatcggtgaaagg

SEQ ID NO: 380293 - DNA, 122 bp, Homo sapiens
ttgggagaccgcccggccagtggctgccctaaagccggctctccagggccgcggagccttcgctcccttcctgaatgccttttttgttgggaaacagtggactgtttctgaaggcctgcata

SEQ ID NO: 380294 - DNA, 122 bp, Homo sapiens
gcagcagacactttcagcagacgctcactgcgatcaacaagtgcgcggccgcgggctctgcgcattagctactactgtgtgcccgctctcgggagacgctcctggaagactcggaactctgt

SEQ ID NO: 380295 - DNA, 122 bp, Homo sapiens
aagagcacagcatcaggaggccaggcttctaatgcggcgcagtctacagcgctgtggactcggcaactcccatcacctgccgctgcacaaacaccctgcttgctgcccccatagaccgaccc

SEQ ID NO: 380296 - DNA, 122 bp, Homo sapiens
tgataactagtacagcacagagggcaccacctaagagtgggtgggtgcaggcagatggtgcgccaaagcaggatcctggaggacactcctctcactatgccgcatatgagcccttcagaagc

SEQ ID NO: 380297 - DNA, 122 bp, Homo sapiens
gcccagaccccactgatgcctgacagacacctgtgcagaaacaaggatgggtcagcagcacgcctgcacctgccagggagtgactcaccctgactcacttctactcccgccgccagtttcct

SEQ ID NO: 380298 - DNA, 122 bp, Homo sapiens
acacacacacagacacacattgtcaaataggggcctagctgcacacaggagccaagggaacgcaggccctccctctctcccctcctacatcacccccacgccaactcacacaggctacccaa

SEQ ID NO: 380299 - DNA, 122 bp, Homo sapiens
gttatgccttgatcagccccatcttgccctggtcacatttgacttttttcacataagctacgagcatggaactgagaaagtcctgtatagaggttaactatagagttgcccggccacacctt

SEQ ID NO: 380300 - DNA, 122 bp, Homo sapiens
tgtgggacaacgctctggtaagcacccgaggcaagaggtcccagcaaggtaatgggacagcgttcggtcacagagagtgagcgagccagcgagagatattcctgggtggaggggtggggacg

SEQ ID NO: 380301 - DNA, 122 bp, Homo sapiens
ataatgaagatgctgagagggagaggtaattgtgtgaagaacaagagctgagtgtggaaacgaaaaactaagagggagatttgcttctttgaggaggagcactttttatttctccaaggcta

SEQ ID NO: 380302 - DNA, 122 bp, Homo sapiens
cgaagcccaggcgcaaatgcctcgactccccgcgccccgagtccgccgctcctcggccgccgcctcagccgccgcccgaagtttggctgaaactttctcgggtgtgcaacgaagcagcctcg

SEQ ID NO: 380303 - DNA, 122 bp, Homo sapiens
ttcatacattttagggggacacaaggcatcaatcaatacacataagctgtacattggttacgcctagaaaggcggaaccaccggaagcggggatgcttccaggtcataggtggattcgaaga

SEQ ID NO: 380304 - DNA, 122 bp, Homo sapiens
aggcagcggtgagtcctctgctagcagatcgggctcaatatccccattccctgttttctccgggcccgccctccgcctctcaggcggccgccatgaagatcctctgccgcggctgcagccgg

SEQ ID NO: 380305 - DNA, 122 bp, Homo sapiens
tcatctgagtggccttcgtcctcaatgcagccagtgtcaaggtggacacgcacacggctccgaagtcctgtgtgacgcccacgtgacctcatgaggctgtgtgatgtcacagcgggcggggt

SEQ ID NO: 380306 - DNA, 122 bp, Homo sapiens
tcctgccaggtcaatccaagaagcagcgtgcttggctatgacaagacagaacttcgcattcggagttcagggcacccctgaccccgcccccttttcggggcacctgcggctcctgttggcta

SEQ ID NO: 380307 - DNA, 122 bp, Homo sapiens
cctgaaaccctgggagagacttgggtcatagccaagatggcaggtacctacggagggtcccgaaatacacttcccagaagtccaggcggcaacttccgctccagggtgccaaggtaggtcca

SEQ ID NO: 380308 - DNA, 122 bp, Homo sapiens
aatgaaaggaaatcggagaccctcactcacacagccgccttcccccaacccagcggctgccgtgctaaacagcacagcactgcagcttctgtccccggatggaagagagatgccggatcaga

SEQ ID NO: 380309 - DNA, 122 bp, Homo sapiens
gtcaaggtcatcgaccggctgagccgggacgagctggtcaaggtgaggcctcgccccgcccggctttctcaagcccaggtgcaccccgaccctgccggccgcccctgcccgcgccagacctc

SEQ ID NO: 380310 - DNA, 122 bp, Homo sapiens
ttccgtgtaaaaccacagtgtgactgtatttcctgcacacactttgcatcccacacagcccggacacactgcagcactggaggggcacaatgccttgctttaaaacatggctcagaagaacc

SEQ ID NO: 380311 - DNA, 122 bp, Homo sapiens
atctttgtccttgcccgaagatgtggatgtagtctactatccagccatcccttcctgtaccgccatgatcctgaaagtgggcaagagaaagtgggcaagaacactgtcagccacaatgctga

SEQ ID NO: 380312 - DNA, 122 bp, Homo sapiens
aatgtccttccatatcatcttttctggtaatgtcctttaaggccaggctgaaaagttgcccggaagggcccccttttcctgcctgcaactgtattcctgtgatccggaagttgcctaggcca

SEQ ID NO: 380313 - DNA, 122 bp, Homo sapiens
gcaaaaagggctatgatgaccaggcagcattgagcaactctgactccgccttcccctcttcgcacaccttctggttactgaaaacccagcgttagtagaaaagtttcttttctttgaatgac

SEQ ID NO: 380314 - DNA, 122 bp, Homo sapiens
tggagttttcaactcttaaacaggccatgtaagtcatttatttgttcagccagcatttagcgagatcgttctgttttagcattgctacatattaggactacatggatgattcagatggaatt

SEQ ID NO: 380315 - DNA, 122 bp, Homo sapiens
gtgaaggccgtgtggccgggcgtgtctagcactaggcacagcactgcacccgtgtggccccgcagcgtctggtggcagcagccgctggccacctgccacaccttggctgtgccatctgtgct

SEQ ID NO: 380316 - DNA, 122 bp, Homo sapiens
gctagcatccagtcccccagtgcagaagaaagaagctcagtttcccaaatgggcaaggaccgctactggtagacagataggtaagtaaaagaatcattggccagacgacctgtatggattca

SEQ ID NO: 380317 - DNA, 122 bp, Homo sapiens
ctgggagacagagcaagactccgtctcaaaaaaaaaaaaaaaaaaaaaaaaagaatttttcgacagtgacagcagagtattaaaccaaatgcagggctcttagcatgcggctccgtgtgtcc

SEQ ID NO: 380318 - DNA, 122 bp, Homo sapiens
acccgccccccgccgcacttgctccattccctacctgcagtgggaggccgacaacggaaacgcaatgtcagtttccgcggaagagacccgcgccccgaacctgtagccagaacgccgaagca

SEQ ID NO: 380319 - DNA, 122 bp, Homo sapiens
cgctggaagggaagtttgcgaaccagaagttcagtggacttctgataacgtctaatttcacggagcgccacagtaccaggcctgtaacgatgaggtttcttcacccctccagtagagggcgc

SEQ ID NO: 380320 - DNA, 122 bp, Homo sapiens
ataacgcgcgttgtgacttggcacaaacttgggtgccgacggcaagtagggcagccgagtcgcaccagcgccccctccacgcgccgcgcccagcaagcgagtggtggtaactcgatggcggt

SEQ ID NO: 380321 - DNA, 122 bp, Homo sapiens
tcattcagacgtctgtaaccagagccgccgggctggctaatgcgcctaatagggatggaacgagggcagcaaatgggcgtgcgtgagcggccgggctgagctgggtggatggtggatgggga

SEQ ID NO: 380322 - DNA, 122 bp, Homo sapiens
gcccagtcctcgccgcccaactttgatttaggaggtcgcctggtcccgccccctgccctacgccgctcccccgcgcagccctgcaaatcaggctctcagctattggctgcctcggtggccag

SEQ ID NO: 380323 - DNA, 122 bp, Homo sapiens
gtgagagccccgaaggcaagaggatcccaggggctggcccagcacggagctggtagacagcgcgctcacaccagggagggctgcaccctcctttctcccgtctgtgttttctttcccttgca

SEQ ID NO: 380324 - DNA, 122 bp, Homo sapiens
gccaggcttcaaactctagatccccgagtctcgagctccagctgggtgtcgagacgggtacgggccggccgcgcctcgcgcatgcgccctaggcccgcagggccccgcgctggaagctcagc

SEQ ID NO: 380325 - DNA, 122 bp, Homo sapiens
ggagggggaggatgggtttgcaggatgattcaggaatcagcagaaccaagtctttggcatcgtgaaatatcttattggaagaggctgagccagaggtaccaggacttaatccaggtaggtgg

SEQ ID NO: 380326 - DNA, 122 bp, Homo sapiens
gttcagccctgtcccaggcacctctgggcgggagggtggagaatccgaaagaaagaggcccgtccctggtcctcaaggtcgtgccaacaggccaactaagccatgtcccaaattgagagcgg

SEQ ID NO: 380327 - DNA, 122 bp, Homo sapiens
ctataacaaaataccatagacttggtgacttaaacaataaatatttatttctcatgattccggagactgggaagtccatgattaggatgctggcagtttcacacttggtgagagctctcttc

SEQ ID NO: 380328 - DNA, 122 bp, Homo sapiens
aacctccaggcaagggctggagccagggctgcagagcattcctcggctcagctggggcagcgccgccccatcccccagtggtcctcatgtggaggctggcactaggcggggttttcctggca

SEQ ID NO: 380329 - DNA, 122 bp, Homo sapiens
caccaagttgggtgtgacttctcagaaactcagtttgctcctctggaaaaagaataaaaacgctgacctcggaaggtcgttttgaggattaaagacatgaatcagtacaatgcctggcataa

SEQ ID NO: 380330 - DNA, 122 bp, Homo sapiens
aacccgccctgtgctgggtgaagcggggggccctgcacccggaggagatcgatcaggggccgcctgtcactctgggggtccatggccccccggctgtggctggggaggtctctggaggatac

SEQ ID NO: 380331 - DNA, 122 bp, Homo sapiens
agcgcagccccaaggaggcattggtgatttgaagcatcagctcctgctgtggctggaaatcgagctcggaagatgtcagttgcagctctgtgaccttcaccctacaggaggcctcagggtca

SEQ ID NO: 380332 - DNA, 122 bp, Homo sapiens
tagggtgctccgggcctagcctttgccagtgaggtccaacggctgcaggaatgggggcagcggcagctcgtccagggcctcggggaagcggcctggagagatggcggtgaccagcacctgca

SEQ ID NO: 380333 - DNA, 122 bp, Homo sapiens
atacagaagctccacttcctagtccgccaattatcatttccggtgattttctaggaaaggcgtcaactctctggtctaggcgttcccttaaactctccgccctcctcctcgcggctcagcct

SEQ ID NO: 380334 - DNA, 122 bp, Homo sapiens
cctgccgcgcctctgcgcatgcgtgcgcggtccgcccttcactgcgggtgtccctcccaccgcctccagctggtgcctccgccgggctagaccatttgccactttacactgaggggctcggg

SEQ ID NO: 380335 - DNA, 122 bp, Homo sapiens
ctgggcccgggggaccactaccatcaagacacggagatgggtagtggccccaaatggttgcgtgcactgttatttattgcatacaagacaaggggggcagggtaaggagggtgagtcgtcca

SEQ ID NO: 380336 - DNA, 122 bp, Homo sapiens
actcacccagctgatggggcacagcgagtggtacacgcggaaatagtactcgcagggctgcgtgctcttcccgcggcgggtcctggtcttgaggcagcggtggtagtctgtggcgggcgggg

SEQ ID NO: 380337 - DNA, 122 bp, Homo sapiens
cggggctcaccggaaggcgcgggggttgaggccggcgtggtgtggcagcatggtggtcagcgcgttctgcagcatcagcagccgccggtaggtcttctcctgcatgggcagcagcagcccga

SEQ ID NO: 380338 - DNA, 122 bp, Homo sapiens
ccggtgtctggggagcggctgccggccgggcccgcgcgagccgcttcactcctacaagcccggctcactagttccaagctgctggactttgaccctcgctgggaagcttgatcgccgcctgt

SEQ ID NO: 380339 - DNA, 122 bp, Homo sapiens
ctgagctcctaaacttctggtttctatccctaaagttggagaaccactgctccccaaacccggtggcattatctgccctgctgtgccgctaggcagtgttcggcaccctgaaagagagcccc

SEQ ID NO: 380340 - DNA, 122 bp, Homo sapiens
gacgaaactgattaccactagcctctctgtatcagagtcaagatatggggtggatgagtccgttccccaagggtgtgctttggagccactgccacagagctaagaagcccctctgctagaac

SEQ ID NO: 380341 - DNA, 122 bp, Homo sapiens
cctctccgggcccagaagctcctcaagtcagcctctccagacacacttgcagcctcccggcgtcctctccgggccgaactcttcctaccggcagcctctgcaggaccagactgtcgtcaagt

SEQ ID NO: 380342 - DNA, 122 bp, Homo sapiens
aaatttacattaacatccttattgtcttcaacacaagattcagtgaagacacagtcccttcgatcgtaccactttgcaaaagcaggctgcattgtgaatgcggcagggggacgggcgaacgg

SEQ ID NO: 380343 - DNA, 122 bp, Homo sapiens
cctcccctaaacctgttgagaatccctgactaggaggaaacactgagcggtttgctaaggcggattgcccctgctatgcatgctgcccatagatggagtggacttctttcgagaagcccagc

SEQ ID NO: 380344 - DNA, 122 bp, Homo sapiens
atgaaaaatgtggggttttgtttgttttttgttttgtttgagaaagggtctcactcccttcggccaagctggagtgcagtggtgagatcatgattgactgaagcctggactttctggactca

SEQ ID NO: 380345 - DNA, 122 bp, Homo sapiens
gatggaaatgtaaagtggtacagccattttggtaaacatcattgctctctgacaaagatacggtgggtcccactgatgaactgtgctgccacagtaaatgtagccactatgcctatctccat

SEQ ID NO: 380346 - DNA, 122 bp, Homo sapiens
ccaagggaagagacagtaaacatgtgtctatgctgcaggcattggagggatttgggtgagcgtggtggttacccacaaacttgagaggcgtgagttgtgttggctcctgcctgccatgccca

SEQ ID NO: 380347 - DNA, 122 bp, Homo sapiens
tatatatataatttattgagtttttacaagatgtatttgttgtagacttaacacttcttacgcaatgcttctagagttttatagcctggactgctacctttcaaagcttggagggaagccgt

SEQ ID NO: 380348 - DNA, 122 bp, Homo sapiens
gccccaccccaggaggaggcgggacttcctcaccgcagagtggctgcttccggtagaatccggaagcctgtacggagaaggggcggggccaaaactgcgcgcccaatcggggtgacgctcta

SEQ ID NO: 380349 - DNA, 122 bp, Homo sapiens
gaaggggatgttgcagggcggcggcacaggggtgtggggcgccgtgttgggagtactgagcggccccggcgcgctgctgttgcggcgcagctgtcgactcggtcgcgcggagggaattgagc

SEQ ID NO: 380350 - DNA, 122 bp, Homo sapiens
aggccgaggtagcaggatcgcttgagcccaggagttctagacaatcctggggcaatatagcgagattctatctcaaagaaataatcataatcataataaaaataaatgaatagataagctga

SEQ ID NO: 380351 - DNA, 122 bp, Homo sapiens
ctctcaaagtccttttaccttttctgttgttactttcccttctctctcccaattaaacgacgcaggatgtgtgtgtgcgtgtgcgccccctcccccgccctttatctgtggcaagaagtctt

SEQ ID NO: 380352 - DNA, 122 bp, Homo sapiens
ggccgccgacctcggccggccgggcgtggggccaggcggcgacggcggcgggcgggccggcggcctggggccctacctgaggctgtgtaccagctcccggcgtgactggcttctcggcagac

SEQ ID NO: 380353 - DNA, 122 bp, Homo sapiens
gcaggaataggactcagtttgcctcaaatctctagaagctctgggacttgctggagctcacgtagaagggaatagctaactgtgcccatctttcccaactctgtcttcaatgacttcatgtt

SEQ ID NO: 380354 - DNA, 122 bp, Homo sapiens
tgcgctcacactccttagcccttgggcggtcgatgggactgggggccctggagcagggggcggcgctcgtcggggaggcttgggccgcacaggagcccacggagggggtgggaggctcaggc

SEQ ID NO: 380355 - DNA, 122 bp, Homo sapiens
ttcccagagtgtaagggggccgggcagaggcagtcctcgattcgcagacaggatggcagccgggcagaggcgctcctcacttcccagacagggcggcggcctggcagaggcacttctcactg

SEQ ID NO: 380356 - DNA, 122 bp, Homo sapiens
cggcgcaggtgacccagaacaggggctgtgggaggttaagggcttgctggagccaggctccggggctcctggaggaggggagaccacaggaagacctggtcctggagggtcctggccccgtg

SEQ ID NO: 380357 - DNA, 122 bp, Homo sapiens
aatttctttattaaatctcttttgactcatttgttcattcatttggccattcgacaagtgcgtactatgctgacagaggcctgataaactattgacacattttggaaaatgcaaatttactc

SEQ ID NO: 380358 - DNA, 122 bp, Homo sapiens
tcccagttgcttattactataaccttggtctttatggtcaatgctgaccccacctggactcggcagccaccagtcttgcctcttgcctagccctgattttgtgtttcattttctgtcattgg

SEQ ID NO: 380359 - DNA, 122 bp, Homo sapiens
gccaggccccacaggtggccccagaattgcaaagccaatggcagcttcctaagtggtcaccgaaacgcactttcagtgtggacccgccggcctgtgtgtattcagcaatcccagccatccaa

SEQ ID NO: 380360 - DNA, 122 bp, Homo sapiens
cccaacccaccccatggccctgatcctaatggcaacctgatggcctgagaccagctgcctcgctccggaacaggcacagcgatgccctgtgcaggaagaagggcggagcagggtgaccagat

SEQ ID NO: 380361 - DNA, 122 bp, Homo sapiens
gttcagtccacggtaagttaagggcaggagattttggaaatagggagtttagaaggagagcgtttttaaaatggagttgaacatccacctggagataggcactagaactaagtgaggatact

SEQ ID NO: 380362 - DNA, 122 bp, Homo sapiens
gcgtttgcaggtcctttcttcacaggtttgaaccgtgtagttaatgtggcagacacataacgctgtgctaaaacattctcatggcttattttcactggattcacagtactagagtcaacagc

SEQ ID NO: 380363 - DNA, 122 bp, Homo sapiens
gtgttttcccttccagtcccgcggggccgaggccccagagccctcccgggctagcagagccgcacttcgtcgtccactcccctggccggtgcagggcacttggaccaggtcctggggtcttg

SEQ ID NO: 380364 - DNA, 122 bp, Homo sapiens
gggacagattggagatgacgtgggtggggtgggaggattcaaggagggtacgcgcctggccggactgggatgactctgcggcaggcctgggactccctcaggccgacccaggcttcccaagt

SEQ ID NO: 380365 - DNA, 122 bp, Homo sapiens
ccgggtgattgctactcggagcagcgggagtactattgggagtattattcacaccgatcccggccccgccgaggctgctgttcaggctactgttgatgcaaatactactgccattcgcggca

SEQ ID NO: 380366 - DNA, 122 bp, Homo sapiens
ctcctgaagctagcaagaccatgaatccacggggaggaacgaacaactccagacgcgccacgttaatatctgtaacaccccgtgcgaaggtctgcagctgcactcttgaaccagtgagacca

SEQ ID NO: 380367 - DNA, 122 bp, Homo sapiens
gaagaggagagcttgctgtagcacaaattgtaaagacaaagcgttcatttaaaaaacaaccgaatgggtccatatttacttggagaaaattggagttccataccttcaggaaaaaaaaaaaa

SEQ ID NO: 380368 - DNA, 122 bp, Homo sapiens
atcaaggccattcctttcccagcctcacggtgagctaactcttctccctccaccctgcaccgtacaaatgtgccggtaattatagcaacatgagcaccagatgattcatcttggagtctgga

SEQ ID NO: 380369 - DNA, 122 bp, Homo sapiens
agagctcccctgtgggatcaggctgaggctggcactttgcctggggtggcactccacttgcgttcttccccctctctatctggctttccctggaagtattttctaagtaaatcacttacacc

SEQ ID NO: 380370 - DNA, 122 bp, Homo sapiens
ttgctcatcttggatggcttctgggccaaaactgcagtcactgaatgaccaagagcagcacgaaggacttggaacctatccttgtaaagagttccttgatgggtaatggtgaccaaatgcct

SEQ ID NO: 380371 - DNA, 122 bp, Homo sapiens
cgccgcgcaagaacacggttatttctcagctggaattgtaatgagggcaaaacacattggcgctctctggcacccaggtggttgcggacgccttggcgaaggctgtggctgagaacttcttc

SEQ ID NO: 380372 - DNA, 122 bp, Homo sapiens
tgctggccgaaggcggcaacaggagacttcaccgctctcgatacacctttctggtctttgcgtttctctaccttccctgtctttcttgtctctctccatcagtggagacaccgtctcccggg

SEQ ID NO: 380373 - DNA, 122 bp, Homo sapiens
tccttttgtgtgcacagctggtttctctcagtaaagcgcgcacacactcgcacacacgcgcgcgcacaaaacttcagccccaactttggtcggctttagggtcccatccctgaggcagcctg

SEQ ID NO: 380374 - DNA, 122 bp, Homo sapiens
ctgctctcctctccctctgcaggagcaagtcccagtctgagatgagcctggagggcttctcggaggggcggctgctgtcgccagtggttgcggcggcggcccgccaggacccggtggagctg

SEQ ID NO: 380375 - DNA, 122 bp, Homo sapiens
atttgaaggtgattagtggagcttttctaagcctcctccacttaacaaaagtgaacactacgcagagttctgagaagggaatttttattccagttcctggtgtcttctattttattctaaat

SEQ ID NO: 380376 - DNA, 122 bp, Homo sapiens
gatcaggactcactgcagccttgactcccaggctcagtagatcctcctacctcagcctctcgagtaactgggaccacaggcgagcatcaccatgctcagctagtttttgtatttgtagagat

SEQ ID NO: 380377 - DNA, 122 bp, Homo sapiens
tggacaagtgtacagcaaacccagggtgaggccacatgtttcaggtctgatgggagctgtcggagggctgggtgcagcctggaaggaatgactcatttcccgtgctggcaggctaggggcag

SEQ ID NO: 380378 - DNA, 122 bp, Homo sapiens
cccctcctttcactgcggggactcggagctgtgggactggagcgcgcaccggcagacttgcgcgcaggttggagttggcgcacacccgcgccagccggggagcggcgtttacgcactggtac

SEQ ID NO: 380379 - DNA, 122 bp, Homo sapiens
ctctggccttcctctaacagccctgcttctgttaacacagcctttttgcagcttccttgacgtcattggctacaggctacagctgttgctagtcaaaggcattgttcctttgagctagcagg

SEQ ID NO: 380380 - DNA, 122 bp, Homo sapiens
ggcttgtagctggaccaggcgtgtggcaagtgactcccacagtggactcctgcgtccaggcgaggggaacaccgtggcgcccgaagagcaacaaccgcgaccccgaagcccgagaggggatg

SEQ ID NO: 380381 - DNA, 122 bp, Homo sapiens
ctgggcctgtgtcactggctgcggagggacaagtgagaggtcaggcgcaaacactaggcacggggcccagtccatggccgcgatcagacgagccgggctctctcagggagcgatgtgcgccc

SEQ ID NO: 380382 - DNA, 122 bp, Homo sapiens
agaaaggaggtttctgccgggctgggggcgggagctacggcttctctggggacgcggaagcgagaagcagggaccttggggcgcgcccggttttccgggacggtgccccggcccccagccca

SEQ ID NO: 380383 - DNA, 122 bp, Homo sapiens
caggatgatggctagaagctccacctagaccccaaggtaccagaacaaagtagtgtagcccgggctctgaaaagcccagactctaaaagctacatgtctaagattaaaaatcttagcttttc

SEQ ID NO: 380384 - DNA, 122 bp, Homo sapiens
gggcgtccgccgccagctcccgcgcccgcgtttcttccaggtctacggaagcagtgccatcgtgtggcggcatcttgcgttagacctgtttttagttccaggctctttccctgttaaatatt

SEQ ID NO: 380385 - DNA, 122 bp, Homo sapiens
ggaagcaagctgcactatattacataatttttcacctccaaagcaatgttcccattggaacgactacctgaaataacccatccagacccctactaccctgtgaccttgggttaggcagtgac

SEQ ID NO: 380386 - DNA, 122 bp, Homo sapiens
ctctggctggacattgatgccttatgcatggaagccatccaaatcctgactctcttgtgacggttgtatgagttaatagaaaagccttgaagagttcccttataacataattctctgctgaa

SEQ ID NO: 380387 - DNA, 122 bp, Homo sapiens
gaaagtaatggatataaaggtatttcataaattgcaagcagctacccaaaggtaagattacgtattatcatctttaccatagttgtgtaccctacagttagtcaataaatatgtgctgattc

SEQ ID NO: 380388 - DNA, 122 bp, Homo sapiens
cgctgagtgtgcgtggagcctatgagggtttgcaggcgcgacctgcatgtgtgtgaaacacgggtgcgtgcactcaaagtcttatggggcacagagggcatctgctcagtagctcacatgac

SEQ ID NO: 380389 - DNA, 122 bp, Homo sapiens
tttagggctgtgtccccctccttctccgccttcaccggggccacctgagccaggctccggcgccacaccctgaggagccctagctctggtatttaacctgactgtgctttatctctgaagcg

SEQ ID NO: 380390 - DNA, 122 bp, Homo sapiens
ggatcaggcgcggcggcacccccaggccaggggcacctctggtggggcagaaggtaacaccgtcctctaggctccacgcccgagcccgggggaggaggggagtgcccgtgtccgtgttgggg

SEQ ID NO: 380391 - DNA, 122 bp, Homo sapiens
agctgcgtgtccgaggggcagagagagaaacagagggggacggggcaggcgcgctgggcccgcccccccgtgcctggggcagcttctcattggtgaaacctcctccccggccgcccgctgct

SEQ ID NO: 380392 - DNA, 122 bp, Homo sapiens
gacttctcagagtcattaacaagttaatccacatcatgaatttctaaggagtatatggttcgcagagtttcccaaacatattaaaccacagagctccactcaaccatcgttttgtggatcat

SEQ ID NO: 380393 - DNA, 122 bp, Homo sapiens
gcccggatcggccgcggcttcggcgcctggggctcggggctccggggaggccgtcgcccgcgatgctgctctccaagttcggctccctggcgcacctctgcgggcccggcggcgtggaccac

SEQ ID NO: 380394 - DNA, 122 bp, Homo sapiens
ggggctatcttaatccaactcatcattgtttcactcatttattttgcttattctttcccacgagaataaaagattgacgaaggcaggaactttgtctattttgtttgctccttatctctagc

SEQ ID NO: 380395 - DNA, 122 bp, Homo sapiens
aggtgcggggctcgggggccagcagcctgggtggctctggctggctctggctggctcggccgggagtgaggagagtgtctcagccactgccgctctgccaggtgccagcaatccacaacaat

SEQ ID NO: 380396 - DNA, 122 bp, Homo sapiens
gagaaatcagaggatgtgcagtacttcgacatggaagactgtgtcctgacggccatcgagcgggacttcatctcctgccccagacacccggacctccccgtgccgctgcaggagctggtccc

SEQ ID NO: 380397 - DNA, 122 bp, Homo sapiens
ttagagattctgcggcaggagaaggggggcagccgaggcgaggaggtgggcgagctaagccggggcaagctctattccttgggcaatgggcgctggatgctgaccctggccaagaacatgga

SEQ ID NO: 380398 - DNA, 122 bp, Homo sapiens
caactgctccaagcgaagtgcacagctgtcttgcctaaagaggcctatttatagtagcctcgggtagtctggtctgggctttctcattgggtacaagtaaaggaacgaaatagccaatgaaa

SEQ ID NO: 380399 - DNA, 122 bp, Homo sapiens
gcccccagccagtcccgggatccacggcgcgcgcccctcccagccgcgcgcgcccgcctgcggtttgtctgcgcagccctggaggctgcgacttccggactgctcctggccgcagggggcgc

SEQ ID NO: 380400 - DNA, 122 bp, Homo sapiens
ctaactcagcccggctggaccccgctgcttaacggggggtcctgcggcaaagaaagtggacgggttgccacttctgtgcctccccatcaggtagcctgggctataaggggctctcagaccag

SEQ ID NO: 380401 - DNA, 122 bp, Homo sapiens
acggtaaacaccactgccacggtgtctacacacacgggaacacggtaaacaccactgccacggtgtctacacacacgggaatgcggtaaacaccactgccacagtgtctacgaatgcagcag

SEQ ID NO: 380402 - DNA, 122 bp, Homo sapiens
gccagttcccgaagcctactccttccgtcctctccccgcccacctccctctcattcctcccggcacgcgcggagagggactgtgattgttcactttacacgtcactctttgtgacgtccccg

SEQ ID NO: 380403 - DNA, 122 bp, Homo sapiens
aaatccagtggcttgtgtttcagctttggttacgtggcagaaaccaactggaagtggtggcgtgagagctctgtttcttctagaagagctttgcgtcttaaacgcccataccgcagacagct

SEQ ID NO: 380404 - DNA, 122 bp, Homo sapiens
atttcctatgcttccagtgactgtcaaaacagtataaagggcaccatagtgtcactgtcacgtttcatagggacattagttttaacttccctgtctggatttctggttttacagaactttta

SEQ ID NO: 380405 - DNA, 122 bp, Homo sapiens
ccccttcctggagtcccggcgggacgggagaactggggactctgcgaaagcgctgcggagcgtccaagagctccccgtggagctgaggcaggaagaccgcgcactggctgagaccccaggag

SEQ ID NO: 380406 - DNA, 122 bp, Homo sapiens
ctccagggctgccgacgtgagccgaactgcacattgggaactgtagttgagtgggaaagccgagaggcgggggccgcacacgcgtacaggggccccggtcaacaaagacgcgccgtgcgcgc

SEQ ID NO: 380407 - DNA, 122 bp, Homo sapiens
tgcctgcggtgcgctgggacaccctcgaggcggctcagcgcccgcggttcccagcgcgggcggggccgcggcagaggttcccaaaccggttgcacagaaacagcgccaccccctactgcccg

SEQ ID NO: 380408 - DNA, 122 bp, Homo sapiens
gcgcgtctgggagaagccagggctgtggtaaccgtcgtgttttctgtccctccccagagccgacagctcctttaatttcatggcgtttttcttcatcttcggagcccagtttgtcctgaccg

SEQ ID NO: 380409 - DNA, 122 bp, Homo sapiens
atcggtgacttctctaatgatgaataaagacggcttcctgggaggcatgtctgtcaacaccggcgaggtgttttgctccgtcccaggccgtttgtctctgctcagttcaacttcgaagtaca

SEQ ID NO: 380410 - DNA, 122 bp, Homo sapiens
gaggactctggcagttttgaggagggctgctgagggtttttgcctgatgttttctcatggcgatactgggcttatggggttgagaaggaagcccatgaggtgaagtgtcctcaccacatcct

SEQ ID NO: 380411 - DNA, 122 bp, Homo sapiens
cgggtagcgacaagcagcagcagcagcaacacatcgagtgcgtggtgtgcggagacaagtcgagcggcaagcactacggccagttcacgtgcgagggctgcaagagcttcttcaagcgcagc

SEQ ID NO: 380412 - DNA, 122 bp, Homo sapiens
gggaaacacacataggggctggggtgggcggggctgggctgatgacccagcttcctttcacggctgcaggcggaggggcagggcccctctgctgatgttctagtgttcttcccggggtgtgg

SEQ ID NO: 380413 - DNA, 122 bp, Homo sapiens
gtggtgggcgcctgtagtcccagctactcaggaggctgaggcaggagaatggcgtgaacccgggagaatggtgtgccccgagcctacttcccgcgcagtcctccaagacgcggcctccagca

SEQ ID NO: 380414 - DNA, 122 bp, Homo sapiens
atgcggtcaatcttgggtgcctccatgcggcagctgcacaggggcaactcctcaaaccctcgctctgtctccagcgaagatgtgtcattggacaccccttggatggaggaaaagaggagctg

SEQ ID NO: 380415 - DNA, 122 bp, Homo sapiens
gccatggtcgcagcggcggccattccccgcagcctcacttccggcaactgtcagtcccggcgagtccgttccccggagtggagctacaagtcccaaagggtcttcctcagcgcgaaatcgtt

SEQ ID NO: 380416 - DNA, 122 bp, Homo sapiens
gagaaggagaggtgcggagcggccgggtgagggaagccgagtatttgccaggggacgctgcgagtggggatgaatttatagggctctcactccgtgacgtgccctccagtggcttttctgat

SEQ ID NO: 380417 - DNA, 122 bp, Homo sapiens
aatatgggagccagtagccagggtggctgttgagcagttgaaatgcagctaatgtgacaacgaatatgaatttttaatttcattccatttaaatagcccaatgtggctcatgtctaccatat

SEQ ID NO: 380418 - DNA, 122 bp, Homo sapiens
cctttttatgacctatttgcggtcgtcattggctgcggctggtcatgtgcaggcgccgctcgccttcacggcctttttcctgatttccccggcgaatttccccccgcattctgctttcccag

SEQ ID NO: 380419 - DNA, 122 bp, Homo sapiens
gacacaccacagctggggcggcaggtggtctgacaacagactgggtggcagcagctggggcgacagcaagtggtctggcagcaggtagtctgagagcaggatgggcggcagcagctggatac

SEQ ID NO: 380420 - DNA, 122 bp, Homo sapiens
aagagagttgtagtggaggtgagatttgtgatcgggaaagccttcgactccctccttctccgtcttccgcctctctctctctgattagttcctatccagcagcagattgaagcaggagatga

SEQ ID NO: 380421 - DNA, 122 bp, Homo sapiens
ccacccgagcgcgggcgggccccggacaggaggaggaagaggcaacaggcaagaagggcgcgccgcgcctcactccgcaggggccgcactgcccacactcaccagtcccaacacaagtcgca

SEQ ID NO: 380422 - DNA, 122 bp, Homo sapiens
ggctaggcctatttccggtaggaatcagtggacttggcggcagaggcagtgcggatccggcgttctccactgatcttttccaaggctgtacagacatggcggcggcttttcggaaggcggct

SEQ ID NO: 380423 - DNA, 122 bp, Homo sapiens
cagagccaggctgcgagcctacagggtagagtaggggtgccgggccccctggtgtcctggcgtactcggggggaagacagtcgccggccgccgggctcctgccacgctgtggcgcgcgtgga

SEQ ID NO: 380424 - DNA, 122 bp, Homo sapiens
aaagatgcgggtcagcaaaccctttgggatgctcatgctctccatttggatcctgctgttcgtgtgctactacctgtcctactacctgtgctccggtgagtgctggctcaggccaggcaggg

SEQ ID NO: 380425 - DNA, 122 bp, Homo sapiens
agctactttaaaacaaataacaacaaaaaaatctcctgattgtcagtgcagagccccgcccgtaatgcctggactcacaggctgctgggcttagcagtctcctcaaccccagctgcacaatg

SEQ ID NO: 380426 - DNA, 122 bp, Homo sapiens
ggcctctgacttgcttatatagggctcaggggctatataaagctgcacggtcatcctccccggcgcgaggggctgaaactgagctgcacccccgccccgcaccccagatcatgtttagtgac

SEQ ID NO: 380427 - DNA, 122 bp, Homo sapiens
ggtcccccaggcccctttgggtccctgagcctcagctggaggtggggggtgcctgcagtgcgctggctcagtctccttctgaaaagctggatccagcttgtttgaagcccttgagctgatct

SEQ ID NO: 380428 - DNA, 122 bp, Homo sapiens
tcaggtgcttgctcgaatattaagcaactctaaaactgtgtcaaagcaaaggttttagtacgaggtaagaaccatcagcgtcgggctggctgctggtcctccgctcgagcgggtctcatagc

SEQ ID NO: 380429 - DNA, 122 bp, Homo sapiens
ccgatacgccggccactggacgggggacgtgtggagctcctgggagcagctcgcctcctccgtgccaggtgagctcctaccaggaggggctgctcagcagagtagagccgggggcctctatg

SEQ ID NO: 380430 - DNA, 122 bp, Homo sapiens
aaattttctgcctgggaactcctattaatctttaaaaatgcagtccagtgagatcgaccacgaactctttcttgacgctccaattaccattccttccattatgtctgtaagtctccgtaggt

SEQ ID NO: 380431 - DNA, 122 bp, Homo sapiens
gcccaaagtcagatttttgttaaataagaggcctttctaactttctgtagcactctttcacgttattctcttggcaggagctacatatgcttaagaatgatccgaagttcaggataatgagg

SEQ ID NO: 380432 - DNA, 122 bp, Homo sapiens
tccagtcctccccggccctctacttgagtgggtgggtcttctgatgggttcctgcccttgcgtgtgtgtatagctccaaacggtgtgccaggctcagggcaaggtcctgagcatacaaagat

SEQ ID NO: 380433 - DNA, 122 bp, Homo sapiens
aattattcaactgaagataaactaaaatcagtaaaatcaatgtactgggaaataaagctacgaacatctcactgcccttggcaacaggagagcctggtcctgttcccaccatgagctgagtg

SEQ ID NO: 380434 - DNA, 122 bp, Homo sapiens
ggctgcaccgcctgcggcggggggcttgttgggggcgctatctggggctgcagtgccccccgcaggggataggttagggggagtatcccgtgatacactgcaggtggagtggggcgggaaag

SEQ ID NO: 380435 - DNA, 122 bp, Homo sapiens
ccacggcaccactcactacattaaaaatccgacacggagtaaagaacgcagcccatgctacgtcaccatcccgtaaccacacgtgacctgagctgaaggtctgacagctgcaggccaaaggc

SEQ ID NO: 380436 - DNA, 122 bp, Homo sapiens
tgccggcgcgcagagagcccagcagctcttgagtccaggaagcaagggtgggaggagggacgagccagtggcaatgacccagacccggacgacccccattgctgagccagcggagctgcttg

SEQ ID NO: 380437 - DNA, 122 bp, Homo sapiens
cctcccccactcactctggccctcaaacttgcggatgatggtgtccaggaaggtgttctgcggcgcgacgtggcccctccgcaccggcatcctgagcccatgggcgggccgggcgggccccc

SEQ ID NO: 380438 - DNA, 122 bp, Homo sapiens
ggctgggaaaggccgccgctgccatcaggtctccaggcggaatagggaagagaggttcgccgctgcttcaaagcctggctgcccggccttggctgccacagctaggtctcggggcgtctgca

SEQ ID NO: 380439 - DNA, 122 bp, Homo sapiens
gggtatctaaaagatatgttaatcatataaagtcaatttcttcccccaaccttatccttacgctttttggacaatttccttgagcaattcagcctaaggaaacttgaaggcagggtttggca

SEQ ID NO: 380440 - DNA, 122 bp, Homo sapiens
gagggagggctccttgcgccagggatgctggctccgggtgtaacaggtgcgcggtgaaatcgcatcttgtgtcggggccggggcgccgggggaagagcagcagtgacccaggccctccccgc

SEQ ID NO: 380441 - DNA, 122 bp, Homo sapiens
aagtaatacttaatgcctccttttaatttaccctctgagtttttatctgtgagaatcttacgtatgctgccataaatgtttaaagttcttagaaaagctcctgatatatcaccagtgcttaa

SEQ ID NO: 380442 - DNA, 122 bp, Homo sapiens
agacccccaggctcctcctcttcaccaggaagactttgggcatggtggggtcccctctcccgactgcggccccctcctcccggctgctccccgctaggggcaacggcggcggctccgtcccc

SEQ ID NO: 380443 - DNA, 122 bp, Homo sapiens
ctcgccgcccctgctcgggtaagtgaggcgctgcgcggggctggggtcggggtggctgtccggggacctccaccgcggctgaaaagctcctctgccccgccccaggatcccgggaccccggg

SEQ ID NO: 380444 - DNA, 122 bp, Homo sapiens
cataacccttggagagactcaagagtatagttcagtagaaagtcgtcatgtctggccaggcgtggtggctcatgcctgtcatcccaacactttgggaggccgaggcggatggatcacctgaa

SEQ ID NO: 380445 - DNA, 122 bp, Homo sapiens
ccacgtagaaggagagtttcagggatctagctcatggaaaaagcccaatcccagccaggccgaaggctgcaggcagcagagaaagaattttccctatcaaagtcacaaatgactggtggagg

SEQ ID NO: 380446 - DNA, 122 bp, Homo sapiens
ggccgtcgcccgagctttctcttgtccatcttctcccgctgctgaaatttcagttgcaggcgctgtcacctcaggacccctccggcttggagagggagggggaggggaaaggaaaaaaaaaa

SEQ ID NO: 380447 - DNA, 122 bp, Homo sapiens
cagagctcaccttgccagagccccgcttgggcgcacccctgtcaccgccaaagaagcgcccgatggagtcaaggatgcccgtgtctctgtgccttgggaggaagccatgcctggcatggtcc

SEQ ID NO: 380448 - DNA, 122 bp, Homo sapiens
ggccagcgtgtgagtgttctgcttcctctgctctgactgtacagtaggcaaaggaccccacgtggggagggcaccttgtgcctttctgggcctcagtttccccatctctacaaagacagggt

SEQ ID NO: 380449 - DNA, 122 bp, Homo sapiens
gtcagtcgggatgtttagcaccgtcacttggtgttaggaccactcggaagacctgcctgtcggacgcctgactgtggttcccggggggccggagctccaggagcctgtaccatctttatctg

SEQ ID NO: 380450 - DNA, 122 bp, Homo sapiens
tctgcggggacaggtggctgcgggacactctactctgcagcctgacaggggctcaccctccgcccagcacctggccctccaggaattctccacctgctgccagcctgcccggtcctgcagcc

SEQ ID NO: 380451 - DNA, 122 bp, Homo sapiens
gttgctattttgtactcccggagtcactcatcccttaagcaagcagggtggggttaggtgcgcgtgcgcggttttaatactcctccccgaactgccaactcttcacgcacgcgaagtaggcc

SEQ ID NO: 380452 - DNA, 122 bp, Homo sapiens
gggcctggcccgcccctgacctcgcaacccttgagattagtaacgggatgagtgaggatccgggtggcccctgcgtggcagccagtaagagtctcagccttcccggttcgggaaaggggaag

SEQ ID NO: 380453 - DNA, 122 bp, Homo sapiens
ggctccagccctgcccgggcgggcactgggctctccagggtcgaaggcaggggtaaggggcgtctttcccccagggcagcctccgggaacaaaagcatttgctgtagagtgagctagagcct

SEQ ID NO: 380454 - DNA, 122 bp, Homo sapiens
acgacagcgtattactggaagagattgaagcctacaaccatgcaaagtaggtatatgttacgagaacgcccttcagcactgctcaaaaattttcggcatgtatttcatctagtcatgtcctt

SEQ ID NO: 380455 - DNA, 122 bp, Homo sapiens
tacctccaggcccgggcatccgctggaaacaggggtgggtagggtcgtgtcatctaaaggcgcagcttcaaccagaagactagaagtcagccaggagctgggagtagtgtcacgcggggtgg

SEQ ID NO: 380456 - DNA, 122 bp, Homo sapiens
tgaatttgggagtggagtggtgctgtggtgtagtgcagtgcttataaaagtgtgatgtgacgattacatctctgtcagactcacttgcgctcctcattaagaatgcaggcccctgtgtctca

SEQ ID NO: 380457 - DNA, 122 bp, Homo sapiens
gctcatggccctagaccacatcctcccagtaaacagtgaacacggacggatggggtgtgccgggagggccatcgtcgccgtctcctgaccgtcattcttccgcatggcttccggcagcctgt

SEQ ID NO: 380458 - DNA, 122 bp, Homo sapiens
ccatgccgctggggtcctggggggtcaggctcgggagcgtctggggtgatcctgctcatgcgcctcatggacgcatcttgccccggtttccaggtgcggtggagcggggagctccggggctg

SEQ ID NO: 380459 - DNA, 122 bp, Homo sapiens
gtgtaaaccctccctgcctgttcccaggctagtctggctcctcgcctccttcctcccgaccgcggagcacgtgcactttacctgcgcacttgcagatctttctccaggagtgagtttaaggt

SEQ ID NO: 380460 - DNA, 122 bp, Homo sapiens
tcctccgaaggaaggggctcctccccgttcttggtcacccaagggtgcaactgtcggggccgggagggcagggagagggggagaggtcaggccattaccagaatcacctggaggggtccaaa

SEQ ID NO: 380461 - DNA, 122 bp, Homo sapiens
tggatggggccctgaaggtggagttcaggctgaaagcttactccatatgagaggcactttcgtccagcagccagatggtggatggagcacagaagagcagctggggaggaagctggagcagc

SEQ ID NO: 380462 - DNA, 122 bp, Homo sapiens
caccgcctccctctctgcttccctccacccgggaggatatggggcactgggccaggaggccgccggcactccaggagcaagcagccttcgaaggggtccgggcatgcccacgggcacgccag

SEQ ID NO: 380463 - DNA, 122 bp, Homo sapiens
aggagagccccactttgctttgacagagatgcaccgagttcaccgagccctccatgaagccggaggacgggctgtaggagactgtgcgtgcccttcggccccctccttgcccagcacctggg

SEQ ID NO: 380464 - DNA, 122 bp, Homo sapiens
agtatatacagtgcatagaaaaccaaagcagtattccatttagtcttgtagaacaaacaacgttgttatgatgaagagttcctggtagaatgtggccttttcagaagataattggaggcaga

SEQ ID NO: 380465 - DNA, 122 bp, Homo sapiens
ccgggcttgagggcccgggggccctagggggcccgggagacagcgctggggccggcggcacggggagcaggagctgaggctgccgccgccaccaccaccaccacagccactgctcgggagga

SEQ ID NO: 380466 - DNA, 122 bp, Homo sapiens
atgggaatgcaacagagcagtcaatgggcagaactccaagctacatggttggtttgtacccgtgagccaccacctatagttctctgtacagacagtctggcagtacttaagggtcttacaat

SEQ ID NO: 380467 - DNA, 122 bp, Homo sapiens
aattcactctatggtcattgaactcataaagacattgaagtctccttaacaaaggaatggcgccagttgattgacaggtcgaacctccctagttgttacacggcggattcgctgcaggagag

SEQ ID NO: 380468 - DNA, 122 bp, Homo sapiens
gaaggaagcctcaattccccggaggacatccgcgggcggaggaaatgtgaatctgcaagtcgttctcccagaccccgcttaacgattcccggccctttctccactccctacagccctcggac

SEQ ID NO: 380469 - DNA, 122 bp, Homo sapiens
cgagaggcatctaagcaggcagtgttttgccttcaccccaagtgaccatgagaggtgccacgcgagtctcaatcatgctcctcctagtaactgtgtctgactgtgctgtgatcacaggggta

SEQ ID NO: 380470 - DNA, 122 bp, Homo sapiens
gcccactacaatccttaaagctcccggagtgagcccttttaaaaatgaattgtatctggccgggcgtgctggctcatgcctgtaatcccagcactttgggaggctgaggcaggcggatcacc

SEQ ID NO: 380471 - DNA, 122 bp, Homo sapiens
tcactaagaaaagggcttgagtgagttcagaagttctgtccaatataaataccgcatcaacgatcccctcccatgagtcacttcctcccacggagttcatcacaagtttatttcgttcccat

SEQ ID NO: 380472 - DNA, 122 bp, Homo sapiens
tcagttctgcacagctggccgactgtgaagctttatttttctcttcttagagctgagtgacgtctctttaatggttttggaatgactgttgccaactctttttgataatttttgttttgttt

SEQ ID NO: 380473 - DNA, 122 bp, Homo sapiens
gacctgcttagggctctcagcaagaccacaagtggctctctcaaaagatccagcctgctgcgaactccctgaaccccttcatgcttcagagagcacgcatacaccctccagcaccccctacc

SEQ ID NO: 380474 - DNA, 122 bp, Homo sapiens
ctcaagtgatccgcctgcctcggcctcctaaagtgctgggagtacaggcatgagccactgcgcccagcctactctgcccaattgttgacatcacctacagctctatagtagatgtctggaat

SEQ ID NO: 380475 - DNA, 122 bp, Homo sapiens
ggccggccgctggttgtctgcgccccgcacaccgcacgtcggagggagggcgcaccgcggcggtcagcacccgcgcccccgcacgtgcctcaccttctgtcaccctttggctgcacaccttc

SEQ ID NO: 380476 - DNA, 122 bp, Homo sapiens
cagcatccctggcgccacccgcagccattttgtgggagggtgggcgaagctgcagcggcgcgtcatctgcagggcagggctctgggctccatccgcaggctgcagctgtgctcgcccgggcg

SEQ ID NO: 380477 - DNA, 122 bp, Homo sapiens
cacctcgccaggcttccagttcccgggagccgctttttgctgagagcggagtttcgggtccggagccagtgcccgcccctctctcccgtcggtcggggctttggccccgtggggctcagccg

SEQ ID NO: 380478 - DNA, 122 bp, Homo sapiens
ctcatccgcctcatacattctattcagaagtcacctccagcctccccagcaggaagtattcgtgacctgccactccctttgtcctgacttagatgccctctgtgcttgctattgctccttgc

SEQ ID NO: 380479 - DNA, 122 bp, Homo sapiens
atgttctgaaaagaggtttctctgtctggctgtctagttgggtggaaaactgatcctcttcgttcacagtgagatagaggaacctgaaaaggataaacatatgaattcccctcaaaatgttg

SEQ ID NO: 380480 - DNA, 122 bp, Homo sapiens
ggagccccctactaaaacaatgtcatggattttagccttatccatcttggcatcccgaagcgctttttctacaggctccagggtacccctaaacaggtctgcacacaactcttcaaatcgag

SEQ ID NO: 380481 - DNA, 122 bp, Homo sapiens
aaatctaatgattattccaccctctaactaggaaagcccataaaatagaaactcaggcctcgttgtgtgtgactcactctcggagcacgcccgtgcctctcctgtgcgcaggcattcacttc

SEQ ID NO: 380482 - DNA, 122 bp, Homo sapiens
gaaaggaaatatcagaaatggcaatggaagaaacatccttcttaggtcaggggcatagagcgctgtgctggggaatatacctgccatcatgccttgtggggattctgccttctgcttagtat

SEQ ID NO: 380483 - DNA, 122 bp, Homo sapiens
gcgccccgcagcgcggcgcctgcccgcaggagggagacccggcccgcccggccgctgggacgcacctgcctgttcagtcccgcaggcagaggggctgcgcctgggcctacgctcgcgatacc

SEQ ID NO: 380484 - DNA, 122 bp, Homo sapiens
ggcctgccagagcggtggctgggtggccaggacctgtggggcaggtcggatgggcggcggcgcctggcggatcagcggcggggcctggcggatcacaggtggagcctggcggatcacaggtg

SEQ ID NO: 380485 - DNA, 122 bp, Homo sapiens
atttctgtaattgtgtgtatgattatatccaaagagaggaaaaaaatgaccaagtggtgccgatttgagggattgacatgagacacccaaggcttttatttttggtcagggatcgtcagtgg

SEQ ID NO: 380486 - DNA, 122 bp, Homo sapiens
ctcacattattactttgacgtatccctgaataatttgtggtgaggttcacatgccaaccccgtgttacaactcccccaccctgttggtgtctggagagcttccagactcatggctgaggaaa

SEQ ID NO: 380487 - DNA, 122 bp, Homo sapiens
atttcccagagcagcctctgccagccaccctactttgatcactttgccgccgagcagcagcggcggtcaacctcagcctcccttagcaacctgagtgccccgtccaggagccttactattgg

SEQ ID NO: 380488 - DNA, 122 bp, Homo sapiens
aatcttgccaggtgattccaattgcagctaaagttgcaaacccagcttttagctggtaagcggaattcctgtgaccttcctaagatggcgtccactcaaccgcttccgcctttacgtgggcc

SEQ ID NO: 380489 - DNA, 122 bp, Homo sapiens
ctgctgctgtaggacaaacaggagctatgtgcctaggtatattcaacctgtatggcctaacgatggccttaagactttcatttccagtatttttaaacattcatctttgatataaagacact

SEQ ID NO: 380490 - DNA, 122 bp, Homo sapiens
ggcaggaagccaccgtgattacatgccccgcaccagaacatgagactggcccctccaggacggagagggatgtaaactgccacccagggcttaatccagcacttctggccctgtgatgagct

SEQ ID NO: 380491 - DNA, 122 bp, Homo sapiens
tttatggggtaagagactgatagctatcatctactttcaagaactgaaggctatgagtatcgaccaaaaataaccaaattaaggtgaatgacaaaatggattctggtcagttgggaccaaaa

SEQ ID NO: 380492 - DNA, 122 bp, Homo sapiens
cccgcctgcttcaattgatctcacctgatcttccagtagcttgttctcctcgttcgccaccgggatggcgaacccatcctcccagtgcagctcagccaggaattcgctactcatgactgcaa

SEQ ID NO: 380493 - DNA, 122 bp, Homo sapiens
aatcttaggaggggcctgaataagaaatttaaactattaaatagtgttttggaagagagacgtatgatatttgtgcaaaataataatgaggttaaaaatggaatttcagccttagctgaaag

SEQ ID NO: 380494 - DNA, 122 bp, Homo sapiens
aaatgagaaactgcaacttcctctgccgaatgtaagaagaatttatatttttgcttaaaacggaatggttttcaatgcaaaggcattgataaggttaaagtgtcatactgaaaatatcctat

SEQ ID NO: 380495 - DNA, 122 bp, Homo sapiens
cgtgtgggtccgcaggtggtacttgagcgactgcttgtagcggaagcacttggcgcagtgcgtgcaggggtagggccgctcgcccgtgtgcgcgcgctggtgctccagcaggtgatgcttct

SEQ ID NO: 380496 - DNA, 122 bp, Homo sapiens
tccgcttctgccactcgtccgcctttagcggggctagcctttcccgcttctcagtttaggcgcagctcaagagcaaacctttttttgaagaccgtagaattggaaaactagagagcggagaa

SEQ ID NO: 380497 - DNA, 122 bp, Homo sapiens
gactgtgagaccgcctgttcttccttccagtccgaaggagcttacgacatcatcctcccacgggccaccgccaacagccaggtgatgggcagtgccaactcgaccctgcgggctgaagacat

SEQ ID NO: 380498 - DNA, 122 bp, Homo sapiens
gttccgtgccggaatcaaggacctggaggtgatgacccagaacctgatcacctcagccttcgagttggtgcgggacgtgccgcacggcgtgcttctgctggacaccttccacaggcttgcct

SEQ ID NO: 380499 - DNA, 122 bp, Homo sapiens
agcccccagccccaatcccagtacccgtttcaccaccctcccctggagaattagcataaccggagtaaataggtaatcaagcagtgtgcttgcaagccttaattttgggacagataaggaag

SEQ ID NO: 380500 - DNA, 122 bp, Homo sapiens
acgagcgtccagggagccgcgctctgtgccagcctcgaggggcatccgggtgctgcctcccgatgtttgcatctctcagaattcacaagtggaaatgccaacgcgagtgatgggatgggcag

SEQ ID NO: 380501 - DNA, 122 bp, Homo sapiens
ggtggcgcgcgccgccaggcgggggcgaaggcactgtccgcggtgctgaagctggcagtgcgcacgcgcctcgccgcatcctgtttcccctccccctctctgataggggatgcgcaatttgg

SEQ ID NO: 380502 - DNA, 122 bp, Homo sapiens
ttctttttgtcctcagccaattagcggcccaacgccccttccgcgcctcatccgggttcccgggacgggaaagtggcgtggtaaccaggcaactactgatcaatcccctccccggctgattt

SEQ ID NO: 380503 - DNA, 122 bp, Homo sapiens
gggcgcctcctctgcccgctgcagcccggagcccgcgggatctgcgggaggcaccggctgcgtcagggcgccagccgccagtaccgccatcagcacgcacaggcacacgccgctgttcatgg

SEQ ID NO: 380504 - DNA, 122 bp, Homo sapiens
ctgcaccctaagcaaggagtggcatgttcagtgtgcaaatggcatctttagaccccacaacggtgaaaaccccgactgtccacgtagggcccaggtccgctgagcaccgagcatcaaaagcc

SEQ ID NO: 380505 - DNA, 122 bp, Homo sapiens
ggtcgcgtgttctgtggtgttggggggccaggctcacccaggctgacccctgcagccgtgcgtccctcctgcagcaccttgggatgctgggcgcctcggcggccccacgctgtccggtgcca

SEQ ID NO: 380506 - DNA, 122 bp, Homo sapiens
tgcgccgcccgccggcctcaggaacgcgccctcttcgccggcgcgcgccctcgcagtcaccgccacccaccagctccggcaccaacagcagcgccgctgccaccgcccaccttctgccgccg

SEQ ID NO: 380507 - DNA, 122 bp, Homo sapiens
ccgaaaagggggaacaccgcctttccaagtccgggtgccagcagcggctgctgccaactgcgccttcgcccaactccaggaggatccgggactattggaaacccgggctttagaggaacggg

SEQ ID NO: 380508 - DNA, 122 bp, Homo sapiens
tccaactgctgctgagggctcccgggacagctacaaggcaccacaatgacctagaggcttcggaaagttgcacaacaggatatgaggccattcctgggagtcactgagtttgggttctgttt

SEQ ID NO: 380509 - DNA, 122 bp, Homo sapiens
agcagagcaggttatgacaccagctttgtcttcccacgtgtggatcaccattcttttcctcgctctctcccagccctttgcccccatttccactgtttccccaaatcccagatcatccattt

SEQ ID NO: 380510 - DNA, 122 bp, Homo sapiens
acatttgggacacaccaacttgcagcatctattctggagtggagaatcatctaattattccgtcctcccatccctatcctcccagaccaaagacctaaaaatcatgagagcagtaagactgc

SEQ ID NO: 380511 - DNA, 122 bp, Homo sapiens
ggaagggtgcacccggccctgtccccactccagtgtgtagacgagagccagggtccaccccgccctgcttgttggcagcccgtctgttgagggccccatgacagcagaggcagtgccgtgga

SEQ ID NO: 380512 - DNA, 122 bp, Homo sapiens
aagatggcacacacaaacatcatagtcactattgtgattaatagggaagctcatacacgccggcagaatgaatattctgtcaaacttggggttgaaattcgccatcttctggggcaggaaag

SEQ ID NO: 380513 - DNA, 122 bp, Homo sapiens
gaatagagagaaacacataccagtagaccaaacttcctgttcacaagcctttgaatactgcgtttcactgtctgaaatagcattcatcttaaggctgggatcatttattccctttggaatta

SEQ ID NO: 380514 - DNA, 122 bp, Homo sapiens
atgtagaacaaagcaccaaaaataacactatttgtgaattacagcaaatatactgtctcacgctgagaacaaaggaatgagtggacagcaattaatgggcattgttgtcagtcttattctag

SEQ ID NO: 380515 - DNA, 122 bp, Homo sapiens
cagggcacagggaaaggtgggcacccgccgcagtgcgcagctgcagaggctggacggcgtcgggctggtttaaccccttactccagagtgtgtcaaaagcagaaggggtaggagggcatgga

SEQ ID NO: 380516 - DNA, 122 bp, Homo sapiens
acaagatcgttttccaaaggacagtctctcttgttttgggggttagaactgggaaagaagcgggtggccgtgatctgacagttatctttcaaacctgacttaagaggtggagtgataccttg

SEQ ID NO: 380517 - DNA, 122 bp, Homo sapiens
ccacctcccagccttccaagccagacagggagcagttttagccccttggggccagggctgcgcagagaaagagggggaggcttcagtatgaagccaaccaaccttctctatagttggacagg

SEQ ID NO: 380518 - DNA, 122 bp, Homo sapiens
gctgtgattgagagggcgggattagaagttttgtgcagtggtgggtccctcttccctgttcgccggagccattgcgtcccgtaccattcccttctcgggtcgtagttctcctcccgctagcc

SEQ ID NO: 380519 - DNA, 122 bp, Homo sapiens
gctcgccgcgctcgcggccgctcctgctgctgctgctgctgctgggcgcctgcggggcggcggggcgctcccctgagcccgggcgcctgggtcctcacgcccaactgacccgggtgccgcgg

SEQ ID NO: 380520 - DNA, 122 bp, Homo sapiens
cgcacgcgcggggttggggcggggcccaagcccctgagttctgcggcgcccgcggctacgcgtaccgtaaatgtcagaatagcagggaaaagagaattagaggcccgtccccactttcccca

SEQ ID NO: 380521 - DNA, 122 bp, Homo sapiens
cgtccccaagagcggcaccccgcagcctcggtgctctggacttcgggagccaggttactccgggttggtctcctcagcacaccgagcagcaccccgggcctctgcccaccagaggccaacag

SEQ ID NO: 380522 - DNA, 122 bp, Homo sapiens
actcaagtgcaacatttgttggtactctgcagcacctccacagagcttttgctgctgccacgttagacagcttcaccatgtaatgacgaccttttaagattctaaatccccccacctctgag

SEQ ID NO: 380523 - DNA, 122 bp, Homo sapiens
cccaagccaggtgtcccgatccctttctgacttagagagcccaggctggttcctaaaccccggggcttcccctgggagggaagcagccattgcaggaattttggttcagtagatctggagtg

SEQ ID NO: 380524 - DNA, 122 bp, Homo sapiens
ccatggtgttctcagccagtgggagctgcccagcccacacctctgtgaggcaggcaggaccggtcactgctcccactttacagatgaggaaaactgagattcggaggaacaaccagcagagc

SEQ ID NO: 380525 - DNA, 122 bp, Homo sapiens
ggctaacacggtgaaaccccgtctctaccgaaactacaaaaaattagctgggtgtggtggcggcgcctgtagtcccagctacttgggaggctgaggcaagagaatggcgtgaacccgggagg

SEQ ID NO: 380526 - DNA, 122 bp, Homo sapiens
aaaagacaagctgcgcacaaccgcacgcctcaccttaaagcggagcatgccctccccttccgtgaacagcgccagctccttccagctgaaggacgctcttgctcggtaggcatcgaggggcc

SEQ ID NO: 380527 - DNA, 122 bp, Homo sapiens
ggtcaaatcctcccacataaagtaggctaagcaaatgcctaagctggatggaccataaggcgaatgccccagagatccaggcacctgcagtacttctttctccagtctctaaaaacctaaag

SEQ ID NO: 380528 - DNA, 122 bp, Homo sapiens
ggaagaggtggagagatggagcaggacgcacaccggagcagcctggggagcgcgcacacgcgctggaccgggttagcagaggccaagtttgggaggggggagtggggctctgctgggagctg

SEQ ID NO: 380529 - DNA, 122 bp, Homo sapiens
aaatagaggaaataacatgtgattgaggtttgggaaatgaaaattgtcataatacattaacgaagaaaataatctgaaggccaagtactcactgaatcagaaaaaaagttggagagtcctaa

SEQ ID NO: 380530 - DNA, 122 bp, Homo sapiens
tggtcttgtttttctgcagacacaggcaccaggggagggaacgaggcagacacaaacatgcgacaggcaggccgtgtgcccgagggcagtcgggctccaaacaccaactctgtccggcgaaa

SEQ ID NO: 380531 - DNA, 122 bp, Homo sapiens
ctgcgcccacctgcccaagtactggacctggggctagcttgccgcttgctccttgccacccgccaggccccccgcccatcgcttcgcccaaatcctttcaaacaaggttccctcctgccacc

SEQ ID NO: 380532 - DNA, 122 bp, Homo sapiens
cgttggggttgtaaaatggcttcctgtgtagtcatgtgacctggagggttccagaaccttcgtaaatgtaaaaggtttcttttatgtctttaagacgtaatactgttaacgacattgccggt

SEQ ID NO: 380533 - DNA, 122 bp, Homo sapiens
cgtgatccacacacctcggcctcccaaagtgctgggattacaggcgcgagccaccacgcccggcccagaagttctgatttatcggtggtaatggctaattactgatttccccggtgcctggc

SEQ ID NO: 380534 - DNA, 122 bp, Homo sapiens
atcttcagttgaggccaaaatctccgcaggttgctaggggccgggccagggctcggtgggcggggctgaccgcgggaactgggccagggtatcacatcctccagggaatgtttggctgcgac

SEQ ID NO: 380535 - DNA, 122 bp, Homo sapiens
tttgcttatatacatgcggcctcacctggaagagaaataaaccacttgtactaaaatgtgcgttccgtttctgacttccacagctgcaggaaataacgagggtattgaaagatggagcgctc

SEQ ID NO: 380536 - DNA, 122 bp, Homo sapiens
catcgaccatattcctcaacccacctcggtgacctgatggtggcggcagcctctcccagccgaccccgccgaccgctggatctccagaggacacccctgccaagccacccggatgcagagcc

SEQ ID NO: 380537 - DNA, 122 bp, Homo sapiens
cgtctccatttctttatgcctggctttgcccctctcaccagccgtggaagccagcagtatcgagctctcacagtgccggaactcacccagcaggtcttcgatgccaagaacatgatggctgc

SEQ ID NO: 380538 - DNA, 122 bp, Homo sapiens
tggcaggcaggctaagcaatcctctgtgtatatttgatagcaccctctttcccatcacagcgcatgtaacacaaaacactcacatgcaagctcctctcacaggcatgccaattcaggcacac

SEQ ID NO: 380539 - DNA, 122 bp, Homo sapiens
gcgggttcccattgctttcttctgttaaacacacccacctacaggctagctggggaagctcgctaaattatgaaaacagctttcctctccaaccagattttgtctgaatgctgtgcagcttt

SEQ ID NO: 380540 - DNA, 122 bp, Homo sapiens
gctcccacccacacccagagtaataagctgtgattgcaggctgggtcctcaccgtctgctcgccagtcttctcctttgaggactcagaagccaagggttgcgggaggcaccacccatccagc

SEQ ID NO: 380541 - DNA, 122 bp, Homo sapiens
accttttggatttaattagaaaaatatcagacacacacagctctcctaaccataacttcccgcctacaccacacaccctgtgtctctatgacacattccctagggaggctgtacattggccc

SEQ ID NO: 380542 - DNA, 122 bp, Homo sapiens
catcataggatcctcagccagttgcagagatcatgcccgggcattaatctggtatgtaatcggtgttcccgaaaaaggagccactgccacgtttatcatcgtcacccgatgaaggagaagct

SEQ ID NO: 380543 - DNA, 122 bp, Homo sapiens
gtctcgccacatgaacttcttggcgcagactccgcactcgtagggcttgagacctgtgtgcgtcttcatgtgctcagtcagatggtgcttcatcttgaactttttgttgcacacggggcagt

SEQ ID NO: 380544 - DNA, 122 bp, Homo sapiens
gaaagggatttcctttgacttccatgcaggatgctcagacagggaacaggaggtaccctccgagaagggcaaacccctctgccccacggccaggcagtcctgcactctgagtcacccatcag

SEQ ID NO: 380545 - DNA, 122 bp, Homo sapiens
aaatgagaattattaatcctccccatccctccatgaaaacactttccccagatttaatagcggttacctttgaggaaagagaatcaagagtgaggagagggacttcagttgtcttctatatc

SEQ ID NO: 380546 - DNA, 122 bp, Homo sapiens
caacagctgggtagggttaaggccttcccctgtggcctgggttgcccagctcttttagggcgtgtgtggcatggcggccatcgcgcttcctctcaggctctgaaaactcaacagttttctac

SEQ ID NO: 380547 - DNA, 122 bp, Homo sapiens
cctagagcacataggaggagacatcagccctctggactgagccggaggagcagaacctcacgcgattcatccattcatttgttcagctaacatttaccagcgcctgctgcatgccaggcact

SEQ ID NO: 380548 - DNA, 122 bp, Homo sapiens
tgtgtctgattggtagttattcagggtaacgtcagaggtcaggtctgcccaatcaggattcgcaaatccagaagacgcactactattggttgaaattaaactgcagccctaaccaacaacac

SEQ ID NO: 380549 - DNA, 122 bp, Homo sapiens
gattcaagcgatccacctgcctcagcctcccaaagtgctgggattacaggtgtgagccaccgcactgggcctttttgttgtattttctatggttacttttggattaccacagcagagttggg

SEQ ID NO: 380550 - DNA, 122 bp, Homo sapiens
cagtgaccctgggcgcgcactttgcctccccgttagagatgtcgcccacgggatccttaacgaggcctaccgcaaagtgctggaccagctgtccgccgggaagcacctgcagtcgctcgtgg

SEQ ID NO: 380551 - DNA, 122 bp, Homo sapiens
taaaacacctcctcttctgattacgggtttctccattacagttgtttccttactggagctcgcaattctgtttagttttttaaaaaaattaaacatttaaagtaaaacaaccaatctatcta

SEQ ID NO: 380552 - DNA, 122 bp, Homo sapiens
cagcaagtaagtggcgaagccaggatttgaacccaggctgtccggctttaagcctggctgcgtctgttgagtgagaggatgcagcgtgagaagaggaagaatgggaaacagccttgggaggg

SEQ ID NO: 380553 - DNA, 122 bp, Homo sapiens
aggaaccaaaagcagaagtggccccccaggacgtggttttgtaactgggggagggcttctcgctccctgcggcccctctgtttgtcatggcccttgggcccacaccatggccttcttctctg

SEQ ID NO: 380554 - DNA, 122 bp, Homo sapiens
acaggcatccgtattctatagctaattcagttgatttcatctcagcacacatacactgagcgcttcctaagagcgaggttgaccgacatttttattagcaataatctctgccttcttctgat

SEQ ID NO: 380555 - DNA, 122 bp, Homo sapiens
taaacactttaactttttattctttttagacttcaaagtaattgacctgatgttctcatccgagtttttcttggagcttatgtagcttccaggaatagcaaattattttccggactttcttc

SEQ ID NO: 380556 - DNA, 122 bp, Homo sapiens
gctgtgacagcgaagggggattgaagggagcaccttctcgtcgccgccgctgctgctccacgtcaagttctcctccggcgcgggctcacgctcttgtaatggctccagcttcatctcctcgg

SEQ ID NO: 380557 - DNA, 122 bp, Homo sapiens
gtgtgattctgcacgtcattcctggctcaacagcctgaatgagtcctgctggatcactctcgtttctgactcacttctcatatctctgtttagatgaagggaaatcttatagataaacaaga

SEQ ID NO: 380558 - DNA, 122 bp, Homo sapiens
gcgagcaggtccccccgaccatggagcatctcacgccggcgagcaggtcccccctgaccacggagcatctcacgccggcgagcaggtccccccgaccacagagcatctcacacgggcaagca

SEQ ID NO: 380559 - DNA, 122 bp, Homo sapiens
tgctcagctcaactcccttggccacttcagtggaaggaggagggactgggggggcgggggcgggggggcgatgctccacaaatcagcctcccagttagggctttgacgcacgccagacctcg

SEQ ID NO: 380560 - DNA, 122 bp, Homo sapiens
ggctcgcggctcgccgctctcggcctctgctagtccgcacccctcccaaagcccacagcccgcggcccgccccaccctaccagctgcaaggccccgccccctagctgtcaagaccccgcccc

SEQ ID NO: 380561 - DNA, 122 bp, Homo sapiens
catctgaccacccggagatatgcatgattcagatctttctcgaactaaaagtataacaaacgcacactccctcatctcaggcatgcctgcggtaatgcatcgtttacattcccacgcctctg

SEQ ID NO: 380562 - DNA, 122 bp, Homo sapiens
tggcatcgacttggcctggacttggcttctctactgcgctcccgatcccaggtgtggggtcgattctgtcttgcgccgattggaggcctctgctgtgggtgtggtttcacgtgcactgtctc

SEQ ID NO: 380563 - DNA, 122 bp, Homo sapiens
cccctgcgctgttctgcgctcgtcgggggggtcggtgagcctctgctggcctagccagggcgcgcgggccccggggcccttacctggtccgctttcccccgggccggatgccagcccgccga

SEQ ID NO: 380564 - DNA, 122 bp, Homo sapiens
catactactcttggacactgtataaaacggttgcgtgtctggaatgccgtcgttttgccccgcggccccatcgtacatgcgcatccccgcagccgccaccgtctccactttccgcagcagcg

SEQ ID NO: 380565 - DNA, 122 bp, Homo sapiens
cagctcctgctggcctcacagagcacacaaccttggctgtgcctcccctgccacaggcagcgtcttcccaggggccactccggacagtccaatgctgccatcagtgggttcaagggaatcca

SEQ ID NO: 380566 - DNA, 122 bp, Homo sapiens
caaaacaaaagggagcttggtcagtggggagcctggggtcaggggagatgggttatgattcgagagctgacattgacagaacactcggcatgtgccagttttgcatgcatgactgcatgcac

SEQ ID NO: 380567 - DNA, 122 bp, Homo sapiens
gaagaggggcccggagtggcagactctgagaccaaagctggcaacagggctggagggtcccgggcacatcatactgacataccatggcccccctgcccccagggccacattgggcccttctg

SEQ ID NO: 380568 - DNA, 122 bp, Homo sapiens
ctgctgaatgctgcctggctaaagcgagatgctgagagcatccaccagtacctccttcagcggaaggcctcaccacccacagtgtgaatcctgaggtgccgccattggcggttctgctgctt

SEQ ID NO: 380569 - DNA, 122 bp, Homo sapiens
ggaggcaaacgcataaggcacaaggcaagaacatgcagagcagaggacaaggccgatggacggggaggctggggacacactgggcagcctaacccaaccctgcagggaactaagggatgctt

SEQ ID NO: 380570 - DNA, 122 bp, Homo sapiens
agggctaaataaggaaacggagtctaattcaggggcaaacgccaggctatatttatcaaacgccaagctccagaaagcctcggctaggaagcctcggcagtgaaatccgaggtttcgctgct

SEQ ID NO: 380571 - DNA, 122 bp, Homo sapiens
ccactactcaccgtctcctggggagatggtttccacctgcactcccatggcggcggcggacgctgagcgggcgggcggcgcgacgggcggcgtggaccaacagcgacctggcggcggttcca

SEQ ID NO: 380572 - DNA, 122 bp, Homo sapiens
atggtgggggctgcagcgcccgtagctccacgctccgccccgccgccgctgattgtcccgcgccttgtgacgtcacacgcgggtttttaaggccgaaccctaggcaggctctgcagaggcag

SEQ ID NO: 380573 - DNA, 122 bp, Homo sapiens
tttctctgattctccaggtcttggtcggctgacacgcattcgatcaagtttaaaggaatgcgcataaatcagcaagcccctagcgtctccttgggagaggtccgcaaatccaggagggcgcc

SEQ ID NO: 380574 - DNA, 122 bp, Homo sapiens
ccaagttcgccatgtcccactgctgcctgcacgggagcctggagcagagctgtgaggagccgccagagagcgcagcgcggcggcccaggaccccggcccagtgactgcctcgccgccgcctc

SEQ ID NO: 380575 - DNA, 122 bp, Homo sapiens
aacagaaggtcccactgctcctgagaacgacccagtgctttccactactgcttcccggcgcgtcctgtgctgggaaccccacgttgcctctaagatggctgccgtatcgccgcacatcccag

SEQ ID NO: 380576 - DNA, 122 bp, Homo sapiens
aagcccagccccaagattctgtcctgctttctagtgcttgccacaggactcccaaagacgcgccgaagctctgcgtctgcctttcagaggatacgctttttctctttgcaattggttctgag

SEQ ID NO: 380577 - DNA, 122 bp, Homo sapiens
gggccagctggagttccgggtgggtgtgggcttggcgggccccacactcggaggagcagccggccctgccggccccaggcaatgaggggctcagcacccgggccagcggctgcggagagtgt

SEQ ID NO: 380578 - DNA, 122 bp, Homo sapiens
agtaggcagtggcccagtaagtggggtcactggctggcagctgcaggagcgccttgagcccggagccgatgcgcggcggggggctgcggcccaggtgggtggcgtggatgcgcagggccgcc

SEQ ID NO: 380579 - DNA, 122 bp, Homo sapiens
gcttgatgcggatgtgcgatttgagattcgccttcatggtgcagcggacgtcgcagaactcgcacttgaaaggcttctcccccgagtgcacgatcatgtgccttttcaagtccgagctgatt

SEQ ID NO: 380580 - DNA, 122 bp, Homo sapiens
cacgaggccatgtgtgcgtgggatgcccggatccgctatgcgctcggcgagggtgagtgacgggggccggggccgggcgggggctccccgttcaggtgtgccggggcccctcaccaacgtgg

SEQ ID NO: 380581 - DNA, 122 bp, Homo sapiens
aacagctgaccttgcccagctgcaggtcagagatggagcaggcgtcgatgaaggcctgcgcgatgactgaaaggcaggcgtcgatgtggtctgtcttgtcgatgtcaaagacaaactggggg

SEQ ID NO: 380582 - DNA, 122 bp, Homo sapiens
tgaactcctgacctcaggtgatccgtctgcctcggcctcccaaagtgctgggattactggcgtgagccacccaacccagcctgcattgtatgttaaactgtgtccgagagcccagtcactct

SEQ ID NO: 380583 - DNA, 122 bp, Homo sapiens
cgtcactcttacggaattgctgatttcctctatttccttgcgtgatggagcagctctgctcggactgtgctccaggacagtgtaaatgccgactgaagatgccacagcagccggcgatgcat

SEQ ID NO: 380584 - DNA, 122 bp, Homo sapiens
ccgcccggggcagtgaggggtttagcacctgggccagcaactgctgtgctcaaaatttctcgccgggccttagttgccttcccgcagggcagggctcaggacctgcagcccgccatgcctga

SEQ ID NO: 380585 - DNA, 122 bp, Homo sapiens
caccttccccagctgggatccctacaggaccctcctctggctggagcagaaggtggaccccgtgggcaggcctggccccgccccaccctcctacagaggccctgggaaggggacaacgctct

SEQ ID NO: 380586 - DNA, 122 bp, Homo sapiens
ccgcaggcaccttgcagtccaggcctccaggggccgcaggtggaatcctgtggctgaggacgtgactcagaagtgccggccaaaattccatgaatctgttctctctggcaggtggtcgagat

SEQ ID NO: 380587 - DNA, 122 bp, Homo sapiens
cgaggcgggggaggggccgtgagtgccgcagtcggccagccatggagcggagcttgctggcggcgaggccgcggcgacaaggtagccacccccgcagcatgcctcgaccgcggtccgcagct

SEQ ID NO: 380588 - DNA, 122 bp, Homo sapiens
agaaaaatgctgcctatttcaaggttgtagcaaagctaagtttgaacagagcaaaggaagcgccatagaagctgcactacttgctcatgtcacagctggggaatggggtggtcgaatgggga

SEQ ID NO: 380589 - DNA, 122 bp, Homo sapiens
atacattttttctttttagactcaaataagttcaaagtaagtacaaaatgaaacttcaaacgttattaatgatcagaacctagactcgactgggagagagagctgagtgtagctaacattta

SEQ ID NO: 380590 - DNA, 122 bp, Homo sapiens
accagaacaggggctggtttggccgagggacctgcttcttgggcagcaccaggaaacagccggagaccctcccagcgcccacatccatggcgtgagccccgcgtgggtgcagccccttccgc

SEQ ID NO: 380591 - DNA, 122 bp, Homo sapiens
acaggaacccaggctggtgagaaggtcctcacaggaacccaggctagcgaagcggtggctcggactagggtgaaagtagcggaggtaacgctgggtgagccgcacccgcgtctcccacgagg

SEQ ID NO: 380592 - DNA, 122 bp, Homo sapiens
catgccatcagcaaagtcaaaatcagaaaatagactctaaaaccatttactatttatagacgacaaaaggtttatatcccttttaagtagagagctacagtgtcatgataagaaaaacaaat

SEQ ID NO: 380593 - DNA, 122 bp, Homo sapiens
ctgtctctttagcatctgcctctaacctgctaacaccacacagccctctcaagacacgggcgtcaaaaggaacgcccacacgacaggctgcacccaaatgtgatgtccccctgtacacacat

SEQ ID NO: 380594 - DNA, 122 bp, Homo sapiens
tcgagggagaagtttataccttcgtcctagagatgccaaatgcagcagggaaggctggaccgaggcagccgagtgctggaaagggaggcaagaggtgcgggagcggggagagggggagggga

SEQ ID NO: 380595 - DNA, 122 bp, Homo sapiens
gctggacgtggccatgataccagagctcagggcagctcttctgacaagcaactgccttgccggcgtgatctaaccctgccgggacacacggggcggggactgggcgggcacgggcagggtgg

SEQ ID NO: 380596 - DNA, 122 bp, Homo sapiens
ggcagctcggacggtggttggggaacgttagggagattggcgcgcggaccactgggtgagcgcccaggaacgccggacgcgcgccttcacgcccgggtgcctggcggcgttttagaaaagct

SEQ ID NO: 380597 - DNA, 122 bp, Homo sapiens
tggtgagcaattctacgggtgtcccgagggtatgaggggcggtgctgctgggaagccgagcggggcatcctgaggtcagggcgccagaggctgcagaaccctggagggtgtggctgcagggg

SEQ ID NO: 380598 - DNA, 122 bp, Homo sapiens
aggtctcccgcaggagccggacctcctcctccagccgccgcagctcttgcagctgccgaacgatcacctcagcctgctggctcagggcctgtgacccctccagcccccaggaccttcaaaga

SEQ ID NO: 380599 - DNA, 122 bp, Homo sapiens
taaattacccattcattatgacccttctcctcatcacgtaccctcccttgcagggaccggcgagctgccatctgcctgttgcttgccagcctggccaaaagactctgcagatcaaccaagac

SEQ ID NO: 380600 - DNA, 122 bp, Homo sapiens
cttccccagggtaaggagtcaccatactgatattcccgcggctaatggtacttcacagagcgaagtgccggagcccgtcgccggcgattgcgcattccgtcgcggagagcattatgggattg

SEQ ID NO: 380601 - DNA, 122 bp, Homo sapiens
cgcagcagccggaattgcggtgccactaatcacagcagcagatgacgacgtttggggccgcgtgtgctcctggaggaacgcggcggggagcgagccggggttgagtgggggctgggaaggga

SEQ ID NO: 380602 - DNA, 122 bp, Homo sapiens
ggacagcaagggcagcagtggagacctgcatgattctgagcaggtgacggaatgtgggctcgagtgtcagcagagccaagaaaggactgaccactgtctgctgcccgtgtccttctgaagtc

SEQ ID NO: 380603 - DNA, 122 bp, Homo sapiens
ccagaaagcctggaaccaccaagattcctaaggatgtggtggacaggggctgggcacccacgaggctgcagcagctgtcagccattatccctaaaataatgctcttccaggcctgggagcac

SEQ ID NO: 380604 - DNA, 122 bp, Homo sapiens
ggtgacatggttgtctccagctgggacagtccctaaggagggctgacagctgatggcagtcgtccaggggaactccttgcagccgatcgccagcacatggcagtccccagagccatatgtat

SEQ ID NO: 380605 - DNA, 122 bp, Homo sapiens
tctaggtgaactagcccaagtgtgaacttttgtcatctatgactctaggtggggtgggggcggggttcatgtgccctttgagttgcctgcaacttgggggatgtttgttaaatgagcattct

SEQ ID NO: 380606 - DNA, 122 bp, Homo sapiens
ccctcgggggtgaagagggcttaccctgtggggctgggcggccttctccatgaggacggccgtgtggggcctgtgctcccgggactcccggcacatcacgcacagcagcttcccgtcgtcct

SEQ ID NO: 380607 - DNA, 122 bp, Homo sapiens
ttggtgaccctggccagcttgataggctgcacacggctggtgttcatgatggcggcgcagcgacgatgtggcggagaggtaaatatatattatataaattaacttaatatataaaaatacat

SEQ ID NO: 380608 - DNA, 122 bp, Homo sapiens
ccggctacggcatggtggcccgggagagcgtgcaggccggagagctgttgttcgtggtgccgcgggccgcgctcctgtcgcagcacacctgctccatcggcggcctgctggagcgaggtggg

SEQ ID NO: 380609 - DNA, 122 bp, Homo sapiens
gataagagaataaaagcaggctgcccgagcttgcattagtaactcgctcgggtccccttccggattgtggaaactttgttctttcgctgtatgtaataactcttgctactgtagctcgcttt

SEQ ID NO: 380610 - DNA, 122 bp, Homo sapiens
gcggcagccagaagagaacacgcctctcaatggtgccgacaaggtcttcccttctttggacgaggaggtccccccggccgaggtaaggtccccttggcgctggccctaacttgccggcggcg

SEQ ID NO: 380611 - DNA, 122 bp, Homo sapiens
cttccacttccagggtgcctttcatcccagcacacctcaaaaccaaacaaccctggcctgcgctcaggatttcccttggccctgggggaggaatgtagccgttgttagcagccccggacccc

SEQ ID NO: 380612 - DNA, 122 bp, Homo sapiens
ccccgcccccacacttccgtgccaccctacctttactctggggttcgggacccactggttcgcctaaacttagcctcccccatcacctggagaacctttattgtggttccttacctcctttc

SEQ ID NO: 380613 - DNA, 122 bp, Homo sapiens
agtcagaatttttcttttccattccaaaggtgtacttagagatctctattagtattcattcgagatgacatagcagctcatatcatggttgtttattggatttatctgttctaattatataa

SEQ ID NO: 380614 - DNA, 122 bp, Homo sapiens
gcagacgcgtcgggaagctgtgcgagaagcgggagagctggcggggaggtgcctgcgacccgggctgtgtggctccccaagatcggcgaaccctttttatgcatggttgagactggaaagcc

SEQ ID NO: 380615 - DNA, 122 bp, Homo sapiens
gtcatggaaatgccttacagtaggattcatttggagcaggggttcccaaccccaaggccacggacaggtactgctcgggaactgctctgtggcctgatagcaacctggctgcacagcaggag

SEQ ID NO: 380616 - DNA, 122 bp, Homo sapiens
gccagtgtgcagtggcattctgactaaatgttaacgtttgagaggcatgcacaaggcctacggctgacaatgtcttccttgctgttttgcaactcccgacatttatcaccactttgagttaa

SEQ ID NO: 380617 - DNA, 122 bp, Homo sapiens
caccagccaaagatctcacacgtcttcacagtgtcgttgaaggccacacacttgcccgtgcggatgcctggagccagagggaaacccctgggtgcctgcactaaacagaggaggccgcccca

SEQ ID NO: 380618 - DNA, 122 bp, Homo sapiens
tttagagaagtcctgggactcagactgccccagcactgattgtttctacagcatccttcacgcacctgcaaatgcagcctgcaccattcatggccagttctgttgtcctctgctatccctct

SEQ ID NO: 380619 - DNA, 122 bp, Homo sapiens
gtcgcaacaagggacttcgcagtcgctgaagcaccagctcctctttcgagcttaggagaccgcctccccaattccagaagcattgttttcttggtccatttgaaaggtgttttgcctatagt

SEQ ID NO: 380620 - DNA, 122 bp, Homo sapiens
ctacagtgtgagcccttctcactgcagagagggtgaccgtgaggcttcctggtggctctgcgagtgtggggccctggggatgtcggacagagtgggtgactataaccatcagcacagggaac

SEQ ID NO: 380621 - DNA, 122 bp, Homo sapiens
ccccgctccgcacccagcagccaacacaaacctccgtagccctggtccatgtcttcgacgcggcccaccagcagccccgtttactaggcgaccacagcacgcatgcgttcagcgcacctccg

SEQ ID NO: 380622 - DNA, 122 bp, Homo sapiens
actgataataaggaaaataggattataacactttagagttggaagcaactttagacagcacgcagtctaatctctccagttcttgaatgaggaagaggctcaaagagattatgggacatgtc

SEQ ID NO: 380623 - DNA, 122 bp, Homo sapiens
ggccagggccctgcacacagactgcaagtcaacacaggagctttgctgtctgaacagccccggtcccgcgttcccaggcacgtctacccctccgacctgactttcctctctcttacttctta

SEQ ID NO: 380624 - DNA, 122 bp, Homo sapiens
tggctgggctctgggcgggggcgggaggtttgtggcattggcgccagggttcttagccctcgcgacacagggcccttgactctcaatacaccatccttcttggccttaatcctccctccttc

SEQ ID NO: 380625 - DNA, 122 bp, Homo sapiens
cttaccgggtccccggtagctctttggaggatggctcagggggaaggagatggtgctaggcgaccagctgggacccgcttgtgatggtgatgggcgaggctccacccaacaaggctgtaaag

SEQ ID NO: 380626 - DNA, 122 bp, Homo sapiens
agtagaagctggaatgggcctcctccttccggacggaccgttggccgggctccgccccggcgcttctgattggacaaggtacaaggccccgccccctcagaactgagtgacggcagaagccc

SEQ ID NO: 380627 - DNA, 122 bp, Homo sapiens
ggaactctgaggagtcgtctgtggaggagcctttggcgtccccctgcccctgagcgtggccgtcagctcttcccagcccctgcactttgctttcccctccctcacgcccggaagggtctcgc

SEQ ID NO: 380628 - DNA, 122 bp, Homo sapiens
ctaggctgccatcgggccggtgcagatacggggttgctcttttgctcataagaggggcttcgctggcagtctgaacggcaagcttgagtcaggacccttaattaagatcctcaattggctgg

SEQ ID NO: 380629 - DNA, 122 bp, Homo sapiens
gcgctgggtttcacagatgcagactgaagtccaggctctgctgcagattaacggggtggccgccagcaagtcaagtgacttgctcttctgtgcactgcatgtacttgggttcctctcacagg

SEQ ID NO: 380630 - DNA, 122 bp, Homo sapiens
gagaccctgtctcaaataaataaataaaggccaatgacatgaatgagatatgggagccaacggcagtgtttccagatcttgacatgattttatgctctagacagcctttataatacaagaat

SEQ ID NO: 380631 - DNA, 122 bp, Homo sapiens
gttggcatatttcacttcttaaataactcgttggcaggccagggaaatcactggagctctcggctctcagtcccggaagcgctcactgggtgatcctgattcacgatgtctatcagtagatg

SEQ ID NO: 380632 - DNA, 122 bp, Homo sapiens
cttgctgcttttgtttcttctgtttaattcagttgcaaaggtctccgtcctctctgggcacgggacccgggctgcgccacccagataacataaaaccgcttcctgaggggcctaggacgcct

SEQ ID NO: 380633 - DNA, 122 bp, Homo sapiens
acatcttctgcttggaggaggcaagggacaggcttcctgtttctaaaggcgtgtgagtggcgaccttgagaaatgtggccagtggagcattttgactgagttgggtcccctcgtgcaatact

SEQ ID NO: 380634 - DNA, 122 bp, Homo sapiens
tcttcgccagcatacccatctttgcagacacagctgccatcgtgacactctcctcggccacggcagtcccctgggcatgtctggatggcacagtcagggcctcggaagccctctacacacac

SEQ ID NO: 380635 - DNA, 122 bp, Homo sapiens
acagtgccctagatgggcatagccaactgctttaaagtatttctggattaatggtagatccgtgatttttaataaccttcaggagttctgcactgacttggcctattccaatccatcactag

SEQ ID NO: 380636 - DNA, 122 bp, Homo sapiens
aacgggggcccccaacaaggccgcgcttccggccgcctgcccagtcgccatagcaacaggcgcagggcggcttgggagcctttgaggccctgaactatttaaggatccaggtgttgcaaggc

SEQ ID NO: 380637 - DNA, 122 bp, Homo sapiens
cacacccgctgcgtctcaggttccgcccccttcctctgtctggcctcgcgccgccccgcgcgggttggggtctccagcaatgactcttggcgaccccgcctatcctggggagcccggggagg

SEQ ID NO: 380638 - DNA, 122 bp, Homo sapiens
ggagggcatggatggctgtgagctcatgtgctgcgggcgtggctacaaccagttcaagagcgtgcaggtggagcgctgccactgcaagttccactggtgctgcttcgtcaggtgtaagaagt

SEQ ID NO: 380639 - DNA, 122 bp, Homo sapiens
aggctctattttaaccctcttctttcctaggttaggagacggagacccagaggggtgacacgaggggctgaggtccatacgcggatggctagtgacaaggtaaatagacaaagaggcggctc

SEQ ID NO: 380640 - DNA, 122 bp, Homo sapiens
aaacagaggggcactcctaggcatggagcaccagctgcgttccttccttgtcttaggccacgagaaatgaggtctctgaacaaagagcactgcccagcccatctgggggcctggatcctgat

SEQ ID NO: 380641 - DNA, 122 bp, Homo sapiens
ctgtcaggtgaggcgtccgttggccgccccgacttgtcacccgggtcctgggcctctctgcgtctcctggtcttctcgtccatgaatctggtctatgtccagtgcccgctcctccccaacaa

SEQ ID NO: 380642 - DNA, 122 bp, Homo sapiens
cctctctatcagccgctcactccgtctcaatatgtctcaagatggcggccaatgtgggatcgatgtttcaatattggaagcgctttgatttacagcagctgcaggtcaggctcctccgcgct

SEQ ID NO: 380643 - DNA, 122 bp, Homo sapiens
ttatatagaacatttacgtttgttatgttaataaccccactattagctctctggatgttgcgttaggaatgtaaatgtagttaatatgaataacaacctctttactctttgtgctgcagttg

SEQ ID NO: 380644 - DNA, 122 bp, Homo sapiens
ctccagccctggtggtgctcgttcccggcgctcgctcgagggggggctgttggaacttggcggggctggaccagcccggccgtgggaggtgcgggccgcggcggctgcagcggcggggtggc

SEQ ID NO: 380645 - DNA, 122 bp, Homo sapiens
gtctgatgtccgttctggcgcggacaggaagaaactgaagtcgaatttttagttgaattgcgtgctctgtgtttggcggtggtgtggcccgttcttttggaggtccacaccacaggtatgag

SEQ ID NO: 380646 - DNA, 122 bp, Homo sapiens
ggaatcaagtggatgtgaattccactgctgaacctgccacacactgactttgggactgagcgaaagcgtttctgagactcagcccttctaactctcacaggaggaatggaatagctaattgc

SEQ ID NO: 380647 - DNA, 122 bp, Homo sapiens
tgctgcgggcagcctccccagcactggacccagcaagcaagttatctcgccgactcccagcgctgtctccagactcaactgtctgtgagtgcggcgtcggtgctgcctggacggccatatgt

SEQ ID NO: 380648 - DNA, 122 bp, Homo sapiens
acagattacttaaaaacagactcatgaacaaatagggaaacgaatacatcatccctgtatcgaattcatccctgtataatcctgcccttacacctgtgctcctatacaagattaacattcag

SEQ ID NO: 380649 - DNA, 122 bp, Homo sapiens
agactcctcctcgccctgcccatctcccttggtgcctcaggctacaatctggtatagtttcggctgcacacacacactatcttggcacccatcctctcttaggacggaccccaaaggcctat

SEQ ID NO: 380650 - DNA, 122 bp, Homo sapiens
ttttcaaagggctacgccttcatcgaatacaaggaggagcgtgccgtgatcaaagcttaccgagatgctgatggcctggttattgaccagcatgagatatttgtggactacgagctggaaag

SEQ ID NO: 380651 - DNA, 122 bp, Homo sapiens
ggaggacagggaggacctggcgcctttaggatccctgccaacagttaggaaaccgaggaccggagccacacaggcccacattctgctttgctcccttctctgagaccctctgccacaaacat

SEQ ID NO: 380652 - DNA, 122 bp, Homo sapiens
aaataaattatatgctgttaaaagtttaattagaaaaacagaagcaagctccagctttcacgtaaattataagaaatttacctgaatgaaaaggaaactgttgcttggcttcaccagtatgt

SEQ ID NO: 380653 - DNA, 122 bp, Homo sapiens
gagagcggtgccttgcagggatgctgcgggcgggagcaccaaccggggacttaccccgggcgggagaagtccacaccggggtaatgggtctgggcttgagggttggcagaggggtggaggag

SEQ ID NO: 380654 - DNA, 122 bp, Homo sapiens
ctttgtgttaagacaattttgttttcttcacagttttcaaatttgctgggtacggtgtaccggcgtgggaacctaaattttacctgcgatggaaattcagttatcagtcccgtgggcaatag

SEQ ID NO: 380655 - DNA, 122 bp, Homo sapiens
tctcaaatcatagctaattctcctctgagggccttgctgaagttctgcgtttgcttgctccgctttcctctcattttggacctccagccttcctgtagtccgaggccctgcaccggggtcaa

SEQ ID NO: 380656 - DNA, 122 bp, Homo sapiens
cagtttacccatccttaggcaacctggtggtcccccactcccagggcaccatattgatgccgaactcagtgcggacaccccgtcggcataatgaccagctgttctaagggtctcttccaact

SEQ ID NO: 380657 - DNA, 122 bp, Homo sapiens
aaacggtgccgggtttgggggtgcctgcctcatggttgcccatcttccccacagaagtcccgggcccagagcccggccagcaggagcagttggtcttcggcagcggggatgctgtggagctg

SEQ ID NO: 380658 - DNA, 122 bp, Homo sapiens
agaaccgccccggctccggctaacaataggatccggccgcagcgcactggctcttataggcgccggcacgtcctgaccgagacccggggctggctgggaaatggagtctacgggccggccca

SEQ ID NO: 380659 - DNA, 122 bp, Homo sapiens
cagcactgggaagtgcagtgaaagccacagagctatggtctcagttacgcagacttaaaccgacactcaagtttcctccgcgatgtaccagtaaaaagtctgaaggtggacgtttttgcatg

SEQ ID NO: 380660 - DNA, 122 bp, Homo sapiens
ctgcttgtcacaccgacctgcaccatctctcgcctgcctgtggggtttctgtcaactagtcgtggagggaaggagactctttaaagaataacatcttattgtggccatgccagaacccacta

SEQ ID NO: 380661 - DNA, 122 bp, Homo sapiens
cgaatttatatatggtttcctttaaaacagcagcgcattcgtgtggccggttagctcagtcggctagagcgtggtgctaataacgccaaggtcgcgggttcgatccccgtacgggccactgg

SEQ ID NO: 380662 - DNA, 122 bp, Homo sapiens
gcccccagattgtgatgtctcagggggcggtgggccgggtgacgcaactgggggtgggcccgtgggtcccagtacctggtccaggaggcagcgtctccctcccgtccgggataagacacccc

SEQ ID NO: 380663 - DNA, 122 bp, Homo sapiens
cgtggggacgagaactctagccagagtctcctccgcctcattcaggggtacctgcacttccgccagcaccccgcagggcgccagggggatgggggatgattttattagtttggatgcatgtg

SEQ ID NO: 380664 - DNA, 122 bp, Homo sapiens
gccagatttcacccagtccagaaaaccacggctgtgtgtcggcatttgatccctcctggtcgtcgacccccctccccggcccctggtgccctcccctagggcgacaacccctccctcagcac

SEQ ID NO: 380665 - DNA, 122 bp, Homo sapiens
ggtccatgtttgttagggctcaagctgagctttcactcgccgtccaccactgctgaacgtcgccgtcgcagacccgccattgactttcaccgctctggatccggcaaggtgtctgctgcgct

SEQ ID NO: 380666 - DNA, 122 bp, Homo sapiens
actaacttgctcccccgtggcgccggtggcgaatgctccaataggcggagagctggtcagcgctcacagcctattggctcggaggagctgccgctccgcgcctgggtcccgcccccctgccc

SEQ ID NO: 380667 - DNA, 122 bp, Homo sapiens
tatttttcaggaataaaggggcaggaagtaagatgagttaagttttagagtttgagatttcgttgagacattggaccttgtggatagggagcttagtagagagtttatgatcttgaggcctg

SEQ ID NO: 380668 - DNA, 122 bp, Homo sapiens
tgacgtcaggaaggcgcgagtagtttcgcgagttcgaatcccgcgctaggtgagctggttcgaatcctgcatgccagctccgggggctcatttgctggggaagaatgtcagtgatcataact

SEQ ID NO: 380669 - DNA, 122 bp, Homo sapiens
ccttaaaaccaaaacaagaaaaacaccacttttagacgttcccccaatccctaggtaccacgacgcgcttccccacccctccccggcctcaggttcgggccttggcccctggcaaggccgga

SEQ ID NO: 380670 - DNA, 122 bp, Homo sapiens
tgactgtgggcgggcgggacggcggagccacttacagcgggacctgcgagggtgtgggtacgggactccccaacggaccctctagtttgtaaccgtgcgaacactggagggattcattatgt

SEQ ID NO: 380671 - DNA, 122 bp, Homo sapiens
gccctctgaaggtggcctgcaggggctgcctctctgcagcctcgaccagggtggtgactgcgctgaccacctgccgcagggccgcagccctcccagaccgacagagtgccaccagctcccgc

SEQ ID NO: 380672 - DNA, 122 bp, Homo sapiens
tcaggggtacgtatcttccggccagggcaggtgtcttccggccggctctcttcctgattccgctatcttgcttcggcacgctgctgacgcaagtagccttgcgccctgggactgggcctgag

SEQ ID NO: 380673 - DNA, 122 bp, Homo sapiens
gcgcgcgggggcgggcgcggaacaccggttccaccgccaccttcaggcctcccggtgtggcgcggttcgggacgtcacacaaataccagggcacccatgtttctgccctgggaaactctcac

SEQ ID NO: 380674 - DNA, 122 bp, Homo sapiens
aggcagagagagaggtttggtgttgaccccagaggcgaccctgatggctcccgtgcgcaccgctcactgcttccgtgaatacaaagcctgtctgcgtctgtccttgtggatgaaaccaacat

SEQ ID NO: 380675 - DNA, 122 bp, Homo sapiens
aggaaattaggactaagaaaagcaaagccactcacccaggatcacatagcgcgtatgtgccgctgccagggctcacactggagcctggcttggccatcacgtgctttttttttttttttttt

SEQ ID NO: 380676 - DNA, 122 bp, Homo sapiens
agctgcttcttggtgaggagagctctcaggaatggccttttataaaagagatcccagccccgggggatgggggggaaaggcctcgtacctgagtggctaggcccagagggggctgggcctaa

SEQ ID NO: 380677 - DNA, 122 bp, Homo sapiens
gggcgatcctgatgaggatggtcatgtgcctgttccagatgagcgtcaggttgtacctcccggggatgctgatgtccacgacaaggctcagcgcacccggcgtcaccccgagctgcacgtgg

SEQ ID NO: 380678 - DNA, 122 bp, Homo sapiens
agagcaagtagggagtttggggttttatagaggtaggtaaacaagaaaatcatgaggatgcgtggaggcaggtcttacctatcgcatgtggaggaggatgattctttgttgttaatcatttc

SEQ ID NO: 380679 - DNA, 122 bp, Homo sapiens
tgcttacaaaccatactaaggacatccagattcttcctcttctgaaagattaccaccaatcgccctccacttcactgcaaagtaaaggaaagcagccaggaacagtatgacccaccaaagac

SEQ ID NO: 380680 - DNA, 122 bp, Homo sapiens
cacatcagaatcacctggaggacttggggtgggggttcggggtgggggaatgaaacaaaacgaaaacaaaaaaccagggccccagtattagagtttctaattcaataggtacaggatggggc

SEQ ID NO: 380681 - DNA, 122 bp, Homo sapiens
tgcagcgttgcccaaatatggggggaattaggcgcctctacctcctcaagaagggtctgccggctgacctcgggggtgtgcacgtccttctgtgtgcagaaccctggggcgtgcgcctttct

SEQ ID NO: 380682 - DNA, 122 bp, Homo sapiens
tgcctccaattaatatctgcctgtttgacggtacagttcggtctgttccacgcaggagcccggcatgtgccatgtaagtgggatggggaagtgtcggctgctactggcatttcattccaggt

SEQ ID NO: 380683 - DNA, 122 bp, Homo sapiens
cacactctgtgattctacttaagtaaagtttaaaaacaggcaaatcaaatctatggtgttcgaagtcaagacagtagttacccttgtgggggctgcaactggtacagagtgtaaggggggac

SEQ ID NO: 380684 - DNA, 122 bp, Homo sapiens
catcgccacacccaggacttgctcgtgccgcaattccccacggaaacaaccgagttgaaacgagaagcttgctctctgggtgcagtagctagaaggcttcaggtaactccaaagccaacact

SEQ ID NO: 380685 - DNA, 122 bp, Homo sapiens
ctgccgcgcggccaaggtgggtctgcggaggcggccggccgggtgtgggtcgtcggcagccgcagcgacgtcgattccaccccggaccttcgccgccggccccgcgccgcgctctgccagcg

SEQ ID NO: 380686 - DNA, 122 bp, Homo sapiens
gacaaagtatttgggtggtaatcgcccatcgactttactacctttaatagtttaccaaagcgcgcgaatgtaaaacccagaccatggtaagactacggtggaaatggaaggtgtctcactga

SEQ ID NO: 380687 - DNA, 122 bp, Homo sapiens
ggtgtgaagtaaagggcaaggtttatattttgcataaaagacaagaaaagacagtttccacgatgaaggtcaaagctggtcccaggaggagctgcacaagagctaatccatccagtgtaagg

SEQ ID NO: 380688 - DNA, 122 bp, Homo sapiens
taactcagcatgttcccggccacatcccggtgaaccatgcagcctaactcaccacgttcccggccacacagggccaagaacagcccaggcaatgttaaggagcattgcatggaggagccact

SEQ ID NO: 380689 - DNA, 122 bp, Homo sapiens
ctgtgctggacaggtcaaggacagccttgttggaaggaaaataaagacaccaaagagcagcgtgaaaacagtgggatttgttcatccggcaggggagagagcacagcactcagcgggcctcc

SEQ ID NO: 380690 - DNA, 122 bp, Homo sapiens
tgtgcaaggatatccacattctgcacacacaggtgtaggcatccctgtgcatacgtgtcacgtgatgacccctggggctgcatgcgtgtcatagctgtcccctccccctgcaaactcagccc

SEQ ID NO: 380691 - DNA, 122 bp, Homo sapiens
ctcagcttttttatttatgaaccaaaggtgatgatacacttacctcacaagggtgtgcttcgtaatgactgtaaccggctttgaaaatgcatcggactctagaaatgattcataataagcaa

SEQ ID NO: 380692 - DNA, 122 bp, Homo sapiens
ccctctgggagcgcctcccgcgctcccccggccctcccccagcctcctcgtctccagccgcgggagaaactcactgtctaggctctgtggcttgtgggcgctgtcctcccacttctgaaggg

SEQ ID NO: 380693 - DNA, 122 bp, Homo sapiens
tgtgtagcttcatttatagatgtggcaactgaatcacaggtgaagtcacatccaagggtgcgcaggtagaaaggggccaagccatcgttggtaactgctcctgctgccttggtaggtgtgtc

SEQ ID NO: 380694 - DNA, 122 bp, Homo sapiens
aggatcctgagaccagacagccacgtataaggtggcgggcgtgactcctctggccaggctcgtgggcggcgcccgcacatgcggagcctgccacccactgggcgagagcggtactgcagacg

SEQ ID NO: 380695 - DNA, 122 bp, Homo sapiens
ccttctagaagtgggttcgcctacaatggggcaggttgggctctaggcggtctggagcggcgcctgcgcagtgggccaggccgccgctgtagaggtcgttttgacttgctctgacttcgcgc

SEQ ID NO: 380696 - DNA, 122 bp, Homo sapiens
gacaagaacagaggcaagtctccaagcctgggatgtggagctgtcagcactacagggcatcgggcaagctcaggatggagtcaacagctggagatgccaagttggagcaggggcattccatg

SEQ ID NO: 380697 - DNA, 122 bp, Homo sapiens
ggagccacaacacccgatgcttgggaggcacctgggcaggagctgagaatgtaccaaacacgttctaccacgcaacattcatggaccctgagtccggccaccaccgccgacatccactctgg

SEQ ID NO: 380698 - DNA, 122 bp, Homo sapiens
ttgagtccattctcccttgctgttagttcgttcagttcaacagattttactagatgtctacgatttggacaagcacatcaggggttaagatataaataactgtgtgattgcatgtggcatca

SEQ ID NO: 380699 - DNA, 122 bp, Homo sapiens
ggcaagatcatgctgagtgaaacaacccagctaccaaaggatgcgtcctgcttgagtctccgacacgaggtcctgagagccgtcacgttcatacagatggaaggtagaacggtgggcgccag

SEQ ID NO: 380700 - DNA, 122 bp, Homo sapiens
gtaactccacctgggtacaaggagcccacactgggtgccaaagatgtaggggaaccagcccgctacaccacatgcgtgttctccccttcccggtggaaatgaaggaatgagaaaagaaataa

SEQ ID NO: 380701 - DNA, 122 bp, Homo sapiens
ccccggcacgcgctctactcctgtaacggaaaggtcgcggcttgtgtgcctgcgggcagccgtgccgagaatgaaccccagcacccccagctacccaacggcctcgctctacgtgggggacc

SEQ ID NO: 380702 - DNA, 122 bp, Homo sapiens
cccctcctgtcatattgtttcttatgtccagggaggagaggatgatattgctaccaatatcgaagaagtgtacacgccccctgtgatatggttcctaatatccacgttgggagaggatgata

SEQ ID NO: 380703 - DNA, 122 bp, Homo sapiens
accctggtcacctgtgtgtacttcctgggcacctacgtgcagctgcggcgccacccagggcgcaggtacgagctgcgcacacagcccgaggagcagcggcggctggcgacacccgagggcgg

SEQ ID NO: 380704 - DNA, 122 bp, Homo sapiens
caggaaaactattcagttttgctgcctccaggtaaaacaaagtgagtaacacaggacaggcggtttacttgagagaaacgggaatttcatactgaagcttttgccctcaaatggtacaaact

SEQ ID NO: 380705 - DNA, 122 bp, Homo sapiens
cgtcggccatctccttacagaattgtacggaaaccttcccctcctccagcgagaacttcgcgctggacaagagggtcctgattcgagtgacctactggtgaggacctcacacatgcctctcc

SEQ ID NO: 380706 - DNA, 122 bp, Homo sapiens
tttcaaaggaagttgttctgattatcaatgttgtaagagaattacatcaataaacgaatacgctgaattccttagaaaaagcgtatacaggtggtctctactttccatagctgtaagtttgg

SEQ ID NO: 380707 - DNA, 122 bp, Homo sapiens
accaaaaacaggcttgcttctacagctccatcttgaaaagcttctagcagccagcacctccgtcctctgttctcgccctgcctcacctgtcattttgctaaagacacccgcatccatccgct

SEQ ID NO: 380708 - DNA, 122 bp, Homo sapiens
tcccattactttccagctttactcctcctgttagtcaccagacagggttttgaatcacttcgggatcattttctttatttgaaagaatgtgccttggggccggacatctaaagctccccaaa

SEQ ID NO: 380709 - DNA, 122 bp, Homo sapiens
ctccccctcttcctcctggtcccctccccttcctgctgagagcgtggcagagccagccgccggccttcaaagactagacaaccgcctttgcactcgttggcctctcaccacccccgcgcaat

SEQ ID NO: 380710 - DNA, 122 bp, Homo sapiens
cgcgtaccacagtcctcgccagtgtagccggggtcacacacgcagcgcccgtccttgcagcgtccccgctggctgcagccccgagggcagctcctcaccccacagtcctcgccagtgtagcc

SEQ ID NO: 380711 - DNA, 122 bp, Homo sapiens
ggagctcagctcggttgtgggagcaggcgaccggcactggctggatggacctggaagcctcgctgctgcccactggtcccaacgccagcaacacctctgatggccccgataacctcacttcg

SEQ ID NO: 380712 - DNA, 122 bp, Homo sapiens
tgtacaggggtgtgttaacatctttttcagtcctgttgcccaactctggcctgtggttcccgggcagacccagccccactgctactttctgttgtctagggcagccaccggacactggtgga

SEQ ID NO: 380713 - DNA, 122 bp, Homo sapiens
acagggatccccacaaacctttatggccttcctctgatcacgctgtcagagccctggcagcggctctcagacagtccctcactgcagcctccccacagccctgcgaccgctcccacacatga

SEQ ID NO: 380714 - DNA, 122 bp, Homo sapiens
cccgtgatagaccgccagggaaggggctggttcggagggaattcccgctaccgggaaggtcggaactcggggtgatcaaacaaggaatgcatctcacctccgtgggtgcttgtgctgcgcaa

SEQ ID NO: 380715 - DNA, 122 bp, Homo sapiens
ctggagccagagaacaggtagccgcccatccacagggaatgaagctgggatgccatgtaccggccaaggaggtgctacatgactttaaatcgcatcatgtagagcgtcaggtcgacgtgtca

SEQ ID NO: 380716 - DNA, 122 bp, Homo sapiens
ggaccggctgggaggcggcaggctggcaggcacagtgtagggttacagtccatttatgggcgcagccgaaggcagatatcagtgtcgatggcattcgctcccagctattcttaggagcctct

SEQ ID NO: 380717 - DNA, 122 bp, Homo sapiens
aaatcgagcgcagcgccggtgggctggcacctctgggggatccagtacaccctctgcagtcgctggcccgggtgctaagtcccttattgcccggggccggcagggcctgccggctgctccga

SEQ ID NO: 380718 - DNA, 122 bp, Homo sapiens
tttgtgcccggcgccctccacccacagcggctccacggccttggggcagcgctcctagagcgccagcccctgcgagaagtcgatcacctcgtctttcgtgccgtggataatgagcacgggcg

SEQ ID NO: 380719 - DNA, 122 bp, Homo sapiens
gagaacggaaagcccggagggactagaatccttgcattcgacaagtttgtcggcaatttccgtcagccgaccagagggcggagctgaggtcggcccagcccggaggcgggaaggacaacttg

SEQ ID NO: 380720 - DNA, 122 bp, Homo sapiens
agcagcggctctcggccggggacaggggagccctcggcgtgcgaggaaagcgaccacggtcgggtcacctgcacccagctcagtcaccactcaggaatgggggtgtagtaagcagcgttcag

SEQ ID NO: 380721 - DNA, 122 bp, Homo sapiens
gaggatcacttgagcctgggaggtcgcggctgctgtgagccatgatcatacctctccctccggcctgggcgacagagtgagatcctgtctcaaaagaaaaaaaaaattaaactctcttatca

SEQ ID NO: 380722 - DNA, 122 bp, Homo sapiens
tcgagaccagccaagccaacgtggcaaaatcctgtctccacgaaaaatacaaaaattagccgcgtgtggtggcactcgcctgtaatcccagctacttgggaggctgacgcaggagaatcgct

SEQ ID NO: 380723 - DNA, 122 bp, Homo sapiens
ttttacagatgagaaaattgaggtgcaggaagataagtaacttgtccaaagtcctacagccggaaagtggctgaaccaggacttaaacccaggtttccaagcaatcacaatgggaagttgaa

SEQ ID NO: 380724 - DNA, 122 bp, Homo sapiens
ggctggcatctaccggtcccttgggtctaaaccctaagggtcaacaaggccatgcccctgcggatggccggcccaggcgcgctcccctacccggggccgcctgtgctcggtgtgccgtgtcc

SEQ ID NO: 380725 - DNA, 122 bp, Homo sapiens
cattgggcgcctggcgcgcggggcgatgctgatccggaaggggcagcggctgcagtgcagcgcgcgcgtccgctcctgggcccacgtccggcctgggctgccctgccggagtttctgagtgg

SEQ ID NO: 380726 - DNA, 122 bp, Homo sapiens
gcccaccgccccttctcgaattgttctcggctctaacacacactgcccactgccccttctcgaattgttcttggctataaggcagggaaatggcttttcattcactcggtgattctagttac

SEQ ID NO: 380727 - DNA, 122 bp, Homo sapiens
ggtgggcagccgggcagtggcgctcccgacatcccagatggagtggcagccgagcagggacgctcctcacttcctagacggggtggcagccgggcagaggcgctcaattcccagacgagtca

SEQ ID NO: 380728 - DNA, 122 bp, Homo sapiens
gggccaggaggaagatggcggcgtccgcagctgccgctgagctccaggcttctgggggtccgcggcacccagtgtgtctgttggtgttgggaatggcgggatccgggaaaaccacttttgta

SEQ ID NO: 380729 - DNA, 122 bp, Homo sapiens
atatagctggtaagggcttggtaaatgaaatgaaatttgaactatctcaaataaaaagaccgaaaactggttttagcatgcaggtacaagggagagcccattctcaaacaggccactgtggc

SEQ ID NO: 380730 - DNA, 122 bp, Homo sapiens
ccaggggagccggcacggaagcggctgtgcgcatgagcagatgaggcctagccgaggcggcgggacccccaagtttggaaagctcttttaacggtgagaacgcgttaacacttgccaagggg

SEQ ID NO: 380731 - DNA, 122 bp, Homo sapiens
aaagaggcaggcgccggggctggagagccgggcagcttggcgctggtgaattccagcctgcgttcgctggcgcttgtacggtcccgggagtgtgaagctgctgttgagctatcggggaagtt

SEQ ID NO: 380732 - DNA, 122 bp, Homo sapiens
agagctccctcctggggcagggactgggaggagccaaagttatagccacacccccggtgacgcccggtggtcggctgtggtctcccattggctacaccggctgccagtccctggaggaggcg

SEQ ID NO: 380733 - DNA, 122 bp, Homo sapiens
actttatcacccagaattcttttccctctcccccttggctacccacttcttggcctagaccgacttctagaactagtgtctggtagccagtattctggggaagggagtcccttgggggtagt

SEQ ID NO: 380734 - DNA, 122 bp, Homo sapiens
tcgtgaagtcattcagttttcattcctatgaagaaattccttttcgtatatactctttagcgttgcattgctttttcagaagcatatttctagtgaatatcaagaataaatattcatcatta

SEQ ID NO: 380735 - DNA, 122 bp, Homo sapiens
agggtggcggggcggtgaggccgcagaggcggagggatctgcgcatcaaagctagcgaggcgagcgaagtttggccgggggttggactttccttcccggaggcggcacccaaacagctaccc

SEQ ID NO: 380736 - DNA, 122 bp, Homo sapiens
tggcctctccacgccgcgccatgccggtccacaccctgtccggcccactcataccatccacgcccctgcacatactgacagctcagtaccccttaggggctgggctcagaacagaccctcta

SEQ ID NO: 380737 - DNA, 122 bp, Homo sapiens
aaggctcctgaatcctaagagaatgttggtgaagatcttaacaccacgccttgagcaagtcgcaagagcgggaggacacagaccaggaaccgagaagggacaagcacatggaagccagccca

SEQ ID NO: 380738 - DNA, 122 bp, Homo sapiens
ggcggggctttattggagggcggggctttagggtcccgggcttggggcttggggacgggccgggcctagggttcggcgggctggggtccgcttgcggctcaaggaagggcggggagccccag

SEQ ID NO: 380739 - DNA, 122 bp, Homo sapiens
aggagggctagatatgctattattagcacaagagaatcaaggcacaagccttgctggcctcgacctcagctcaaaaagctgagttaattgaacttactaggtccctgcagttggaaaggatt

SEQ ID NO: 380740 - DNA, 122 bp, Homo sapiens
cgccccaccctcgctgacctaataaggccatgcagtgtgcgggggagctacataaaagcgcgggctcgcggcgactctgcaccacgcaggggaagagaaagcaggagccgtccagcacggag

SEQ ID NO: 380741 - DNA, 122 bp, Homo sapiens
catctggacagctcctcccaacagccctgctcccctgggagcagcatccacacccctgagcgcaatcaccccctttaaaagcagccctaattggacttcatgctgtgctggtcagcgggagc

SEQ ID NO: 380742 - DNA, 122 bp, Homo sapiens
ttaagccccacgaagccgggtgtcctgtgtgcggcatcaccaccaggtgttgcggggctacgccacagttctggagacacagtagagcttctgtgtctgcaaatgaccctctgtgggcttgg

SEQ ID NO: 380743 - DNA, 122 bp, Homo sapiens
cgagactggaagggactgacagagctagaaatgaaacttgtttttccacctcgagaaaaacgaatcaacaaaaaataccctaagcaattgctggtatctgaagcccacttttttgaggctgt

SEQ ID NO: 380744 - DNA, 122 bp, Homo sapiens
agtggaaaggaggttaagacaggagagatgtgaagaatgaaaaatggcaacgtgattcaccgtgtttggtcatgaagatggtgtatttcacctcagagttggagaagtttactccccatttt

SEQ ID NO: 380745 - DNA, 122 bp, Homo sapiens
gacaactcttgcaccctggcatggacacaccagatgaagctctgtataagcaaagatgaacgattttctaaaggttcaaatgaacaggtcttgagtcaaataagcatgtggagctcctccaa

SEQ ID NO: 380746 - DNA, 122 bp, Homo sapiens
gaggctatggcaatctagatatggccttatcaatgaatgttaattaccaacggtaatgaacgattgactgcctcggctggggcgggtcggggactgctgtgtaagatgggcaggatcctgcg

SEQ ID NO: 380747 - DNA, 122 bp, Homo sapiens
gtggggtggggcgcatgcgttggaagccattcgcgcgggcagtccctgagtgtcccctcacgtgctccccagcgcgagcagcacccccgcctctgcgcttcccagagcgtgcagcttccggt

SEQ ID NO: 380748 - DNA, 122 bp, Homo sapiens
gattcatggtttataagcaatggtgaagtcctttttccactggctgcagccacgaatggccgagaagctgtaaacagtaaccgtaaccatgcatgagcatccctacctcgctgtctcctcaa

SEQ ID NO: 380749 - DNA, 122 bp, Homo sapiens
gaaaaccacgtatcgtgcaaggttctctacacacatcactaccaccacccctaagagatacgacttattatcctcattttactggttaagaaattaaagcacaagaggtttggttaaatgct

SEQ ID NO: 380750 - DNA, 122 bp, Homo sapiens
gcgttcagttgcggctctcggcgccgtaaatcactaggtcgcggttaagaatgtgctgtgcggacccgtgaggaccgtgaccgcgatccacccccagctacctccacacctcttctccccaa

SEQ ID NO: 380751 - DNA, 122 bp, Homo sapiens
gccaattcctaacccaaagttttcccaacagaaccttagtagaacaaaatgctttaagcacgtagtgtacaccctcattgcatgtcaaaaagaactggtattatttcaggaagaacaactca

SEQ ID NO: 380752 - DNA, 122 bp, Homo sapiens
cccttgagtagtgggcacggggcccagggcttctctggatgagctgggcgggcatgagaacgcatggagctgggggcaggaggtcggagcagcgaacgaggaggagaaggagtaggcggagg

SEQ ID NO: 380753 - DNA, 122 bp, Homo sapiens
tgcaggctctgagaggaggggacccggttcccgggtgagtgtccaggcatgccagcggaacggcccgcgggcagcggcggtgagtgaggaaaaccttttgggcgcgggtggcagcctgcggg

SEQ ID NO: 380754 - DNA, 122 bp, Homo sapiens
gatgtgttggctctcgtcagtaggtgggccagcacgggcactcatcagtagaagatgccacgacagccatggagctctaccggctggtggaggtgcagtgggaacagcaggaggcccgcagc

SEQ ID NO: 380755 - DNA, 122 bp, Homo sapiens
tcccgggttcagagactgagtccaagctcagtctcctgactagcgtggattgcaggtgaccgccaccacgcctggctaatttttgtatttgtagtagagacgaggtttccccatgttggccc

SEQ ID NO: 380756 - DNA, 122 bp, Homo sapiens
gaagccggaggacagtggcatctacttctgcatgatcgtcgggagccccgagctgaccttcgggaagggaactcagctgagtgtgggtaaaaagcaggctcaatgctatcagtgagcaccga

SEQ ID NO: 380757 - DNA, 122 bp, Homo sapiens
caagtacaggcttgggtgatggctggtggggtccgggtcgacattttcccttcccgctcccggacttctgcacacacgcgctgctcggcgcagccgtctttgcccggcgccttcctccggga

SEQ ID NO: 380758 - DNA, 122 bp, Homo sapiens
cgccttacccccacccggctcccgaggccccaggctccttccgccacccgcgccggctcccgcccgctccccagctcgcccccggccccgcctccgactccgccccgcccccgcccgtcccc

SEQ ID NO: 380759 - DNA, 122 bp, Homo sapiens
gcagcgccgtctcggcactggcaggggagggcaggggcggccgaggtggcagcgagtcctcgggaactgtgggtgggacctggtgttccccacagtggcagctccactcagggccaggcagg

SEQ ID NO: 380760 - DNA, 122 bp, Homo sapiens
tacacccaagggcgtgcaaacgaggccccatctctctgcatggcagggagtctacatcctcgtctctggctgcaattgagcaccctgaacactccttcagttctagaatcttagaacaggta

SEQ ID NO: 380761 - DNA, 122 bp, Homo sapiens
agtaagcacccccatttcagagtggatggattgggaatcccatctctgagagtgtcaggccggcaggagaagccacctcagaagtctggagtgaggctaggatggggcaaaaacacttgtat

SEQ ID NO: 380762 - DNA, 122 bp, Homo sapiens
agccgcctcccccgccgccttcccgggccgtttgtccgaaggcattatgcaaaataaagccgccttgtttcccgcgcctggtaaccccgggcttcccggaggctttcttggtgagagggagg

SEQ ID NO: 380763 - DNA, 122 bp, Homo sapiens
ccccacgctgcgggtggaggccctgaagatggccctctccttcgtgcagagaacctttaacgtggacatgtacgaggagatccaccgcaagctctcagaggccaccaggtgaggccaggggc

SEQ ID NO: 380764 - DNA, 122 bp, Homo sapiens
ggctgtactaagcggtcgggtttccccgggaatttgatggttcctatagtctgcctgtgtcggaggcttctttggtttggaaggatctgggcaaatgtgttgggttcaggaatggacaaagg

SEQ ID NO: 380765 - DNA, 122 bp, Homo sapiens
gaaacctggcgccgcggggtggtcgcgggaagccgtggcatggcttggtgaacacaggctcgccgacccgggggcggatgctgaggttgccattgttggtggctgcatctgcagtagacggg

SEQ ID NO: 380766 - DNA, 122 bp, Homo sapiens
tgtaggatgagtcgcttaggagaaaaatgaaaaccaccactactatttctccatagggaacgagcagggctcttgctaccacgttgaatggaaaaataaaagggaggcatttggtaggcgag

SEQ ID NO: 380767 - DNA, 122 bp, Homo sapiens
tgtgtctcctgtgctccagacttggcaccaccggtcacccccacaccccctgcacggccgcggctgctggtgtcctggacgctgcactgctttgccagaggccagagccccccctcatccag

SEQ ID NO: 380768 - DNA, 122 bp, Homo sapiens
tagaaccagttgctttaactctcaaaagccattaccaaaatggtatttttttcctccttccgccagtcagggagaatttttaaaaataataatcaaaacatgaaaaaacataatcacacctg

SEQ ID NO: 380769 - DNA, 122 bp, Homo sapiens
cccgggcgccggaggcggggctggcgcggccaggcaggcaggggatcacgtgcgcaggggcgggcgcatcgagaatctaatctgagaggtggtaggtgacggatggggtccccagctgccaa

SEQ ID NO: 380770 - DNA, 122 bp, Homo sapiens
tgttgatcctgaccccactctcttcttaatgggccctctctcccatctgcagcagggtcacggaagcaatttcctcaagtagttttggggtcaggtaggtatctgttttctttagggtcaca

SEQ ID NO: 380771 - DNA, 122 bp, Homo sapiens
ccaccgtctggcagtcctcgtagttggggtagaaagccacgtcggtgcgcggctgctccacgatctccccctgcagcccgaagacaaagagccgggagtcatacagtgtggagccgtagatc

SEQ ID NO: 380772 - DNA, 122 bp, Homo sapiens
cgccgcgacctcgcgtacggtggctggcgaggctcagtacggtgtgtggagctggagcaccgtgaggaagaagcgaggttctttttaagagttcagctgcgaggtctgtagctccgaatagg

SEQ ID NO: 380773 - DNA, 122 bp, Homo sapiens
cgccttcaaagactcctctcctgctcccagctttaccccgttccctccacagtatctgaacgcccctggtgaatgcagaaagccagcctagccccagggatatttacctttccaatttcatc

SEQ ID NO: 380774 - DNA, 122 bp, Homo sapiens
cgcccccgccgcgtcgccctggggcccacgggtgcacggcccgggcagcaaggcaaggtgcggcctctcagcgccaggacccgagacccccagctggagagaaggggacaccgtggtccgcg

SEQ ID NO: 380775 - DNA, 122 bp, Homo sapiens
gggcaggtcctctatcgcacccaagaaaacccgacacacgtgtgcggccttttattcaggcgtttctgggcgcgcactcgcctctcccaggcgcgcgcgcgcacaaccctcctccacccccc

SEQ ID NO: 380776 - DNA, 122 bp, Homo sapiens
tttgtttaaagaccacgaagttacacagcttggctatgttgctggaattgctgcgcctcacgtttctggaatctacctagaggattctgaagaaggcggcgagtctatgactgtgcatgcac

SEQ ID NO: 380777 - DNA, 122 bp, Homo sapiens
ggttcctcaaggcaccattctaggtgggtaacttgtctaggtttccacagtccgttctcacgtcagcacactgacactgtgcccagctcaccactagaagaaaaacggcatacttttctatt

SEQ ID NO: 380778 - DNA, 122 bp, Homo sapiens
accaccttgtgtctgtttcctctttgccgcacctggaagggaaggggtgggtggtggtaacgttcagtgaagacagtaaattagctgagattctgttcctgctgcagaactcagagaaatgt

SEQ ID NO: 380779 - DNA, 122 bp, Homo sapiens
gtggcggcggcggcgcctgggcctgaccgggtccccggggctgagcgccgggctccgcgccgcccctcccgcgcccctgccaagcgggcgcctatcctctccgagcaagatggcaaccccgg

SEQ ID NO: 380780 - DNA, 122 bp, Homo sapiens
tgcaagagccggcaggaaattcccctcctcctgaaccacagagtatttctgggtgggcatcgattgtctatgggccatggcgtaagacccccaccccccgaccccccggcaacaaaagtatc

SEQ ID NO: 380781 - DNA, 122 bp, Homo sapiens
cggcctggacgcggtcctgtgctgccacctgcctccgaggggcagagaaagtgggagggccgggccagaatccctcccgccaaaactcctgcccggtgcggagaggcgcccggagcccaggg

SEQ ID NO: 380782 - DNA, 122 bp, Homo sapiens
ggtggcggcggcgggggtgtcccttccccgtcgggcagagactccctgctggcaggtgggcggccacaccccgggggtcgggggaactgggctgacagcagagcccgcgttctgacctgagc

SEQ ID NO: 380783 - DNA, 122 bp, Homo sapiens
tgaactcggagccagacgctttttctggcgaaacggagaaaaaacgccgcggaaacggtgcgcagggttggggagtataggttctgattgcaacataattccgcaagcttttttatttttta

SEQ ID NO: 380784 - DNA, 122 bp, Homo sapiens
gggaagatcctgcaggacctgaccggggagtttgcgggaaggagggggcgggccaagccccgcagcccctcagtcccgcatcctgcaccgcgcgctccccggccccggcccctcgggcccgc

SEQ ID NO: 380785 - DNA, 122 bp, Homo sapiens
ttgctgggttaattataaaatagattctggctgttgcgtgttagcgcgcgtcccggagtgcgcatgcgcagcggcgggggttgttccggcagcctttcactgaggccacccgccagtttcaa

SEQ ID NO: 380786 - DNA, 122 bp, Homo sapiens
agaccctcggcgagcccaccggagcgcgctggcgacagtgacagcgccgccccccgcccgcgcccggaggtggcagggcctccccaccaggcccggagccccggcctccccggcgcggccgc

SEQ ID NO: 380787 - DNA, 122 bp, Homo sapiens
ctcgccccggcgccgcctcctccaggcagtcctctagactgcatccgccatgggcctggacgctgctcccgggggcagcccccggccagggccaggcacacccgattcctggagcgtcctag

SEQ ID NO: 380788 - DNA, 122 bp, Homo sapiens
tttaaaaggctgagtaccaggctcggtccatatagtgctcccgttcataccgggccatgtcgtgtagagaattccgtgtagctgctgaagcctgaaataactcactctctggcccataaccg

SEQ ID NO: 380789 - DNA, 122 bp, Homo sapiens
ggctgactgtagatgtactcgggatctctcgtcgacttgtcctcaatgaccacgctcgagcgtaccttcaccctagagaaaagactccacgttgggcaccagatgtaggggtgggttgcccc

SEQ ID NO: 380790 - DNA, 122 bp, Homo sapiens
tccaactcaattctacatctttcaccaccattttctctgttctgcccttagaaaagtgttcgctcatcctgctgagattcaaggagagtcacccctggctagtgagtaatcacatttagaca

SEQ ID NO: 380791 - DNA, 122 bp, Homo sapiens
gcacaataaacacttgcagaacaaatggaaaaagcgacgtcttcgatttgtagtgtaaagcgcaaccccagttgcccagcagaaagggatcacccatagggcttcggagctagtaggtccgc

SEQ ID NO: 380792 - DNA, 122 bp, Homo sapiens
gagtatgaggctgcagtgagttgtgatggcgtcactgcaccaaaaccttgggcaacagagcgagaccctgtctctaaaaaagaaaaaaagtccgctaagataaagaacaatgctagtgtgta

SEQ ID NO: 380793 - DNA, 122 bp, Homo sapiens
ctgagcgttcgtcgacagagctcaggaggacctctgggatcaggatgagggtgtgtccatcgagagacactcgcaggatcgacgttggcgggagctccagcaccaggtcgacgtcgtccagg

SEQ ID NO: 380794 - DNA, 122 bp, Homo sapiens
cgctggcagctgggttctcccggttcccttgggcaggtgcagggtcgggttcaaagcctccggaacgcgttttggcctgatttgaggaggggggcggggagggacctgcggcttgcggcccc

SEQ ID NO: 380795 - DNA, 122 bp, Homo sapiens
agctcttaaggaaattctttgtgaaatattctcaggatggaactttactttctgagattccgcagaagagatttacccacaagcaaggtgggaaagagtgaaagctttgcaatgtgatcctg

SEQ ID NO: 380796 - DNA, 122 bp, Homo sapiens
gttgctttgcagcccacacagcctcatttcaggcaacaggaaggagaacccaggtggaagcggagagtggtggtccccatgtcaggaaggcagcactcacagaagtctctggaagacagatg

SEQ ID NO: 380797 - DNA, 122 bp, Homo sapiens
gggaaccccgcagtacaaggtgaccgaggacaataccagaaatgggagccccagaccccacgtagcggcgaagttcccagaaggcacagcgctcgggggtgtggccagacgcatgggcggtg

SEQ ID NO: 380798 - DNA, 122 bp, Homo sapiens
tctcccaggccgggtccaggagcaggtcccggtcccagtcctcttctggctgcatgtaatcgttggtttgctgagaatcataatggtccatgatggtgcgcgcgtgctagggtctggatttc

SEQ ID NO: 380799 - DNA, 122 bp, Homo sapiens
agggtacaaggctgcaatgccaggctgagggtgaaaaacaaactcactgttagaaagcaccgtccgggtgccaggtgtcagctgggttccttcctgcccccttgggtcaaaaagaaattgcc

SEQ ID NO: 380800 - DNA, 122 bp, Homo sapiens
gccggagccatggaacggggaagaaaacagcccgcggacggggtcggcttgtccagggcacgcctgctcggcacacgtgttgccaacgtgaaggcagacatggtccctggccctaggatgag

SEQ ID NO: 380801 - DNA, 122 bp, Homo sapiens
ggtgaacgccgtcttcctcctggccccctgtccgcactcgcagagggagctgctgcagttcgtgtctgggtgcgaggcccaggcccagcgcctgccgcccacccctaagcaggtgatggaga

SEQ ID NO: 380802 - DNA, 122 bp, Homo sapiens
agcggaggactgtaggctcattaagcaaggtatccttaggtcgctggttcgaatccggctcggaggacggtagttttgacctaccaagctaataattccagacaatacggtctttacaaaaa

SEQ ID NO: 380803 - DNA, 122 bp, Homo sapiens
ttgatgagccgctcaatgcgcctgttaacctctgggtagcgggtgccacggtaggggatgcgctgctctatgacacggccggtcagtgaagagcagtctttcagctcacatagtcgcccaaa

SEQ ID NO: 380804 - DNA, 122 bp, Homo sapiens
ggccgaaggcgatgcgcgcagggggtcgggcagctgggctcgggcggcgggagtagggcccggcagggaggcagggaggctgcagagtcagagtcgcgggctgcgccctgggcagaggccgc

SEQ ID NO: 380805 - DNA, 122 bp, Homo sapiens
acctccccaggccgtgcctcccaccccagggtcttctctcttcaccgaaggggtcccttccgccctgccctgagagctgccctgcgcgggctgtcccctgctttgtctgcatttgcattcaa

SEQ ID NO: 380806 - DNA, 122 bp, Homo sapiens
ctcttcaagtatttgatttatgacctaagtagctgggcaggctgataagaacggacaaaacgagctattttgcgggctagtaaactttcatcttagactaatcttctttggtttgggtgagg

SEQ ID NO: 380807 - DNA, 122 bp, Homo sapiens
aaatattcagcgagtgattagctggtgcatccccacctgcgtcctttgcatagccatgcccgctactctttcacaggcagttttacttggtaagttacaaacgtactggctgcactctgcac

SEQ ID NO: 380808 - DNA, 122 bp, Homo sapiens
tcaggttttgagaagagaacatcattggatctggcagctaaaatatgaaacaccatccctcgggcttctctgagtctgtagtctcatcgggaggccagccaacttgctgtctgctattgagt

SEQ ID NO: 380809 - DNA, 122 bp, Homo sapiens
ttcttgccgtaaatttgtggggtttttttgttgttgttgtttgtttgtattttttggagacggtgtcttgctttgtcacacaggctagagtgcagtgggttgatctcagctcactacaacca

SEQ ID NO: 380810 - DNA, 122 bp, Homo sapiens
cacaacgtcaaataactggcccttacctgcatctgccctgctttattttcctgagtaacacgcacgtaacacgcgtcaccacctggcctgctcactgatgtgactgctcattgaccctccca

SEQ ID NO: 380811 - DNA, 122 bp, Homo sapiens
gtgtctggacctgtggagccgctgagccttgtggctgagtgggcaggctctggattatttcgcgctcggcaacccatttccccgggtgcccctgggcgagccatggatcctctccatgcctc

SEQ ID NO: 380812 - DNA, 122 bp, Homo sapiens
gtatggagggggcgggactcttaataaaattacactgcacacagagctagcatcaagatccgctcccgggatacgcgcactgctccggggccctcaggcggagacccagaccccgcgcgggg

SEQ ID NO: 380813 - DNA, 122 bp, Homo sapiens
tcaagaccagcctggccaacatggcaaaatcccatctctactaaaaatacaaaaattatccgggtgtggtggcacgcccctataatcccaggtgctcaagaggctgaagcaggataatcgct

SEQ ID NO: 380814 - DNA, 122 bp, Homo sapiens
cggaatccgtggaggatggatgctggttcacaaccgtcgggagccgctgtggggaccctgcggcaactccctaagactcgaaggctccatctaatgaaccatcagggccctggtcacaaggc

SEQ ID NO: 380815 - DNA, 122 bp, Homo sapiens
agggggaacagcttgggacctagcagagctgctcatcggggttctattcctcccagccagcgccctgacaaagccagcctctggataagaaactaattacttctcctgcttcttcagtttga

SEQ ID NO: 380816 - DNA, 122 bp, Homo sapiens
aatttcaacttagagcaactcgtgttcctgtgcacaccaccgacggcccctgcagtccaccggctcgctgccgtcactggttctgtccgcccacatcttccatgtccaccaccgcctgtcct

SEQ ID NO: 380817 - DNA, 122 bp, Homo sapiens
aaatcattgacttggcagaatagcaagtcacacattaagcaacaagcgaaatacactaatcgtagcttgactgttttgtaaagaatttcacagcacaaaaagttaatatcattgatttggag

SEQ ID NO: 380818 - DNA, 122 bp, Homo sapiens
ctggcagacggcagggcagtgaatgaaaacacttggaaggcgcagtgtgaagcggaaatgcggacgcaaatgtcacgtattattaccgctgccgccacggtttctaatcgcgttaaacatgg

SEQ ID NO: 380819 - DNA, 122 bp, Homo sapiens
gagccctaggggaccggctccgctgcgaggagcggaagtggcgcgggggctcagagaaggcggagggggcggtgaggcccgaacgcgggaaaggcggagaccccgcctccccggggcggagg

SEQ ID NO: 380820 - DNA, 122 bp, Homo sapiens
acaccacatcagagagccttctctccctgcaattcccattcatgaagcatctgaggacctcgattcctgccattggctgcagatcaggggccagatgctggaccaagggtgattcaatccct

SEQ ID NO: 380821 - DNA, 122 bp, Homo sapiens
ttagcaaatctgagttccagtcccaggtccactactattagctgagtgacgcttccagcccgtttcccccgcctggaaactgaggacggcaacccccaccctcgcagggccggtgggaagac

SEQ ID NO: 380822 - DNA, 122 bp, Homo sapiens
atctctacaaaaaagtgaaaaagttagctgaacaaggcggcatgcacatgctactccagacgctgaagtgggaagatcacttaagtccgagagatcgaggcttcagtgagatatggctgaga

SEQ ID NO: 380823 - DNA, 122 bp, Homo sapiens
atatggccttgtgcatagtctactaggggagacagatacataaatatgcaaatgcttaatcgattctccagagcaagggtgagtaaacttcaccctatgggccaaatctagtctgctgtttt

SEQ ID NO: 380824 - DNA, 122 bp, Homo sapiens
gcgggcgggggaggtgaggggtgcgggcgggtgtgcatgtgcctggctgggtgcacaccccgcaaggcggcggcgccaggacgcggagcgctccccagagcccggctgcctcgcacagctcc

SEQ ID NO: 380825 - DNA, 122 bp, Homo sapiens
agggtcagtaagcatgctggaaaagcacaatttccctttgtcacagcagccacctatgatcgtctccaactgaacctgtcaagtgagtccaaaccttctaaaccaattgattttctctctgt

SEQ ID NO: 380826 - DNA, 122 bp, Homo sapiens
tgtcgtcacttctcggctgctcacgctgcgacgttgttttgttgggtcggatctctgcatcggtctgggcatgggtaactactcaggattaatgtcagaagttgagtttttgttggtgacac

SEQ ID NO: 380827 - DNA, 122 bp, Homo sapiens
attataggtgcccatcaccatgcccggataatttttgcatttttactagagatggggtttcgccatgttggccaggatggtctcaaactcctgaccccaggtgatccactcgccttggcctc

SEQ ID NO: 380828 - DNA, 122 bp, Homo sapiens
aggaaagagtgcaaaaaggagtgttgcctgatgtgacactagagttggggaattttaaggcgtttagaagcttggctgtcagtacccacaacagttgtgcgggcaagggaaacaggcccttg

SEQ ID NO: 380829 - DNA, 122 bp, Homo sapiens
cgagcttgaatcccagctctgcggctcacccgcgcgcctcaggcaaggccagtgtgtctccgagcctcggtgttttttctcaagcacgtaactttattcatgagtcgttctgaagcataaga

SEQ ID NO: 380830 - DNA, 122 bp, Homo sapiens
cgccagcggctctcagatcggcctcgcccctttccggactcctggctactcattggctaccgctcgtatgacaggatgtcgccattggccgagaccaactacctatcgtgtctgggagggcg

SEQ ID NO: 380831 - DNA, 122 bp, Homo sapiens
caacctctgacagattcgagtaaaagtaactgcggttctcgactttcaagcatttcgcgtcgccggtgaggggggcggcaggaacccggggccccattcataaaattgcaagccgttttcct

SEQ ID NO: 380832 - DNA, 122 bp, Homo sapiens
aagtgcaagtgtggagaatgcactgctcccaggaccctaccatcctgtttggcctgtaaccggcagtgcctttgctctgctgagagcatggtggaatatggaacctgcatgtgcttagtcaa

SEQ ID NO: 380833 - DNA, 122 bp, Homo sapiens
ttttttccaggcacactaacacacgccatgcaagacaaagaaaaccccggccccttcccccgaggccactaatccagaccgccatctgtccccagctttcataggccacctccctcagagtc

SEQ ID NO: 380834 - DNA, 122 bp, Homo sapiens
cttaatttagagttcgtgattgggcttcagaggggtccagaccccctcgtgttagatgcacgattttgtggctatgtgtagtgttctagtagattcacagctgtcaccagatccacagagtt

SEQ ID NO: 380835 - DNA, 122 bp, Homo sapiens
cactccaggtccgcgccaaggccgggcagctccgctttctgctcagtctccgcgaggtgtcgccttcggccgaagaaaccaccgcggcgccaccctcgtagctcgcacttatttatttattt

SEQ ID NO: 380836 - DNA, 122 bp, Homo sapiens
aaggtcacctaccttagctccttcccgaatatgagaagatctgccgcattgtcgatggcccgcgatgcgatccgctcggccctgtcgcgaagcttgtgaaagctattgtagatgttccggat

SEQ ID NO: 380837 - DNA, 122 bp, Homo sapiens
gatggtttcagagaaagatgaagtttcaactgtggtcctctcagatcaggcctctcggaccgattttcccagctctgcgggcgctctacgcgctggcgcgagccgcccctcaggaggccacc

SEQ ID NO: 380838 - DNA, 122 bp, Homo sapiens
gcagctgtctcatgtcttccctgaaggaaccctctcatgggacagctggacacagccaggcgggaaggactcttcaccagccccgtctccatagtcccggctgccatcactgctggcatcga

SEQ ID NO: 380839 - DNA, 122 bp, Homo sapiens
gcctttccacaccatcagtatctccgggttgaggctgttgaggctgcaggcccccaggcacgtgccagatgcggacgctgtgggcatttccgctcagctgcaagaacagcgccactgaggca

SEQ ID NO: 380840 - DNA, 122 bp, Homo sapiens
catttggttagagggtctactccatgggttatactgagcaagaactccagatgcacatggcgcacacaggcaattgtgtaacaaaaggttgaaaacagctcccctgaattttttgctgtttg

SEQ ID NO: 380841 - DNA, 122 bp, Homo sapiens
tggactccttcgtccgctttgtggtgttacagggtctctaggacactgactccgctggctcggtccggaggcggcggcgaagcagggagcgacccaggttgcgctgctccgcgcggcttaag

SEQ ID NO: 380842 - DNA, 122 bp, Homo sapiens
aacattaatgggggtctcgcgttagtatttgaagagtcatccgcttctgaaaagtgttgacgcaaaaccacgacgtctaggcaggaagtggccaattgaaccagggcacgagctctcatttc

SEQ ID NO: 380843 - DNA, 122 bp, Homo sapiens
atagttaatgtcatcatattattgagttctttatcttaaattaaaacaaatatatatatccgcagtggtcttcactaccaagtcatcagtaggggggtgatagtgatggagccattctttac

SEQ ID NO: 380844 - DNA, 122 bp, Homo sapiens
ccatttctaatttcattgtctttcttcccacgctcatttctatcattctcccccatgacccgtctggaaattatggagagtgctcaactggtaaggagaacgtagaagtagccctagggatc

SEQ ID NO: 380845 - DNA, 122 bp, Homo sapiens
tgcttttttgccactgcttccgatttaacctctggcacctttatgactgcactgataactcgaggaggagtctggccagatgcctgctgagtaggcattgatagtctcatcacagatgtacc

SEQ ID NO: 380846 - DNA, 122 bp, Homo sapiens
acatctcatatcttctggttgatttgagcaaagctcctgccccctgccaggctttgggttcggcctcccccagaccgggtctccggattcgcagccccctgggcggggtctccatgtcgccc

SEQ ID NO: 380847 - DNA, 122 bp, Homo sapiens
gcatgagatgaaaggccaggagtggggctgttggcagactggcagacggacaggcggggccgggtggaggcgtggggtgggggaggggagataaccatctgctagagccgccaggtgtagac

SEQ ID NO: 380848 - DNA, 122 bp, Homo sapiens
gcaggccagcaggagttccggttgggcctgggcttggcgggccccgcactcggagcagtccgccggccctgctgccccgggcaatgaggggcttagcacccgggccagcggctgcggagggt

SEQ ID NO: 380849 - DNA, 122 bp, Homo sapiens
aattaagtaacctgttgaatgcacacagcgaatgagtggcacagccagagattcaagtcccgactctgggctctcagccatcccactctccctcctgccatctctccgccaagaactgggga

SEQ ID NO: 380850 - DNA, 122 bp, Homo sapiens
agtttcctcatctgtaggatgagtataataatagagcccacctcgaaatggggtttgtttcgagtataagatgagctaatgcatgtcaagtgtttagaacacagacggggcccggagcggtg

SEQ ID NO: 380851 - DNA, 122 bp, Homo sapiens
ggacatgggccgggtttccgtgacccacaggcaactttggcacagacgggctgagaactccgctcagggcccctgccaggctgtgctgcgaacacgtgccggggtctcgggcggagctggct

SEQ ID NO: 380852 - DNA, 122 bp, Homo sapiens
tattctcctgcccagcccccggcccggcctccgcctccggccctgctccagccccgccagcggcccaggacccgcccctggctccggccccgcccctggctccgcccccgcccccgcgccgg

SEQ ID NO: 380853 - DNA, 122 bp, Homo sapiens
aagcatgagttctgtcacaatcaaacaggtaatcatgaggctcctataccaggaataagtcgtaagaatgtctgcaggcacactggcttttcatggcaaaatgctgctgagacactccaggg

SEQ ID NO: 380854 - DNA, 122 bp, Homo sapiens
ggaaggggccctcggtcactaagtccttcctcgcgaagcccgcaggcatctccagccgcgcgcagtcctgggcgctcccgccgccgcccaccgaggcacaggcaccttctccgtgagccggg

SEQ ID NO: 380855 - DNA, 122 bp, Homo sapiens
agataggtgagttccagtcatcgtttctcccaattcttgccttttggttttttggcataacggaaatggtcccgttcttggaccgtctctccctctcaataccctgttttcccctcagtttc

SEQ ID NO: 380856 - DNA, 122 bp, Homo sapiens
aaaaggacagaatggaggacagttgtcttctttatctggtgaagccagccttcttgcacgcgggtcttcaccccgccccattagctcttgcctgtcttgtttgctaacctttaactgcagta

SEQ ID NO: 380857 - DNA, 122 bp, Homo sapiens
aggcagacagacactcgggcctccgttccaccctccctgaatcacaataggcttcagagtcgcggacacacctggggaatggcgatatccccccaccagggacacaggctgttcctcgaagt

SEQ ID NO: 380858 - DNA, 122 bp, Homo sapiens
acactgcctcctgtgcatgctccttccaggactgctgtgaggacagaggtgtaagagcaccgcacaaagacctgcgcgcaggaaagacggctcatcactgagttaaggcggtgagagttctt

SEQ ID NO: 380859 - DNA, 122 bp, Homo sapiens
gaccatcaaataggccttctgggcatccactttgagtcctgcagcagctatgacgtcaggcggctgctgtgtacctggctgtgggttaggctccttgggtggaccaaggacacacacccagg

SEQ ID NO: 380860 - DNA, 122 bp, Homo sapiens
cggagccgcttcctttctcgccgcgaggctcggggttggggggggaccagattggagccgcgggctaactgggatccgtcccatttccctgggcttgacgttctctgaatttttagctaatg

SEQ ID NO: 380861 - DNA, 122 bp, Homo sapiens
caagtgacaacctcccagaacttagttcctcacttggtgcccacctctcagagaagacatcgcacacacggccgggcacggtggctcacgcctgtaatcccggcactttgggaggccgaggc

SEQ ID NO: 380862 - DNA, 122 bp, Homo sapiens
taaaattacctcaaggagctgactctactggcagtaaagaagctagcagtggccgggcaccgtggctcatgcctgtaattccagcactttgggaggccgaggcgggtggatcgcctgaggtc

SEQ ID NO: 380863 - DNA, 122 bp, Homo sapiens
cggggaaaggcacgcgcgatgctttcccactcgctcagcgggcgccgctcactggaaactcgctccggattccgaacccgagagcagagcagagggaagcccctttgctgagcagctcctta

SEQ ID NO: 380864 - DNA, 122 bp, Homo sapiens
gcggggaggggcagggggagggcgggacccgcgcagccaataggcgaggacgcagtcccgcgtggccttgtgggagctgtagtacgctccctgtgcccactttcctgggccggggtagcgct

SEQ ID NO: 380865 - DNA, 122 bp, Homo sapiens
actggaacctgtactggaggacatcctctttccgaatgaccgaacacaacagtgttaaaccgtggcagcagctaaaccaccaccctggaaccaccaagcttaccaggaaagactgtttggcc

SEQ ID NO: 380866 - DNA, 122 bp, Homo sapiens
actattcttgagaaacccacacccatgataaaatcacctcccaccaggccccacctccaacgttggggattacaatttcacattagatttggtgggacgagccatgccagggatgccccaaa

SEQ ID NO: 380867 - DNA, 122 bp, Homo sapiens
aaggagaccgaggtgccctgccctgggtcacgcagctagagatagcagggctgcgcccctcgcccggagccgcccctcccaaggggcttctccttgtacagctcactgtacagctgtaccgg

SEQ ID NO: 380868 - DNA, 122 bp, Homo sapiens
atagccaaactctggacagatggaggtgattttcccgcccctgtcattgacatcttggcccggctaggacaggaaccccccttgctgggggaagaggggaatgactttgtggcatggcctag

SEQ ID NO: 380869 - DNA, 122 bp, Homo sapiens
cccgagcagcctggccagcagcatcccgcctcgcccacttcccagtagacacagggacagcggcttccactcccgggacctctggacatcctccatcccggtttggcgggaaactgacccag

SEQ ID NO: 380870 - DNA, 122 bp, Homo sapiens
agccatcgtcgtcgtaggagaggacagctctgtgccggttattctagaacaagccatcgtcgtcgtaggagacgacagctctgtgcctgttattctagaacaagccatcgtcgtcgtaggag

SEQ ID NO: 380871 - DNA, 122 bp, Homo sapiens
tggtcccttaaatggtgatgtttcttagggtttttttcttggctctcttgatttccctctcgacatattctgtgatattatttgtgtggtcttgattagtatctaaatgctcatgattttcc

SEQ ID NO: 380872 - DNA, 122 bp, Homo sapiens
gttaactgggtagagagagtcgttttatttttagtgtgtaaaaggaagagtgttaagcaacgtggattgtgaagcaaaaggcagatttttggccagatgcgtttgctctatgatgatcctga

SEQ ID NO: 380873 - DNA, 122 bp, Homo sapiens
ccgccagtccccgccccgactgtgaatgaaaggcgggcgccgccgagggctggctgggaacgccgcagcgacgccggcctctcgagaggcgcgcgccccgccgagatgtacggtaaggaggg

SEQ ID NO: 380874 - DNA, 122 bp, Homo sapiens
caagcgtcttttctgtaatttcctccgttagtgctttgcttgcacctgcattcactgcaccgagggaggcgtctcagttgattcctaatgttttcgccctgcgattgtgctatgtgggtaaa

SEQ ID NO: 380875 - DNA, 122 bp, Homo sapiens
atactcagcaacaggaggagcattctggcggcaagttctgctcagcggagtttctgcctgcgaggagagcgctgggcgtgaggccgaacgcactgggccgagcgacggaggcgcgcgcagag

SEQ ID NO: 380876 - DNA, 122 bp, Homo sapiens
agtcccacccctgccttggacaagtgcccactcctgcgcgtacatggccagctgggtctccgcatagctctctccacctcgcctctcccactccctgttcccgttcccatctctgtcctcct

SEQ ID NO: 380877 - DNA, 122 bp, Homo sapiens
acctgagctccctcggtaaggggagctgtgtcctcttgatgccaagtcatgtttggggaccggtcaccgaatgcgcgtcaaagttcgccgcgtggagggtgaagaaagaggctgcgcctcaa

SEQ ID NO: 380878 - DNA, 122 bp, Homo sapiens
ggctgggcgcgcggcccgcggtcccttgcacgtcggcccccgtcgcccgccccgccccggcgcgcgtttccattttaaaccgccgcccgccgcccgccacccgccacccttcggccgcagcc

SEQ ID NO: 380879 - DNA, 122 bp, Homo sapiens
ctattttgatcggtgacaatggaagcttatttgtattgttttgagaacaccccccacaaacgcacgtaaaacctctataaagggagaaccgccttgctgctgagggcgcggtgggacccgtc

SEQ ID NO: 380880 - DNA, 122 bp, Homo sapiens
cgctcgggctggagcgcctgaagccgcgaccgccgcctcagccgcctcagccgcggtcgccgccgcttcggctgacttaggctccgccgccgcctcctcacccgcctcgccccgaccccgcc

SEQ ID NO: 380881 - DNA, 122 bp, Homo sapiens
acttgcagtgatgtttaactcctctccacgtgaacatcacagcaagtctgtgctgcttcccgtccctacgctgcctgggcagggtttgtggggaaggggtgggagccctggggctctgggag

SEQ ID NO: 380882 - DNA, 122 bp, Homo sapiens
aggcccgcttagcccgcgctggctccggaatggcgagggggcggtgccgggctgtgggagcgcctgaggggcaggagtccagggaggcagacttttaccctcaaaaggaatgagtcccagag

SEQ ID NO: 380883 - DNA, 122 bp, Homo sapiens
gcttaggaaggtcgggggcctgggggtccacccgggaccggagattgcggatgaggtcagcgctgccccccccaacacccttccctgctgcataccctgtctgaagtaagaagctctcaagc

SEQ ID NO: 380884 - DNA, 122 bp, Homo sapiens
caattcatgtaagaaaaccaggaagcaaggaggtttcagtttatcaacagatttaaaaggcgcaagccttttgatataactagagaagagaagactcaggtgatcacacagactgtcttcac

SEQ ID NO: 380885 - DNA, 122 bp, Homo sapiens
gttcacagccatgcacacgagtgtgcacacacacgtgcagtcagcagacggctcttctagcgtgacaggtctgtccagatgcagaaagcaagacccaagcaggaccttaggcctcccaaggc

SEQ ID NO: 380886 - DNA, 122 bp, Homo sapiens
ttctttgactaggaaagggaactccctgaccccttgagcttcccgagtgaggcaatgcctcgccctgcttcggctggcgcatggtgcgagcacccactgacctgcacccactgtctggcact

SEQ ID NO: 380887 - DNA, 122 bp, Homo sapiens
gctgggtggtgtgggctgaccctcatggctgtgcgccgcagctgctccagttcactgagccgctcggaaaaggacaagctcccgggcttggtctgatcatctagtttctgccgatgtcctat

SEQ ID NO: 380888 - DNA, 122 bp, Homo sapiens
gggattggcagagggcatggaggagatgagtcgtgtagatagactggccaggaacgccaccggttggcagccttttgtcaccagttgagatgatttgggatcatttttggaggctcctggag

SEQ ID NO: 380889 - DNA, 122 bp, Homo sapiens
ggtgttggtgcttttccctttggctttttcaccaccgtcttcaatgcccatgagcctttccgccggggtacaggtaagagtcacactcagctcccatcagggagccctgtgaatcccctcag

SEQ ID NO: 380890 - DNA, 122 bp, Homo sapiens
cttctaaaatctctgcagggtacgtgtctgacagctaacacagcccagcagcctacttcgcgctgacctgggctttaggactggatgcagggggcccaaggtccgccctcccgcagctaggc

SEQ ID NO: 380891 - DNA, 122 bp, Homo sapiens
atctgtaagggagcaaaagaggttacagctgaaactcaaagctgatctgttttcacattccgctcatgcgggcttcagagccacacaatttcactttcaattacttaccacacttcattgat

SEQ ID NO: 380892 - DNA, 122 bp, Homo sapiens
gccgggagaggagagggagggagcgaggcggaggcgcctcgggagggggccatcgcccaccgggcagtcttcccaccgacgattaggctttgtcttcaaaacaagttagaggtggtggcttc

SEQ ID NO: 380893 - DNA, 122 bp, Homo sapiens
tgctccagcactgggaccgagttcgagctctcgcctctgtcccgggccgcaacttccaggcgcaactggactcccacgatccgcaggaaccgggtcccctccactcgccctcccggagcctc

SEQ ID NO: 380894 - DNA, 122 bp, Homo sapiens
ctcggccccaaaactgcgaacggtctgcagccctccaacggcttcccgcaccacctgccccgccctggccactgcatcctggatctcccgaagcacttcctggaaaagagggccagcaaaca

SEQ ID NO: 380895 - DNA, 122 bp, Homo sapiens
tccctccccaaaaacccctgcgatgatttccagggtggacgagtctggctttgagagggtcggagggtccgagagcgccaagagagagtccgggaggcagatggcggagctgcagttggaag

SEQ ID NO: 380896 - DNA, 122 bp, Homo sapiens
gggtacccatgctgccccgcaggcctcccttcaatctgtgcttgcacaattctagatgggcgttctccagcggggtctggtggtgtgcactctgctgctccatttgctgtccagttgtttgc

SEQ ID NO: 380897 - DNA, 122 bp, Homo sapiens
gttctatttatgctcagcaccatagcagacagggtggcaataccattaccaaaataataccgccgagatgtactaagtgacaaatgagaggcttctggttttataacctaaatacaagactt

SEQ ID NO: 380898 - DNA, 122 bp, Homo sapiens
ggtgctgaaagagtgttttagattcctatttacacacacatacacataacagtcactacccgaaaactgtcttacagcatgtcagtgttaaaatgttaactttgaagtctaaagaccaaagc

SEQ ID NO: 380899 - DNA, 122 bp, Homo sapiens
tgccgtctacgataatctcgactgtaagacctgctacgtgatcgtctatgggagcgggagcgagaccgtgaccgggtataatgccttcgggagcttcttctggatctagacctgcaagacaa

SEQ ID NO: 380900 - DNA, 122 bp, Homo sapiens
gtccgcctggtggaaaagccctgcagctttgccaggtggggtgagctggcccgttgtacgcgaaggcagaaaaaacagactaggatttccagcagctgtgcctggagcggcaaccctaagcc

SEQ ID NO: 380901 - DNA, 122 bp, Homo sapiens
cctctgcttggttacactgagccgatgtttctttagccaaaggcagtgggctagtttagacggcctttcattcccggcagcgcctgtgggtgcgtgtgacctgggacagaggggcaaaggaa

SEQ ID NO: 380902 - DNA, 122 bp, Homo sapiens
tgccctgcccggaccttattctcaaagccccgccgatcccgccgtccccgcgaccccaagcgtcagcaaagtttatgcagttgaactggattctgagtatatctgtggatagttcctgggag

SEQ ID NO: 380903 - DNA, 122 bp, Homo sapiens
tggactgataaaggcatgttttcacagcaacatattaacatttgaaaggaaagtgaattccgggtttcacctgggtgagacctcaccagctcccatttgtgaaagccaagatggggccaggg

SEQ ID NO: 380904 - DNA, 122 bp, Homo sapiens
ggatttaagagttattgttggcagcaggatccacctggtggtggtcacagagctcactgacgcatgttgtacgtctcaagatgccaaaaccacaaaaagattggagggttaagaaaaccccc

SEQ ID NO: 380905 - DNA, 122 bp, Homo sapiens
ttgtatggacggacagcatttcctttctaaggctgagtacgattccattgtatggatggacggcatttcgtttatccattcatccatccaacaacacgtgaggcggcttcaggcttcggagt

SEQ ID NO: 380906 - DNA, 122 bp, Homo sapiens
gcagagggaatgtggctggcagaacaggtgggccaaggcagtgtccagcaccacatgccacgctaaggagaatgggctttttctacagctgctgtactggccctgagggttcatggccttca

SEQ ID NO: 380907 - DNA, 122 bp, Homo sapiens
ctgttcaaggcccttctccacccccacatcctgcagcccctgccctaccaggtccagcggcgtccgctccagcacgtccacaagcctctccagccgcgtccgcgccgtgaagacgaagtcgt

SEQ ID NO: 380908 - DNA, 122 bp, Homo sapiens
tccacaacggtgtccccaaggctgtcacaactccgagggcacatgcaaaactgaacactccggccatgcaaaaaatgattttcttctgttggcttggcatgatgagaaacggcttctgtgag

SEQ ID NO: 380909 - DNA, 122 bp, Homo sapiens
cctgctggcccggggacgggcatcggctctcagcaagagaagtattcccgggatgctgagcgcttcattctgtctccaggactcaggcaggtaggtcccagctccgccgcgcccccggacct

SEQ ID NO: 380910 - DNA, 122 bp, Homo sapiens
agtttaaattcctcttagcaagcccagcatcgcagccaataacgcatcagggggcggagccgtagaggcttgcgccccgcctcgctccgctattggaaggaaagcagccaatgggagagccg

SEQ ID NO: 380911 - DNA, 122 bp, Homo sapiens
agccctgctatgctgaaactactcccggcccagtgctagccctttgggaccccgtttgaacgtctgactgccctttgacacctggaccagtgggcaggaagagaaactaaaatcgaggtagt

SEQ ID NO: 380912 - DNA, 122 bp, Homo sapiens
gtttctggtacaggaccagcagtacaaaaaaatagtgtacgagtacctggataatacacccgttttgcaatagtgcaacttttaagtacatattgttgactgtccatagtccacgcagagtt

SEQ ID NO: 380913 - DNA, 122 bp, Homo sapiens
ctgagaaaggcccgggcaacgacgctccgggggcttgccggagccctctttgaagtctcccgacgggctcccagcctctcataaggcagctaaggccgaacaccccggtgaccataggccag

SEQ ID NO: 380914 - DNA, 122 bp, Homo sapiens
cgtcctcctttctgtgatgttgtctcctcacctctgtctctgccatgaggagccatacaacgccttgagattgtcagccaaaagatgttcttgaaaagctgggttatatgtttttcgtcgtt

SEQ ID NO: 380915 - DNA, 122 bp, Homo sapiens
acagctggcctcgctccctccctgtgctccggcagcccctcgcctcctctctggcctctgcgcccactgcggcttgccgccgggggcctcccctggacaccaagtttcttcttttgttgtgt

SEQ ID NO: 380916 - DNA, 122 bp, Homo sapiens
tttttttttttcctaaagcgattgcgatttctgctgggagctcaagacgggcgagctgcccgagatctcttcgagataccccaggggaggaggagatgggcaggatttagtaggacaactcg

SEQ ID NO: 380917 - DNA, 122 bp, Homo sapiens
gcttagggcaaggtgcagagggcggcgcggcggtgcagcgagaaagacgcggagagagggcgctgctctgtggctctgcaaccttccgccagctcccacgctttccccgcgcgtccccggcg

SEQ ID NO: 380918 - DNA, 122 bp, Homo sapiens
aagtgggtcccagaaagtacccccctccacatacacaccgcaagcatctttggggttggccggaggggcgggccctggctgggctcaggcgagaatccgctggaatgggaggtgaggatgat

SEQ ID NO: 380919 - DNA, 122 bp, Homo sapiens
tgagaacaggaagttggtagctcagctggactgatatgtgatttattctttcaacagccacggccagatccagtgaaaaacaagctctcatgtctgaactgaagataatgactcacctgggg

SEQ ID NO: 380920 - DNA, 122 bp, Homo sapiens
ccgccaagcccgaccctgcaaagggtcgtaaccggacttcggggcaaacttcaggtcccccgcctgctagcccgccaaccccctccgccaggcagccggcgcgcctccaggttccgcccagg

SEQ ID NO: 380921 - DNA, 122 bp, Homo sapiens
gcagtctcatgtaaccaagtttaacccacagttgaaatttccagttggtcatgtgagcaacggaagcaatttttaaactctggccaggagccccaatgcttacaaaaataaaagctttgttc

SEQ ID NO: 380922 - DNA, 122 bp, Homo sapiens
atgccttgctgacattttaatgcttttgttttccttctcttcatcctgtctggcatgtcacgttttccttggctcttttattgtgtaacatgtgatcaggggctaaaggacattcgcagagc

SEQ ID NO: 380923 - DNA, 122 bp, Homo sapiens
ggagttgcttcccctgctaggcgggctcgaaccgggcgggagtcactgtccaccttgcttcgccagggtgttatcgccagccagtccccttccgcatgcccaagggcagcctcaggaagcga

SEQ ID NO: 380924 - DNA, 122 bp, Homo sapiens
ttgcattcaggtagattatttggaagatgatttaaggacgtaccagtgcaggagttgtcgcgggacagtgagaccagggcagtttgacaatcaataaagggtgcatcattggcaagctacct

SEQ ID NO: 380925 - DNA, 122 bp, Homo sapiens
ccatcctgagattccgagggggccgcagcgtggctggcaggaccgacgtctgcgcagttgcgtctgtgtcctgcttggtcctctagcagctgagccagacacatgttttatgtcgtgtggga

SEQ ID NO: 380926 - DNA, 122 bp, Homo sapiens
tccagactttccccctccagttaccctgattccgctcggagatcggcccggcagccatggcgaaagagatcccgccgtctcccagcagcggttccgccttctgacctcagcacgacttccac

SEQ ID NO: 380927 - DNA, 122 bp, Homo sapiens
tggaggtggaatgaacgaacgatcgaacgggtcaatgaaaagatggatgagcagttttaccgctccaggggcagagtgagaccctgagggtctcagctgcatcctacctgagaacagggcct

SEQ ID NO: 380928 - DNA, 122 bp, Homo sapiens
ccggagtgggggctgctgggcttaggagcggatctccaccgaggtctgggtttcttctctcgcaacggtcttgactgtttccttgagccaccgtcagatatttatttaacctcgcagttcag

SEQ ID NO: 380929 - DNA, 122 bp, Homo sapiens
ccccttgggcgatgcctggacagcatcagtagtagttgcccgagggaggggggcagtcctcgtccggggacaggtcccaaaaggctgtttatttgttagagttctacgctcttcaaatgaac

SEQ ID NO: 380930 - DNA, 122 bp, Homo sapiens
ataaacggagctggacgactcagtctcttggtctgtggctgctgcggttacctggatgggcgagcacctctgaggctggctttgttacctgggcaataagggactagcagttcagccgtttt

SEQ ID NO: 380931 - DNA, 122 bp, Homo sapiens
gcaggggcggggtcccaagccaatggaagggtgataccgagagggcggggcgccaggcggcgagagagccaatgggaggccgagccgaggaccgcgggcggtgggcctccccccgagaggag

SEQ ID NO: 380932 - DNA, 122 bp, Homo sapiens
cgagcggggcgaggcagcgattggctgccgggcgttgtcagtcgccgaggccagagccatcgccggggaagcgcagccgggctcgggtgcttcggctgccgccgcggctgctcggctagtgc

SEQ ID NO: 380933 - DNA, 122 bp, Homo sapiens
accttgaatgactttctgagacccacaagataaatcagacaaatctcaggttgagtccagcgttgctacgtattacatgacattgtactgtaactgaatctgtttctacctatggatctatg

SEQ ID NO: 380934 - DNA, 122 bp, Homo sapiens
aacaaagaacggaagttccccctcgtttcgcttccgggtcggttgttcttgccactcacccgtacccccaacgcccacttgttctgtctaggaaaatgggaggtcctcgcctctctgtggtt

SEQ ID NO: 380935 - DNA, 122 bp, Homo sapiens
agctaaagggtgcctcttactggacggcaaacgaatgacagcgtttatttcaagtaaacgcgatccaggcatgggatatataaataattacatatatgtataaataattatatatatatata

SEQ ID NO: 380936 - DNA, 122 bp, Homo sapiens
cccggagaggccgggcaatctcgggtcttcggtggatgcctttgggcgggctcggggccacgccggagtcccgcttggaaactggggagtcgggggggggactggattcccagcggaaccgc

SEQ ID NO: 380937 - DNA, 122 bp, Homo sapiens
ggttcagatctcagttcagttttctcagccttttctgtgctggttggagtctgtgctgtgcgtgtgtcactccagtgtcaggctgatatctgtgcaggtttccacatagaattcgggcatcc

SEQ ID NO: 380938 - DNA, 122 bp, Homo sapiens
aaactgaggcgcaaagtcacgcacgcagtgattaattcattttatgcagttaatgggaagcgggctcaaggctcggagggagctctttacacgtccggccctgtgctattataatgagttca

SEQ ID NO: 380939 - DNA, 122 bp, Homo sapiens
ggaaaaaaaaccccacagagtttattaacactcgcaggtagagaggcccaggagacccagcgcagcccggcgggagccctctccacctctccaccaaaggcaggtggtcccaccaggctgtg

SEQ ID NO: 380940 - DNA, 122 bp, Homo sapiens
cctggtggaggtggacagcagctgctggagagcccggagggcagccaggaccgtgtcagacggcaggagtcgggcggggccactccaggcaccggccagcagggcagaggtaccagggaggg

SEQ ID NO: 380941 - DNA, 122 bp, Homo sapiens
tggggtgggtgcactcttttggagctggaggaagtgctgccctctgctcccccatcccagcgctttggtttctcccacccggcagtcatggggacgctggatgagcccatttctgaagtgcg

SEQ ID NO: 380942 - DNA, 122 bp, Homo sapiens
aggggaaaatatatttttctcacagagcatccagagattcagttgcaccgcattttcccacggactgaggtgtcctgattgtgtttgttttacagtcctgtgaggattcgttcatatcagct

SEQ ID NO: 380943 - DNA, 122 bp, Homo sapiens
atggacggcgcggagagcgcaggaggggtctaggcagagggacaccaggtgcgaaggcctcgaggcagcagggcttgtgtgtggtaaagacgtaggagcaaggagaaggctgacgtggcctg

SEQ ID NO: 380944 - DNA, 122 bp, Homo sapiens
caccttctttgtgctcaggagcggtgagtgtcagttcggcggctgagcccccagtaagggcgtggttccgggccaacgggaggacgtgctgatggcgctgctttcttccttccccaccgcag

SEQ ID NO: 380945 - DNA, 122 bp, Homo sapiens
ggtgggcggaaaaagccacctgggaaagtcagcggttttgtggattaggtagtgtaaccccgcaggagggaccctttagtattcccttccgggaaaaggcacactttaggtcttctcggatg

SEQ ID NO: 380946 - DNA, 122 bp, Homo sapiens
tgactagcgcccgcatactgtcgagggtatggagatgaagggtcctctccgggagccctgcgccctgaccctagcccagaggaacgggcaatatgagtaagtaaccacctgattcccacaga

SEQ ID NO: 380947 - DNA, 122 bp, Homo sapiens
gacgcgccagcgtgaaaggcctctcaccgcgcatgaccatgggggcaggacgtgagggcgcgggttagtgtcaaaataggaagaggaggcgagcttcaaggacggctggagaaaccagaagg

SEQ ID NO: 380948 - DNA, 122 bp, Homo sapiens
cggtccgcgtgcccctcccggcacacccggaggtgagaagtgccctccggtgcctccgtccgcagcccctcgtaggtctgcacgtcctgcttcggatcccaaatcctggctttctgaagaag

SEQ ID NO: 380949 - DNA, 122 bp, Homo sapiens
gaggaaagaggaatacaattagaaataggattcaggctgaatttaaaggcttagtgatgacgggttcttaggttcgggtatgtgggagaaaaaaaccagcatagagactaccttcggggcag

SEQ ID NO: 380950 - DNA, 122 bp, Homo sapiens
cttaaattttacttactgaaaaccaacattttaactcactccaaagctagtatattctaacgtaatgctcctatattaccctggacaaatagttgagtagtcagggataaaatctagaagta

SEQ ID NO: 380951 - DNA, 122 bp, Homo sapiens
gggaaaatttggagtaaaatgtcacaattcaggatttaaacaagaaagacacagctcccacgtatgctgaaaactcatcagcttaagactattcacatgtcctgtcaggattacatgtgttg

SEQ ID NO: 380952 - DNA, 122 bp, Homo sapiens
ggcagagctcagtgatgtcagcttcagcaggctcctttgcttcctcagctgtctccacggcggcatcgtctgggccaagggagaatgactaagtgtcccgcctacacccggtgctaatccag

SEQ ID NO: 380953 - DNA, 122 bp, Homo sapiens
cctccactgcctttgtcacccgccagtgtgaagtctccaaccctccccgtgtgcagtctgcgcttgggaatttgttgttgtttgttataacccaaatatacttgaaaggtaaagcttaagag

SEQ ID NO: 380954 - DNA, 122 bp, Homo sapiens
agcgaaggcggcgtaatcatggctgctcttcctccaggccggcgcggggtgtgcgaggctcgctccagtcaaggttgcaaggtggctattgcgatcctcattttgcagaggaggaaacggaa

SEQ ID NO: 380955 - DNA, 122 bp, Homo sapiens
acatattaaaaaataaacattacttgatcacctattctgttctagtacttctctatttaccgcctgtacagagaagtaacacacagtcctcaacttcaagaaggaatcctaagcatctcaaa

SEQ ID NO: 380956 - DNA, 122 bp, Homo sapiens
agctattaagaacggaactgggatttgaacctgggtgcactccagagcctgagctgagcacgtagccccttggttttccacagtgcctgtgtagttagtgacaggactggaatgcttgtttt

SEQ ID NO: 380957 - DNA, 122 bp, Homo sapiens
aagggtctcggcggcgacccctcgcccacatcccggtgcccgggcctccccctcgcggcacgttctcagtgttcacggccccgggacccctgctgggggccacggaagcatccgccgccgct

SEQ ID NO: 380958 - DNA, 122 bp, Homo sapiens
agccgggcttacagaccattgctgctcagctccctggattcagcccctttcccaggggtacgtacggaggtctaacctcccgctgtgccaggcttgcagccacttttcccgaaaacccgggt

SEQ ID NO: 380959 - DNA, 122 bp, Homo sapiens
gggcaggtaagagggtgggtggagacccgtgttcgcagctgttgtcgctgaggccgcagtcgtctttccaggcctacaggatttggcttccagcccctgctgcctttatcagctgtctgagc

SEQ ID NO: 380960 - DNA, 122 bp, Homo sapiens
gccgccatcttgcggagccacggggagagcgcgccagaaatgaggctggcggggcggaggcgcgtgggagtgggggaggggcggaggcgcgtgagtgggggagcgcgtgggagtgggggcgg

SEQ ID NO: 380961 - DNA, 122 bp, Homo sapiens
gtcggtggctcaggcagcacagtccatcaccaacacagagaaaattactgccaggcctaccggtggctggccagtagcatcaattttgtattggaagggcaatccaaaccagattcaccaaa

SEQ ID NO: 380962 - DNA, 122 bp, Homo sapiens
cccgggcggggaagagcttcctggtgtctcccggctcctgcccttctcccgccccaggggcgggctgccgccgccctctgcagctgagtcagtgcagttcctcacctaccttctctgctcac

SEQ ID NO: 380963 - DNA, 122 bp, Homo sapiens
aagaatattttagaacatcagctacagctggtatggttatccatcctcctaatcctgaatcgctttttaaatacatagtgaaacattcaatttttaaatgaagggcagatttttctaccctc

SEQ ID NO: 380964 - DNA, 122 bp, Homo sapiens
ggtctgagttttcttgtcccactgggtgtttcaagccctaggtaaaagtgtgtcctgcctcgttactgggaagcaccatccacacacacgagcctacccagcctggggccctgtgtgccagc

SEQ ID NO: 380965 - DNA, 122 bp, Homo sapiens
tcggaaacacacataaaatcctttaaaaccaagccctaacagggttcagaggaaagagtccgtgggaggcgcataggaaaagcctaggaaagcctcggcagcttccttgacgctggctgtga

SEQ ID NO: 380966 - DNA, 122 bp, Homo sapiens
tgctacccacatccaaagtgaagatcaagacctcagccaagaccactgccaatgaagctccgcaatccccaagcagaaggcgcttgggtgaggggtcttcctgactcaaaaggacttgaagc

SEQ ID NO: 380967 - DNA, 122 bp, Homo sapiens
gcatgcgcgactgagccgggtggatggtactgctgcatccgggtgtctggaggctgtggccgttttgttttcttggctaaaatcgggggagtgaggcgggccggcgcggcgcgacaccgggc

SEQ ID NO: 380968 - DNA, 122 bp, Homo sapiens
tcttgcgggccttggccctgggctcggctttggggatgatgggcttgggctccagcttggcgggggtctcgcgtgcaggctcggggcctcggagcgtgggggcctgcagcggggcggtggcc

SEQ ID NO: 380969 - DNA, 122 bp, Homo sapiens
caatcatgctgcacattgagtatgaatcagtgtggacaaacataggcaccttctgttggccgaggctcagagcaggacacaggactccaccggactgggacacctctcacccccaattcagc

SEQ ID NO: 380970 - DNA, 122 bp, Homo sapiens
gtccccagccctgccccgcgggaacgcagctaaagcctggtgagtaatagagagcagcgccggtgggctggcacggctggggaccgagtacaccctccgcagccgctggcccaggtgctaag

SEQ ID NO: 380971 - DNA, 122 bp, Homo sapiens
tttcaaggcagctctctttgttagaaaagttcctcctttacctgatctgcagctggccttcggaggaccttccagtaacagatcctccaacagctgcttagctatgccacagcctacctgag

SEQ ID NO: 380972 - DNA, 122 bp, Homo sapiens
aactaaagtccgtgtttattaaaattttcttaatttttacctaatggcctttttctgttccggcatcacacccaggataaaacattacatttctttgtcatttttcattaggttcctcttgg

SEQ ID NO: 380973 - DNA, 122 bp, Homo sapiens
gagatgtcctccacagatgggcacttgctcgtacaggaacctttccgccgggctggtggacggagatttctactctgtggacacacttaaccttagcggaatctccgccggtcaagaccggc

SEQ ID NO: 380974 - DNA, 122 bp, Homo sapiens
cgccgccgggtcaggtatcgattgaagtggaactccttctccagctccaagacctgctgccgggtgtaggcggttcgagagcgcttaggctcccctccgttataactggggttaactgaaaa

SEQ ID NO: 380975 - DNA, 122 bp, Homo sapiens
cgctcctccgggcagtagagggctgtgtcactgcagtagatgtctcccttgtaggggggccgcgggcctggtttctccaccccgtcgcagaaggccaggtcgcgggcggaggcatcggacag

SEQ ID NO: 380976 - DNA, 122 bp, Homo sapiens
agtcccggggcctgccgggagttgtagttctggtgggagtttcgcgctgcctgctggactcgaagcgggtctgggagaacccagcctaccttctttcctcctccacttcctttttccttcct

SEQ ID NO: 380977 - DNA, 122 bp, Homo sapiens
agtgagcataatactaaagagaacagtgggcctataaaaacggtagagaaaatagcgggccgatcttcaacctaggaagcaatctgctggaagagaagcttcgtgtcccagaagccaaaggc

SEQ ID NO: 380978 - DNA, 122 bp, Homo sapiens
aagaatatcacccatgtatatcagggacttttgaaagtcacacacaagcttggcataaaacgtgtgctcagaaaaaaatctgaaaagaccctaagcttttatctctggatgacccctaggct

SEQ ID NO: 380979 - DNA, 122 bp, Homo sapiens
tgcctaacacataagaaatgcgcaggaatcaaacgcaaactggtgaaccaactagagggccgcgggggcagaagtgtccggcggggatccggacagcgcatccggaagcgccatgggccaac

SEQ ID NO: 380980 - DNA, 122 bp, Homo sapiens
atgcaccatgaggcagtggccagtgctgtgggtgttaggggcattgctccccggccactacggcatagcaggcagtgatcgccacactggccaagctttagaccatttattccagagacccc

SEQ ID NO: 380981 - DNA, 122 bp, Homo sapiens
gggaagggctgggacagctctcctctggcagttagcccgtgcatccttctttagcattgccgtgtacgcacaccccaccccgccccctacacgcgcacacacacacacacacagagttttgt

SEQ ID NO: 380982 - DNA, 122 bp, Homo sapiens
cagataaatcatcctttgctagaattccactgctctagaaccttcagtggctccctatttcgattacagtccagaatcttcacctgggcattcaaggccttctacaatcagatatcaagtta

SEQ ID NO: 380983 - DNA, 122 bp, Homo sapiens
cacccatcattgacaagatcttcatggacacgctgcccttctgacccctgcctgggaacacgtgtgcacatgcgcactctcatatgccaccccatgtgcctttagtccacggacccccagag

SEQ ID NO: 380984 - DNA, 122 bp, Homo sapiens
aacgaaataattaaattttggctgatgctggcctttagtcatcgaaggccgagaaagtaccgccctaaccagggaaaagcaatatcagatgtaggctgttctgttgtgtctcaacctcaaaa

SEQ ID NO: 380985 - DNA, 122 bp, Homo sapiens
tccgctgatcccgcactcagggcgcaacttcacacagcgagggagagccccacgtcggagcgccagatgtagggaccagccccacagggtcggtaggtctctccctgtgtgcggcgatgaga

SEQ ID NO: 380986 - DNA, 122 bp, Homo sapiens
ccaggcagctgccacctggtggggacacgtgggagaggtctgcggcaggccaaggagggccgggctgcaggaggaggggtggagagctaatggtacagggtttctctggggggtgacaggag

SEQ ID NO: 380987 - DNA, 122 bp, Homo sapiens
gctcctgcgggccccgagccagcccttcccggccagcccagcacaacagccccgccagtccgaaccaatggagaactgcttcgcgatgggaagccgacaccagcagcgaaagcacaacttcc

SEQ ID NO: 380988 - DNA, 122 bp, Homo sapiens
gcttgtcaatcatctagaaccgggtgtgattgagcgagttgggatcccactgccgacagccgcgcggaggcggtcgggaaaccggaaaacgcttccaatggctgtgtttccggcgacggcgc

SEQ ID NO: 380989 - DNA, 122 bp, Homo sapiens
ccccttctccccatttcgcagctataattgctgattatgttgttacacagccgcggctctcggctctgtcctcccgtcatcatgatctagtctggcatatcaggaagcttcaaacgcagact

SEQ ID NO: 380990 - DNA, 122 bp, Homo sapiens
agggtccccccaaagtcctccacaccaggagggctgtgagcacctggcagctctgcatctcggtgacagcagcagcggctgggaagcctcatccctccctcctgcaaaagctgaggcaggtt

SEQ ID NO: 380991 - DNA, 122 bp, Homo sapiens
cagagatttatggaatttacttttccagttttggtagcattccaaagcctggggaggaaacgtgcagcaagcttttcttcactgggactagattgtatttgcccaaagaaggaagacagatc

SEQ ID NO: 380992 - DNA, 122 bp, Homo sapiens
agtaggctgaggggacagtgggatggggcggacatgggggcctgaggctcacagtcaggccggatccgggtgaggttgtagtcggcccgcagggagcgcacggctcgcgtgatgcttagcgc

SEQ ID NO: 380993 - DNA, 122 bp, Homo sapiens
gtgaatcaccctcttctctgtgtctttccctaaccactggagacttcatagataaacttgcggggtcacggtgagggaggcactgtgtggaagggtaaatgggcttcctgggggtttagtac

SEQ ID NO: 380994 - DNA, 122 bp, Homo sapiens
taggtagaacctctctgagttcctccctatttatggcatccactcaggtgaggctgggggcgtccttaccttgcgctttggctgctcaggacaaacgccctgccattcgtcccttctctctg

SEQ ID NO: 380995 - DNA, 122 bp, Homo sapiens
gccccgccatttaaaggcccctccctccgcgtgtgggaatgggattcccgcaggttgcaccgcaggaagcaaggcaggtggactctgcaccaatgcctgcagactaagggcagactctcagg

SEQ ID NO: 380996 - DNA, 122 bp, Homo sapiens
cagaggggagggcaagctggagggtttcctcctgcctttacttatcagatcagccccctgcgggctccccaggaggcccatgagagcttctggccacccccacagggcagccagcactgaca

SEQ ID NO: 380997 - DNA, 122 bp, Homo sapiens
ggcgcagacaggtaccggaaacttgcaaacgttatgtcagctacacagctgcccctatcccgactctcccaaaacaaatctccgactgtaccccctttggacaaaaaagtaggcagttttgc

SEQ ID NO: 380998 - DNA, 122 bp, Homo sapiens
cgcccatttgcgtcgccgcctgggggtgctgcttcgtgacgtcagggctgagctagggggcgcccgctcctggctgcccgctcctcccggccctgcggcccccgcctgccctttaaaagagc

SEQ ID NO: 380999 - DNA, 122 bp, Homo sapiens
tggtcagtggaccagtggtacctccccaggttggtggtgaccagccgggcagggcttcggcgctctcagggccggactctcaatggcagaatctggagagttcacggactgtcttttgggtt

SEQ ID NO: 381000 - DNA, 122 bp, Homo sapiens
gtcctggggaagcagaaaaccgggaaaggcaaagccccttcttctcctgtttctctaggtcgcttgcttagaaccctttagggttctaacgcagtttctgctcgcagggaatgtgggccctg

SEQ ID NO: 381001 - DNA, 122 bp, Homo sapiens
gacactcttagttactcatctaacagccatttcctcctttttacttgattttgttgtggccgtggacttaaggggaattgagcccagctctaggagctgaatcatgattaatgtctttgacc

SEQ ID NO: 381002 - DNA, 122 bp, Homo sapiens
attgaagagtgggccaggttctctgttttcctccaggtccaggcggctgggcagggccaacgtaggaaatgaagaactgtgcacggcgcaccccaggaattcagcttcctctcaaaagccat

SEQ ID NO: 381003 - DNA, 122 bp, Homo sapiens
agacgggaaggaggaagaggcatgcaagcaaggtgcccgcggagccgggctcggcagggtcgaaggatccgagtggagcggagacgggtgctcctgcctcccttcctggaaaggaacctggt

SEQ ID NO: 381004 - DNA, 122 bp, Homo sapiens
gtccctgacagcagttggctttttgctcttagtacctgtatctgcatcctaaatttgccacgacaaactaccacaaacttaaaacagcagaagtgtattctctcctggttctcaaggccaga

SEQ ID NO: 381005 - DNA, 122 bp, Homo sapiens
tgggtcccagccccgcccctgactgcgctgggtaggtggtcgctgcgggacccggaccggcggaatcacacccagagcccccaagcccacggcagggatgtcacccggggtggcgaggctct

SEQ ID NO: 381006 - DNA, 122 bp, Homo sapiens
aatggaacttggtctgaagggtgtggaaatgctggtccagggcagatgcacttcagctaccgttccttgcctggtgtgtgcttgtcttgaagcacccttcttatgtgcctttctggaatggg

SEQ ID NO: 381007 - DNA, 122 bp, Homo sapiens
cctctctgaaaccacaccctaacccagcctgctggttggtcatctattttccaggctcttcgtaaccctgggcatatctccatatacacccatcacacctgctattactattggttgatgtg

SEQ ID NO: 381008 - DNA, 122 bp, Homo sapiens
tatgaagaccgatacaacagatgggatgatgggtcgtgcagctccagagatgatttctctcgggatgattataggtataatgatagacgtcccccgtccccctcaaagacccaaactgaatc

SEQ ID NO: 381009 - DNA, 122 bp, Homo sapiens
tctcaacctgcaggaaccccgcgtttattctcagttgtttggtttagactagcccaaaaccgcttacacccaaccagtttaagagctcattctagcgagcccttcccgtgccctaatcagtg

SEQ ID NO: 381010 - DNA, 122 bp, Homo sapiens
atcacagctcagggcacaccctgaacttttccaagacaggagcacaggtggggtctggtccgactgggttccgagtccagatctagcagggaaagatgtgtgctcatcccctaccccgcact

SEQ ID NO: 381011 - DNA, 122 bp, Homo sapiens
agacccaaccccagtcctaaagctacctggcttcttccccggctcaggcatcctgagagacgtcacaccaggcacgaagcaggcacaggtcacccaaagagggactgagtggggtcctgtcc

SEQ ID NO: 381012 - DNA, 122 bp, Homo sapiens
cattttacacagctaaaatcagcgtgtatacgttcatcttccaccttcccttatttgtcacgactttacaacgccaccgagttgatgtgtcaatctgcttctgaaatgctgctcgctgaggc

SEQ ID NO: 381013 - DNA, 122 bp, Homo sapiens
cacccggggctgcagcaaattaatccacagcaggggcccctgtgccccagggctctgagccggcctcacgccctgtacccccgcccgtcaccccaaaacctcagcagcttttccctcctcgg

SEQ ID NO: 381014 - DNA, 122 bp, Homo sapiens
tgctgccgggccctctgcactcagctttaacaaggaggccatttgcttcaaactaagtggcgaattccctatcacccatgcttgacctagcttccaagccaaacttactttccactgtgctg

SEQ ID NO: 381015 - DNA, 122 bp, Homo sapiens
ccttgtctaaaagctctttgggactgaaatggctgtttatgaatccttgtcaacctcgttcgcagtcaacgaccagggaataaattattcgtggaatgacacagttcataattattataagg

SEQ ID NO: 381016 - DNA, 122 bp, Homo sapiens
tccaaatccccgcccccgcgatggagaagaaaccgagacagaaggtgcagggcccactaccgcttcctccagatgagctcatgggtttctccaccaaggaagttttccgctggttgaatgat

SEQ ID NO: 381017 - DNA, 122 bp, Homo sapiens
catcaagccccgcaggtcccgcagccacagggcctcccactccccgtgcccccgcccccgcgcccccgcgggtttccgggaccccagtctctgctgccctccgcgcaggagcctgcacaggg

SEQ ID NO: 381018 - DNA, 122 bp, Homo sapiens
cctcccccgctctcaaaaatggcggctctcggggcgcggaagaaagcatcgatcgttcggcgctctgcccacttggcggggcgaaactaaactcgccgaggaaagataagggggcggggctg

SEQ ID NO: 381019 - DNA, 122 bp, Homo sapiens
gggagcctttgctccacctgactaggagcgcgcggggtctgtgcctgccctggagggcagcgcctcgggtgctctccgacccggggttccctatctctccgcctgcttccgggcgcgaggag

SEQ ID NO: 381020 - DNA, 122 bp, Homo sapiens
aagggaagaaagcaaaaacgtcccttgcacacttcagcccgcagaccccaaggaggggcgcgaggtcctcagaaccggaaaggctagcactggatgggtccccgcagccccgcgccgctgcg

SEQ ID NO: 381021 - DNA, 122 bp, Homo sapiens
gggcagcccggcccgggctgctggcgatgactcaggcctggccctgacgtcacccacgcccggccactggcctccctctgaagccaggaaactagttggggagtggcactcgcagctgcagc

SEQ ID NO: 381022 - DNA, 122 bp, Homo sapiens
aagagagcttttaagagttgctctgtttatctgtatcttctgattatcctgtacttccatcgtaatgtagcacattaatactaactactatttattgaggatgtgctatattttcaaatgtt

SEQ ID NO: 381023 - DNA, 122 bp, Homo sapiens
gggcgtgtgctggccgctgaccgcggagtccggcgtccccggcccgcccgccgccccccgcgtggctgccacctcccgccccggagccccctcagagccccgggccggcctccccgccccca

SEQ ID NO: 381024 - DNA, 122 bp, Homo sapiens
cttgtttatgctttgactaacgggacttacggtatgatgctgaatgtatctgactctgagcgttttagtaatgaccactgaaatattttcctccgaattcctgtaaattttcatcctgagga

SEQ ID NO: 381025 - DNA, 122 bp, Homo sapiens
caatggcataggtgatgtcggcattggagccctcatcggcatcacttgcaagaactttaacgactgaagtccctttagcagcactggacccgatattcacttcgtatttggttgctcgaaat

SEQ ID NO: 381026 - DNA, 122 bp, Homo sapiens
accctgcgcctttcatccactccggatctccaaacaccaactggttcatcaccctaatgacgctgacccttttacaaggctcctttcatgtcagccgcctgggagtgccatctcagcattaa

SEQ ID NO: 381027 - DNA, 122 bp, Homo sapiens
gtctgtcactctggccagtcctgcctcttcacaaacactgattcggctctcctaggcttccgcctgtgtcccagtctggggtttccatggagtgtgaacacgaagttaagagtgaggctgct

SEQ ID NO: 381028 - DNA, 122 bp, Homo sapiens
gatgattgagccaaagcaagagaaactcatttctttgtaaaactgcacttgacgttgtaacggttttgaacaaaggataggcacactttcagaacactttatctgttgagagtcacggcatg

SEQ ID NO: 381029 - DNA, 122 bp, Homo sapiens
cagattagtatttctcaaactgtgtacttcggaacgctagttatccaagaaagctgcctgcgctccagtaggttcttagtcaagtaagtttgggaagcactaggtactctgggtccccctgg

SEQ ID NO: 381030 - DNA, 122 bp, Homo sapiens
ctcaaggaggctgggagagcaccaaagggaggcagggctgtttctgaattggaatggtagcggatgactcactgacatggaatacacagaataggtgaacccgcagagacaggaagctgatt

SEQ ID NO: 381031 - DNA, 122 bp, Homo sapiens
ccccaggcaggtaggtatcattatccctattttacacatgaggaaactgctcaaggtcatcgagcctaattgcaggtgaggctggggagagaatcctgctcttttcattctgccacacagcc

SEQ ID NO: 381032 - DNA, 122 bp, Homo sapiens
gcctagcacagaacttcccctttcctcattggcaattaaaaaaacaacaacaaaaaactgcgtcttgcttttgtcacccaggctggagtgcaatggcgcgatttcggctcaccgcaacctcc

SEQ ID NO: 381033 - DNA, 122 bp, Homo sapiens
acgattcccgagggttgcgggcggcctctcctcagccctgcagctcccacacgcggacaccgcgggcctcggccatgtccactgaccgaccttcctcgccggaactcctcgcgcatcgccgg

SEQ ID NO: 381034 - DNA, 122 bp, Homo sapiens
cgacgtgcacgcagtagccaggcctgacccgctggtcccttgctggcgggaggaaagaggcggcaccatgagccacgcagtaaccatcgaggagccccaggcccagccgcaggtgtctcaaa

SEQ ID NO: 381035 - DNA, 122 bp, Homo sapiens
ccagtctcagccggtcagtagcagagtctcgctgagaacctgggtggagctttggctgcccggctggccagccacgggccccaggccaggcctcttgggggccttccaaaaagtttgacact

SEQ ID NO: 381036 - DNA, 122 bp, Homo sapiens
gcccccagcaaaacaacaggccaggagctgattctacctgctacttactgtgctctttaccggactgaaaggactctactgctccaaggagactgatgtgttgcttcctctctcccaactct

SEQ ID NO: 381037 - DNA, 122 bp, Homo sapiens
gtaatggttttctatttttctaagagttagaactgatctttcactactttggggaagtgtcgaagcaccccagagttgctgtgccctcttgatacacaacagccaacccaagcccctctaat

SEQ ID NO: 381038 - DNA, 122 bp, Homo sapiens
tatgatgccaaagtagaaagctgagtcctctacattgattagggcaggcctcccaccctccgctaaggcattaaattattttacccaagtcacacttttaacctatctgattaatttgctga

SEQ ID NO: 381039 - DNA, 122 bp, Homo sapiens
ctcttaaaatctaccagtggattcacatcatctgtaggactaaatctaaactgggatgtgcgactttgcccctgcttatggcttcattccccagttcctgtcttagcctacggccattgtga

SEQ ID NO: 381040 - DNA, 122 bp, Homo sapiens
ggatcagagggtggaaaataaaagctgtggtccccaggagtcctgaacatctggggacagcgggaaaacatgagtgactccaaggaaccaagggtgcagcagctgggcctcctgggtaaggc

SEQ ID NO: 381041 - DNA, 122 bp, Homo sapiens
gccttagccgccagccctacagccgggagggaatgtaatgtaaggtttggcgcctcggggcggatccggcttgcacagtcagttaaggaaccagagtatcgcgagatccggggtaaaggggc

SEQ ID NO: 381042 - DNA, 122 bp, Homo sapiens
aaaggcggggtgggggggggcattttaattggaatgctttcttgtatctcatccactatccgcaccccatcgccctgcaaattaatagctgttgcggagttggggtatgtgtgaccacaaaa

SEQ ID NO: 381043 - DNA, 122 bp, Homo sapiens
tcaaccctgtcggccactggagccactggggtagccggggccgtggagctctgcacagcccgggggaggccgatgttcagaacaaagcttttatcatggaaaagtacaaacataaacacaaa

SEQ ID NO: 381044 - DNA, 122 bp, Homo sapiens
tccccagcgtggcttctgcccccacaggcatgcgcatccttgtcacgttgctgctggatacgctgcccatgctgggcaacgtcctgctgctctgcttcttcgtcttcttcatcttcggcatc

SEQ ID NO: 381045 - DNA, 122 bp, Homo sapiens
cccacacgtcatgaggcctgtggcaccccgatggggactgagcattcactcttctgcccacgtgaggaaccaacaaaagctggcaaggacaccccaggataacacccaaacacgtcgactcg

SEQ ID NO: 381046 - DNA, 122 bp, Homo sapiens
tggtttgggatttttctccccaccccaggcataaacagaaatggatgtgcgaatgagtcacgcacgcaagggaaggtctgcgatgtcctgagtccaagggctggagtcagtccctgccctgg

SEQ ID NO: 381047 - DNA, 122 bp, Homo sapiens
ccctgcgatattgggagtagtatcatacgcttcttccgtgtatattaggagcaatatcaccgggtggctgtaccttgattgctatgttggcagtcatgtcatactctacccgctgggtatta

SEQ ID NO: 381048 - DNA, 122 bp, Homo sapiens
ggtaccaacgatccattttgcccttgcgccgcgctcccgctgctctgcctttccccaaaacgcgccccaccaatccgcagcggcttcgtcacggcgctcttcgtcgcactccaacccgccgc

SEQ ID NO: 381049 - DNA, 122 bp, Homo sapiens
gcacggcgggggcctggccggccgaggaagcgcaaacactcaagctcgctgcctgccccacgtcccacggggccgctccccaggagcgatggcaagaaagtcaagtgagtcctgggcactgg

SEQ ID NO: 381050 - DNA, 122 bp, Homo sapiens
acaccgtatttcctcatggctcctgagggacctggtctttctgcacgtccctgctccctgcgtccggcttggaggatgcccgtatcaacgccaacattcacgtaatcaccaccccccttcca

SEQ ID NO: 381051 - DNA, 122 bp, Homo sapiens
atctgtcaggccctgtgggctgcgggaaaccacagaggccttgtgacccaaggacaaaagcggctgaggacatggcaggacagtgtggactcccagggcccctgagtgcacaagcctggcca

SEQ ID NO: 381052 - DNA, 122 bp, Homo sapiens
tcaatcactggcgcgcacggagcagctgtacctgcgcccacatgggctgagagacagggacggttatagccatctcgcgtccatctggaacgccccacgtggacttcccctgaaatagctac

SEQ ID NO: 381053 - DNA, 122 bp, Homo sapiens
tagctctgtactggcctttctaaaaaattcatgcctgtgcatgcccaagcaataaaattacgcaagttgcccagaggcccagcttggttcagtgccaggttaggatcaggcacatctgtttg

SEQ ID NO: 381054 - DNA, 122 bp, Homo sapiens
cccggggccaagtccctgcctgcctcccagcagcccacgtgcggcccagctcctctctcacggtggcctgttgatgcccaccctcccacgcggacagaggtcagcctgagccccttgcctca

SEQ ID NO: 381055 - DNA, 122 bp, Homo sapiens
ccgggtcccggtggggaggagctcggggcaggaggacttccctaggtccctccgggcactcggaagggggagtcctcccaaagccgcacaaagccgggatcatttcaatccggaacagcctc

SEQ ID NO: 381056 - DNA, 122 bp, Homo sapiens
gtggattaataaggttggctcagcgttaagctatgccagagccgagtccaaattttattccggtacagggatgactttctatgtggcctctctggctctggagctaatttggatgctgagta

SEQ ID NO: 381057 - DNA, 122 bp, Homo sapiens
gctggactcccagcaacttgggcagtgaaagaaatgggctgtggaataaatgcatgtaatcgatctaagaacctggaaaagggtagattgaaggagcctgtggaaattaagagcgttaacca

SEQ ID NO: 381058 - DNA, 122 bp, Homo sapiens
agaaaaggctttttattgaaatataaatatttaattttaaatatataatcaatatattgtcgattttcaaggagacagcagtgtcaacctcaaatctgtctcctgtgatgcagtatttttat

SEQ ID NO: 381059 - DNA, 122 bp, Homo sapiens
tgtggaattaatgagatgaaagctgatcttctctctggacataattcactagcagctaagcgaaactctgccaacaaaccccagtctttttctcataggtattgagaaaactgtaaattttc

SEQ ID NO: 381060 - DNA, 122 bp, Homo sapiens
ttcggtacaaagccctgttttgcttccggaaactcggttctgctccgcccctgttggccacgtgtttttgtttatggacgttatttttgccaggcatggtggctcctgcctgtaatcccagc

SEQ ID NO: 381061 - DNA, 122 bp, Homo sapiens
ctgggcccttgcaggcagatggcggacagcgtgtgaacagagcaattgcgggaggcacagcggtaaaggtaatggcatccacctgcgaaaagcacaagagccctcaggaggtgacaggaagc

SEQ ID NO: 381062 - DNA, 122 bp, Homo sapiens
ctattgttaagtagaacaatcatttattttcagaagattcataacacttaaggaacacttcgtccctgggcaattccctataggttatgaaaaataatgtcataaataataaccaggaaaat

SEQ ID NO: 381063 - DNA, 122 bp, Homo sapiens
tgacttcctgggggactttgtggtgggcgagcgggtgtgggtgaacggcgtgaagccaggcgtggtgcagtatctgggagagacgcagttcgcaccgggccagtgggctggcgtggtgctgg

SEQ ID NO: 381064 - DNA, 122 bp, Homo sapiens
ccagttaggggggccataaataattctcttctcccccgcacagaagctataaaccagggccgaggcgcgatagtttatcaaagacgagggctggctccttaaataaaccgcggtgatctcac

SEQ ID NO: 381065 - DNA, 122 bp, Homo sapiens
ctggtctagcctcagagtaacccctgttaacaaactaaaatgtacacttcaaaatttttacgtgatagtataaaccaatgtgacttcatgtgatcatatccaggatttttattcgtcgctta

SEQ ID NO: 381066 - DNA, 122 bp, Homo sapiens
gcggtgggagcggcaggtgcagagggaggacttgaaggttccatccctaacagaggacagcgtggccgagtactcatgcttccaaccctgcacagaggatagtgcatgcccagcatgcagac

SEQ ID NO: 381067 - DNA, 122 bp, Homo sapiens
atacaatttaacctattcttctgcagcaacacacccagatggggaggaacccaataacaccgatggtgctattgacatgctcagaactttccagtgacattgtctctgttttcttgtatatg

SEQ ID NO: 381068 - DNA, 122 bp, Homo sapiens
ttctggtgatctatgtgggcttttatgatcctgtgcagactaatcagagtatttagtgcccgctgtgagcataacacttagcagcagggagagggggttaaggaggtgatccttgcttaagg

SEQ ID NO: 381069 - DNA, 122 bp, Homo sapiens
tgcgccttccggtgcgccttccggtgcgccttccgctccgccccttcaggcaggaagtgtcggcgccgccactgtccggccacagcctaacgctcttcgctgtcgtttgtggtctcgcgcag

SEQ ID NO: 381070 - DNA, 122 bp, Homo sapiens
aggtcagcccggtcccggccctggaaggcacagtgcagacatttgaaggtgtgcttgatgcggatgtgcgatttgagattcgccttcatggtgcagcggacgtcgcagaactcgcacttgaa

SEQ ID NO: 381071 - DNA, 122 bp, Homo sapiens
aactctggtctcccaggagaccactcaggttgtgcagcaagtcattggttagaggaccagcggtggaaatgaaatttctatcagactcccagtctgacccccagcatgaaaaacttagcagg

SEQ ID NO: 381072 - DNA, 122 bp, Homo sapiens
gtcgtggggtcctgaagactggatctcttcctaactccattcccaaaagcccgcgaagagcgtgggggagggggaaagtgaaaagcacccttcacctcacccaacccccacaccctctgtga

SEQ ID NO: 381073 - DNA, 122 bp, Homo sapiens
gctttagcggcagatgaccatttccactgcacaacacgccgtgctttagcggatgacgaccgtttccactgcacaacatgccgtgctttagcagaagatgaccgtttccactgcacaacact

SEQ ID NO: 381074 - DNA, 122 bp, Homo sapiens
cgactggggcccagaccagtctggccctggccccgcctttcctatctgtgacgatagcagcgcctgagggccactcagcggccgccccggccggctcgccggagctgactggccagttatag

SEQ ID NO: 381075 - DNA, 122 bp, Homo sapiens
agcttcctcttgcggcagttctgggctgccaccttgtttttgccccgtcgtcggatgtcccggactagcgctagctggctctctgtcagcgggtaccttgccaatagctcattaaagtcatc

SEQ ID NO: 381076 - DNA, 122 bp, Homo sapiens
gtggatggggattcttgtcttctctggtcaatttctatatgggacacttcctaagttactcgatcctctaaacactataagaacttggagaccgagctgaaaacttaattagcattatgcag

SEQ ID NO: 381077 - DNA, 122 bp, Homo sapiens
ggttttattacaaccttttttacaacctttctctgtctatatctttctttatacagttgacggactggacaaagcttctatagcaaactcagatggccccacagcaggttcccaaacacctc

SEQ ID NO: 381078 - DNA, 122 bp, Homo sapiens
agagccttgagtgtccagggagcttcagctctcagccgctcactggcatccaggagataccgtctggggcttgctcacccctggaaagtagactgcctgccttattgcttggctcctgaatg

SEQ ID NO: 381079 - DNA, 122 bp, Homo sapiens
tgattggctcggcttccctgcttcagtcagctgaagagcgttccctcggagagtggagggcgcctcggagcatcctacccagcaaagagctgcttcctgtttcgcctgtattgttagttcta

SEQ ID NO: 381080 - DNA, 122 bp, Homo sapiens
aaggctactttattgtcttccccccttgactggtaacctgatcaggtgcaactatagctacgtggagcaaaaaagtgagcacttgtgagcacttacctagagatgctgcggtcacagcaatt

SEQ ID NO: 381081 - DNA, 122 bp, Homo sapiens
accagtagtttattattcacaaactgtgattcaccagtcctattttttaagccagcatcacgctctaatcatattcctaggttacaagcccagttatttgtgcataataaaaactgaatcca

SEQ ID NO: 381082 - DNA, 122 bp, Homo sapiens
ccccgagggagatgctgacaaattatgagaagacctagaatagctgggggcggtgactcacgcctggagtcccagctattggagaggccgaggcgggaggatcacttgagcccaggaggctg

SEQ ID NO: 381083 - DNA, 122 bp, Homo sapiens
cagcccccataagcatcagcagggtgatggcatacaggtagaacatgatgagtgccgactcgctcttggtcttggagcgcccaatatgaatcaggtataccaccaccacagcaatggtggcg

SEQ ID NO: 381084 - DNA, 122 bp, Homo sapiens
acaaaaccccactgcaagcgtcatcgcctcacacacacaaaaccccactgcaagcgtcatcgccgcacacataccaaaccccactgcaagcgtcatcgccgcacgcacacaaaaccccactg

SEQ ID NO: 381085 - DNA, 122 bp, Homo sapiens
agttacagatatatgcccgtagcgtcggagctgtgggactctccagctggtacatatgcccgtggcgtcggagctgtgggactctccagctgttgctgtctgtctctgcctcagttctgtcg

SEQ ID NO: 381086 - DNA, 122 bp, Homo sapiens
gtctttgacatctgcttaccagcataaattagcagagaagctcactatcctgaatgatcgcggtcagggggttctcatccgtatgtataacatcaagaaggtaagcatgaacaatgggacta

SEQ ID NO: 381087 - DNA, 122 bp, Homo sapiens
tccaggtctgaaagcttcaggtacagcggccggcgctgaggaaaacagcgttaagtgaggcgcgtcagcggacaccacctgcctgcacatctggctggcctcaacttcccgctgttcgagcc

SEQ ID NO: 381088 - DNA, 122 bp, Homo sapiens
tccaggctgcgggagccaggacgaccgggggctcccagagcgcgaagtcgcgatcctcggcggtggagagctcgtgccaaaacgtcctcccctgcgccagtcaggccttcgcggggctggca

SEQ ID NO: 381089 - DNA, 122 bp, Homo sapiens
gctcatgaggttcatggtgactatgaaaacgcacaaggagggcaggtagcccagggcccacggtgcaaccagtgggcgcaacggtgccgtgagctggcgctgcggccgtgaagctgcctcct

SEQ ID NO: 381090 - DNA, 122 bp, Homo sapiens
ctttggggcgtacgactttcggggctctggtcctctgtttccctatccgtagaatggagacggctactctgtgagaagcccgaggtgcgcaggacccaagtgaggagccggcaacctgaagt

SEQ ID NO: 381091 - DNA, 122 bp, Homo sapiens
cagggacgcgcgccgctggcaacccggagcgcgccccgcttcctggttccgcccggcgcgcgctcgctagcccgctgtccctcgcgccccctccgcgaccgcccttgaaggacccggacccc

SEQ ID NO: 381092 - DNA, 122 bp, Homo sapiens
gcgtggcctggcgactggcgagagggcgctttgtggaggtgctgtgctgtcctgtgccctcgcagccccgggggccccttaggaaagaggacacgtccggggacaggcaggacactgggcgt

SEQ ID NO: 381093 - DNA, 122 bp, Homo sapiens
caagccaggtcttcgctctcagagagcttatagtctaaatggaaggacagatgctgaagacgtgattacaggcaggagagtgttattaggaggtagaccagatgcttgggaagagtgatagg

SEQ ID NO: 381094 - DNA, 122 bp, Homo sapiens
gtaatttgggtttctaatggtataacgtggattgcattgtagtagaactgccatgcctcacgggtttgcagcaacctcaaatgctacagtcaagtatgagtcatagcatgccagagctggat

SEQ ID NO: 381095 - DNA, 122 bp, Homo sapiens
ggctgtgtcctccaaacctccctgaacttagctctcaggcgtctctctgggtgtgggtcccggacctcgagggcgcacggtgtcatctagcgaggaaagccttgaactatcagaagatctgc

SEQ ID NO: 381096 - DNA, 122 bp, Homo sapiens
taagtaatacactatggaagccacaaacgtaatgctaaactttacatttgcagccagccacgttaagaacaaaaaagaataaatttaattctaacaatatattttaacccaatatatccaaa

SEQ ID NO: 381097 - DNA, 122 bp, Homo sapiens
agctggacgcagagtccatgggcccagcacccgcccgggcgcgcagccagggggtctgagcgcagtccacgcacagacctcggcacgggtgtccacggcaacacgatcccatcaccaacaga

SEQ ID NO: 381098 - DNA, 122 bp, Homo sapiens
atcaaggttaatatctggtgatggcccattcctcatagacaccttctatgtgtcttcatacggcggaaaggtagggcagctctttggggtttcttttataagggcactaatcactagcatta

SEQ ID NO: 381099 - DNA, 122 bp, Homo sapiens
agggacccacacgtgcatctcaacatgggggattcactgcaggggctgcacctcaggtgccgctgggagttccaccgcaagcatggcaggggtggcggagggtcatggtcagcagaattggc

SEQ ID NO: 381100 - DNA, 122 bp, Homo sapiens
tagaaggaaggactcatttgtggaaggatctcccatctgtaatgaggatgactctgatcccgtgtgtgcatctcggatggtcgggcagatggtcagatcccaacaagttctaaactctttgt

SEQ ID NO: 381101 - DNA, 122 bp, Homo sapiens
ggaggcgggaccccactccggtgacagcggctactcgccagcccagcgacaacaaaagcccggagagaaacccgctctgtccaggaaagtgaaagcggcctcagcccccgccccagccggcc

SEQ ID NO: 381102 - DNA, 122 bp, Homo sapiens
cagaggagtctcaggacagcgcacagggaagtactggcttggagctgcgtgttccttgggcggccggcggagggcgaagagcaggaagagcccgggggacgacggtagcagagtgttgggga

SEQ ID NO: 381103 - DNA, 122 bp, Homo sapiens
aagatgcattttcaaagcacgtttgagaaagaaccaccactgctgccttcgagaatgtagcgatctgacactcagagacacctctctccataacaggctggtggtatctccagttttgattt

SEQ ID NO: 381104 - DNA, 122 bp, Homo sapiens
ggtctcgggccagagcccacaggacctgggtctaaggcaccatccgcggccgagcagtggcgctggggtctgtctgcgtcctccccgcccccggggtgagacagacaggaccgccctagagc

SEQ ID NO: 381105 - DNA, 122 bp, Homo sapiens
cctggggtggggccaggatgagcgtcatgagagcgaggcctggggtagggccagaattaacgtcgttggggcaggtcctgggtagattccaggttggcgggtcctggggcggggccaggata

SEQ ID NO: 381106 - DNA, 122 bp, Homo sapiens
aacgaagacatttgggtgtgcagcgctctcatgttgtggacgctgctgtgccaggctgggcgtccgtgcggagcgcgcccagcgctggagcgcgcctaagaggcgccctgcagtgtggctcc

SEQ ID NO: 381107 - DNA, 122 bp, Homo sapiens
gcatcctgtgcatttacaccaagcagcagcaacagccatttattcactcatcaaacttgccgcgtgtcccctctgggcctcactgttgtcggtggtggatattccactgtgagcaagacgta

SEQ ID NO: 381108 - DNA, 122 bp, Homo sapiens
tcactgaagaggacaaaacagctgtggcgaaactggaggccatctttggagcagactttacgaaatacgcgattatgctgttcacccggaaggaagacctaggggcggggaatttggaagac

SEQ ID NO: 381109 - DNA, 122 bp, Homo sapiens
ctgtcagcacagcccactcctcacatcctggcctgaatcttcaccattacagtccctcctcgggtagcgtaagtcgtcgttccatttgctttggcaaacccccccactttgtgtgaagaggc

SEQ ID NO: 381110 - DNA, 122 bp, Homo sapiens
cagtgctgagggcggcctgctgtccgtccctgcggcagactgggccctgtcccaccttcccgtcactcctcgatgtcacatcagagtgctctctcctgggtgggaacccgcgcacggaggaa

SEQ ID NO: 381111 - DNA, 122 bp, Homo sapiens
agtcttctcttgaggtgcatgggggggggagggcaggtatcaggtttcttggccaggcctcgccctgtaagtcagaggcgctctttgggtgccgtggctcacttttcttgggtgcatcacct

SEQ ID NO: 381112 - DNA, 122 bp, Homo sapiens
cggtagtcggcaccaaatcacaatggcaactgatttttagtggcttctctttgtggatttcggaggagattttagatccaaaagtttcaggaagaccctaacatggcccagcagtgcattga

SEQ ID NO: 381113 - DNA, 122 bp, Homo sapiens
gctgtacttgcccggctggttcttcttcttgctattcttcctcttcttagatggggacaacgccgccgagccgccagccttggtcaccttcttggccattccctcggcggtcgtcactggca

SEQ ID NO: 381114 - DNA, 122 bp, Homo sapiens
aaataggggagtctacaccctgtggagctcaagatggtcctgagtggggcgctgtgcttccggtgagtgtatgaggccctggtttggtggtgtcctccggaggaagtgagttctggatagac

SEQ ID NO: 381115 - DNA, 122 bp, Homo sapiens
actggcattttgaaaaaaatattttcctccagaaactgggcacccccaagccctaccacccgctttttttttcttttttcttttttttttttttccttcttgaggaatggagcttcgcagag

SEQ ID NO: 381116 - DNA, 122 bp, Homo sapiens
tatgagctttattctgctgcttgagcgggccggggcggtgggccgccatgccgcagcgcgcgtgtacggagtcagcactgcttccgggccaggacaagcgcttccggtcccctccaaggggg

SEQ ID NO: 381117 - DNA, 122 bp, Homo sapiens
atgtccaggcgagggtaagttttggccaggctcccgctgtccagtgtccaggcctctctgcgcccgtcccgcgctagcctcccctgccgccctcccttgaagaagaggttcatcagcgtctt

SEQ ID NO: 381118 - DNA, 122 bp, Homo sapiens
tagacaagatagaagaatatgtttctcatgtatgcaaaataagcctagaagtaggcagtccggagttggaatggtgactccacagagactttggggaccaaggcttctggctttgctgagac

SEQ ID NO: 381119 - DNA, 122 bp, Homo sapiens
ccttcagtattcagcagtctagttttcagacaaggctatgcaaatggggaagacaagctgcggcagctgcttctacaggcctggatttggggcaggaggttcgtacctgaggaggataaaag

SEQ ID NO: 381120 - DNA, 122 bp, Homo sapiens
ctgccacggctactgccgccgggtcatgtgataatcaggctgcaagggctcaggctgctgcggtggccgttgctcagcccctcccctgccggcccaagcgagactcgcaccgggatcgtgac

SEQ ID NO: 381121 - DNA, 122 bp, Homo sapiens
ttgaatctttgctttaggaactcaagtgaaggaaacagggatttcaactgaggagactagcgtgaccatttatggacagcattgaactaggttgggtggcatgcggctaagaggcagaaata

SEQ ID NO: 381122 - DNA, 122 bp, Homo sapiens
ttgtccaaagtcacatctagtaaaatggcagagctaggcctccagaagtcatgggattttcggtatattattctacttacacaagagcacgcttgtccattcctagggcagaaagttacccc

SEQ ID NO: 381123 - DNA, 122 bp, Homo sapiens
agttgcgggggccacgggcgggccaccgaggagctggcgcgcggtattgatccgtcccgccgccccaagcctctcctgaggcctccctctggcgtcccccgggatccggaggcccctgggac

SEQ ID NO: 381124 - DNA, 122 bp, Homo sapiens
agagacagagagcaaggctgtgaaactgaggcaccgttcctagacatctcggtgctgtgtcgttcattcaaggagagttgagatacagtgaaatgagccagggcgaggagggagggtgaagg

SEQ ID NO: 381125 - DNA, 122 bp, Homo sapiens
ccggggtcccggggcccccgcagcccagcgggcgctcggtccgtccagactggcccagagcgcttgcggaagaaatatttctggaacacttgttatgcctcaggcatccttctgagaaggag

SEQ ID NO: 381126 - DNA, 122 bp, Homo sapiens
ggcttccctgactcggctacctgttctggaggtcaggctttgggcccttgcagaggtcgccgaggggcccgcgccgccgccagagcctgggcccagtccccagtcttcagagacgccctcga

SEQ ID NO: 381127 - DNA, 122 bp, Homo sapiens
tttggactcagcccccacctcctattccctgtaccgtaattttgagtctctcatcagtcacgtggactggttacatctttgtctccccttcagaacaccctggagcctgtacctccctcaga

SEQ ID NO: 381128 - DNA, 122 bp, Homo sapiens
gcatggctctggccgtgagcagagcagccccgacctccgtcctgacccagggcgccggagcgccactgcggatctcaccaccacacaagccagacctgctaggaagcccttcccggccacca

SEQ ID NO: 381129 - DNA, 122 bp, Homo sapiens
tttacacatgatgaatattcgtcactggaataaggcagtataacattaaggccactttcacgacctacttaaaatatctcgttttaaaaagaatagtgttccgcggtttcaggttatttgca

SEQ ID NO: 381130 - DNA, 122 bp, Homo sapiens
taaagagagggctagggactgaattccaacaaagagctcttatagtaccttggatttcctcgggacagtccacaccattcaagagctgtgcaggccctgaagaggtgagctgcacaactgat

SEQ ID NO: 381131 - DNA, 122 bp, Homo sapiens
cgctagagcccagcgaggactggctcctgcacgtgagagtccaatctcaagagcgggaatcggaagtctcccggtgtgacgtctctgggaagtacagttccgtgatgccggtggcgccagac

SEQ ID NO: 381132 - DNA, 122 bp, Homo sapiens
ccggggtgggacccggggtctcctcgggctctgacgtgtcctgagggctgacacgtggagcggggcgcagactccgactcccccacccaagaggccagcccgcagtcccagccccagcccag

SEQ ID NO: 381133 - DNA, 122 bp, Homo sapiens
tctcacacgggaaggagaggtttctccctgaatggagggcagggaggggccgggagggggcgtgggatcccacctctgctgagccttcacagagggggtccttgacctttgctctcaggaag

SEQ ID NO: 381134 - DNA, 122 bp, Homo sapiens
taattttactttctgcaatcattcatccattcagccagtgcggtatttctgaggtgtgttcgatcgcggatccatgcctgccgcagtacagttgtgagccaaatgagactgagactagttcc

SEQ ID NO: 381135 - DNA, 122 bp, Homo sapiens
agagaaggaaactgaaccacaattaagttataaatatgacgagtccactcagctagtaagcgacaaagacagccattaaacccaagcagcttgattcagactcgatgtcctttgcttttgga

SEQ ID NO: 381136 - DNA, 122 bp, Homo sapiens
ccccatccccacctctccgggtcccgccccctgggcgactgttggggtagtgagtgacagcggaggacggggggaggcagggacccagccctcacgtgcccctccttcccttgtctgcagcc

SEQ ID NO: 381137 - DNA, 122 bp, Homo sapiens
gaaacagtagaggggaagaagatctaggtggagggtgaaatatgacctaacatcgttcgacgaggtattaatgtggtggctttcccgcccttgtcgaccagctcttaaaaccacgctacttc

SEQ ID NO: 381138 - DNA, 122 bp, Homo sapiens
accacggctcggcaagacttccctcacatcatcgtgagaaggttccagaataccacagctcggcaaggtttccctcacatcacggtgagaaggttccagaataccacggcttggcaagactt

SEQ ID NO: 381139 - DNA, 122 bp, Homo sapiens
tgatctgaacacagcctctcactgattcaaaacgtccttttggcgtgtctgtaatgcctgcgtgttcaccgttcgcattgttactgtgagcgacccacgcaccagctccacacggggctccc

SEQ ID NO: 381140 - DNA, 122 bp, Homo sapiens
tttgccaaattaccactgaaaggttaatggttattttccaaattgatctcagatgtttaccgtttttttctgatgtcctcaggaagatcatgtcggcagggacccgctggttctgtgttatg

SEQ ID NO: 381141 - DNA, 122 bp, Homo sapiens
tgagtcacctctctccacatttctcctaactctcggtgtcttctttttcttccatttccacgccatgtgtacattgcatcttcaggtacctgggctcttctatcggggaaaggggcgtccgt

SEQ ID NO: 381142 - DNA, 122 bp, Homo sapiens
gtaggaagagttctcttacaccatatgccagtatttcttctagtcatttgagtaaatacacgttgagagcttcggttttcccactagcttttattttttgtccttttttttttaagcttttg

SEQ ID NO: 381143 - DNA, 122 bp, Homo sapiens
gtgacatttaccaggtctcaggttcacaccgcgggcggccgtccgaaggctcctctcggacggtccccgagacctggagcacggcctgaggtccccaaagggagagtgtaaaaaggggggcg

SEQ ID NO: 381144 - DNA, 122 bp, Homo sapiens
ttgaatgctgtaaggttctgacttgagtggattttagcctccactggtcaaggttcctgccgctgccactgctgctgcagacactgacatcactatactgcatgaatgaaaaacaacaacgt

SEQ ID NO: 381145 - DNA, 122 bp, Homo sapiens
gtaagttttgacacagtaggaaacagactgatccctggaagatcaatacaaaaggcaacgcggcagttcgacagctgaaaatacaggcggcggcagccagccacgcctgtgggcaggggaga

SEQ ID NO: 381146 - DNA, 122 bp, Homo sapiens
gacaaagcgtctccccttggagcgagcggagccaggcgcagccgcgcgcagacctgtcagcgcgtctcacgcgcttgggagagagtttgcaaagtcataattatatctcttaacctgtcttg

SEQ ID NO: 381147 - DNA, 122 bp, Homo sapiens
tgacagccacggccaccgtgttagtgtcgttggtggaaagtggccaggcacccaaggcctcgtcgcgggcgtgggtgggcgccgcgggctcagaggctacgctggtggatgtcaacgtgtac

SEQ ID NO: 381148 - DNA, 122 bp, Homo sapiens
acacacacacctttaattattcaaactcccaaaggttctgaagttaaacaagttcttcctcgggagagcagacttgaccctcttttccctactctcttccccaacctcaactcctgcacaag

SEQ ID NO: 381149 - DNA, 122 bp, Homo sapiens
gccgcgtgctggggaaaaagccgcacagcgccggcgcggtccgggaggaaggggcgggggcgagcaggacagagccacagacccagagacgcccaccccgccgcccatgccagctagcgtgt

SEQ ID NO: 381150 - DNA, 122 bp, Homo sapiens
attttagagtctcctcccctccatatgacccagcacattgaattgcagctgtcctgcagccggccagttagcacacaggacattggccttggggaaaggtacagaactgccgcatcctctct

SEQ ID NO: 381151 - DNA, 122 bp, Homo sapiens
tttcctgaaggctgagtgtcaaacacggtcgctgcaaaacctccagacgctcaggatgttcgcaggctccattgacaaaagtgacttcccacgctttgcccacagagggcatccctgcgcat

SEQ ID NO: 381152 - DNA, 122 bp, Homo sapiens
atgattaatgggcaggggcaggaggcgcggggagacggcacgtccgttctgagctggctccggggcagcggcgcagcttcccaccccggggctgggccgccgaccacgcaacggttggaggg

SEQ ID NO: 381153 - DNA, 122 bp, Homo sapiens
ttgcaactgcactctcttctggtccgtgtctgttacggctcgagctgagcttttgctcgccgtccaccactgctgtttgccgccatcgcagacccgccactgacttccatccctctggatcc

SEQ ID NO: 381154 - DNA, 122 bp, Homo sapiens
ttgcttcgctttagggcattaggtagagagaaccatggtttggcttaggattgaaggggccgacagcttcccacctccagttggaaataaatggtggagactctgggaccccagcagggagg

SEQ ID NO: 381155 - DNA, 122 bp, Homo sapiens
tatgtttcaatgtcactaaatattttacttttatacatacttacttgtaaaaataagtaacggggcagtacactgtcaaatgaagggctgagatatactggttctgtcattcttatgcccat

SEQ ID NO: 381156 - DNA, 122 bp, Homo sapiens
tggcccatccatctctcctgacactatcggcctgttgtctaaagtacttacagttctctccgggggggaggaggcctgacctggagatgctgggggaggggaggaagtagggcctctaggac

SEQ ID NO: 381157 - DNA, 122 bp, Homo sapiens
taaaatcaaacatcttttgtggtattcatttttttattgcttgatgtctggaacagttaccgaaactagacctgtatcgcgcatctctactagtgcttgggcctcaaagcagtgctcatcac

SEQ ID NO: 381158 - DNA, 122 bp, Homo sapiens
ctcccggcccctttgccgaggtcctggcccaggtggggctcccgggagcctggaggccaacggcggaaagacagggacctgatccctccagcagtcccagccgccggcccctcacaccctca

SEQ ID NO: 381159 - DNA, 122 bp, Homo sapiens
caacactccacctgttgtctctactaattttcatcttacataagtaggcacataatgttccgctcgcttcgtctctgtgcctttgctccgtttcttttaaccactagaatggttccctctac

SEQ ID NO: 381160 - DNA, 122 bp, Homo sapiens
ggggtcaaacgagggtcgggggtggggacacgcagcctagccactgtcctgcctgggatccggtctcccccgccccccggctgcaggtaatctccccattcctgctactgcgggagcgcctc

SEQ ID NO: 381161 - DNA, 122 bp, Homo sapiens
tgactagaaaaaatcagccatagtgacgatttggaggaagactgctacagatagcaggggcggcaaatgcattaggtgaggtttgattctagagaatctacaaatgtaaattaattatttgg

SEQ ID NO: 381162 - DNA, 122 bp, Homo sapiens
cgccgacaaagtggttggggcaggaaggcgaggtcagtgcgaatggagggcgcccaacttcggtgttgcagttgactctgtgctcgggctctgccctccactagccctagagtcttgggcag

SEQ ID NO: 381163 - DNA, 122 bp, Homo sapiens
accagaggcagcaagcttccccatacccagacagggcccagccccctctggggacctccccgctgcccagggctgactcggactcagggcttccggctgagctacttatatagatggagaga

SEQ ID NO: 381164 - DNA, 122 bp, Homo sapiens
cactgtccacctaacctagaggcactcaatgttacgggtgttcccaaagcaaatgcctgccgttggcatctctgtgggaagttcctgtcccttcagaatagctgccctaccaaataaagcct

SEQ ID NO: 381165 - DNA, 122 bp, Homo sapiens
tgcgccctgctctgcccttggccccttccccgggatctgtccgtgtgcccggagcgcctacgaggccccagtggagtcacggccccggaaagcgctgcccctgcgcctcagccccagtaaag

SEQ ID NO: 381166 - DNA, 122 bp, Homo sapiens
cccgttagcaaaagggagctgcggatcgctcagaacaggcccctcacctcctcacgggagcggacggacctcgccggagacccacttctaaaagcaccacgctcgtccatctaacaagtgtt

SEQ ID NO: 381167 - DNA, 122 bp, Homo sapiens
ccagaactgagctatcattttacccgatgactaggtcactgccattcttgttcccacgtgcgtctgagacacatggtccaaggcaggctccctccctctcttctgcgcccccctccccagac

SEQ ID NO: 381168 - DNA, 122 bp, Homo sapiens
attttagctgtgaagtttctgctctaacaataaagccaagtaaatgtactgaaagtattccggagtttgcctgtacaaggggctgtgtgattggaagagttcttctgaatactgccctaagc

SEQ ID NO: 381169 - DNA, 122 bp, Homo sapiens
tcccagtctagacatgctgcacctgcggccagcagaagtcaccgggagcaggcaggcgggcgggcgggcgggggtaaggagagagagagattcgtgaacccggtaaacccaccctcaaggct

SEQ ID NO: 381170 - DNA, 122 bp, Homo sapiens
ataccctctcaagcaccttatcaacagccctattttacagaggtggaaacaggctggagacgcaggcccagcagcttggccttagtggagctcagaccctaacccatgcgctcataagccat

SEQ ID NO: 381171 - DNA, 122 bp, Homo sapiens
gcataggcaggaaccggggctgtgcgtggtgcttgtgggcctgcgcgagttccgggtaggcgtgggcttggtggaccccacacttggagcggccagccggccccaccagccctgggcagtga

SEQ ID NO: 381172 - DNA, 122 bp, Homo sapiens
agctcgccatgttgctgcgggagtctctggggaacatgaactgccgtaccaccatgatcgcgcacatctcggccgcggtcgggagctacgcggagaccctgtccaccatccagattgcatcg

SEQ ID NO: 381173 - DNA, 122 bp, Homo sapiens
caagctcactactgtattttgtgctaagctaatatgcaccaaccatttcctgtaaggagccgtgtgactgggcacatgatttattccacaaatgacccagctctctgcaaggctcacacatc

SEQ ID NO: 381174 - DNA, 122 bp, Homo sapiens
cagtgacagcggcagaaacagagactgcaaagacacaaaggaaggcaggcagtgggggcccgcaggccgacctcagcccttatcagaagggcaggctggatccagtttgggatcagccttag

SEQ ID NO: 381175 - DNA, 122 bp, Homo sapiens
gcgccgcggcacgaaggcatgaccaacggcgactcgggttttctgccgggccgggactgtcgcgatctggaagaggctcgcgggctggcgcgcgccggcggccgggagtcgcgccgccgccg

SEQ ID NO: 381176 - DNA, 122 bp, Homo sapiens
cacctcttgacttgccagtatgctggcaaacaacccatctctcttggagaatccacacttcgtttcttctaggtccagcctaaatgttacctcctccagggagcctttccagatactgcttc

SEQ ID NO: 381177 - DNA, 122 bp, Homo sapiens
cccaagcaggcccaggaggctgtgttcagtctcctgtggaattccacggtcagccaggctcgcagccactgttctgcccgatgcttctctccccttcattccccatctctgccgccctttgc

SEQ ID NO: 381178 - DNA, 122 bp, Homo sapiens
gccttgtccctggagccctgttggctgaacaccctcactcaaggatgttcccgtggacttcgacagagcctggcctggggcaggctggtctccctctgggacccttcccaggggccctgcta

SEQ ID NO: 381179 - DNA, 122 bp, Homo sapiens
gctgcgcggcgggaatctcaagatctgggcaaaggctcgcgtctcgggacgcgaagtcgacgccaaaatgggtccccggacaaggcgaccctgggagtgccggcgcccccggccgggcagag

SEQ ID NO: 381180 - DNA, 122 bp, Homo sapiens
gagggcgttgggggggggggcgatattctctaacccctcactaaaacatcacgtggcctccgcctagtctcctagcttttccccctatgtcaccaaagctcgggcctgtagtgacctcgaca

SEQ ID NO: 381181 - DNA, 122 bp, Homo sapiens
ctttaagagctatatctgtaaaatggacacaatggtatttctcttgtaggaattgtcctacggattaagatgaaaattagtattgtgctttgtcaatgagagctgtgacattcaatatacag

SEQ ID NO: 381182 - DNA, 122 bp, Homo sapiens
taataggagtggcttctgaaatctgtggttgcacatcacaaaatacatctgcacttcccccgttgttagttacgtctaatgatctttccatggtttaagtgagcatttctgttggtgttggc

SEQ ID NO: 381183 - DNA, 122 bp, Homo sapiens
ggaaggctgcagagctagagcagcgccgcccgaggggcggcaggggctgaccacagagagcgcgggggcctccagccgagaggaagggagggcagctcgggccggtagtgggacccttgggg

SEQ ID NO: 381184 - DNA, 122 bp, Homo sapiens
ggctttgggaaacgcaggtcacagtagcagggcattgaaaaccctccctccgcatggctccgcacccaggaccctggggtggctccacagtggctccattttctcccacaatggtgacctgc

SEQ ID NO: 381185 - DNA, 122 bp, Homo sapiens
gctgaggagcccgtggatctgcatccctggaatcagcctgtcaccatcccacctgcaaagcgactctggaatatcctctgcgctgagctgggctggggaccctgaaagcagggcctagaagg

SEQ ID NO: 381186 - DNA, 122 bp, Homo sapiens
ttcaacggcgcgctcgagaaggcccggctgcacgagtgggtcaagcggcagggcaacgagcgccagacggcacagcagatcgtcagccatgtccagaacaagggcaccccgccgccaaaggt

SEQ ID NO: 381187 - DNA, 122 bp, Homo sapiens
agggacccccgaggctgcattcacagtgcggtgcgcccagtggagcgcccgcgaagtgggcgtgtagggctggcggacccggagaagggcactcagagacccctgggacatcactcgccacc

SEQ ID NO: 381188 - DNA, 122 bp, Homo sapiens
gaatcgaaagatttggaggcgccgggggagaaacctgcggagcgctctccgagcctgtggcgtcccaggaagactccgagcggggccagggaagttctctggaggacatggggtggataccc

SEQ ID NO: 381189 - DNA, 122 bp, Homo sapiens
gggttcatggaagaccagcgagatgacgttcatcagccaccgggttgcctgcacttgatgcgtgtcagataaacaacaggcactttcgttaccagcatctgcgctttgaagagagtttcgta

SEQ ID NO: 381190 - DNA, 122 bp, Homo sapiens
cgaccttaggtcggatggtcggggccaggtgtgcacaggacacacccgggtgcaggggcgcgcagcttctaatgacgcggcactcgagcactgtctaattaatcccgtgttttcacacagcg

SEQ ID NO: 381191 - DNA, 122 bp, Homo sapiens
ctgactctcaggctcctgagtacaggtgtccgtgagccgcattccggagccagtgctgctcgcccctcctgtgcggtccctgggccctgccggcagctccacgtcctgccagcggccccgag

SEQ ID NO: 381192 - DNA, 122 bp, Homo sapiens
gaaggcccagctcttgctgtccaccccggcagtaggcaggcagcctggccatgtgccctccggtcagcatgcggtatgaggaagagggcatgtcctacctctacgcctcctggatgtatcag

SEQ ID NO: 381193 - DNA, 122 bp, Homo sapiens
ggcggggcactcacctccacgcgctcctcgcgaaggcggatgcggccggccaggcgctcgcgcgtactcacgtcaggatactggttctgcacgaaaagcgcctcgagcgcctgcagctgctc

SEQ ID NO: 381194 - DNA, 122 bp, Homo sapiens
ctgaaatcaagccgttgagaaaagggaattcggccctccgccgcctcttcagtttaaaatcgtttcccgactcgctctgcggccccacgcaggaagcctccttggcgcctcgccgattccgt

SEQ ID NO: 381195 - DNA, 122 bp, Homo sapiens
cctccgctcgagtcacttccgaagcagtcgattcttggggagaagcgctgcggaaaggggcgactccgatgcagatggccctgtcccggcgccccaggtcgtcgcgcgcgcagctgcggtag

SEQ ID NO: 381196 - DNA, 122 bp, Homo sapiens
tcccggcaggccgcggcgcgaagcacctgtccccaatcttccatccccgacgccccttcccgggtacccccctccaaaagctgccaggcacactgggaacttgtcaggtggctttggtgaca

SEQ ID NO: 381197 - DNA, 122 bp, Homo sapiens
cacggcgtcgcctgggcgctgctggtggccgcggccctggggcttggggcgcgcggggtgcgcggcgcggtggcccttgccgacttctacccgttcggcgccgagcgcggcgacgccgtcac

SEQ ID NO: 381198 - DNA, 122 bp, Homo sapiens
tcaatatcgtgctaaaagatactgcctttagaagaaggctattgacaatccagcgtgtctcggtggaactctgactccatggttcactttcatgatggccacatgcctcctgcccagagccc

SEQ ID NO: 381199 - DNA, 122 bp, Homo sapiens
gaggggtgggggccggagtgggtgggtccagccaggcctgggccgggagccaggctcccccgcgttcctacccccacgtggccgcgcgcagccaatggcacgcccccggcgggggccctcgg

SEQ ID NO: 381200 - DNA, 122 bp, Homo sapiens
ttttggaaccagaagtctcacatttaatatgactattgatatggttggatgtaagtctatcgtctgctgtactggaaattggaagtctgttgcacttcttagatctgtgagtatatagtttt

SEQ ID NO: 381201 - DNA, 122 bp, Homo sapiens
gctcggaaaacttcggactttttcggaatggctcgggaaaccgagggtgggaagcctcttcggctctttccggagactgctaggggtcgggattcttcggagacgctcgggtgcgtcctcgg

SEQ ID NO: 381202 - DNA, 122 bp, Homo sapiens
aagtgagagaaccccctttctacaaaaaattgaaaagtaagccaagtatggtggttcacacgtgtagtcttagtatattgggaggctggatcacttgagtccaggaattcaaggctacagtg

SEQ ID NO: 381203 - DNA, 122 bp, Homo sapiens
gccactgagatgcttacccacagtttggttcctgcttaaaacagttttccctgctgggcgcggtggctcacacctgtaatcttgacactttgggaggctgtgccgggcagattacctgaggt

SEQ ID NO: 381204 - DNA, 122 bp, Homo sapiens
gacaaaggttcatcttctatccccattgaaactacagtttgaggaatgattgacctccgacgtgggcatctcgggtttccaagccgttgttcattcccctggatgtgagagtttgatatttc

SEQ ID NO: 381205 - DNA, 122 bp, Homo sapiens
cctacaaacttcaagcgccggtctctcctagccaatcaaaagaaagatatttctgaatcccgcctctttcagcagccttgctggccaatcagaccacaccatgaagcatcaatacagaaaag

SEQ ID NO: 381206 - DNA, 122 bp, Homo sapiens
gctccgtgatgtaagtgaggtccagcccatggccctcctccatggtgggactcaggatgacgggcctgcgagagagcagtgggcagatcagaaacagggtaaggaggcagcagacattcatc

SEQ ID NO: 381207 - DNA, 122 bp, Homo sapiens
cgagccctgccccgccggagggcagctaaggcccggtgagaaatctaagcggtgagaaaccgagcgcagcgccggtgggccggcactgctgggggacccagtacaccctccgcagccgctgg

SEQ ID NO: 381208 - DNA, 122 bp, Homo sapiens
aggcttcgggggcagctgctgggccagcgctacgggcccctctccgagccaggcagtgctcgtgcctatagcaacagcatcgtccgcagtagccgcactactcttgaccgcatggaggtgag

SEQ ID NO: 381209 - DNA, 122 bp, Homo sapiens
gttgggtgcagaaggtccttccgggcccaagttctgtcatgcactgactgctccagagcccgagtcggagtgtatcacagaacctgggccgggggggacagcgggccgagcctccttcttcc

SEQ ID NO: 381210 - DNA, 122 bp, Homo sapiens
actgcttcactcctggggccagaggcgtacggtagaaatttgaagatgggcatctgaacacgggggacgggttttgcgaaatcagtgcatttggtgtgtagcctcggaatgaaagctgttat

SEQ ID NO: 381211 - DNA, 122 bp, Homo sapiens
aacgcaacttcgccctgcttgagcgaggtagggggcggcgaatggcgggggtcgcgggcgcggggagcccggttgtggtagggcttaggtgtcagaaacgaatttttaagtcgaacgaggca

SEQ ID NO: 381212 - DNA, 122 bp, Homo sapiens
aagggatgtccagctgccacccactctcgctgtactagtgattggaagccaaacagtgttcgggcttcgggggctgaaagcagctggacgagtgaagagaggaggccattgagatcacgatc

SEQ ID NO: 381213 - DNA, 122 bp, Homo sapiens
ccctttgcttaccttctgccctatattagagccccaggttctgtgcccttttcctatcatcgcaaaactcatgatgctccggctgctcagttccctcctccttgtggccgttggtaagaccc

SEQ ID NO: 381214 - DNA, 122 bp, Homo sapiens
actcatgctctttccatattctgttgacccagaggattcagacccttattttcaaagcgccgtatattccttcatgctctggctgactgccttctgcttgagtgacccaccaccctttctct

SEQ ID NO: 381215 - DNA, 122 bp, Homo sapiens
tcggtgtggagagtctctgcaggatgttattgacaggtactgcagacctcgtgaccttttcggtgctctctggctgcattgcaccccggcaagaccccttcttgtctcgtggatgtacatct

SEQ ID NO: 381216 - DNA, 122 bp, Homo sapiens
tatttacttgacactcgcactctgctgagctccccgtcactggggacgggctgggggaatcgagcggcagccgtcctctctgtcttgccctcctccagtcttccctccgagctgctagtaaa

SEQ ID NO: 381217 - DNA, 122 bp, Homo sapiens
caagaagacagccacagctgtggcgcactgcaaacgcggcaatggtctcatcaaggtgaacgggtggcccctggagatgattgagctgcgcatgctacaatacaagctgctggagccagttc

SEQ ID NO: 381218 - DNA, 122 bp, Homo sapiens
cagtgcccgggcctcacaagtgctgtgaacgggaccctgcacgtggcccagcaccgtaagcgcaggtctgcccagcaaacgccctgtggtgagcgtggggctcagtggccgctgatggagac

SEQ ID NO: 381219 - DNA, 122 bp, Homo sapiens
tgtgggtaggttacaattttggggagagggctttattttgtttgaaaattcacttcttcccgctaagcttttgattaggagctgaatttgaatcagtttgaaattgtattctggatcgagtg

SEQ ID NO: 381220 - DNA, 122 bp, Homo sapiens
tggggctgctgcgcgttaccttgctgcaagcggggcgccttccacctggctgggggtctgcgccacagtttggtccagaggagggaggaggaagggaagaccccagtggtgggaccctggac

SEQ ID NO: 381221 - DNA, 122 bp, Homo sapiens
attccctgtactgcatgaggtgtcagggtaattaccgctgatcagccctatttctccgcgcgctgcccgctcctcgggccccctgtttactgatgcaccaccacagcatcacggcgctttca

SEQ ID NO: 381222 - DNA, 122 bp, Homo sapiens
tggtctccctatgttgcctagtctgggcctgaactcctgggctcaagtgatctcctatgtcggcctcccagagcactgagattacaggcaagtgtaagccactgcacctggccgttttcttg

SEQ ID NO: 381223 - DNA, 122 bp, Homo sapiens
agcagctctctgagctgtctgggctgggcggctgcgggagccagagctacgtagtcccaccgactctagggattcgaaaaaggaaccgccgacagacctgcctactcttaaagaaggagatg

SEQ ID NO: 381224 - DNA, 122 bp, Homo sapiens
cctctttccggaaggcccctggcgctaccgttccgctccacggcaggaaaccaaaggttccggcgtccagagggcgcctcccagtcccgggcagcttttcttggaacaccggcggctctcgg

SEQ ID NO: 381225 - DNA, 122 bp, Homo sapiens
caggctctggccccgcgcgagcctcttgactagaatattggcgcaggggctctggagacccgggcctcccgctgtaggtggggccagtttcctcggagcgcctggaaaccgaaggcaggcaa

SEQ ID NO: 381226 - DNA, 122 bp, Homo sapiens
atggccacctatataggcttctgctctggctattttgggaggtggcactccccgtagccccggccccctccccttccggtgtcaggtactccccaaccgtggtgctgggtgtctgtatcaca

SEQ ID NO: 381227 - DNA, 122 bp, Homo sapiens
ctgcgagcaccgcaggcagcccaggttccggcccgcgcctctccctccacacctccccgccggcagagggagcccgctcaggcctcagccagcacagagaggggctcccacggtgcagctgc

SEQ ID NO: 381228 - DNA, 122 bp, Homo sapiens
aacagtgttggggaggagtggcagcggcaaggcagcccagtttcgtgaaggctcttggcgcgccgcggcccgcaggcacctggcacgcgccttccccgccgccaggatgcccaagaggaagg

SEQ ID NO: 381229 - DNA, 122 bp, Homo sapiens
gcaacaatgacaaacataccctgggatgctttccctctgtggtttgttatagtaagatagcggctacagcttatatatcatcaacagaggactggctaaatgatggcacttcattctgcaga

SEQ ID NO: 381230 - DNA, 122 bp, Homo sapiens
caacaccgcggggacgcccgggaggctactgaagagccagtggcgcctgcctcgatcacacgtcccctgtggagctccacctgcccgcacgccggctcgggcgctcccataagcggccggcc

SEQ ID NO: 381231 - DNA, 122 bp, Homo sapiens
gggcaggcgacttcgcctctctaggcctcggttttcctgcttgtcaaatggggctgatgccggcgtgggcttcttcaggcggtcgcgagcgttgacccctggagtcagcgaaccagccgcgc

SEQ ID NO: 381232 - DNA, 122 bp, Homo sapiens
ttctcccccctagtgggtggtgagagccagagggaggcacgctgctccggctggctggtgcgcaagggaagttctgtgcctggtttcttcaacttccaggaacagagtggactaggatgcgg

SEQ ID NO: 381233 - DNA, 122 bp, Homo sapiens
tcctggggggatgtcttacctggtgactgaggatagtgctgtaaagctgttctctgtcctcgagaggacggagtggggcaggggctaggcttgaggggttttggggggtgtagaaggtggcc

SEQ ID NO: 381234 - DNA, 122 bp, Homo sapiens
gccggacgccgtgcgtatcgctcgcggggcgcggcggttggggaccagccctgcctcccccggctcccagcctccagccccggcgcacctcagccccagcccggccagccccccggatcgcc

SEQ ID NO: 381235 - DNA, 122 bp, Homo sapiens
ctgcagagatcccctgagccaagccgaggcagtttccacataagccacattcaatggtatcgcaaccatgagccttaacattgccatcagaaggaaggaatcaggcaggtgaaggcaacatg

SEQ ID NO: 381236 - DNA, 122 bp, Homo sapiens
aatttccttccagacccctggacgtgggcagtggcgggaaatgcatagtctcccagccctcgctctgaaccgtcatccttcgtgccccagagcccaaaggccagccccgtggttattggcct

SEQ ID NO: 381237 - DNA, 122 bp, Homo sapiens
ggctggatgaaattctgccctgtacttgcaaacatttgcagaactgctcagtcagccttccgggaaaaccatgcccacatcctactggattcctctagctttggtgttgtcaacacagagat

SEQ ID NO: 381238 - DNA, 122 bp, Homo sapiens
agcaagggcagggacgggccacaggccaagggcagcagtcaggcctgctctgtctgtgaacgctcccggcttggcctcggctgatgggccctcacgcctgaagcgggcaggaagctccggga

SEQ ID NO: 381239 - DNA, 122 bp, Homo sapiens
tactttatggcccaggctataaaacgcaaatcccacctccctttgaaagcgccctccgcccgggactcaccataaaaggaagagaagatgcaccccgcgcccctcgccgcggaccaccccca

SEQ ID NO: 381240 - DNA, 122 bp, Homo sapiens
ctgaccagcccaaacggcatgccgaggtgttggctttgaatgaaagctgatgaacctaaacgccagggcacagagtgattgggctgcacactgcgagataatacattttctgcaccaagctc

SEQ ID NO: 381241 - DNA, 122 bp, Homo sapiens
caaatgtggccttggctcttccgaaagaacacaggctgtgctgtaaagaagggctgcagccgcctggtgcttgacaaggtccccaagacgggaagggacacatgtagccctgtcctccagga

SEQ ID NO: 381242 - DNA, 122 bp, Homo sapiens
gccaagcaaggctctcctagagaggctctccgggtatgtgcccaggagacggggacaacacgttcacagccacaccgtccgtggtgacgcacacgtccagcaggcgaggactgaatggcgtt

SEQ ID NO: 381243 - DNA, 122 bp, Homo sapiens
actcttcaaatataaccctgctgcttgcctcactgggcggtagtagctgtttacatagctcgtagataaatagaaaactcaatctgcttatttccagctaccatattagcaaaaaagaaagt

SEQ ID NO: 381244 - DNA, 122 bp, Homo sapiens
ccaggcccggcacgctgacctccctgaggctgccctccacgggcaccacctggggctgcccgtccctgtctttgtactggaccacaaaggagtcaaactggccctcagggactgtccaggag

SEQ ID NO: 381245 - DNA, 122 bp, Homo sapiens
agctgacatggactgtatttctcagtctacactgcacatttcctaggcagagactagggccgtcttggtgcttgttgcatgaacagatttagctccaccctgacacgtaaactggatttcct

SEQ ID NO: 381246 - DNA, 122 bp, Homo sapiens
ggccacgccaacaatgtacggcagtaatttctcctggaggtccccaaagctacggaattccgggacagtaaacaccaagttgtcatcggtagctatgtgctgaagctctgccctggaggcgg

SEQ ID NO: 381247 - DNA, 122 bp, Homo sapiens
gttgcccccgggaggggtcagcagagcccccgtggtccagacaggcagagcctctgtgtccggggtggctgtgggtcctcaggacgcctgcccggcttgagtgtgtctgttgcttagcttgt

SEQ ID NO: 381248 - DNA, 122 bp, Homo sapiens
agaggagtggggtactatgatctgcccatgttgggtcacgccgtctcatctatgacagggcggttggtgggcaagcacaggtcttttcaaaggaagggtgtggttttttcagacaaaacaac

SEQ ID NO: 381249 - DNA, 122 bp, Homo sapiens
ccagcctgaccaacatggagaaacccggtctctactaaaaaaaatacaaaattagccgggcgtggtggcgcatgcctgtaatcccagctactcgggaggctgaggcaggagaattgcttgaa

SEQ ID NO: 381250 - DNA, 122 bp, Homo sapiens
caggatctcccactcctccctgacctctctgctgcgggactggagcagcttcgtactagtcgagggctattcttatgttaagctgctctccaggtgggcaaagtgatgtcccttcacccccc

SEQ ID NO: 381251 - DNA, 122 bp, Homo sapiens
gggcgagggctgacttccgtaatctttcggaagaggcggagtcttcttccgaggaccattcggaagaggcggagtcttcttccgaggaccattcggaagaaggcggagcctacctctcatca

SEQ ID NO: 381252 - DNA, 122 bp, Homo sapiens
cggtggcccaggcttcgtgtggtcctctcccctaagtgccttcttacaactgagagatggcggcaaaggtgaaggaagccacggcttgcccatgtcatcctggttatataagactcggcacc

SEQ ID NO: 381253 - DNA, 122 bp, Homo sapiens
ccgaagaggtgcgcctatgcttggctggggctgaggtcaccaagagtcctctcggagggacgttactacacgcgctggcgaggcccaggagtcgtggtgcgaggggtactatctgtgaaacg

SEQ ID NO: 381254 - DNA, 122 bp, Homo sapiens
cgttggttatgaagggtgtggtctccctggtggagtacgtcggtgggttgggatggggagcggctggacagaccggtctcactccgtttggtgccactccacccgcccgggtttccgcgccc

SEQ ID NO: 381255 - DNA, 122 bp, Homo sapiens
gccaggagagggtggaagtcattccccaattcccatccttgcgccccccggcttagcccacgcagcctggacagaactggaggaggggtgcacctgcagctctcagcgccccggctgacctc

SEQ ID NO: 381256 - DNA, 122 bp, Homo sapiens
cgggagacttgattgtccttccttcaacagacctgtccaaaatgactggaaagtaaataccgtaaatcactgttgtcagggcgcacattccacctccttcctcccttacccacagcggtcct

SEQ ID NO: 381257 - DNA, 122 bp, Homo sapiens
cactccctcagcacgcggcctccagggtctcagccttcttttaaaacaaggcccctcacacgcacaacggctctgcaccgatccgcttacaaggcttgggtaagatacgacttcaaaggtca

SEQ ID NO: 381258 - DNA, 122 bp, Homo sapiens
aaatttttcccttgagaatagtccccgagtgccgtgggtgctggcggagaactctagctacgaagcccagcggtccctccaggcgcccaggccgggcctgaacctagggcatctacctgggg

SEQ ID NO: 381259 - DNA, 122 bp, Homo sapiens
ctggctgcctttcagaggtggcataccaagtttttgcttattcgctctctcttgggagaacgtcaggtggctcataaatctggggacggagttaggaggagtggaccgagcaggactcacca

SEQ ID NO: 381260 - DNA, 122 bp, Homo sapiens
tgagccccacccgcccccatccctgcttaggtgtgagagacttcaggagggtatgggggccgtgcatgtctgggtgtggcgaggtacccaccgtcgcctgtgctgacccctcctgcagggga

SEQ ID NO: 381261 - DNA, 122 bp, Homo sapiens
tggcaggaaacctggttatccatgtccctctccgaccctcccccgacttcgccaggctcacggaggcaccatcgccttccattatgtacagtgtcgagggtcccatccagggcaccgggcac

SEQ ID NO: 381262 - DNA, 122 bp, Homo sapiens
ggtcaaggcacgggcgaaggcagggcaggctggtggaggggaccggttccgaggggtgtgcggctgtctccatgcttgtcacttctctgcgataacttgtttcagtaatattaatagatggt

SEQ ID NO: 381263 - DNA, 122 bp, Homo sapiens
agagtcccaccccggacaggctgtatcaaccccccacggccatatgcccactgctgtttgcgtacaatgaggcgggacctatagactgtatccactgactcatctggagtgattccgcgggg

SEQ ID NO: 381264 - DNA, 122 bp, Homo sapiens
gcgtcagcctccggttcggttgcgctgcgcgtagtggtctgggcgacctgagggcggggccgggagcaggccccgggctgtggggagggtgcgcttcccgcgggcgcgcggagtgaggacgg

SEQ ID NO: 381265 - DNA, 122 bp, Homo sapiens
tacaatggaaattcagacggcccaacagggagtggcagtcacctcaaaggccccactagacgggtgcggggcaccactgcagagcccctccctggctgtgccaaggccgtccacgcctgcag

SEQ ID NO: 381266 - DNA, 122 bp, Homo sapiens
ctggcctcccacagccgctcctgacccaggaggcctgggtgggggctgaatctctgtccccgggcctaggtgtgggccatcggcgagtacctgtcggtgacctacgatcggaggtgcaccgt

SEQ ID NO: 381267 - DNA, 122 bp, Homo sapiens
agaaaaatgatgttggaaatactagtaacaaataaagtatcacggaaatccccacccaagcgatacggtttccttgacgcgcccttaaccaaggcgttaagtttagcctgacagcatccctc

SEQ ID NO: 381268 - DNA, 122 bp, Homo sapiens
agggaagaaaagagttcagccaggggtggcagccactgggccccgagcagactctgcctgcggtccccactgggagtggctccggcggggaaggggctggcgcgctggcagccagggtcttc

SEQ ID NO: 381269 - DNA, 122 bp, Homo sapiens
atttgattttcgtgctccatattggcagcgcgaagctgtttttccaggttttcaatttcccgttcatggtctcggactaggctatccttctctgcgttatgctgctgtaataggtgcgtctt

SEQ ID NO: 381270 - DNA, 122 bp, Homo sapiens
tgagagtactaacatagcaaaagataaatgaattccaaatctgttactgccatctatttacgtaagttttttcttgaaataaacagcttttactgggtgggaaataatgtgtattttgtgct

SEQ ID NO: 381271 - DNA, 122 bp, Homo sapiens
ttcaatcacacccccactgtttttggtgggacaggggttggggacttccaaaatgagaagcgcagaggggtggactgatgtattacttcagtaacagaggtgctgggtcagccaggcaacaa

SEQ ID NO: 381272 - DNA, 122 bp, Homo sapiens
tggagagggccgaggtgtgagcagctggcagcaaccttgctgacctcagcacaggggccacggctcactttcttgcacccagaggacaggccccacctgcagcatcacctaggctgaaacat

SEQ ID NO: 381273 - DNA, 122 bp, Homo sapiens
tgccgccggggcggagcccggtcgcatcacgtgacgaagagtcagcttgtgcaacagcgtcggaggctcactagaaaaaaaagggcagggtcccatgcatcgcctgggtcctgtttacacta

SEQ ID NO: 381274 - DNA, 122 bp, Homo sapiens
acgcgggtgtcgggcaggcgggtgtcggcacgcgggtgtcgggcaggcgggtgtcgggcacgtgggtgtcgggcaggcgggcgtcgggcaggcgggcgtcaggctgcttggctttgccccac

SEQ ID NO: 381275 - DNA, 122 bp, Homo sapiens
atcgggagctccctctcggccctgaccccgcggtctctgtcgccccgcaaacggccgctgcggccgcaggctcccaattgggacccttcccaggggaggaccccatcccccgctctctttct

SEQ ID NO: 381276 - DNA, 122 bp, Homo sapiens
gcagcctccgggctgcagctgccactgacgctgccatcgtagctccgggcagtgactttacgtggtcaaagagtgacgagggaaggaagccaggcgtttcctacagcggcccctggcggtag

SEQ ID NO: 381277 - DNA, 122 bp, Homo sapiens
tcacataaaatgtccataaatcccttcagccacaggacacaattgatggtaattctttgccgttaaagttgtcactggccacagccccagagctgggaaatgcgttctatctgctccgtcag

SEQ ID NO: 381278 - DNA, 122 bp, Homo sapiens
gaggagggggtggccaggcgcgcggggaggtgactccgtcagtcacagctgctgtttcggcgcggggccgggccgctgccgcgacgtgtggaggcaggagagcgatgattgccgcaggagaa

SEQ ID NO: 381279 - DNA, 122 bp, Homo sapiens
tttcggtgcgacgctgccacctgctggctgtctgggagttgcacccagaggctcagaacccgtgtttctcagagggcccgggaggggcgaaactgcgggttcccaggccctcccggattctg

SEQ ID NO: 381280 - DNA, 122 bp, Homo sapiens
gtgggaagcgcctggacagaccatgaccacagccaaggagccaagcgcttcggggaaatccgtgcagcagcaggaacaggtaatgctgcttttgggggtccgtgtgtgtgtgtgtgcgtgcg

SEQ ID NO: 381281 - DNA, 122 bp, Homo sapiens
gcgggtcccggaggtgagtgctggatgtggtctgtgtgcggacgtcgggaggggccgctgcgggcggagcgacccattgcccggctctgccagcgcgctcctagactgcgaagcccctccct

SEQ ID NO: 381282 - DNA, 122 bp, Homo sapiens
tgtcccggagacgacgaacttggctccccacgagggcggcctattccccacagtgtcccccgggggccacacctgcacccaccttgctgaagataattcgctttctcatccgtgaaagaata

SEQ ID NO: 381283 - DNA, 122 bp, Homo sapiens
cctagctgctccaggggcagcaggggaggcgcgtgacagagcaaccctgagaggccaactcgtggaaccataactgggattcccgctcgcgccctcaggtctccctcccttttccagcgtca

SEQ ID NO: 381284 - DNA, 122 bp, Homo sapiens
agcccggcaggcctccggatgccgttccgagacgcggcgcgaaggagttaagcgggccggcgggtgacatcacctcatttacataggagcgcccataaagctgcgcccgccgcaccccgccc

SEQ ID NO: 381285 - DNA, 122 bp, Homo sapiens
gcacaaacaggggcgagacacagccaggaccaactcctggcccggtgctgtcctgttcggcgtcaccccactgcacccccggccgtgctctgccacctttgaggatgacctccagctcgtcg

SEQ ID NO: 381286 - DNA, 122 bp, Homo sapiens
tggacctggatggaattgttttactttgcatcgccggactgcgctgcggacggggtggggcggcccaatggcccccctggggttactctgctccccttcacgcttccctcccggccccgccc

SEQ ID NO: 381287 - DNA, 122 bp, Homo sapiens
caacacgtgcaggcccaaccgtccgttcatcgcccctcgaagccccctgcacgggatccgcgctcttgcggcccgcccccgagcaccgagcctcgcatccatacgcgcagcactcacggaag

SEQ ID NO: 381288 - DNA, 122 bp, Homo sapiens
gctgtcatagctcatccttgggcttcgattcactgcctgagagagactcttgtgcaggttcggggggaccctgctgggcatccaggggctgctcctgggagaggtccatctcttctgggctg

SEQ ID NO: 381289 - DNA, 122 bp, Homo sapiens
gctcgaaggatccaggtcagctgcagccgtcggccggggcggggtgggctgggtgggatccgcgcggccgcagtccgggccccgggccgccgccggctcagaggctcggcagatgcccgccg

SEQ ID NO: 381290 - DNA, 122 bp, Homo sapiens
cgcgcggctcggcgtccgggaggaaagccgcgggagggcaggtcagcgagcgccgggccgcgggaggcagctttgggcagataaaaagcctctgccgctcttggccctctggctcaggccga

SEQ ID NO: 381291 - DNA, 122 bp, Homo sapiens
tgttacagttcttaaaggcggcgtgttcggagtttcttccttctggtgggttcacggtctcgctggctcaggaatgaagctgcagaccttcgcggtgagtgttatagctcttaaggcgacgc

SEQ ID NO: 381292 - DNA, 122 bp, Homo sapiens
ttccgacccagcctcttccccagaacgctgagtgtggactgcggcggtgggggaaaggagcggttgcccacaaaccatccgagcacagggagccgctcagacccgacgccggcgggacaggc

SEQ ID NO: 381293 - DNA, 122 bp, Homo sapiens
ggcggcctcgcagtgctgaggggccgggttcccaggcaatagccagggcgccccgaggcacgccacgcctccgcttgccgcgcgcagaactgcctcagcaagactctcgcagtcccctcggc

SEQ ID NO: 381294 - DNA, 122 bp, Homo sapiens
gaactggaaacaaatcactgttttgctaggagctttgcatgacctcacgccctaggctgccgggtcctgggctgtcctgatgggctgtgaaatcccacccactcccagggctgccgggtcct

SEQ ID NO: 381295 - DNA, 122 bp, Homo sapiens
agggtgggtgcccgcagggcacaggtgccgccgtggctgctcgcacaacccctgcagctgcgatcccgcccagttagcctcgggggctgcacagcccagccccctcgcccagggcccagggg

SEQ ID NO: 381296 - DNA, 122 bp, Homo sapiens
atcgcccagaccaccccggggtgggtagcagctgagttgctggtaccattccattcagcacgaggatgcatcgggccggctctcctgcaacgtccagcaagacagatgcatgggtagagcag

SEQ ID NO: 381297 - DNA, 122 bp, Homo sapiens
gctccctggccggaagaccttttctgtctggtgtctgcagagcctgacgtgggcagcgcccgcagctcgcgccggtgcaggggagctgagggccgactgcgcgctgcaccacggcggccacc

SEQ ID NO: 381298 - DNA, 122 bp, Homo sapiens
gtgggtataaaatcgtaaatcctatgtagtcgcgtagtgcatgcgcagaaggcttagacacgaaatgtcatttcagcaatgtgcctagagaagctctgacgccgccttggaagtaagtcgtt

SEQ ID NO: 381299 - DNA, 122 bp, Homo sapiens
catccagcccgtccgggtttaacttagaagtgtgtggcccctcagaagcaggagggtgggcgtctgctctcatccagtccgtccgggtttaacttagaaacacgtgcaggagatgctgcttt

SEQ ID NO: 381300 - DNA, 122 bp, Homo sapiens
aatctgttagcaatgctgattctcaggcccagcccagacctgacagatcagactctctggcgggggtggggggacagccgccccgtctccacagctctcccaggattcggatgcagctggag

SEQ ID NO: 381301 - DNA, 122 bp, Homo sapiens
gcagaggggtcagcgtgggggcactgactaacctccggccatcctctccaggcccagtgacgagcaccatccggaagtgaaggctgatgggtacgtggacaacctcgcagaggcagtggacc

SEQ ID NO: 381302 - DNA, 122 bp, Homo sapiens
tattgaactcagaattgttctgactggcagtttatgaagttcttcccctactcctcccatcgccaatttttcttgccccaaacatttatacctcagggttaagaagccaggtaagtgagggg

SEQ ID NO: 381303 - DNA, 122 bp, Homo sapiens
tgttttcactcacccgcctctccctccggctcttgagctgaacgagggcagggactgtgtcgtgtttgctgttgtattctcggtaccctctaaggtgcctggggcatggtaggagaccgata

SEQ ID NO: 381304 - DNA, 122 bp, Homo sapiens
gcctgtgtccagcgcgtggctcctctgttccacattagcagctctggctgggtccacacccggcccagtctgggtgctcaccttgcaggtagggtctggctggggaacttggggcccttcaa

SEQ ID NO: 381305 - DNA, 122 bp, Homo sapiens
gtatttgattgttcaactaggcttcttccatgaggatcttattttccctggcatttatcacgtcagtaaggtagaggagctcctatctgaaaatagcacctagcgctaagtctgtctaaggc

SEQ ID NO: 381306 - DNA, 122 bp, Homo sapiens
gaattactttctcctcattgtttaaagctttatggggatttttattcaaggtttcctagccgaggtatggatatgtaacccaagtcagccacacccattgaactgtcttctgggactgtgga

SEQ ID NO: 381307 - DNA, 122 bp, Homo sapiens
gctggcctggaagagagacacctgtagaaagttctgcgggaaacttctctgcctgatctgcgcgatgactgaaacttgggcttgggtttgcacaataatgttggcttaggagagcaggagaa

SEQ ID NO: 381308 - DNA, 122 bp, Homo sapiens
gcgtggagctccccgagcccggcccgaggctggaagggccggatgctggctgggagcgggcgctgggtgcctttggaacactcttcccgtctccctctccaagctcacaaccctgggtgact

SEQ ID NO: 381309 - DNA, 122 bp, Homo sapiens
taacaaatttaactcttagatttgcagaactgataaaatcatagaacttttaagatgaaccggattctaaagaagttaccaatcagtttacagacggtggaattgagacctacaaatattaa

SEQ ID NO: 381310 - DNA, 122 bp, Homo sapiens
gagacaaacggatgccgagatccagagggtcggagaacaggcaaactcggagcagtagaccggcccgcgccccgggaacgcggccacagcggccggcgctctgcccggcctctccgcgcgga

SEQ ID NO: 381311 - DNA, 122 bp, Homo sapiens
tggccgaattggccgccctgacgggtgagggccgctttcccaaggccccgcatcgcgcctcggcgtccccgcatgagctcctggtcttggcaacccccttactgcatcttcccaggccagat

SEQ ID NO: 381312 - DNA, 122 bp, Homo sapiens
gagcttaaatgacaatgggccacaaggagcagggctacaaagggaagagcagggggagaacgttatctatgtctctgggtccattagtaggtacgtgcttgatcccagctggatcaggttaa

SEQ ID NO: 381313 - DNA, 122 bp, Homo sapiens
ttttctcccttaccctattgtcatttgggcacactgtttaagacttgcttgataaaagaacgttacccaaactaactggaaatttgtgtggctcttcccttgtagctgaactgtgaaccaaa

SEQ ID NO: 381314 - DNA, 122 bp, Homo sapiens
cctacgctggcccagctgctaggaactagcgccccgagcgccgcccgctcgctgcatgagcgcccgagtcctgcttcccacccaccggggcaggcgctcacagactgtgtccactgaacttc

SEQ ID NO: 381315 - DNA, 122 bp, Homo sapiens
ctacacatgcctggctcgtaggaagtgttccgtgagtctctactgagtgtttaaaaccttcgatgcctcccactgctgtgcaggccaaaaacttaaagtgcttcttggatactgatgcatac

SEQ ID NO: 381316 - DNA, 122 bp, Homo sapiens
cccagacgcctcttcccagcagacttctgcttatatttcactggtcacgactgggccgcacgatgacccttcactgcaagggagagaggaaagatggatatttaattttctagcctttctaa

SEQ ID NO: 381317 - DNA, 122 bp, Homo sapiens
gctgagtgaggtttgccttgaaacagatctaagttcggtagaaagtagtggggacaccgccggcactgcaggcaggagataagttgcagcaaaatcccgttcagccgatcacccaggcaaga

SEQ ID NO: 381318 - DNA, 122 bp, Homo sapiens
cgctgcgacagttgtggcggagggcggtgcggcccccgttagtgatgactgcgttactgccgtgcagctgatggaagcgcaggtcagagcccccggcccctgaggacggagagcttggagac

SEQ ID NO: 381319 - DNA, 122 bp, Homo sapiens
ttctggagggtcagcctccacaggtcagagagctgcaggatctgctggacggaggacagccgccccggccacaggttctcggcgtgcatggtggcgtgcccgctgaagcagtgatcttcata

SEQ ID NO: 381320 - DNA, 122 bp, Homo sapiens
tttttcagacagacaaggggagggtttcctgtgatgggatcagtcagatgcctgcctggccgctccccctgaggggacttgggctcctcttagcattggcaggcaggaataaacttccggct

SEQ ID NO: 381321 - DNA, 122 bp, Homo sapiens
gcctaatttaatgatttgttcgttctcagctttgggaattacagagtgcactcacacatgcggacgcctcacactcaccatccctttttgcaatgtatactcaatgattattgattgaaata

SEQ ID NO: 381322 - DNA, 122 bp, Homo sapiens
ggtcagggcggagctcaggttgactctgcagcagagaactacaattcccatggggccgcgcggcagaaagaaaggggcgggacgggagggggcgcgtcgcgcttgcgcaggtcccggggccg

SEQ ID NO: 381323 - DNA, 122 bp, Homo sapiens
cctctcttattgctatttatttcctttctcactggcctttggaaaaaaagaaaaaaaaaacggcaaaggatttgggggctacaccaaaagaaagtgaaggagcagagtatgtgagaaactga

SEQ ID NO: 381324 - DNA, 122 bp, Homo sapiens
tttaaaagtgaaacatacacttaccatgtgacccagcaatccctcttctagttactaatgcgagagaaatgaacacatgcatccacatgatgatttatatacaaatgttcataactgcttta

SEQ ID NO: 381325 - DNA, 122 bp, Homo sapiens
ggctcacagtcaggccggatccgggtgaggttgtagtcggcccgcagggagcgcacggctcgcgtgatgcttagcgccagctcaagggcggcttctgcctcggggtccttccaggagcactg

SEQ ID NO: 381326 - DNA, 122 bp, Homo sapiens
acggatattcagagaaatgcaaatgaaatgacaccgggctccacttcacacccatcagatcggcccaaatcagaacattggctaatcacgagtgtgggggcaagagagtggtagaaacccta

SEQ ID NO: 381327 - DNA, 122 bp, Homo sapiens
cgacacacaggagaaaccaacgacacgcaggagaagcccatgatatgcaggagaagcccacgatatgcagaagcccaccacacacacaggagaagcccatgatacgcaggagaagccgacga

SEQ ID NO: 381328 - DNA, 122 bp, Homo sapiens
cctgataaactaatttcctctggggacgctaaaaagctcctcaaacccaggcctcctctccgaaagcacgccgaccaagccgcccttccgcggattcgtccccgagtcttggccgtggactt

SEQ ID NO: 381329 - DNA, 122 bp, Homo sapiens
ggccagtgccgggctgacacgaggggcaggatagggttcccagcgcggaccagggtggctcggggcggcgggggtgtggggggatgaactggggtcggagcccaggtctccacagcctgtga

SEQ ID NO: 381330 - DNA, 122 bp, Homo sapiens
cgagcttaatgatgactgttttttttgattgcttgaagcaatgtgaaaaacacatttcaccggctctgaaagctcttgagttgccatttgaaagaaatcttagaatactttgcagttactta

SEQ ID NO: 381331 - DNA, 122 bp, Homo sapiens
attttttgagctcttgccatgttccaagtaccatgctaggctctgaggtaacacacagtccggtaggggagccagacctgttttacaggtatctccaatactgtgtgataagttctatatta

SEQ ID NO: 381332 - DNA, 122 bp, Homo sapiens
ggccggcggcggcggggctggccggacccgggcgctctcactcgcctcgtcgtcgggctccgacaaggaagacaatgggaagcccccgtcctccgccccgtcccggcccagacccccgcgga

SEQ ID NO: 381333 - DNA, 122 bp, Homo sapiens
ggcctccaaagcacctgtcgttgtggagattccacagcaggcagggtggagatggtgagccgcagacatcacacctgccccaggtcaggccgaggctgctcatcaggagccccgagacctcg

SEQ ID NO: 381334 - DNA, 122 bp, Homo sapiens
tgcagccccttcccctcccctccccctcctcagcctcctcttctaccccagggcccaggccggttaatctttaactgcttctggactagcactgaccccaaaagcaaacacagcaggattcc

SEQ ID NO: 381335 - DNA, 122 bp, Homo sapiens
accgcgtctcttaccggtaatggtggtgaactgttgaattaaccccttcagcgccgaggacgccgcggagcccccgtgggcagccatcttaccgccgccgccgccgccgaacaacaacacag

SEQ ID NO: 381336 - DNA, 122 bp, Homo sapiens
attgctgtaggagtgtaaatcctaccatctggaagatgtcctagcactcatgctcctgagcgtttataccctctcactcggcactcgtttccaaacctagcactcacgctcctgggcgttta

SEQ ID NO: 381337 - DNA, 122 bp, Homo sapiens
catctgccgagacaatgggagcggggagccggacagggggcggggcccgaggcggggccccgccaataatggctcggagccggcttcaggggcgggggcaaggaagaaattaagccaatgta

SEQ ID NO: 381338 - DNA, 122 bp, Homo sapiens
tgggctgctaggaacccatcagtccatctctcacatgtaccttggtagtgttcacctcagcgtgggcacttacccagggtcttctgggggatgtacaaaaagtgcatgtggtcactgccctt

SEQ ID NO: 381339 - DNA, 122 bp, Homo sapiens
tagttatcattacccaccgagtttgtataatttggcaagaaaaggggcagataaatttaacgtggcatgtgcagatacgtttaaaaataaaatccaaactctgtgactaacatctctgtcaa

SEQ ID NO: 381340 - DNA, 122 bp, Homo sapiens
cgccgttgcctagtaactgtcgccggagggaggcggggagggtcgcaagcgcgccgccggcgtccaatcaggacctgcgttccgggagccaatagcagcttcgagagccgctcacctagagc

SEQ ID NO: 381341 - DNA, 122 bp, Homo sapiens
tatctcacatccctgctcccacagcggggctgcttcccatcctagtgccacacggagggccggggaggccgggttcaggtttgatgctgaactcatatgcacaccggttttctctctcataa

SEQ ID NO: 381342 - DNA, 122 bp, Homo sapiens
gtgtccgtgaaaaagttgagactgttgcatgctgggctatgtagttctcctggtacttaacgcgcgcgcgacggcaaggtctgaactctgttacccagaggccctagcaaccaggaggcggc

SEQ ID NO: 381343 - DNA, 122 bp, Homo sapiens
ctcagaccttctcctttgtcatgaggggagattttcctgattttcctggtgtggtgttcccggggctttgtgcttcctttgagtggcctgggtgtccctggttcttggttactagggatcaa

SEQ ID NO: 381344 - DNA, 122 bp, Homo sapiens
tgacctgataaccacactcttgcagctttggtccaagaatggtaaaaatccaaggaatgccggggaagggagagggggaggcagagcaaaacaaaacacaatctccattgtaaatgactggt

SEQ ID NO: 381345 - DNA, 122 bp, Homo sapiens
acttcaagtgtgcaccaggtcatttctttttagctaccccagagtgtctgccaccatccccgcaaagctggagaaagagaaacccaggcagccagaaaggaactcgggagacccccacccct

SEQ ID NO: 381346 - DNA, 122 bp, Homo sapiens
cccagccagagtggaggtcccacccagatggtttgcaccaatccagagggggctttccagcgagtccccgcccccttccgacccaccaatcacgcagcgcctctggccgcccaatctcctat

SEQ ID NO: 381347 - DNA, 122 bp, Homo sapiens
actcagcccttggacaccctctttgctttatatacattcactctcttggtgacctcattccgtctcatgcttcatatcccacctgcataccaatagctcaaatttcctctattctgtaccac

SEQ ID NO: 381348 - DNA, 122 bp, Homo sapiens
ctcgtgccatatgcaccagctggtggatcctgctgcctccctgcacatgtacggaagccacgtaccgaacctggttctccaagaagtgcatgtagcggtaaagcagtgtgtaggagggagag

SEQ ID NO: 381349 - DNA, 122 bp, Homo sapiens
ccaacaccaccgtcgcaggcagagtcccgccccgccaggcgacgtcacgtgacgcacattcgctcaagtccacatccgggcatccacctggccctggggcggagcctgcggtcgggtctcgg

SEQ ID NO: 381350 - DNA, 122 bp, Homo sapiens
taggcaaccgcgtcggcgtctgcttttaacctgtgggagaacccggcgagctaagccaaacggagggcgggagagaggaagcggcagctggcgcctctcggcaactctaaccctctgataga

SEQ ID NO: 381351 - DNA, 122 bp, Homo sapiens
cccggggtttacctgcgcgcactccagcgggagggcgggttgtggaggtgtgctgagcggcgcgcgggggtgagggcgtggaagcggagggtggggcccggagagccgttaccagggcgaaa

SEQ ID NO: 381352 - DNA, 122 bp, Homo sapiens
gggccggggctgcagtggagggtgtggggcggggagatgccctcattgcccgcgcactggcgcccgagcccagagaagagagcgccggcttccccgccagtggccgcagcaccccaggagcg

SEQ ID NO: 381353 - DNA, 122 bp, Homo sapiens
caaattaaagagtcctttattagctggcgaccgagaggcagctaacgctaaaaattctctcggcccctgaggaaggggctagttttgtttctatactgtggtctaaataggcgaggggggat

SEQ ID NO: 381354 - DNA, 122 bp, Homo sapiens
cccgccttgccgttctcggtcaccccatctcgaatgtgacatccccgagggccatcggcgcggcctgcccaccccaacactcagggcctgaggaagctcccccaaaccccactccggactcc

SEQ ID NO: 381355 - DNA, 122 bp, Homo sapiens
gctagcaaaggcggccaagcagctcgaaattcttcaaccaagacctagagttttcagacccggaagagaaggcccagcgcggaccgtgcggggcgctagaaccgctcagggttgaggcttgg

SEQ ID NO: 381356 - DNA, 122 bp, Homo sapiens
gagtcttgatcttgttgcccgggctggcaatggtacgatctccctgcaacctctgcctcccgggttcaatcgattgtcctgcctcagcctgccgattagctgggactacaggcccgcgccac

SEQ ID NO: 381357 - DNA, 122 bp, Homo sapiens
gctgctgtgtcagtcagacacttctctgcttccgttggcgggaaggcttcaggcgggtagcggggactcggtactgccccctcccaagctgggagcagggcgcgtgacgtctcagacatttg

SEQ ID NO: 381358 - DNA, 122 bp, Homo sapiens
ggcctgcgcaacaccccagaggcaaggtgaacgcgagggcctataatgcaagaaccaaggcgagtcacgccctgtctgggcaaaagaggagtaaagacccctcagctgcagcccggcagcgc

SEQ ID NO: 381359 - DNA, 122 bp, Homo sapiens
tggtggcggctgggggtctgcccttctgtgagagttgggggaactgtctcccaggccactcggggctcctgtgagaagctcagtggcgtgtatcctcagccctcgctccacagatgaagttc

SEQ ID NO: 381360 - DNA, 122 bp, Homo sapiens
aaaaatgcgctgaagctgtggctgatggaaaggtccaacgactacttcgtgctgcagcggcgtcggggctacggggaggaaggcggaggggggctcacaggtaagctgtggccaccctacct

SEQ ID NO: 381361 - DNA, 122 bp, Homo sapiens
agtaacgattccttcagtgatcccggttctccaaactcttgcctcaaaggcggcctgccccggtgctgtcagccgtgaatggggactcacttcttgggaaaagaggcttttggaggctgtgg

SEQ ID NO: 381362 - DNA, 122 bp, Homo sapiens
aggagttctggccgcctgaatctgacgggatcctctgtttgcgccgaaaccccgcgctggcgcagcctgatggcgttcgcggccaccattttgcctccttaatgaggacgcaggaggacggt

SEQ ID NO: 381363 - DNA, 122 bp, Homo sapiens
gctttttctctttgcaattggttctgagaatccccaccctcctcaataatttgcctatggcggagcaggagccctccagctcccgccccatcactggtgattggcatgggacctagctcgtc

SEQ ID NO: 381364 - DNA, 122 bp, Homo sapiens
tctgcagcagcctggaaggattgagcccttggtgcctgcatctctctgagccttggtttccgcttccgtccagcggggagaatagcagtaaactgacattacaggtttgggatggtcaacag

SEQ ID NO: 381365 - DNA, 122 bp, Homo sapiens
ggaacgcgcgagcggagggtggggcgatcaccaggacaggtggctgcagtcaacgcgcagcggcccagggcgcgcgcagcctgcgcggcctcccgaggccggagttgttccccgaaagttgc

SEQ ID NO: 381366 - DNA, 122 bp, Homo sapiens
gacctccgctccctcagacgcggggcgggccctgcgacttcactctgggagggacatttccgctcacccagctctgcgaccctcgctcctgcggagtcagcttctgctcgcggagggggaag

SEQ ID NO: 381367 - DNA, 122 bp, Homo sapiens
acagtacccaagagcctgggtgagtgggtgctccgaatctgctccaccaggagccggcgacgtcatctcagagcagctgcctgactttctatgactgtttccacatgtgtgaaaatggtagt

SEQ ID NO: 381368 - DNA, 122 bp, Homo sapiens
tgcaggtgggcatcaggttgcccccgtgaagtgcagctggggccgagcctggctgaaggacggccaccttctctccagctgtccagcgagggcttctgaggtggtgccctccggggctctgt

SEQ ID NO: 381369 - DNA, 122 bp, Homo sapiens
actgggggctgcggcctagaggtccgggcttggagttcgcctcagacgcggtggagccgccggagtctgagaaggtaagaagccgccggcttgaggtccctgacaactaaggtctctgagga

SEQ ID NO: 381370 - DNA, 122 bp, Homo sapiens
gtgcaacgcattgatcacagctcactgcagcctcaatctcctaggctcaagtgatccttccgcgtcagcctcctgagtagctaggactacaagtacgcttcaccatacccagctaatttttc

SEQ ID NO: 381371 - DNA, 122 bp, Homo sapiens
gctcagtttcctcgcccatttccacatagcaaaattcaagcgagtgagtgtgtgtgcctgcgtgtgtctcagtgacgtgggaaggaatggcagatgctacaacagtgcagactcggcacccc

SEQ ID NO: 381372 - DNA, 122 bp, Homo sapiens
tttcattccgatttttgtgacaactgtattttgcgttggaaaaaagcctggaagagaatacgttcataattgaaagtcgtcatttttggctggataatggatattttcttctccacatactt

SEQ ID NO: 381373 - DNA, 122 bp, Homo sapiens
gattgatcctaaacttccctcctgcattcatgggagttagctgacaggaaatacacagtgcgaggaagtggtgagtgagagaaaaaaaaaaaacagctaactgataagatcttaattgcaag

SEQ ID NO: 381374 - DNA, 122 bp, Homo sapiens
aaaaagctaaataaagtcttaatattgttatgaaaaatctttatgaccttgtggaccccgcgaaagggtctcaggaactgcactaggggttcccagaccccacttagaaccattactttata

SEQ ID NO: 381375 - DNA, 122 bp, Homo sapiens
gcctgtggtggccatgaagcccagcctcatgttcctggccaaggcaggcagccgcgacatcgccgcctactgcaactacacgcagtaccagccccgtgtgctggctgtcatcgggccccact

SEQ ID NO: 381376 - DNA, 122 bp, Homo sapiens
agccacagtaaagccgcgtccaccagcagcagggaggtccagggtctcaggtcagggagccgcatggctctgtcaacggatacgagatgagaaatcatgggggtggagtcccaatccttgtc

SEQ ID NO: 381377 - DNA, 122 bp, Homo sapiens
ctcgtggtgcgccgttttttaagccggcctgaaaagcgcaatatttgggtgggagtgacccgatttccaggtgcgtccgtcacccctttctttgactcggaaagggaactccctgacccctt

SEQ ID NO: 381378 - DNA, 122 bp, Homo sapiens
agccgtctttattttcagtgagtcataggtaaaatattcttcaccaggcgaggattgagtcgcagtcgcgtcaggaactcgcctccaggtactgagcgagcgagccccgacggccgcggtgg

SEQ ID NO: 381379 - DNA, 122 bp, Homo sapiens
tagaaggccctgcatccgtaaattcgcgcatctctgtttttgttagatccttgtaagcatcgctacccgagtccaggatggaatttcacaggaaagtgaagggatactgcaggcctgtgttt

SEQ ID NO: 381380 - DNA, 122 bp, Homo sapiens
agggcgggggatgcgggccaggcccaccttgagggccgggagctgggccggaggccagggcggccagggtagtgcgctgggcgaggcaggggaggagtaggggagagtgggcgtgggggccc

SEQ ID NO: 381381 - DNA, 122 bp, Homo sapiens
caaacgtgacttccaacattttttatttatctttcccttttcttttccaagatgtaactacggatcagacactaaggaccttcacgtttcgctgatgtagtttttggaggaaaaaggggggg

SEQ ID NO: 381382 - DNA, 122 bp, Homo sapiens
ccagcgccccagtctatgttactgggagtgtgaaagcgaccagccctgcagaggcttccccgcgccccgcgccccgcgcccctcgccaacccccggtgcgagcccagggcaccgagccccgc

SEQ ID NO: 381383 - DNA, 122 bp, Homo sapiens
ttctcccttccatttaccaccaagtctctagattcaaggtcaagtcaaaggagcacagcccgtcttacccctgggactcccagcgcccagcacggagcctgggatgttagagcgctgggtca

SEQ ID NO: 381384 - DNA, 122 bp, Homo sapiens
gcagcttagtggggagggtggccagccaggcctacctgtgacagtcgtgccagatccacgcgtggcggccgttcttgggccggaagtcggactggccattgttgtggatctgggaggagaag

SEQ ID NO: 381385 - DNA, 122 bp, Homo sapiens
attagtgaaattaaatgtatttcctatttgaaatttagctgagcattctttggccacaaccggttctgctgctgactttgacatcagtgccttctgcctggggcacctcagagcaactaact

SEQ ID NO: 381386 - DNA, 122 bp, Homo sapiens
agcatggctaccacctcttccaggctatgcggcttggggttgaggagataaacaactccacggccctgctgcccaacatcaccctggggtaccagctgtatgatgtgtgttctgactctgcc

SEQ ID NO: 381387 - DNA, 122 bp, Homo sapiens
agtcgaaagctgaaaatgattcaatgcacttaggggatgcggaggcggcagcaaggggctcgggaaagccggggggccgcaggactggagctccggggggcggcgggtgggggatgggaagg

SEQ ID NO: 381388 - DNA, 122 bp, Homo sapiens
tccatgtggcctcaggtatccgtgctgtagatttctttggagctttctacatgagcaacacgacagatgtggagctggctgggctagatggggacaaaacagtgactgtggagttcaagcat

SEQ ID NO: 381389 - DNA, 122 bp, Homo sapiens
ggaaggtaagaactagactgaaatactacatgcattttctttgtatgatttataacaatacgccctgccttttctatactgcagtttttaggcttaatagaaactttaggagcacctgaagg

SEQ ID NO: 381390 - DNA, 122 bp, Homo sapiens
gctgaactccgcacagccctggctgggcttctctgagtgaacaaacgctgccctggtctccgcagctgtgaaatatccagtgagcatccagctgcgggttagttacttccacagtcagagaa

SEQ ID NO: 381391 - DNA, 122 bp, Homo sapiens
cacagcactgcgtggcaggagcggagcgagcctcgtaggcgttccaggtgttccctgagccggattaaatgcctctgcgctgtgggggtggggacagcgtggggggaagccaggaaaagccg

SEQ ID NO: 381392 - DNA, 122 bp, Homo sapiens
tgttttctccttcctgggcacagtgttattctttcaggagatactacaatggactgtgttcgttggcctccagccaggaggtggcagtttcaaaagagccccagctgtggtagcagtgggat

SEQ ID NO: 381393 - DNA, 122 bp, Homo sapiens
gacccccatcgcagtggggggaggcactccccgtgaggcggggactgagagccagcccctcgtcccaccctggcttaggacccccatcgcggatcctaagaaccttaggacccacttggagg

SEQ ID NO: 381394 - DNA, 122 bp, Homo sapiens
tcttcattaaaacaacagcactacaacctctggaggtacgccgtaattattagatgtttacgtaccctcatcagcgtgctaagtttttattgaaaagcccctccttcagtccctcctgaatt

SEQ ID NO: 381395 - DNA, 122 bp, Homo sapiens
atgtcacaggtggcatttaaaacccattccttgctggacctggtagagacgcccccagtccgtcaggtctctcgctgcagttccgcagtttgaccgcaggggacggaatctgcggcggcctg

SEQ ID NO: 381396 - DNA, 122 bp, Homo sapiens
gctttgcaggttgtgtgcgatgcagtacaggggagcccccaaattaattggagcttagctcgcaaaggttcttggctttgcccaggaaagaatttaagggtgagccagtggtagggttgaaa

SEQ ID NO: 381397 - DNA, 122 bp, Homo sapiens
ggtcgggtggcatgcggggcaaggtagcgcagccgggtgggggtgccccggcagcagggccgggaggggcgtggtgggggggcctcggcagcgtggcagaggaggagggaccgcgctgagcg

SEQ ID NO: 381398 - DNA, 122 bp, Homo sapiens
acgcaaggattcttaaggacctcctggctcaaaacaatcacttcctctcttgctgtggttcgtggacaatggagtcccaaagggaggcctttccttgcaacctcaaagggaggaaagcctgc

SEQ ID NO: 381399 - DNA, 122 bp, Homo sapiens
agattggaggggtcaagcagaaccagcagccccgacagaggaggtgctgccctccagtggcgtctgtgaggacagcaggggctgtgcccaggagacctcagaaatcatccagtccaccccct

SEQ ID NO: 381400 - DNA, 122 bp, Homo sapiens
ttttctcaaacaaaggtgtgttgtcattcaagttattgagagtaattgtagcaaggacttcgacttcccggcggtacggcaagccccagtctgatgcacgaatcctcagagtataaacccga

SEQ ID NO: 381401 - DNA, 122 bp, Homo sapiens
gataggaaagaatggagactccgccggtggtgcagacagggctgggaaggtttgtgcacccgggtagtccctggctgctgctgccaggctgcctcagccggtcgctgctgccgcggcgactg

SEQ ID NO: 381402 - DNA, 122 bp, Homo sapiens
agcacgaagctgtgcacagagtcgctctccacagagatgcttaggatgtgatccatgaatcgcaaatcccagctagtgctcacaaagacggacatttctccccaagaccattccagtgcccc

SEQ ID NO: 381403 - DNA, 122 bp, Homo sapiens
gttccttctgatgttcggatgtgttgagagtttcttctttctggtgggttcgtggtctcgcgggtttcaggagtgaagctgcagacgttcgcggtgcgtgttatagctcttaaggcagcacg

SEQ ID NO: 381404 - DNA, 122 bp, Homo sapiens
agtctttcctgactcctcccccttctaactccccaccgacggtctgtgtccgctgccacgcgtgtccagtacctcgcagacctgaggaatgtagttctccttgaagtagttcttcagcctcg

SEQ ID NO: 381405 - DNA, 122 bp, Homo sapiens
tggacagggtgtagacattgttaaacacttagttgagtatctgtgggcaagtcttgagatcgctaagtagaatctgagctttgtttctttggtttttggtcttttttttttttaaagaaagt

SEQ ID NO: 381406 - DNA, 122 bp, Homo sapiens
tcctcagatcccagacggggtcacggccaggcagaggcgctcttcacatctcggagggggcggcggggcagaggtgctccccacatcccagacgatgggcggcggggcagagacgctcctca

SEQ ID NO: 381407 - DNA, 122 bp, Homo sapiens
caacacagcgaaaccctgtctccaccaaaaaaatacgaaaaccagtcaggtgtggcagtgcgcgcctgcaatcgcaggcactcggcaggctgaggcaggagagtcaggcagggaggttgcag

SEQ ID NO: 381408 - DNA, 122 bp, Homo sapiens
acctcttcagctgcccagcacccctaccctctgtccccacagcttctggtcccttacccacgcctccgaccaccagcagcttcccaaagaacagcagcaggtctgtgactttgtccaggacg

SEQ ID NO: 381409 - DNA, 122 bp, Homo sapiens
actatgaacagtatcacaggagggatgtacaccttctgcgataatgggagtcatattatccgctccctccctgaatatttagaaaacgtcacagtggggtgtacacccctgcgatattggga

SEQ ID NO: 381410 - DNA, 122 bp, Homo sapiens
actgtgtgtgaagtgaggtataaatgaatttgggaatgaatgctatgagttcctgtggctcgctccccttgacctcatttgcaacagggacccatggatcccacaaagataaaaaatggaag

SEQ ID NO: 381411 - DNA, 122 bp, Homo sapiens
cctgcctttgtggcgcggcggcgcggccgcctttgtccctccggcgcgcacgccccgccgcgcgccgccttctgcaaggatcacccccgccgcggcgctacctggccctttgtcaccagctg

SEQ ID NO: 381412 - DNA, 122 bp, Homo sapiens
ggcccgaaagttgagctgttgaattatgtatgacctcctagtccctagccggccagcccccgctcgcccctcctcttcctcctcctcctcctcccacctcggctccagaaaaccctgggcgt

SEQ ID NO: 381413 - DNA, 122 bp, Homo sapiens
ttctcccaagtgctagttaaccgcgggggctcaggcaaatccatggcccgcgtgggtgtgcggtgcggccctctgaggcctctggctcctggtctggcctggccgcgccggctccgggagct

SEQ ID NO: 381414 - DNA, 122 bp, Homo sapiens
ctccccagccactctggaacatgctgcccgtcgagcagtggtccgaggtgaccttcggggcggtgagagagtccagaggtcagaggaggaggaacccgtcgggcggtgagaaagctttaccc

SEQ ID NO: 381415 - DNA, 122 bp, Homo sapiens
gaatgcagccagctcacagtgacctgcagcagggagtctcataccccagggaataagtcccgctcctccactctcctcctccctccctccctccctcaatttctgccagtacctccttcccg

SEQ ID NO: 381416 - DNA, 122 bp, Homo sapiens
ggtgaacagtgcagtagaacacagcaaggatgtcagtcctggaggaggcacctgcagagccgggccctaccaagcagagtgaagaagtctttcagaggcaaagcctcccagagaggagttca

SEQ ID NO: 381417 - DNA, 122 bp, Homo sapiens
ggagcagggaggacggctgggagccgaaagccggaccctgctggtcatagcgcaccctgacgatgaagccatgttttttgctcccacagtgctaggcttggcccgcctaaggcactgggtgt

SEQ ID NO: 381418 - DNA, 122 bp, Homo sapiens
accactatatgtattgcttctggctagttccctgtctccaggttcttctgcctcgttttccggctcccatttgcaaaggaggtttatgtacaatgctgctttaggggaaagggcactgactt

SEQ ID NO: 381419 - DNA, 122 bp, Homo sapiens
ggtggcgactcagacctctcgggcagcggctgcagggcgagcacagaggggactccgatgcgaaccgaggccccgggacccgccaggccacccgcgccgccgcccctctccgggtacgcgcg

SEQ ID NO: 381420 - DNA, 122 bp, Homo sapiens
cagtagcaaaggaggtaaaaaaggcaccgagccgtcagccaaacctgaaaagtgcggccccgccccctccacagccactggtagcttcccgtggaaggcccgcctcccggggcagctgcggc

SEQ ID NO: 381421 - DNA, 122 bp, Homo sapiens
gtccttgtgaagttgtcacgtgccaaacgcttgtccctttttcctgctgggtaatactcccggtgccgcccttgctgttcgtcgatgcacatctggctgcttttcgctggctgcgagcggag

SEQ ID NO: 381422 - DNA, 122 bp, Homo sapiens
tacagccagctctttgctaaaatatttactatatgaccctttacagaaataaatgcttcccgacccctgatctggaataggggttctcaagctgtagcgtgcatcaggattacctggagggc

SEQ ID NO: 381423 - DNA, 122 bp, Homo sapiens
cgcgccgcagggccgggcggaaagtttttcctgacggagttttggctgcggcagcggcggcggcggccggagcgggccatggacgcgctcaagtcggcggggcgggcgctgatccggagccc

SEQ ID NO: 381424 - DNA, 122 bp, Homo sapiens
agcagactccagggactcaaggtttgtaacaaaagggcagatatggaagagatgaactcccgggtccaactctgagaatagagcaccctcagggctggggatccctgaggtgtcagggaatg

SEQ ID NO: 381425 - DNA, 122 bp, Homo sapiens
tcttgtcctggctctgaccctcccctttaggtcttgcaatgctctgagccctcctctcctcgccttagaatgcaactgctaaaccctgccctgcctgacaaggcctatgaaagcagaaagga

SEQ ID NO: 381426 - DNA, 122 bp, Homo sapiens
cttagttattatgcactggtccccaagagcaatttctgcgctgctgttgcaaaaattcatcgtaatgaaataaacgtaaaaggggaaaatgtgttatgaagtgttggagggtgctttgctca

SEQ ID NO: 381427 - DNA, 122 bp, Homo sapiens
gggaaccacttcaggttgtggccaaagtgagcagcagagccccagcctctgagtaggaggcggtggttacacaaacaaagcacaatctttcgattatcttttctacaggtgtcacaatcttg

SEQ ID NO: 381428 - DNA, 122 bp, Homo sapiens
ctcttgatgcccttttcacttctgtgttgtcctggttgaagttggcaaagagcagctggccggcgccggcctccccgctctggctcgccaggttcatggctgggcgcgtggcgagtgggccc

SEQ ID NO: 381429 - DNA, 122 bp, Homo sapiens
atccagagacccaaagcctccgtcctcacacagatgctggcgatcattctatttccaggccggctctgggtgaggcttcagaagaacttcccaaacagcacagtgaacctgagatggacaag

SEQ ID NO: 381430 - DNA, 122 bp, Homo sapiens
gtgtaagttccggtgctcaaacctgagcggccgactacaaatcccagagtgcctcgcgggcgccgtctccacggcacttgggtttcagggccatggaatcgcaagcccttttcgcactgcat

SEQ ID NO: 381431 - DNA, 122 bp, Homo sapiens
tcccgtcaccccccaggaaaaccccgtgcccggtaaatagtgactctgcgtccctcctcccgagtcccgggactttctcatcacccgccacagaaactccgtgcccggtaaatagtgactct

SEQ ID NO: 381432 - DNA, 122 bp, Homo sapiens
ttgattgctttggtggttacacaaatctacacatgctgcaagggtccccaactcccaggccgtggaccagcaccaagccgtgacctgttaggaacccggctgcacatcaggaggtgagcggc

SEQ ID NO: 381433 - DNA, 122 bp, Homo sapiens
accgcacaaataaaatcaaatccaagtcccccatcccaacccgaatgatggaggctgcggcggccggagtgaccccgccgccgccagccccagcccgctagccgcggaccaacaggtaaagt

SEQ ID NO: 381434 - DNA, 122 bp, Homo sapiens
ggggtgggtccctatttcctctctgggatctgtagccaatcattcacgaggtaaacagaacgaccgagtttctctcagccgagaactgtggctgcccctccggtgaaaacagaggaagtggg

SEQ ID NO: 381435 - DNA, 122 bp, Homo sapiens
acacagagtctaatgagtgggcagggtcaccccatcaaagccagaccttcccctgctgtccgctcctcttacacaaagtggtacaagcacagctgaggtatgcggcagatggctcttgctgg

SEQ ID NO: 381436 - DNA, 122 bp, Homo sapiens
cggtccctctgcgccccggcccggcctcctgcaccgccaccgccgcagctcccccacggacggaagtgagtttactgaaattttcaagccacagaaagaacaaaagaagtaatatccattat

SEQ ID NO: 381437 - DNA, 122 bp, Homo sapiens
catggtctaccagggcagggaacagagcagcacgtgtgcacaaatctaggttgtgggggacgttgaggtcggggtgggggaggttagacttaaaagacaaagtcctaagagctcccagggca

SEQ ID NO: 381438 - DNA, 122 bp, Homo sapiens
gagcaacaccgggtctttgatgtttttctgaatgtaaaggcattattctttctcaaactgcgcctaagtactacagacattaaaacaatgagacgtaacgggtggacctggctctaagtgtt

SEQ ID NO: 381439 - DNA, 122 bp, Homo sapiens
ggcgttcgattggatggctatggtagccaatcagaaaaagaacctggcactcctaatttgcgtattcctttcccagcgatgacgtagaacaacgtttgatccaatcagaagtgagcaaatcc

SEQ ID NO: 381440 - DNA, 122 bp, Homo sapiens
agatgcctccagggggcataggaaaacccaagaacctgaggttcagcggacggcttcctgcggcttgctggggccggcttggcgggcaggtatcctgtgtggactgcgcgagcagttggagt

SEQ ID NO: 381441 - DNA, 122 bp, Homo sapiens
aactcaagtgatctgcctaccttggcttcccaaaatgcagggatcccaggtgtgaggcaccgtgtcctgccctctccacatctttcttaagcacactgactaaattggtctaagtagagcct

SEQ ID NO: 381442 - DNA, 122 bp, Homo sapiens
tcagtacatcggtaaattgcccaggggaagaggaagggggggaaggagcattaaatgttacgaaggccatgtaaggttattttccggtttgcagcattacaagcagcagtagggttaagtaa

SEQ ID NO: 381443 - DNA, 122 bp, Homo sapiens
cccggctctcagacaggcagaatgtggttgcccgcccggcgtgtggtgctgggaaccttccgctactgcggctcaggagcccgccaacccctaccccacccaatccgcgctagcccgagcgg

SEQ ID NO: 381444 - DNA, 122 bp, Homo sapiens
gcgggctccccctggccacatcccgggcctctcacacaagaagaatagttctgtttccgccgtaaacccccacacaaaggctgcccggccaccgggtcccctgtcccccttcccggggactt

SEQ ID NO: 381445 - DNA, 122 bp, Homo sapiens
agcagcggctggcgtctgtggccctttaaaggcgctcgagctggtgcagtcaccgcggatcgtgtgaaagcaaagggccggctggggaacggagtccacgcggccacgcgagtccggcagcc

SEQ ID NO: 381446 - DNA, 122 bp, Homo sapiens
gtcaagcaaccagaactgggggctcttgcctgaggattccagcttctcttcccaggtgcccgtctgatggggagatggctgatgcccagaacatttcactggacagcccagggagtgtgggg

SEQ ID NO: 381447 - DNA, 122 bp, Homo sapiens
ggaaagagcatgtgcttgagcggggaggtccttgggctttgccttccctcacctcgaagacgcttttaggcaaatgagtcatctcaggttcattcgcatggggtttgctgaaagaaaggaca

SEQ ID NO: 381448 - DNA, 122 bp, Homo sapiens
tatctcccaggtatgcctgtgctctgttctctgtttgaggtcttcttgttattcatttcacgtgttaatgcattcactcattcactcatgacctacaagaatgtgtttctttacaaactgca

SEQ ID NO: 381449 - DNA, 122 bp, Homo sapiens
ctgttcatttgtctttctgacctcttcccaaatccccaattttcacctgaacccacttctcgtgagtccagaccccatatgcccagcctatctgaagcctatgcctctttccgctagacgct

SEQ ID NO: 381450 - DNA, 122 bp, Homo sapiens
ggcggtggcggcagcggcgtcggggtgtaagcagccagcgagtaaggcgaatgctcagaccgtgctaggcagcttcgcagcccggctggctggtggggctgcctgcacgagagcagcccgct

SEQ ID NO: 381451 - DNA, 122 bp, Homo sapiens
agtgcagcctcccacgtggttttgcccagagagaatcgtcctggggaagcaggtgggggtcgctgcacagcagtcaatcaccgcttgagtgcttgtgccaccagcaagggggaggggtctct

SEQ ID NO: 381452 - DNA, 122 bp, Homo sapiens
atcaccctagtgtgctgagaccttgagaataaagtgtgtgattggtttcatacttgaagacggatataaaggaagaatatttcctttatgtgtttctccagaatggtgcctgtttctctctg

SEQ ID NO: 381453 - DNA, 122 bp, Homo sapiens
aatagtgtcatggtagctaaaggagaaaaagggggtttcgtttacacgctgtgagatcaccgcaaacctaccttactgtgttgaaacgggacaaatgcaatagaacgcattgggtggtgtgt

SEQ ID NO: 381454 - DNA, 122 bp, Homo sapiens
gcccccaggaacggcagcagcagaagacgatgcgggtgcaccagaagatgacctactcctcgaaagtgtcggctaagcacaccagcctgcggcggcagctgcagctggaggacaagcaggag

SEQ ID NO: 381455 - DNA, 122 bp, Homo sapiens
aacttctcggatcctcagcttctgcatctgtgaaatgggcaaatattggctccctggcagcgctcctatgccagtgagtgaaatgccagtatgtaaagtgcctggccccgcagattctcagt

SEQ ID NO: 381456 - DNA, 122 bp, Homo sapiens
caccaaatgtttgaccctgtgagtgcctcagttgctactgttggaagaatgggcaagagtcggaacagagacccttgaagggagtttcaaagcttgatgaaatttgcaagacttgagaatgc

SEQ ID NO: 381457 - DNA, 122 bp, Homo sapiens
tggctgccagcgcggccgcccactctgtcctgggcaccgctgccagcccagctccgtccccgtgtgtcccttggggtccgccttccctggggccctacaagcactgagactgggactgggga

SEQ ID NO: 381458 - DNA, 122 bp, Homo sapiens
gcctcgaagactgagtgcactgcactgcactgacctgcttcagctcgttggtaaagtacacgtaagttacagccacacagagagactgcaggagcactgtgaagatcacgatcagcacgcag

SEQ ID NO: 381459 - DNA, 122 bp, Homo sapiens
ggggtaagttccctgtttctcatagagcgattctcctccctcagtcctaggccgctaagacgtcaggggagctgatacacacttccaagaacacggagacatcaaagggagctgagagtcca

SEQ ID NO: 381460 - DNA, 122 bp, Homo sapiens
ggcgctcgggcgaggtgagagcgggcgcgagtgcgccgggggcgctggggggctctgcggcgggcggcgcgcggcccggggcgcggcgcggagcggagctgcagggcggcggcgggagcgcg

SEQ ID NO: 381461 - DNA, 122 bp, Homo sapiens
gtgaatcataaggaaaaagaacgagagaatgaacctgttcaaaacagaccaaccaggcaccggggccttctatggatcccggtaatcagatgcttctgacctgatgagatggcggcaatgtg

SEQ ID NO: 381462 - DNA, 122 bp, Homo sapiens
ggctttcatttgaccacccaccttctcctttcgactcctggtcatttccatctccctctgcgttttaaccggtgaaccaagtcacattttaattcgagggagaaagatgtcatgtgttactt

SEQ ID NO: 381463 - DNA, 122 bp, Homo sapiens
ttcctcccccgccccgagatatgcgcaatagagcatgacggagcgcaaggcgggaagccgcgacagacgtgtgtgcgtgcgtgcgtgcgtgcgtgatgcgcgaggcgtggcttgctggtggg

SEQ ID NO: 381464 - DNA, 122 bp, Homo sapiens
gtctctccgccggctaatggcaagcggcggcagcacggggggcggttccaggaccgggcgcgggctactgacgccatctctagaggcctagagttgcttggagaggagctggttgccaaggc

SEQ ID NO: 381465 - DNA, 122 bp, Homo sapiens
agagagggacagtgcacaagagcaatgtccccagacccatctttaagtgaagcaccaggccgatgaaacatccctctctgctgccttctttctctgatcacaactcagctccggaggaaaaa

SEQ ID NO: 381466 - DNA, 122 bp, Homo sapiens
aacttaccagctaatctgatgggaacaacataacctgattaaactaaattgttttgacagcgtggccatttgaagaactgagaacactaggaaaataacaattaccctcttcatactcggaa

SEQ ID NO: 381467 - DNA, 122 bp, Homo sapiens
tccgcagcagagacgagtgggcgctcgtggtcactggggcacgagggagacatggcctgccggagggccacggccccgggtgatgccgaccttcttcctcccgtccctcccgcgtgcaggtg

SEQ ID NO: 381468 - DNA, 122 bp, Homo sapiens
ttaaaatacaaaggaagaaaaagaaatcttaaacacttccagaaacagatgaggcaatgacgtttatgactcattaagggattattctgggccaagctgtttaaatccttaccacaagtctt

SEQ ID NO: 381469 - DNA, 122 bp, Homo sapiens
ccagggactgactgacaagagctacgttttctgcctctatcatatcccattctagaacaccggtttggctgtgatggccttttaggatgctcagtgcctaaatgacaggtaggccactttct

SEQ ID NO: 381470 - DNA, 122 bp, Homo sapiens
gcggcggcggcggctgcgtcctgggcggcgtctgcgcggctgcggccccactggcggctgcggctactcctggcccgtcccgtcagcgccggcccccgcccccgcccccgcccctccccctc

SEQ ID NO: 381471 - DNA, 122 bp, Homo sapiens
gaagagtggggagaggaagggcctgggctggcactcaccgaagatgagcggctaaatgtccggctgcgcctcctccgccgtctgtgcttcctccggctgctgcgctggctgcggtaactgct

SEQ ID NO: 381472 - DNA, 122 bp, Homo sapiens
tcagggcgcaggctactctttaatatttttcacgttagaatttgctcagatttgaataaacgcagagcgaaactagagagcgttcgcgcaggttctagctaccttggtcagaaggaggggct

SEQ ID NO: 381473 - DNA, 122 bp, Homo sapiens
cgggcggacggcgcggccgctggggtgcacagcgtagccccgcgtgcccggctcgctctccgttccctcggatagctcccaccgctcggctccgggctcagaaagcggaagtatttggtaga

SEQ ID NO: 381474 - DNA, 122 bp, Homo sapiens
gtgccccatgtgggctgggcctccctgcccttcgaggtatttgtcacacactccccgacccggtctctaagctgcagagtcccacacagcagcctcaagccacaaggagctgtcgagccctt

SEQ ID NO: 381475 - DNA, 122 bp, Homo sapiens
atcagcccgcctcggcctcccaaagtgctagtagtacaggcgtgagccaccgcacctggccgtatttgtactacttttaaagaatgaggccccaaatgtagctggaatgaaaatgtttgcaa

SEQ ID NO: 381476 - DNA, 122 bp, Homo sapiens
cgcgccgctgcagagatcgaaggagagccctggcgctgggcgtttctcttccgcccttggcgctagagtcagctacatggggctctgggcttgtgatcccatagtctagtttcctcgtttta

SEQ ID NO: 381477 - DNA, 122 bp, Homo sapiens
gatttgagcatctgtggatttgatatctatgcgggtcctggaaccaagcccccatggatacggaaggacaattctatcactcagagattctgaattctggactttgagctcaatgccatgac

SEQ ID NO: 381478 - DNA, 122 bp, Homo sapiens
cagacccggtggtccagccgtgagtgtccagctgcaggccccacagcagccagctctgggcgaaaatctagagggcccctgcgcaccctcccgcccggggtgccctggcccagggtgcacct

SEQ ID NO: 381479 - DNA, 122 bp, Homo sapiens
ttgtctctctacccctgcccagggtaagggcaaacgccttccaagctgtccaagggcacccgcctggcctggttaggttctcctagttgcctgcagaggaatgactccacatggggctgggg

SEQ ID NO: 381480 - DNA, 122 bp, Homo sapiens
ggcctcagtggccaagcagtgtttgtggggcaccggaagcggcgccgcacccgtgctggccggcccgccactgggaagaaacgccccctcgggcggcctactgctcccatcgaagcccacag

SEQ ID NO: 381481 - DNA, 122 bp, Homo sapiens
caattatatgagtagaactgcctgttctatgtactgtatcccacttaatgtaaggcatcacggattgggtgatgccacattactttatatatcaataagataatgtttaaaatgttgccagt

SEQ ID NO: 381482 - DNA, 122 bp, Homo sapiens
taaaaacaatccttagagtggccttagccccaggcaccagccttgggtccgatccacctccgtccgcagctgctccttcgggaagggctgctcaagcgtttctgtgcttttcctctcctttc

SEQ ID NO: 381483 - DNA, 122 bp, Homo sapiens
attaagtgaatctttaagtaaatctgtcgtactagcgtttcaggcggctcaaacaccacacgctcccgactacggcggaatggagagaatgtgcgcatgctcggcgggaatctgcgcatgct

SEQ ID NO: 381484 - DNA, 122 bp, Homo sapiens
cggccggcggcgtgctgaccccagtggccctggagctgaacggcggcctgtgtctggaggcgtgcggcgcgctggaggggctgtgggccgcgccgcggctggggccggcggccgacgaggcg

SEQ ID NO: 381485 - DNA, 122 bp, Homo sapiens
acgcgcaggaacattgaggacgctctgccgagggaaacgggccagtcctaagacaaacaccgcatgattccactcagccgaggcccctagaggagtcaaagtcatagagacagaaagtagaa

SEQ ID NO: 381486 - DNA, 122 bp, Homo sapiens
accctaggcctcggggagaggtttccactaaaaaggctgccacctctcgatcctagaccccgagattcctttcacccgggaaatctcttaatcgcatcctttgtcattttggtaagtaaacg

SEQ ID NO: 381487 - DNA, 122 bp, Homo sapiens
cagccccgtgggatccggggattcatctttgacaaacatttacggattatcaaatcacaacggcagcccgacagggccataagtcaccctaagcagccatccgcagtgcagtctgaggagtt

SEQ ID NO: 381488 - DNA, 122 bp, Homo sapiens
ggcgtgagggaaggggagctcagcagttccccgcgcggggcccaggcgtcggcggcagggcgggcccctcaccgccagcgtgccagccccgcccctacccaccagtgtgccagccccgccct

SEQ ID NO: 381489 - DNA, 122 bp, Homo sapiens
gaaatgaagcatgtctttgaagaccctcagaggcgagaggttgccaaacgcaagatcagacgcctgcgccaaggcatggggtctgtcatcgactactccaatgctttccagatgattgccca

SEQ ID NO: 381490 - DNA, 122 bp, Homo sapiens
cgcgtcgacactcgcgctcgctttgcagccggcgctctccgggtgtgggcgggtggggggcgccgcaaaaaaagaccacaacccgggacgattgtttgttttaccaggcctaggcgtgccgt

SEQ ID NO: 381491 - DNA, 122 bp, Homo sapiens
cttagcacgctaagtccgcaaatgcgaaatgtactcatgggagtctcctgtgcagtttcacggtcagaatctgtccaaatctaaagacttatcagctgctttctggggcccctcccaggcgc

SEQ ID NO: 381492 - DNA, 122 bp, Homo sapiens
tatgacacctgctgccctcagggcctcttcctctttcccttagacgcaggccagctggaacgtccccaggcgttctgtcctggatcaagcaagaggaaggggcaagtgggaggagccagcag

SEQ ID NO: 381493 - DNA, 122 bp, Homo sapiens
ccctttaccccgcgggaccggagcccctcgccgcgtccagccgcctcctcctctccatcccggatcctgtccggagcgatacttttctgagacccctaacaacccctacctctagcccacct

SEQ ID NO: 381494 - DNA, 122 bp, Homo sapiens
tggtcactcacacagacaactctttctcgacagagcctgggctgtgttcaccctcgccagcgcctctctgctttccgaccctggtcccccgcagtgtcagcgagtgagaaagagctctcccc

SEQ ID NO: 381495 - DNA, 122 bp, Homo sapiens
gcttgtccctggaattatttggcatggggcattttcacaaagcagccctctttcaagaagcgtcccccatcccctttccctctagtgccctcaagctcccaggatttaggtacccacagaaa

SEQ ID NO: 381496 - DNA, 122 bp, Homo sapiens
tagtgtcgagcgttatcatccacagtcgcccctcaaactgtgacccccacctgggagacccggaatcatccaggaccctggtgtggggggcagtactccccatatctgccccccgaaaactg

SEQ ID NO: 381497 - DNA, 122 bp, Homo sapiens
agggctgcccccgaaggccggggcggctggagaagcacccagggagtaggggctcctagccgaggcccgtgagaggctgcggcgcagggactcgttcatggcttcactctctagaagcttag

SEQ ID NO: 381498 - DNA, 122 bp, Homo sapiens
tgcctctttctttaccaacacaaaatgtgtagcattgttctaatagaagaaatgtgcttccgagggtggagcagtgtggtaataaagcagcctatttttgcaacttggcgttacctttgggc

SEQ ID NO: 381499 - DNA, 122 bp, Homo sapiens
ccaactcttctggtttcctctacgatgagcggaaggtttgaatcctggaggtggggtctccggtgtggagttctggaaactgtgaggtgatttgcaggtgtgttggtttgtttggggtgtgt

SEQ ID NO: 381500 - DNA, 122 bp, Homo sapiens
gcgtgctgagcctccccgccgctttggagacggggctagattttcgttgcctccggctctcgacaggtgcaaaacaatgaattccaagcctcggaagcaaagaagcttaggatccgacggtg

SEQ ID NO: 381501 - DNA, 122 bp, Homo sapiens
ttacctgacagattgtccgctttcttttcatctcgtaggaaaagaactcccacggggagccgctaatcccagagtaaacagatgacctcgtggtgcctttctcccggaggtggggttcctag

SEQ ID NO: 381502 - DNA, 122 bp, Homo sapiens
agtctgctcctgaaaaacttgtttacatccatgttgagaggagggagggaaggaataagacgataggcagaaatggaatgaaaggtttggaccaggattaatttctttctgttgttttcttg

SEQ ID NO: 381503 - DNA, 122 bp, Homo sapiens
cagtgcattttccaggattttcaagtcttcgatgctgtcatgttgagagtccactatccacgtttgtttatccaggaataatgcagaaaatctgagcattcgtgaatctaatcattgaggta

SEQ ID NO: 381504 - DNA, 122 bp, Homo sapiens
gttttcacccttgtgtttcacagtttcatttctaacatcctgattatgataatggacaatcgtttgcctgatttatcagtacaagaaggagatttgggccgcaaacaagaatactctggctc

SEQ ID NO: 381505 - DNA, 122 bp, Homo sapiens
cattcctagccaactcttcaggaaatgttcaggcactttctcagattccagctaaaacaccgactatgtgaccctggggagcacagagctcacagggtggtaatgggatataaaatttgcaa

SEQ ID NO: 381506 - DNA, 122 bp, Homo sapiens
tccaattaatgtacctcaatcaaaatccagcccctaaattctgtttagcaaaactgacaacgaaaacaataccctctaaaatgccatcttccatagcacactaaaaggcatgtaaggtatgc

SEQ ID NO: 381507 - DNA, 122 bp, Homo sapiens
actaccacatatagatggaatcatacaatatttagcctttgtgcctggcttatttcacttcgcataatgtcttcaaggttcattcatgttgtagcatgtgtcagttcttcattttttttgct

SEQ ID NO: 381508 - DNA, 122 bp, Homo sapiens
gggccaggcctcctctgtgactctgggctacctcagtttccccattttggccagactcaccggcccactggggtggtgatgttttcgttctgttttatttttctaactctgctgaccatgaa

SEQ ID NO: 381509 - DNA, 122 bp, Homo sapiens
cactctcctcctgggtgctgggcaggaaaagtggttttgaggtgaaatttgggagatgaacggtggaattttaggagtcatgagaaaaagtttccaggaaactttgatgaagtttgggatac

SEQ ID NO: 381510 - DNA, 122 bp, Homo sapiens
tcaaagacctcagctctgggctgtttcctgtcagcctggcaggagcctcaggactgtggacgaaggatgtggccttgggcatttgtcctgttcccacatgggcctggtccctccctcctggc

SEQ ID NO: 381511 - DNA, 122 bp, Homo sapiens
aacagcaggtggcggaacttgagagtgtgcagggagctggccagggtctccagaaccctgcggttgggctcagccaccagctcggttgcaccctgcagcatgttacagatggtgagctgtcg

SEQ ID NO: 381512 - DNA, 122 bp, Homo sapiens
tgtgaggagcccctctgcctggctgcccagtctggaaagtgaggagcgtctctgcccggccgccgtcccacctaggaagtgaggagcacctcttcccggccgccatcacatctaggaagtga

SEQ ID NO: 381513 - DNA, 122 bp, Homo sapiens
caataatctgaggagcaggatgagctgggactgagacttcgggagccccgtcagcctcctcgtcacggctccgacatccaccaaagtcctggcagctgctgggctccagacggtgttcccac

SEQ ID NO: 381514 - DNA, 122 bp, Homo sapiens
gatcccaggaggcagccaagctgggattcatctccatttgttgatggggaaattgaggcccggaaggccaatgccagcccaggaccctgaggtgtgctgaagatccaagtctccaaaagtct

SEQ ID NO: 381515 - DNA, 122 bp, Homo sapiens
ttgtgcagacacggtgggatctgcatgtgcactggggcctgtgcctgggctgctgctccccggccaccggtgtcaggatctccaggacccccatgagtggtcagtggagcagagatggcaca

SEQ ID NO: 381516 - DNA, 122 bp, Homo sapiens
cacgtcagccggggttttgcgttttgattgacagttgctatagcgaccgggtcggtccgtcgccattttgttggttggtttttttttaaaccctttcgcttcccgcccgaataataataaaa

SEQ ID NO: 381517 - DNA, 122 bp, Homo sapiens
ctggcccttgtgcttatctgtatttgataagatgacacaggaagcaaatacagaaagcaacgtgttaacaagggcaaaagatcaaaatggaaacttaatacctgcgtgtcactaccttctgt

SEQ ID NO: 381518 - DNA, 122 bp, Homo sapiens
gggccgcggccatgggagaggccgaggtgggcggcgggggcgccgcaggcgacaagggcccgggggaggcggccaccagcccggcggaggagacagtggtgtggagccccgaggtggaggtg

SEQ ID NO: 381519 - DNA, 122 bp, Homo sapiens
cctattcccatctgaaaactaagaatccagaaataggcttaatctgtaactctagggcctcgagttaccttgagccaacattgtagatgttgtactgcaaggtcaggtctcgtccctccacg

SEQ ID NO: 381520 - DNA, 122 bp, Homo sapiens
tgtactggattactaaaagtcagggctctggaaagatctttggtttgattttccgggaaacgtatcttcttggatactcttcagagttgtgataaattcctccagcagcaggtgggaggtag

SEQ ID NO: 381521 - DNA, 122 bp, Homo sapiens
caggagtcaacagcaaagtctcagctcctgggctcagccaccaacaacgtctcagcactccgagggcagtggccacagtctcagaaccccacagctccaggccctcgagccacactcatgcc

SEQ ID NO: 381522 - DNA, 122 bp, Homo sapiens
agagtgcggaacttggagtcagatctatttttggaagttgagtatagagcaaaatgtccccggaactgaaaggagaacaaatagccactcttttgagcagttaggccctaagtgggctggaa

SEQ ID NO: 381523 - DNA, 122 bp, Homo sapiens
tgacaagatgcaagctcatcattttgttttgtgtcataagggcatttgcctactaattagcgttttggaaaacttccccaataatggggcccacagtctctaacactgcccctttgaagcta

SEQ ID NO: 381524 - DNA, 122 bp, Homo sapiens
aatctgggcagccggctaaagccatgggttccttctgccttcttcaaattacatttactgcgctgcagcacctggaataaagacagactgtgagaagccaagccagaaaaaaaaaaaaaaat

SEQ ID NO: 381525 - DNA, 122 bp, Homo sapiens
ctggagtcagcgaaccagccgcgcacgcactcccgggcggaggtcggggctggggggcgacgcctcccgtctgcgcgcccccggccccgcctcccgccggcgcacccctccctcggctccgc

SEQ ID NO: 381526 - DNA, 122 bp, Homo sapiens
cctgtaatcccagctactcaggaggccgagacaggagaatcacttgaacctgggaggtggcggttgtggtgagccgagatcaagccattgtactccccccgggaaacgagtgaaactccatc

SEQ ID NO: 381527 - DNA, 122 bp, Homo sapiens
tagtgagactgagggctacgtgatggaggctgaggggtcagagaggagtcagtcctgggccggcatcctcagcaggctgggttttgaaaggcaggactgactgtaccaggtggggtctgggg

SEQ ID NO: 381528 - DNA, 122 bp, Homo sapiens
atatagactttcttatactttttaacttcggtttggtttaagagccacaagatgactcaccgaatatatttccaggcattaaaatagatgatctctgaccctcaccaggattgttatgtttg

SEQ ID NO: 381529 - DNA, 122 bp, Homo sapiens
cgccctgcctcggtcttgcatgcgctgggctagcaaggtggttctaggccaagctcttaccggcttccgagaggtcccgcagggagctgctgagggcgctgcgcttgaggccctcaccgctg

SEQ ID NO: 381530 - DNA, 122 bp, Homo sapiens
ctcgacgacaacaaagtgctctattgtgatctatcacatttttctcaaaaaaccttcaaccgcgcacaaggccagcgccatatcctgcactggccctccctcattgtcctcgccgagggaaa

SEQ ID NO: 381531 - DNA, 122 bp, Homo sapiens
ggagatcaggacggtgtggcacagcctggggcactcccagcactcagcagtggccatgagcgagaggcagcaaggggacgggtggagggagtgccatctgtcacactccatgcagctcttca

SEQ ID NO: 381532 - DNA, 122 bp, Homo sapiens
aagagaatgtcgctcatcttgcacgtgcaaaagttgccctgggaccacgtgccttgcctgcggaggacccggcaaaacctgtaccaggacgtcggtggccacgcccacggctcagggctggg

SEQ ID NO: 381533 - DNA, 122 bp, Homo sapiens
ccaaaacccacaccaattcagagaaaagtgcttcatttcgataacatcgacttgtgaaaacgagcaagaaagttgcatttgagtggtaccaggtttcaccattatgcagttatcgagcaatt

SEQ ID NO: 381534 - DNA, 122 bp, Homo sapiens
tggcccctggtgtgatgagctcgccgaggccgtctcaggtcctgcgcccaccacggtcttcgggagcagctgtcggctttgcaaaagccccaggactttccgggtggacatggggggcttgg

SEQ ID NO: 381535 - DNA, 122 bp, Homo sapiens
aggagcatataattatacattgatttatacagagtaccagaggaacacagcattgagagccgtaacaccacctgagggagtggagaaaggcttcagagagaaagtgttttttggaatggatc

SEQ ID NO: 381536 - DNA, 122 bp, Homo sapiens
tcagtggtttttagtatattcataaggttgtacagtcatcactactatctaattccataacgctttcatggaaaccattaatagtcgctccccttttcctcctccccctagcccctggcaac

SEQ ID NO: 381537 - DNA, 122 bp, Homo sapiens
ggggagaaagagagggagggagggaaagaaagagggagggagggggagcgagagagggagcgggagaagggtggaaaaaagggggaagagacattaaaaacgcaaaggttggccacgtgtgg

SEQ ID NO: 381538 - DNA, 122 bp, Homo sapiens
tcaccgtgaggactgactcaagcagaagcgaaagcggtgacaccgcagacccgacctatgcgcaggcgcgcacccgcacttcctgcccgccataccggccggggcgcccttcgctccgccca

SEQ ID NO: 381539 - DNA, 122 bp, Homo sapiens
ggtggaagaggagaagctattactgcattgaggggcttccaggtctttcccaactgtcaccgaacaaagacgatggacaaaaaaacaaggtgaggctccaggacactcattaatagcaagga

SEQ ID NO: 381540 - DNA, 122 bp, Homo sapiens
gggacttgaagaaggggagccccgcgcgcgcggctgtgggcttggggaccggggacttctcgcgccatccccaggaacgccaggcaaggtctgggggaacaaaagaggaagctgcccccaga

SEQ ID NO: 381541 - DNA, 122 bp, Homo sapiens
cgggccctttaacaagccaacttttgcttgttataccttttcaaactagaaatgaagccacggaagcatcttacaggtagacgcttgtactgtgttggctggagaaactcacaccatagcag

SEQ ID NO: 381542 - DNA, 122 bp, Homo sapiens
gttctccaacaccgatgccgacgaaggcagccactcacccgtgtcctcttcccgataatccggattcaggcttgtggtcgcgcaggcgcactccaaatgctcctctaacctcacctggactt

SEQ ID NO: 381543 - DNA, 122 bp, Homo sapiens
gacccatgcctacaatcccaacactctcggaggtcaatgtgggaggatcatttgagcccacgggttcaagaccaatctgggcaacatggcaaaactccatctctacaaaatatttttttttg

SEQ ID NO: 381544 - DNA, 122 bp, Homo sapiens
cgcgacgagacgccagcgctggccggtacggacgccagccgccagggccccacggtgctgcgaggcagccggcacccacagccccagggcctcgaagtcactggggacagaaggtacacgcc

SEQ ID NO: 381545 - DNA, 122 bp, Homo sapiens
tctggggctcagctggcccgacaccacaacccaacccccagccgccagcagggggcgcggcgtcattcagagacccctccccagggcggtgccctgcaaggcgccacagcctcgggaggggc

SEQ ID NO: 381546 - DNA, 122 bp, Homo sapiens
acgccggggcaccgcttgggtcagaaaggacctcggaaggctgaaaaagtgggtcggagacgggctcgcattgttcccgcatgctgtcagccgcagtcgccaactggcagcaggcgacgtgt

SEQ ID NO: 381547 - DNA, 122 bp, Homo sapiens
actcctgttctgtatcctgttgactgtattaccttgcctccccactttcatgtagaagcacgttttaaagaagcctccttctgatgcatggctgattctttgtggtgtgtttgtctttagca

SEQ ID NO: 381548 - DNA, 122 bp, Homo sapiens
ctgtctggttttgtaacaatttccccgccgccggccaatgaacagcgtggcggcacgtcacgtggtaccgttttatataacactttgctgagacaagacagttattaggcggcgcggggcgg

SEQ ID NO: 381549 - DNA, 122 bp, Homo sapiens
ggcaccactgcgggcagagtcgcagggcctaaggtgaaggcacgggcactgccccatcatcgccaccctggcagcaagctgcctgtgacttccctctgctgcccacagcccgcacctgtgag

SEQ ID NO: 381550 - DNA, 122 bp, Homo sapiens
aaataatccacttagagattacatcctgccttccctgttaccataacaataaggtagggacggggagaataactacagaggatgctattctctcttgattaccccttcaagccactacttat

SEQ ID NO: 381551 - DNA, 122 bp, Homo sapiens
ggcggcgctgcagcgagagaccggggtgccaggactgcttactcctcttccggacctggacggagtgtacgagctggagcgagtcgctggatttgtccgcgacctggggtgtgaacgagtga

SEQ ID NO: 381552 - DNA, 122 bp, Homo sapiens
tccacacatgtatttttctgactctgaaagcaaactacaggcaacagacaaaagtgaaaacgagcaaatagaaatggtggctgtaaaagggtatagtaaaactgacacagatagttctatgg

SEQ ID NO: 381553 - DNA, 122 bp, Homo sapiens
aattctagagttaaactgagaagcagacctcgcgggtctgaaagacaaaaagtcagtccgcggagtcaacttcggtttaccggtgcgttccaacctgattgtcccaacagcaagaagcgccc

SEQ ID NO: 381554 - DNA, 122 bp, Homo sapiens
gacgtggtcatgcgcagaaagatccgtccggctctctgagcagagggtagcgtgtgggggcgggataccgacgcggctcggctgccgattggtcagaagaggatagaaaggggcgggaagcc

SEQ ID NO: 381555 - DNA, 122 bp, Homo sapiens
ttttctttattagtataaagagcatgtttgtaaaccggagaagatctgtggaagtctgatcgagatggtgaaaggctaagcgcaagaagaaaaaggagctgaatctgtgagaatcagtgttt

SEQ ID NO: 381556 - DNA, 122 bp, Homo sapiens
gccccggaaacccggcgccttaatgcaataaacaggaaatcgcggggatgatctgggttccgggggaagtggaattattttttaccagcgaagagatcaacttccacatccggtggtaacag

SEQ ID NO: 381557 - DNA, 122 bp, Homo sapiens
aacagtttcatcacctcagaaacaaatcctacctgattagcagtcaccctctatttcacccgaagtcctccagttccaggcaaccataaatctactttttatctctacggattggcctattc

SEQ ID NO: 381558 - DNA, 122 bp, Homo sapiens
gtgggccgaccccctccaagaactcccgggactgcagccacacgccccaactccccacaccgcgcggcaacccctacgtattccccagccccggacaccccgaaccctcccgtccggtggaa

SEQ ID NO: 381559 - DNA, 122 bp, Homo sapiens
caaacttctgatgaatcagaatcacctggtgtgctttttttttttttttttaagaaatgtcggttgtcaggtcaagttccacctccagcttccaattgtgtaaatctgagtgggccaagact

SEQ ID NO: 381560 - DNA, 122 bp, Homo sapiens
ctggcccaatgactggctccctcacgctgaccactcctctgggctggcctcctgcactcgcgctaacagcccaggctccagggacagcctgcgttcctgggctggctgggtgcagctctctt

SEQ ID NO: 381561 - DNA, 122 bp, Homo sapiens
gggaatctggtgcctcaagagtgtagggagtcccagatgcacttgttccagtacctccctcggcagccattcaagcggggaagtcgctggaggagcccagtctcccgcccccagagggggcc

SEQ ID NO: 381562 - DNA, 122 bp, Homo sapiens
gcaggaaatccaccccgctgcacttcgccgcaggtaaccggggccagcgtcccctcgcctcgctccagaccccacctgcgcagccggggcccacaggtctgaaaccagtgctcctccgcctc

SEQ ID NO: 381563 - DNA, 122 bp, Homo sapiens
gggaactaaaaatgttcttgtcctctgggtagaagtcaacagtggaggtcagatgccctgcggaattgctgggttggcgagggaagaagcatgtgctccagctgtccctggaacacggtggc

SEQ ID NO: 381564 - DNA, 122 bp, Homo sapiens
gcataatagctctttttatagatgttgcctaaattatttagtcatcccaacgtggtttgacgttggattgttcctcttgtgtgcatttgtgtatgtggttataacaaagaatgctgttatta

SEQ ID NO: 381565 - DNA, 122 bp, Homo sapiens
gcatagagcaggtgcttaacaaacctttgaatgtcacatagaaaatggatttagtttttacgtggcttacacagcaagacagagggcagcatgggcccatgctggctgccctgggcttggtg

SEQ ID NO: 381566 - DNA, 122 bp, Homo sapiens
agggaggggaccttggcttctttccattcactggcatgttttcggggcacggtcatcccacgctgggctccagcgccagtcccaaggcctcgccgaactccagcccgggagtgcgcgcggcc

SEQ ID NO: 381567 - DNA, 122 bp, Homo sapiens
atactgatttagtaggtttggactggggcctgagactttacatttctaacaagctccgagcgactgctgctggtccagggaccacactatgcatatcaagggtcaagactggagtagtggtt

SEQ ID NO: 381568 - DNA, 122 bp, Homo sapiens
gacccgtcgccttcgtaggtgaaatctaagtacttttcagcaacataattagaacacactcgaaacaatgcctgcagttctccgagtaggacattttctgtttttgtgtttgagacagggtc

SEQ ID NO: 381569 - DNA, 122 bp, Homo sapiens
ccactaaggttttgggtttgaatagataccgtttaaagcaaaaacaaataaataaacaagcgcataaaattgtgtgttttctgcgtgtgtctaacattagttgagtgcttactatattccag

SEQ ID NO: 381570 - DNA, 122 bp, Homo sapiens
aaacccgccgcggaggaagaggaggaggaatccatcccagggcgaccaagcttgcagagacgaactccgcaccgaccttcacgtgtctccgcgacggaaccggaaccacagctagctgcctc

SEQ ID NO: 381571 - DNA, 122 bp, Homo sapiens
tcaatagccactaatcactggtaggatcatttcaacaaaaacacatgattgggccgggcgcggtggctcatgcctgtaattccagcactttgggaggccgaggtgggtggatcacaaggtca

SEQ ID NO: 381572 - DNA, 122 bp, Homo sapiens
tcctacctttaccctcccgccccgccgccctccgcacgtgcgcccagcggcgtgcgcatgcgtagtcgaaccacattcgcgtctcccgttcgccctctggtggacaccggagggaagtatgg

SEQ ID NO: 381573 - DNA, 122 bp, Homo sapiens
tctacttagaccgggacgacgtgaccctggagcgtttcagccgctgcttcctgagccagtcgcaagagaagagggagcacgcccagaagctgataatgctgcagaacctgcgcggtggccgc

SEQ ID NO: 381574 - DNA, 122 bp, Homo sapiens
gtcaaaccaatgtgtagctccatgtattgatttatgactttgcctgtaacctctgccccacgcacctttattttactttttatttttgagacagggtcttgctctttcattcaggctggagt

SEQ ID NO: 381575 - DNA, 122 bp, Homo sapiens
tttgttattcacaatggatctctgggaccacacttacatgtcagcacaatctcccagcctcggtggaaaagaggggactggagattgagtccaaagacgtggccagtgattcaaccaattgt

SEQ ID NO: 381576 - DNA, 122 bp, Homo sapiens
ttcactggggctctcgggtggtttatgtcatgtgcggtaaagaaatgaccatagaaagcccgccctgctttggtcattctgagctggccaccagagactcacaaagggcttgcagagccagg

SEQ ID NO: 381577 - DNA, 122 bp, Homo sapiens
tcctacgtgcctggcgagatggcccacccaagagcctggcggagcagcgggttgagggggcgggtgctttattgggggctgggactgggtccaggacagggactggggccgggaccgggacc

SEQ ID NO: 381578 - DNA, 122 bp, Homo sapiens
cttgcgccaccgacgcccctggccttcgtttgcagcaagtttacccccaccattacctctcgcataaaagcctgcatttaccaggtcaaagaggggaaccaacgcctgcaggaatcgcttca

SEQ ID NO: 381579 - DNA, 122 bp, Homo sapiens
ggccaaagagggtttggaaggtagggcttaggggccattccctcctgtcgcacagccctgcggggttctcatgcggaaccccaggccaacccctgatgacagggcccaacgcgggaggcttg

SEQ ID NO: 381580 - DNA, 122 bp, Homo sapiens
taaggctaggctagaaacaaatcccccgcaaatttgcaaacgggcggggctggcgacaagcggctggagggctcaaagctggtgcagactaaacaatcacacacgcacaaggctctgcaaag

SEQ ID NO: 381581 - DNA, 122 bp, Homo sapiens
aggcgcagaggcgaacgggaggcggcgctgcaccgtgcccgcccctccccggcccggccccggctccagccccagccccagccccagccccggccccggccccggctcgcgggcgctgcgtc

SEQ ID NO: 381582 - DNA, 122 bp, Homo sapiens
cccgggccggcccactgagatccaaggtatcagtgtctcgtaggcgctgcacgaactcctcggcagaggtgcagcgctgtgcggtaccgatcagaaactgggcgacgtgccgctcgctcagc

SEQ ID NO: 381583 - DNA, 122 bp, Homo sapiens
tccgcgggaggtgggtgggggtgggcgcgtgagcacgggctattgcgcgctcacgtggcgcgcccccggctgagcccaaggccggggtctcagaaggccccgcccaccccgcagcgaccccc

SEQ ID NO: 381584 - DNA, 122 bp, Homo sapiens
tgccacaggaccgaagctgcacaaagtttgcaggattgtgtgcataattacctctgccgacgaatctattcccacagaaagcttcgctggagagattacaatgctttgagccttaccgcatt

SEQ ID NO: 381585 - DNA, 122 bp, Homo sapiens
tccctaccggctctaccgcgcacatgctgcgtggccttgggcaagtcggctaccctcccccggccttatctggaaatcgatttgaatgagcttatacgtatgacatggtctggcacaatcct

SEQ ID NO: 381586 - DNA, 122 bp, Homo sapiens
cgatcccggtgccaccgctgaagttagcccctcgctcgcccgcccgccgtgccactcccgcgcacaacctcgaagagctggcccgcgcctcggcggtgctcaccaggcctcgctctccgccg

SEQ ID NO: 381587 - DNA, 122 bp, Homo sapiens
ctcatcccctttccctgagctcgctggccctggggcctacctctggccgcaccgggtcctcgatgcccaccacgcagatgcaggtgagttcgttgaggatgtcattctcattgtcccagtcc

SEQ ID NO: 381588 - DNA, 122 bp, Homo sapiens
tggggcttggcttccagagggaggatccagtttcacatcgggacaccaggatgtgatccccgtgcccctctgaaaaatcccagatggcgccttctggaagccctagcagtctccgcactggc

SEQ ID NO: 381589 - DNA, 122 bp, Homo sapiens
cacatgcagagggctgcacatagacacagggaaacacacacacggagatgcacagaaacacgcagaccccatgcagggacctgctttcccgccacagaggaaagcaatctgatcaaacagac

SEQ ID NO: 381590 - DNA, 122 bp, Homo sapiens
gcaactggtcttggtagcggaggcacccgaatgctgcccgggtgaggtaagtttcctgtgcgtccccggccccttcccactagacccttctgaggggcttgcgcttaggggctctgcatctc

SEQ ID NO: 381591 - DNA, 122 bp, Homo sapiens
cgcctcgtggccctcggccggcctctgaagagggcagtgaggggcccccacctgggcgcccgatgcccagagcactctgcgcccccagcctgccccagcccagtccctcccggccgcgcgcc

SEQ ID NO: 381592 - DNA, 122 bp, Homo sapiens
gcaaagtgggcaaagcgggcaaagcgagcaaagcgagagggttggtacccagtctgggcgcgctggagctaagcaactggcctttgtttgtgaattggagcagtttaggggacatcctccgg

SEQ ID NO: 381593 - DNA, 122 bp, Homo sapiens
cccttaaaatttagggcttcctccttcgcatcccaaaagctacacccggagccccgctgccgccagggagacagaaaatgatgctccacgaagcacacagcttcaaaacaggaaagatggga

SEQ ID NO: 381594 - DNA, 122 bp, Homo sapiens
ccagtacaatctattgccatccgtaccccctctggccccagtggggctgagagttcacagcgtgcactgtgaggtcacggttagagacaggaagccagtacccgctgctgttttctaggagg

SEQ ID NO: 381595 - DNA, 122 bp, Homo sapiens
cagacaaaggcggcgcattcctgaagaggcggcggcccctgcaggcggcggaggggatggcggcccgggccggagccggccggggacgcgggcccgagggtgtggcggcctaggctggcccg

SEQ ID NO: 381596 - DNA, 122 bp, Homo sapiens
agttaaacataggcctagcagccagtaaagatgctgagtgcagtgacaaagaacggtgaacggaggacctgtttgtgaaggatgaggattttcctgcattcaccgttgagaagtcagtcttc

SEQ ID NO: 381597 - DNA, 122 bp, Homo sapiens
tgttgggtttcctcttggtgccaggtctcagcccctgcaaaagaaagctggctttggccgcgcgcagtggctcgcgcctgtaatcccagcatttgggaggccaaggcaggtggatcacgagg

SEQ ID NO: 381598 - DNA, 122 bp, Homo sapiens
cagctcagttggtgactgtccaatatcttctgcccacacttcctgaccacaatcctccttcggggtgatgaaaaggccctggaagtcccttgccatttactgaggaagcgtgggcttgtctc

SEQ ID NO: 381599 - DNA, 122 bp, Homo sapiens
ggggagaggccgcgcttcctgacccggtccctctgcaccagcgtggaggggggaggggcgcgcaccctttccgcccaggcttttgcgggctcctcgggccgaacccgaaggggctgttcctg

SEQ ID NO: 381600 - DNA, 122 bp, Homo sapiens
gacagacatcctgctatagagtggagatgacaggaacacatttttttactttccttttctcgctctcatttctgtgttttattaagggaaatacaaagggaaaattgtgttatttgtttaaa

SEQ ID NO: 381601 - DNA, 122 bp, Homo sapiens
agtcaccgaatttctcctcttgggagtgacagacattcaagaactgcagccttttctcttcgtggttttcctcaccatctacttcatcagtgtgactgggaatggagccgttctgatgattg

SEQ ID NO: 381602 - DNA, 122 bp, Homo sapiens
gacctgggcctgggcatcaggtcccattgtggttgggtccacagggccccttgcctcattcgtggaggtgctgggggaattctacaggctgaggacgtgtgaggctccagggtccagcgtgc

SEQ ID NO: 381603 - DNA, 122 bp, Homo sapiens
taagtaccttactgtgcagcaaagcattggggatgcagagaaacgtgatacagcactaaccgcccaggagctcacagtctagtggggggcacgtgtaaacagataagggccattctgtgtgg

SEQ ID NO: 381604 - DNA, 122 bp, Homo sapiens
gtgccatcggacatgacaggcacttcccctcagggtctctgccctggttatacctttgcccggaacgcccttcccaaacatcctctgaggtcacttcctgagaggcctgtcctgaccacgaa

SEQ ID NO: 381605 - DNA, 122 bp, Homo sapiens
attaagtaacctccaaaatgagagctatttgagatgtacatataagtgaaaccttattgacgtaatttatatatctaagaggatttcactaaagctggcaaggtaacgtttctgcaaataaa

SEQ ID NO: 381606 - DNA, 122 bp, Homo sapiens
gggcggacaggcagccacgcggggacagcgcccatcggccacgatctagacacctccgggcggacaggcagccatgtgaggacagtgcttcccagggaggaaagcatgcccgctccacactg

SEQ ID NO: 381607 - DNA, 122 bp, Homo sapiens
tgttcgccctgattctccagcaatttgtaaattagagctcaggttttcctgccccagcaccggtccccacagtggtttccacaggtgagtctctgctctggaagacggtaactccctgcact

SEQ ID NO: 381608 - DNA, 122 bp, Homo sapiens
gcagcttatactctggtgagcttgcagagaggtttctctacacctggcatgaccctgccccgtccgagctttgcatggttgttatagccctgagggctcagacatgggctgccaccactgga

SEQ ID NO: 381609 - DNA, 122 bp, Homo sapiens
ttctggtcttgtcatttcgaataaggggtttatctttcctattgtcttcccctctgggcacggcacactggctactggagttaagaggaaatgcttaggactccctgtggctccagggagca

SEQ ID NO: 381610 - DNA, 122 bp, Homo sapiens
caaagcttggcgccgtgctatggtcaagccgggtcgggggctcgggccagccttcaacaccgttggcagcaatcggaacgatcaactgtaccctcagtaccgcgacctcgcccggtcctgcc

SEQ ID NO: 381611 - DNA, 122 bp, Homo sapiens
tttagtttcgtacaaagactggaccatgtggaccttggaatttattagagttacaaataacgcattatcatttgccaggttctttaatagttaatcttattttatccttataacacgtctgt

SEQ ID NO: 381612 - DNA, 122 bp, Homo sapiens
agcgggtcactggggcacctggtggggcaaatgggctcccagctgctgtactttcctcctcgccttcccagttccccagagagccttggacggaagcggtgggagcaacacaggagaaagtc

SEQ ID NO: 381613 - DNA, 122 bp, Homo sapiens
tgctgcagcggcagtcgtcgcccctgccgccgctgccaccgaaggaagcatcccagacaccgggaaggtaaaggggctcagctaggaagacacagtgtattctgtctctgtggggatgtttc

SEQ ID NO: 381614 - DNA, 122 bp, Homo sapiens
catcctagcagatgaggcctgagcagggtactcctgaggctgccctgaagtgaacagggccgggcacaaggctcaggggagggtccagcagcctggtggaagccgggacactgtggccacag

SEQ ID NO: 381615 - DNA, 122 bp, Homo sapiens
ctggctgcggaagccgcagccgctcgagccacgcaccagtttcccctcggcgcgccgctccgagttccgtccacccaggaggctgccatgggccggccctgcctccgcccagtccgaggagg

SEQ ID NO: 381616 - DNA, 122 bp, Homo sapiens
ttttgtgttcacttccttgccctcctttgaaacaaaatcctaatcctagagctgccggagcgagactgcggagctccattagaactttccttagggccgggcatggtgggaggccgaggcag

SEQ ID NO: 381617 - DNA, 122 bp, Homo sapiens
gcaggatgacacccaacagacttccaggaagagacctcggagctgctggagcacaggcaacgtggctgcttggtgtcctcagcagggcgcccgagcccagctcggattggtgtgcatggcct

SEQ ID NO: 381618 - DNA, 122 bp, Homo sapiens
atatcagcagattctcagactaggaaggctgggtgtctgccccagctcttcaatgagagacgtaaaatgatttagagatgggtgaggaggaaccagtaactcctgggtccgggaaattaggc

SEQ ID NO: 381619 - DNA, 122 bp, Homo sapiens
gggtcactcgaggcacatccttagacttccaggcaagtctgaaggggccaaagtggtattcgttgtcagatgccttgaaacctggtcatgctcttacttggacaagcttcttctgcattctg

SEQ ID NO: 381620 - DNA, 122 bp, Homo sapiens
ctacctctttactttgcagctgaggctactgctgacacctttagcatctgcctactcaaccgataagatgagaaccttagtccactgcctgcttaggaataagggttagggagaaccagagc

SEQ ID NO: 381621 - DNA, 122 bp, Homo sapiens
cccggtacccctgtgggtccagctcgcgggtggcggtgcccagcaaggagcctgcaggtccgcgcgcccagcggaacctgcttccccttttacccctcctcgccccctctcggtggtgggga

SEQ ID NO: 381622 - DNA, 122 bp, Homo sapiens
agctttggcactccgagttcttttgcctcctccctcttttctctccagtgaatcacagaacggtactttcttcctgagctcccccgggaagagggggtgggggaaaaggactgtttagaggc

SEQ ID NO: 381623 - DNA, 122 bp, Homo sapiens
tcctcaggcctctaggccttattcacctttcccctttcctgtgccacttctcctctagggcgccaggctgtccttagcatggtccggaaggcaaagtaccgggaactgctcctatcagagct

SEQ ID NO: 381624 - DNA, 122 bp, Homo sapiens
cagcagctcccgccgggtgtgccgtgtcccacggtatgcgtgggtgcgaggggtgagcgccgcgccggggtgagagtctgcgctggacacaggaggctgtgcacgccaacggccgtgccagg

SEQ ID NO: 381625 - DNA, 122 bp, Homo sapiens
ggactggttgtccagctgggggtaacttgaaaccagccccggtggagtattcacaccacgcgcatgtgcaaaacacgcaccccaggcttcccctcactaggtccggctgctaaacactgcgc

SEQ ID NO: 381626 - DNA, 122 bp, Homo sapiens
gatcccacagccaataataagtccgcccctttgaaagtctaaaaccacaaacctagggaacgcccacacctgaagggctcatattgacaataccttaatgacatgtttctctcaacctgtcc

SEQ ID NO: 381627 - DNA, 122 bp, Homo sapiens
aatgggaaaagaactccaggaagtgtaggggaggggcagcgtggagaagaaaggatgtgacgtcactgagataaccagctcggctgttagcaactctgttagcaacgctgtttgtctttctc

SEQ ID NO: 381628 - DNA, 122 bp, Homo sapiens
ccttttttaaacaacagtggccccgtgggggcctcagttccccaagtcactcctggcctccgcaacagacacacaggcctcggaatgctgcctcaccttgttcacctgggacagcggggtcc

SEQ ID NO: 381629 - DNA, 122 bp, Homo sapiens
ggacgaggggcaggcggggccagggccgcggggcggagccgggacagggtccacggcagccgccatcttggctgagggcaaagacgctcctggcgctcccgtctttcggcttgcctcagttg

SEQ ID NO: 381630 - DNA, 122 bp, Homo sapiens
gctcaagccagatccctctcaacagagcacaaaagccacccagtcccaaaaaatgtgagccgacgccgggcccctcaacggattctgaatggcaaacccgagaactgcaggagagacaggag

SEQ ID NO: 381631 - DNA, 122 bp, Homo sapiens
cagtctgctggagaggctcaccgtttctttttcgagcgaattacacagttgtcttggcagcgtgatttgccctctggttcctgctttatcagtttggtgattctttgtacagattgataacc

SEQ ID NO: 381632 - DNA, 122 bp, Homo sapiens
agtgaaaaactcagtaacctagagcagcagcgtccaatagaaatacaatgtgaggccaggcgcggtggctcacatctgtaatctcagcactttgggagggcgacaagagtgaaactggctct

SEQ ID NO: 381633 - DNA, 122 bp, Homo sapiens
ggcagggaaaaaggctggtgggtattataagaagacagccggctggacctgggggtagcgcgtggctccctgcggaggccctgtctacgtgtcacacagtcggacatgccaccctgggctcc

SEQ ID NO: 381634 - DNA, 122 bp, Homo sapiens
tgcctcacctttggcatgagtgaggctctgtgcacgtaagaaagaccctgtggacctgtccgggaggacctgggtgccagcagggatggccagggtgctgtgggatcactgttgctgccagc

SEQ ID NO: 381635 - DNA, 122 bp, Homo sapiens
ctctcctgcagagcacagggcatgggacgcactgtgccgtcattcctgcaggctgcttcccgggcctggggtcgccagtcttttttgaccacgggggatgcacatggggaggctctaggtag

SEQ ID NO: 381636 - DNA, 122 bp, Homo sapiens
ttcttttagggcatgtttcttgtgcaagagctcagtcacagggtactgagactggtctgacgctccagttcttcaaatcttttggagactggcaattcctttgagattcctgcccccactct

SEQ ID NO: 381637 - DNA, 122 bp, Homo sapiens
ctactctgacagcttcatgaatccggcggcgccctccaaccacatgaacccggtcagcaacggcctgtctcctcaggtaggtggtctcagcccagcacccaggatcccaccgccacgaaagt

SEQ ID NO: 381638 - DNA, 122 bp, Homo sapiens
tgcgagagctgatcgagagctgccaccggccgccgaagcctggatcaggctctgtcccgacgcctgaccggaacctgaagccagcggaaatcctgagagaaagtctgaaacccactcagtcc

SEQ ID NO: 381639 - DNA, 122 bp, Homo sapiens
cggccaacggaaagctctggccctcccaggctggagtttgtgccaggcaggctccagtagcggggcagggcccgggtgcttcgctcggcagcccccacgccccttcctccacacccgagggt

SEQ ID NO: 381640 - DNA, 122 bp, Homo sapiens
ttcactgcaagacagaagatcactcttgaggtcagagtctgtcttcatgccagatacattcgtgagcagatatggtcaccagctcaaaggctacagagccaatgcttaactctgggaagcaa

SEQ ID NO: 381641 - DNA, 122 bp, Homo sapiens
ccagagctgggagtaaccgagagctcctctcatccatccttttgccttcaggggcacttccgccctcccccgaagaccatcccagccaaagggaatgttatcttttccccaaagagctcctt

SEQ ID NO: 381642 - DNA, 122 bp, Homo sapiens
gcactgtcccggtgccaggcaggtgggggttggggcagagggcagaaggaaagggtgcatcgcggaacaggcccttagtggagcttactggaagaccccaccagccgctgctgcacgtcatt

SEQ ID NO: 381643 - DNA, 122 bp, Homo sapiens
ccacccacagcttgttgggtaaacagcggaacggactgggccggcgggatctggctggagcgcttgctccctcggtcccgcctcggattcgggcttgcgggtggcgaccctgcctgcgcagg

SEQ ID NO: 381644 - DNA, 122 bp, Homo sapiens
caatgtccaacgtatcctcattcttctcaggcgtggtacaagagcttgggaactgccgaacgcgggtacaagagcttgggaaccgccgaacgtgggtacaagagcttgggaaccgccgaacg

SEQ ID NO: 381645 - DNA, 122 bp, Homo sapiens
cacttagcgctgacaacaggcctggagacagcgggtctgacatgagtcttcccgggctgacgccggaaatggctgtgcattcaagggaaaccatttggcctgcgccactgaggacgagttga

SEQ ID NO: 381646 - DNA, 122 bp, Homo sapiens
gcgggggcggagagaggagagtgcccggcaggcggcggctgggccggcccggaactgggtcgtggaaggatcgcggggagcggccctcaggccttcggcctcactgcgtccccacttccctg

SEQ ID NO: 381647 - DNA, 122 bp, Homo sapiens
ttctgattcttcatttctgactgcctaggcaaggaaaccagataaccaaacttactagaacgttctttaaaacacaagtacaaactctgggacaggacccaagacactttcctgtgaagtgc

SEQ ID NO: 381648 - DNA, 122 bp, Homo sapiens
cgggctgctggcgcggctggacgggcagctctccgcagaatccaggggacggttgctgagcgggcctgggacagcgggtcgcggcacctccggcctgcgcgtgtctaatccgtctgtcgggt

SEQ ID NO: 381649 - DNA, 122 bp, Homo sapiens
agcttcaccagctcacgctgcttctccttgtactggcgctgcacctcggccagccgcatccggaagtccagctccagggcgtccatgtcctccagggaggacttcatggcatacatctgggg

SEQ ID NO: 381650 - DNA, 122 bp, Homo sapiens
cagagggcaggggccccgcggggaagcctcaggcgccgttcccctcgcgaggcggcctcccggaatcacggacgcctccctgcccagcctgctgccccggacctccttcgctcgcctccccg

SEQ ID NO: 381651 - DNA, 122 bp, Homo sapiens
caggagagaggaggaggggtggaggcagctggggagtgtgagcaagatgccgcgggggctcgggggagactgcagccaagtgctgcgtctgaggatatttatagacagacacacagagagac

SEQ ID NO: 381652 - DNA, 122 bp, Homo sapiens
aagaaccccgctccttcgtgaaaccccttttcccttagcctttaagctgccgggccgcgacggggaactggccaactcatccttcgccgggctctccgccctccgggctctggggcagaaca

SEQ ID NO: 381653 - DNA, 122 bp, Homo sapiens
caactgatctctatcaactcctttctctcaagctaaatacttggtcagtcttctcttatccgttaaaaaaaaaagaaagaaaagctttaaaaaaaagtcctgtgtcttcttctagtcatccc

SEQ ID NO: 381654 - DNA, 122 bp, Homo sapiens
tggcccgggcacccgctggccctatcggtcccgggacacccgccgctccttcccagagcccgaggagcctcctgaaggtggaagctatgctggtgagcactgccagcgcatgatgagactga

SEQ ID NO: 381655 - DNA, 122 bp, Homo sapiens
tctgaggaagaagggcacagagacccaaaattagtttggaaagcatcctgatttggtgcccgaggcctggaaagaaatggcggctggggtgcggcggaggtaggggaggaaaacgttggatg

SEQ ID NO: 381656 - DNA, 122 bp, Homo sapiens
aagcctatcttgggaggccacacaccagtgtacctaaggttcgtttacccggaccggaagcgacagcaccgatacctttggcacacttccgcctggtacactacaaacggcctccttcccgg

SEQ ID NO: 381657 - DNA, 122 bp, Homo sapiens
cttacgcttctgctgttctatcatggcggcaaccggtctcttcagcgccgccactgaccgcgctgccgctctcaggcgccacgcaattggttccaaattagtccttcctccacaacttccag

SEQ ID NO: 381658 - DNA, 122 bp, Homo sapiens
ccagaggcaggcacagaggcgcgtgcagggaggccagcggctgggacagaggcacatttacggaggccagaggcaggcacagaggcgtgtgcagggaggccaacagccaccacagaggcgcg

SEQ ID NO: 381659 - DNA, 122 bp, Homo sapiens
gggaggaaaagtgattactgctcgcttccacttcacaggtagaactactgatgggggtgacgcggtaaggtgggagggcatgaaggcaggggacgcggcctaggtcaggagggacgcagagg

SEQ ID NO: 381660 - DNA, 122 bp, Homo sapiens
acagagatgtgaatggggcagggatgtcctttgatggcatcaagactttagcttctggtgcgctgtgtcccagctctgatttcagttgcagccgtgatggacagttgcatggaagctgagac

SEQ ID NO: 381661 - DNA, 122 bp, Homo sapiens
caaaatgaactaagcttcccataataacgggagacggcggaaatgtcgggatgccgcttacgtatcggggtgtttatgcagagctgtgtttctgagaaaggccgaacacagatgctcatgta

SEQ ID NO: 381662 - DNA, 122 bp, Homo sapiens
cctactggcaaggagctgacatgcagcccggagtcagctccctgcggatgggctgatcctcgcgcaggctgtgcggggcgggcgcgcactggacccgccccatccccgccccctccccgccc

SEQ ID NO: 381663 - DNA, 122 bp, Homo sapiens
ttgttagcgtggtgatggagcaggagctgctgagcaggccgccccggctctcttcctcagcgtctaggcttttagaattgttctatgtcctttcagccaacacaaaggcaggcgttcaaagc

SEQ ID NO: 381664 - DNA, 122 bp, Homo sapiens
gcgcgcggcagcggtagtggcaggtgaacttgcaatctgcagagaggcctggcggtgaggcggaggagctccaggtcggggaaatgtcccggagattgaagggaagccccagggagagggcc

SEQ ID NO: 381665 - DNA, 122 bp, Homo sapiens
gccattgaacagcagttccaccttatcccaccacctagagggccagacctagtgagagcccggatctggtctccagcacctcaggggcacccacgcacccaagcccaggtgtgcgcaccctg

SEQ ID NO: 381666 - DNA, 122 bp, Homo sapiens
aagctgagggaaagggagaggcggctggcctaaaatttaggtgggcggaagaacctgtgacggagctgtgaccgctgcacaggccagagaccctggagtcctcctcaccccggggttggggg

SEQ ID NO: 381667 - DNA, 122 bp, Homo sapiens
atttgagaacagaggagaaggactttcacagtcacttaacattttggcctggaacctgaccgtagattgaaaaccaaaaggcaatctgggaaagaggacagagaggctggggcagaaggtca

SEQ ID NO: 381668 - DNA, 122 bp, Homo sapiens
catcgtctccccatctccgccgtctccagcgcagccaacctgcctggacacctcatgaagcgcaatccagctagtctagcgtctccagtttcagccatcctggctgtaccctgtgagccccc

SEQ ID NO: 381669 - DNA, 122 bp, Homo sapiens
ccgtgcacatgccaatgccttccgtgcacacgcccgagccctgggtggcatttggggcctcgccaccactgctacccagcagctcccagcagaaggcccaagagagccaaatgcagaagagc

SEQ ID NO: 381670 - DNA, 122 bp, Homo sapiens
ggccttactcctcactgtgacataatcccagaacgcatctctgctccttggtcagtgaagcgatgagggtggacacaaggactagacaagagcagacagtgagctggcacctgacccaccct

SEQ ID NO: 381671 - DNA, 122 bp, Homo sapiens
gggctccgcggatgggggatcgtgcggcccccgtgaccccggcgcccctcccctgcccgacgaggaagggccccatggctgggaatacccccacggccactgtccatctcctctccttcctt

SEQ ID NO: 381672 - DNA, 122 bp, Homo sapiens
aaaagaaatctcttcgggagctcagcctggatgtgagaggttggggggacccctgaacggcgctgctgtagcctagcagccctggcctgtcttgatttacccttgtcgtccatggcgtcctc

SEQ ID NO: 381673 - DNA, 122 bp, Homo sapiens
cgagctctggcccttgagggtcgtggcggccgaggagggggtgcacgggcggagaatcttcgccttttctggtttatcttggggggaggggttttcccagtggttctttaagggacatccat

SEQ ID NO: 381674 - DNA, 122 bp, Homo sapiens
ttctttgcttttcttctatgactgttccaataatcccatctctgagcacttccaccccaccgtgattggggagagcatgtacggggactttgaggaagcttttgaccatctgcagaacagac

SEQ ID NO: 381675 - DNA, 122 bp, Homo sapiens
taagagaggatttaagaatcctatgaaaagcaaacagcaggaggccagcttatacatgatcgccacaagatagacggcttccttcttggcttctgttgtagagaactttcaactgtctcctc

SEQ ID NO: 381676 - DNA, 122 bp, Homo sapiens
agctttgccactgagcactggataaccttgccatggatccgatcctgtgcttctactctccgatcccttctcctctgctgctacacaacttaggacgaaggctgaagggacctgtaggcaac

SEQ ID NO: 381677 - DNA, 122 bp, Homo sapiens
atgagagtggctgaaacccggaacactggcctcaccaaatgctgggaggatgcggagctccgggaaccctcactcattatggtgcacatgcaaaacgggcagccactgtggaagacagtttg

SEQ ID NO: 381678 - DNA, 122 bp, Homo sapiens
cccgtcgtgagttatgggaggcacgggacccataacccagcattctcagactcccagggtcgtcaggacacggcgccccgcgcggtgatggatgagccggccccagcgctggctttgtccgg

SEQ ID NO: 381679 - DNA, 122 bp, Homo sapiens
accgcctcttttcagtggtcccttgagaagccactgtgccgcttcttcccgctcagcgggcggtaaggcctgtatgtgcaatgtgggtctctcagcagctgctcctgctggaaacttctcca

SEQ ID NO: 381680 - DNA, 122 bp, Homo sapiens
ataacagtttaaaccattgctgttccaggtaaaccaggacccatagtcactctagatacacgcttcgtttctgactcatggtgcgtgctcagagaacaagggcccttgtccattgagtggga

SEQ ID NO: 381681 - DNA, 122 bp, Homo sapiens
ccctcccctagatcctcctcgcctgaactcaaggcgctccccgccctaaccttccacgcccgcttctcccacacctggcagcagacagctggagatgaagcgtgtgacccaagtggcagggc

SEQ ID NO: 381682 - DNA, 122 bp, Homo sapiens
ttgaccgctagcaagcttggtcttccgctgggaggctggtttgcccattctgtaaatggccgtggagaggaggaggctagtggtgatagaaaatcttttcagcctctcagagaacaatgaca

SEQ ID NO: 381683 - DNA, 122 bp, Homo sapiens
gactctggaggaagagatggcatctcctagcctagcctgttacaagggtgggacacgagccgtttatccatttatcggccccgtgttagaggaattctggaaacgtgtactggcagttaatt

SEQ ID NO: 381684 - DNA, 122 bp, Homo sapiens
cagagagcgatttcaccaagcatctaagagttctttagatctttaggaagtctaaggcagcgattgcctcctttggtgttatattctaagtgtttccttcacatagttgtggccctttcacg

SEQ ID NO: 381685 - DNA, 122 bp, Homo sapiens
gggatgggggctggggcacgaggaaagggcagggagccgcagtgccttgcaggacactcacgccagggaggtcctgtctgctccaggatgcctcgtggccccacttcctgcctctgtcggga

SEQ ID NO: 381686 - DNA, 122 bp, Homo sapiens
gccgtgaaggtctcctccaccccacgctgggtccctgcatctgtgcctcagttttcctgccgaatctatcaatgagatgtctctcttgcagggatcggcttcgtcactgagacctcaggcct

SEQ ID NO: 381687 - DNA, 122 bp, Homo sapiens
ggcgaggcggtgcccgcgggaactggccgtgaggtggggggccagaggcgccctccccgccgctgctgtgccctggctgcaccctcagaccaggcagaagacgtggggagcgccggggccag

SEQ ID NO: 381688 - DNA, 122 bp, Homo sapiens
cactcctggaaactgctgatggctgcatgaccatgtaggtctgagacttggagggtcccccgtcccctccccaccctccagctggcctcctcctcggtcccccagaccgcccttgctcaccg

SEQ ID NO: 381689 - DNA, 122 bp, Homo sapiens
gaaataaacaaagtcttaatttcaagagaaattggcatcatcaacaggaatttgggaattcgggaactctttcctgtgggaaagctgcatcagaacactgttgccttttaagaatccactac

SEQ ID NO: 381690 - DNA, 122 bp, Homo sapiens
cctcccctaccgcagggtcaccttggccgggctggcggccaagggctccttcagacccgacgtgccccagcggcccagcggccgcttggtcccctgagcagtcctcatcctcgcaaactgct

SEQ ID NO: 381691 - DNA, 122 bp, Homo sapiens
gcgcgtcggtggcttgggagcggggtcttgaagactggttactccacttaaagaccctctcgggccggagccttggcggtcagcccagagctgcttctctctgcctggaaactgggccatgg

SEQ ID NO: 381692 - DNA, 122 bp, Homo sapiens
aagataaattaggtcccctaggcgcaaggtcaggtgacacttcggtgactgcagaaggggcgattcctagagatatgcttcaaagcaagtgggacttagagataagcagagccgagaggtgg

SEQ ID NO: 381693 - DNA, 122 bp, Homo sapiens
cctggaggggctacaggcgcgggtggtggggtggcagtcgctggctgcgccaggatggggcggccctcagggcagtgcggagcccacgtgccggggagcaccggccatgcccggcccagcca

SEQ ID NO: 381694 - DNA, 122 bp, Homo sapiens
actcctccctgccctgttgcatcattgtgtagtactgggtgtgtttacctttgtagaagacgtgtgcccatgtagtggcttctgtgtccataagtaaacattggggagggagaagctggtac

SEQ ID NO: 381695 - DNA, 122 bp, Homo sapiens
cgtccagagatcagctggcggctgctgagcaaacagcacgagctaatcagcaaaaggtcacgccggctccccgagtccccgcatttgaagtcatgcctcacacgggcgggctggaaggaacc

SEQ ID NO: 381696 - DNA, 122 bp, Homo sapiens
ccgtcagcctccaggagggcgccgccggccgccgtgacttcagcaaggcactactatctccgtcagccgccgcctcggccatcttcctgcccggagtgcaacaaaatccggctctggccagc

SEQ ID NO: 381697 - DNA, 122 bp, Homo sapiens
gctgggatcaaataaaacacggaaaaatgacagacgctgcagagctgtggaggacgtgagcgcttgcacgctgtggggaatggaaattagcgcttaaggaaacccacggagatttctcaaga

SEQ ID NO: 381698 - DNA, 122 bp, Homo sapiens
cggtaggttttgcgctgtctgtcgcttgtgcgctgtctgtccctctcttccccgtataaacgaaatagtgtggcgagtactaagagataccgttaaagaatccaaagttccttctctgaggc

SEQ ID NO: 381699 - DNA, 122 bp, Homo sapiens
acatttgtgggaaacaggaactcctaagaagaaggcaagacactgcagagaaggaacaggcgcacctggaacagagtgcaggagacaaagcgaagaccatcgctgttgtgacaaagtcggcg

SEQ ID NO: 381700 - DNA, 122 bp, Homo sapiens
tttctctagtagaaagtgagctctactacccaccaagactcataaggtagggaattccctcgacatgggaacgtgctgggcagtccctgggtggcggatattcactgagcaggcacttcagg

SEQ ID NO: 381701 - DNA, 122 bp, Homo sapiens
catcctgctgtggcttggcacaggccgggcactgacagaggggacccgtctggttgcatccgatccttcgatgctcctgcaggggtggaggggcgcgtgggtacagtcagcagggctgtggc

SEQ ID NO: 381702 - DNA, 122 bp, Homo sapiens
gcccacgcctacctggagtctgtgccccagtgcatggcgtagatcttggccaggtgcccccgcagtgtcctcctcgtgcgcatttggattcttcccactgggtcgatgttgtttgtgatctt

SEQ ID NO: 381703 - DNA, 122 bp, Homo sapiens
gcttgctggaacgtccagtgaaactttatttacaaaatcaggcgccagcccttgggccctcgtttgcggatatttttaaaatagctttaaatattaataagcgtattaaaattgccttaaat

SEQ ID NO: 381704 - DNA, 122 bp, Homo sapiens
ggggcctcaaattacagaacataggaagggtcatgtgaaaagtcagcatgtctggaatcccgagggttatatttaggagctgggaagattacccccaaagatgttctcagctaagaatggat

SEQ ID NO: 381705 - DNA, 122 bp, Homo sapiens
attcccaacctggcctacagccatggccaggcctcattaactgctgccaggtttccctgacgctgacttctaactacagggcccaaagtggatttaagcacctgattgctaaaggaagtagc

SEQ ID NO: 381706 - DNA, 122 bp, Homo sapiens
cagacgaagaaatcatcgctatgcatgctggccttgggatgggggcgcaaagcccctggacgcgccccgcctagtgggcgggaacgactacagcccccagcatgacccgcggccgcccatgc

SEQ ID NO: 381707 - DNA, 122 bp, Homo sapiens
atgacaccacagctgcctctgaggtccatgctattgtatcgagcatttagtatgtccagacgctgtgctaggcatttcccacattaccttgtttaaggctcacagccttaaggtgggtatta

SEQ ID NO: 381708 - DNA, 122 bp, Homo sapiens
gcactctgtgacatgtgtaagcatgtatgtgagcttgtgtatgcatgtattcatgtgtgacgtgtgtgtatatatgtgagcttgtgtatgcatgtgagtactcacgtgtgacatgtgagcat

SEQ ID NO: 381709 - DNA, 122 bp, Homo sapiens
ggctcccagccagccgccccaagccgctggcggctcacatcctgtcatctggggcagctccgcagagtgctcccagagcccctctctgcaaatggcctgtgcctgccccaatttccctctgc

SEQ ID NO: 381710 - DNA, 122 bp, Homo sapiens
ctccgtcctgctggtcgccatgtcctgggtctccttctggatcagccaggcggcggtgcccgccagggtgtctctaggtacggggcctcgccgctgctccgagggagctggaagggcggccc

SEQ ID NO: 381711 - DNA, 122 bp, Homo sapiens
ctctaagaaatacctctccttccgtgtgtgaaaatccttgggggaaaaaaaaatcccacacggtgttcttggccatcaggatcatgaaaacaaactttggtgaatgtgagcaactgcgccag

SEQ ID NO: 381712 - DNA, 122 bp, Homo sapiens
gggccgcggggccgcctggcctcctcctgccctggccgcggtgccgcgcgctcgggaacgcgggcctttcgccgctagccagcttctgcctctcggccacctgtcctctctcgcccacgctg

SEQ ID NO: 381713 - DNA, 122 bp, Homo sapiens
ttcgtctccaagttagatattccaaaacagagcatccaacgcaacatgtctgccatggaacgcttccgcaacatggacaagagagccacaactgaggaccgcaacacggccttggagacgct

SEQ ID NO: 381714 - DNA, 122 bp, Homo sapiens
agcctcagacagtttaagtgactcgacaaaatgtcaccaatgctgagtgatggagcaagtcggcttgaggccaaggtccattttctccctgctacaaagatgactaagcacgactcagagtc

SEQ ID NO: 381715 - DNA, 122 bp, Homo sapiens
ctcacctgcctccaccccactgcaagtgaagagcagcaggtagcacaagaaaagcgataccgccttctgccgcatggtggcgccgcgcgcgggctccgtcactagacctgcgaacgggcgag

SEQ ID NO: 381716 - DNA, 122 bp, Homo sapiens
gaggagtccagaggttacagccaaacctcaccactaacctccagctgcaggtggtgatcccgctcaaatcagaagtcccacactcaaggtcaccagagtccccgccctcctcccaccctgtc

SEQ ID NO: 381717 - DNA, 122 bp, Homo sapiens
cctccctgcagggatggggagaccacggcaggcttttaaacattcttggtctcactgagccgtaggtgaggaatccctggttcctacagactctgctgtaatatgaggagcagggtttaagt

SEQ ID NO: 381718 - DNA, 122 bp, Homo sapiens
ttgcaagatctgcaaactcagctaatgaataccttccaaataatgcaagatgttaccaatcgttcatgagtaaaagatccaaagtacaaaacagaacagagttttaaggtaagagcacccca

SEQ ID NO: 381719 - DNA, 122 bp, Homo sapiens
tcactgtgctctggactccagcaccggaggactcctacacggaggactcccgttctgccacgtcctggactcctgcagaagtgaacccccgccccgctgcaccctggatatagcaaggcagg

SEQ ID NO: 381720 - DNA, 122 bp, Homo sapiens
aaaacaataaaatgaaaaaaactcttagaggtgaaactcaaaggtcaacctctggctgtgcgggacaatgggtgtccggccttcccttcccttcccttccgaagtgatgaaggagttccaat

SEQ ID NO: 381721 - DNA, 122 bp, Homo sapiens
tctcctgggtcacctttgcctgggaagtggatgacaaagcatggaccacagcaaacctagcgacctggagatgcaagaatgttcctacaatgtcttgctttctccttgtttagacacaaagt

SEQ ID NO: 381722 - DNA, 122 bp, Homo sapiens
cctcccctgccgccccagggtccttgcccgccgagtgcccttacccatcctcctcagagccgacaggagactaggatctcggacctggagagcccaaaggttcgcactggtactgcgagacg

SEQ ID NO: 381723 - DNA, 122 bp, Homo sapiens
ttgctgggcacagcctggctcacctgcctgtccaagtcggccaaagtccagcctttgaggcgtggccacctgaggggacgtgtgcttggtctgtgtgtggcccgcttgcccctcctgctctc

SEQ ID NO: 381724 - DNA, 122 bp, Homo sapiens
ctcccgcactggcggaggacgcggccgttggaggcgacacctccacaagcagcgtggaggcgacacctccacaagcagcgttatctgacggaaccctcacaacaacccgttttacagatgag

SEQ ID NO: 381725 - DNA, 122 bp, Homo sapiens
ttttttttttaaggaaaaggagactggaagaagaaaaataagtatttctggcagaacttccgaaagaaccagaaaggaataatgagacagacttcaaaaggtactgcaatgcagctggcgga

SEQ ID NO: 381726 - DNA, 122 bp, Homo sapiens
catcacaacagataaattactacgtattccactttactaagtctccactcaaagttcctacgtttacaaatatgtaagtaaaagaggcacaaaaatgtaggggatggtgttttcgttgctca

SEQ ID NO: 381727 - DNA, 122 bp, Homo sapiens
tccgttctccgtcgtctccgcaggcctgaagttcattggaagagcaggacgtcacggggacgcctcgtccttcgcggtcaacgccctgaacttggcgccaggatctttaaaacccggaagtt

SEQ ID NO: 381728 - DNA, 122 bp, Homo sapiens
tgcacagaggtgcccatgtctgatattcttatcctgtagaggaaaggaagtcagcccaagcgggtctgaggctcacacactgaccacggaggaaaccacactccgggttgctttgcccatcg

SEQ ID NO: 381729 - DNA, 122 bp, Homo sapiens
gtcctgcagccgcagccggcacggagggagccagccccgaccttgccccgctgcggcccgcggctcccggccaaacccccctcaggaaagaggtgaggccgccagggggccgttggggagtc

SEQ ID NO: 381730 - DNA, 122 bp, Homo sapiens
ccacccccccggagtacttaagggagttggcggcgctgctgcattcattgcgccgcggcacggcctagcgagtggttcttctgcgctactgctgcgcgaatcggcgaccccagtgcctcgac

SEQ ID NO: 381731 - DNA, 122 bp, Homo sapiens
cactcacaaatgccatctttgttgtccccaaacaaacctgtgtcccatcctgatcgcaaccgctttaagccgtggctctcaaatgaacccatccatccctatcccgcttcccagatccaacg

SEQ ID NO: 381732 - DNA, 122 bp, Homo sapiens
cctaattggcagtttggtatcctacgaaagcctagaaattcgaacctaggggctgaaccccgccctcagaccaaccaggaagaggtgacgtgattggtcccgcccccgtacttctttgagcg

SEQ ID NO: 381733 - DNA, 122 bp, Homo sapiens
gagtcagtacacagtgttggggtgggggcagcgtttgggggcgacgagttttgtgcaccgcgctggagtaccctgcacataaggtccgctcatgggcttctcagtacggactcgccggcggg

SEQ ID NO: 381734 - DNA, 122 bp, Homo sapiens
gggcgaaagggtgaagagcagattccgcccacgcgtgccgtgctgagggccctggagtcccgagcggggccaggtcagcatccatccccgcccagtactcactcgtcaatcctgtccgggaa

SEQ ID NO: 381735 - DNA, 122 bp, Homo sapiens
gaggcggcttcgcgcgtcgggaagatcaggcggttgcttgctggccagggtctgcagattcggtgcgaagaagctggcggaggttgtgtagggcgagtcagtgtgactgagcaccctgggtg

SEQ ID NO: 381736 - DNA, 122 bp, Homo sapiens
atgtactcctcgcctagggggactcctgtgtggctcacgttcagcttttctgtcatgaaccgtgcaaactgccggatctcattgcctgagacgaggatgttggccttcgggccctggggctg

SEQ ID NO: 381737 - DNA, 122 bp, Homo sapiens
gagggaagtcctcgtccctggtcacgggaggcaggagtgaagagtcaggcagaaagagcacgtggcaactaacagcagatagaagggaatgatcatgggtcaataagtttgctgaccaaatg

SEQ ID NO: 381738 - DNA, 122 bp, Homo sapiens
tactaaaaaactctaaaatcagtacatttttctcccttgcatctcccagactgttctgtccggagctggaattttatctgtttccatcgctagtaatgcatgtgccaggttttggcctggtg

SEQ ID NO: 381739 - DNA, 122 bp, Homo sapiens
aggatgtgcttagggcactgagtggcccagagtggggagctcctgcagggttgagaggaccggcggggcgaggtcggggcggggctcgcaggacctgggcggggctcgcaggggctgggcgg

SEQ ID NO: 381740 - DNA, 122 bp, Homo sapiens
aatgagtctattcctaaatcagattctaatcacactagctagcatggctatggaacacagcgtgtataacagaatttccagaaatccaaactgtggacccgcaaaaaatttaaattactcat

SEQ ID NO: 381741 - DNA, 122 bp, Homo sapiens
ataaatgtaaacaagaaaacaggctgggcatggtggcttgtgcctataatcccagcacttcgggaagtcaatgcacgcagatcgcttgagctcaggagttcaagacgagcctaggccacatg

SEQ ID NO: 381742 - DNA, 122 bp, Homo sapiens
tttccgcgggccctgaccctgctggcccccaccgggccagtgaaagcagcaggctttatgcggctgtcgggctcggggcgaggagccggctccaccctcccagtctgggcccatcctccggc

SEQ ID NO: 381743 - DNA, 122 bp, Homo sapiens
gccttcacagtttcaccttcaggtaaatgggctcatcctttgagccatgaggatgggaagcgaagcaaggaatgaaaaagctagtgtgtttgtgtgtgtgtgtgtgtgtgtgtgtgtgtgtg

SEQ ID NO: 381744 - DNA, 122 bp, Homo sapiens
cacgccaagcgtaagacagtcactgcaatggatgttgtctacgcgctcaagcgccagggacgcactctgtacggctttggtggctgagcctcaccccggctttttatttaacagctcaccca

SEQ ID NO: 381745 - DNA, 122 bp, Homo sapiens
gcccctcagtcctgggcccgctgcatgccgggcgggtgcagggggtgtgcggggtgaggccgtgcgccccggagtggagagggcgcccgggccccgagggctcgccggagcccccgtccgcc

SEQ ID NO: 381746 - DNA, 122 bp, Homo sapiens
cacgagacacctcacctaaggctgctcggaaccgccgagaagaaccaggtccaaagtaggcggcaaagaggtcatcagcaaggagtgttcgaccctggggagaatagcgggcgacggggctc

SEQ ID NO: 381747 - DNA, 122 bp, Homo sapiens
tcctgcctgctctgtggagctggaggcctgggttggcagctgagatttgggcagctgcagcggcccctggggagcaccagatccatggagtgtgcagctcccgctgcgcttccctgccacag

SEQ ID NO: 381748 - DNA, 122 bp, Homo sapiens
ggtcagccggggctactgcctggatagttgggcgccggcttccctaaaggtggggtcacccgcgcccgcacgcacactagcccgaacctttactcccgacacagccgcagtctgcactttat

SEQ ID NO: 381749 - DNA, 122 bp, Homo sapiens
tttttctgctttcagaaacacatcactcttctctaagccctggttttccgtgtttgtgggcgtgtaggtgtgtgtgcttgtacatggtggcagctgttacgattctttccacacggagaaag

SEQ ID NO: 381750 - DNA, 122 bp, Homo sapiens
cttcaaaattctgggagctccggggagggctccggggataggggtccaggtgacgtccggcgcccgtctcgcgggtagggaaactgaggccgggccgcagcgttcggcgcccggttccgtgg

SEQ ID NO: 381751 - DNA, 122 bp, Homo sapiens
aaggaatgtatgaaaggaatcggggcttatcttaatcacacaccgggccccagcactgcccgagccggcgagggcctctgtgcaccagctccattgccaggcaggcctgcgcagatctataa

SEQ ID NO: 381752 - DNA, 122 bp, Homo sapiens
tctgtcaccctgcaatgactacactggcactggtttcagaatgccgctgacacacgccctcgcggcgcgtgaatgtttctctcgactgactcatatggcaggaaaacatgcacgtaataaag

SEQ ID NO: 381753 - DNA, 122 bp, Homo sapiens
tttcttttctttctgtctttgtctttctgtctttctttcctgtctgtctgtctttcatctcgatctgttgcccaagctggagtgcaatggtgcaacaatttcagcttactccaacctctgcc

SEQ ID NO: 381754 - DNA, 122 bp, Homo sapiens
gagagcggccgcagcctgcggcgagagacacctgaggctgggaaacggctccgggagccgcgcgaggacacagcccctcggcaggaagaggcacatttcacgctctgcggaagaaaagtctg

SEQ ID NO: 381755 - DNA, 122 bp, Homo sapiens
tcctagcaacttgggaggccagggcacttgagcctcaaggaccacttgagcccatgagttcgagaccagcctggggaacatagtgagacactgtctctacaaaaaattcaaaaattagctgg

SEQ ID NO: 381756 - DNA, 122 bp, Homo sapiens
tgctttgtctttccttccagccccttcatgaataagttttttccagccagctttccaaatcgacagtaccagctgctcttcacacagggttctggggaaaacaaggaaggtcagtgctaacc

SEQ ID NO: 381757 - DNA, 122 bp, Homo sapiens
gatgagctaatcagtggaattgtgcctgggtgcttggacagggcagagtctttggaacctcggagtcgtaggagaactgaaaaatctctctggcttcccttcccttagaagggatccactgc

SEQ ID NO: 381758 - DNA, 122 bp, Homo sapiens
ccctgcttcctagggagggaggctggggcggcaaggcgggcgcgggtggtccttgccccgcgccagctcgccaggccacgtcgctggcgtttttccagcgctgggtcacctgcgggccggcg

SEQ ID NO: 381759 - DNA, 122 bp, Homo sapiens
cggtacctgttcttctttctgcgcagccgcgaaaacagtttacttttctttctgtggggacggacgggaggtggaggccttcattctggagaaaggccaggtgcagaactggcctgtcccct

SEQ ID NO: 381760 - DNA, 122 bp, Homo sapiens
tgatcagagtatctcattcttatggtcaaaggttatctctcctcctccttgcccctgacacgctggagattttcataatactcaaacatttataaactaacccaatgtaatttttctcaaat

SEQ ID NO: 381761 - DNA, 122 bp, Homo sapiens
ctatccccagggcccccccatcacacctggcggggccggggggtcttcactccagggtctcgctccctgcccttggggcccggggccatgcagtacctggagtgtcctgcagggggaaagcg

SEQ ID NO: 381762 - DNA, 122 bp, Homo sapiens
gagccaccagtttatagggttttgacacagattatgccttgtctgtgtctttctctcactcgcccatccatccatccatccatccatccatccatccatccatccatgattaggaaagacat

SEQ ID NO: 381763 - DNA, 122 bp, Homo sapiens
ctcccaataattgttatcctccccgcccggtgcagctcaggtgatgggcacagacggcaacgcagccgccgccgccgcctcctcctcctcctcgtcctcctcctcctcctcctccgggtgcg

SEQ ID NO: 381764 - DNA, 122 bp, Homo sapiens
attggttacaactgatgaacctacagtgacacatcattataacccacagtccctagtttacgttagagttcacacttggtgttgtacattcattctataggattgataaatttacagtgatg

SEQ ID NO: 381765 - DNA, 122 bp, Homo sapiens
aagctcacccctataaatccaggcgggcgcttcgttacccaggagcccaaggtgcagctccgggacgcttcttttcaaggccgggacccctgcagcggcccgtaggacacctccctttccga

SEQ ID NO: 381766 - DNA, 122 bp, Homo sapiens
ccttcctcttccccactctctgctgggtggaagcccccaggctggggctgaaggctctaccggcacaaggccccctaacatcgtcctctatcccggggccccgtcaacatccacccaggcct

SEQ ID NO: 381767 - DNA, 122 bp, Homo sapiens
tactcaagtatcttgactaatgagaatcataacacctgacttagaaatggtatccaaaaacgtcaggtgtttgctgcatgtttttgtatttcaggggatttttattttgtgtgtgtgtatgt

SEQ ID NO: 381768 - DNA, 122 bp, Homo sapiens
ccggacacacacacacacacaccccccacacgcagcgcgcgccaatgagcccgggccaggcgcagggggcggggttttcccaggctcgagcacagcagctgctatttaccttcttggcttct

SEQ ID NO: 381769 - DNA, 122 bp, Homo sapiens
caagacaaacagtccagttagctcttcaggaccgtcagagccaattacaggggatgagcacgcagtcactgcagccgcgcggtaccgtgagagttctgggtgctctctctctctgggagaga

SEQ ID NO: 381770 - DNA, 122 bp, Homo sapiens
cgccaccacccggctcatgctccaggcgctgcgcacaccccagtggccgcccaggacgtgcggtcactggagagcccccagccacgcccctagatgctgctgggcggcctgcaggagtacca

SEQ ID NO: 381771 - DNA, 122 bp, Homo sapiens
tcatcagaaagcttgataggggctggagggtctgcttccaagatgagtcacccacgtggccgcaggcaggaggcctccatttctcaccatcagggcctctccacagggctgtttgagtgtcc

SEQ ID NO: 381772 - DNA, 122 bp, Homo sapiens
ccaggccactctgagacatttctatctacactttgctcactgaatatgcagaaataagatcgttggaaaagaaagcacctgaggtcagacaggtagtagtatatactccgatactggtaata

SEQ ID NO: 381773 - DNA, 122 bp, Homo sapiens
tgtcatgtttttctgcggaaggaccccacttcagacaagaccaggggtataaaccgcacacgagcagtcagcctccaacaaatgcatctttacaagtcctgtgaggtctgcactccacccac

SEQ ID NO: 381774 - DNA, 122 bp, Homo sapiens
aatcttgctgctgcttactctttgggtctgtgctgcatgtatgagctgtaacactcgccacgaaggtttgcagcttcactcctgaagccaatgagaccacaaaaccactgggaaggacgaac

SEQ ID NO: 381775 - DNA, 122 bp, Homo sapiens
tggctgcgcccccgctctcctggtccggggggtactctccacggtgactgccctgctcctcgcggtgcagctccacgctgaccttggtctccaccttcaggcggggcttgccgctggggtcc

SEQ ID NO: 381776 - DNA, 122 bp, Homo sapiens
cttgtcaaaccttaaatatcatttagatccatcgcgggggaagttctaaggcaggctctgcggctcctggcaggaacaagaaagcagatttgatggacgcgtgtgcagcgtgcgtagccgtc

SEQ ID NO: 381777 - DNA, 122 bp, Homo sapiens
ctaccaccccggaccccagagaagcccgggaccaacaggacgcggcccggggtgggggtgcgtcccctgggtggaggtgcaaccgtttccaccccgccagtccatgctctggatgccggtca

SEQ ID NO: 381778 - DNA, 122 bp, Homo sapiens
attccctgactccaggagctgggcaacactagacaaaacaggagaatgaaaaaagcatgacggtactttctcctgtcaacactgctaaatgctgtgtgtagccgtatcattcacacaaagcc

SEQ ID NO: 381779 - DNA, 122 bp, Homo sapiens
ccgcgctttttcttgggcgccatgggttggtgcctggaccaccaggactggtgagggcagcgaccccggccccttccccaatttagcccttcctcttacctggcctaaatattctaggcgcc

SEQ ID NO: 381780 - DNA, 122 bp, Homo sapiens
tgaggaggcagaagtctgtcgcttgaaaactaccagagcaaaaccatcgcttggaggtgtcggggatcgaacccgaggcctcatacatgcaaagcatgcgctctaccactgagctacacccc

SEQ ID NO: 381781 - DNA, 122 bp, Homo sapiens
agaggctgcgctcagtctgagagtggctgcctgagacagctgccacaggctgctgcagagcgtgcagcttttgcaagggactgaattcccagccagacaccccttggactcttttttggagg

SEQ ID NO: 381782 - DNA, 122 bp, Homo sapiens
gtcggttggcctggtggagtgtgtccaacctctgacccgcttttgggaggatcagaaccccgcgtccgggcggccggcgcgcacctggagcactaagggcctggtcgcggcgcgggctgtcc

SEQ ID NO: 381783 - DNA, 122 bp, Homo sapiens
gagtggagctccgcatcactcaaccctgggggcggagctagcccaggctcccacacccgacgctctggcccacacagacgctactctgtagcatctcaggttccctctggctgcactctgga

SEQ ID NO: 381784 - DNA, 122 bp, Homo sapiens
atggtccgccgctggggccctgcccgtgggctactggggctgcggggctggtcgaagccgcggtgtcctgggcgcccaagccaagttgcaaaaatcagtttaaaagaaaaattctctccttg

SEQ ID NO: 381785 - DNA, 122 bp, Homo sapiens
gcagccagctcttcacaccagcctcgtctctgggcattggagccacgccggcaaaggtcacgtgcagccagttggacgaggggtaaaatgccacccgaatctgtttagagtaattgttttcc

SEQ ID NO: 381786 - DNA, 122 bp, Homo sapiens
agggaactccctgaccccttgcgcttcccgagtgaggcaatgcctcgccctgcttccactcgcgcacggtgcgcgcaccactgacctgcacccactgtgtggcactccctagtgagatgaac

SEQ ID NO: 381787 - DNA, 122 bp, Homo sapiens
agtaggaccccggagatcatgacttagtagtaaacaccaaacgggtttctcctgcatgggcgcctgatgcaataatttgccttagctacagagggtggaaccctatctcggaaataattcat

SEQ ID NO: 381788 - DNA, 122 bp, Homo sapiens
gctacagtttgttgtttctgatgtttggatgtgttcactgcttcttccttctggttggttcgtggtctcgctggctcaggaaggaagctgcagactttcgtggtgagcgttaaaagctcgta

SEQ ID NO: 381789 - DNA, 122 bp, Homo sapiens
agtagcctcctgggggtcggtcgtcgggagggctcgtgagcggaaggctttaggatgaagcgacagggcccagagtcgtggagattggactggggggcaggggagcaggcattgacaaccac

SEQ ID NO: 381790 - DNA, 122 bp, Homo sapiens
ggcagtgctaagctgcacaggacttccggggacaacgcgcgtagcgaggcgacgtcggcgcgcatctcctccacatcgcgcttgagcttggctcgccggttctggaaccaagtgaccacctg

SEQ ID NO: 381791 - DNA, 122 bp, Homo sapiens
cacccgggcagctcttattcacatgtgccagtctatggtttccgcatgtcactaaccctgcgaacacatccaggatacaatgccttcaacactgggaatctcagtggacactgagaaattta

SEQ ID NO: 381792 - DNA, 122 bp, Homo sapiens
gggggagagggcggcggtgccggacttaagtcccggacagggatgtgggcgggcctgggacgggagtgggaggggccgcggggaaagcttcggcggcggagcgcacctgtcccagctcaggt

SEQ ID NO: 381793 - DNA, 122 bp, Homo sapiens
aatttatgaagtagggctttaccaacattcactgaatctcctcaggcaggcctttccatccgatcctcaccaggaccccacccttccccattcagggatataagaaaattatcctaaattta

SEQ ID NO: 381794 - DNA, 122 bp, Homo sapiens
tttcgacatgctaaagtgaactttgaaactgcgagaagatgtggcacacacggcaggtgacgggagtctgaccagaggagtcggggaccatctgagaagacgcgtgttctctaaacacggct

SEQ ID NO: 381795 - DNA, 122 bp, Homo sapiens
gccaacgcccggcgcgccagccaatgcgcccgggccgctgtagctgctccggggccagggcgctgggccagctctggcgcccggcgcttgtgattggctgcccccagcctcagcccagcgcg

SEQ ID NO: 381796 - DNA, 122 bp, Homo sapiens
ttggttcgggccatgaatccgaaactgttggccccgcggtgtcctctgcccagacctcagcggattgctcgcttttatagagcttgccgcgttcccattggctggcctcaggtggcgtgatg

SEQ ID NO: 381797 - DNA, 122 bp, Homo sapiens
cgatcagagcttgccctgaacggactcctttcccactgcagacaagtagggggttttgcccgtaaagaaggagctagtctacgtgcggctgcagtaggccctgcgccatccgtcatttctcg

SEQ ID NO: 381798 - DNA, 122 bp, Homo sapiens
ggttttctgcacgtggcttaccagcctcggtctgcaaacgagacttctgtgtggtcagctcgctcaggctcctctgaatttcctcattcttgcccctggcctcacttaactgatcctccagg

SEQ ID NO: 381799 - DNA, 122 bp, Homo sapiens
ctcccggctgcaggctgcgatctgccttgctggggcctcatcccagagaaacaggctggccgggagcattcggaggggcttcccaggaagagctggaccctgacacatctttccgtgggtgc

SEQ ID NO: 381800 - DNA, 122 bp, Homo sapiens
agaacctaggatccatgcacaagctgggcaggtgctgccccacagcagtcaggactaccgcggctgagggcccatcctccccgggctctgcggccgtaagcccagggctcagccatggctcc

SEQ ID NO: 381801 - DNA, 122 bp, Homo sapiens
ctcgacctcctgacctcatgatccacccgcctcggcctcccaaagtgctgggattacaggcgtgagccaccgcgcctggccacctcttgattcttaaatttaacaatggttactatttatgg

SEQ ID NO: 381802 - DNA, 122 bp, Homo sapiens
catctttgaatcttcctaaagcagtggtcacagagcttaaaggtgacacaacagtgctcacgtaaaccaacacacattccccaccccccaagccaacaataaaatcatccccttcaatttgc

SEQ ID NO: 381803 - DNA, 122 bp, Homo sapiens
aatctggaaatgttatttagggatccacgtctttgctgcagaagactttctgcgcggcaacgtctctacccctacacacacctctgagaaggagaaatctagggttggcgatgggtggtgtg

SEQ ID NO: 381804 - DNA, 122 bp, Homo sapiens
ccagtgggccggaccttggtggtgggcggggcctaggggaatccggggagtttggcttgccgggttgtggttgggggacctacattaatgaggcttccaagaagcggggtctggggaagcct

SEQ ID NO: 381805 - DNA, 122 bp, Homo sapiens
gagcccggctcgggatcgcagcactggtcgcggcggcgcaaacttccccggcccctaggccgtagaccccagaacccaccaggctgtgctctctctcaggcggcagggtctggccagcaccg

SEQ ID NO: 381806 - DNA, 122 bp, Homo sapiens
ttgggtgcagtgtatttcttactgtgctttaaagaggaacacgttttaagaacccccgcgcggggcggagcagggcggagtccccggcgggaagggacccgagacctcggctgcgcctgcgc

SEQ ID NO: 381807 - DNA, 122 bp, Homo sapiens
cctcttaaaaagtaaggcagattgagtcactcccatgctcaaagcccctgaatgccttctcgtctcactcaggccgtcattaaagtctgactcaaaaaagcagaccacctgtaattcctgca

SEQ ID NO: 381808 - DNA, 122 bp, Homo sapiens
aaccggggctgcttgccgcgcttgagggccagctggagttctgggtgggtgtgagcttggcggaccctgcactcggagcagccggccggccctgccggccccgggcaatgagggacttagca

SEQ ID NO: 381809 - DNA, 122 bp, Homo sapiens
tgtctggtgatgatcagtgtgtgattggtggttgtgcatctgttgatattgcagtcctctcgccagtggtggaatatggtacttatcaaaatgctgtcagttgtaagtgacagattcccaag

SEQ ID NO: 381810 - DNA, 122 bp, Homo sapiens
acccgctgccctgagtgctcaccacgtgaggaactggagtggccgagttcgccaaggcgccggggacacctgagcagatgagaactggagcctccagctgcttccagcgaatctacacaggg

SEQ ID NO: 381811 - DNA, 122 bp, Homo sapiens
acctcgtgatctgcctgcctcagcctcccaaagtgctgggattacaggtgtgagccactgcgcctggaggtaacaaatgttaattttaaatccaactgagcttgagcccaggagttcgaaac

SEQ ID NO: 381812 - DNA, 122 bp, Homo sapiens
cacaatgactgctcttatttgaaacactgaaccttaactatacaaccacatggtctgatacgctgtcttttaaggctctgataacaaaataagttagggatgtattagatgcactcctcata

SEQ ID NO: 381813 - DNA, 122 bp, Homo sapiens
tgcagcagagcacggccgattgctcctccggggagtgtcagctaggggacggagccggtgcggagatcgaggccccacaaggcctgcccctgtggttgttcccactgtcccactgatggctg

SEQ ID NO: 381814 - DNA, 122 bp, Homo sapiens
taaaattctaagctccccagctgactgaatggtccctcctcttggccaggggaattccaacgtaaacctgaaaaactagttcaggccaagatagaagtgggttggacacgcctcattatacc

SEQ ID NO: 381815 - DNA, 122 bp, Homo sapiens
aatcaagggggtcaggatcggctatttgtacatattttagatgtacggcatcacatactgcgtgcggtcatgaaaggctcacaaaaagctagtcacatcctggcaaaagatgttgtgtgata

SEQ ID NO: 381816 - DNA, 122 bp, Homo sapiens
aagagagatgaaaccaccccagtgatttgtagcacgaaccacgcaactatggggtccatgcgggttagtgggatgccatttttttaaaggtcgcaggctacctaaccttgtttaaattatcc

SEQ ID NO: 381817 - DNA, 122 bp, Homo sapiens
aagggtgtccttccagagacggtgtttccagggggaggaccgcccccgcttccagatccccggccccggctgtgactgccctgtttcacccctgctgtgtcccatcccccgtctgtccacta

SEQ ID NO: 381818 - DNA, 122 bp, Homo sapiens
gggcggcagagagagacactgtctcgaaaaaaaaaaaaagaaaagaaaagaaatcagccacgattcagatttttaatgctaacaagacgttttgctttctaaatgcacacacctttaatata

SEQ ID NO: 381819 - DNA, 122 bp, Homo sapiens
gaccagactgcacccagtctgtcttggagtgaaagccatttagtctgtccccatcctctccgagtcatccttcccctgatgcacagatttcggccgccgctcctgcacacgcaccggtgaaa

SEQ ID NO: 381820 - DNA, 122 bp, Homo sapiens
ttcgctatactggatattgtttcctgactgcgctgagagaaggaaaactgaatgttatatcgaaagtcccgtgctgggcctgggatctcccgctgcaggtcaccctctcggacggccgctcg

SEQ ID NO: 381821 - DNA, 122 bp, Homo sapiens
cttgtctggcttcccagccgctgctctgacgtcctcgtggacggtttgggcatttctacgcggttgtgcgaccaacaactgcccgttcaggtcaaggtccccatctacaggagaaagggatg

SEQ ID NO: 381822 - DNA, 122 bp, Homo sapiens
gctctcccgggagccaggcgcgttgctgcacccgaggtggggaaaccggagcccgaagagcggaaggggcttattccaggcgacaggcagtgtcagtaactgaatcaggggccgaggaagtt

SEQ ID NO: 381823 - DNA, 122 bp, Homo sapiens
tgaggagcttccttcatggcctgctgtgggctgagtaaataatatgattgccttctacagcgctagagattcatatgtttatccccatttttcaggtgaggaaatgcttcagatgaggctcc

SEQ ID NO: 381824 - DNA, 122 bp, Homo sapiens
gagtgctgcttccctctgtccactcggacgatgcctcgcagggccgcagcccccgccacccggatgctggcctggtgaggtggtccccaggactcacactcactggtgcagatcaatgctga

SEQ ID NO: 381825 - DNA, 122 bp, Homo sapiens
tcctttccccttcttcccaactcccagtaccccttctggtggctgtggccagaaactcagcgaacagcactggtcctatgcccatcagtgtgctggaattgagtgcacggtatctcacctgg

SEQ ID NO: 381826 - DNA, 122 bp, Homo sapiens
tcccaggcctccatggggttatgtataaaggcccccctagagctgggccccaaaacagcccggagcctgcagcccagccccacccagacccatggctggacctgccacccagagccccatga

SEQ ID NO: 381827 - DNA, 122 bp, Homo sapiens
tcgggctgaagtgatgggatccgaggactgacggcgcgggtgccgtgcggggtgagagcacgcccggcaaattccaatggaattcccttagtcgctgctgagttttggagcattccaaggaa

SEQ ID NO: 381828 - DNA, 122 bp, Homo sapiens
gagttttcaaggttcgtccctgttgtagcaggaatccgtgcttcacttaggctgcaagggcgtaccatggcatggaggcacctatgggtggacggcgtttcgctggtctgtcctgggctgag

SEQ ID NO: 381829 - DNA, 122 bp, Homo sapiens
gatttgcatacattatgcaaataggtagaactgcccgaagaatgcctacgctgcgtggtgcggacgaaacgcttcccggggcctttggattggtctgtctagccacctcatttgcatgacgt

SEQ ID NO: 381830 - DNA, 122 bp, Homo sapiens
ccgccgccgcgcagtgagtggggctggcgcggggcttgcggggccggggtttgggagggccgggtttcaggagacgtctgcgccgagcggccaggggagcggggctgaggaggatctgggcg

SEQ ID NO: 381831 - DNA, 122 bp, Homo sapiens
tgatcctctgctgcttctcctcagggaggagggagaaccagcgagggtagctcctggggccggtgcactgagcagtgatgaatgtttcatgtagctgaagtaagagtgactggaatatgctg

SEQ ID NO: 381832 - DNA, 122 bp, Homo sapiens
ggctccgtcctggagaggctcagtgacccggcagtggcgccgatccgggttagccagggccgcgctgggacccgcggagtcgcgtgatgcaaacgggaaggcgggagcaacccagctccttc

SEQ ID NO: 381833 - DNA, 122 bp, Homo sapiens
taagagagcgagactccatctaaaaaaaaagaaagaagaggaagagacaccaggagcacacgtagggaagaccatgtgagaacacagggagaaggcagccatctacaagccaaggagagagg

SEQ ID NO: 381834 - DNA, 122 bp, Homo sapiens
agaccctgtctcaacaacaaaaacttcgcgttagatcttgcattatagaacccctacaaccggagggcagcttaagttgcctgttttactcagggacagccctaaactgcctttcgccagaa

SEQ ID NO: 381835 - DNA, 122 bp, Homo sapiens
ggagggagacctggtgcgctacctctcggagaagcttttcaccagcagccacacgatgagcggcaggttctcgcgctcgttgtaggtaggtaaaagcaccgaatatttgttctgtcgtggac

SEQ ID NO: 381836 - DNA, 122 bp, Homo sapiens
gtgtccagaagaaggccatggacagaacggagactaggttccgtaagaggggacagattacgggaaagatcacgaccagccgtcaaccgcaccgccagaatgagcagagtccccagcggagc

SEQ ID NO: 381837 - DNA, 122 bp, Homo sapiens
cattggttcccttgcgcagcatctgtggagaattaagctttcccctcctctcttgccagccgttgttcctaatcttgtcttttttaagggaggaaagcaggagaactcatgacactttgtat

SEQ ID NO: 381838 - DNA, 122 bp, Homo sapiens
tatagccgctcccaagacccataaagaggtgccacagtcgaggccgggggcggtggctcacgcctgtaatcccagcaccttgggaggccgaggcgggtggataacctgaggtcaagagttca

SEQ ID NO: 381839 - DNA, 122 bp, Homo sapiens
gacgtggttactactctcctccacccccgcagaccttctttggtaacgtgaacgagtcggcggtggtgcgccatgacctgcacttccacttcactgcgcgctacatccgcatcgtgcccctg

SEQ ID NO: 381840 - DNA, 122 bp, Homo sapiens
cgccggcggcccgaggggaccgcgctgggaggggctgccgcgcagcgcggggggactgggcgcagggcgggccccgggtagtgggtgagagggccggcctggacccggcgggcgcacggctc

SEQ ID NO: 381841 - DNA, 122 bp, Homo sapiens
ccccggcggctggcccgctccccgagaagggccgtggtcggggggctctcactcacgagccgctggctctgggtcagccctgcccccagggcagcgctccatcatgaggctggcggggcgct

SEQ ID NO: 381842 - DNA, 122 bp, Homo sapiens
agagctcagcgagctcttctgtgtctgtttggggcgtgtgggctccgggagcgtgaggaccgggaagctaggaggctccttcccttctggcggctccctcactgagaccgggcggtttggtt

SEQ ID NO: 381843 - DNA, 122 bp, Homo sapiens
actcatattcttttgtgttcttcccctcatctcactagatgaagctcagagagtgcttgccgggtcagcggccggatgcccagtgcgttgtctacgttgtcagtcagttcagcagtcgcctt

SEQ ID NO: 381844 - DNA, 122 bp, Homo sapiens
aggcaaagcaactcagcccaggaggttgaactcgagtcatcagagaaggagaaacagtgccgaaaacggcccgtgcgctaccagggtagcccattaacgcattaactccaggctcgttgggc

SEQ ID NO: 381845 - DNA, 122 bp, Homo sapiens
tttgggccgggtgcagtggctcacgcctgtaatcccagcactttgggaggccgaggtgggcggatcactaggtaaagagatcaagagcatcctggccaacatcgtgaaaccccatctctact

SEQ ID NO: 381846 - DNA, 122 bp, Homo sapiens
cccaggacggcacagcctgcaggagccgcagccgccccatggggacagttcgagctcacccggtccctaggcaagagagcacagtcctggccacctagcccagagggcatgatgggcccagc

SEQ ID NO: 381847 - DNA, 122 bp, Homo sapiens
aaccgtctgcctccctcagcctcccaaaatgttggaattacaggcatgagccactgcacccggccagatatgcagtgtaattttgatgagagaacataaatcatgctgccattttttgtctt

SEQ ID NO: 381848 - DNA, 122 bp, Homo sapiens
gaggggaggggagagagttgggcgagggagagcccccggccggctgccagaagatcccggcgggaggaagcccaagtgtcacttgaattccacccaaggagcgggcgcctgggatcagagcg

SEQ ID NO: 381849 - DNA, 122 bp, Homo sapiens
caagccctgttttcttcttctgaccactgggtggctccgcagaattggttctgtgattatcgcgctctcaaaggcggccttggggtttgggtgaacagtatgataatgctggtttgtcgtag

SEQ ID NO: 381850 - DNA, 122 bp, Homo sapiens
gtgccgggggaggaagtgcggcttgttttctttcctccagtctcggggctgcaggctgagcgcgatgcgcggagacccccgcgggggcggcggcggccgtgagccccgatgaggcccgagcg

SEQ ID NO: 381851 - DNA, 122 bp, Homo sapiens
atggtgttgaggagagctgtttgtggtatccaaagtgctccattagcatctttaaaggatcgcctgagaagtcccagctgtctggcttcagctctgcttagcatgggtacccatcggtgtcc

SEQ ID NO: 381852 - DNA, 122 bp, Homo sapiens
gactagctcagaggccaagtaagtcacataatggcactaatgagatgctaatgtcgcttccggaatgaattccttagactgcatctatgagttaggggtttttgtgagctttacttaagact

SEQ ID NO: 381853 - DNA, 122 bp, Homo sapiens
gcacgggcctcctcaccccccatctctcccgtgcgcccactcgcttccttctcgctcactcgcaggcactctctcgctaggaaacacagaaagtattttgtgtttggagatagtaaccttag

SEQ ID NO: 381854 - DNA, 122 bp, Homo sapiens
gccttccaccttgctcttctcacggagaaactggtgggagagctcgcgggtgctttccctcgctctcccttctccgcctcttttcctgttcaccagaaaggtgcgggatggggggcgggggc

SEQ ID NO: 381855 - DNA, 122 bp, Homo sapiens
agagaaggcggtacttcaagaagcagtcgcagaccctggttagggcgggtgtcgagtcgccgacctggagtcagatcatctacttataaattttggttttggtacttactgtgtgacttcgg

SEQ ID NO: 381856 - DNA, 122 bp, Homo sapiens
ccaccggaacccgagaccgagtcagaacccgagtgctgcttggcggcgaggtgagtgtggcggccgcagtcggtcgctcgcagaaagcggggcgggtcctggcccgaactcggtcgggcccg

SEQ ID NO: 381857 - DNA, 122 bp, Homo sapiens
catgcactagatgaacgggtcacaccaatggcatgaaatggaaaggttacaggagtgaaacggtggcccttagtgtttggatagttaaagcagtgaggaaggcctggttcactgcagcccaa

SEQ ID NO: 381858 - DNA, 122 bp, Homo sapiens
acaggccaagatgggcacctctatggcagctctcccgtggagcgtgaggaaggggctctccgaagagccactaccacggccaggtccctgctggacaacaaagtggtgaagaacagtcgggc

SEQ ID NO: 381859 - DNA, 122 bp, Homo sapiens
acagttccacttataggtacataacttggtgagactctcccacaaatacacaagtagacacgcacaaaaatttccttagctgcaatattgattcagtgaaaagtgaaaacactctaaatgtc

SEQ ID NO: 381860 - DNA, 122 bp, Homo sapiens
aatacccactgccaatgcatctaatgcttcagagagctaggctttcaaccatatagatttcgggattgagctttgaaaaaaatcatcctggtatgaaaataacactgaatttgaagtcagac

SEQ ID NO: 381861 - DNA, 122 bp, Homo sapiens
cctgtcccagggggtctgctgggctccaccgggccccgccctgaatgcagcctggagcaacgctggaggccggggctaggaaactgtgagccccgccttgtctgtgtctttctcagggattc

SEQ ID NO: 381862 - DNA, 122 bp, Homo sapiens
gatactaagcatcaataacttggcaaggatttcacagctagttagtgttaggcaggaaaacggcctcacgtaatctagggaaatcaccctgtgctttagtgcctctgtctattctgaagcaa

SEQ ID NO: 381863 - DNA, 122 bp, Homo sapiens
ggaggcggcttctccggccgggcggccccgccaccgcgacgccgagcccctgacgtcacccgattcgccaggaaatgaactttttaataatccgaggagggaggaaagccctcggtcccctc

SEQ ID NO: 381864 - DNA, 122 bp, Homo sapiens
cattgcactccagcttgggcaacaagagcaaaattccgtccaaaaaaaaacaaaaacaaacgaacaaaaaaacaggccaggggcggtgcctcaagcctgtaatcctagcactttgggagggt

SEQ ID NO: 381865 - DNA, 122 bp, Homo sapiens
gtgagggcggggccgggggcgggccaggagtgggggtctttggccggggtccactctgaccgcggtgtttgcagggcagtagaggagctgctgcgctgcggcgcggaccctaatttggtgct

SEQ ID NO: 381866 - DNA, 122 bp, Homo sapiens
ctcctcacatcccggacggggctgcagggcagaggtgctcctcacatctcagacgatgggcggccgggcagagacgctcctcacttcccagatgtgatggcggccgggaagaggcgctcctc

SEQ ID NO: 381867 - DNA, 122 bp, Homo sapiens
ggcaactctcagagcccatccaggccacagagcatttccgggtggcttgtgtgtgcgctccggctgtcgagcagcaggacttggcttctgttcccggcttcgttggccccatcttttagttc

SEQ ID NO: 381868 - DNA, 122 bp, Homo sapiens
cggatgcctccccactctggggatggaccacaaccccgagattaagttactccaggggtccgcgggcggggccgggggcggggcagccccccagggagggagggactgtgggcccaggaaga

SEQ ID NO: 381869 - DNA, 122 bp, Homo sapiens
tctgtggatctccgtgaagtcacacttgtccaggctcttgatgacttccctctcttccaccgccatttcctgcaaaaaccacagacacgcgctctcaccatgtctgaaggacagacatgcag

SEQ ID NO: 381870 - DNA, 122 bp, Homo sapiens
tggacaggcatggctccttcatgcagggtgggaaatctagctgctgtagccagaggggtgcgggtgggaccctggaaggcaggaggggagtgtgggtccaagctggtgccaatactaatgcg

SEQ ID NO: 381871 - DNA, 122 bp, Homo sapiens
gctgactggctgctaggctgctggctgcttggccacagacgggcgcacggagacactcgacgccgctcccgccgccgccgcgctcagcgccgtctgccccctccccattcaggtagccgctc

SEQ ID NO: 381872 - DNA, 122 bp, Homo sapiens
agcccgcggccggtgacgccagcggtgggggaacacaatgtcctgtgggtgatcggtgagcgagcggacggtggatttctcctgcagtcggtggcaggaaggatgtcatcacgcgctatttt

SEQ ID NO: 381873 - DNA, 122 bp, Homo sapiens
gtcatacctgcttagtcaattactactgacttccagtttccaaaatgatgctctggtttccgttcctattttctccatcttttttttttttaaagcctagtcagctgggcatggtggctcac

SEQ ID NO: 381874 - DNA, 122 bp, Homo sapiens
gaaataccgggtgctgaaggctttttggcttcctgctccctccctgtttacccctttcatcgccctgcttcccaaccgccccctgactctgctccccattttctgcacgcctgcgcccccgc

SEQ ID NO: 381875 - DNA, 122 bp, Homo sapiens
aaaaaaactctttatatctttatatatatcctattggtactgtttctcttctctagagaacgctaatgcagaaatgttgcacctagtggatggagaataaattcattcatcccacaaatatt

SEQ ID NO: 381876 - DNA, 122 bp, Homo sapiens
tagctatatatggcacttttcagccaattttcctctgtgcattgtctgcatcaaagttaacgcaaatcaaatctttggaggaggttaaaaaaatttattttttgctccttaacacccttttg

SEQ ID NO: 381877 - DNA, 122 bp, Homo sapiens
catcctggccaattgcacagtagctgctaattgctagagctctgctaatggcccgtacatcgatgaagaatgagttacaagcagcaaaatccagaagacaataagctagtgtggtttagagc

SEQ ID NO: 381878 - DNA, 122 bp, Homo sapiens
cgccgccagagcaggggcacacttcagaggggaaggtcctcaggcccaggctcctggggacggcgtgtgtcctggctccaccctctgctggcggtgagaccatgcacaccgcaaaaccatgg

SEQ ID NO: 381879 - DNA, 122 bp, Homo sapiens
acacaggagaaattcaccactgtgcaggagggacgtggttaaggcgagttctgccattaacgtgtaattagacaacacttttaccccgcccctcctgtgaatgccaccattctctccaaaat

SEQ ID NO: 381880 - DNA, 122 bp, Homo sapiens
tgacctctgggctgctgctgctgctaggattgccgcagtcgtttcagacacgatgggtttcgggcctccaaggaccaaaaaatacatcattttctctgtggtcacgccattcccagtttccc

SEQ ID NO: 381881 - DNA, 122 bp, Homo sapiens
ccagccaggctggccagccagcctccaccacaacagtcgctatttactttggatgctggccgtccccacaattcacacacaagatttattaccagaaagtaagtcatacaggctgcagtaat

SEQ ID NO: 381882 - DNA, 122 bp, Homo sapiens
tccccgcctgcccactccctattgggggtggaaaagataaatagaaaagatgggttctcccggcagaagttacggtcctgccgctagccctctctgagctcaaattcacgtccctggctggt

SEQ ID NO: 381883 - DNA, 122 bp, Homo sapiens
caccctccaccctggtaaggtgccggggccagtttgggccgggactcctagaatttgaatcgggggtggtctaacgctgtcgcctgcggggtgtgcaggaggcccctagtgaagccaagagt

SEQ ID NO: 381884 - DNA, 122 bp, Homo sapiens
ccaggggcctgtctccatggcagcatgcacgcagcacctggggctgccaggtggcccagtcggcagcctcttgagcacacctgcttggagccaaggccagagagcttcctggggggtggggt

SEQ ID NO: 381885 - DNA, 122 bp, Homo sapiens
ctgcaggaatgtggccgtctcccctgggaactgggctgaaatggtatattggaaagactgcgggtgaggacccttaccctcttctcttgatgctgccatgcatctcttaccccactaccaaa

SEQ ID NO: 381886 - DNA, 122 bp, Homo sapiens
aaacaaacaaacaaacaaacaaacaaacaaacaaacaaaaatatttgtttccaaatggcacgcaaggaaggtagtaatccctgagtgttaagccagcagattttgccacttcattttgtgtg

SEQ ID NO: 381887 - DNA, 122 bp, Homo sapiens
gccaccgctagaaacacgaacatatggtttggctgggagccaaggatctggaagcaactccgtggtctcgggactgagccactgagtcaatggggatgccagtttgtaagatagggaacaca

SEQ ID NO: 381888 - DNA, 122 bp, Homo sapiens
agagcagggcaccgagctggggacgtgtcagggacgaagcgagggtgggcgagcgcggaccgctgggaccccggggctcagtgccgctcaccgggggtgaccgcgcgcccagccccggccca

SEQ ID NO: 381889 - DNA, 122 bp, Homo sapiens
agacaccgcacccggccccattttgcatgcattttgcacgccatatttaaagattcttgccggtcgtggtggctcacacccgtaatcctagcactttgggaggccgagacaggacgattgct

SEQ ID NO: 381890 - DNA, 122 bp, Homo sapiens
gtctttcccgctgatccgggaggctagcacggtgctacccaagtgtgatccagaggggttcgagcaccaggtgttcctagtccccaaaagctagatacagaaacggagaatgaacatttaaa

SEQ ID NO: 381891 - DNA, 122 bp, Homo sapiens
cccatcatctgggatgtgaggagcccctctgcctggctgcccagtctggaaagtgaggagcgcctcttcccggccgccatcccgtctaggaagtgaggagtgtctgcccggccgcccattgt

SEQ ID NO: 381892 - DNA, 122 bp, Homo sapiens
atcgcaaatcagttcacagcggagatcacaggggtttattctaaggacccgactgtcctccgactttctgaggttaacaatcttgcaggatttttattgacctgatacagctcccgtagcct

SEQ ID NO: 381893 - DNA, 122 bp, Homo sapiens
tgaaataaacaggaaatccatagaacgtgaacaataaggaaccgttcaggatggccaaaccgccgtctgcgctgttttctcgccagggctcaggcctgggaacggaagaggttaaaatccag

SEQ ID NO: 381894 - DNA, 122 bp, Homo sapiens
cactttcctgggagcggcggccacggaggcaccatgaagaagtcttactcaggtgggcttcgcgcccggggtggggaggggtcggtgtcccgggaccagcgctgctcacctgagtgcctgcg

SEQ ID NO: 381895 - DNA, 122 bp, Homo sapiens
gtccgggcgcgtgtaccttttgccgggacccccgacccctccgcctgccgcactcaccttcgcaggtgcacttcaggaaatgaaatatttgtagtaactttcataaccccctgggcaccctc

SEQ ID NO: 381896 - DNA, 122 bp, Homo sapiens
ctgttgtatccccttgtcttctccaggccagaacaggctacaccacttatagctaacttgcgcaaactgtctgctcctctagtccctgctggtatctttggcaggtctcgacttggggtctg

SEQ ID NO: 381897 - DNA, 122 bp, Homo sapiens
gtggagcgttccactgggacatgtggacgccatcgagtatggcagcagcgcaggcacgggcgagcacagcaggcaccttgccgttcacccgccggagagcctggccgtggttgctaacgcga

SEQ ID NO: 381898 - DNA, 122 bp, Homo sapiens
tggcagaggggagagggactcaggctgaactccgaaagaaggaacatctcacaccaaaggcgagggcagttgggggcagggggatcacagtacattttccatgcagactaagggtgggagtg

SEQ ID NO: 381899 - DNA, 122 bp, Homo sapiens
tgggcgagctcgcgggcccggccgcccccagccccagccccgccgggccccgccccccgtcgagtgcatgaggttgacgctactttgttgcacctggagggaagaacgtatgggagaggaag

SEQ ID NO: 381900 - DNA, 122 bp, Homo sapiens
cgctggcacgccgggggttccgttggcacgcagggggttccgcaggcacgcagggggctccggtggcacgcagggggctccgcaggcacgccgggggctccgcaggcacgccgggggctccg

SEQ ID NO: 381901 - DNA, 122 bp, Homo sapiens
ctggaagcagggtcatagacctgaagtacgtgaatccatgtggaaagctgagcctgcctgcgcctgcgcagtgcagcttagtgcgtcggcgcgcagttctcccgcccgtttcagcggcgcag

SEQ ID NO: 381902 - DNA, 122 bp, Homo sapiens
acccaccgctttgctgaagttgacgtggatgaggttgctagcggcgtcccgcagaatcagcggctgccccaggttaaagtggcagtcctggtccacgcccgccacccactgctggtagatct

SEQ ID NO: 381903 - DNA, 122 bp, Homo sapiens
taaatgggacagctccgactgcgctcagcctctaggactgtggctccgcccgggctagttcgctctccagtcaggaggcggaggcagctttgagcactgattaaccagccagccagcgaaga

SEQ ID NO: 381904 - DNA, 122 bp, Homo sapiens
ccgtgtcacgctccctcctggttctgcgcgtctacaaacttttgagcagaacacgagcctcggcaaacgagtcccgcagctcctcctgctgctcccgctggttcctgcggcttctgctcaga

SEQ ID NO: 381905 - DNA, 122 bp, Homo sapiens
acaattagggcggcggagatacagccctggccctggagtcaggagtcagggtcttgctcccgaaatgtgatctgtgactgagtgacccaagatcaacctgtgctcacattcctgctctaagt

SEQ ID NO: 381906 - DNA, 122 bp, Homo sapiens
actgcgagaagacctaggaggtgcgggcaggcagcaccgccacctcttcctccggtggagcgctcggccgacactcaccctttcaccacaaagaaggggtcctccatggacatggcgtcccg

SEQ ID NO: 381907 - DNA, 122 bp, Homo sapiens
taaggaagatagctcaaagccaaagcagaccctccgtgtgaactttatactgctcacttccgtgtttcccaagtaaatggggaaactgtccaaccttgtcatgtgttgggacttactgcttg

SEQ ID NO: 381908 - DNA, 122 bp, Homo sapiens
accattggattgcttttaagagcgcttccctgtaatccggagagctttgaaaaacctgttcgggtccccagaaacccatcctgggttgtttctcccaggccaaaagaaatcaaactgtaggg

SEQ ID NO: 381909 - DNA, 122 bp, Homo sapiens
ggccagacatcttgaaaccacagctgttaaatctgtaacgcaatacgtctggcagagccacgcagcacttttataatagcatgacggacctgtttgaaaacctcatgagaaggggcgggaac

SEQ ID NO: 381910 - DNA, 122 bp, Homo sapiens
agtgatccacccacctcggcctcctaaagcgctgggagtacaggtgtgagccactgcacccggcctgaggaggttttaactaataacctaggagatgagactgggcaaatattagaaactga

SEQ ID NO: 381911 - DNA, 122 bp, Homo sapiens
tgcaggcagcagcctgagggtgcttgggtcgcccctgcctcctggggatgggactggtcccgctgtcctgcagcctgcgtggcaccgtgaggctcctcacttgcgcctagacccgccgtcca

SEQ ID NO: 381912 - DNA, 122 bp, Homo sapiens
gttagtgattcttatctattttgttggatgatatttgcactgaaaagttagatatcattccggttctattatacagtttagtttatgattgtatttgactcagagtaaaaaaattgtgagca

SEQ ID NO: 381913 - DNA, 122 bp, Homo sapiens
ggcgcaaaagacctgccccagccccgggcctagggaaaaaaaagcgcgaaatgaagcctccgttgtgcaatgtgaataaagaaaggacttttcttaaaatgaggagggagcagcagtgacta

SEQ ID NO: 381914 - DNA, 122 bp, Homo sapiens
tttctggagagacctctcagagcgcatgctcttcggatagtcggtctgtagcgccattttcgtatggaagggactgcactctgattaggtacagccttaggacgcccagcgttcaagttgtt

SEQ ID NO: 381915 - DNA, 122 bp, Homo sapiens
gccctgtggcgtggcgtgagcaggaccgcgggcgcacagccaccgtggcgggcacagttgcgcactggtgacagcggcctcgtctggttcttcccacaaccctatgaggcaggtgtgctccg

SEQ ID NO: 381916 - DNA, 122 bp, Homo sapiens
agcaatcctcccaccttggcctcccaaagtactaggattgcaggtgtgagtcattgcacccggccaatatgttatttcttgatgttattccatggcccttgaacagtggctggcatggggcc

SEQ ID NO: 381917 - DNA, 122 bp, Homo sapiens
cgaggctgggaaaccatgtggacgctgggatgggggcggtggcggttttgcatgaacgatcggttcctcaggttcttgctcctgctgtcaagatacaagcagcacacctcacaaccacccat

SEQ ID NO: 381918 - DNA, 122 bp, Homo sapiens
agcagacgcggaggctggtggcccctgggcgagatgccgtacgccaaccagcctaccgtgcggatcacggagctcactgacgagaatgtcaagttcatcatcgagaacaccgacctggcgta

SEQ ID NO: 381919 - DNA, 122 bp, Homo sapiens
ggccctcgggcgcagccactgacgccaatgtggcccagggggctgtggggacagtagtcccgctagcgcaccgactacaaaacccgtccagccccgcgcccacccgtccccgtccgtgattg

SEQ ID NO: 381920 - DNA, 122 bp, Homo sapiens
tccaggtacttcccctgccgctccggcttgcgtgaagtctcatgtatatttcattgactgcgcttggcatgtaatgaaaaggtcgcctgcttccatctctgtgaccccgctagactgcacgt

SEQ ID NO: 381921 - DNA, 122 bp, Homo sapiens
cggcgagaaagccagcctttggtcagaagcagcttctggcgcccctggctggactctgtgcggtgcggcctcgttgccaaactacattttccggcagtacccgggacgccgggcgcagagcg

SEQ ID NO: 381922 - DNA, 122 bp, Homo sapiens
caaggtatgaaaggaaggggctgagggtggccgggcggctgcacactagctgggtcgcggcgcagaaacgcaggggccgcgagtgcgctggccggcgggtgtcccgggtccacgcttacggt

SEQ ID NO: 381923 - DNA, 122 bp, Homo sapiens
acctgatagagcaggcactcaacaaatacatgatgacatatttttaacaaccaatatgtgcgtccctgcccctggctccatagatttgcaagatttgtgtgtccattcataagccttccaaa

SEQ ID NO: 381924 - DNA, 122 bp, Homo sapiens
ccctttccatcttcacaatctgggtagagggaagatgaagatatggaaaaggggaacgtgcgataaaactgaagttttccccagaaagaaggaggtaaagacaaaacaaagcctatcaatca

SEQ ID NO: 381925 - DNA, 122 bp, Homo sapiens
cgctgcaggaacatggcagcagggcagacatggatggggctggggccttggtccccctcccggctcaggccactgcacagccgtcctgccccaaggccctctctacatgcttgatgggcgcc

SEQ ID NO: 381926 - DNA, 122 bp, Homo sapiens
ggggcggcgacgagcaagacagtgatccaggtgagagctgaggcggctcacccgggatggcgcttttccttgccatgggctctgatatcagatttcccttcaaatgtgtgttttaaaacgca

SEQ ID NO: 381927 - DNA, 122 bp, Homo sapiens
aggtgggcgtggcaggcataggcggagtcaatctatgagtgggtgggcctatcgccaggccgagagtgggcgtggccgacgtggggtgggtagcagccgaccgagtcggaccggccagttgg

SEQ ID NO: 381928 - DNA, 122 bp, Homo sapiens
gtcataagacgggaattctcatttagggtctggagttcctccgtggaagaagcagtgggccgtggggtccctagtccctcctttctccttttaaaaataaaatcatggcccttttttaaatt

SEQ ID NO: 381929 - DNA, 122 bp, Homo sapiens
gacaataccatttttaaaagacccggcagggcacgggggcggatcaagaggtcgggagttcgagaacagcctggccaatatggtgaaaccccgtccctactaaaaatacaaaaaattagttg

SEQ ID NO: 381930 - DNA, 122 bp, Homo sapiens
tgaactactggcctcaagcaagtctcccaccttagtctctcagagtgctgggattacagacgtgagccactgcacctggccagaatctacatttttaactgggaaacctgtacagtggttaa

SEQ ID NO: 381931 - DNA, 122 bp, Homo sapiens
cctccatcgcaccacacccctcatgtgaaccacgaccctgattactagtgtagatcgttgcgcctgtctggaatttggtaccaattgagttgtatatcaagccccccttgggaaatggcttc

SEQ ID NO: 381932 - DNA, 122 bp, Homo sapiens
gctagctttgtttgtgcttcagcatctggctggtgtttgcaggatcctcgtctttgctgtcggcatcgtgtgagctgcggcagtgcacggcagccgaggaacccaaagaaggggccagatgt

SEQ ID NO: 381933 - DNA, 122 bp, Homo sapiens
agttagtagaggtgaaaattgtaaagaaatggcaagctaggttgtaagatgggttatcaccgtaaataaatacaaagtcaacaagaatgagttggcatagagagaaagatgatgaaatggaa

SEQ ID NO: 381934 - DNA, 122 bp, Homo sapiens
tgcaccagccacagggatgcggggacgctggggacgcggggatgcggggacaccggggaccgcccgggagcacgtcctgcgcatcgccgggctccgcgaggcctgcagaggacgcagccctc

SEQ ID NO: 381935 - DNA, 122 bp, Homo sapiens
agaatccagtcgctgctggagagggaggagacaggcagtgacaagtcccgaggagggcctcggtccctcctgtcgtgcagggagttctgctcctggaaatattcctcctcttcatcgaagaa

SEQ ID NO: 381936 - DNA, 122 bp, Homo sapiens
gggcgtggatggggagggcctaccctggctcttattttcccctccatagcaattcctagacgatcccaaatatagcagtgatgaggatctgccctccaaactggaaggcttcaaaggtgagg

SEQ ID NO: 381937 - DNA, 122 bp, Homo sapiens
caatttgggaaagccctggagggaacccgaattggcttgatgccagccaaaggagagttacggttagacccataaaatggggctgtggggagacaaagtatcccacaaagaagagggttatt

SEQ ID NO: 381938 - DNA, 122 bp, Homo sapiens
cacaaaagagagcaaggcaaaagctgcagtgtcttttaggaccttgtcttggatgccacacggtcatttctgcaatatcccagtggctacacagtccggccctgtgcagtacaggaggatca

SEQ ID NO: 381939 - DNA, 122 bp, Homo sapiens
tttttctaaaaaaagtctttttgattaaatgactcaactaaaaaaaaaaaagctttaggacgcaaggaggatgagtgtgcaatgtgtacaaaagagaacctgaatcacatccagatctggaa

SEQ ID NO: 381940 - DNA, 122 bp, Homo sapiens
ctccggcttcagcacgctggacagcgcccgcgcctccaccgccttataaaggggagcgcgcggggtcacgtgggcgcgccccgccccattgacgtcaatgttcattcatggggaagcgggcg

SEQ ID NO: 381941 - DNA, 122 bp, Homo sapiens
gtggcgatgggagtggcaactgggagtgacctgggggtgtctgagtttgtgcaatgaacacgcactttccaccaacaccaacttctggaggggtagtacctgctgtgagccctgacatcaca

SEQ ID NO: 381942 - DNA, 122 bp, Homo sapiens
atgtggggcttagaacacctgggttgtacttgttgtgtgaccttggaggagtcgtcttatcgctttgagtcacacctgtaaggggggcatggtaataattcaggccataggaggctatcaga

SEQ ID NO: 381943 - DNA, 122 bp, Homo sapiens
attcagtagaacatcaataaattacatcagaaattcaacactttattataaaacgggcttcgtgttagataattttgctaaacagtaggctactgtaagtgttctgagcatatttaagacag

SEQ ID NO: 381944 - DNA, 122 bp, Homo sapiens
gcataataatacactttattctattagtattacaacatgaattgtgctcaccattcctcacgattgcttagctatttattctttgcattactaatatggccattattaactcaatatctcag

SEQ ID NO: 381945 - DNA, 122 bp, Homo sapiens
ggcagggcctgaggcagaaacccgcgtccccgcgccggcgctcacgagctctgcgcgccccgcccccaaccgcctttatgtgggcgccgggccccgcccctcggcctcccgcgcgcgccggg

SEQ ID NO: 381946 - DNA, 122 bp, Homo sapiens
aagatcagaatcctatgagaggggacagtccaaagatagaatctgaaaaacaaaagtaaacgttaaagaaatggagaatgggaacttacctggttggcactgtagttagtggccatgatctt

SEQ ID NO: 381947 - DNA, 122 bp, Homo sapiens
catgtgacccacgcggtgagaggtctgctccccgctgctgcagccatctgcggtggagaccgtgagtgtacacagacagtgccatctgaagggaactccactgcctctatgtgctacttagg

SEQ ID NO: 381948 - DNA, 122 bp, Homo sapiens
tggaaaatcttttcctacatcctcgaaaacataaactcctctgtgagtgaaatgcttgtacgaagctctgccatatgtttgtagtgttattattttcacctcaagtagaaagtctgttgaaa

SEQ ID NO: 381949 - DNA, 122 bp, Homo sapiens
gagaaaatctatgcctttgtgctcccgtcctttgtggtgcgcgggctttgctttgccggacgggaagtggccgagcctcgtttatgaaaacagtaccaggagaaggctaaacgtgggccccc

SEQ ID NO: 381950 - DNA, 122 bp, Homo sapiens
gtgataccatcatagttcattgcagccttgaactcctgggctcaaatgatcctcccatctcgagatcccaaagtcctgggattacgagcatgagccattgtgccttgccaaagaaagaatat

SEQ ID NO: 381951 - DNA, 122 bp, Homo sapiens
ttcactgacttcaagaatgaagccgcggaccctctccgtcagtgttacagttcttaaaggcggcgtgtccggagtttgttcctcctgatgttcagatgtgttcggagtttcttccttctggt

SEQ ID NO: 381952 - DNA, 122 bp, Homo sapiens
tctacaatgttgttcttcaaagctgtgccttctgttttctttctgcagctagctgtgttccgccatgtcagaatggagggatgtgtctccggccacaactctgtgtgtgtaaaccagggacc

SEQ ID NO: 381953 - DNA, 122 bp, Homo sapiens
cccgggggcacctggacgggggtgagggccctgccagatgtgccaggggaatggtcaccccggcctcagggacggccctgcagaggcccgaggcggactgcatgtgtgcgacgattctcgcc

SEQ ID NO: 381954 - DNA, 122 bp, Homo sapiens
agagcgtctgaagagaaaggcacccggagggttcggggtcctgcgggctgacggccctaccgggtccagcagtggccagctggcctggttgacacctgtacgcattgtttttaacacagtga

SEQ ID NO: 381955 - DNA, 122 bp, Homo sapiens
ctctctaatttacactgctccacccacagtggcctccttgtttcttgaaaacaccaggcacgtttcctgctcagggcttttgcactggctgcttttgcgttggatgctcttatcctcagatg

SEQ ID NO: 381956 - DNA, 122 bp, Homo sapiens
atttctcaagcatttttaaaacctgtgtgtctttaaaataatcataaaatgtcgcactctcgattttctgttatttgaaattttaaaataaaatgccttgtctagaagcaaatcaatgcagt

SEQ ID NO: 381957 - DNA, 122 bp, Homo sapiens
ttgtacattagcttcatggatctgcaggggacagacaggatgagaggggacacccagacccggcggccagagccaggccctgccaaaggctgcccagatccagccacttctccccacgggcg

SEQ ID NO: 381958 - DNA, 122 bp, Homo sapiens
accagagaagtttctcttcctccttaggttatccacggtggctggtgagcatggctgtgccgggtgagtgggtgggcagcccaacctgaccccacatctcagcctgggccgagcttcctgac

SEQ ID NO: 381959 - DNA, 122 bp, Homo sapiens
ctgtatacgacatcgctaatgacaccgtacgaggcacgctaacaaggatgctgtacacaacgtcgctaatgaggacagtgtacaagccatcgctaatgaggacactgtatatgacattgcta

SEQ ID NO: 381960 - DNA, 122 bp, Homo sapiens
gtagcggcagccccggggggccggtgccctatcagaggcgtgggaggcatcaggagcaagcggcccccatgcttttctcaggggagcctctcccttggtaattaatgagtaatccgccgagg

SEQ ID NO: 381961 - DNA, 122 bp, Homo sapiens
tcggtctccacagcacttggtcggctcagccttgttcgtgcgagtcaagaacttgagccgcgctgctctgaagagggagagtcagatgtgggcaaaaaaagtgcatcgaatgtctgagaaac

SEQ ID NO: 381962 - DNA, 122 bp, Homo sapiens
taagattctaccatctggaatgactcataaaatatgaagtgggccgggtgtggtggctcacgcctgtaatcccagcactttgggaggccgaggcgggaggatcatgaggtcaggagttcgag

SEQ ID NO: 381963 - DNA, 122 bp, Homo sapiens
gctagcgaatgacagagccgtggttcacactcaggtctgtctggattcatggctcaggtgcgttctgctcctatcccaagctccttagacaacagggacaggtgatgtcctgtaggactgtc

SEQ ID NO: 381964 - DNA, 122 bp, Homo sapiens
gtcctaaaacctttggtttcccactatctaatgtggtttcaactatctatgaggcgctttcgtggcaaggagtgattctctccagtaggcaatcctaagaacgagcgcagtgcttggcgcac

SEQ ID NO: 381965 - DNA, 122 bp, Homo sapiens
aaaaatctatgttttcctccatgatggttaatcctcaaatagtcaggcttacttctgtcccggatcctaaccacctaccaggttttcttcgtgggttttaggttaagtccctgatccggttt

SEQ ID NO: 381966 - DNA, 122 bp, Homo sapiens
ataaaataaaggtagcaacacaccgccgtcagcctgctcgacctcgccccccgcgcgctgcgaaataaagttagtgcccagtggccgctgcaatggcccagaggggcccagccgagctcccg

SEQ ID NO: 381967 - DNA, 122 bp, Homo sapiens
tcttctagcgaaagccagaattgggagccgggaggagggcttcctctgttggtctcccaccggtgccacctccgtccagtccacagtcatgactgaacacccaactttccctgttaccttgg

SEQ ID NO: 381968 - DNA, 122 bp, Homo sapiens
tgggagactgggagaaagcagggccacgggagaccttgtttgtgacctgttttctccccccggctccctgcttcgcttgatttcttaccctcccaggtgttcccttgatggagtctcagctg

SEQ ID NO: 381969 - DNA, 122 bp, Homo sapiens
cctcccagagtgacgcccttgttcactgacaaagagacctgtcccaggagtgtcctccaccgagccggtcagctgtgggtggttttcctgttacgacgctcagtagcctgtagcaataacaa

SEQ ID NO: 381970 - DNA, 122 bp, Homo sapiens
accactggtggacagcactcaccagtcattatccccttgtcatggctaacgtctccagatcgcccatggaagatattggatgctggtgcccaggaaatggccttggcagaggggaaaagaca

SEQ ID NO: 381971 - DNA, 122 bp, Homo sapiens
cagccgtggcaaatggtggaacctaagttcaaacccagagtccgaggttgtttctgatgccgagctgcttcccggggcttccaggaggtgtggggttacctagagaatgagggctggaaggc

SEQ ID NO: 381972 - DNA, 122 bp, Homo sapiens
ttccgaagtagtggctgggtcttaaagcaccgtgagtgcaatcaccacttaagtttgcagcgcctttttgaggacctatgccactcttgcattagtcgtttacttattttggccagtcttct

SEQ ID NO: 381973 - DNA, 122 bp, Homo sapiens
ttgttatttagatagtaagtaaactcttctgttctgctgaataataccttggctactctacgctattaaaccacaaagcttcatttagtaattcaagaccaaaatgcaatagtaaagcattc

SEQ ID NO: 381974 - DNA, 122 bp, Homo sapiens
aaggacgctcctccagagggggacgacctatttcctagggtgacatcctcatgaaaaaaccggtacaggatcaggggagagcctctcagggcctcacagtgaagctccagcaggtcccccac

SEQ ID NO: 381975 - DNA, 122 bp, Homo sapiens
cccaccctctctatgtgaatgacaagcacgttacaccaatcagttgcagctgtgacattgcgccgaggctctgaagtgggtaattgcagaccacagctaggctggaatgctgtgtttggggt

SEQ ID NO: 381976 - DNA, 122 bp, Homo sapiens
ctgctccctcgccccctccttggtgtccttcatggctgtgtccggttacagagtagggaccggccagggcaggctggccctggcacatgcagtcagatctgagtcaggcaacagcacccagg

SEQ ID NO: 381977 - DNA, 122 bp, Homo sapiens
cctctcctggttttgttcaggacagcagattagaggcaggaggcaatgacaataaaataacgataaaatcctgagaacaattgggagcagctttccgatacttaatccaagcccttctcgtc

SEQ ID NO: 381978 - DNA, 122 bp, Homo sapiens
cttatgtaagaaatacagggtgggaccaagatggccaactagccaacaagaagcagccaccgtcagaggctcccatcaaaaagaaccataatagcatgtgaatcctgcactggcaactgagg

SEQ ID NO: 381979 - DNA, 122 bp, Homo sapiens
ctcctgtacgtagtcacggtcttgtgctctaaggtgagtggaggacgagcttgggcttagcggcagcccgtatcacatcctagactttttacttcgaggagaagagtctcacgagttgtcct

SEQ ID NO: 381980 - DNA, 122 bp, Homo sapiens
aggccaggagccccgccaccctccacgggatgtgcaccctcagaccccattctctctgttcgtccttccttgaccagtctgtaaaccttcactgtttggggatcgtcctgtccatccatgta

SEQ ID NO: 381981 - DNA, 122 bp, Homo sapiens
caaaaaatgccagataatcactgcttcggctctttggtttaattttttagcttgtcacctcgcctgtattcagggaaagcaagattttctctaaagtcaagattaacttcttggtgccacag

SEQ ID NO: 381982 - DNA, 122 bp, Homo sapiens
gcatcccccttgaagatgttaatatgcagcgcccctagtggccacagctgggaaggagcccgtctctgctggaatctcctgagcgagtttgcagaattgacgggcttggggcatgcaattct

SEQ ID NO: 381983 - DNA, 122 bp, Homo sapiens
tgtcttgcagggatggtggtcgttaggaagtgacacagctgtgggatttagatgagataacggttgtacagccaagataaggcatcattggaatgcaaactgccataagcctgatttatagc

SEQ ID NO: 381984 - DNA, 122 bp, Homo sapiens
cggcctctccagacccacttgcagcctcccggcgtcctctccgggcccagctcttcctcccggctccgtctgcaggcccggctcctgcctcccaacaacctctttggactcagtgcctgccc

SEQ ID NO: 381985 - DNA, 122 bp, Homo sapiens
caggaagttccagaatgacatcctcatggaattgttttatttttctcttgcattatctctcgtctgttgtgattttcttcagccaaagtctccctgtcatgacctaccaaaaaagaaaacat

SEQ ID NO: 381986 - DNA, 122 bp, Homo sapiens
cgctgggtgtacgcactggagtcgggaatttgcacgtgaccacggactttttttcatatccgccgaccatgctgtaacgaggcgtacgcgttactggcgtgcacgtactcagaagactagct

SEQ ID NO: 381987 - DNA, 122 bp, Homo sapiens
tcggtgttcttttcccggtatcccttagttgtaacctgaaagccttcaggaaatcgccctcgccaggccattccgccactctgcccattccttcctcactccctccccctccgcccaatttg

SEQ ID NO: 381988 - DNA, 122 bp, Homo sapiens
aacattaaccaaaatggtcgctaccagagaacgctgagaatcccgccactacgttacgtgcgcacacagaaacgcctttattctgagcccttactggttctgttgcgctgtcattcaatgta

SEQ ID NO: 381989 - DNA, 122 bp, Homo sapiens
caaagcagaggggaggctggggtcacagctggccactgagagacccatccccctcagcaccgtggcttcccagctctccctgtcctcctccccccgacatctgccccttccctcctaacccc

SEQ ID NO: 381990 - DNA, 122 bp, Homo sapiens
agcggcgaaccccgccccgccattgccccgccccacgccacacccacctcggctcggtcccgcctctccccgcgcgccccgggctccacctaagccggcacgaggtccactcatggctccgc

SEQ ID NO: 381991 - DNA, 122 bp, Homo sapiens
tcacaatataatattccatcgtatagcataccaacacttgttttaccagtctgctattaacgggtatttagattgtttccaatcttttgctattaaaaagaatgctgcaacccttgtatgta

SEQ ID NO: 381992 - DNA, 122 bp, Homo sapiens
gacagaggccgctcaccgtcatgttcggctggaaccggtcttctagcaccgccagggccgcgtcctgaccagagcctgaaggcaggagaagcatctgaagtcaaccgctgcgacgccgtttg

SEQ ID NO: 381993 - DNA, 122 bp, Homo sapiens
ggctcatggtggcctggacttccaggttgtgatgccaggagggtcccagccgggaagccccgagcagggctcaggccgcccatggggggtcagtggccagcaccttcccttccgcctgcagg

SEQ ID NO: 381994 - DNA, 122 bp, Homo sapiens
tcctttcatcctggaatggaaaagtcattacaggaaagagtgaatgttataaaggttaaacgtgagtgactgatgatgatgtatcagggaattccctggccctgtaaggctgtctggtatca

SEQ ID NO: 381995 - DNA, 122 bp, Homo sapiens
tccagaagccccgggaatcccctgcatgaggccttttcttaaagagctggcgctgtctgccggcccctcccacacgcactcacgggagaacgtgggggaacctgagggtgtggggcggttag

SEQ ID NO: 381996 - DNA, 122 bp, Homo sapiens
ccgggtgcactgcgggctgggcagctctcccactacgcccaaagcccaggcggccgggaccgccgtcccaaagtcacaaaccacacccgtgaaggacgccctccgcaagacagagaggaggc

SEQ ID NO: 381997 - DNA, 122 bp, Homo sapiens
tccagtacctattgcatgaccccccacgtccgcctcccgccattgccagcaagtgccttgcgcgggtacctggctgcgcttattaatccgttaagctcactctgtcaccggcgccattaagt

SEQ ID NO: 381998 - DNA, 122 bp, Homo sapiens
tgaagaaacatggtgctattattcaacccgccatgcgttattttgcttacattagtgacccgttaatacacttaagaaaagaagtaatttgcatcatcatccattgaaattgacaagactgg

SEQ ID NO: 381999 - DNA, 122 bp, Homo sapiens
ctcacttgtttgatcagtgtacaaatcaagtaggtcatagaaaatgaccacagatcatcacggactaatccagtggtgaggtgaatcacaaccagaattgcagagacggtatttttactgga

SEQ ID NO: 382000 - DNA, 122 bp, Homo sapiens
gggggctctgacctacttgaaacaatgccctctaatgtgcctggtcattaggcacccccccgcccagccctagccaggtgcccctcaagcttgatggcagcaagagaagcttcttccaggct

SEQ ID NO: 382001 - DNA, 122 bp, Homo sapiens
ctgcttggcgataggcgattgtctcaccgctcggcgataggcgatggtcttaccgctcggcgataggcgaaagtcccttcgtggttgccaagatgtgtccggaattggtgggttcttggtct

SEQ ID NO: 382002 - DNA, 122 bp, Homo sapiens
gcaggggcggggggctccctgggaacccttctccgaggtcgcaggtggaacgggcttgcgcgtgagaacggggcctgggcttaactcactggggcctcccccgggtggccgaggttcttttc

SEQ ID NO: 382003 - DNA, 122 bp, Homo sapiens
ttttctctgtttgcttagctggcattcagtagtctgcacatcaacaggaaagaaaaaatgcgaggaaagtcgtttatctgctaaagaaacacattcctgatagtattcacctgctaaaaatc

SEQ ID NO: 382004 - DNA, 122 bp, Homo sapiens
ccagcactgtcacatccatcgtgccttgaggacaggcataaatttacggccttcctcctgcgctcccggcctgctcctagcctttgactagagcctgcgcagcatcccagtcccaggctagg

SEQ ID NO: 382005 - DNA, 122 bp, Homo sapiens
aggattttcagagttgagcgtgtgtggtggttagctgtattcctccactgggctgggccacggtgcccgggtctgatgggacattactctagaggcctctggaaggcgttggatgggtgggc

SEQ ID NO: 382006 - DNA, 122 bp, Homo sapiens
ggctgttattgagccttttcctgggaaggggctgctgctgtgcaggacttgtggtggccccgggacccctccagagaatgtgtacttcatcctgggctcataccaccctctctgcgtggggc

SEQ ID NO: 382007 - DNA, 122 bp, Homo sapiens
gacagaatgaaaagaggtttttgttggcttttgttgttgttggggacggagaggggggtgcgtatttacatcctccacacttaggacagttcctgagacacagcagacatttgccagtattt

SEQ ID NO: 382008 - DNA, 122 bp, Homo sapiens
ctcctgagaccgttgctagagaaacaagacaacatccaagttctccacatcatggttttccgggcgccagccaaggcgctccgggggcgtggttacgtgggcgacgcacggagggggcgggt

SEQ ID NO: 382009 - DNA, 122 bp, Homo sapiens
gggtgggcgtggcgggcggggggcgggcaatgtgaggtcccgccccccagagacagggggcggggccctgcagccccgggtcgccccctgtccccccacttcccaccacctccccccaccca

SEQ ID NO: 382010 - DNA, 122 bp, Homo sapiens
ctctcctttgttcactcgcccttcttttcagaaagccaaataaacagctcctttgatgtgcggcggctgcctgcgaggagaagtctgagggactctggctaggcgggcagcgcagatggaag

SEQ ID NO: 382011 - DNA, 122 bp, Homo sapiens
gccgcgccgcttgtcctttggataaaccttggcggttcctcctctggtgtccgtggaccccgccgcggcgttctccagggccgcggacctttgcccaccggttgcgcccgctgccccgggca

SEQ ID NO: 382012 - DNA, 122 bp, Homo sapiens
cgtccaaacacccgctcctctcccgccgggcgggctcctttgtcttctgggctttcgtcgcgagatggaacgctgggtcagtgcatcccagcaaaacacgttaggagtaaacgaaggccttt

SEQ ID NO: 382013 - DNA, 122 bp, Homo sapiens
ggaaggaagacacgccaggccggaaatcagaatgctttccgggcactccactcatcctggcgtggggctcaggcttggctctgccgcagtccacaccatctccccaacacagaactacggca

SEQ ID NO: 382014 - DNA, 122 bp, Homo sapiens
cagattagcatataaccagttgtggtggttatagagacttgggtaacaaattggggagggcggagagaaagagaacaagctggatgcagttcacctttcatatctgttaatatactgttttc

SEQ ID NO: 382015 - DNA, 122 bp, Homo sapiens
aatgagctaaatgagaaaaatgacaaaacgagaatgaaattgtcatcagacaaccgcccccgcgccgtccttatccagagcgtgagcccagagcggggatggagatggtgggagggagggag

SEQ ID NO: 382016 - DNA, 122 bp, Homo sapiens
tgaaggcgtcttgcattgcagctccgttgcagcgcagaggcgcaggaaggcagactaccacgagcctcgggctgcggcctcgccctcctggtcgagcctcctgccctccaaccctctgctcc

SEQ ID NO: 382017 - DNA, 122 bp, Homo sapiens
ttattttttagcccttctgtctcccacaatacaaatttaaacttccaagggcaggcaaagcgtcttctgtgcctctcattgctctgcaagtaatgggtgatccttagagtcatgtttactca

SEQ ID NO: 382018 - DNA, 122 bp, Homo sapiens
tttgaagaggctgtaaaaaagactatggcccatctcattttggtcccagaggggcctaggcgcagccccgggggacccggtgcccagagggatggtagggtgcttcaggcccggacctggcg

SEQ ID NO: 382019 - DNA, 122 bp, Homo sapiens
acgcggccacgcgccctgtagataagaagcctcagctctgggtttctggcccaggtgccacggagccacgcgccctgtagataataacccttagctctgggtttctggcccaggtgccacgc

SEQ ID NO: 382020 - DNA, 122 bp, Homo sapiens
ccacagatccaaagagcctcttggaatgggcactcgactgttctgacgttgtgattctctcgggagtttgaagacagaaaggaaaggggagaaacctgcagagagcatcaaaggatgggggg

SEQ ID NO: 382021 - DNA, 122 bp, Homo sapiens
ggtgactcactctttgaggggccctggctatttgagtaggtctttccttctctctcttaacgtctgtttttttcatcaaacactttggaattcagatgtaagatagtcgcctcttcaagctt

SEQ ID NO: 382022 - DNA, 122 bp, Homo sapiens
ccactgcagctgcctctttgaagcggatccgtgaagtagaaatttggagacgtaagctgacgtggaaatctatccccatccttagcagggaggtgctggtcatgtgacccgatgttgaaatt

SEQ ID NO: 382023 - DNA, 122 bp, Homo sapiens
ttacaatgagctcttctcctgctcgaaacgagccagcctgctgagcttgctgccagggcccgtcgcactgcctgcactgtgtttcccgtcgcacagcctgtgatgtgtgtttcccgtcacac

SEQ ID NO: 382024 - DNA, 122 bp, Homo sapiens
ggccctgtggagtcaggatgaggacccagatctgagtcactatcatgccctttggcctcacgggaaaccatgttagaaaacggcgcattatcctacaggcctcagtgcacaaccgtggagtc

SEQ ID NO: 382025 - DNA, 122 bp, Homo sapiens
cccgctgctgactcccatccctccggatccagcagggagtcagctgtgctcctgatctggcgaggcacccattgcagctcctgatcagggtaaaggcttgccattgttcctgcacggctaag

SEQ ID NO: 382026 - DNA, 122 bp, Homo sapiens
ctccgtgtgtgggggtggggagcgggacgtccttagctcctggtgttgcggggagcaggacgtccttagctgcggatgtgggggagagcgggacgtccttagctctgggtgtggcggggtgg

SEQ ID NO: 382027 - DNA, 122 bp, Homo sapiens
aaaggtggacgcctgatgatttcccagggatgctctcaagattgccctggtttggccaggcgtggtagctcacgcttgtaatcccagcactttgggaggctgaggtgggtggatcacgaggt

SEQ ID NO: 382028 - DNA, 122 bp, Homo sapiens
gtgtcggagctcagcccgcagtggttgcagctctcactcgccgccggctctgatcgcccgcggtcggtttcaagatagggaagcccacattccagccacagtgattaagaggtgtcagctaa

SEQ ID NO: 382029 - DNA, 122 bp, Homo sapiens
gcacggccccacagcactcttccctggcctctgactcttcttctgcttttaaagggctggcgtgattcgaccaggcccacctgcatccacggaccctaaggtcggctgacctgggacacacg

SEQ ID NO: 382030 - DNA, 122 bp, Homo sapiens
aaacttaggcctcttgccatgggtctgagaaagccctgccctgtttaatcacctccctgacgcgtcccagcctcaacactaaaggcaggagggatactagagaggcagctgactgccccctc

SEQ ID NO: 382031 - DNA, 122 bp, Homo sapiens
tatggcatgagacctggaaatcatgatgagtttctccttgtttgtaaactgcctctgcaccggctgaggttgctcggccgtgggtggctcctggctggcaccctccggcgagctctgctccg

SEQ ID NO: 382032 - DNA, 122 bp, Homo sapiens
ttatttgttgcagagaacagatatcactctgttgcccaaggtggtttcaaacttctagaccgcagtgatcctcctgatttggcctcccaaagtgctgggattgcagaagtgagcccccacac

SEQ ID NO: 382033 - DNA, 122 bp, Homo sapiens
ccaatcagagacgctgggctgggaaccgtccaatcaggaacgcagctggtgcggatagggcggcttccgggatgtggcggggcctttgtctctcgctgcagcctgagctctaggtcttgttt

SEQ ID NO: 382034 - DNA, 122 bp, Homo sapiens
ccgggaccaacaccgagatggacaccctgctggtgtctaggtaggagttggagtgcgtcccggtctccgccaacccagtgctgtttttactgtgcgaagttaacgtgggcgagatcctagcg

SEQ ID NO: 382035 - DNA, 122 bp, Homo sapiens
tctcactcttccagtttccaacaaccgtgagcatgaggaaaatctcccctccggattcctcgcccagcctcggatgtgagttacaggcattagagggaggaggaggaggagttgaagtttgc

SEQ ID NO: 382036 - DNA, 122 bp, Homo sapiens
cgagcagcctgggatctccgatgaggcctagcgtctgctcatacccagatgcacgtactgcgccagggtggccgcgtgatgggcgggggtaatgacagctgtcgggtctggtttgacgtcag

SEQ ID NO: 382037 - DNA, 122 bp, Homo sapiens
gcttcatttggagtcaggcctggctgttgctcaggtgaccagcttgtgtctctgggagggcgctgctttccccggccacccggcgcgatgatccagaatgtcggaaatcacctgcgacgggt

SEQ ID NO: 382038 - DNA, 122 bp, Homo sapiens
gccccggcctttgtttcaccctcgcgcgctccttctccggcatactcgctctgggtccgccgctgccgctcatcatgaggtcctgctcgggcatcagcttggaagagctttaccacttcccc

SEQ ID NO: 382039 - DNA, 122 bp, Homo sapiens
tgcaaggtggaacaagcccagggttccagtcgtgacctcccgagttattcattcaaaaagcgatttttgagagggcctggggtggtggcttaggcctgtaatcccaggacttgtgggaggcc

SEQ ID NO: 382040 - DNA, 122 bp, Homo sapiens
ttaaagggaatgggggtatgttcccatgacagggctggagagtgaccaaggagggccaaacgaccacaggccctggactcatgccatcactgcaggcctgctttacacgcgctgcttttaga

SEQ ID NO: 382041 - DNA, 122 bp, Homo sapiens
cctggagcctggagcccccagagcctgggctcagctgctctagcccgacatttgggattccgcaagcactttccttccaaggttcagctggccaccagttcagcctagtcctatcttcccgc

SEQ ID NO: 382042 - DNA, 122 bp, Homo sapiens
gttgctgcagacttgaaaccggctccaaatccggcccaaacatgggctgaaaatatggcgcgctaatctgctgcttcccctcctcctcaagttctttctgactcttcccacctttcccagtt

SEQ ID NO: 382043 - DNA, 122 bp, Homo sapiens
aggttaagtctcttaactcacggcccagatggtggtaaatgctcctccagttgttctcaacgttccaaggaagctgtttttttcttcactaattgctggcttcctgagggttaggagtaaag

SEQ ID NO: 382044 - DNA, 122 bp, Homo sapiens
ctacttggcctcagagccagcgccgggctcctgtgtgtgtgttaaacaggtagtctcttccggtacctaaaaccggtaggagagagaggagagcagggggtgctgctggccccagaagaact

SEQ ID NO: 382045 - DNA, 122 bp, Homo sapiens
attttgggaaccaagcctggggccccccattaccctgtacagagtcaggacactgttccccgaatcctagctgctttggctccagcctcagctcagagggccccagatactgcttgggcaac

SEQ ID NO: 382046 - DNA, 122 bp, Homo sapiens
tgtaccaccaccagtggagccaggtaaggatgcctctctgctagaaacagcacatatggacgaagccacaagctatggctcatcccaacagaatcttactagctccctagtaaggttagcta

SEQ ID NO: 382047 - DNA, 122 bp, Homo sapiens
tagaatcaagacacggtgttctgttttgttttgttttttagagacagggtctcactctgtcgcccacgctggagtgcagtgtcacaatcgtagctcactgctgccttgacctcccgggctta

SEQ ID NO: 382048 - DNA, 122 bp, Homo sapiens
tcacgatacagggcaacagcgccacctcacggccggccccgtagcagcggcctccattggcgcctaaaaatggtcaggattcacattcaggtggattattccgcgccaggaacattctccac

SEQ ID NO: 382049 - DNA, 122 bp, Homo sapiens
tcaagaccagcctggtcaacagggcgaaaccttgtctctacaaaaattacaaaactttgccggatgtgatggtgcacacccgtagtcccagctactcaggaggttcaggtggaagaatcgct

SEQ ID NO: 382050 - DNA, 122 bp, Homo sapiens
tccagaagggcagggcccgggcaatggtgtccttgaggctctcgcaggtggggagttccccgggcttcaggcctgcgtaccgacgctcctgggggacacaggcacgctgctttccctcccaa

SEQ ID NO: 382051 - DNA, 122 bp, Homo sapiens
ggccccagggggtgtggtgatgttcagcgccttttggtattctattctttcctccagagtcgtggggaggacaccagccagatgtccctgcgggtctcctcagctcctgagctcctgggagt

SEQ ID NO: 382052 - DNA, 122 bp, Homo sapiens
gaggcgggaggctgggcgagaggagccggcggggcgggggcctgggccgtcacgtgggtgcgccgcgcaggcgccgggcgggccagacgtaggcccgggggttcccggcctggccgggtagc

SEQ ID NO: 382053 - DNA, 122 bp, Homo sapiens
gtggctactgcttccctctcctaggaaagaatgaaataccttaatttttcctgtttcttccgttgtttttccatgtgtctaagagtttccaatcttgattcaggagtaaacaaacagggctt

SEQ ID NO: 382054 - DNA, 122 bp, Homo sapiens
tctcctgagagcctagccccaaacttctatagagacttaacttctgcttttctggacacgcgtgggcacccagaaccccgaatggggaggaatgctgtagacgccctgctgccctccagccc

SEQ ID NO: 382055 - DNA, 122 bp, Homo sapiens
gcaccggagcccgcgggggcggcagagacccgccccggcccgcaggacaccccctcggaacgcgcggccccccggctaagtcatgtttaacagcctcagaaattatcttgtctccgcgttct

SEQ ID NO: 382056 - DNA, 122 bp, Homo sapiens
gtgcagcggccctgccccacaggccccacgagggggcgcccgtgtggcgtgcctgaggcccgctcctcgcaagcttgcctgccccgaccctcccggcatcctcaatgccgcagcgtgggtgt

SEQ ID NO: 382057 - DNA, 122 bp, Homo sapiens
tggagccccacagttagggttacgggtgggttagcgatcaaggcgtggaggtccccagcgcgtgagcaaacacggtgggcgcagagctgctggagactcactggccagacgtggatgcagcc

SEQ ID NO: 382058 - DNA, 122 bp, Homo sapiens
tggggataattatctcatctgccctctttcaggcaaaactcagagtctttggagggccttcgctttcccaaagtagcttaattttggcccccgttcttcgtgcctcctaggttttgttgggt

SEQ ID NO: 382059 - DNA, 122 bp, Homo sapiens
tggggcacagagcagggtggagaatgaatctgacggggcaatggaagatgtttcacacaccgtcctaggtgtgctgctctgttctgacccacagggccaggagaaaggccagaggtcttggg

SEQ ID NO: 382060 - DNA, 122 bp, Homo sapiens
aaggagaaaagtacctctactttgccactgctatttattttcctaattctgttaccagggcggtccaggagatacagctgaggaagctcattattttcttaaacagctttctttttttctat

SEQ ID NO: 382061 - DNA, 122 bp, Homo sapiens
ctggcagcccggcccaataccagcggccgtggggcctgacctggactgaaccccggagcccggacaggctggtcactgcagggcggggcctgaattctgcagctgctcctgaggccaaaagc

SEQ ID NO: 382062 - DNA, 122 bp, Homo sapiens
cgctggatctggccggctcagcgctttcccatatataattacaagctgctatccatcatgcgggcgccgcggcgcggacacacggaaaggcagcagtaagcacttccactaatagaagcagg

SEQ ID NO: 382063 - DNA, 122 bp, Homo sapiens
caggcggcgcagggtgagtgtgggcgcggccggtcgggacctgttaccctgaggcaggggcgcagcggcggcggggccgtccccggcggtctctcgggtcgcgttcccggccctgggagcct

SEQ ID NO: 382064 - DNA, 122 bp, Homo sapiens
ctgtaaataagggaatttcctgaatctttactcttacagatttaagatcctggcattctacgtttttccatgtctctacctagggaggagcaggcaccatctggcaccctgactgggtgggg

SEQ ID NO: 382065 - DNA, 122 bp, Homo sapiens
ctatccagccacacattcattcagcacacagtcattgagcacctagtatatggcaagcaccgtgcaggttgctggggacacagtagggaacaaagcaggcaaatgttctgtctttaggagtt

SEQ ID NO: 382066 - DNA, 122 bp, Homo sapiens
gcccacacgaactcctccggcggctgcgtgcaggcctccgccagccactgcgccaccgtgcgctctggaacctcggctgccagcgccactgcgcctctccagggcgccccgggcagtgtgcc

SEQ ID NO: 382067 - DNA, 122 bp, Homo sapiens
tggccaccagtctgtcctgtctgtctgtcctgctagcaagttctgcatgtggcatgtcagcggccatcttcatgttcctgctgggcctcttctttgatgtcataactatgaatatgttgccc

SEQ ID NO: 382068 - DNA, 122 bp, Homo sapiens
catagaacaaccatggttacttcattagccaaatgtcacctctcattgtggcctttccatcgcatagctggctgagttaggcaggcacaacccttcattcagaaaagtaaactcacccccaa

SEQ ID NO: 382069 - DNA, 122 bp, Homo sapiens
ccaccgccccgcccccaggattcaacccacgcccccaccccgcccccaaggtcaatcttgcgccaccgccccgcccccaagggctagcctcgtgccaccgccccgcctccaagagccaatcc

SEQ ID NO: 382070 - DNA, 122 bp, Homo sapiens
cacgggtggagcagtaggagaaccctgagctccagagtgaatctggccagggttcgaatccgtatggctctcttaccgtgggcaagtcacggttcctctctggccctcagtttcgtcttcta

SEQ ID NO: 382071 - DNA, 122 bp, Homo sapiens
ggctgaactccattctaggctgtttcaactctacccttggcctcccagctgacaggtgcacggtggccatcctttggcatttccactctggcactcgctaatgatgaaactgaatacccaag

SEQ ID NO: 382072 - DNA, 122 bp, Homo sapiens
atacagttttccatctctatgatctcgtgatgtttggtatctagtctctctttcctaatacgaatagagtactattaggactccaattgtcaataccagtcctcaggacctttcctaacttt

SEQ ID NO: 382073 - DNA, 122 bp, Homo sapiens
gtagagtgaggaagaaataagctgttttcatgaaccaaacacaaaggcccaaagacgacccgtgagctctcctcatatgtggagtggttgttcattggggtgggggtgtgggtggggccagt

SEQ ID NO: 382074 - DNA, 122 bp, Homo sapiens
tgggaggtggccgggggccagcgctgctcccggggtcagtccccgcaccgacacccggctcgcaggaagggtctgccagggaccagccaccccgacccgagcgccccctgcctcgaggcgca

SEQ ID NO: 382075 - DNA, 122 bp, Homo sapiens
ccgtggccagggtggcgggctgaacggccttcttaaaactccttccgtggccgggaagcccgctggaccagagtagccgtggcctcgggagcgcgccggggccgcgggatgggcgcgggggt

SEQ ID NO: 382076 - DNA, 122 bp, Homo sapiens
gaatatgtcttgagacaccaagatataggccaatcaattttggttttaatcaaaccaaatcgagaaatgcattttcatcatttgcatcaataactgcaatagatacagttcttaacctgttc

SEQ ID NO: 382077 - DNA, 122 bp, Homo sapiens
acttaaattttctggaattgcttttgcagggaatttatcatgaactcaccagtcccttcacgtggcttccattctctcaaggtttagttcattggtttgggggttcccctccctactttttt

SEQ ID NO: 382078 - DNA, 122 bp, Homo sapiens
cgctgcctcgtggctggagcctccagggcgggagcgtcccgggggctggaactgaggttacgggttcgagccctgtggagggatcccccagcccccccggtagggacacttttgtttcctga

SEQ ID NO: 382079 - DNA, 122 bp, Homo sapiens
attccgtaaacatccagtgcttgaactgggaggaagtgagagatagtaatgtgctcttttcggtgacttaaaaactgttctctgctgaagaatgcttcggtttaacgcttgccatctttttc

SEQ ID NO: 382080 - DNA, 122 bp, Homo sapiens
aagttcacagtacttggcacagagggtgtgtaactgtgagctgtaattatctttgtagcacgtggatgcacatggatctgcatttttacacagctacatgtgtgcaggtgtacaagcccatg

SEQ ID NO: 382081 - DNA, 122 bp, Homo sapiens
ttcactagaagggcaggcagtgcccattcatcttgtcagcggcaacctcagctgtggacccgaatggagtgagcaaagggagtccaggcctccactctgctctagagatggcagtgtccagg

SEQ ID NO: 382082 - DNA, 122 bp, Homo sapiens
gctttctagccgtactttgttcagctcttttatctgtgtcccctatccagttgccctttccgcagtccctggcacttctattttataccatcagttgcctttttgttccatgtcttttatct

SEQ ID NO: 382083 - DNA, 122 bp, Homo sapiens
cacttacacttgtggacactgcggccggtgtcctgaggacgtgtgttgggaattcagccacggggaatggaggtcccttggttcatatagtcacaggctctgtattctaaccccagctttgt

SEQ ID NO: 382084 - DNA, 122 bp, Homo sapiens
tgagtcacctggaaaggacgtaaacagattgagtggggggcccgcttcaggtcctggagccgggctcgcttcggggttctcgccgccctcctctgagaggagaggggacgggaggcgtggcg

SEQ ID NO: 382085 - DNA, 122 bp, Homo sapiens
tccagtggtgtggggcatggggcttactggaggccaagccactgggtccagctgctccagcgctggctgtgggccccctgggagctgccgattcctccctgacctgccccagagggtgcgga

SEQ ID NO: 382086 - DNA, 122 bp, Homo sapiens
ccgcctggcttggccgcagccacagggacatctggccctggttctgagatgtggggagtgcgggcgggctcgagagttgcctggaggctgctgcctgcacacagaaggcggctgcagcttgg

SEQ ID NO: 382087 - DNA, 122 bp, Homo sapiens
tatgcagttgaactggattctgagtatatctgtggatagttcctgggagagtcgcagatacgacacggggttgtcacattctctatgggtctgtttcctcatctttaaaagccatctctgcg

SEQ ID NO: 382088 - DNA, 122 bp, Homo sapiens
gcctgtgaccctgcagcggacgcccttcaaagtccgtgtggccgcatttggaagcctgggcggcgtggagacggcgccttcagcttgagatagtaagttgcccaatgcctgcacctgtggag

SEQ ID NO: 382089 - DNA, 122 bp, Homo sapiens
gcgcccgacactgacgtttgcggcggcgcgcggaagtgacgtcaggtcccgtcgtcgctgcgtggaggggttccttctcgctaacctcttcgcccggaagtggcaacaagactgcaacatcc

SEQ ID NO: 382090 - DNA, 122 bp, Homo sapiens
tctttttcagcctttcagcttcctcagacttttgggggtaggtttgcctaggctgcctaccgcagcacacccaggaacatgctggctcctccatcactatcctgctctgaacatgcttttga

SEQ ID NO: 382091 - DNA, 122 bp, Homo sapiens
ggggctcccaggaagcggacgcccggtccccacacagcgccgcggccgcccctccacccccgcgggagcccctgccccacgctaataaaatgtgttgcgaggctgacgctggtgtgtatgcg

SEQ ID NO: 382092 - DNA, 122 bp, Homo sapiens
gaaacaagaaatcaagcgcatccaggattcatttataatctctctcgttgagtagaagtccgcatctctcgatattgtctggttacctgcatgaagtattctaaaggaggaaaatagctcaa

SEQ ID NO: 382093 - DNA, 122 bp, Homo sapiens
ggctggagagtccatatatgggatgatgtcaccctggggaggtttgggtatgcgctgtgccgctggagagaccgctagaatcgcctgctctcagacatgggtctgtgcataaaatggtacca

SEQ ID NO: 382094 - DNA, 122 bp, Homo sapiens
agggaggccacctggtgtgcctggagcctgggcaggggactgaggtctctggctctcccgcgctgcagcagggcggtgccacggcgcgttctctggccgcaggcgacgggggtggctctggg

SEQ ID NO: 382095 - DNA, 122 bp, Homo sapiens
aatgcagcactatttttaacgagtgaacaaagaaggtcaaacaagtcctgtgcgggatagcgcccgctccttccaagcagacagacgctggaagcgtgactcgtcccatgagggacgcagca

SEQ ID NO: 382096 - DNA, 122 bp, Homo sapiens
gcgctcggctctttccgccgccgccgctgccgcgcggtggcccgtgcgcctcggcaccttcggcaatttccgtcgggccccagccgccattttctcgccgcttgtgtggctcgctggctgcg

SEQ ID NO: 382097 - DNA, 122 bp, Homo sapiens
gctcatccctgaggcatgtggaaccaggcgctgtgctcgtggcccagccagggtggtaggcggggccaggcccgggacatggtgtatgtcaaggccacgcacaacaggcctgatgttccagc

SEQ ID NO: 382098 - DNA, 122 bp, Homo sapiens
gcgggtgatcgagccaccctgcccaggggcgcccagcactggtaggtgctgggggtggggcgaggctttggggagagtgtgcgtggggtgggagtagggggaagggaatttcctcggaggtt

SEQ ID NO: 382099 - DNA, 122 bp, Homo sapiens
tcactcgccaaggcggcggggccgggaggggccgaacctgtgcgcggtgaggttcggggacggtggggagcagggtgcgctgcctttggagtgatgctcgcgggagcggctgcgagggaagg

SEQ ID NO: 382100 - DNA, 122 bp, Homo sapiens
ttacacacccaccatttcctccatttcaccccacacacctacccagcctgtccccacgcacgatccggccagggccacacaagcctccatctgggacaacccttgttcaggacatccccagg

SEQ ID NO: 382101 - DNA, 122 bp, Homo sapiens
aggaaaacacaaacggtgcggcagagctccccaatgggcgaatgtggcccccaccgggcacgcgtgaggtgcaggggaccttgcacatccctgtttcgagcccaaggggtccttcaggccca

SEQ ID NO: 382102 - DNA, 122 bp, Homo sapiens
cttggccgaggtgctcaaactttgtctctggaccctgcgagctggcaggttctggggcagcgctcgggcctccgctcgtggtcgctgtcaggaggcgctggggtgatggggcgagctggaga

SEQ ID NO: 382103 - DNA, 122 bp, Homo sapiens
cgtggaggctcccaggcccgaggtgggaggctcctccctcccaaagctaaacagggcttccggggaggagaagtggggggagcttcgggctcaactctctcccgggccccacaaaggtgagg

SEQ ID NO: 382104 - DNA, 122 bp, Homo sapiens
ccaccccccgtttttttttttacagctgaggaaacacttcaaagtggtaagacatttgcccgaggtcctgaaggaagagagtaaagccatgtctgctgttttctagaggctgctactgtccc

SEQ ID NO: 382105 - DNA, 122 bp, Homo sapiens
acagactctagagactgaaattcaaggcccagttcttgctgttcctctctatctaagagacgtgtgggatctttgggtgatgaaatactttttctctgcaatttaagcctaatctgccctaa

SEQ ID NO: 382106 - DNA, 122 bp, Homo sapiens
ggatgagaatcctgacattgagtgtgctgactgcccaattggtttctacaacgatccgcacgacccccgcagctgcaagccatgtccctgtcataacgggttcagctgctcagtgatgccgg

SEQ ID NO: 382107 - DNA, 122 bp, Homo sapiens
atgtataatgagaagtataactattcagaagtccaagcacttgtgtgtgcatggtgctatcgtcttgctgtaggcaaacctacatgggaatccaccttgacacataggccacttcctgagcc

SEQ ID NO: 382108 - DNA, 122 bp, Homo sapiens
tagaagtgtttcttctcttgacagccctgctctaggggttgaagaatgaccaagttgattcgggttctcaaaacttaatcaagcatcttcctaaatgggattattcacattcctgcggcatg

SEQ ID NO: 382109 - DNA, 122 bp, Homo sapiens
tagggcccctgaaatgatacgctgtcgtacctgcctcccgaaggggctggctgtttccgtcggcatcactgatagggcccctgaaataatacgctgtcgtactgcctcccgaaggggctggc

SEQ ID NO: 382110 - DNA, 122 bp, Homo sapiens
ggtggagcaacgcagagcccaccggcgaaagggctggatctgcaggaagtgttgggatcccggtacgttcgaaggccgcagggtcgaggccaggaggtttggatgctgaggtttgcgtgcag

SEQ ID NO: 382111 - DNA, 122 bp, Homo sapiens
aggatacaggagagcatttgccaccaggcggactccctgtacccacccggccacagggggcgatgttcctgggagacaggaaatgcccaggggctgggagaccctctgctcttctgctccct

SEQ ID NO: 382112 - DNA, 122 bp, Homo sapiens
caattagcgcaccactgttccgccactattgggggtcacaagttccaatcattcttttaacgtgtgtttaggccatggatttttctggggctctattattctgggtttgccctgggtaacca

SEQ ID NO: 382113 - DNA, 122 bp, Homo sapiens
gctctactcccctcccgctcagtgattaaacaggtgatggctgagcacctgccagggcgccggcggtgtgcagggccccgggctccaggccttgctaagcgggctggcccgctcccggggct

SEQ ID NO: 382114 - DNA, 122 bp, Homo sapiens
gcgatgcgggtcagggtgtgtaggttccctgcaggtcgccccaggttttatcctgggaggcggaatgccgtcagaccagtccccaggtggctcccgcggccaccccggctgtgggtcctggg

SEQ ID NO: 382115 - DNA, 122 bp, Homo sapiens
cagcggcccaggcactggcaagggcaggctgaaatcaaacctcggattttggaacctccacgcctgaaaccctaaaccagcatcgaactacaactcccatcatgccaggcggccgcccggtt

SEQ ID NO: 382116 - DNA, 122 bp, Homo sapiens
gaaggggtgggtcttggcatcctcgtctgtcaacacctactgcctggtgatgcgtccacgcgtggccttcgtgccatccgtgcccaggactccgagtccagcctgagaacaggcccccagag

SEQ ID NO: 382117 - DNA, 122 bp, Homo sapiens
gggtcacacctgaacgctgctgccagccgatgccccagccctgcacgccacccactatcccggcacgctccctctgcagatggtcgccgcacctacaagccctggccgcacccaacctgtgt

SEQ ID NO: 382118 - DNA, 122 bp, Homo sapiens
gcaagcagggggcgctgtggggcagtcgccacatgagagcccacggcactcaccaaacagcgagcaccctggaccctcggtgagaagtgagcgcactgtggcccccagccccccatgagcct

SEQ ID NO: 382119 - DNA, 122 bp, Homo sapiens
ccttcagcccagcacctgagcacatctgtcactcagggcctgagggggcgggttgttaaacgttatccaatcagggacgccgggctgggaacggtccaatcaggcacccagctggagcggac

SEQ ID NO: 382120 - DNA, 122 bp, Homo sapiens
ccccggacacccggcttcgactggttatatcttcggtgttcttttcctctcttcttctttcgcggttcagcatgcaggaaaaagacgcctcctcacaaggtttcctgccacacttccaacat

SEQ ID NO: 382121 - DNA, 122 bp, Homo sapiens
agcagtccagaagccgaccccaccccctgcacctcggggaagagggaacccgggtcagcccgtagcaagaatcattcctgactatcccaggagaccacggcagaccaaaaacacctctctga

SEQ ID NO: 382122 - DNA, 122 bp, Homo sapiens
cccaccaccccaacactgttggggggcagggagggtaaaaggagctgagggaggttagcccggagaaaacctggctgccacacctatgtcgggagctatgccgaggctttgcacacgttacg

SEQ ID NO: 382123 - DNA, 122 bp, Homo sapiens
gcatggccagctgccagccaaaggctgatttccctggggggacctggagtgtgacttcgacgtccatggcagggaacccccaattgtgagctcatgttcgcatcccctgggatcttgcttta

SEQ ID NO: 382124 - DNA, 122 bp, Homo sapiens
gccaggcgtggtggcacgtgcttgaattcccagctactcaggaggcagaggcacgagaatcgcttgaacctgaggaggttgcaatgagccgaggtaaagccattgcactccagcctgggcaa

SEQ ID NO: 382125 - DNA, 122 bp, Homo sapiens
ggcaggcggtggacgcaccgcgggctttttctgtttgaagactacagcgtcacacagcaacgcgcgcgagagaagagagtattctcgcgagaagtccaggggtggccgtgatggcggcggca

SEQ ID NO: 382126 - DNA, 122 bp, Homo sapiens
gggaatccgtttgcagagcccttttctcctgcagtcctcagggaaattatccagattccacggggagaaaacatctttggaaatacgctgctctctccctctgtccctctagtctgggggac

SEQ ID NO: 382127 - DNA, 122 bp, Homo sapiens
cgttagaacagctttcattactcactgaaagcactgggaatctggaggctgtcctggacacgcacatacaaatggcagcagaacgtatgcccaggtcaaaggcactttgaattcattttgtc

SEQ ID NO: 382128 - DNA, 122 bp, Homo sapiens
tggccgtggaacggtgatgcatagcgtgctgacgtcccatgcctctacggggatgggatgcgatggtgtcaggcctctggcttgggcgccgcccctcggcgacgtcactgggtactgtgacg

SEQ ID NO: 382129 - DNA, 122 bp, Homo sapiens
ttagtggactctgtgtccttcctgagagaggagggccctgggttaacagcagctctgggccgggggcctcacccctggatctcattcagtccccatgaagtgagatgaaggaatggagacca

SEQ ID NO: 382130 - DNA, 122 bp, Homo sapiens
gagagttgtctttctgtgattttgaattctaggggtttgatgtgagaatgaaatttaggccgattttattgttttaatgggaagttcatctgcatgatctattaacaatgaaatgcaagagg

SEQ ID NO: 382131 - DNA, 122 bp, Homo sapiens
aacaagagggcagtgaaggccagcgagcccttatgtatggtacagaggtaggctagaccgcggcgttcgattggatggctatggtagccaatcagaaaaagaacctggcactcctaatttgc

SEQ ID NO: 382132 - DNA, 122 bp, Homo sapiens
accctgatcgtgcgtatcgtgtttccttataagcagcactcgcgatttaaaaacaggtcccggtgcccctcttgctgatcctctctgccattagcccgcttaattccctttttgtaaattcc

SEQ ID NO: 382133 - DNA, 122 bp, Homo sapiens
agacacagccacacctagaacgttcacgcagtggagccacaacagcaagatgatcaggagcgcggcaatgtcgttggtgatctgtttcgctgcgttggaattgttgggcgaggcaggggctg

SEQ ID NO: 382134 - DNA, 122 bp, Homo sapiens
attaagcatatctgaaaaaagcaagtaaatattttaacaaaactatgactcaggaaccttcgagaagattagttccccacttagatttttaaggagtaaaaagggctgagttatgcctttaa

SEQ ID NO: 382135 - DNA, 122 bp, Homo sapiens
cattgataccccctgcctcctttgtgtgtgaaggcacgggcttaccagtgcctcggtccccgaagcccccgggtccgggaggggccagttaaagcattcctgtggccctggcagggtggccc

SEQ ID NO: 382136 - DNA, 122 bp, Homo sapiens
gctcattcatgagcctagggtgatcaggcctccggcctataaagaactgcaggatcagtgcggctcttttctcgagatagtaggtggctctgaaaagagcctttatgtccatcaaaggggcc

SEQ ID NO: 382137 - DNA, 122 bp, Homo sapiens
tcactgtacagaggaaaaggacctttggcctacgcgggggcagctttgggacggtgaacacgtgcgaagatgaacgggagaggagggttatcttagtaaggcttgtttgcagatcctcagtg

SEQ ID NO: 382138 - DNA, 122 bp, Homo sapiens
tctcccaaagcgcttacggcagtctcgcgggatttccccctctcgcgggaattatttgaacgttcgagcggtaaatactccctggggctgtcatagaagactactcggagagcgctgcctct

SEQ ID NO: 382139 - DNA, 122 bp, Homo sapiens
aagaataaagttgcccaaagggttcccaggacaccccagctccacctggcggggcagccccggagaaccagaggtaaatgaccaccgcgactgcaaacagagggtcctgcaagagaaggcga

SEQ ID NO: 382140 - DNA, 122 bp, Homo sapiens
caacttgctgtcttttttctcatctttacgcattttattcttctactgttgcattgtggacgttagttctacaagtaacagagcgtggtataggagattaattatcagtttcattaaatagt

SEQ ID NO: 382141 - DNA, 122 bp, Homo sapiens
gggtggggccgcgagacttggtacctagccagcgggcggagcgcggagggggtttcgcttcgggctaagggactgtagttgtgacagccaggaaaccgagaacggaatgccaatactgctta

SEQ ID NO: 382142 - DNA, 122 bp, Homo sapiens
ccccttcccgctccgccagcctggccgtcacccatagaagtggggctgctgagtgaagggcgctaggacccggtggcgcggtgtcggcagggactgggcgcttggggcgcaggagggagccg

SEQ ID NO: 382143 - DNA, 122 bp, Homo sapiens
cgaggcaggcgatgatgttttcctgctttccgagtttgtcgttttccgggcagtatcaaacgctggcatctctccaccaccctgtctccgtcctctcttcttccctccccgcttttatcccc

SEQ ID NO: 382144 - DNA, 122 bp, Homo sapiens
acagcgggatgtcctgctccgtggcgcagtgtggaaaatactggacaagcgaaggatatccggaagcttctacagccgtctgtcctgtggaactgcgcgtcattttgttggttgcctgtgcg

SEQ ID NO: 382145 - DNA, 122 bp, Homo sapiens
aatatgtctggagatggttgtttgcttgggtattctgcctcactgccctgcctaaacttccgttattggcaaggacctgccaacagctccttcctcctctgtgggtgggtatagagaaaggc

SEQ ID NO: 382146 - DNA, 122 bp, Homo sapiens
tgattacgtttatttgcaagaccgttcatgttgttttcagttcatggtatgattaaaacccgatcctttgttaccatgcccttaggtactaaaaaataattgtgtttgatagttggcagtca

SEQ ID NO: 382147 - DNA, 122 bp, Homo sapiens
ccagcaacatcatttatacccagggcagttgagctttgttttgtaccagtgccctctcctcgcctcacacagatatggctccacctggactcttttctttggcccacactcacaaaagccta

SEQ ID NO: 382148 - DNA, 122 bp, Homo sapiens
ccccggcctacagttcgcgggtggggcgacctgcgacagcccctttaagaggcgtggtcacgtgctccgcccccacctccgcctcgcgcgccagtaaggggtggggtgcgggaggaggtgcc

SEQ ID NO: 382149 - DNA, 122 bp, Homo sapiens
ctcaggtgtggtacaggtctctctgactctgctgtctatgttctttgttaaaacgcattccgtaatcccacttcacagaaggctggcaagttgattaccatggcacttaccactcttctcta

SEQ ID NO: 382150 - DNA, 122 bp, Homo sapiens
agtggccagtcggacagcatcatgcatccttccatgaaccaatcaagcattgcccaagatcgaggtgagagcctgggtgttggggaggggcagggagctagggcagacatttgagtgcccta

SEQ ID NO: 382151 - DNA, 122 bp, Homo sapiens
gacacatcactcttctgtctgtggccctgctggagtcctttgtgccccccggagtccacacgccttccctgcaagacgagaatggggctgggaagaaagaggcaacaccacggctggcagga

SEQ ID NO: 382152 - DNA, 122 bp, Homo sapiens
cctcagataggctctcactgggaataacggactctgcagatggaattaaggtaaggctctcgagataagcgtgcctgattagagtgagccctaaatccaatgactcccgtccttaagagaca

SEQ ID NO: 382153 - DNA, 122 bp, Homo sapiens
gggaggagagccgcctgccccagcccaagcgggaagggcctgttggcggggagagtgactcggaggaaatgtttgagaagacgtcgggcttcgggagcgggaagccatcggaggccagcgag

SEQ ID NO: 382154 - DNA, 122 bp, Homo sapiens
gtcctctctgggtacactgtcacctctggttgcactaggaagggaggaaaaatgagacaccgtgaaagaaaaccaccaagctgggacaggagattctttagggactatcactatgtctaatc

SEQ ID NO: 382155 - DNA, 122 bp, Homo sapiens
cactcaccggtccggaagggagcgccgggagaggcctgagagccagccgggccgtcctctcgctggttcagccagttgattcagtgtcaaaacccagcggaactgaaattccgccagttcac

SEQ ID NO: 382156 - DNA, 122 bp, Homo sapiens
cagccccgcggcatcctgggccctgcgcgcgcgcccctgcggaccagcatccttcccgcgcggctcctagagagacgcaccgagtggaagacactactcggcttggccaggacgcgctcttc

SEQ ID NO: 382157 - DNA, 122 bp, Homo sapiens
ctcgccctcgccctgcctgcctgcctctctccgtctccgccgccgccgccgctgcctctgcgagctcgccttaccttcgccgctcaccatccggaaccccaggggggagcgcgcgcgcggca

SEQ ID NO: 382158 - DNA, 122 bp, Homo sapiens
ggtagttaccacgcaggttgaaaggccagtggggcataattaacgagccctcagggtccacgctcccgccctcggagctcagaaccgacgggaggtgcaggaggccgggcatttctacagcc

SEQ ID NO: 382159 - DNA, 122 bp, Homo sapiens
atttataccatcattttcatgttcctcactcagcccttacctccagaaccttagctggaccggaaaccaggctcactctacagattaggagaggagtagatgcctggaagtattcaacacac

SEQ ID NO: 382160 - DNA, 122 bp, Homo sapiens
tgatctgcccaccttggcctcccaaagtcaaagtgatgagattacaggcctgagccaccgcgctcggctggacatgggtggatctttatgtgacatgtatattgtgagcattcatcagacac

SEQ ID NO: 382161 - DNA, 122 bp, Homo sapiens
gctcactcatgcttggactactgcccaagtcctgtgacatcattgctcccctctctgacccgtcttcatcccaggaaggaccttcatgttaccctccccaagcagcacttccacaacctcac

SEQ ID NO: 382162 - DNA, 122 bp, Homo sapiens
gagctgggtgtcaaagtcttcatctatgtcttcatcgctggtgtaattatccatgtgaaacgtggacaggtttactttaaagtcagagtgaattaaaagtatttttccagttgtgaagagat

SEQ ID NO: 382163 - DNA, 122 bp, Homo sapiens
gcaaagctgccccgtccattccgaggggcctcccaaggcaccacacgcgccagggggctccgggcccatttccattatggaaaactgaggcacaggaaggttagggaccggtcggggaatcc

SEQ ID NO: 382164 - DNA, 122 bp, Homo sapiens
ccaggaacccaggggccaatgacaaccttcacaggcatctgctgagaagacatgggccagcgctggatttgtccagctctcccaggcttggtccaagggctcaggagtggacccatccctgc

SEQ ID NO: 382165 - DNA, 122 bp, Homo sapiens
cccacctcagggtaacgatttccagacatccccggggctccccgaccctccctgcatgcacgtgctgaagtaatcagcactagcattggctgtcctgcctgcctttgattggcttgaaaagt

SEQ ID NO: 382166 - DNA, 122 bp, Homo sapiens
ggcgccccagctctcctggagactgggcaaggatggaaggcacatggcatgtagcacacccgctgtgaggaggcgccagggacaaaatgagaagggaagggtgtccgggacggggcatggag

SEQ ID NO: 382167 - DNA, 122 bp, Homo sapiens
gtttgtgtcctgttgaatccacatgaatcactaattgctgatttaaacccagacactaagcgaatgacacatacagtacaacaaatacagatccaatatgaagagactggcaaatgaagggc

SEQ ID NO: 382168 - DNA, 122 bp, Homo sapiens
tttgtttttttccaagacaggttccctgttgcccaggcgggagtgggtggcacctccaaccgagatctcttgggctcaagtggtgatctttttatttttgattttttgagatgcgctctcat

SEQ ID NO: 382169 - DNA, 122 bp, Homo sapiens
gagggcaaatgtctctagtctcacctcgaatgggtccccctacagaagagacgacgccctcgagagccccaagtgttgtagccttaaactgccgccctccaaagcccccctttttctggggg

SEQ ID NO: 382170 - DNA, 122 bp, Homo sapiens
acatccacgggacacccaaccaatctcattacgaatcccttccagccttcccctggacgccgaacagcctgtgccgtactccaggcccaacaatcctgtcttaagggtctgtaaggagtact

SEQ ID NO: 382171 - DNA, 122 bp, Homo sapiens
caggggctccgcacaaggcaggtaacattcctggggcggcagctgctctgtgcgcagctccggatccaggaaaatcgctcaggtcctggggagaggagctccaagctctctgggctgcctcc

SEQ ID NO: 382172 - DNA, 122 bp, Homo sapiens
tcgcttttcccagacgcacgcaagaaccgtgcaccatctcgctcgctctctgcccgcccgcgccttacaccttccccgctcggccgcagaaacagaagatccaggagcgatgctctcccact

SEQ ID NO: 382173 - DNA, 122 bp, Homo sapiens
ccaccctccccgtcaccactgggccctgatccttcctttgtcttccaggccggagggactcgccggctgttggtgccgtatctgctcctgggaggggcagttgggtagggggagattgcctc

SEQ ID NO: 382174 - DNA, 122 bp, Homo sapiens
ttcacgcctccctcagtgtcagtggcatcaccccgtcctcctaaacacggccagctcagtcgctgataagctgagggacagaataaaggaacttagaaaagacccccaagctgacagttgct

SEQ ID NO: 382175 - DNA, 122 bp, Homo sapiens
tcttccaggctgttgtgtttcccttcatactccttttctttttctcttctgtttattttacgctccattttttgaagatgctatttcagcttgttcttcttggctttgagattttttaaaaa

SEQ ID NO: 382176 - DNA, 122 bp, Homo sapiens
ccactgacacgtgtcattgtcttgcagagtctgtggcatagtgactgcctgggcccttctcgcgttcatccttggaagatctggtacctgagtgcagcgaggcctcctgcggccaccctcgg

SEQ ID NO: 382177 - DNA, 122 bp, Homo sapiens
gtgcccggttgccaggctctgggctggagcggtgtctcttccttcctgggaatggatgtgcggcgggggggactgcgcccggctggggcggggccgaatcgtgccttttagatagtcacaac

SEQ ID NO: 382178 - DNA, 122 bp, Homo sapiens
cccacggccctccccccacagcaaggcaggtgtgtctgggggcctcggcgggtgccggggcgcggggcggatggtgccccccgggcgcaggccagggaggcccgagcgccttccccacgccc

SEQ ID NO: 382179 - DNA, 122 bp, Homo sapiens
gcgggtccgtcgcggggagggggtccccggaaacgtgccggcccgagtgccgacccctcgcgactgcccaggaactttgcatgcgtccttctgggaccaggccagggcactgccagagttga

SEQ ID NO: 382180 - DNA, 122 bp, Homo sapiens
aggcagatatttaggtgctgtgggttttccaaggtttgtgttgtcttagttattggagcacgtatatttcaaagaagctgaaatgtcagcctgccaggctgcccctggcctgcagaggaatc

SEQ ID NO: 382181 - DNA, 122 bp, Homo sapiens
gcggggtgctaagtttcatgtcacggtgtcctaactgctggctctatactgggaagctctcggggaccaaggaaagagcgaccgtagttctggtcagcgcctgcccctggagctggccacac

SEQ ID NO: 382182 - DNA, 122 bp, Homo sapiens
catgctgaagtccaggaggtcactgagctccttgtctgtgcccacaggcgccatcctctgcggctggttcattctcctggggccagggcgggcacctcaggcctggaaaccctgcttggtgg

SEQ ID NO: 382183 - DNA, 122 bp, Homo sapiens
tttcctggtattctcgtgagcctgagatgcctgtcaagctacaggaggcccttggaaacccgtctctctccttcagtttctgcctcttgattctcctccccttcctgctaacgaagcctcgc

SEQ ID NO: 382184 - DNA, 122 bp, Homo sapiens
aaatggagcgaggcggcggagctggggaggcggtaatctcgcgagatggaagccagcctccgctaggcccggaagcctcgtctgagggggcgggggacggaggagggagcgggagtcgagcg

SEQ ID NO: 382185 - DNA, 122 bp, Homo sapiens
ccgcagagaattcttccggaggcggtcacagacatctccgtgacgcagaacgagttagagcgtcccttggggtttccatggtgctgcccttagcctgcagtatctccacttcctctcccgcc

SEQ ID NO: 382186 - DNA, 122 bp, Homo sapiens
aacaattactggcctcctcgctgcagtcccaatgctgtttctctggctcttcaattagcacgtgcaatttcaacacttctccaaataggtgattttaaatccatattcaataatttatagaa

SEQ ID NO: 382187 - DNA, 122 bp, Homo sapiens
gaagcccaaatgaggagtggaccagcgacatgtgacctgtggtcacagacacccacgcttcgatccctgcacccaggaccaaagggctgcaaatctgcctgccgtggaatcgtgagaaacgt

SEQ ID NO: 382188 - DNA, 122 bp, Homo sapiens
cgcgccgcggagacggctccgcagctgccatcttgttgcctcggacgccgctgcgctcaccgcccatccacaggccgcgccccgcccacagatctaggccccacccccgccctccaatagga

SEQ ID NO: 382189 - DNA, 122 bp, Homo sapiens
cttggagtgcaaaaggtggggggcgctggaggcagccggggatcagctctcccgggtgggcgcttctccccaggtcagggagcgagagcgctgctgctcagcctcggccgccgcgactgatc

SEQ ID NO: 382190 - DNA, 122 bp, Homo sapiens
gagacgggccctggtggtggctcgggaggcgaagcgttgtcctcagccccgcgtggaactcgtgtctggcacagcctggctgtggcctaacctgccgagagtccatcagcctccatcctacc

SEQ ID NO: 382191 - DNA, 122 bp, Homo sapiens
atgggaggaggacaacgggagtaggcagcgagtgtgtctgttccccaggccccgccgtggcgggcatcctctccatccagaacatgacgacattgctggccaatgcctccttgaacctgcat

SEQ ID NO: 382192 - DNA, 122 bp, Homo sapiens
tgagaggtggttttcagatctgtgtgtttccagtcaagatgtcactccctagatcccccgcgttgagcaactaatatattatgcattattgggcaataaactctcctgggaagagaaggtat

SEQ ID NO: 382193 - DNA, 122 bp, Homo sapiens
tattttttatgtttcacttataaagtcttaggtaactagtaggatagaaacactgtgtcccgagagtaaggagagaagctactattgattagagcctaacccaggttaactgcaagaagagg

SEQ ID NO: 382194 - DNA, 122 bp, Homo sapiens
gctgtgcaggggcggccgcaccccccgggcagatagccctgcccaccctcctaaagggaccgtcctggtttcttcctgaccggatcccaagctaggagagttctttgggtgtgccccaggtc

SEQ ID NO: 382195 - DNA, 122 bp, Homo sapiens
ctgtcaccaaggaccgccgcgccgtccatctgaggtgtcctgttttccatgccatttgctcggtcttcagtctgcccttgcacagaggtatcttgaaggtccgtggcatggataataactaa

SEQ ID NO: 382196 - DNA, 122 bp, Homo sapiens
ggtcggtctcttcctgccgagtgcgccgagccccccgccccttcctgccccccgcccctccgcagcctcctgcccgcccacagcccgctgcccgcctcggacctcggagaggaggagagggc

SEQ ID NO: 382197 - DNA, 122 bp, Homo sapiens
agggagagcacctgtggctggggttggcagtacccagtgtaggagaggtgtgtcaggcagcgggtcatgagctcggacaggctgacaaggtctatatcactgagggcctagggtgcctcctt

SEQ ID NO: 382198 - DNA, 122 bp, Homo sapiens
ttcacaggacctaccccagaatcctgtgactcagaagcgcgcttgtgaagtgcgcatgtgcgggcagggcctccagtggggctctcgtgggggcagcagccaaggactggggctggtggcct

SEQ ID NO: 382199 - DNA, 122 bp, Homo sapiens
tagaaggacagagggtggatgaagacggccagccattaagatgctgggtgtcaaccgggacgacgtggggattactgcaccatgtgaatacctcactgcgcgtgaaacatcagccaaataaa

SEQ ID NO: 382200 - DNA, 122 bp, Homo sapiens
tgggcaggggcagcatgtagcacccattgctgggaagtttgatgaagaccggggtgtgttcggaagtgtgtggaatggcgatgacagccaggacctccgggtcgtccgggagctgcgacacg

SEQ ID NO: 382201 - DNA, 122 bp, Homo sapiens
ctgtgagtcactcaagcctggggcaaggaggggctggtgcctgagtgagaccccgagcttcgctcgccaggcccgtcgctcagctcccggtctgggtccccagtcagcagttgctggggaag

SEQ ID NO: 382202 - DNA, 122 bp, Homo sapiens
accttgctgctgagaagcacgtggcacctgtcataggcccctctggctgctacaagttcccgggcatggcggctgcagggtggcagccagcccggaaagccaggatgggccagggaggtgtg

SEQ ID NO: 382203 - DNA, 122 bp, Homo sapiens
ggaggttagggtgtccatgtagaagcacgcaaggcccctctctttatgggatggagccagcggtggggagaaaaggggtgtaggggcccacacttcctgaccagtcacattttggcacagaa

SEQ ID NO: 382204 - DNA, 122 bp, Homo sapiens
ggggttttggggaacccagagtaagaaagtgtataaactctattcagcaaatggctgctccgctctatcttaaatataggcccaattagccactcagaattcatcttgaaggattggttctt

SEQ ID NO: 382205 - DNA, 122 bp, Homo sapiens
taggaaaggactttaggtgacttactctaaatctctccttttcaggtaaggcatctgcaacgcagaagttataagaaacttgcccaattgagaccctctaaaatctacaaattcagagtctt

SEQ ID NO: 382206 - DNA, 122 bp, Homo sapiens
gatgccttccctcttcactgttgaacttcattatagattaacttccttttacctttctcacgcaaagatttcatgcctatcgcattgctttaagaagaaatgttaactatactattttaaat

SEQ ID NO: 382207 - DNA, 122 bp, Homo sapiens
ggggtgagaatcctaggtgtgaacagcggggtccctgggcagtatcggggatcacaactccgaagcggggtccgggagtggggaaagggatgggcgcgcgcgccttacctgatgccgccagc

SEQ ID NO: 382208 - DNA, 122 bp, Homo sapiens
ggtcttcctcgctagcgtccgcaccatcttcctccctggtatctttaacgtcttcctccccggccagtgtcgggtcttcctcgctggtgtccacaccatcctcctcacaagcctctcccacg

SEQ ID NO: 382209 - DNA, 122 bp, Homo sapiens
caacaacacacttccctgacagctccacaacctcaggccgtagtgaggaatcaacagcatcgcacagcagccaagacgcaacgggaacaatagtcctacctgcccgctccacaacctcagtt

SEQ ID NO: 382210 - DNA, 122 bp, Homo sapiens
ggcttactcatggctaccttatcactggcgaggtccttgcttcctaagcacaattaaacccgtattctttttacttccaaagcaggcaggcgacaccctcggagtccctgtgtatgataact

SEQ ID NO: 382211 - DNA, 122 bp, Homo sapiens
acccctacccttcctggctggagaaaaatggcccgccccgtgaaacagcaaataaacacacgcgttccaggacgtgagatacggcctccacatcaatcagagggacctgcccagtcctgtca

SEQ ID NO: 382212 - DNA, 122 bp, Homo sapiens
ctcaagccttgaaataaaactaagccgagatgtaatttacaagttgtgagtgccactcaccgtgctgctgtgtcctcagccaagtccagtgctatatctgaaagttcttccggagctcctct

SEQ ID NO: 382213 - DNA, 122 bp, Homo sapiens
ggacctccccacattcctggccctaagggtcattttattagtcactgaacgcacgggcagcgcctggatcctgcgcccgggcagtcctgggcttgaacgtgtgtgtcagccgcgctgccagc

SEQ ID NO: 382214 - DNA, 122 bp, Homo sapiens
cctgagttgatgtgcccatattttcaaacagccaagtgccctgagacacagcctttgctacggtacctgctgaaatctggaagtgtgattaactattacttaaattgagtggggcagactaa

SEQ ID NO: 382215 - DNA, 122 bp, Homo sapiens
gccggcgcggcgggtggggcctgcgggggccgggccgggcgggggttctggggtctcgggcgccgccccggttccgcctgcggctctgaacgtggggctcggcgggagctcgggcgggtctg

SEQ ID NO: 382216 - DNA, 122 bp, Homo sapiens
agcaggctcctcccagctggcccagctggagcataaaatcccctgtcagcacatgccaggcgcgttcctcggtgcctccccagcctccgtgaccccagggcctggcttaggctgggaagatg

SEQ ID NO: 382217 - DNA, 122 bp, Homo sapiens
agcacctgccggactcttcgcccagagaagcagaagtcatcctggcgctgtccagcgggccgcagctgaaatcccgggaactaggcggggccacctgcaacctgcttttcccacagctttgc

SEQ ID NO: 382218 - DNA, 122 bp, Homo sapiens
atccagcaacctgctccgtgcctcccgcgcctgttggttggaagtgacgaccttgaagatcggccggttggaagtgacgaccttgaagatcggcgggcgcagcggggccgagggggcgggtc

SEQ ID NO: 382219 - DNA, 122 bp, Homo sapiens
cggggcgaccccctccttgcctcgctctctccgggatcagagagagagcgagagagagagcgcgcgcaggttgcgactggagggcctgttggggcgctaggcagagcgcaaaccctagatcc

SEQ ID NO: 382220 - DNA, 122 bp, Homo sapiens
ggttattgaggtttccaacaggatgacaccctcagggaatgatgagaaggcagcagggggcgggggcttgacacagcatcctgagtatcagagtaagtgatgtagtgagtcattacttcttt

SEQ ID NO: 382221 - DNA, 122 bp, Homo sapiens
tgcgccttgtgcagcacctgcaggttctcgattgctgctcgatgcggaggatgtcggcctcggtcatgagctcgccaaagggccagaggatggcgttgtgctcgcgggagtacctccagccc

SEQ ID NO: 382222 - DNA, 122 bp, Homo sapiens
cgcgctttggaggggcggccggtcttcgggcagctagcgggctctaattacccgcttgtccggctcttaacctagattgcactcagctagaattacattcaggagtgaagcacttcgcagat

SEQ ID NO: 382223 - DNA, 122 bp, Homo sapiens
agtgggagcaaggggctaacaaagagactttagcttgcaattcttcggtggcatcttcaacgaataacagagaggccaattaaccagtttgaattgtttgctgtttagtgcttgctttgctt

SEQ ID NO: 382224 - DNA, 122 bp, Homo sapiens
tgggtcctggacacttccggaaggatttgtttccagctgccagatgaggaaactggggctcgcagagccggcgccgcaggggaggggctgtgcacgaatccagtgggaaacctctctccgga

SEQ ID NO: 382225 - DNA, 122 bp, Homo sapiens
tgcctcaaaataaccttgcaaggtgggtgaggagcatcccctcccccatttcatggaggacgaaagtgcagctcaagctgaaagtggctcttacaagactccaggtggaaagtaggtccctg

SEQ ID NO: 382226 - DNA, 122 bp, Homo sapiens
ccctggttggagtcccgtttcctggtgccgggatcagggctggcggtggggcgggggtggcggggcgggggtgcgggggagccggctggggcggcggccaacagacgccgctgcaagtattc

SEQ ID NO: 382227 - DNA, 122 bp, Homo sapiens
catcttcccatccttgcaaagcccttgctggaggaaaggagacttacctttggaactaaacgttgagtttctgaattggcattgtgtttggtaatataaaataactacaggacctaagagag

SEQ ID NO: 382228 - DNA, 122 bp, Homo sapiens
gctgtcctgcgtgttcttggttgctctgggcacctgtcgggagatgctgcccgttgactccgcaggacgcttcccttgggatgagttctcagaaattagccaatgctgctgccgcatggccc

SEQ ID NO: 382229 - DNA, 122 bp, Homo sapiens
ccccaccccaggccaccctctcccagaggacgccatctcccttactgttgctgggagcctcgccctttgtcccaactgggtagagcccccaggtgctgtttgctcaggaggctgctgtgggg

SEQ ID NO: 382230 - DNA, 122 bp, Homo sapiens
gatatgcagggactggaaggccgagatgttagaggagatgttgcccatggctcctggctgcggcgccagccactgcggctgcggcgggagggcgccgccccccgagcagtcacgggcccgac

SEQ ID NO: 382231 - DNA, 122 bp, Homo sapiens
ggtgggcagatcacctgaggtcaggggtttgagaccagcctggctaacatggtgaaaccccgtctccactaaacatacaaaaattcgccaggtgtggtggcgtgcacctgtaaccccagctg

SEQ ID NO: 382232 - DNA, 122 bp, Homo sapiens
gcccttgctgctggggcggccggcagggagcccacctgaggcgcagagggaggccattgccgggcgctgccaccatgaggagtcccgagtcctggggagacaggtcctgtgcagggaacaga

SEQ ID NO: 382233 - DNA, 122 bp, Homo sapiens
gggttttgggggtggtttccccaggctggggggcttttctacggttcctgacgcattcagcgtctgcgcggggcgcgtggagggggccgccccaacccgggccctgcggtgccacgcggtgc

SEQ ID NO: 382234 - DNA, 122 bp, Homo sapiens
gctcccacagcgcctggcccctcccacccaacgaggtcacgcccatgccgggtagggccacgcccttcggcgcccccattggtccagccttgaagcctggaccacgtccctctgggttggcc

SEQ ID NO: 382235 - DNA, 122 bp, Homo sapiens
caacccggcaaccagtagaatcgcttgggaagcctccaaatgctgatgccccatcatcaccggggaattgtgatctgcggccaggaccgagatccacgggcccagagtgaaatgacagtact

SEQ ID NO: 382236 - DNA, 122 bp, Homo sapiens
ttgctttgtggaggactcttgctccagggaagctatctcaattcaccttgagccctttggcggggagattagcaccataaaggcaattatgccactctcaaaacaacccatactttctcgaa

SEQ ID NO: 382237 - DNA, 122 bp, Homo sapiens
cagctgggaccagcagagaaacccccgccttctcctccctgagtcacttcccagcatctgcgcaaggctggcgctgccccatcccgcctgcggctgctcccatcacgtgatcataagaaaat

SEQ ID NO: 382238 - DNA, 122 bp, Homo sapiens
gaaaccatgggggccgctccttcccacaccactgagactgtccatccaggcgcccgaagacgactcctaaaccacctttgccagacgcaggtccagcaacccatcaagagcacagctcgggc

SEQ ID NO: 382239 - DNA, 122 bp, Homo sapiens
agagagcggctctcggatatggggcggaaccctgaaaaggcgagagctgagatgccgctccgttctgccttaccacgccgccccccagcgtccgccaattaggagagcccggagccggatcc

SEQ ID NO: 382240 - DNA, 122 bp, Homo sapiens
acatgagtggtggtgtaggcacgtgtttgtgaaccaatgatataaaaacctcaggtttctcgataccatatataaaagttgagctattcccttttaagtacacatctgagagcatacaatgc

SEQ ID NO: 382241 - DNA, 122 bp, Homo sapiens
cttgcaatcttggagctgaaaggagccttagaacgagcctttaatggccagtggccgacgcgctactgagccctctcccttctccttccatcagattccagactgatgacccctcgcctcgc

SEQ ID NO: 382242 - DNA, 122 bp, Homo sapiens
gggtgcgtagtgggtggagaaagccgctagagcaaatttggggccggaccaggcagcactcggcttttaacctgggcagtgaaggcgggggaaagagcaaaaggaaggggtggtgtgcggag

SEQ ID NO: 382243 - DNA, 122 bp, Homo sapiens
tgcctcatttgctttcaatgaaagcctcaaagcagccaaaaccaggctttcccccttcctcgagtttgaatatccagaatcttttgtacttcttgttggttaaattgtttatttttgtaaaa

SEQ ID NO: 382244 - DNA, 122 bp, Homo sapiens
tagccctgcaaggtcggcaaagtgcgagcgtgatccttcttagggcaaacacgtgaccaacgcaagctgttcttgactttccacagcagccccgacagtctgctctgctgcccatcagaggg

SEQ ID NO: 382245 - DNA, 122 bp, Homo sapiens
cagcaccttgggcggtgatgggacccagagccacggaggctcgggcggagcaggagcccacggaggtggggaggctcgggcatggcaggctgcaggtcctgagtcctgccctgcggggaggc

SEQ ID NO: 382246 - DNA, 122 bp, Homo sapiens
tgcaactcaggcccaggatgacaaatggtgtcttaggccattgttaacacagggaggtagcgaccagttgacgtgtgatttttaaatgctcagtgcagaataaatgaaatgatgccattgtc

SEQ ID NO: 382247 - DNA, 122 bp, Homo sapiens
tgtgcccagaaacactcaaccgtctgggaatatttttctcaaaggcttcggctctcttctcggccgctggtggaggaaaattacaaaaataagtgccatgatggcgcatcttttgtaggcag

SEQ ID NO: 382248 - DNA, 122 bp, Homo sapiens
gtacagcggtcacccacgccccaagcagacacacagactctgcagacaccgtaacaggcccggcaccgtgcacacatcacaggcccaggcctctgcacatggtcacagatgcctatgcgaaa

SEQ ID NO: 382249 - DNA, 122 bp, Homo sapiens
ggcagatctcttctaattcctgcttcttggcggtcaggcgggcccggagctcctcagcctcggcacacagctcggtttctgcctggagctgctcctgcagctgcaatttctctgccatgagc

SEQ ID NO: 382250 - DNA, 122 bp, Homo sapiens
tccgcaggatttcccatgttctcaccatctacagagtcactcccctccaccctgctgccccgttccaccaagtggccctcacactaggtggaggagccctcacagatctctttccttcagcc

SEQ ID NO: 382251 - DNA, 122 bp, Homo sapiens
tcctgattacttttgttgtcctgcctcttcaggtaatggtcacagatttggctgtaggcacgttaccagccctgtggcttcttgactcttggttccctgttaactctgtttctgagaaatgt

SEQ ID NO: 382252 - DNA, 122 bp, Homo sapiens
gcgggtgcggaaaaatactaataccccaccctgttgcggatggctgaggttggagtgaggcgcccttgtggccgctcccgaacccgaacgcttaggttaatcctagatctctgcggaaaacc

SEQ ID NO: 382253 - DNA, 122 bp, Homo sapiens
gagagggaaaaactagagataaaccaaactgactctcagttcctgagactgatgtgacatcggcttgatctaaaccccaaagctgatgttttatttgttgttgactctgtgtatggttttgg

SEQ ID NO: 382254 - DNA, 122 bp, Homo sapiens
tcgtccagcaccacggtacccgccatgcccgctgccaaagaactacctccaccaaagtcgcgtggaggttcccaggatgactccaccccggcgcgaaaacttccgaactcttcccgccacca

SEQ ID NO: 382255 - DNA, 122 bp, Homo sapiens
aggctggctccggggcctgagttaatcgcttgcacctctagtttattcgctcccctcctccgccttgcagggaacctagtgtacggctcacccagcccgcgccccaccccgccttgctggct

SEQ ID NO: 382256 - DNA, 122 bp, Homo sapiens
ttatagattaactctcctgttcttgctctgtagattcatttcaagactaaatggcatcagcgttaagatcgcccttcttcattgctgacctttcctctattatcttgcacctaaatcagacc

SEQ ID NO: 382257 - DNA, 122 bp, Homo sapiens
tgtgcctatggtaacaagggagtccccctcttctgaccccttgttgtcatcaagcaagaacgtctgagccccaggcaccctctgaaattcccaagaaggaagcatgccaagaaggaagcacc

SEQ ID NO: 382258 - DNA, 122 bp, Homo sapiens
gcggacgcaggagcccacccagcagcacttctcggtggctcaggtgtttctgaacaactacgacgcggagaacaaactgaacgacgttctcctcatccaggtgggcgggcagggccgcgagg

SEQ ID NO: 382259 - DNA, 122 bp, Homo sapiens
gagcaccaaagaggaggtttctggtaggcagctcgctcctgaacgctgagcagaacgggccggccatgccaggtgctgctttgctttgtttgaacaaaggtcctggggtcctcacagtgaga

SEQ ID NO: 382260 - DNA, 122 bp, Homo sapiens
ttcacttgagatatgtatccctcatgaattctagttctgtatctctgatccatcatgtgacgatattgagctgagaattcctctgacatcactggatgcaatgggtccagggcataaaaaca

SEQ ID NO: 382261 - DNA, 122 bp, Homo sapiens
ttcctcttcttttggccctgagattctggcctctttcttcagtgactttgctctcagcaccgcccccatcctccccaacacctgctcattttctccaactagatatatgcatctatatatct

SEQ ID NO: 382262 - DNA, 122 bp, Homo sapiens
tgtgcgattcagcagctacaaatacccaacagctttggagtggcagcgcggccccctcctcggccccctccaacttatgtgtgttgctttacgtgttggcgtgaagatggttcccgaggcgg

SEQ ID NO: 382263 - DNA, 122 bp, Homo sapiens
cggatcccgggtttatggtcacctctccctcggttagggtgtccgtctgtaaatctttggcgatcctcccttcgctcttcagtggcgacacttgggatggcggggtgaggaaggggtagtga

SEQ ID NO: 382264 - DNA, 122 bp, Homo sapiens
ccgcggccgaccagctgagggctcccggagatatggagcggggtcagcgaggcctggtggcgcctcctggagtctgggacgagcggcggtccgaggagcagcccaggtggggcgagggtacg

SEQ ID NO: 382265 - DNA, 122 bp, Homo sapiens
gaggtgtattaggcagtaagaaacccttaatgaagccagactgagtcatctgcctgtcaacgttcttctgtgtgggagtggaataaaatacctttgaaacctgtcttgtttcagaaaccact

SEQ ID NO: 382266 - DNA, 122 bp, Homo sapiens
cgtcccggctggtggagggagcccggatgcctggcagacagtcagtggtcggttggcggccggcccacataagggcaccatgctcaccgtgtctaggcagagctggaggctcctcctgccca

SEQ ID NO: 382267 - DNA, 122 bp, Homo sapiens
caatgcgagcaacgcggcagagagggggcttccgggaaagggagctcaatgcgagagcaacgtggcagagaggagggctttgttttcactttcaccgtgtatcatttataccactagagctc

SEQ ID NO: 382268 - DNA, 122 bp, Homo sapiens
acctacagggtttggtggaaacctcaatcgtgtaacccccatgtctgaactgaggatgtgcggccggcctgccaggtgtgctgtttgctgcctgctttggggaaagagcatcagaaaatcct

SEQ ID NO: 382269 - DNA, 122 bp, Homo sapiens
tgacaaaggagaagctagagagcactcaaatactaattcttgaggacaattaagacagatcgcattatgaaaaacagattttgtcactgaaggctcagggcttcagcctagatcctgcgctg

SEQ ID NO: 382270 - DNA, 122 bp, Homo sapiens
ggctccgcgtgacagagtgataacgcccggggcgtatgttctgcggtccgcgcggctgggcgggaggcccgagataggcaaaccaaagagcacaacctactgccagcctggatggggcgcca

SEQ ID NO: 382271 - DNA, 122 bp, Homo sapiens
atcattttacaacacacatttgaaagtcacctttggagcattctaccttcctgtaatccacgagaaaagtattttcaaattccttgacacacaactaaagagaataccacaacaaaaacttt

SEQ ID NO: 382272 - DNA, 122 bp, Homo sapiens
tggctttcctctctccttccatctcccctctttcgcttcccttccctctgcgcccgcgcgcgcctcccagcacgctggtcagctcctcttgctcgcaagcaggtctggccccagcggcgcga

SEQ ID NO: 382273 - DNA, 122 bp, Homo sapiens
cataccacagacacgcgtgtgcatgctcctacacaatacatatgcacatatcatgaacagcgtaagttcctacacacggacgtgtgatacacacatgcatgtacaggtaagcacacatgtac

SEQ ID NO: 382274 - DNA, 122 bp, Homo sapiens
ggggggagagggcaaaggaagccgtgagaatagcattgccgagctgggccgcgagccccgcgcttccggggcgatctcggaggccctgctgaacccctggctccctcccgccagccaatccc

SEQ ID NO: 382275 - DNA, 122 bp, Homo sapiens
tgcccgaagaataaaagaagaagggagggtgaggtgggggcggatcagcttgagtcaccacgcgtgtagctgacagtggaggaccccaggccacccccgcccgtggaaatccatgagaccgt

SEQ ID NO: 382276 - DNA, 122 bp, Homo sapiens
ccacattccaaagccagtgttccttctactgagctctgagttttctaacagattcctggccggtaagcatagttttatgtcaggaagccccagtttagacatataaggtctaggaactccca

SEQ ID NO: 382277 - DNA, 122 bp, Homo sapiens
gggtcctgcagggcaaatgcctctgcctcccatactgcagcaccagaaccatggggccttcgcagagcagggtcactgggcagcaagagcttttaaacatatttggttatttttgtttgaac

SEQ ID NO: 382278 - DNA, 122 bp, Homo sapiens
gaacttctgcgcgggcccttggagggtagagctggtgctggctcacttgtctccaggtcccgtcgtcgccctcccaggcgctccctcccggcacttcccgggctttgggcacccttgcttcc

SEQ ID NO: 382279 - DNA, 122 bp, Homo sapiens
gctggagctgggggtccgtgaaaagtgatggcagaggtggcaggaggtggcggcagccaccgggatccccaggctggagggcagaaggtggggaagcaagacagaggcccctggcgatgccc

SEQ ID NO: 382280 - DNA, 122 bp, Homo sapiens
agcagcttcagtcagtctcgtgtcacacagctgcgcgaggtagctccacacgcacctacgcgtctggaggatgctatccctggctactttggggaccactcaatactggcagcctcaccacg

SEQ ID NO: 382281 - DNA, 122 bp, Homo sapiens
gcgatggcggtcaccgggaggccggcgcggaggaaccagcgcccacagacccttgctcggcggaagtcaaggaggtgccccccagcccgtggatcgaactgccggattttcattttatagtg

SEQ ID NO: 382282 - DNA, 122 bp, Homo sapiens
gggcctaaagcgctccctatcgccactcccgggggctttatcacctcaagctacttcccacgctccagtcaccatccctggatggtttcggaaatctctctggctctccaaaaggcacccct

SEQ ID NO: 382283 - DNA, 122 bp, Homo sapiens
gggggagggggcggcgggcggggtgggcggcgcgaggaggcgggaggcctcagggccgggcgcacgtcgagggctgcggccgccgcagcgggcacggccaacgagctgcgggcccgggatcg

SEQ ID NO: 382284 - DNA, 122 bp, Homo sapiens
ggaaggggaccgggccgtgccggcgggtgtgtgtctccagttggcgtgtgtggctgccgccggggagggctgtgatgcactttagtcctggactctgctcaggctcgccaaggagggggtct

SEQ ID NO: 382285 - DNA, 122 bp, Homo sapiens
gtcctccaccagaacaccaaataatgatatgcgctgctctaaaggaaacagcaagccagccgggttctggctctaggaggtctctggaggtacaataatataaacctgatcaattgcaatta

SEQ ID NO: 382286 - DNA, 122 bp, Homo sapiens
gcccccgaaccctggggcacaggacttgacactcccgcaggaggcggagcatgtgaagctcggggcatttcctgtgtcacccgcaggagggaccgcacacgggacactgtcccagtcgcagc

SEQ ID NO: 382287 - DNA, 122 bp, Homo sapiens
gggtcctggggcagcacagggtcctccctggcccaggcgcccggtggccgagagcctgcccgcgagctcaacgctgctcaacggtctctgtccttggctgtggctcctgcgctctggctgag

SEQ ID NO: 382288 - DNA, 122 bp, Homo sapiens
ccctggctggccctgtctatggcgtcctccagaacccctgctcaagcctgaaaagttccccgcaacagtgatgggtggggcctccaccccatgccctgcctgaaacccagcccttgctgatg

SEQ ID NO: 382289 - DNA, 122 bp, Homo sapiens
aagtgacccgcccaccttggcctaccaaagtgctgggattacgggcatgagcgctgcgcccggccaggttgtggtaattttttatggcagccctaagaataaatacacagacctgaactttt

SEQ ID NO: 382290 - DNA, 122 bp, Homo sapiens
tgaatgtgagttcctggtcacaatcagccttagcaaacccaccagacggaattgagagggcgtctaggagcctctaaggcatccagccaacctgggctggctgcgtcctgcgtccccctcct

SEQ ID NO: 382291 - DNA, 122 bp, Homo sapiens
gcaaccgtttaatgccgccgcgtccgcaagcgcgcgctctcaccctgcgccgcgttgcgacgtcaccacgctgtccagcccacggccttgcggggaagactttagggccaatcgtgtccatg

SEQ ID NO: 382292 - DNA, 122 bp, Homo sapiens
tttaattgtaggcctcggcaagccacaaaagctttgttgccacacatggtcgtggtgagtcgactgtttgaaaagctgcttgcacagagccagacacaagcgaatgcccagtgggggctgtc

SEQ ID NO: 382293 - DNA, 122 bp, Homo sapiens
gaacatcactgctccaactcatttatgcagtccccagcccacccacaccatacaacaggacgctggaagactggacaaaggaatcatgccaagaaaggtgacatattacagaaaacaagcaa

SEQ ID NO: 382294 - DNA, 122 bp, Homo sapiens
ccagctgacctaggggagagggcgggagaaagtatgtcactgtgcggtggcggacagggacggggccctactgccaagagactcactgagacagtgaacactcggtggaggatggggcctca

SEQ ID NO: 382295 - DNA, 122 bp, Homo sapiens
acaccaccacacctggctaagaattctgccatttagactgcttgttcttgcttgtatgcacgacctctctttttctctgctgtaataaagtggcaccagacaaggttaaaaccattgtcagg

SEQ ID NO: 382296 - DNA, 122 bp, Homo sapiens
acagagatacaagatattttcatgtattcattcgacgaacatcagtggagagcccatctacgtgctgggctctgaggacccaggggtgaccaagacaggcccagctctcccttctggtgctc

SEQ ID NO: 382297 - DNA, 122 bp, Homo sapiens
gcaaagagccctctcctccccgggcaccctggatatttcccctgtgaaggatgccttgatcggacttgggcgcctgcctgtctctcctctaagttgtgacagggattccatcgatattactg

SEQ ID NO: 382298 - DNA, 122 bp, Homo sapiens
gggattctgcggaaagggaaaccaacaagagacacacgcacagttggaggtggaggggtccgagcggggttattccactggagaataaatatagcagaaaagatcaactgcaacaaaatggc

SEQ ID NO: 382299 - DNA, 122 bp, Homo sapiens
cctcctaccacacccccagttccaaaggtggaacccaagggtgatgggattggtcccacccgccagccccctagtcagggcttgggctaccccaaatatcagaagtcgttgcctcctcgttt

SEQ ID NO: 382300 - DNA, 122 bp, Homo sapiens
tccatcaactattattattactatttgagacggagtctcgctgtgtcgcccaggctggagcgtggtgcgatctcggctcactgcaacctccacctccccggtttaagcgattctcctgcctc

SEQ ID NO: 382301 - DNA, 122 bp, Homo sapiens
tgggattttgaagagaacagacgtgaacaggactgcgtctggcttcatcatccatcctctcggggcgggaaagtctgttttcttgccctcaggaaaacccactgctggagaaacagcagttt

SEQ ID NO: 382302 - DNA, 122 bp, Homo sapiens
ccgaatctttcatttcagccctatgtgggatgcattgtgtcgggacttcacgggtagctacgatgggtgttagcttataataataactcacagttaaagcacagccgggccagtgatttcca

SEQ ID NO: 382303 - DNA, 122 bp, Homo sapiens
ttcaaagggcattcagggagtgtatattcagggtaacttgcagctatgctggaaagggagcgagggggtagggaagatgtgtttcaaggcccaggaagtcaacagcctagaaacctgggaat

SEQ ID NO: 382304 - DNA, 122 bp, Homo sapiens
ctggggcctttctcgtctcccactgccagcttaatgagctgtgctggtagcaacagatggcgccccgcagggtctcacttgggtaaggctctctccctcaatcctccagctgcccccgctag

SEQ ID NO: 382305 - DNA, 122 bp, Homo sapiens
attgaggaaaataaatttttagtatgttaacagcagtataaataccccatttttattccccgtcttaaataatacatgcacactcagcaacaccaaagctctgcatcataacagcagatgga

SEQ ID NO: 382306 - DNA, 122 bp, Homo sapiens
tggtggtgtccacgttggtgaggtcgtagagggaggatgacacgggtccgtacgcccagtcggtgaacttcctggacaggctccggagccgcttctccttgatctcacgactgaggatgtac

SEQ ID NO: 382307 - DNA, 122 bp, Homo sapiens
gaccggaccagggcgaatctgctgtctgtgccggcggaaggccagtaagtgccgtgcagtcgtgaaaaaggaagtggttaaagtggttacggcaaagcggtggcgccggctgctcccgacac

SEQ ID NO: 382308 - DNA, 122 bp, Homo sapiens
atcaagggcgaaaagaggctgcacaaatcacgtagaaaattagaccgcctctttccatggcgataatcgaattagcctcaaattaaacgtgaaattggccctctccggctgtggagacaaag

SEQ ID NO: 382309 - DNA, 122 bp, Homo sapiens
gagatgaaaagagagtcttcaacctgaattcagtataaaaaactgccggtggctcaggcccgtaatccagcactttgggaggctgaggcaggtggatcatgaggtcaggagatctagaccat

SEQ ID NO: 382310 - DNA, 122 bp, Homo sapiens
gccctctaactcagagccctgcagttcaacgcaggtgaaaggggaacatggagggtgacgcggcattgacagtgggatgcacgtgtcttccctgccaggccgcactgtccctggctccgctc

SEQ ID NO: 382311 - DNA, 122 bp, Homo sapiens
atgcaagcttttgctgacccacaccccccttccccaatgcctccgcttcccttcccccttcggggacttgggattgccctgcagactccctggacttgagcgttttggtctctggctgcagt

SEQ ID NO: 382312 - DNA, 122 bp, Homo sapiens
atctcctgcaattttcataggaggtggccctgaaggagaggctgccctggtgactgtcaccggaggaccccagggttctggatagacagacatcccagtatcttcaggagcatagttacagc

SEQ ID NO: 382313 - DNA, 122 bp, Homo sapiens
tcagaggggtcgactgcgtccgtggggcacaacccaggggccaggctaagacgccacacacggcaacgaccctcaacgacaacgacccccacgacgccccgcgccccagggccagcaggctg

SEQ ID NO: 382314 - DNA, 122 bp, Homo sapiens
cagagcgaccagaagtgccaaaagctgacattcagatactgccgaaacaaaccacaagagcgctagggcccccgctaatagtccagctgcgatggtgagaactcgcggacccgccggcgatg

SEQ ID NO: 382315 - DNA, 122 bp, Homo sapiens
taataactaatgaaatcacgtctacttccagttcaatacgatgcttccacctaagaaacccgtcaacgcagtcaaccattcttccacacgctggcaaacagttcaacatacacctctggaca

SEQ ID NO: 382316 - DNA, 122 bp, Homo sapiens
gactttgaaaagacacttaacataaaaacagtaacctcttcccattctccttctccctgtcggttggttaagtaggcaggaagtaagcagacagtaaaatcaaagacaagagctaatgattt

SEQ ID NO: 382317 - DNA, 122 bp, Homo sapiens
tctgtcacagccaccctattagagacagtcgctccccctggaagatggaggggcagggggcgggagatgtgagacaggaagcagcaggcatcagaccccagacggtctcagcctcacaggcc

SEQ ID NO: 382318 - DNA, 122 bp, Homo sapiens
cagaagacagtgagccttcccgggatctttctgggagctctgagtgtgaaaacggtcctccggccagcgcaggttgagagaacgggaaggagggggaagctgtgggcgcccagggcgtgaca

SEQ ID NO: 382319 - DNA, 122 bp, Homo sapiens
atagcagctgtaggaaacagacaccacatctggggctgcaaagatacaggaaagaggcaacgcatttgtcagtgttctccagagaaacagaaccatggcacatactgatcaatcaatcactt

SEQ ID NO: 382320 - DNA, 122 bp, Homo sapiens
ggatcttgataaactgtctccagtttgaaggttgcattttataggcaatgccagtgagtgcgaggcacagtggaggaaatactttccttaactgaaaactgtcttttgacttctctggatgt

SEQ ID NO: 382321 - DNA, 122 bp, Homo sapiens
gctttctccaggtacacctgaccaagcttttcctcaggagagtcttatatctcctacaagcggcaacagggtatgtgtatttaaaacagaccaaaaaaaaaaaaaaacaccaaaaaaccacc

SEQ ID NO: 382322 - DNA, 122 bp, Homo sapiens
ctgagccctggctggagtgggggtggggtaccaggctgggccccctcccccgcccagtggcggaatcttgcaaagaccaaacaggtgaagtgttgacagaggggggtctaatcgtgggcctt

SEQ ID NO: 382323 - DNA, 122 bp, Homo sapiens
tctatttttatcacagagtagactggactaacgccgaaagccggggcgtggtgaaccagccgccctacctgcaatgtgcggcctggtaggatactgttccagaagtagcttgggcttttcaa

SEQ ID NO: 382324 - DNA, 122 bp, Homo sapiens
ataacagatctctgttagagatactactcacatcccacttccactttattacagagattacgctgaatagagaactgatttttaacaataaaactctttctatggcctttagccagaagcaa

SEQ ID NO: 382325 - DNA, 122 bp, Homo sapiens
ggttgaggttgcagtgagccatgccacaattttgtctgcactgcagcctgtagtgcagagcgagaccctgtccccatcccccaccaaaaaataataataataatagacaggtcgatgagatg

SEQ ID NO: 382326 - DNA, 122 bp, Homo sapiens
tttaagcaaggagtggttcaaaagttatagagcacccagctgtgggttgtagtttgtggtcggtccatgggaggatcttgaaggaaagatgcagatgaaaatacccaaattcaataatcggt

SEQ ID NO: 382327 - DNA, 122 bp, Homo sapiens
aagttaccaatcaaatgttgcagtcttaatcatttattggaaactgtaagatttttgagtcgtgtttctcactttgatgtgccttactgccaccaagaaggttcatgttttttttttttgtt

SEQ ID NO: 382328 - DNA, 122 bp, Homo sapiens
ccccaggctcaccatccagttgggtctggctgtgatgttcctggccgaagggcccgtagccggcctcagagcgcgcccgtacctgcaccaggtagctggctccccgcttcagcccccgcagc

SEQ ID NO: 382329 - DNA, 122 bp, Homo sapiens
ccacttctctgcagcagctgggccaagtagtcagtaaggtcagcaccagccacatccagccggtaggtgtcaagtggggccagatccccagtgaggatgggtgccacataggaagtgccatg

SEQ ID NO: 382330 - DNA, 122 bp, Homo sapiens
atcctaaagccgcaatcttcccctcgcctcctctcaggggaccccgtggaacagctggtccgccatttcctcatcgagactgggcccaaaggggtgaagatcaagggctgccccagtgagcc

SEQ ID NO: 382331 - DNA, 122 bp, Homo sapiens
gcgcttctgaaggttttgggagaacgtgtgtcagcccttcaggcacacagggtgccagtacggagttgggggcggggaagggtgcagtgcaggcggctgggaaggctcatctgctcggcttt

SEQ ID NO: 382332 - DNA, 122 bp, Homo sapiens
ctactacctgtctagaactgaatataccagaaacctgtggctaggctaaaggtagccagacgcaggcaaggccaacagcctctgaaggggcgtggctcaaccccccacccaacaggggtgct

SEQ ID NO: 382333 - DNA, 122 bp, Homo sapiens
aaactattggcagcaaagccatactgccctctgccacctctccccagctcaggccagctgcgcctctgccgtgcagtcaatcgttggctctgtgggtggcctggagccaggccagcacccct

SEQ ID NO: 382334 - DNA, 122 bp, Homo sapiens
aacccggctccgcagacggatccgcttttccgtgtgttcgccgacgccgcgggggcgtggcgcggccctagcgcattgtaagcagttgggggtcatttcctcgaggccctactcgctagcca

SEQ ID NO: 382335 - DNA, 122 bp, Homo sapiens
gacaggggggccccagggctccaggcggtgcttgttcctcagcctcttctccttcctgatcgtggcaggcgccaccacgctcttctgcctgctgcactttggagtgatcggcccccagaggg

SEQ ID NO: 382336 - DNA, 122 bp, Homo sapiens
ggaagccccgaccctgcagtgctgagggagcggccccgttcctgcctccgccaaaactgtcgagtgttctgttactgacaaccgaacattcccagctaaaacaaagcttgtcctatgccgcc

SEQ ID NO: 382337 - DNA, 122 bp, Homo sapiens
ataaatgctgtttccctttcttaatctgtcagtcaaggcaacagaagagacaaagaattacgcaattattattatgtctaaatattgttttaatggttctcaaagtgttgcccctgggccag

SEQ ID NO: 382338 - DNA, 122 bp, Homo sapiens
aaaacctgtactgtctctggcttgcatgttcccttccatgaatataatgcagtaaaacaccgtgggaaacaagcctttcaagaattcaaacagtattactagacagtaacgacactaagaca

SEQ ID NO: 382339 - DNA, 122 bp, Homo sapiens
ccccgtgttccaagtcccctagtgtaagaacccggctgttcccttggtgataactcaaggcgggtcaccacctggcggggtccgctggacgcttgagggtcccccatgcggaccaggtgcag

SEQ ID NO: 382340 - DNA, 122 bp, Homo sapiens
aagggggtcccatcccagcagcggggcccgaggcgactccgcccctgccaccgccctccccgccacctgctttctggggcttccctgcgggcactggtaccaccaccgctaccaccccgggc

SEQ ID NO: 382341 - DNA, 122 bp, Homo sapiens
gagtgggagggggtgaagaccttatcatgttagaacaacaagaagcaaggaggtagagcacgttcttcctggagtgtaggaagcaagtacaacgtggttgtggagggaccagggatcaggcc

SEQ ID NO: 382342 - DNA, 122 bp, Homo sapiens
gaaaatgctccgcaaggaactaaacacagaaggttctaacgctgagccaagactgggaaacgaactctgggaactcaccccaggctccccaagaacatcgcccctctggctggagcgcaatt

SEQ ID NO: 382343 - DNA, 122 bp, Homo sapiens
tcagcgtggcaggagggtggcgtgtgcgtcgtgtggctcagagtcagcgtggcaggagggcggcgtgtgcgttgtgtgggtcggagtcagcgtggcaggagggcggcgtgtgcgttgtgtgg

SEQ ID NO: 382344 - DNA, 122 bp, Homo sapiens
tctcctaaataaaactcctgttttctggagccaataactgatcaataaagggtttaagggcggggggcggtggctcacgcctgtaatcccagcactttgagaggccgaggcgggcggatcac

SEQ ID NO: 382345 - DNA, 122 bp, Homo sapiens
ttaaaaatcctagatgattccgatctgcagtcaaggttgaaagccactactcttagtagacgacctcctatatttcaatgaagacacggacagtaacatggggggtctgtatcaagtgcctg

SEQ ID NO: 382346 - DNA, 122 bp, Homo sapiens
cacctccccctcgcactttcgaggggagtggctgcccagagataaccagagactgcagggcgccttgggccacctctctggaaggcacagacaggtgccatccttttctgggcctgaaggct

SEQ ID NO: 382347 - DNA, 122 bp, Homo sapiens
gcaggattgcttaggacccccagtcccaggagcacgtgattcgatccaccgaacggagagcgaagaaagttccaaggactggcaaagctctgtagaccagccgcacagctacgtcactgagc

SEQ ID NO: 382348 - DNA, 122 bp, Homo sapiens
aaacggcataagggcatgcatatatatttcacttagtgcctaatagaatcttgacacatgcggctggattggacagttctctagtcaagggggatggcattccggctcagactataaatgga

SEQ ID NO: 382349 - DNA, 122 bp, Homo sapiens
caccgggagcctggtgagggcggcgagcacagaaggagccccgggcccgggacatggaatcgcgcgagcccggcgcgggacggccggagacgcggccaacgctgcggccacgagcagccggc

SEQ ID NO: 382350 - DNA, 122 bp, Homo sapiens
caatttcagtatgactagggctgtggtaggagcaatgctaggcgatggggaatccgaagacgcacaggagtccaagggttggctgactgcagaccctcatcataagtctagagccggagaag

SEQ ID NO: 382351 - DNA, 122 bp, Homo sapiens
gcgtctgtttggggagctcaccggagagccggggccgtcacgtgggcgcgctgactccgccggctgccggggacagcctgtactacagccccggccactaaatcagaccacgccgccagacc

SEQ ID NO: 382352 - DNA, 122 bp, Homo sapiens
cttgaggtgtgctgggagctgtggtccgggtcggcgggcgcgcaagttggctagtctctgcggccacctccggaagggtccgccggctgtgctggtgaggtgggtttcgggggtgttctccg

SEQ ID NO: 382353 - DNA, 122 bp, Homo sapiens
gtgggggtagccggagaggaggctgttgttcggcgcagccacgggcctgctcaggatgtccgtgatcccgtggggggttccggcggccagctgggggcccagccctggggggctgagcttgt

SEQ ID NO: 382354 - DNA, 122 bp, Homo sapiens
ggctggtcacgtgggccgtgggtttcccaatgcctttacaagcgaaggtcggaataaccacggctgagaaagacactctagtggctaaaccttcgctgctgcagtaaaatgcctttccttcc

SEQ ID NO: 382355 - DNA, 122 bp, Homo sapiens
agtggccaggcagcccgtgccaggcgctcagtccacgagcggtggccgcccgttcacccccgatcgacccccagctatggaatttcatttattaaatgtcgaggaggctgctggcagccctg

SEQ ID NO: 382356 - DNA, 122 bp, Homo sapiens
gcgggtcaatttgcctagcattgttgcacctgggtagaaatgggactcaggccaagaattcggttcgagtgttaggaggacgctgaggggagtcaggaacttgggtgggagtcggggggaaa

SEQ ID NO: 382357 - DNA, 122 bp, Homo sapiens
ggcaggaacttcagccgggtctcgccatgatggaacatggaaagcaacctagatccttctcggcctctgtatcagctcccaagatcctgcatgttagaaccgtggttgtcaaccttgaattt

SEQ ID NO: 382358 - DNA, 122 bp, Homo sapiens
gaggaattgttagttttcttgtaagtcttgccccaatcctccccatatttcaaggagggccgcagagtccaaaataaaaaacctccagtttcctttttttcctcagttggctggatttcccc

SEQ ID NO: 382359 - DNA, 122 bp, Homo sapiens
tttgatgggtcaacttgactgggctaaaggatgtcaagatggatggtaaagcatgatttccgggagtgtctctgagggtttctggaaacaatcagcatttgaattggtgagctgcgtaaagc

SEQ ID NO: 382360 - DNA, 122 bp, Homo sapiens
cctggtcatcacataaacaccagcaagggcagtagtttagggacagctttgctctgtattcgaagaaaggtctttggtctgcttagaaattaagtttggagcagcctgggaggaaatagaag

SEQ ID NO: 382361 - DNA, 122 bp, Homo sapiens
tcactgtggtcaccctcttctacagctcagtcattgctgtctacctccagcccaaaaatccgtatgcccaagggaggggcaagttctttggtctcttctatgcagtgggcactccttcactt

SEQ ID NO: 382362 - DNA, 122 bp, Homo sapiens
gggcccccacctgggccctgggcacctcctgcactggcaccacctggtggaggggaacagcgctctctcccgctggacccaggatggaggtggctcttgtgtggcccagctgagagctggct

SEQ ID NO: 382363 - DNA, 122 bp, Homo sapiens
ccttggacgtattacttgaccttgctgattctttgtttctctctctttaaaatgaaagggcggtagtagatgtttttaagtcaactttaagttttttaagttcaaatataattacctttatt

SEQ ID NO: 382364 - DNA, 122 bp, Homo sapiens
tcctgcccctcccgccgtctccgggggccttttctccgctcggcaccagggtgtccccggcgccgcctgatcctgttagcgcggtactctgagtgcagtcagtcctcggcgctgttttccct

SEQ ID NO: 382365 - DNA, 122 bp, Homo sapiens
cgatgggcagaggcgagagagatgagagctctcaatgaaacggtgatgctatttataaggcgctgtgagatcgcaatgtcctgctgatccggtaggagccagctcaaaggggattgtcttca

SEQ ID NO: 382366 - DNA, 122 bp, Homo sapiens
ggggcatagttgcaccatcgttatctaaaccagtggttctcaaagtaaggcccgaggacccgtgtgtgtccccaataccctttcaggtgctatgtggaaagtatatgtccaactacctgcat

SEQ ID NO: 382367 - DNA, 122 bp, Homo sapiens
aattttgactgcaacacagcagaagttccatcaagactcctcagctggaactcctccaggcgagaggctcttcagatctccttgttcttgggaaggatgaagcagaacagttgacatcatac

SEQ ID NO: 382368 - DNA, 122 bp, Homo sapiens
cccctggcaactacagtgtaccacatgaccacaaattcttgctcacggtggattggacaccggacctaagttgggccaatcagaactacttcccggcaacttgcgattgtcactgaaagaaa

SEQ ID NO: 382369 - DNA, 122 bp, Homo sapiens
ttctcgagtataaacggagctggtgacgaggcctgacacacggtcacacctcaattcgcgcgtggcgcccggcacaggctgagccccgccagatacaccattagcctccgctgaataatctg

SEQ ID NO: 382370 - DNA, 122 bp, Homo sapiens
tgctgggcgtacatggggaggcctgaccctcgtccttgtccagagctcctgccagggcctcggcgtcagactgagcctgcggcgggggagagaaggagaggagcgctgatccgggcacccag

SEQ ID NO: 382371 - DNA, 122 bp, Homo sapiens
ccatgtggctctcaggtgggctactgtaccacacttctcttccttcctctccatgtatatcgcaccagcctcctagtcagttttgatgagagaacttgaataccttggttgccggtgaagga

SEQ ID NO: 382372 - DNA, 122 bp, Homo sapiens
gtgggcaaggggcggggacgttggagggaggctgtcttggatgctggagccttcggttcccggctctgctgagcagaaaagttgaagtcaaggaagggttgaggcttcctcacaagggcgcg

SEQ ID NO: 382373 - DNA, 122 bp, Homo sapiens
gattgaaccgtgtaaacgcacagctccccatcaacgcttcctgcgtcgggctcaagccagcgttgtggaaaaaaagcatagcatggttttttcacgttgtcaagagcgttctgaggcctgcc

SEQ ID NO: 382374 - DNA, 122 bp, Homo sapiens
ggagaacacccgcacagctggggcccctctgctgagatgctgcccaaaataccccgctcacgactgccttccaagctaactgctgaagccgagagttctgacgggcagcagtgggcgtgcat

SEQ ID NO: 382375 - DNA, 122 bp, Homo sapiens
gaactggaggcaggaggaggcaggggatcagtgcaaagaatgggtcagcatggatggaggcgggtatacccaacactgggcctccacaagttcttgagaaagtcaccaccggcctgccaaga

SEQ ID NO: 382376 - DNA, 122 bp, Homo sapiens
gcgcggggcggggagcggggtcggctcagtggccctgagaccctagctctgctctcggtccgctcgctgtccgctagcccgctgcgatgttgcgcgctgccgcccgcttcgggccccgcctg

SEQ ID NO: 382377 - DNA, 122 bp, Homo sapiens
cgcgaccttggccgcacctaaagcagccagccgtgagtgcagaccccttggccagcgtggcgcagtggccctgagcagtagtggcatgtgtgtagatcaagtcggatctagtccagctcggt

SEQ ID NO: 382378 - DNA, 122 bp, Homo sapiens
ctgaatgctggataatcagtgtttcatggcagttaggtaaatcccaggcactgaagtgctcgcagcctcacagatcgaacgacttcctacaacctgtcacttctgtttttacctaatggtcc

SEQ ID NO: 382379 - DNA, 122 bp, Homo sapiens
gcctaggtcggcccagccctcccaggcccagtactgaatctcgcatctcaagtgaagcaacgtggagggaggtggtgttatccatgaggacagggaaggtgggcagagcaggtctgaagact

SEQ ID NO: 382380 - DNA, 122 bp, Homo sapiens
accactgagtctggatggtcaccgggcagccgccgagagctgagcttccctgactggggccgtgagactgcctggctcacaccttgcggaggactgagactccccacccccatggccttctg

SEQ ID NO: 382381 - DNA, 122 bp, Homo sapiens
gtaagtgaaaaggggaagtaggaggttcagaatcagagcaggagacatggcagaagcaatcgtcagagtgatgtgagcactggctggtgccaagcactaagcaatgtgggaaccctctagaa

SEQ ID NO: 382382 - DNA, 122 bp, Homo sapiens
gccgcccgggaggctcggatccggggcgcccagtgccccccgctgccttccgtgagccgtcgggccccagctccacgtaggcctcagacccagccctgtttctgcttgcggggccgcggctg

SEQ ID NO: 382383 - DNA, 122 bp, Homo sapiens
aatctcacggggtagaccgcaggttaacacctctcagactccttgaaaaatagctggtgacgggtcagtgcccagagctcacctgcctttcgccaaactctaaacacccctgtgtgtttccc

SEQ ID NO: 382384 - DNA, 122 bp, Homo sapiens
tggaggaagtgcctgtgagagagttgtgtctctcagattctgttcaccacaggtgacactcgatgcaaccccaaacctcttctgcacaatcccaaggggtgctgactaatccaacccaaagg

SEQ ID NO: 382385 - DNA, 122 bp, Homo sapiens
aaggaacatttaccaagatgtgcagagctttgtgggtggcacagagaccttgtttttgtccgtgcttagacaaaaatcatgaagagaaggcccggcatggtggctcacacctgtaatcacag

SEQ ID NO: 382386 - DNA, 122 bp, Homo sapiens
gggacaggacacaccctcttggctccccacccacaagttactagcatgaaacaaacccagcgaactcaattcaaggaaagggaaagctcgttttctaggcatagggtcctgcagtggggccg

SEQ ID NO: 382387 - DNA, 122 bp, Homo sapiens
cagggaggccacacgtcagcttgcatcacgggactcctgggaaagaaaaccaacctaaaacgacagactgctgcgcagtagaacctgtttggttcttctgaccaaagcaggccatacccagt

SEQ ID NO: 382388 - DNA, 122 bp, Homo sapiens
acgctgactctcggacggaggcgacggttccccctctcccttcggcccccttgaccccttcgtgctttttgcaagactcctttcggttccaggggccagaatactttcttttctgggctcct

SEQ ID NO: 382389 - DNA, 122 bp, Homo sapiens
acaaatgtatgtcaaatgaatgaatgaatgaaaatgctagaaaatacgaagcagatgcaccgaggaaatgtttctttgaagtatcggatataatggaatctgagagcctcgtggcaatcagc

SEQ ID NO: 382390 - DNA, 122 bp, Homo sapiens
tgagtacagtccctgcctggcgccttcccggggtgggctcgtggggccccggggcgagggcgagagagcctcccaaggatctcctgaggccgggagaagctggtggactgggccatcgccgg

SEQ ID NO: 382391 - DNA, 122 bp, Homo sapiens
ttggccctggagcatgtgggccccggggcgtgggttgagctcggtcttcccctgaggccgcgcggagctgggcgactggggcgaggactcgcgcacaggtgagtactggccccggttgcggc

SEQ ID NO: 382392 - DNA, 122 bp, Homo sapiens
ccgggacactgaggcctctgaccacccagcacccccacaggcctgtcctgcacccattcacggccacgtgcaaggcttaggtcccaccagccctgcctgacgggacactgaggcacagggtt

SEQ ID NO: 382393 - DNA, 122 bp, Homo sapiens
ccctatactctgcaaatatgggtagaaaaacaacattcctgctacataaccagactctgacgttttccttttccctccaaactgtatcaatctctgggaccctggggtttcctccattccag

SEQ ID NO: 382394 - DNA, 122 bp, Homo sapiens
aaacagaaacatttgtccagtttagtaaatgtcagcccagcagcatgaagaacaaaatatcgaatgtcatttccatgaagcaaagttactgggccaacagcagatgcatcccttggcaccag

SEQ ID NO: 382395 - DNA, 122 bp, Homo sapiens
attggcctgccggtgccaggccgccattggctcggagttcctgggaggcaggccgagggccggatcccagttctgattggccgttgctcaacacgtgtagtggggatgctctctgattggat

SEQ ID NO: 382396 - DNA, 122 bp, Homo sapiens
gcgcacaaaacagttgtcacaactgacgtcaccaggggcggagcctttggacggaagtgacgcttgcgcggccgcggcggagtcgtcatagaggcggggctgcggcggctgcggtgttcctc

SEQ ID NO: 382397 - DNA, 122 bp, Homo sapiens
tttcctttttatctgccctcaattggctttagaatcatggtttgtaccaagcaggactcacgaaatgtttttttaccctttcatatcatgctgcctgagctcatgctttggggtaacttcct

SEQ ID NO: 382398 - DNA, 122 bp, Homo sapiens
ccaattatacaggacccccaaactggccagtggaccactgcaaccgccatttactttctccgctgcaagcaccataggctgattcaggaagataaactgaggctcaaggaatttcgaagtgg

SEQ ID NO: 382399 - DNA, 122 bp, Homo sapiens
gtcatctcccacagccttcattttaacaaccctcaacacaaaacagtcattttcttggggcgtccctgaggtgtgaacctcctccctcccagacacccacccactctccccatcttcctaca

SEQ ID NO: 382400 - DNA, 122 bp, Homo sapiens
aatccatgcaagtgggagaaagttccaatgcacactttccatgcttccgagtctaggtctcgtggtgaatattcagcaatcattcatgagaaagaatgtattttgttgtatgacagaagggt

SEQ ID NO: 382401 - DNA, 122 bp, Homo sapiens
tagtccttcaagatttcctacatcccggatgaagaggtgagctccccttcgccccctcagcgagcccagcgtggggaccactcttcccggggagcaaggccacgaccctgggggcgcttctt

SEQ ID NO: 382402 - DNA, 122 bp, Homo sapiens
ctccaaatcaaaaccactaagagttcctcccgcgcagactgctgccccttcagctgccctcgattttgctccacgcctgccggccagagcctcccggcgtttcttccgccccagcggagtgc

SEQ ID NO: 382403 - DNA, 122 bp, Homo sapiens
ggcaggaagctttggcatgatcctccacgggcgaggatcacgtagagacgtgtagagacgcgacgaagcacgaagacccgtgtttgacgggttgccaggtgcctacatcagagctcattaaa

SEQ ID NO: 382404 - DNA, 122 bp, Homo sapiens
gaagagagcgtgaggctggggccggggactggacgccctggcacctctcccaccagcccacggccccacctctccgtccacactctcagtggccatgcacttgtgccccgccctctcgctga

SEQ ID NO: 382405 - DNA, 122 bp, Homo sapiens
ctctcccgttccctctctctccactcttccctgctcccagtcacccccacccacaacccccgctgatcacatcctcccggtgcccgccacaggcaaccagagaacaacagaccctcctccag

SEQ ID NO: 382406 - DNA, 122 bp, Homo sapiens
cctcccggggactgacagatggaaagcccagctcagtctccctgctctattgcagatcttcggggactattaccacttctggcatcgaggagtgacgaagcggtccctgtcgcctcaccgcc

SEQ ID NO: 382407 - DNA, 122 bp, Homo sapiens
tttgcaaggcacggagaacctctttctctttgacaccagctttgtgtgggcctgatgacacgtttggacggctctatttctttgaaggccaacctcagaggcccacggacgcgtcgggcact

SEQ ID NO: 382408 - DNA, 122 bp, Homo sapiens
gtcccagcacaccttgcgacgcccagcgaccacaattcccagaacgcactgctcgtcgcacgcaggttttccttgttgccggggtttgtagttcttctcgatcgtgtcagtttgtaaggcga

SEQ ID NO: 382409 - DNA, 122 bp, Homo sapiens
catcctggctctggctggtgaccgaggactgtctccgcagggccccctgaaaggaggccccgctcttgaaagtattgactacttcaatctgcaacggaggagagaacgagacaagttgcgag

SEQ ID NO: 382410 - DNA, 122 bp, Homo sapiens
tctcagaggtcagaatgtcagaatctgagtgcatgtctttgccccttcctaggtgtgtgacgtggacaaattactgattcattttgtgcctaacttccctcatccacaaaatggggataatt

SEQ ID NO: 382411 - DNA, 122 bp, Homo sapiens
atagtgagggccaatgcccagggttggagggaggagggcgttcatagaagaacacacatgcgggcaccttcatcgtgtgtggcccactgtcagaacttaataaaagtcaactcatttgctgg

SEQ ID NO: 382412 - DNA, 122 bp, Homo sapiens
aaaaaaaaaaaaaaaaaaaaaaaaaaaagcttgccccaacatcggtatattccaaattcgcgcgtgcttccgaaggctcatattctcggccctttcagacgctcttaaaatttttctcctag

SEQ ID NO: 382413 - DNA, 122 bp, Homo sapiens
cccctctgagccctctcaccttgtcctgtggaagaagcacaggctcctgtcctcagatcccgggaacctcagcaacctctgccggctcctcgcttcctcgatccagaatccactctccagtc

SEQ ID NO: 382414 - DNA, 122 bp, Homo sapiens
cctttttccgtcccagagatgtgggctgcaccttatcacaccagacattccgattccccacggctgagttcatctgcgtcgtaagccgccccacctcaacactcccggcgcgaactcaccca

SEQ ID NO: 382415 - DNA, 122 bp, Homo sapiens
ccctcctgcgatgcccgcggattggacggctgagtctggctacgcgggcctccgcgggagcgcgaccgggccaatcaagagcttggcgtattttacaaactgagaaagtagctccagcagca

SEQ ID NO: 382416 - DNA, 122 bp, Homo sapiens
ttccaggcagctgtgggaattgggtaaaagtgtggtgtctggggccagactgcctggggtcgatgctgcctccattatttaccgactgtgtaatcccaggaaaattagttacccttcctgtt

SEQ ID NO: 382417 - DNA, 122 bp, Homo sapiens
aggctgagtcagaggaggagaaggaggagtttgataatcaggactctgaaacgcctctaccgagtactagccaaaaggagagtccggaagtaatttatgccaatccccccagtcttcctaaa

SEQ ID NO: 382418 - DNA, 122 bp, Homo sapiens
gaggccaccggggcgctaactgggtggccggtgggccgctgtggcctcgagcagcctcttcgcgcggccccgcaccccggcaagcagcagcgggccgcgacgcccagcctgccagtgagctg

SEQ ID NO: 382419 - DNA, 122 bp, Homo sapiens
ccagacacttctccactctgagccaagtgctaacccaaacagttcatgactcaacagctacgtagtctatccacccattcatgtgacattgtgaaggcgacactgccacaagccacaaccaa

SEQ ID NO: 382420 - DNA, 122 bp, Homo sapiens
gcaactggtcagcccctcacagcaaaaccatgcaggtcccaaagtggtcagatagctgagcgcatggctgagacagcagctagtcctgtgagggcagagggaatctcaggaaatgtagacga

SEQ ID NO: 382421 - DNA, 122 bp, Homo sapiens
gtgcctagcggcatctcgcatatgtctaatggcatctcatgtgtgactagcagcatctcacgtgtgcttagcggcatcttgcgtgtgcttagcggtgtctctcgtgtgcttagcagtatctt

SEQ ID NO: 382422 - DNA, 122 bp, Homo sapiens
atccttctgcaagaaccaaaggtcacctcaccctcgttcactgcagagcctgcctcccaccggccctgctgcttcactctgctcccaaacgcagttcccgagggcaagccctgtgtggcccg

SEQ ID NO: 382423 - DNA, 122 bp, Homo sapiens
gcgaagagagggaccaaggtgaggtgtgggggtggggcatagcctgaggacccccactctcgccaccaagagggggaggggacttccggtggggagggggcgagtaggcggggctcttgatt

SEQ ID NO: 382424 - DNA, 122 bp, Homo sapiens
ggccgtagggggcatgaaatgacgcaggtcagaccctcagaaggcgcccggcacagaggccgctcagaggccactccacgccccgtcgctgccgtcatcctcatcagctttgctcacgcgtt

SEQ ID NO: 382425 - DNA, 122 bp, Homo sapiens
cacttctgggaacctgtgtcatcttctttttctgttttttgagacagagtcttgctctgtcgcccaggctggagtgcagtgacgtaatctccgctcactgcaacctccgtctcccgggttca

SEQ ID NO: 382426 - DNA, 122 bp, Homo sapiens
tgcggcgtctggggctgacggggccacgtgtccttcgccacttcttccagcatgtccccccggggtccccaggggctgggcatcctggcccaagcaggacagaaccctccctccagggtcct

SEQ ID NO: 382427 - DNA, 122 bp, Homo sapiens
gggctgccttcaacaagaatcctgtcaggtcagtttagccagaatttcccctaacccactcggatgcctttctctctccctccctccctccctccctcccttccttccttcctctctctctt

SEQ ID NO: 382428 - DNA, 122 bp, Homo sapiens
cttttaaatcaagccgagctgccggcccctggcacacacgaaggtggccccctccctcctcgcaagcccacccgccagtcagaacgtgagctccctcaggaaggaagacagaggccttcgcg

SEQ ID NO: 382429 - DNA, 122 bp, Homo sapiens
ttccctgccacggaaggggcactagctctcgtggccgcatcacatacccgcaacatgatgcgatgctcgatgttgagaaggatcttcttcttctccctgtagtcccggatgagggcgtgcag

SEQ ID NO: 382430 - DNA, 122 bp, Homo sapiens
cacccacgcccggccactggcctccctctgaagccaggaaactagttggggagtggcactcgcagctgcagcaaatctcaaaataaagaggcaacggcctttctcttcctctccatctccct

SEQ ID NO: 382431 - DNA, 122 bp, Homo sapiens
caagggaaaacaagtggtacactggtatttctatttgataacctgttctctttggaattccggttagaaatcaaaggcttacttgagttttaatgctttcgggacttcaaatgcttttctat

SEQ ID NO: 382432 - DNA, 122 bp, Homo sapiens
gtgcaggtgtcacggtgtcgctgcttctcactaacgcagggctccggcgtgcaggtgtcacggtgtcgctgcttctcacttgtgtaagaagtgccaccgcagaagtaccacagctggtggca

SEQ ID NO: 382433 - DNA, 122 bp, Homo sapiens
ctctgaagtgagctggttgcctagactgctccactctgtaactctcattctggggttccacgagagaggcagaagctaattagggtccattctcatgataatgccaaaagtgcaagaagaca

SEQ ID NO: 382434 - DNA, 122 bp, Homo sapiens
acaaaatgcaaagtgttcttctgtggacgaaactaaccccagaggaggactggttgggaacggtaatgccccgtttatcaggctccaccaagaacaggctgctctgaatgagggtggatatg

SEQ ID NO: 382435 - DNA, 122 bp, Homo sapiens
agcaatctgcctgcctcagcctcctaaagtgctgggattatgggtgtaagccaccatgcccggcctgggatgatttccaagttagcacctccctatatgggtggccccaacccttggggaaa

SEQ ID NO: 382436 - DNA, 122 bp, Homo sapiens
acgctgccgccgccaccttccatgttggcaggtgccgggttgatgtcgtcagcagcagaacggctccgcccaggtggtgacgcagaatcccggcgccgcccgcccacccagcccatggctcc

SEQ ID NO: 382437 - DNA, 122 bp, Homo sapiens
gagctaatggtaatagaaaacctagcaagacctgtctgttcagattcttgaactttctttcgattgtagcatttctcctttcaggatacagtacgggatcctttctggaatggaggtcttat

SEQ ID NO: 382438 - DNA, 122 bp, Homo sapiens
ggacaggagtctctccgagtcgcagctcgccgccgagaagcacccacctcccgcggccggcgcagcccaaggccctggcccctatagcccggcctaggcccgccccaggcggggctaggggc

SEQ ID NO: 382439 - DNA, 122 bp, Homo sapiens
ggcgtgtgcataaactcacctcagaacccacctcgcctgtcatgacttctgcctcccctgcgctccactagggacggagctgtctctgattccctcagccggagagcagcggctcccgccgt

SEQ ID NO: 382440 - DNA, 122 bp, Homo sapiens
caccctggaggagtggcctagagcctcaggtcacactgggtctcccaggtgtgaggagggcgccttggtgcgtttgcttttttgggagccctacatttctctcatctgcgattctacagttc

SEQ ID NO: 382441 - DNA, 122 bp, Homo sapiens
cttcttttcctgccggagacggatcggcgagtggggtttcgctcccactccgcaataggccgtaaacacttgggtccatcgccacaagttggttctggtgtctccaaacttgtatttcagtc

SEQ ID NO: 382442 - DNA, 122 bp, Homo sapiens
ggctctgtttgaggctgccgctggactaggcataccacaagcagcttttgatgcagacgccgacatcgggacgaggggaacacggtgacgccccaaaactcgagacaccagcaacaatggag

SEQ ID NO: 382443 - DNA, 122 bp, Homo sapiens
ggatgcagtgagagttgccgtaaaagcgatgaaaaagtcatcggcaatccttaccacatccgtacatcggcagctcggaggcttgactgctggagcgagatgtggcccaagacgccccggtg

SEQ ID NO: 382444 - DNA, 122 bp, Homo sapiens
tcaatcaattcagaattttcacagaatctcttctcctttctccataaattatggtagggccgtcgtggtggtgatgtttttatagtttcatgaggaattatgtccatctggccccagttgtc

SEQ ID NO: 382445 - DNA, 122 bp, Homo sapiens
gggctgggaaggtttgtgcacccgggtagtccctggctgctgctgccaggctgcctcagccggtcgctgctgccgcggcgactggcgacaagctaccagccacctacgatggcccaaggagg

SEQ ID NO: 382446 - DNA, 122 bp, Homo sapiens
aaatttcttcatactcaactttcagattctttaatctccagctcagcttcaacaattcaacgctgttctttctgaaaaagtacacatcgtgccttctctacttcgctcttggaacataattt

SEQ ID NO: 382447 - DNA, 122 bp, Homo sapiens
agtgcaatggtatgatctcacttgatcttagccaaaaggctgagaagcgatgcaacggtacgatctcagctcaccacaacttccgcctcctggattcaagcaattctcttgcctcagcctcc

SEQ ID NO: 382448 - DNA, 122 bp, Homo sapiens
caaccaaccccattggctggctcgaggagggggctcgcgagacagcgccggcccccggcgcgagactcccagtccagtggccgcctggaaattgcggagtggaatgcagccactagagacgg

SEQ ID NO: 382449 - DNA, 122 bp, Homo sapiens
tccgtttctctggacctggatggaattgttttactttgcatcgccggactgcgctgcggacggggtggggcggcccaatggcccccctggggttactctgctccccttcacgcttccctccc

SEQ ID NO: 382450 - DNA, 122 bp, Homo sapiens
cacggcagccgctcctgattggcggccacggcggtcacgggcaaggtgccccgggattgacgccgcctgtggccagagccggagtaacgggactcccagctgcgcgtcgcagtcccgacgcg

SEQ ID NO: 382451 - DNA, 122 bp, Homo sapiens
ttccaaacgtcagcacagtcgaaaacgtgcaccccgcagcctccactgccgcgagccacacgccacctccagagggccggggcctacagcctcaaggggccgcccaaggaggcggacctggc

SEQ ID NO: 382452 - DNA, 122 bp, Homo sapiens
aaaaacttacccaccacaataaagtttccacacttagatacacatgctgaggattcaattcgatctcccaaaatctgttcccattttaccttcccagagtaaaagtcaactgccttcattct

SEQ ID NO: 382453 - DNA, 122 bp, Homo sapiens
agtgacacagctcgtttacagcgcctccatggaccagataagtgccatcactgacagtgccgagtactgcgagcagtatgtctcctatttctgcaagatgtcaagattgttgaacaccccag

SEQ ID NO: 382454 - DNA, 122 bp, Homo sapiens
cacctcaaccggcaccgccacgctagctccacttcccggcgacggttgacaagaaagcgccgcgtggggctctcggaaaacagggaaggtccgttttcgcttttcatttcttgacctgtggc

SEQ ID NO: 382455 - DNA, 122 bp, Homo sapiens
ggtaataaaaaggccgggcgaagaggctttggggacgaatcaagagccgtgttaagggctcgctgaaaatggatggaagacattattaaggctcaatggccatcttatcaaaatccaatagg

SEQ ID NO: 382456 - DNA, 122 bp, Homo sapiens
ctgtcgtgtcatctcacatctgtcatctctcaggtcatatccaacacactgggccacccacgcacagggacgacgcgacagccctgtggctccaccgcacaggacagccacgactggcaatc

SEQ ID NO: 382457 - DNA, 122 bp, Homo sapiens
cagtctcccatccgtgtaagggccgggcagcaaggctttcatcctttgcaattgagagaacgcttcctgattgttctcatggcttagaaataccccttgatttgcattcgaaggaaataagg

SEQ ID NO: 382458 - DNA, 122 bp, Homo sapiens
cctgagccaccgcgcccggccaacaccgactcttttcaccctcccaggtatctagagagtcgagtgggagggaaattgctggctctggccactacagtaacatcagcacctagagcagtgct

SEQ ID NO: 382459 - DNA, 122 bp, Homo sapiens
ggagttgaggtgggggcggacacttcccctccatatccaatttgctcttgccacagcgggcgcgtcttcgtggttacaaagcgctttttccctgatgacttttttccccttttcaaaaacac

SEQ ID NO: 382460 - DNA, 122 bp, Homo sapiens
gagactcctgcgttgctggtgggatgtggtgcagccgcttccaggagcaatttggtgtcccgtcctaaagctgaagaaacgcatttcctctggtcagtgccactcctagacaggccaccctg

SEQ ID NO: 382461 - DNA, 122 bp, Homo sapiens
cagaccaaactaaaaaatgctgatttaggaaacacacccttttcctgatgaggaaagttgcgtttttgtccaatatcttaaatcttaaggagcttttaaggttttggcaccttttttccctc

SEQ ID NO: 382462 - DNA, 122 bp, Homo sapiens
gcagccccgccgcccgccgtggggtcggggacagggagaagggagtgcctgcctggtctgcgccccccgcctgtcagcccttgcctcgaggctctggggcacccaactcgtcgactcctgac

SEQ ID NO: 382463 - DNA, 122 bp, Homo sapiens
ttgcacttccggggtcttcaggagattgatacgtcattacgcacttgacggcagcggcggcgacaacccggaaacgggcggggcgcgggccctgggtaggttcctgtggtattaggtggact

SEQ ID NO: 382464 - DNA, 122 bp, Homo sapiens
agaagccgagtgactgaatgaatgtatgaatgaaggaacaggtcagtaactggcggttcccgaagttggagccgactaaattaccccttcaagacgctaagcaaaagccactccgtcgacat

SEQ ID NO: 382465 - DNA, 122 bp, Homo sapiens
gcatttgaatctttcctgggctgctgggtctgtctttgctgcctccttgtcctttttccacggaaatgagcacacacagtctctgtggaggtctgtaccttcccaaccctttctgccagggc

SEQ ID NO: 382466 - DNA, 122 bp, Homo sapiens
ccttggaaccagcgttttgtttggcttttccgcttttcactctacgaaaaagcccattggcggctacccaggttaccgtcctgttgccattgcgcctgcgcggcggtttgtttaccagtcca

SEQ ID NO: 382467 - DNA, 122 bp, Homo sapiens
agggagagagtaaacaaataaatgttccagggcagtcaaccacatgccccattgatattccgtgtgaaagtgtctctggcctaaggcacctggtttgtttgctttttgtcccgtcctgggag

SEQ ID NO: 382468 - DNA, 122 bp, Homo sapiens
tagccctctcttcgggtctggatcagccctctcttcgggtctggatcagccctctcttcacgtctggatcagccctctcttcacgtctggatcagccctctcttcacgtctgatcagccctc

SEQ ID NO: 382469 - DNA, 122 bp, Homo sapiens
ctaaaatgaggacaaagcccgcccaggtctagagcgcgcgcgccgtggcggccaatgggacgctgaagctaggttgagtgacggacttgagcagccaatgagtgtgcagtttgttgcgatgt

SEQ ID NO: 382470 - DNA, 122 bp, Homo sapiens
ctggggaatgagtacagtgtgttcccctaaagctaagtctgcaggggttgttccttggggcgttgggactttatttttttcttagttggggtgtgtgtggtgacattcgtcttggtcaggca

SEQ ID NO: 382471 - DNA, 122 bp, Homo sapiens
agttttattgctgccttttggttgggagtgaatataccaagaccctcacatagccattctcgaagtcccacctgaacaaaatgattttgaattataattctgttcttcaaacatttcaggaa

SEQ ID NO: 382472 - DNA, 122 bp, Homo sapiens
ccccccaccgttcacatccccgcgcgttctcgcgtcctcgctgggactgcgcccaggagccgcaggcacttacaaaacaaattgctgcctccatcactgggctcagtaccacctgacactat

SEQ ID NO: 382473 - DNA, 122 bp, Homo sapiens
tcttcctcctcctcttcatcgccgccggccgcggcctcctgctcgaggcctgctcccgagcgcccagcggaatccccgcccaggtctaggctgccgttcccgggctccatggcggggcggcc

SEQ ID NO: 382474 - DNA, 122 bp, Homo sapiens
acgcagttctcaagtgttactacaggttggaatcacctgggagagcttttataaggccgccgccaaggccacgccccgtacctgagaatctcgggagggggggtgagatgcggcatcagtag

SEQ ID NO: 382475 - DNA, 122 bp, Homo sapiens
acccacctgttccagcctcccaggctgcccaggccctgtgcttcctccccaggggacaggcgcaccaccccaggggaaaaccaagggctttgtcatagataggggcaatgttggttagagct

SEQ ID NO: 382476 - DNA, 122 bp, Homo sapiens
ggggcccccgcgtgccccggccttcctgggacctgctgaggaccatctgtgctcggagagcgtcctgttccaatgacttcatcctgcagagaacagcgggcaggggtgacttggggcaggag

SEQ ID NO: 382477 - DNA, 122 bp, Homo sapiens
gagagagggagggcgaaaggaaggaaggggagccagaggtgggagtggaagaggcagcctcgcctggggctgattggctcccgaggccagggctctccaagcggtttataagagttggggct

SEQ ID NO: 382478 - DNA, 122 bp, Homo sapiens
aaaggagcctcttcctcagggtagagacagcttcctcccaggcagcaacttggatttcagcgcttctcaccctctttccctagactaggatttgtttcttaatctctgtgctactgacattc

SEQ ID NO: 382479 - DNA, 122 bp, Homo sapiens
aaaggacccttttcttgatcctctcttgtccagagaaaccgcagcacaaattgcaatggacggttccccctctcgcaaagtgccttttagcttgcgcgcctgcctctgagggccggggcgag

SEQ ID NO: 382480 - DNA, 122 bp, Homo sapiens
cggggctccttccccggcaggcgtgagtacgcgcctcagtcctttgcaaaaacgcgttcccggttccttggaggtaacacgaaccagccattaccaggctgggggattagggtctaaggaca

SEQ ID NO: 382481 - DNA, 122 bp, Homo sapiens
tgtcaccctcaccactgcctggcaggggcgggaggcgcccgggctcatttggagccaggacgaagccaagcatgtgcctggctcatggcccgcacatcaaccccactcagacttgaggactt

SEQ ID NO: 382482 - DNA, 122 bp, Homo sapiens
cccatgaccatgctcagaggcagccttgcagctgctgcccagtcctgtgggctgcagccgcgtctccctgagctgcctgtcaagccagtggtacatttcattccctccccattgactcaccg

SEQ ID NO: 382483 - DNA, 122 bp, Homo sapiens
agaaagaagaaagaaagataagaaagaaaggggaaaagcggcaggcgatcggaacggagccggcaagtcttccagaagctggaggaaatgcgccccggcctgccaggccttgggcccttccg

SEQ ID NO: 382484 - DNA, 122 bp, Homo sapiens
gtttgattcttgaacttgcattgggccagagaaagattctggttgttgatcctggaggcccgcagaccacagcttgtttaagcctgtccattgctggcttgggctgttcctaggcacagcag

SEQ ID NO: 382485 - DNA, 122 bp, Homo sapiens
ccttcactccctccctccactgcgccctggagctcaacagagtgcagctttctccaaaaacgctcctgatgtggaatgaggtgcagaaagctttatggaggaagcccagtggggccaaccaa

SEQ ID NO: 382486 - DNA, 122 bp, Homo sapiens
ccctggtcgggtggggggatgtctggatacctcctctgtggaaagaactggccacacatccgcagaggtgactcgggctgagaacccaggctcctcctccctttggtgacacgcccctcggt

SEQ ID NO: 382487 - DNA, 122 bp, Homo sapiens
aacaagctttatttgttggacttgtggtgggtacaccacgttaaaccggtattgatacaccggagtcacagttgaccagttaagtcagaatttctgagtgcaggacttgctgaatctcccca

SEQ ID NO: 382488 - DNA, 122 bp, Homo sapiens
tgaagtttgatagctacactcgctttctgaagtccccgctgtaccaggaatgcatcctggcggaagtggagggccgtgcactcccggactcgcagcaggtccccagcagcccggcttccaag

SEQ ID NO: 382489 - DNA, 122 bp, Homo sapiens
tccaagaaaattagctcctccctcgttctccacctgctctgagctgggagcagccagaggcggtgcaagcgcccagctccccagagctccccaacctcggacctcaccgcaggggcgctggg

SEQ ID NO: 382490 - DNA, 122 bp, Homo sapiens
cgcacttgttcacaatgaaataggggcaactgagggatttagcctggagtaacactcattcgagattttcactgtgttcttaagaggcagcatggtgcagtgggaagaaccctgcactgaga

SEQ ID NO: 382491 - DNA, 122 bp, Homo sapiens
gattttccagtttctaccattccctgtaaggcactgagacgcaagatttcaaggcccactcggggtaccctggcatggacatcgagtcgttctagcgctgagcttcaaaactattcctttcc

SEQ ID NO: 382492 - DNA, 122 bp, Homo sapiens
cagggagggtggagagcctgtattggggtggaaccctttgactcgacaagctaagggctacgttgaagtggcttatctgcactcctagttccagagacagtagttatctcgggccccaacat

SEQ ID NO: 382493 - DNA, 122 bp, Homo sapiens
tcccgcccgtggacctctaaacaccgggcggggccgggtgtggcggcgcgctcggacgttcgtcattcctccgcgccctccgcctgccagctgattggcccctgggccaggggcggggcact

SEQ ID NO: 382494 - DNA, 122 bp, Homo sapiens
ggtacgtaagcgggaaaggggtgccaagtctcagctaaaaaatcccctatggcagagatccgagtacacatgcagcagtttccaccggtggggccccgaggaaggggaggatgatgggagaa

SEQ ID NO: 382495 - DNA, 122 bp, Homo sapiens
aggtctgggtaagctaaagcgagcagttagctaacccttcctgccacggggatcctggggcgaaagaggacaactgggcggtcagttacatgtgctggtgtccagccgctgcctctctttcc

SEQ ID NO: 382496 - DNA, 122 bp, Homo sapiens
tggaggcaacgatacaaactcggaggcagagagggacaagatggctcccctcagttcgggcgaggctgcggaattgccagacagtacttatcagggatacatcttaactagaagcttcttcc

SEQ ID NO: 382497 - DNA, 122 bp, Homo sapiens
ccttcccccacctggatcccaagcatcccttggactctgccaggacagagccacagatgccgggggaaatgggaaatgactggagacacagaggacagccacattcaaagctggtgggaaag

SEQ ID NO: 382498 - DNA, 122 bp, Homo sapiens
cggagtggggcgagcaggggcgggacggggcgggactgcggggaggtggccggcgggccgcgccgcgagccagtatctcagagagcgcggggtccggacagccgcgcgctgagggtctcggg

SEQ ID NO: 382499 - DNA, 122 bp, Homo sapiens
cagatagcctgtcctggcctgtctgtcccagtccagggctgaaagggtgcgggtcctgcccgcccctaggtctggaggcggagtcgcggtgacccgggagcccaataaatctgcaacccaca

SEQ ID NO: 382500 - DNA, 122 bp, Homo sapiens
gtgtggcgccctcctcgccctggtcctccaggaactccagcagctcaggggcactcagcacgcggtcctcgcccgagtactgatggaagatctcctccagctccggccgcttcagcagccgc

SEQ ID NO: 382501 - DNA, 122 bp, Homo sapiens
cacttcctcgtccgtgttcaaccagcgcctttcggcctctcccttggccccctccccagacgcccacgccccgcactcgcctcctgtggcctttccgggcagactccgcaggcccgggatcc

SEQ ID NO: 382502 - DNA, 122 bp, Homo sapiens
aatttaaatatttgttctcccttacccctcccaccccatccccgctgtgccccccatccccgccccttctatagctatttcgattcctggagagcattacacatgtgtcccatcccaggcct

SEQ ID NO: 382503 - DNA, 122 bp, Homo sapiens
tcatgccgatggcttttgttctctcatcgttttagcaggtattttctttctcaagcaagccggagtcatggaagggggaggtccatcaggacactgtaataatatatatataaataacaagc

SEQ ID NO: 382504 - DNA, 122 bp, Homo sapiens
gtcctttcattagtataatgacatctactaactacatcagtttgcagaaaaatattcttacgaaaatagtccataaaagggagattgggtagaagcggctgatgaactggttacattaacat

SEQ ID NO: 382505 - DNA, 122 bp, Homo sapiens
ctaagtcaaccacctatgtgtgtttccttgactgtctttactacttttatataatcccctcggggcagaaaccacatctctttaatcttttcacacatcctcctgcccctaagcaggaaaac

SEQ ID NO: 382506 - DNA, 122 bp, Homo sapiens
gctcccctccgggccgagccgcccgaagcgggcgccggcgtaggccccgactcaggcaggcgggaaatcccggagtccccgcccgcggcccgcagccccccaccccaggtcggcgtggcctg

SEQ ID NO: 382507 - DNA, 122 bp, Homo sapiens
cgggggcggctggcgtgtgttttcccccacttggggttgttccacgcagttcttgacctccgctggccacacctgcactgggagcccggcgcccgggctgcgctccgacaaggctgagcacg

SEQ ID NO: 382508 - DNA, 122 bp, Homo sapiens
tttatggagctgacattccagtggggtcactgcataaaacaacaagaaaacaaacaaaatcggcacaatgacagaagccacaatggctgggagatgacatgggcaacctctctgggagatac

SEQ ID NO: 382509 - DNA, 122 bp, Homo sapiens
ttagaagttggggccgtcacagctttctcatcgaagtgccagatcccaggacactacaaacgcttgataaatactaaattagcactgtggctttctagcctggggactgacaaatggaagcg

SEQ ID NO: 382510 - DNA, 122 bp, Homo sapiens
ccacacaatgaggagagttttgcaaacaaacgcggccgttgctccaaggtctcgggtaaccgattggcaaaacctaggtcttcccacttagggaagatggcccaagagcaagaaggcgaaac

SEQ ID NO: 382511 - DNA, 122 bp, Homo sapiens
ctccccgcagactcatattcctcttgtaggtgggaaagggacggagaggtgcagggggaacgccctgttccacatgccgtatttactctgggcatggctaatgactccagggccttatcatt

SEQ ID NO: 382512 - DNA, 122 bp, Homo sapiens
ccatggctcgccacggggaccaagtgtccctgaatctctgacttgagatttctctgcttccgcagctcctctccacacctgttccctccccttctccctctgtgtatgccaccctctgggac

SEQ ID NO: 382513 - DNA, 122 bp, Homo sapiens
cacggagccccgacgtgagcagctcaccgggagacagttggcaatttaacactgatactacgcaacgagggccatgcgtgttacaggcatctgatgggaactattttgggtgacacatttga

SEQ ID NO: 382514 - DNA, 122 bp, Homo sapiens
cagtggctgagggacaggcagcacctccatcgtggatcccctgggcaaagcgatgaatcacgtccccatgcaagattgcatcacactactcagagctgtgcaccttttaaaacccaggaatt

SEQ ID NO: 382515 - DNA, 122 bp, Homo sapiens
tttttccaaaggcttgtgaacctgctcagtcagattccacgtgtgcctgcgctcaggcagcgcgtctgtcatcaacagcttaattccgttttcgcatcaaaccacaccagcagacagtgcgt

SEQ ID NO: 382516 - DNA, 122 bp, Homo sapiens
tcaaagtcgtgtctttcatgagctggtggaaacaccggagcgcccgctcctggaaagccccgttctcatagcgctcatggccaaacgctccccgcttggcagcatccgccagctgtaactgg

SEQ ID NO: 382517 - DNA, 122 bp, Homo sapiens
gaatccgggacggcggcaggtgcttcacatcaggaggacgcgagacaaaggcagggtgggcgcgggctcgggaagaaaagtcctgttttgtcacaggttaaaatcaattttgatgattgaaa

SEQ ID NO: 382518 - DNA, 122 bp, Homo sapiens
gctcaagcgatcctcccacctcagcccccaaagtgttgggattacaggcatgagccaatgcgccaggccccagacagcattgtcgagaaggcttctccaggaaggtgacctttgaaggagac

SEQ ID NO: 382519 - DNA, 122 bp, Homo sapiens
cggaattgtggaagaaacaggatcgtgcactgagaactgtcctctttattctaccaagtacgatttattagccaagttgacatttgtcgatttggttatagtaactcttacaagcaattctt

SEQ ID NO: 382520 - DNA, 122 bp, Homo sapiens
tgccttgggtggaggaagggctattgccgctgttgtggctgttttttaaatgcattccttcgttgccacaggaatgagaaattaacagcagaggaatgtaggacaaaggtacctgcacgcac

SEQ ID NO: 382521 - DNA, 122 bp, Homo sapiens
ttgccagggtgctgagcaggggtggggcgtgcggaccgtagtcagaagtggaggcccttgcggagggactcccttggtcccatccagttcagggggcactgaccggcggcgagagttcgcgg

SEQ ID NO: 382522 - DNA, 122 bp, Homo sapiens
ctaaccgtcgcttaccttggtttccacagcgacgccatcagggggcgtggcaaagggacgcgcggggcagagacctcctttggattggtggatggtcaagccccttctctttagcccctcct

SEQ ID NO: 382523 - DNA, 122 bp, Homo sapiens
cagggtggggtctatatgtatttacatccatctctgtccacatacaccattcctaaggaccggagggtgcgtctcctaaaatgacggccacccctcgcatgcacccaccgtcagcacgctgg

SEQ ID NO: 382524 - DNA, 122 bp, Homo sapiens
gcgttccccggcctgcaggcgcagctagaggcgcagcactggctggagctggagcggagccgcgagcgcaggctgcaggcgctgcagcagggaggctcaggacccgggcccgcgcgccgcct

SEQ ID NO: 382525 - DNA, 122 bp, Homo sapiens
ttaccacacggcggccatctcacgttcatcagggtcggggttcatcagtttaccacacggcggccatctcacgttcatcagggtcggggttcatcagtttacgacacggcggtcatctcacg

SEQ ID NO: 382526 - DNA, 122 bp, Homo sapiens
gtccatgatgacgtcaatcaaccaaataatagatatccactatgacaatttcatccagggcgatgtaatagacactgggaggggtggaaaataggactcaatgctatggtcagaagaagttc

SEQ ID NO: 382527 - DNA, 122 bp, Homo sapiens
ccgggaggtggaggtctccccggtgctgagtgctggtgggagtgcaagggacaaagaaggcgcatctgttcccagccccggagaagctggttcccatggcgactgcggagcaggccgcggct

SEQ ID NO: 382528 - DNA, 122 bp, Homo sapiens
tgctgacgctggcgctgtccgggaccagggcccgaggccacctgccccccgggcccacgccgctaccactgctgggaaacctcctgcagctacggcccggggcgctgtattcagggctcatg

SEQ ID NO: 382529 - DNA, 122 bp, Homo sapiens
ccggacccgacaccgctaccctggctccccgccggcagccggcagccagcggcagcggatcgaccccgttctgcggccgttgagtagttttcgatttcggctgatttttgtccctctgcgct

SEQ ID NO: 382530 - DNA, 122 bp, Homo sapiens
tgccctggggacggggcagggctcgtgagtttcagtggggcggggttcggccgggggcggcggcaggacctgagcagccaggagggctgggggacagtcaggtcaggccggtggctacccgg

SEQ ID NO: 382531 - DNA, 122 bp, Homo sapiens
ctgcgcttctctatgggcctctgtgatgcaagcagccatcagacagagtgccgtccctaacgcctcatgagcaaacgcatgttcacaggtgtctacgtgagcaattagcacatacagcacgt

SEQ ID NO: 382532 - DNA, 122 bp, Homo sapiens
ctccctcctcttctgcctccctctgctctgggaggcagcagcattggcggtccgtgcagccgcgtgcgcttgcgcaagaccccccccctcctccctccccctcagtctccccatcctagtta

SEQ ID NO: 382533 - DNA, 122 bp, Homo sapiens
tgaacgtggccctccgtgcacggcaagcagtacaggaacgtgttcggaaggcagagtgcgcggccaacagcgtgggcagcttgcctccctgctctggctgcttttaagccagcaaacgtgag

SEQ ID NO: 382534 - DNA, 122 bp, Homo sapiens
taggtctgagagaaggcctcgcacaaaacactgtacaaacccgaaaggaagtctgagagacgaaccgccttcctccctgaagcttctagaactggagcagaaagaaggtgtggcccagggcc

SEQ ID NO: 382535 - DNA, 122 bp, Homo sapiens
ccccgcccgcgccggtaataattagcgggcgggcggggcccgcgcgtcagccgcgggagccggccaatccagtggctctcctccgcggtcgcgtcataggccgaacaaccaaacagaaaagt

SEQ ID NO: 382536 - DNA, 122 bp, Homo sapiens
aggcctcaactcccagaaagctgcctgccaggtcacaagagccctgtgaggtcttcctatcgccgggacactgggaggcaggcgcggggcgggtccgccgggcgacgcgctgtgattgggcg

SEQ ID NO: 382537 - DNA, 122 bp, Homo sapiens
acaccagagggcactgcagggagtgagcgggcctgccctccagagagcaggctgcagtgccgtctccacaggctggcattgaggtgggcggcctgctgtctcctgactgccctgattggact

SEQ ID NO: 382538 - DNA, 122 bp, Homo sapiens
gctcctgctgagcaagggaactagagtggcccagtctccacctgggtctggctccgttcccgaagctgattcaggaattgagtcatcattcgcaacctgaagtcaaggaacatcttaattag

SEQ ID NO: 382539 - DNA, 122 bp, Homo sapiens
ctctccatcttccaaagaagacttttcagtataaaaggtgccctaaatcctttgtgatgccgcccacaagcagcgtgcgctgacacaaagcaacgccgccggccactgctgcctgcagacaa

SEQ ID NO: 382540 - DNA, 122 bp, Homo sapiens
cggtgacaggtcagcccaatcggggctgtaaacagacttgacaggtttgttctgggctgacggccattgactaggttctcagaccagataagtcacttggctgagtccacagtaggtggggc

SEQ ID NO: 382541 - DNA, 122 bp, Homo sapiens
cggtgcccaccggcctctccgagtgcggggccctccgagcccacgcccacctggaacttgcgctggcccgcaagtgccgtgcgcagcccggttcccacccgcgcctctccctccacacctcc

SEQ ID NO: 382542 - DNA, 122 bp, Homo sapiens
tcagaacccaggctggctagattatctatttccccagaatttccatttttcaaaagaaaacggaaactcaaatgtgcatgtgaaatctgatttttttagcttgtgtggaccaaacaaaacgt

SEQ ID NO: 382543 - DNA, 122 bp, Homo sapiens
ctaatgctgcttttcaagattaacgtgcattcccagagacaagactgccacctggacacacggctggaaacgggagagctcgtgcctctcagaggagaaaatggagagaatttcaacagtac

SEQ ID NO: 382544 - DNA, 122 bp, Homo sapiens
caaaagtgaggaagtgtgtagctctgttgatagagagttgtaaaaaaaataaataaatagcggtactcctcaaaactgtcaaagttatcaaaaacaaggaaagtctgagaaactcaacagcc

SEQ ID NO: 382545 - DNA, 122 bp, Homo sapiens
tggtgggcatggggttgatggcaggaatggagtgctggggtgctgggaaaactgggacgtcggttgtattggcaagaatatcacgacaggtgtcggggttcagatgaagttgggatgtctga

SEQ ID NO: 382546 - DNA, 122 bp, Homo sapiens
gataaataggctatattttgatcttcttgggggaggagattagataggaaagcaacaaaccgttggccccaaaggaaagagaatctcttgaagaattcagtaaaaatagaataaaatatcga

SEQ ID NO: 382547 - DNA, 122 bp, Homo sapiens
agtccctggggtgttcaggagtcccgggaggtcgggggagcagggtctgcaacaaggggccgggcgcttagactccaaggaggggagcgagctgcggccaggtggggcgaggtcatttcctg

SEQ ID NO: 382548 - DNA, 122 bp, Homo sapiens
ctgagctgaaactccattgatcactcgacctccattaagcctctactctgactggtaggccgagtaaagcttttggtttccccagattagtatcaggtcagagccactgtgtagtaatccct

SEQ ID NO: 382549 - DNA, 122 bp, Homo sapiens
tggggcaggggcttagtgggacccccagcggctctcgactagggaggtcgaagaggacagcgcgaggagtctggcttcatcattgaaacattggctttaaggaagctcgaggggtctggctt

SEQ ID NO: 382550 - DNA, 122 bp, Homo sapiens
cttgtctccctgcgaattgaagctgggtgctgctagtgctgggggcaggcgtgggggagtcgcggaggcggggaggggggctgggcagaggttggaacgtctatttttagtgagggttttat

SEQ ID NO: 382551 - DNA, 122 bp, Homo sapiens
ccaggagacacttcaaccctttcgccgccccttgcccgccctcacctgaaccgcgggcgccggccccctaacccgcagcccttctccggccgcgggctcccagacgcactcgctcccgcaag

SEQ ID NO: 382552 - DNA, 122 bp, Homo sapiens
tctgccaggtcctcggccagagtccagtcgccaggttcagcgacgcttctggaaagtatgcgatccagggcgctgatgtgcactaccctgtggggcaccgaaatagcttaactctatttaag

SEQ ID NO: 382553 - DNA, 122 bp, Homo sapiens
ccactggagacgcagaggcaggctcattctgggctttaattccctcttcgctaaacgaggcgttcggtcgcctcatcagaagtgacaggaaagaaaataagtggactctctctcctggacac

SEQ ID NO: 382554 - DNA, 122 bp, Homo sapiens
cccgaggtttccacagcgagacgaggtagattcagggctgggacccgggaattctggccccgggctccttcccttcctcgtgttgcggacactaactcggctcgcgtgtcccctcatttgaa

SEQ ID NO: 382555 - DNA, 122 bp, Homo sapiens
ccctcgctttcgccctgaactttccttgtgttagttctcttccactagtgcctggttattcgtctgtttctcacagtagactgctagctttgcgagggcaggggcagcatctgtgtttaatc

SEQ ID NO: 382556 - DNA, 122 bp, Homo sapiens
gggaggcgtttcttctccctcagggtctttcaaaaggatttgcctaaagctggggcaagccggtggcggctgccccagacgcgcgacgaggcgcaagtggcgcagctgccggcccgagagag

SEQ ID NO: 382557 - DNA, 122 bp, Homo sapiens
aggcatgccgtaggattacgggaacccaaagttcacgaatgcaaacttcacgaggctgcccggccccatcctttccagaagatcatatctacagcaaaacggtgctttatcctagaaatccc

SEQ ID NO: 382558 - DNA, 122 bp, Homo sapiens
agagcagctccatggtccagcagcattgctactcgcctgctctgcagggaacgcgcagaacggattggaggcaaaaaacaaaacagggagggggacatcaaggagagaaattgaagtacgaa

SEQ ID NO: 382559 - DNA, 122 bp, Homo sapiens
atagaaggcaatgagcacctgtcgggggaacaaccacctctgtagaaaggtcacagagcccggactgcaggacattcctggcagcccagccacacccatctcctgacaatgcatcttctgtg

SEQ ID NO: 382560 - DNA, 122 bp, Homo sapiens
cggggtgacactcgccctcagataatcagaagattccgtggatccttttccatttggcagcggcttctctggaggtttcccggaaaacatgtggaggagagccttcctctgcgggtcttgtt

SEQ ID NO: 382561 - DNA, 122 bp, Homo sapiens
cctgaccgcaggtgatccgcccacctcagcctcccaaagtgctggcattacaggcgtgagcgagagcacctggccctcatttgtttttcaaagaactcagtgaatgtggaagggacagggaa

SEQ ID NO: 382562 - DNA, 122 bp, Homo sapiens
ttattgttaggaaactgaaaatgcctgccacccaatattcacagagctgagatgcaaatccgtaaacttgtgcactgtttattataactcagtgacactccagcagaaccatttctttataa

SEQ ID NO: 382563 - DNA, 122 bp, Homo sapiens
aggatgcatttggctcacaattctgatgtctaggaaagttcaagattgggcatctgcatccggttatgtcctcaggctgcttccactcatggcaggaggcaaagagaagccagtgtgtgcag

SEQ ID NO: 382564 - DNA, 122 bp, Homo sapiens
gtgatttaatgagcagtttatctaaccaattgtcatggatctgatatccggcccttaaagcggaatttctccacccactcttaactgtccgggactacattacccagaatgcagcgggagca

SEQ ID NO: 382565 - DNA, 122 bp, Homo sapiens
gtgctaatccccaaatgttcaacaaataggaagttactcacagtgtctccgaaagcagaccgaatccagggggcctgccctccccagtggttaattacaaacttaattaaaatgggtctgca

SEQ ID NO: 382566 - DNA, 122 bp, Homo sapiens
cactcaatatgttggctttgtttagtgactaagccaaagaaaaaatttaatcagtgagaacgtgtctgtaattatgttctaatccaaaataagagggtgagaaatttttcacctcaccgaga

SEQ ID NO: 382567 - DNA, 122 bp, Homo sapiens
cacccggctcccggccttagggttcctgcttttccatggggtcttggggtggtgcatccccggcacccctacagcatccgccccttccgagcatgtcttccccgtcacagagaacttcatgt

SEQ ID NO: 382568 - DNA, 122 bp, Homo sapiens
tgtttttaaactctgatgttctcatcaccttttcctgctggcttctcaggcagatgtagccgaggcccctccccggggagcagcagacaccacagaccctcgggcgctcccgtcttcagcaa

SEQ ID NO: 382569 - DNA, 122 bp, Homo sapiens
ggagagtgggcctggctgaggtggcggccccaccgcgcagagcgcccagcgcaggagctgcgtccacgctggcctggagcaggtgaaaggtttgatgggagactccatgtgatgcaatgcag

SEQ ID NO: 382570 - DNA, 122 bp, Homo sapiens
cttccggactgggctgtcttccggcggtcgtgggaacagctgccgttggctccccgacctcgcattcaccagaggagagggtgctgccaatacagggaaacagggccaccccgttcccaggt

SEQ ID NO: 382571 - DNA, 122 bp, Homo sapiens
ctcctcccgcagcccggcgggggcggcaaggtggggactccttggtgtggcagctgaccccgggctcggaggtgcaggtcacgctgcattgaggatgtgcttatcttgtcgtcctccgtcgg

SEQ ID NO: 382572 - DNA, 122 bp, Homo sapiens
accagcccttgagaggcgggaagtcgggaggttgggagggtgctgggggtgagaggggggcgggggaggattgtgactaaagtttatccataaaagagttaaccagacacatttcccaacgc

SEQ ID NO: 382573 - DNA, 122 bp, Homo sapiens
gggaggtggaaggctgtggtaacggtgggcggaggcgggaccatggcgcatgctccgcgacgtcccgggccgcgggcggaatcccccggctaacctccttgggggtgagactgggtgggatg

SEQ ID NO: 382574 - DNA, 122 bp, Homo sapiens
acggactatctcacaggtgatctggactggagcagcagcagtgtgagcgactctgacgagcggggcagcatgcagagcctcggcagtgatgagggctattccagcaccagcatcaagagaat

SEQ ID NO: 382575 - DNA, 122 bp, Homo sapiens
cgctcccgccgcccggcgtgcgcaggcggagcggaccagccccgcggggctcccgggggacggccagccgcccagcgggcatccacaggctgcagaggctccaacccaggacttggctcgcg

SEQ ID NO: 382576 - DNA, 122 bp, Homo sapiens
cgacaaacagcatgtttatttgcagcttttacagctagcaaatcctttggtaccagggagcgcaggacccagtgggggaagagttcaggcttgggctgaatgcccaggactcagctttgcaa

SEQ ID NO: 382577 - DNA, 122 bp, Homo sapiens
gtcaggaggcggggaaggggcggggaggggcggggcgatttataggccccgcccacccatcgcctttgccaccctcgaacgggcaaaagaaagaaagaggcaggtaaggggaggcgaggccg

SEQ ID NO: 382578 - DNA, 122 bp, Homo sapiens
cagagcaggagatttgtagataggcctaacttgctgctgagtgtcaggttgaggctgccccgcagtagatgtcacccgccagccccgctgcaaacctttgctctgagaggggcgggcccgtg

SEQ ID NO: 382579 - DNA, 122 bp, Homo sapiens
gaaccttcttcctggcctccttgtcagttaccaggggcgctgggggccgtttgacatcttcggagaaaggattcggggagctgccagagaatagtcccaagtaaactttgcagaggacggcc

SEQ ID NO: 382580 - DNA, 122 bp, Homo sapiens
gaggaaactaaaaggcgccagcagtaggactttctccaaggtctctgacaaaatatgttgcgggaaaagtcaacccgccccaaattcccccgtgtggccctaactcgaggctctggctcctc

SEQ ID NO: 382581 - DNA, 122 bp, Homo sapiens
atcatggttcactcgctttctggttgtttcatatatttggagggtgggcagagcagatcacggaatacagatagcactgagagggctttaggcgtgtgccagatcccgctggctgccaccca

SEQ ID NO: 382582 - DNA, 122 bp, Homo sapiens
tcgcagggcactttcagcagaatctagagccccagggatttgaggatggatgcggacacccgggcctgaggcagctcgcggccttgaccgaattccacgcgagctgaagcccagggatatcc

SEQ ID NO: 382583 - DNA, 122 bp, Homo sapiens
ccgggagtgccgcagaaccccagcgtcacgaggtgaggggtgtcgcggtgtgtcgcctgccgctggagaccggaggatgtgttcttctcatctttatttttctgttatgaaaactaattgag

SEQ ID NO: 382584 - DNA, 122 bp, Homo sapiens
cctaaggaaggcacacagaaaatattctgggggttcatttgtgcattcagcaatatctaccgagtgccactgtatgacaggtgctgttctaggggctgttgttagagtgataaacaagtcag

SEQ ID NO: 382585 - DNA, 122 bp, Homo sapiens
gcgtgtggttgctgtcccctgtgtgggagggatgggagtctggtggccccatcccagagacgtccccgtgtgagccccggatcccacatctgccatgtgttaagcatgtgctgcatgccata

SEQ ID NO: 382586 - DNA, 122 bp, Homo sapiens
ccagcttcccccagcggtgacaccttacgtaactggcgtacagtatcaaaaccaggaagtcggcttgcacctgggtgtaattttgttaactagactaagatctgattcagttcctagcagcc

SEQ ID NO: 382587 - DNA, 122 bp, Homo sapiens
taagcgtgcatggcgctgcagtacacactaatcaaccatgacgatgtgtgtgagtgtaagcgtgcctggcgctgcagtacacgctaatcaaccatgacgctgccatcgtaagggatggctga

SEQ ID NO: 382588 - DNA, 122 bp, Homo sapiens
ccaggccacatccctgggcgcccgcgctgtcccactcccttcctggtgcgccccgcctcgcggtcacaagggccccaccgcccggggagagctgcccaccccgcgcctgacgcccagggcct

SEQ ID NO: 382589 - DNA, 122 bp, Homo sapiens
cttgcctctccgcttccttgttcttctgcccctgttttttcgcgtaccacatgccgatttcgcggcctttcaggtgcccgggatgccggcccctgccgcctcgaccaccccctccgccgccg

SEQ ID NO: 382590 - DNA, 122 bp, Homo sapiens
acctcctggactcaagcaattcccctgccttggcatcccaagtagttgggatgacaggcacgcatgtcattccatggaattagccatgcccggctagttatttttaatttttttttgtagag

SEQ ID NO: 382591 - DNA, 122 bp, Homo sapiens
gggaaggaaagagaagcaccttaactcttcgccggcagagatcttgttacacagcagcatcgccccacagggcagaggcctctgcagccatcaaagaaaatgagatcgagctaagtgggcca

SEQ ID NO: 382592 - DNA, 122 bp, Homo sapiens
cagacagagataacccaggcaaaggcgcggacttgaggcgacaagctcctggtgaatacccggacccagcctcgccgtcgcccccgtcgtccagcaggggtcgctgttacccagcgaccgcg

SEQ ID NO: 382593 - DNA, 122 bp, Homo sapiens
tgtgggatataatctcgtggttcgccgttttttaagccggtctgaaaagcgcaatattcgcgtgggagtgacccgattttccaggtgcgtccgtcacccctttctttgactcggaaagggaa

SEQ ID NO: 382594 - DNA, 122 bp, Homo sapiens
tgccggagcctccccacccccagtgggctcccacgtggcctgagcctcctcgacgggtgccgccccctgctccgcggcgcccagtcccattgactgcccaagggctgagtgtgggtgcgccg

SEQ ID NO: 382595 - DNA, 122 bp, Homo sapiens
accagccagagaccaagattctgcggtgcacatagtcaagggttgctatggagtccaacacggccccaaacagaagtggtccctgaaaatttctttcccagaaaacttgcatttgaaaaaca

SEQ ID NO: 382596 - DNA, 122 bp, Homo sapiens
tgaccttacttggcaaaaccaacaaaacaaccaaatacaggtctcaagcgatttacagctcggtgcttaactcggtcaccggccgaggggcagccctctggcgccaaagccccgcctctcta

SEQ ID NO: 382597 - DNA, 122 bp, Homo sapiens
tctcccatttcaaaccctttcctgaaagtaagttaagttcttagagaacaatgtcccatgcgatgacattcctgggccacagaggctgctcttcctcaacagccaggcaaagagccctggac

SEQ ID NO: 382598 - DNA, 122 bp, Homo sapiens
acatacatacgcgcgcgcgcacacaccacacacacacacacacacacacacacacacacacgccgcctcgcgcgcgctcgcggcacagcaccgacttcccaaccccaaacacacgcgcgcac

SEQ ID NO: 382599 - DNA, 122 bp, Homo sapiens
ttgtccacaagtgtagaaaaatgtggtcacaagtcagtcctcggctcgcgtacgaagaggcggtctgcccagtggggacgcgggacccccctgtttcccctatttttatttattttttactt

SEQ ID NO: 382600 - DNA, 122 bp, Homo sapiens
ttaaataggtctcatctcccccccaccaatcagatgggagcccagagaagaaagggtccacgtattcttccgtcagactagggactgtgaagacaggaactgcctctcccatcagaatggag

SEQ ID NO: 382601 - DNA, 122 bp, Homo sapiens
ggtgatttggggtagatgacattcatgacgccagctcttctggaagtcatagtaaggcaccgaggggtggctcctctccctgcagcggctgtcgcttaccatcctgtagaccgtgacctcct

SEQ ID NO: 382602 - DNA, 122 bp, Homo sapiens
cacagctggaaactcagtcccagtccagctcagcgccacatcccctctgaacctgccctccgccctccctcgcgggaaaagaccacggagatactgggaacggatagataggattgcatctt

SEQ ID NO: 382603 - DNA, 122 bp, Homo sapiens
aggctgccgcggggagggcgccatcttggccccgcggagcgtgactgtctcggctggaagcgtgggaggccggaggatcagtgactggctgtcgtggacatgctcgctacacctcccggggc

SEQ ID NO: 382604 - DNA, 122 bp, Homo sapiens
ctgcgcttccgcgtcagccgagagctcaggatctctaagaccaagaagctggtgcgatcgcgggcgcccagacttcagtctgaggctcggcggcggcggcggcggcagcggtcgtcctggcc

SEQ ID NO: 382605 - DNA, 122 bp, Homo sapiens
tgtggggatttgggtctttggagaagggagagacttctgcattggcctgagccagccaggcgcctacaatgctccgcagttcacagccagctgagaaccctcagccgagcacagggctgctt

SEQ ID NO: 382606 - DNA, 122 bp, Homo sapiens
gcatttaatgcctgcagtgtcgggggtggcagcgctcgggccggacgtggcgaggccaagcgggcagcgctgctctggtgccggctcccggattgcaggcctaatcgatgcatttttctgag

SEQ ID NO: 382607 - DNA, 122 bp, Homo sapiens
accgtctccagcggcctcacggcatccatgtgcattcagctgaaagtgctcttgggacctcgaagagctgcttgaatttaaggggtaggaaatatgcccttgttccctcccatgccctttgt

SEQ ID NO: 382608 - DNA, 122 bp, Homo sapiens
gactttacctccaaattctggtcccctgtcctgtgttttaacttgtgttaagatcagactcggctttctctttccctttattcagaattttgcacgatagtatctaagactggtgaacacta

SEQ ID NO: 382609 - DNA, 122 bp, Homo sapiens
ccggaacctcagctgtgagaggacagggaaggtggaggagtgagatagaacttgggagcccgggggttgggagggacagggataaataaagacaaagactgaagacaaaaaaaaaataaaag

SEQ ID NO: 382610 - DNA, 122 bp, Homo sapiens
gtggtgctgatccatctgctgggccgtcacctcccgagagagcgtgtgttcctccaaccacgcgtgtcttagcaccagtctctggcaggagccaggagatggggaagacaatttaaatgatt

SEQ ID NO: 382611 - DNA, 122 bp, Homo sapiens
ccagcacgtgcacgacacccacagcgatgggctcgtggaaaacaagctcagcccggctcacggtgcccggagatccacctggcacccatcagtgaccacagttcagggcgtcgggtcttggc

SEQ ID NO: 382612 - DNA, 122 bp, Homo sapiens
ggtcaatttccttccaagtaaatgaaatgcaaataaaaattccagcagtttttcagctgccggctgcccagctgattagcatgacagaggctgggagatgaggcctgacccggtgcacttcc

SEQ ID NO: 382613 - DNA, 122 bp, Homo sapiens
tcccgtggacctgacaactctgccttccccggtgtggtctcgctgttccctttgagagtgcgatgctgccgcttcagccaggacgttctcaaaattagcagaagggcttccttcctgaaatc

SEQ ID NO: 382614 - DNA, 122 bp, Homo sapiens
cgggtggggccggttgtgcgggtggcctatctggggcaagcagccgaggccgactgtgtccggcgtgtggttgagcacgggcaggtgtctggcggtgaccctgcacgtctggtgtttacctg

SEQ ID NO: 382615 - DNA, 122 bp, Homo sapiens
ggacagggtctctctgtctcgacactggacagtgggaccgtcctgggcactgcagggtgccgagcagcgttcctggcctccacccactccatgctaggagcttctcccagtggcgacaacca

SEQ ID NO: 382616 - DNA, 122 bp, Homo sapiens
gggctggaggctgagccgcagaagcgaagcgcgcagccccaatcggactacaatttccgacgggccccgaggccccgccccgcactacgggttgcaatgagggccaactccactttgggctc

SEQ ID NO: 382617 - DNA, 122 bp, Homo sapiens
ttaaacaggctggaccggttcaagttcccagccagaccaggggtgggggtggcgagtgtgcgcgcgcggaggagggcgcggggggccgggaatgggcgcgctgtgggggcccgcgccacggc

SEQ ID NO: 382618 - DNA, 122 bp, Homo sapiens
agcagcgtggcccaccaccactgctcctccttcctggccacgtggaagacgtcccccgcgcggaagctcagctcctcgtccgtccgggacttgaagtcccagaggcccacatacttggggcc

SEQ ID NO: 382619 - DNA, 122 bp, Homo sapiens
ttttggcgatcattccccacatattgtgatgacaactacttttatatcatgtggtgtggtcggtattgttatgtatataacagaaaagtcaccatagacaagtcaaaagcaatttgatgcaa

SEQ ID NO: 382620 - DNA, 122 bp, Homo sapiens
ctctttcaggcccttttgggagaaaataatcatttgcactggttactattgttgacaaatcggttgcctctaatcaattatgagtgcctgtgattgttttcttaggataaattctgtaatgg

SEQ ID NO: 382621 - DNA, 122 bp, Homo sapiens
ggggctggagggacagggaggtcacggatctgggccacctgccggtgagtagaggacgcccgtcgccccccgaaatgctctcttttggcgggttctgcgtaccagagggagggagcggacgc

SEQ ID NO: 382622 - DNA, 122 bp, Homo sapiens
ctgtccgcctccagccgctctcctctgacggtcagtttcaaagaaacacagtctgggatccggagtagaaagaggccgtttcccgtgaaggccatagaggcagtttccaggcgcctgggtga

SEQ ID NO: 382623 - DNA, 122 bp, Homo sapiens
ttacgaaaacgccccattcccaaagtgtttcgctcttcccctccaccagggcacagcacgcgatgctgagggggaagaaacctaaacccaggcagaaaccccgggcgccacaggccctgtat

SEQ ID NO: 382624 - DNA, 122 bp, Homo sapiens
tcactgatgctgttcaaggggccattagctatgaagcagtacctcccgacaaaacgagtacgatttggtctgaagctatatgtactttgtgaaagtcagtctggttatgtgtggaatgcgct

SEQ ID NO: 382625 - DNA, 122 bp, Homo sapiens
caggaacgggaggggccgactcctccccatgcaaacagcggcagcttcccgaggccccaccgcttcctcccagcgcgtaggccaatgggagatttctccaggtcagtaatccgatttttcgg

SEQ ID NO: 382626 - DNA, 122 bp, Homo sapiens
tgagggcagatacatatgtgattaaagtagtaatgtccagatttactcttttgcacacatcgaccttaatttctgttggaaacgcaacacttgctagtatattttctcggtcaactctggtc

SEQ ID NO: 382627 - DNA, 122 bp, Homo sapiens
gtcggatctctaggctggatccgggcctctccaatcaacagcggttaggagggcggggcgcgtgcgcgcgcacctcgctcacgcgccggcgcgctccttttgcaggctcgtggcggtcggtc

SEQ ID NO: 382628 - DNA, 122 bp, Homo sapiens
ctgcaggtcactgtggtcttaggggaccttctgtccttttcttaggggaaatacctggaacgctggggtacagaggagagaccatggtaggggtggagtgatgtagtcagatatgcccagag

SEQ ID NO: 382629 - DNA, 122 bp, Homo sapiens
ggtttcaaaatagccagctaaatgccagaaagctgtataattgtacagaagggcagtgtacgtaaggacagtgtacaatgccatataaggacattttggtcaatgatggattgcatgtatga

SEQ ID NO: 382630 - DNA, 122 bp, Homo sapiens
ctcaggaggcggggccagggtggggcgttgatatgtcgtagcacgtggccaggcggtgctcggactctgggaggcggagcttaggacgggccgacgtggggaggggcccagggtccgggagg

SEQ ID NO: 382631 - DNA, 122 bp, Homo sapiens
cttttataaagacactaatcccatttgtgagggcttcaccctcacgaactaatagcctcccgaagactccacctcctagtaccatcacattgaggatttcaacatatgaatggaggtggagg

SEQ ID NO: 382632 - DNA, 122 bp, Homo sapiens
cgcctctgagtagggcgggcgaggaggcagccaaggcggagctgatggctgcgccgagggcggggcggggtgcaggctggagccttcgggcatggcgggctttggggggcattcgctggggg

SEQ ID NO: 382633 - DNA, 122 bp, Homo sapiens
tgctgggttatgagtgcacgaatgtctcacaggagcaaggctggctcaagtctaattttccgcttttccccggcgacctagaaaacttggtttctctggtggaccagccgccgcgctatcga

SEQ ID NO: 382634 - DNA, 122 bp, Homo sapiens
caaaattcaagggtctgaattctggctcccgaagtagagaattattttggagacaggtagcgtcctatgcttgtctgagtctgcatggcttgggaaagggacacataggtttggggcgagct

SEQ ID NO: 382635 - DNA, 122 bp, Homo sapiens
gggggacatccctaaggaacaggccagaggacctgagctctccctggctgctctggaaggcggaggccccccagtttatccagtccctagagcaccccaggccagatctggggtgcgcctgg

SEQ ID NO: 382636 - DNA, 122 bp, Homo sapiens
ggcctcccgccggctcacctgccactcccagccaatcggggccaccagaattggggctgtcgccgggggggtgggtggctagggcgggaggggaggagatgctgccggcccgaggctgagcc

SEQ ID NO: 382637 - DNA, 122 bp, Homo sapiens
cccgagccgggaagccggtcccaaccttacactgggcggcccccaggaagcccagcgcctcggttcggcgactctgcccagtcgcagctccccagaagtcagccctcggggtcgcggccggg

SEQ ID NO: 382638 - DNA, 122 bp, Homo sapiens
ggcaaggctgatgcggtagtgggcggggccaggtgggctaagcgggacgggcggtgtgggcgggacctgtttggtgggcggggcctgttattcgctctgccttccacccagcaagtctttgt

SEQ ID NO: 382639 - DNA, 122 bp, Homo sapiens
cgacccagctcggagcacgtgcgtcctccggcctagcctggcaggcgattcccaggcccgcgtggtcctcgaaggcccccgtcctcctgcgccatggagaccccggcctcgcgacctacccc

SEQ ID NO: 382640 - DNA, 122 bp, Homo sapiens
atgtgtctttatggaaatcataaaacttcagccttccttggattttgtggcttcatgtttcggcaaacaaatatcatctgggctgtcttctgtgcagggaatgtcattgcacaaaagttaac

SEQ ID NO: 382641 - DNA, 122 bp, Homo sapiens
ccaaattttcttttatgatcgaccactcttcacattcatcactcactgttataagaaaatcggtctctgagcattacatactcttccaatctatttgaacttgtccccattgccttgtgtag

SEQ ID NO: 382642 - DNA, 122 bp, Homo sapiens
caacgtccctgcctcgggctcccgtgattctcctgtcgagtgcctgggattgcaggcaggcgccgccatgcctgactggtttttgtatttttggtggagatgggttttcgccgtgttgactg

SEQ ID NO: 382643 - DNA, 122 bp, Homo sapiens
ctcctgcatctgttcatccggaaagacaggcacacttcagacccttaaaaccagaccgtgcgttaagggcaacgcacgcgccagacctccagtaaataggcgagttaaaaaaaaaaaaaaaa

SEQ ID NO: 382644 - DNA, 122 bp, Homo sapiens
tccacacagcccggctcccttcacacacccccgccccctccgagctccccgactcctccccgcgctccacggctcttcccgactccagtcagcgttcctcgggccctcggcgccacgagctg

SEQ ID NO: 382645 - DNA, 122 bp, Homo sapiens
ggactctgaaccctgtctccagccctgatggggaggagtaatccgattgctttccaaacccggcctcgccttgcaaacttgtccacccccaacccacccggacggccgggccgccgcctcct

SEQ ID NO: 382646 - DNA, 122 bp, Homo sapiens
gctgagcattcttggcctcgcaggccgtaggcctctgctgcacctgtcaactccacctggcggcacagaagctgccaacggtacgtcagtgagttaccttggccgtgttccagtgaaactgt

SEQ ID NO: 382647 - DNA, 122 bp, Homo sapiens
gggaagtccgcagaagtggcccaatggcagagcaggagctccgctctcagtgtggggcctcgtttgggtttgggaaaacatgtcctctctcacgaagacgtgggtgtctccagcgggaccct

SEQ ID NO: 382648 - DNA, 122 bp, Homo sapiens
gggcacgaccctggtttaagatccggctctgggcacgaccctggtttaagatccctgcctcgtcgaaggtcctccatatctaagggaaaagcaatagccaccgccacaaaaccttgacgcca

SEQ ID NO: 382649 - DNA, 122 bp, Homo sapiens
aaatcatcagatgccctcctcccgcagcggtggcctccacctctggcctggcccagcttacgtggtccagcttgtgcaagatccaattccaactccgggtttccggcttttggccactcagg

SEQ ID NO: 382650 - DNA, 122 bp, Homo sapiens
cgaactcctggcctcaagtgatccacccacctcgacttcccaaagtgctgggattacaggcgtgagctactgcacccagccacatcaggacttcctgtaattacttatggcccctcacaata

SEQ ID NO: 382651 - DNA, 122 bp, Homo sapiens
ccaggggcctgggtctctttctcgggtggcgggatggtgatggagaggttgggtggcttccggctctgcaggcggctgctggacacagaggacacgctcccgccattcttgtcagcagaggc

SEQ ID NO: 382652 - DNA, 122 bp, Homo sapiens
ttttagtggctacagagtagttttcttgttaaaaatataatagccttaattatattccaacgtttaggttagagaaggtcttctccaatgctgcgtctacaatcatcatcattttgtatgac

SEQ ID NO: 382653 - DNA, 122 bp, Homo sapiens
ctgtgttccttctaggaaggccggaggtttccacacctctgtggtcgtcactctgaatcccgtctgtagtcttaagtgagatactaggtgacacattgtcttccacgcggcaatataataac

SEQ ID NO: 382654 - DNA, 122 bp, Homo sapiens
ctggggtggtgcgagggggtgggccgccaccccctccggttgccttggcaccattgtaggcgcctgctctgctgctgggaacctccgcagagcccaaggcccttcgttgccagtctgctccc

SEQ ID NO: 382655 - DNA, 122 bp, Homo sapiens
cgctaaggggagggggcggggccttattctcatgggattcgttccctggagacctgtgtccgcggcctctctgggaaagcatgggtcctctccctcacgcggggaaaaggactgcgtctctt

SEQ ID NO: 382656 - DNA, 122 bp, Homo sapiens
ctctgctggccccggggccgggcgtctctgcagataaggcattaacagtccctccgcagacgcaccctgcagatctgctgacgactggctccgttctgcccaggtgcctggggcgaggtgcc

SEQ ID NO: 382657 - DNA, 122 bp, Homo sapiens
acaaatgcatcgcattcccggttgtttgcagaaaatttacagctgagtaataaaagtttacgatcgactcacaagttggattggccacaagaagtcatgtggattccatccatgaacgtgaa

SEQ ID NO: 382658 - DNA, 122 bp, Homo sapiens
tgtgtctacgcctccccctccgccgggacacgcgcactcgctcgctccagctccctctcccgccctgcgccaccacattcccattcagcagcaatgatctgcgcagaggagctgcgcagtcg

SEQ ID NO: 382659 - DNA, 122 bp, Homo sapiens
ttggtcagcgtcgcccttgcgcgatgacgtcgtgcctgggcggaaactttgcgagagtagcgcgggagctgagaagttgcagggttgagttggtcccggcaagtccttgagcagtttgttcc

SEQ ID NO: 382660 - DNA, 122 bp, Homo sapiens
aaaataaacgcatcgaaaatacttcacagataaaatgtaagttgacactgtcttcgcatgcgggagcccgagtgatacaatctgataggcagctgccagcactcataactgcttattaaatc

SEQ ID NO: 382661 - DNA, 122 bp, Homo sapiens
actcaatcgtagggcaggcaagaggggagcagggcgggactcttggttcccggcccaccccgtacctgggggtgcacagaggacacggctgtgagctccacactgaacacgcccttgtgacc

SEQ ID NO: 382662 - DNA, 122 bp, Homo sapiens
gcgtggggaaggggaggtgaccgccggagaggagcagcctgcagcccgctggaggggccccggagccgcacctgggacgcctgtccccgacctctcagtgcccgcggatacgacgctcttgg

SEQ ID NO: 382663 - DNA, 122 bp, Homo sapiens
gtgcatctcagagtggatactgtttctcccattggtccttcacacaattgggcgagtgtccgcggcccggctggcctccagctgcggctgtgtgcccagctcccctggaagtgtgcctgcag

SEQ ID NO: 382664 - DNA, 122 bp, Homo sapiens
cctacatccggaaggggcatggacctgcgcccgggagatcgaatattttccatgatcaaacgctgttcattggctttccctcctccgctaaggcggagcctacttctcttgcgctcccattt

SEQ ID NO: 382665 - DNA, 122 bp, Homo sapiens
cagcccggtgcccggcccagcgtccccgtagtgcgcccgctacacgccgggccagagcttcgctccttctgccgcggcgcgcgccccgcctctcgttttatggcctcctccccgcccccatc

SEQ ID NO: 382666 - DNA, 122 bp, Homo sapiens
gatagagtgctcttaaagctcttgttcatctgggctggagattttaagtctctttggcctcgtagtctgtttggttcatggaacttcctggaaaggaaacacaccacacactgcctttggcc

SEQ ID NO: 382667 - DNA, 122 bp, Homo sapiens
attgaagccgtagcctaaccgtctcggaagctgccatcttgcttggtgctcaacggaagccgagagataccacggggccaccgagaggcgtgctcgggcggctcgcccccgccggagccttt

SEQ ID NO: 382668 - DNA, 122 bp, Homo sapiens
gccccaggcatgcgctcctcccgctgctcccttggcccccagcgcacagctccaaacccgcggggcgagccgtcaccttactctctagccttagccggcccccaaatttaatttctgccctg

SEQ ID NO: 382669 - DNA, 122 bp, Homo sapiens
gaaaacagaggggacagccaggactggtgttgggtgtcagggaacagacggagcggactgcgtgggtccagccaaggaaagtgaagcaagcagacttgtttgggtcaaggttgcctagggaa

SEQ ID NO: 382670 - DNA, 122 bp, Homo sapiens
tagagatgcctcaaagggatgttctccgggggaccttcccaaatccgcgcttagcggtggcgaagggacttcttccacacagacttctcaagggccagccggctggtttctgccggctcttt

SEQ ID NO: 382671 - DNA, 122 bp, Homo sapiens
ccagaaagagcacctcacgccctgggctgcaagcgcagccggacgcgcgcgaccagtgatcgccagccaatggcaagccgggacccggtcccactgctgattggcccccagatcccgtggga

SEQ ID NO: 382672 - DNA, 122 bp, Homo sapiens
actgcagaggaattgcccatcttaagggcaaaggccatcctatttggtttcaccaaatgccgggcattgatccccaggactggcaagagttggagaagtctagtttccataaatctagaata

SEQ ID NO: 382673 - DNA, 122 bp, Homo sapiens
cccttgcacactcgcacttatacacatgcatggtcatgctcacagcctcgcacacgccctcgcacactcatccacacacagctgtgcacaaggaacacagagcagatgttctcagagggact

SEQ ID NO: 382674 - DNA, 122 bp, Homo sapiens
ccgcgctgaggcgcagacacggcggctcctccaggcccattaataacccggagggcgctgcgatccgacagcgcagtcgccacaggctctatttcccgtggccgcctgcctccttccagccc

SEQ ID NO: 382675 - DNA, 122 bp, Homo sapiens
tggggtgcaggcaggggcaggagtgggtgcggcgctggcaggcggcctaggagaagagggcgaggaaatttgttctaacaagatgaagccgagaaatgaggctagcgtaagagtcaccaggc

SEQ ID NO: 382676 - DNA, 122 bp, Homo sapiens
gtgccttcaatgctgctttcttcctctctgtccaattatcctatttgcactcaaaaggaacgtcgtacttgaaggcatattagaaaatatttatttagaatgctatttaccacattgtgcca

SEQ ID NO: 382677 - DNA, 122 bp, Homo sapiens
ctccttcccctccccctctctgttctccttcccctcccgatccccgggcgggccgcagcgcgccacgtacctggccccgcccctgcgagccacgcagggaaccccggtgacgtcaccaccct

SEQ ID NO: 382678 - DNA, 122 bp, Homo sapiens
cccccatggctgcagtcgctgcagatccctgcagcagccgagggtcacctagctcctacccggaaccactgacccctcagtcagacacagcttccgggtcatttaggcagctgcggagatca

SEQ ID NO: 382679 - DNA, 122 bp, Homo sapiens
gagtccaatgtacagcgtgcgttcacgctgagaattcatgggggacgcgggtggttgggccgggagaggagagatggtcacttgtgtgtggtatccaccaactgggtcttctacgccagagt

SEQ ID NO: 382680 - DNA, 122 bp, Homo sapiens
cccatgcttcagaaagctgctcaaagaatggcccggagtgcggaggccaggatgggaaggcgagcttggaagcagaccatgatgcgcctggggcaggtgccccctagaccctggaaagaaca

SEQ ID NO: 382681 - DNA, 122 bp, Homo sapiens
ttccatggtgacggcaaacaaggcccacactggacagggcagctgctgggttgctactctcgcctccgccatgattccgcccgcagactctttgctcaagtacgacaccccagtgctggtga

SEQ ID NO: 382682 - DNA, 122 bp, Homo sapiens
gtaaggcctctgggcatcctcccagctggcaagggcgggtgactgacgctgtgttctgcccggtttggtgctggcacccacccatgtcatctttccacccccggctgcaagcttgaggtgca

SEQ ID NO: 382683 - DNA, 122 bp, Homo sapiens
ggaggaagaagaggagccagcgatcgaggatgtgcaggaggagacacagctggatctttccggggattcagtcaagaccatcgccaagctatgggatagtaagatggtaagaggacaagagg

SEQ ID NO: 382684 - DNA, 122 bp, Homo sapiens
caactaatgatagagatattagggctagttaaccacagttttacaagactcctcttcccgcgtgtgggccattgtcatgctggtgggcgtcccgcccacctgaaaggtctccccgccccgac

SEQ ID NO: 382685 - DNA, 122 bp, Homo sapiens
ccaaggcccagacggagcttagcttcctcttgaaggagccatatctgtatttctggtgaacgtcgtgtttgacatcaaaggaatgtttagagacatgatttcagccttccttacgcagagaa

SEQ ID NO: 382686 - DNA, 122 bp, Homo sapiens
gggcagctgaggcagaattcccggcaggacggggagtagtagcggcgctgcagcgccaggcggccgccgcagatatccgaaaagctccgctcatcctccatgacgcccccactcggccgccc

SEQ ID NO: 382687 - DNA, 122 bp, Homo sapiens
cgggatctgcagctgggctgaaatggatcagagcggggggtgtggacttccatctggagccgggacaggacctcaggaggcaaatgacgaccgtctgtgacacgcaggcccacgtctgtgct

SEQ ID NO: 382688 - DNA, 122 bp, Homo sapiens
agtgaagtaccataaagtgagatattcctgtaagtatcctttgttttcacctataccacacgtttccccatatgaacatcattgcatagatttctattgtccatatcagtaataatttctta

SEQ ID NO: 382689 - DNA, 122 bp, Homo sapiens
cctgggcaccatcaggccccacttcgggagcccccggtgctccgggcccacctgactgggcgtcctctgagtcagggaggtgccagtgctgtggtccccgcgagcccaactgtcccctgacc

SEQ ID NO: 382690 - DNA, 122 bp, Homo sapiens
ccagcgcttcacaccctggttcccagagggcctcgtgcctgcgttcccgcctccccaccacgagtgcttcacctgagggacccctgatgtggcgccctcaaagaacctgcaggcagcggcac

SEQ ID NO: 382691 - DNA, 122 bp, Homo sapiens
aagagaggattttgacttgttccacgccacacagctcgagactcctgactagaaagaacccgggtctcgtaactcgcgatagtccccattcggccctcccaacctctgtctgtgggggcccg

SEQ ID NO: 382692 - DNA, 122 bp, Homo sapiens
gccggaagtgtggcggcggagggcggggccggcgcgttgaggcaggagtgagcgcagcttcggcggtcaacgcgctttattccgaggggcttcagatacagatgaccccagccctgcatccg

SEQ ID NO: 382693 - DNA, 122 bp, Homo sapiens
cccccgcccccggatgggtgctattgttccttggcccagggttgggggccatcatcttcccgtccctacccaatccggcagaggagcctggcctgtgaggagatgccattcctgcctctcca

SEQ ID NO: 382694 - DNA, 122 bp, Homo sapiens
gtttctgcctccagaactgtgagagaacacgtttatgttatttgaagacactgagactgccgtccattgttccagcagccacaggaaacgaatgccctgcattcttacagcactgcggcagg

SEQ ID NO: 382695 - DNA, 122 bp, Homo sapiens
gatgtcggacaggagagactcgtggccaccgctccagtgtccatgagagcccaagtgcaccggaagcctgttctcttcacaaaatagcaagacatgtctatgccacagtgaccatgtgccag

SEQ ID NO: 382696 - DNA, 122 bp, Homo sapiens
ggccccatcaccacagggtttgggaggaggccaaagatcccaccaggttcatgtgtgtgtcgtgcttctccgactgttgaacgcttgccgcctttgtgcccggagcagcttgggtcacttgc

SEQ ID NO: 382697 - DNA, 122 bp, Homo sapiens
ttcacatccgtcccttgcaacaagcaagagaagaggggcgcggcttcaggggacgggcgacggtttacaggacagctcgtacacagtaccagctgacatcccctaagcctgagtgtctaggc

SEQ ID NO: 382698 - DNA, 122 bp, Homo sapiens
gcaaaccacacgtcggagcgctcgggagtcaggtcccatgctgtgtccccctctttgttccgcagctcagggttggccccacgtgacaggaataacctgaagaggggacaggatgcccaatg

SEQ ID NO: 382699 - DNA, 122 bp, Homo sapiens
acccttgttgggggagcaactaggaggcggtatggggagggggacttccagggcactgatcgggacctgggtgctggatacgtgggtgtgttcattttgtaaaaatctatgcatctgaatat

SEQ ID NO: 382700 - DNA, 122 bp, Homo sapiens
acgttcacattctttgactacaacgggcctccgcaggacctggctcggtgggcaattctccggcctcggggcgggcgtccgggcccgcgccgtctgaggttagcgggagcgcgtaccctggg

SEQ ID NO: 382701 - DNA, 122 bp, Homo sapiens
cgaatccatcagcgtggctggtgctgaggccttgctgctctcccacggcgggcctgggtgcggcctgggcctgaggaaggggctccagcggcgggtctgcagctctggcggcggctctgact

SEQ ID NO: 382702 - DNA, 122 bp, Homo sapiens
aagagcggacagcgatctctaacgcgcaagcgcatatccttctaggtagcgggcagtagccgcttcagggagggacgaagagacccagcaacccacagagttgagaaatttgactggcattc

SEQ ID NO: 382703 - DNA, 122 bp, Homo sapiens
gcttccaccaggagctaacagaggaattaggggagctggaggccagctcagatgaggaggcgatggtaactaccagggttgtccgccggcgagtgattattcaggtacccactgttaaatta

SEQ ID NO: 382704 - DNA, 122 bp, Homo sapiens
ataattcctgacagtgagcagcagctgatgcttttaatgggggaggaagactgggaatctcgcttgatgatgacctaggacttcagtcagcaggacactggcccctttcctccccctcccag

SEQ ID NO: 382705 - DNA, 122 bp, Homo sapiens
gggagtgaagaagaggaaaagaagcctggtttgggccgagaggtccttctgcaaagacggcgtcaattaagccggctgttgggagctgccgaaggccccatcttttatagtcacagagtcct

SEQ ID NO: 382706 - DNA, 122 bp, Homo sapiens
gtgctgtctgtcaaggctggcatactagagaggctccgtgtggacaccaagatctgagctcgtgaggtaggtgggagggggaggcatggtgattatggtaaataggggggcccagacaagat

SEQ ID NO: 382707 - DNA, 122 bp, Homo sapiens
cgccgccgccggagtcctgctcctcccctcccccggagcctgacttcactccgccgccggcgcgagcccggcgtaattcacactttgcagccgcggaccttgcgccaaccacggctgccgcc

SEQ ID NO: 382708 - DNA, 122 bp, Homo sapiens
ccgggagcaagagcaggggcggggccgggagcaagagcaggggcggggcccggagacgggcgagaccaggtacagtacccagcccctgggcagaccccgagcgaggagaaagcggcgatacc

SEQ ID NO: 382709 - DNA, 122 bp, Homo sapiens
ccggagcaaatgggcgggcgaggcaacacttgctctgggtgagggtggcgggggcaggcccgggcgaagcggcagcgctggagcttggccaccaggtggcgcagtggccccgcgctcggcga

SEQ ID NO: 382710 - DNA, 122 bp, Homo sapiens
acacggttgtaccaggtagcctttgcttaataagccctcggagtactcgtcctttgagctcgtgggacttgcggggtggtcattaagcgttggtgtgaataccgggtatctccgtctcccag

SEQ ID NO: 382711 - DNA, 122 bp, Homo sapiens
gttgtcctgacgcaggaggccagggcagcctgccggatgctccaggtcacctgcccaggacgggccggaggggaggggctgagggagggtgtgggggacgcaggaggcaccacttcgctgcc

SEQ ID NO: 382712 - DNA, 122 bp, Homo sapiens
ttagcaagatccttgtggacgcttcttttgcatagactttgagagccgctgcactaagaccggaggctgtgtcttgctgctgggtctgggtggagcacaggaagagcactaggcaacggttt

SEQ ID NO: 382713 - DNA, 122 bp, Homo sapiens
ctcgtgacgtcatctcgtcccgcgctcggataggctgtacccactccacgctggttgaggcgctcttaaagtcctttgtaacccagattggagcctgaggggacctctcgtggacgcccaca

SEQ ID NO: 382714 - DNA, 122 bp, Homo sapiens
gactttccgagacagccagccccgtgtcggcagcgttcctgatctcctgcgggccgggtgcgaggatggcttttgtcactctggcagcagacaccaaagtcaggaggggaagctggggaagc

SEQ ID NO: 382715 - DNA, 122 bp, Homo sapiens
cagctcgcgacaacaccgatgtcagagatttcattaaccaaaggttaaaggaaaatgacacggaccccactgccccgccatacgactccttggccacttacgcctatgaaggcactggctcc

SEQ ID NO: 382716 - DNA, 122 bp, Homo sapiens
gcgaataaaagggttacatcttggggcgggggctctctgcgggcttggaggcagaggactcgacaaaatgggcttctctccccgcagccccgggcgctccccctcctcctacgacaacgaga

SEQ ID NO: 382717 - DNA, 122 bp, Homo sapiens
gaatgcttgggactcccttccctgttacatggaagttacatgcctgggcttaaatcccgacgctgccatttactagccaagtaactttgggcacctctggtctccgtttcctctttttaaaa

SEQ ID NO: 382718 - DNA, 122 bp, Homo sapiens
actgctgccctttccatccttcccacggagtcgaactccagccagaggaaggtatgagaccgataaaggagaaggctgacaccagaaaaagaaagttggcccttctacccctcattcgttca

SEQ ID NO: 382719 - DNA, 122 bp, Homo sapiens
taggatgaactatgtgtgacaaatggtgccgttgagtcctctcaactgggaacgagtcaccgtgtatctggagaccatgtgtgtaacgggttgcacctgcttggctggatacaaaggtggga

SEQ ID NO: 382720 - DNA, 122 bp, Homo sapiens
ccacagctgttcatggtggacaacggggctgatgactggcgcatcgccatgacctgcgagcgcgtgttcctcatctcgctagagctggcagtgtgcgccattcacccggtgcccggccacta

SEQ ID NO: 382721 - DNA, 122 bp, Homo sapiens
gtgcctgaggtccgggcaccgggagaccccgtgggggacagcctgggccgatcatgtgggcgagtttgggctagcatagagttggaacaggactcaggatgcagccctggtctacactggcg

SEQ ID NO: 382722 - DNA, 122 bp, Homo sapiens
atagtggcactgtggagaagagtacaaacttcagcagttgacctacctgtgaaagctcatcgtcttcatcgtcaaaggtaaaagccttgaacttggagctgttccaatactcctcctcatca

SEQ ID NO: 382723 - DNA, 122 bp, Homo sapiens
agcgataaggtaaaggataaagccttctcatgcaagcattagacagttgttcccataatacgatcaactcctgtttgtatagaatactaaaagaaatggggtatttgaggtaaacaagaact

SEQ ID NO: 382724 - DNA, 122 bp, Homo sapiens
cgccagctcgccgccatcatctgctgtgtcctcgtaggccctgcacaggcaagtggggcgcgtggacatcgtcacagcagccgccagccctgcctctgagctgccccatcacaccttcttca

SEQ ID NO: 382725 - DNA, 122 bp, Homo sapiens
ctgcctaggagtgtcccaaggttttccttgttaaaattggtctggctggctgctgtgacgcgccacactgtcctgacggtgcacacactgctgtgtggaggaacagaggagtccagctggcc

SEQ ID NO: 382726 - DNA, 122 bp, Homo sapiens
ttctttcatcaggtcctcacaacattgtgcaacaagtgtgaaagatgtagtctccatttacggctactgaaataggctgagagagggtaagtgatttgcctaaggtcacatagcttgtgagg

SEQ ID NO: 382727 - DNA, 122 bp, Homo sapiens
ccggcctcagaactgtgagagaacgaattcctgctgttttaagtggttccttacagcagccgcagaaaagtaattcagggtcctggtgggtggccggcaaagtgggtgccattctccgaggg

SEQ ID NO: 382728 - DNA, 122 bp, Homo sapiens
gagatcctttgcattctctctcaagcctcacgcctcccagaggagtcccaagtagagttccggaagcagcatctaaccccagactcccacggcagggctcctccaaggacgctcagggccag

SEQ ID NO: 382729 - DNA, 122 bp, Homo sapiens
gccttggggggctggtccgcggacaggcagggcccgcggggctggtgaatctgcacttttcggtcccggccgtcgagcgtgcgctgcgggagcggggagcgctttgcggtggacgagctccc

SEQ ID NO: 382730 - DNA, 122 bp, Homo sapiens
tggtagattgagggatatgaacttgcagtaggggcttggtaagaaaaggaagtactcagccggacttgctgaaactaacagctttcacggggaattcagaagaaccttgatgtagaagaaaa

SEQ ID NO: 382731 - DNA, 122 bp, Homo sapiens
gactaacctgggtgttactaataaggagttcaaccagggcccagcaatcaaggagggcttcgtggaagaggtggaacttggagtggcctggaagaatcgcatagaatcagcaaaaccatgga

SEQ ID NO: 382732 - DNA, 122 bp, Homo sapiens
gctcctttagacatgcacccaccttggcaaaggcattgaggtctggatggctgcagggtccgggatggaatggttgaatacagggcgtgtgctttcttctcaaccctcttgcagtccgtctg

SEQ ID NO: 382733 - DNA, 122 bp, Homo sapiens
actccgatactccaatgcaggttcatcaactgtaacacacggaccagtcacggcgttggccgttctctggtttgggcacatgtagaatgacacgtacccaccattacagtgtcactgcctaa

SEQ ID NO: 382734 - DNA, 122 bp, Homo sapiens
ggggcttccccagctccatctgcctcctgaggccccgggagaagcccatgttgaagttctcggtgagcttcaaagcaaacccttaacacacacaaagccccggtgtcggacacacagcagta

SEQ ID NO: 382735 - DNA, 122 bp, Homo sapiens
ctcatcagtattaaatactgctggttgccaaatattccagcttcctgcattctaggaccccgttatgtgggtaaaaggggccttgggactagtttggttcaataaacagaacaggaatgaca

SEQ ID NO: 382736 - DNA, 122 bp, Homo sapiens
gtatgaagccatcagctctgccatcccgcagctctggattaatcatggcaaggcgctaaccgatggagatcagtaggagaggactagaaagcttttcatgtacatcacttatttaggcactg

SEQ ID NO: 382737 - DNA, 122 bp, Homo sapiens
gccccctcccgcccctcctcccgggggctccgaggggtggttatggggcgagggtccttgcggggcccgggcagtgaagggcctggaggccccagagtctgtgccaggtctgagccgcgggg

SEQ ID NO: 382738 - DNA, 122 bp, Homo sapiens
acattctctttaaaaacagacaagctccagagtgaaaacattttgcttccagaaacgggccggatggctaaattagtgcagctgagtacaaagctgaatctaaaaaagcaccaattctaaag

SEQ ID NO: 382739 - DNA, 122 bp, Homo sapiens
agataaggcattaacagtccctccgcagacgcaccctgcagatctgctgacgactggctccgttctgcccaggtgcctggggcgaggtgccaaaggttctctataaagtgcccggctcccgg

SEQ ID NO: 382740 - DNA, 122 bp, Homo sapiens
gaccgcgcgtgtttacggcagggctgagttggggcgtcgatctccttggcaatgagggcccgggaagtggctctcgggcgggagttgagaacgcagggagttgcctagcaacagcgtcctag

SEQ ID NO: 382741 - DNA, 122 bp, Homo sapiens
agagcaatgctgttgggtattctttctggtggtgtgcctccactggccacaaggcagagccgccaccaagatctgcttgtctgtcactgtgagccctacccctgttcgttgtttctaagtga

SEQ ID NO: 382742 - DNA, 122 bp, Homo sapiens
ggtatcggggcgccccttcccctggcagcgtatttcagcccccagagacatcccccacctcggccatccccagcgcctttgcagggacagcagcacaaccatagcagaggtcctgggcatcc

SEQ ID NO: 382743 - DNA, 122 bp, Homo sapiens
ggatgctctctgattggatgcaggattggcgggaaggcagcggggtcatcaaaggctgcgcggttgctgaggcatttccggggtgtcttccgaccaggattggaacagctactgcgctgcct

SEQ ID NO: 382744 - DNA, 122 bp, Homo sapiens
gtaggcgaacaccgcacctcgagtccatctgcgttgctgcttgagggtatggacgatgtgcgggatggaggcccagagctgttcatccctgcaaccaatgttcacgcaaccaccagggggcg

SEQ ID NO: 382745 - DNA, 122 bp, Homo sapiens
aaagcctcccacgaagtctgaacctggtactgatatacgcttcagccctcagaaggcaaccgcttgattctctgcgcaggcgcagcgttctcaacaccgccaacgggcacaaagccacgccc

SEQ ID NO: 382746 - DNA, 122 bp, Homo sapiens
aaaggagggagcaggcagccagcggccgccagccctgcgccgccgccgacacaaagagtgcgggcgattccgcgagactgatttatgacgttttacagccctataaaagctgtagcgacgag

SEQ ID NO: 382747 - DNA, 122 bp, Homo sapiens
ttcaaagagcaccacactaaaccaagggatcccaatgcttcagaaataccaagatgacaacgtctgttacaggtgttaaattccaaccaaaagtagagcacgaacggaaggaggaaaaaaaa

SEQ ID NO: 382748 - DNA, 122 bp, Homo sapiens
ttagattgcagaagggcttgcttgccaggtggaggggcttatactcaatggggtaggcagcgggggtgccctcaactagaagagtgatggcacacctgagctgcaccttgttatttacttat

SEQ ID NO: 382749 - DNA, 122 bp, Homo sapiens
ttgctgctgtaggttttaaattccaacactcagcgggctttatgcatatggaagggacaccgtcttctttcccctctcccccagggcgcggtttcccagcgcttgttcgagagcgagttggc

SEQ ID NO: 382750 - DNA, 122 bp, Homo sapiens
tctcatcgtccttgcagctcatcataccgtgcatctcagcataccatgtagggctctcatcgtaccatgcatctcagcgtaccgtgcatctcagcgtaccgtgcatctcagcgtaccataca

SEQ ID NO: 382751 - DNA, 122 bp, Homo sapiens
ggacgaagcttcgcctactgtttgactacgtgcgtgcagcctcccctcgatgtcggccctcgaaaagagcatgcacctcggccgccttccctctcgcccacctctacccggcagcgggggca

SEQ ID NO: 382752 - DNA, 122 bp, Homo sapiens
aggtacagctgcagacgctgcagctctagaccgcggggtccgggctcaggcagcccttagcgcccaggctgggtccggctgtcaccaccccgagcgtcctgcggcagcctcccttgcacgaa

SEQ ID NO: 382753 - DNA, 122 bp, Homo sapiens
cactccttgaacagacccctagtctgaacttgaggaagagagagacttcccttctaaagacgtctggccttccagcgggaggtgggtattgttccttagcattccataaactgtgttctaac

SEQ ID NO: 382754 - DNA, 122 bp, Homo sapiens
tagtaaacacaggatttcctgcatccgaaatgacttcaacaaattgcctgttccttcaaacgtgatctgttgacaaatttggactctgttcctttaggtacagataagcttactgatggaaa

SEQ ID NO: 382755 - DNA, 122 bp, Homo sapiens
tgcatttttggtagacggagtttcaccatgttggccaggctggtctccaactcctgacttcgggtgatccacccgccttgtctgggattacaggtctgagctaccatgcctggcctatttgt

SEQ ID NO: 382756 - DNA, 122 bp, Homo sapiens
ctactttctgaaatactcagtgataggaatagaagccactgttgatcattaaacaaatatcgaacaccaggaaggttattaacagagagagatgtagagcagaggtttagagaagtcttaaa

SEQ ID NO: 382757 - DNA, 122 bp, Homo sapiens
gaggcaaacacataaggcacgaggcgagaaacgtgcagagcggaggacgaggccgacggacggggaggctgggggggacactaggcagcctggccaactctgcttgtccccctgctctgccc

SEQ ID NO: 382758 - DNA, 122 bp, Homo sapiens
gaaagctaaggcctccacccccgatataattccttaacccagagctttgggatcatccctcgccgccgtcctccagagtacctagagagaagcttccccctcctcttcctgggtcaggagga

SEQ ID NO: 382759 - DNA, 122 bp, Homo sapiens
actgcttgagaggcctgccctgtctcccaagacttcaaataggtaagcaacagaccgtttcgatgtgtgcacatgtgaggtatcatcagtttccacatctgaactaaacctggggtgggggt

SEQ ID NO: 382760 - DNA, 122 bp, Homo sapiens
aaatagtctggctgccaggccaccaaggccgtgctcctgtctgttgcctcttgtctgccacgtggtgtgacagtacccagcaggagcctggcagggacaggctgagaccccagaacttggct

SEQ ID NO: 382761 - DNA, 122 bp, Homo sapiens
cgaccggctgctgcccacactcggagctgttgcctgccacgatgccagcccgaaggttctcgctgtctccagtgccctcctccatggagtaggtcttggagtggttgcctcggcgatgggat

SEQ ID NO: 382762 - DNA, 122 bp, Homo sapiens
agtaggtgaggaaatttatacatggttatactttatagtctgaatggactggtaatgtctcgttaatcactgtgatcagcttctgcttgagtctggaaaagcagactcaaaaggctgacaaa

SEQ ID NO: 382763 - DNA, 122 bp, Homo sapiens
taatagagctacttacttggataggtctgtaaaggttggcaatgccactccccaatgccacggccatagcagtagcactggtatctgacaccatgcacatacttctcccatgaatctccaat

SEQ ID NO: 382764 - DNA, 122 bp, Homo sapiens
gtgtaccgatttacacacctggtgcctggtctagctgaagctaggttcaatttatactaacgtttttagtatttattttcaaataatttggcgtcctacccaggtaaatactcagtttgact

SEQ ID NO: 382765 - DNA, 122 bp, Homo sapiens
ctgcagacttgtccagtgctcccacggcctgtacggacactgtggaaggcctccctctgtcggctttttgccatctgtgatatgccataggtgtgacaatccgagcagtggagtcattcagc

SEQ ID NO: 382766 - DNA, 122 bp, Homo sapiens
atgcagccaatgcttcattctcctctggatgctgccttactttgaattgcttcattcacccgctttgcaggccacattcagcaggggatgaacatttagtggttgattaccaatttcctgtg

SEQ ID NO: 382767 - DNA, 122 bp, Homo sapiens
tctcgcgaggccccagagagcaggcgctgggcagtgtggaggtcgttggagtcacttccccgtcaccagctcctgtgcctgccagtcggtgcccctcccgctccagccatgctctccgccct

SEQ ID NO: 382768 - DNA, 122 bp, Homo sapiens
gcttccttacccctctcagctttcgcataattgaagagagttggggccttgctcttgaggcgaagctttggcttaagggaatgtgtctggtttgatcttctatccagacagtttgaggggga

SEQ ID NO: 382769 - DNA, 122 bp, Homo sapiens
tccgtcccgagccgccacccgatatcccgacgctctgaggggatggcggcccctaaccggcggtttatagcctggccccgcccccggcccccaggggggctgtgcgtcacttcctgaggcac

SEQ ID NO: 382770 - DNA, 122 bp, Homo sapiens
tctgggtcttctggtcccagctctgcattgtccaggtcctggcgttcggggtctgtgacccgccggctctcgtacacagagctctggaggccacgggggtcgccgtcctgctccctttccga

SEQ ID NO: 382771 - DNA, 122 bp, Homo sapiens
tttttttggcggccgcctacccgggagttgggagcgcgctgggacgccggactaagcgggcgcaaagccccaagggtagccctctcgcgccctccgggacctcagtgcccttctgggtgcgc

SEQ ID NO: 382772 - DNA, 122 bp, Homo sapiens
gctcccaggctctcccctgcacccagtgatggtgcagcatcctcactgcaggcacagctacgggatagctcttgtcccgggaaagagcggggagcttggatgataaaggcaaccagtcacat

SEQ ID NO: 382773 - DNA, 122 bp, Homo sapiens
ctctagatactagagtaataaaaaccatgatgcattagaacggatcaggcccatatcaaacgttcaacatacagtctgctgctatggttctttttttttttttttttttttttttgagacag

SEQ ID NO: 382774 - DNA, 122 bp, Homo sapiens
tgtgaggcacatttcccttctgttgtttaagaaatgggagctgggaggcagctgagagggcgtgataaaagaattaagtgtgatcaactgaaacaactatgttgtagttctccatgctggat

SEQ ID NO: 382775 - DNA, 122 bp, Homo sapiens
gcagccggcccctggggagtcaaggaccttgatcgccgataacaagttgccgttggcgggcgccgagggtgacccgcgagcgcggcacccgcctccccgcccctagcaggaccccctccgcc

SEQ ID NO: 382776 - DNA, 122 bp, Homo sapiens
gcggctgcaccacctcgttgctgcctgccccggcccggtctccccctgcaccccggagtccggcttcgtcaccccgtcttggggggcctgccctccggcctcgagaatcctccccctgcagc

SEQ ID NO: 382777 - DNA, 122 bp, Homo sapiens
ggactcgcgcgcctccccggggaggtgggtctgggggcgctgggggcatggaaggggcgccgcgccgggagcggcccccacttacccctcgtgtcccttgcagaggaagaagagcgtgcgcc

SEQ ID NO: 382778 - DNA, 122 bp, Homo sapiens
cagatctgaaaatagcctcccagtagctaaccagcccagcagcccggagctctccaagggcggtgctggtactatgggcagtttacagtgcggccagctgagtgctacaacagctgcatgag

SEQ ID NO: 382779 - DNA, 122 bp, Homo sapiens
ccacgtagcttgtgaatgaaggagtggggatttacagtcagggtctggccccggaatccacgcagtgcacccctgtcctaggccacctctgcagctgaagtaccgcccttgccttagtcctc

SEQ ID NO: 382780 - DNA, 122 bp, Homo sapiens
aagccatactcacaagaactaggaagttcgttgcaaaatattccttgtccgtgatcagcacggcacacactatcagactcactctgccaacacaatcactagagaaggttcatctccgaggg

SEQ ID NO: 382781 - DNA, 122 bp, Homo sapiens
ggcggtgctcacgtgcctggggtgtgaaagctgcacgcagccctcatctggccaggtccccggctccgactcacaccgtgcttggccagtgtttaactcacacagcgtgatgctctccactt

SEQ ID NO: 382782 - DNA, 122 bp, Homo sapiens
ttctaagaaccatcgggtgcctgacactaccaacgctgacatgaatggatgcaaggtaaccggccagtgctccctaggctcatagaggacccaacaaccacactggatgtccatatcagatt

SEQ ID NO: 382783 - DNA, 122 bp, Homo sapiens
gagttctcccggggaaatgtaccgtccagcgagttgcagatctacacttggtgaggagggcggggtggcctcagggacccgggccgggaacctggaacaacagttaattgcctttgccagtg

SEQ ID NO: 382784 - DNA, 122 bp, Homo sapiens
agaccagaggaaggaggaggcgcctctttcacccgcgtccccaggtccccatgtacgccacgtgggtgggagcgtgtcccacacacccgcgcgcccaaagccacattcgccacgctcccgcc

SEQ ID NO: 382785 - DNA, 122 bp, Homo sapiens
tgcctctcacgcaatggatcccctggcggcaacccgagaccggttctcctacccgcattccgccaagtctctcgctctgcccaggacgcacagatgagagcgctccgaagactggtgggtct

SEQ ID NO: 382786 - DNA, 122 bp, Homo sapiens
acagccaggtgatggaaactcattaggttcagaaaccagattgtgcgcgcggttctgagacgtagccaagcgacctcacgcaagaccctctttggggcttagttttcttacctaaaaagcca

SEQ ID NO: 382787 - DNA, 122 bp, Homo sapiens
gatgggccagcccagagctctgtatggccatgagaaatttcttgcactcctataataagccggcattgtgatggaatactttctccctgtcatttgagtgaatcttctcaacaacactagga

SEQ ID NO: 382788 - DNA, 122 bp, Homo sapiens
ccagacacccaggggccatgccacaggcccccagcaactagacgtgaagggcaaagggtacgtgaagcacaaacttcacctccgtccccagtcaggggtcagacatcgttttaacaggaggg

SEQ ID NO: 382789 - DNA, 122 bp, Homo sapiens
gggaggaggcacgtgcatgggaaccttctaaccgtggtcaagcctcgggcagggctggtccgtgatggactaaagcaggtggatgcccactggtcatccggtcacgcccgttgtccttacca

SEQ ID NO: 382790 - DNA, 122 bp, Homo sapiens
gcagaggcgtgagactgccggccagccctgctgtgtacactgatagaattagtgagcgagcgtcccactctgatggaatccagatggaactcgtcactgtcactgcggtggagacggtgggg

SEQ ID NO: 382791 - DNA, 122 bp, Homo sapiens
cctccaattcctgcgcccccagcgtggaaaggcttccatttctctctaccgggggggaggcgggtgagaatgggtctgtaatttctctaagatgaataaaggggcagtaaatgatcttcctg

SEQ ID NO: 382792 - DNA, 122 bp, Homo sapiens
aattctctgagtttttaacctttaaatattgtattttgttttgtagccaggggatgatggcgcttcatgggttgcagctactgaaaatagcagcgtgtgtgtaattgctggactagatgaaa

SEQ ID NO: 382793 - DNA, 122 bp, Homo sapiens
caggattatctgaaggaggggagttcagggtttccacgaccctctttgcagtgacagtggcgcatggcctgaccttcgtaacaatgcatttttgttgttaacccccgagcatggaccgctgt

SEQ ID NO: 382794 - DNA, 122 bp, Homo sapiens
cagacctcaagtgatctgcccgcctcagcctcccaaagtgctgggattataggcatgagccgctgcgctcaaccagaaaacttttaaatatgtttggaacaacttgggcatgtcaatctatt

SEQ ID NO: 382795 - DNA, 122 bp, Homo sapiens
acacaagagtcctggccctgggccctaaattacacatggatctggagctgaggaaggcctcgaatctctggaattcaccctcctcatctgcacaataggggctgcagtgcatgatccctcac

SEQ ID NO: 382796 - DNA, 122 bp, Homo sapiens
cagcaagcaaaacggacaccctttaaccccctcagcaaggtcatgtagaaaacaattcagcgcatactactactcctaaataaaatccctgatccaacggcatcatcttgggtaccagattt

SEQ ID NO: 382797 - DNA, 122 bp, Homo sapiens
tccccctccgagggcggaggacgcgggcgaatatcctgctgcccggtacaagatggcggccggcgcccacccctgggctttgtcattggacggcgcctcgcccccctggtttctctttcttc

SEQ ID NO: 382798 - DNA, 122 bp, Homo sapiens
gcctggccagtatttcttcgtcccaccctccctatgtgggcgggtctcttcctaggtaatcgtgatggaaacagggtgatcctcagttgctggagatctacacttctgggtctgagggagga

SEQ ID NO: 382799 - DNA, 122 bp, Homo sapiens
gaaatgggcgcggccgccccctttctgccgcggcagtcagcgcagcgcccgctccgcccccgtcccgccccggcctcgcgttccgccgccagtcccagctatccaggtctccgtcgcaaaac

SEQ ID NO: 382800 - DNA, 122 bp, Homo sapiens
ggtggtctcagcccacagggaatggagccgcagctggcggtagagccgtcggccctttctcgttttcgtgcccaaatcatccccgttggtcatttgctggtgacaggggtggcgccgtcacc

SEQ ID NO: 382801 - DNA, 122 bp, Homo sapiens
ttcccaccccaagtcggagcttgcggttgagttgaagcgcaaaccacacgtcggagcgctcgggagtcaggtcccatgctgtgtccccctctttgttccgcagctcagggttggccccacgt

SEQ ID NO: 382802 - DNA, 122 bp, Homo sapiens
gtccggaacctcccccaagtccggcctcagcctggagcccgcgcgccttgggcggatgcacggactgagaggcgcttggctgggctctcagcccgccactgccacccggccccgtgcgctca

SEQ ID NO: 382803 - DNA, 122 bp, Homo sapiens
tctgggaggtggggagcacctctgcccggctgccccattggggaagtgtgcgcctctgcccggccaccccatctgggaggtgaggggcgtctctgcccggctgccccatctgggaggtgggg

SEQ ID NO: 382804 - DNA, 122 bp, Homo sapiens
agtctgcggcaacacatggtcaactgcggcaaggaacacagccgcttactgtgggaagagcgatcacagcgtgctctgaggccaggggctgcacccgactcggccccctaacaaacccaggg

SEQ ID NO: 382805 - DNA, 122 bp, Homo sapiens
cagggccagcccgggcacctgcgcagggcagggtgcaggagaccagagctcagaagggaacgccccgccctgctctcagatgccccttgagggagagttcaaggcattttgaaaataaattt

SEQ ID NO: 382806 - DNA, 122 bp, Homo sapiens
cctgctgaccccctggggccccagagatgcccggcctttcccgcttgaaacacaaacctgcggcgcacaggccaacggtgcccacacaccgtgtgctcgctccgctcataccaggtaggaaa

SEQ ID NO: 382807 - DNA, 122 bp, Homo sapiens
gagttccctcggccgcaaggtggggctgggccaggagctgggaccccggtcgtcctgtcccgtccctgcgcgacgcctgcggccccgcagccccgcgtctccccacatggtgcgggggccgc

SEQ ID NO: 382808 - DNA, 122 bp, Homo sapiens
ggcgcttctgggctcgctctgccgtgaccctagcagaaggggcccgagacaggtcagggacgaatcccggacttctgcctccgcgcgcggggcgggggtggcttaggttgactttcaggctg

SEQ ID NO: 382809 - DNA, 122 bp, Homo sapiens
tatctcttccagctctcccgactccctgcacgccggctgctgggccgcttctcttcctagcgcagccttcctcacccacagacttgaggaaagacactccagttggttcccgtattctcaca

SEQ ID NO: 382810 - DNA, 122 bp, Homo sapiens
atcctagcgcgcagcagcagcagcagcagcagcagcagcagcagcagcagcagcagcacccgcatccgctgcgggagtccgagccggaaccacacccaagtagctgccctttcctcttctgt

SEQ ID NO: 382811 - DNA, 122 bp, Homo sapiens
gcacgcacgcacgcacactcgacgcgaccagacaggcgcgtgcgcgtcagtcgaaaactccgcccctcacacgccctcgccccgccccgccagtacctagagcggcctagcccgggcagccc

SEQ ID NO: 382812 - DNA, 122 bp, Homo sapiens
ttgattgaggtacatataggattgtcagtccttagcctaagcttctaatgcagaaaacagcgaaaggatctctcaaggcctctacagtttgacgccagagagtaagactcttgatatgaagt

SEQ ID NO: 382813 - DNA, 122 bp, Homo sapiens
cagaggaggcaggtgtgagtcaggccagaggcagccaggcaccatgaagacaggaacaaacgctgggtcaccaactctgtggcttggggaggctgttctgctctgtggatctgtctcttctg

SEQ ID NO: 382814 - DNA, 122 bp, Homo sapiens
atggatgtggcccatgaccctggcagggttttccctttaagtaacctgcgtgtcagaaaacgtctgcaggattccgaacagaaagctctaacaagcagtttgaaaagtgcatctctaaggcc

SEQ ID NO: 382815 - DNA, 122 bp, Homo sapiens
gactatgagaagaagcagtggaagaagtgacttgcatccccagctgtctccctgaggctccgccctggctgggagcctctggcggcccctcccctcccctgcccttaaccccagtaaagctc

SEQ ID NO: 382816 - DNA, 122 bp, Homo sapiens
gaatagggaagataattggcttaggtaagcaatctggagaatgcctgaaataactaaaatcgaaagttagtagtagctaattgtggtcacaatttcatccttgaaaatggttttcataggca

SEQ ID NO: 382817 - DNA, 122 bp, Homo sapiens
actccctcgcactgtcaatgccccagacacgcgctatcatctctagcaaactcccccaggcgcctgcaggatgggttaaggaaggcgacgagcaccagctgccctgctgaggctgtcccgac

SEQ ID NO: 382818 - DNA, 122 bp, Homo sapiens
gtattctgttctcaaggcaaaagggtccatccagacatatccaggccacatcctagattccgggtatgaaggcacctagtatcttcacacatcctttgacagtgaccatttattacacacat

SEQ ID NO: 382819 - DNA, 122 bp, Homo sapiens
ggaacaccagatggtaggtatggaaagctctggagtcctcaagactggccatttaaagatcgcattctgccactgcaattttaagcacgcaatacccatgacaggccagatgatgtggtggc

SEQ ID NO: 382820 - DNA, 122 bp, Homo sapiens
tgcataataccaaaagtcaaatcatgttgtgagtgatttctttccaaggactatcagggacgtccctgttgtcaagcagggtgtaataaattgtggtaataaatactaccacaggccgggcg

SEQ ID NO: 382821 - DNA, 122 bp, Homo sapiens
ttcatcttccccctcttataacgggaaaaacggccgtctcgggcagaagccacataaacccgccgggggcctccctccttcacgaccaaaggcactaaggcactatccacaaaggctttttt

SEQ ID NO: 382822 - DNA, 122 bp, Homo sapiens
tgcaggccacctgtccattgggtagtcatagtggagtcctggtctccagcaccccaaaggcgctccctgtgcagggtgggggcctcacgatagtcacactctgctgtggactggagccacag

SEQ ID NO: 382823 - DNA, 122 bp, Homo sapiens
tctggaccggcaatgtcagagccctcacaggcatccccacaccaacaattctgtagcccacgtgggagaagacctttgacttcaaaggctgaaagagaatcaacaaaaaaaccttttggctc

SEQ ID NO: 382824 - DNA, 122 bp, Homo sapiens
cctctctctcggtggctgctgtgggagcagctaacctcacagcacccgaagggatgtcatcgggaccccagctcggtttccagcatcagctgatgccagcaagaagccagccaggcctgggg

SEQ ID NO: 382825 - DNA, 122 bp, Homo sapiens
ctcggggaggggtcaggtcatgttcccttccagagtccggcgactctgaggcaggttccgcgggcgccgctgggaggagccggagctgccggaggaggcggccccgcggcctcctcccccac

SEQ ID NO: 382826 - DNA, 122 bp, Homo sapiens
gacctcgctccaggctcttctggctccaatcaaaagcagggctctttcggacttcgcttacgtttaataaagaaaaccggttggccccttcggctccacctggctcaacagacagccagtgg

SEQ ID NO: 382827 - DNA, 122 bp, Homo sapiens
aaaaaaaatagtttctgtacaagaaagaacagaatgtagagatcaaaaacgcaatcatgtcgtctgttctggcagcctctagtgttcatctcatgatattacacaagcagcttctagtgttt

SEQ ID NO: 382828 - DNA, 122 bp, Homo sapiens
tcccagactttccctaaggaacttgcaggggtgcagggttgggttgtgctgggtggaggccggcagagcacagggtgagaaatccgagtctctgctgccctctcatggtggctaggggtcct

SEQ ID NO: 382829 - DNA, 122 bp, Homo sapiens
cggaagacggaggactgagtagtcggggcggggggggggggggacaacagtctagaaatgcgcagacatggaattagggtcacgagtttcgtttgggtcatgttcagatggagaggctgtgg

SEQ ID NO: 382830 - DNA, 122 bp, Homo sapiens
tgaatgtctgttggatttttgcctcttccacttcaacctttgacagagagatagaaatgtcggccaaagtgttgatagctgtcactaacccaaccccatccagtcccagctttttcttttga

SEQ ID NO: 382831 - DNA, 122 bp, Homo sapiens
ggactaaggcctccgccatcatttccccgagttccctgcctttgacaattcatcaaatagcgctagctctttttgtgtcttaaatgtaagcggtaatgagtaaaatcagtgtctccctgact

SEQ ID NO: 382832 - DNA, 122 bp, Homo sapiens
ccaggtcccaggtctcgaaaaccaaagaagaagaacccgaacaaagaggacaagcggccgcgcacggcctttaccgccgagcagctgcagaggctcaaggccgagttccagaccaacaggta

SEQ ID NO: 382833 - DNA, 122 bp, Homo sapiens
tgcgcaggcgcacacagcagcgccgtggtcctgtcttggatgcccattactcatcaaattcggccacatgccgtgcgcttacctcctactcagatgcacgcgtgccggggatgggggcacgc

SEQ ID NO: 382834 - DNA, 122 bp, Homo sapiens
tataaaaaaatagctaagtgaaaatcttcacgaatgaaagcaacctctttgtttgttcctcgtcatcctaaccaaaatcagtagtttgatagtacttctgtttcattatgacatacatctac

SEQ ID NO: 382835 - DNA, 122 bp, Homo sapiens
gtgttttttcctggagggacggagctcctgcagaccctattgggctagccgctcctcccacgtcgctgccgcagatccccgctcccctcccccacccgcggtccgtccctcctggtcgaccc

SEQ ID NO: 382836 - DNA, 122 bp, Homo sapiens
gggtgcctcgtggctcattccccagacctctttcctcagtaatgtctgcgggctgtccatcgggctggcctgtatccttcctagcagagagctatagaacaacgcatgtcaaagggtgaacc

SEQ ID NO: 382837 - DNA, 122 bp, Homo sapiens
ttgtttcagtggaaaaatcaaaataactttaggtcaaaattttataagatttgtcgaaaacgccccattaggacagtaaaatagtatgcttgcattgcggaaatgaagttctaattggtgtc

SEQ ID NO: 382838 - DNA, 122 bp, Homo sapiens
cagagctgccagccgtcctctccccgtggagccctgcggcgcgctggcttctcctggtgacggtgtgcaccagctcgcatggagtatcgccaaccagggaagctcgcccgagccttggcgtc

SEQ ID NO: 382839 - DNA, 122 bp, Homo sapiens
gaggaggtggaggcggccgacgaggacgatgaggaggacgacgacgagggagtactcgggcgcgggccgggccacgaccggggccgcgaccgccacagcccccccggctgccacctcttccc

SEQ ID NO: 382840 - DNA, 122 bp, Homo sapiens
caaaattaaaagatattttttaaaaaggaaacaagcattagggactttccatggaaacatcggttaaacattggtatagaaaccagatctacttttaattgaaatcagacgtggctcttaga

SEQ ID NO: 382841 - DNA, 122 bp, Homo sapiens
atgtttccagctgatctggtcagccaggagccaggatgcaaggatgcctgtgttcctgagcgtggggtgtggctggtattttccaggagcaaggaggtggcaaactggataaacaagggtgt

SEQ ID NO: 382842 - DNA, 122 bp, Homo sapiens
ccccaagggacccccgcataggccaagcccagagagattaagcagcaaggaacgcttagacgggctggaaactctcacccctgtagaccaaagccatgctcttggtgaagtgctctctgctt

SEQ ID NO: 382843 - DNA, 122 bp, Homo sapiens
gaggtacacagcagttctcccagctcacagcagtgacctcagatctccagcagcaagggccgcactctcgtgcccacaagggccttgcagaaatgctccggtccctgggcctcccccggcag

SEQ ID NO: 382844 - DNA, 122 bp, Homo sapiens
gtccctctaactggacgggcactccccgcctaactgcacacgtggcaggcagcattctcccgggaagcccgcgcagagggcaaaattgcacacatatgctgggtgcacacttggagccaggc

SEQ ID NO: 382845 - DNA, 122 bp, Homo sapiens
cactgcggataatggtgtcaaaaccacataaaaaatgtcctggccgggcgtggtgtctcacgcctgtaatcccagcactgtgggaggccaaggcgggagggtgacttgaggtcaggagttcg

SEQ ID NO: 382846 - DNA, 122 bp, Homo sapiens
taccatgtacttagccacaggcagaatagctttcgatgaccccatagcactttgtttcttcgccttgatttgcactttacaatgtccccagcccctctgcagcccgtggctggcagggcgtt

SEQ ID NO: 382847 - DNA, 122 bp, Homo sapiens
actgatgccgtcttcttccttttcagacctccgtgctgcacatgtgctccctcttccacgcgttcatctttgctcagctgtggacagtttattgcgagcaaagtgccgtcgctacaaatctc

SEQ ID NO: 382848 - DNA, 122 bp, Homo sapiens
ccctcagcaagaaagcccagctgggtctacccagttacaccggtcaacgagggtctccatcgccgccggccgccctaattcacgctcattcatattcattctcttttctctctgtccctctt

SEQ ID NO: 382849 - DNA, 122 bp, Homo sapiens
acgcatggcctctctgctgtgggtccctccaccgccccgggcctgccagacaggttcttccgcggggtgcccacttcctgtgtggagcctccttgacccgtctggttccatgtgccccatct

SEQ ID NO: 382850 - DNA, 122 bp, Homo sapiens
ggcagggagcgcggcagccctggcggagggatgcaggtgggccggaagatcccacgattccgatcgactgccaagcagcagccgctgccaggggctgcgtctgacatcctgacctcctggac

SEQ ID NO: 382851 - DNA, 122 bp, Homo sapiens
ttaccatctatgcccaggatgtgcatctgaccacagcccccacccccaacccaggctcaacgttccctccagctggagtcctgggatcctgatacagtctagcttgtttgtactgccctagc

SEQ ID NO: 382852 - DNA, 122 bp, Homo sapiens
ccttgagttcttaatctgtggcccacatggccagtggctccccaggatgcggggccactccgcaggagggaggctgccacagccttgtgggcttcaggcaggtgctcccacatccaaacgtc

SEQ ID NO: 382853 - DNA, 122 bp, Homo sapiens
aaccttcctttagcccgcccgaagcagaccagccaatccctgactcgctctcaccgtctccgtccagaagaaccaatcgtagcttgccttttatatccacctatgaacggctgagttggccg

SEQ ID NO: 382854 - DNA, 122 bp, Homo sapiens
cgaactcctgacctcaagtaatccacccgcctgggcctcccaaagtgttgggattacaggcgtgagcctgtagtagtagtattagtagttagtagtattattaacattcagttgcaaatctt

SEQ ID NO: 382855 - DNA, 122 bp, Homo sapiens
ccacttttaatcagaagtccatgtatgaaatccaggctggttttggatgttaacatggagcgaatgggatacatcaaagaatggttggctgcttgttttaaagaggtcccactggtgacagg

SEQ ID NO: 382856 - DNA, 122 bp, Homo sapiens
cttcttccactgcaccggggaaacgttcttgcccctaccgactcctgagagccgctgggccgaatctccaggaaggcgattccgaggccagttttagtctgtagtgggtaaagtgcctcctt

SEQ ID NO: 382857 - DNA, 122 bp, Homo sapiens
cgcgcctcccgcactcaccgccggtctcgtcagtaacatagggagtcgccatcttgaaaacgcaaaccacttccggcgtgagcgggctggggtcccgcccccctccccaccggaagtggagt

SEQ ID NO: 382858 - DNA, 122 bp, Homo sapiens
tgtggacataaaataagagccaaaaatacagcaaaattgttacctataaacatccaaagacgacaagatcatctttaaggaccacattttccttaacagcattttgctttcgaagtcttata

SEQ ID NO: 382859 - DNA, 122 bp, Homo sapiens
tttaaaaggcacagtatgaacagtctgaaacaaatgaagtaaatacccttcagccaagaacgtcactgcatataaaatcatctaacctcaagtctatgtaactcaattctacataagtaaat

SEQ ID NO: 382860 - DNA, 122 bp, Homo sapiens
cgccgaggcctccgggatttcccaattcctcgccctcggcctccccacggctcccaacaacgcagcaccccacccgagagccaggccttggtcgccgcaactgcagccctcaccatcctgtc

SEQ ID NO: 382861 - DNA, 122 bp, Homo sapiens
cgaggtgactttccccaaagaacagagcggtctcctttcatcagaagaggtgaggctccccgggcctgtggccaaacacaacggtgacagcgctcactcgtcaccaggcctggccatcccct

SEQ ID NO: 382862 - DNA, 122 bp, Homo sapiens
ggaggaacctctccagggccagaatcccctgatcctctcccctccggcaaagagcacttccggggatgaagcaacaggaagtggcttacgaaatccacctccaggccgagtgaccagtttac

SEQ ID NO: 382863 - DNA, 122 bp, Homo sapiens
tttaccctctactgaagaagttgtggtcattctctggaaatacctgaattcattcctgagcggcggcctgggcaggtccccgttcttgccgatgcccatgttttgggacacagcgacgatgc

SEQ ID NO: 382864 - DNA, 122 bp, Homo sapiens
tcctcagctgggtgggggcggggctaggtgtggaggcggggctctgagcagatcgagggccgaggcgagggtccttaaagctcatctatttcaccattactgatcggctgctataaataaag

SEQ ID NO: 382865 - DNA, 122 bp, Homo sapiens
tccggctcctcctggagttcaaggctgaggttgacccactcagtgataaaggtaccacaccgcttcagctcgccattatccgagagaggtcaagctgtgtgaaaatcctcctggaccacaat

SEQ ID NO: 382866 - DNA, 122 bp, Homo sapiens
cggggtgactttccctttctggagttatttagccagtttctttctctctgctgtgtgtgtcgacacaaccttggcctcccccgctgtaaaatggaaaaaccacagccgcagagctcaccagg

SEQ ID NO: 382867 - DNA, 122 bp, Homo sapiens
ttacaaatagcgttacaagttcaccagccacagtgaagcaccaggcccacgtcccggaagcgccaaaatggagtaggggaagcactctccgactcaccgtaggtgaagtatgccacttccgg

SEQ ID NO: 382868 - DNA, 122 bp, Homo sapiens
gccttgattttcctaagatagaactccaactctttgccctctagcacatagccatctgctcggccacactgtcccggccttgaagccatgcacgcaagaagcttgccctgctggaactgctc

SEQ ID NO: 382869 - DNA, 122 bp, Homo sapiens
tctctgatatgatcctccatggtagagttgtcagacttaacaaataaatatagacatccacggggaggaagttagtactaaaaaatcattcatttttaaatctgaaattcaaatcggatctc

SEQ ID NO: 382870 - DNA, 122 bp, Homo sapiens
tttcttcacttggcttaaaggccacagcattctggtttgcctcctctgacacctcactgacgccgctcacactccttcactagcttctggttacttatctggcttcttaatgccagtgtgtc

SEQ ID NO: 382871 - DNA, 122 bp, Homo sapiens
ttataggaaggaaaatggtaatgtgtatacaagggacctcgaagatgctgtgggtacccacggggattttgccacaaagggtggatgattaaggagttcacatttatggttgtgagatggcc

SEQ ID NO: 382872 - DNA, 122 bp, Homo sapiens
ggctgttcccgaccccgcctcggcccccaccctcagccggccgacttgcggagaggccggcgtccagtccctcacccagacaggcctctcccagagacactggcgcgctcggaggggatgcg

SEQ ID NO: 382873 - DNA, 122 bp, Homo sapiens
tcaggtggttgagccgcttccctgggcgctggggtgggggagaaagcccccgccggccgccggccgcgctccccgccttcattctgtgatctgcggatttgccagtcgccaacctccgcgcc

SEQ ID NO: 382874 - DNA, 122 bp, Homo sapiens
tgaccatgagtcaagtttggggactattagagctaagtggggcgggggcaacacactcctcgtagtgacccaaatatcataaaagcgctcagggattattctgaagaaaggcgatttaatta

SEQ ID NO: 382875 - DNA, 122 bp, Homo sapiens
atcccccgcggctactttaaatgtacttttgcagtagtcaagaacatgtgcctggtttgccgatctctttcccagagttccttagtcaccctcaaatataaccatttttgccaatttattat

SEQ ID NO: 382876 - DNA, 122 bp, Homo sapiens
tgctcagagagggaaggcgactcacccaggtttacacagcgggtgggaggtggtggtggacggtcctgaatcccagatttcccccacctctagcacgatatgcagaagaagactctaaacat

SEQ ID NO: 382877 - DNA, 122 bp, Homo sapiens
gagacgtgcgacagtcacctgcgggcagattccagaggggagacccagggctgcaggggacgccccttcgtggcagctacccagcctcggcccactgccaggttctttgccaaccctgacgc

SEQ ID NO: 382878 - DNA, 122 bp, Homo sapiens
tataaacacctgcttacgacaccctctggattgctagtctcccgagtcaaccgtactgcacgtgcagttcagaccccgcctggtcctctacaggtccctgtcccaggcaagccttagcccac

SEQ ID NO: 382879 - DNA, 122 bp, Homo sapiens
acacagctcttggaaatgagttcactgatgcagggcatggccaggacccccggccggctccgctcctgaaccgagacacagttctggctgctgccgttaactgacgccatctttctggcacg

SEQ ID NO: 382880 - DNA, 122 bp, Homo sapiens
gaggtgtaagaagagcataggtggatcagcaagtgcgaagacctagaggtgaaagcatggcgcttagaaggatctttaacaagttcactaaggctgaagtgtaagagtcaagagacagggct

SEQ ID NO: 382881 - DNA, 122 bp, Homo sapiens
gaaggtctgatggtgaggggcccttggtgaagctgcaggagtgagaacaccacaggtggccgctgtgcttatttcacaagaaaaactaagcagggtcttcaagcaggtcgcagattggctgc

SEQ ID NO: 382882 - DNA, 122 bp, Homo sapiens
agtgtagtcaaagagcaccgcggagtcccacgcttcccgccggaaggtgatactatagaacgtctcctttgagattcaaggaagtgtagcgcaggagatctgttgaatgacgagcaagtagg

SEQ ID NO: 382883 - DNA, 122 bp, Homo sapiens
cacactcggaggtaaaggtacaaatcctggccagagcatccgagccttggacccgtttctcggcttccttggccttcccgccctgccctccagctccctaaaagctgtgcctttgcacgtgt

SEQ ID NO: 382884 - DNA, 122 bp, Homo sapiens
acttgaggctctcagagtttcaggggtgtgaccaaggtccaaagggcctcgaattgtgggcgccactgggtggctgcccagccagcctgggtctgggggaaggctgccggttaacctggctc

SEQ ID NO: 382885 - DNA, 122 bp, Homo sapiens
cggagctactaccaagttcactgttactgcttgattctgagcaaggagcggttggggtagcgaagagaaatgaggaactaagattcccttatttgcagaaaatcctctttcctattgattga

SEQ ID NO: 382886 - DNA, 122 bp, Homo sapiens
ctcaagaagccatggcggaatccaggggccgtctgtacctttggatgtgcttggctgctgcgctggcatctttcctgatgggatttatggtgggtaagtgaacaaaacactctaccccgact

SEQ ID NO: 382887 - DNA, 122 bp, Homo sapiens
ccgggcggaaacatcctccccgcgacgaaggatccgggtgtgcgcgagcaaaggagcgagcggggagttctaggcccaggacagcacctatttcctgctggtgtaacagagcaccttctctc

SEQ ID NO: 382888 - DNA, 122 bp, Homo sapiens
tcttgagacgctgcttctgccctggggtttccaagccttgggtgctgtgggctgtaatttcgtggagccaagctcaccacctttgggtacctagtacagacggaacccacgcctcctctctc

SEQ ID NO: 382889 - DNA, 122 bp, Homo sapiens
atcatgataaacagttggctgtttgatcatatagccttcagtggaatgctgagttggtcacgaccctcaggcctttggctccctacattaaaacacccatttcaccagattaaaaatattca

SEQ ID NO: 382890 - DNA, 122 bp, Homo sapiens
gtcccccattcctttcccaggtctgctcctggtttctgtgagccgcgctgttactgtgagcgcgctgcctctcaggaagtcttccttgtgaaaggtaactcgtgctgctggaaagaagctga

SEQ ID NO: 382891 - DNA, 122 bp, Homo sapiens
tgcctggtgccctcaaggagctaatttagtctcctttgcagcaagactgttttcatgccccggcccagggcttcagagaaatctgaatagggctcagcaagtcagtatgtggctccaggagg

SEQ ID NO: 382892 - DNA, 122 bp, Homo sapiens
ggcactgctgaacgtgagcacggtcccaggttctctccggggccaggggaagtaccaagccggaacctctgagtgagtgtcccatcaacagtacccgcagccagcaacaacacactgcaaag

SEQ ID NO: 382893 - DNA, 122 bp, Homo sapiens
agagacagagagagagaaactgagagacagagatgaggagagagaaagagagagagagagcgattctgtaaagggctctgaatttattgactcacacaaccatacagaaccagggagaggag

SEQ ID NO: 382894 - DNA, 122 bp, Homo sapiens
aaaaaaaaaaaaaattatattccgcctgggaaggaggtcagtgcccgtcggcatgtattacgctaagatactatttgaagcatttgttaggtattcactagtattccacaacaggctattat

SEQ ID NO: 382895 - DNA, 122 bp, Homo sapiens
tggcattggatgtgggtttgtggtcattgccacattgccggtggctggtagttcatgatgcgcattgtgaggctttctggaggtgatagcaggtgaaaggaagagagccaggggtcagcgtc

SEQ ID NO: 382896 - DNA, 122 bp, Homo sapiens
cacgggagagccggggagggaacacgggagagccggggagagcacacgggagagccggggcggcacacgggagagcagatgaaggtaatacatgcagtggcccagctcgggggtgtggattc

SEQ ID NO: 382897 - DNA, 122 bp, Homo sapiens
attatgctaccaagaaacaacacatcattatccttgggcctggggctcagtgagtcgtaacgagagtaataggaaatccacggttggggagagaaacggtcgtgcttggccagtagagagag

SEQ ID NO: 382898 - DNA, 122 bp, Homo sapiens
ggggtctctactctggatgtgttactgggaatctctatctcagggtgactcagggctcctcgggtgtcaggagatgctagtggggactctgtctctttgtcaggtgtccagggcctctaaga

SEQ ID NO: 382899 - DNA, 122 bp, Homo sapiens
ggggtttgtgatccacgacggcgagtgcatgcaggagtgcccctcgggcttcatccgcaacggcagccagaggtcagtcgcggccacacgtgtggtcactacccgccccacctcacccgcca

SEQ ID NO: 382900 - DNA, 122 bp, Homo sapiens
atttccgtctcggtacctggtgccccctcagagtccactacacaaacgggtaaaatcccgcgcggctattcatttcgccattcgcgagtaagaaggggaaaaggagccgcttctaggagagc

SEQ ID NO: 382901 - DNA, 122 bp, Homo sapiens
agccagtttcaatttctggacggcctctccgcgggagtgacaggttttcttagatgccgccgggggtctttcacgggctggtggtctgccccctggactcgtccatgtgttaggctcagtcc

SEQ ID NO: 382902 - DNA, 122 bp, Homo sapiens
ctggccccaggcctcagtttcctaggtagacccgaccaggctatgcatctcccctcattccgccacgtatctccaggaccagattgtcaaggaggacagcgtggaggcagtgggcgcccagc

SEQ ID NO: 382903 - DNA, 122 bp, Homo sapiens
cacaagggtgcccacaagcagaagttctctctctgtctctccattacaacccaccaggcgcgcgcgcacacacacacgcgcgcacacacacacacacacaaataacaaaggaaaacacagcc

SEQ ID NO: 382904 - DNA, 122 bp, Homo sapiens
tttggctctgaattttctcaacttctttccttcctctagggaaacagaagcgcggaaaggcgccctctccttccctcagtctgaggctcttgcccgccaggcccttcccgactccgcccagg

SEQ ID NO: 382905 - DNA, 122 bp, Homo sapiens
tttgccaggaacaagtctttctggatggatactacgtggttaacaacatgtaaagataaacggctaaacaaaatatcaacattttcttacaaggctcagcttaaggacagaacagtgatgtg

SEQ ID NO: 382906 - DNA, 122 bp, Homo sapiens
ttttagtgtacagaccgaacatctttaatcttggcttcatgtataagagttaaatattcacgtggattaaactgtacctgaacattgtttttgtggaattagagaaagtcacacttgttagc

SEQ ID NO: 382907 - DNA, 122 bp, Homo sapiens
aaaagtctagagacctttttttcattcccttccccatccctctcgcccttccccgcggggcgattaagccaagtaagctaaacaatactggagtaaactttctatcagtcactctaggaagc

SEQ ID NO: 382908 - DNA, 122 bp, Homo sapiens
tgagcctcatttgtaaaacaggaatgagaatagtgtggtggggattaaaggagataagcacgctctttggaacaggacctggcacacaggacactctcagtgttggttataattcattggga

SEQ ID NO: 382909 - DNA, 122 bp, Homo sapiens
caggtaatcggagtccttttcttttcaaagttttgccaaaacaagctccgcgctctgaggcggcgcggcctcggccgagcggtccgtgtctccttgctcctccgtcctacccaagctggcgc

SEQ ID NO: 382910 - DNA, 122 bp, Homo sapiens
aaaaccacgcacaaaaccttcttcagagaaaagggaagctccaaacctgactgagacaaacggaggctcttgaaataaaaagaaaataccgcaggacaaacagcctcccgtccccgggcgca

SEQ ID NO: 382911 - DNA, 122 bp, Homo sapiens
acagaaaaagtattcttgtagaaaaaagagaaaagtattttccttgcagcagggccctgacgtgaatccatttcaagagctgatcgcagttgctctgtctctgactcctggctccagccgtt

SEQ ID NO: 382912 - DNA, 122 bp, Homo sapiens
tgtatggcagaaggcccagaagcacattcccaaattcccaccggtttcagttagtcatttcgaaagcacccagtggggatcttttggataaacattctgaactcttttctaacaaacaattg

SEQ ID NO: 382913 - DNA, 122 bp, Homo sapiens
tacaatgagctgatggacccacccggggtcaagacagtgaccaagcgaaatgggcgtgggcgtcacgaggtgtctgcggaaggaagttggaggagagtggtccgagctcttttgaggaaagc

SEQ ID NO: 382914 - DNA, 122 bp, Homo sapiens
ggctcatgccaagtgtgagttgctgtccttgggcaagttatgtagctgtgctgtgtcctgcgccctcacctgtaaatggagataatagtaacctacttcatagggcagttgtgaggatccat

SEQ ID NO: 382915 - DNA, 122 bp, Homo sapiens
taccacagcgttttttcccattcatgtgttaatatagtgaattcgattgataaatttgtacgtttttaggttcaattattaaaacttgagacagcgtctcactctgtcaccgaggctggagt

SEQ ID NO: 382916 - DNA, 122 bp, Homo sapiens
tttttaaaaaggtgtataaagacagagcagtgacgggtaccacggagggtgctgctgaggcgatgatagcagaggggcccaaggaagtccgaggctgtcctctggggcatgacgagggcgga

SEQ ID NO: 382917 - DNA, 122 bp, Homo sapiens
caccccaatactgagcttttccgacgggcttaaaaaatggcgcaccacgagattatatcacgcacctggctcggagggtcctacacccacggagtctcgctgattgctagcacagcagtctg

SEQ ID NO: 382918 - DNA, 122 bp, Homo sapiens
ccagcaagcagatccgggcacccctcccaggtcctaaagcctgcaaaaacccaaagagttcgtggcgctggtggctccagctgttagtttcccgggcagtctccgggttggatttgcaccct

SEQ ID NO: 382919 - DNA, 122 bp, Homo sapiens
ggtggcggtcgggccaggtccggggcctggggacgccgaggcggccgcggaggagcgccgcgtcaaggtctccagcctgccctacagtgtggatgcgctcgtgtcggacaagaagccgccca

SEQ ID NO: 382920 - DNA, 122 bp, Homo sapiens
agtgtgggggtcccagatgggagacccaggagggccggctgggtgggaggggcccgggagcgaaactaggctgatgtgggccatgttgtccacaggggccaagggtccggccacgtggtggc

SEQ ID NO: 382921 - DNA, 122 bp, Homo sapiens
aagggaaatgaaggaaagaaaaaaggaaaacaaaaaggaggaagaggagaaaaggaaagacgaaacataaaaaattcaaccggaaataaggggtttatttctgaagttccttctgaagcacc

SEQ ID NO: 382922 - DNA, 122 bp, Homo sapiens
aagcctattggtaaaggtactccgggctcgcgcgctctgattggctggcctgaagtacaacgcctcctccccttgaggcacgggcgctctgggttgtgggagttggggagctgctccggctt

SEQ ID NO: 382923 - DNA, 122 bp, Homo sapiens
tactcgggaggctgaggcaggagaattgcttgaacctggggggcacaggttgcggtgagccgagatcgcactattgcaatcccgactgatcaaggagagcgaaattccgtctctgggcaaca

SEQ ID NO: 382924 - DNA, 122 bp, Homo sapiens
tctgcctccgagactcaggagccacttttcaagagccgagacaactcgttagagaggagccgtggcctgctctggccgaaaaccccttcctattaacagactgcaactagcccggaacgact

SEQ ID NO: 382925 - DNA, 122 bp, Homo sapiens
aagtgctgggattataagcctgagccaccgaggccggccatcatggtccttttctcctggcggtctcatttaatggtgtcaatgctatcaagtctgtaaaatatgccaaccagaccccaaca

SEQ ID NO: 382926 - DNA, 122 bp, Homo sapiens
cgggggaggcgcgggcctgggcggccagccccggcgcacagccgcggccggggcgcgcggcgcggggcggaaaagcctgtttacacagactgcacaccgcctggggaataatgcagtaaagg

SEQ ID NO: 382927 - DNA, 122 bp, Homo sapiens
aagcccccagggctttctcactggaagtgtaaagccccaggcttcagagcagagtgcctgcgtctcccgcagaaggccaattcaagcgagaatggggccgcagtgtgacgtgggtgaactgc

SEQ ID NO: 382928 - DNA, 122 bp, Homo sapiens
ggcgctggcggctgcgctggcagctggatcgacggactggctgggggtgcgaggcgaggccgccgggctgttttgaagctctgggctgggactgcgcgccctccctccaccctctaggcggc

SEQ ID NO: 382929 - DNA, 122 bp, Homo sapiens
caagctgcttatttaaagatggcatctaacggagatcttttgtttccctcatcactttaccgaaggaccataccagactctgcgctcgtctcctttcatgttttgcttccgttctgcctctc

SEQ ID NO: 382930 - DNA, 122 bp, Homo sapiens
ggggagagaaggagaacacgaagtgaggcatgggaatgagacaatggtgggaaaagaggacgctggaaggaagatctactcttccagtctgcaggtggcccccgaggagccgcagtaggtca

SEQ ID NO: 382931 - DNA, 122 bp, Homo sapiens
tgaccttgtgatcggcccacctcggcctctaaaagtgctgggattacaggcgtgagccaccgcacctggccttgagtactgggtatttttatagaaagatgagaaagttttgaaactagaga

SEQ ID NO: 382932 - DNA, 122 bp, Homo sapiens
gggatactgtgacctttgtctagagttgatgggggtgtgatttgtgaaataaaacaggaccgtactgcttggaagaaggaaacggaagctgacataatggggattaattagttgattgctgt

SEQ ID NO: 382933 - DNA, 122 bp, Homo sapiens
ggagtggtagggcagcacagggggaccggagggggcggggagagaaggccggtccccggccgctcaggttttcagatagcccctgccgcctgtgctcttggccattaatccaggattgacaa

SEQ ID NO: 382934 - DNA, 122 bp, Homo sapiens
gaaaccagcagggaaggctcagtataaatagcagccaccgctccctggcaggcagggacccgcagctcagctacagcacagatcaggtgaggagcacaccaaggagtgatttttaaaactta

SEQ ID NO: 382935 - DNA, 122 bp, Homo sapiens
cttcaagagacactgaacaacatcagaagtatcttttttgtctgagctctatttggctgccgttcccttttcaagaattcgagaaacaaaggaattattggatagtagtcagtaacaatagg

SEQ ID NO: 382936 - DNA, 122 bp, Homo sapiens
gggggcgtgcggggggtgccgaggggcgcggcgtcaagtgcgtgctggtcggcgacggcgcggtgggcaagacgagcctggtggtgagctacaccaccaacggctaccccaccgagtacatc

SEQ ID NO: 382937 - DNA, 122 bp, Homo sapiens
ctcccccgccatgggtcgcaggtgggtgctcagcacctcccagatcacagctgtgctttccgggacccgcccttgccgagcttctcactgggaagggaattgagagggaagcctgggctggg

SEQ ID NO: 382938 - DNA, 122 bp, Homo sapiens
ctggagcctgagggagagagagagaggacgcctggggcatggtgagtcgggcgctctcctcgtgccctggctgcctccatgccaggggcctctgcgagctgaaacatgaaaggtctttggat

SEQ ID NO: 382939 - DNA, 122 bp, Homo sapiens
aatgtcataaatacttttctatgtacattgaatgtgttttatgaacatttaagctgtgcccgcatttcactagaatttctcggagagcaactttaggttggaaaaagactcagttttaggaa

SEQ ID NO: 382940 - DNA, 122 bp, Homo sapiens
tgacaggtcacgacttgacgatggcggggtcctcctgctgggtgggagtgggcgcgcctgcgcgtacggcacggccaagcaactcgctagggccctgctttttgtaatttcaaccaagttac

SEQ ID NO: 382941 - DNA, 122 bp, Homo sapiens
aggaggaacacaaaagtgatagaagtaacaggactgttgatcatttagttaaaagaactgcggagggacacacccaggtttctgagagatgtccagtagtacacaggtaacatctacggctc

SEQ ID NO: 382942 - DNA, 122 bp, Homo sapiens
tggatgctgttctgtttcctcccttcccgcccttaggcctctcccagaccagattctgcacgccttgtgcatgtttcaagagttgagcactaagatccaatcccaagaagaggcttgatcca

SEQ ID NO: 382943 - DNA, 122 bp, Homo sapiens
cgcgcctcaagcccattgtgtaagagatgctctcaccatgctgtggtttttatcggccaacgacgtatgcccggtgtctgggtggctgctctggagaatacacgttgcactggtagttattc

SEQ ID NO: 382944 - DNA, 122 bp, Homo sapiens
gttcgcgtgcagtcccagatatatatagaggccgccagggcctagggatcacacaggatccggagctggtgctgataacagcggaatcccccgtctacctctctccttggtcctggaacagc

SEQ ID NO: 382945 - DNA, 122 bp, Homo sapiens
ctacgccggctgataggcaacattcatcttctaaaagccaagctcctgaaaacaggcacacgaatgacccagccgtcacttcagaagctcggcctgaggcacaagcattccgagatgctgcc

SEQ ID NO: 382946 - DNA, 122 bp, Homo sapiens
acccactgtggacttcactgacttcatcaacaatgagaccattgcagggcaggttagttgcgcggaggggtgagcaggcagctggagaggaggggaggagtcagggggacaagatgagccac

SEQ ID NO: 382947 - DNA, 122 bp, Homo sapiens
attgcaatccttttaaatgtactgagcttatcttaagacttagcatatggtctgtgctggcgagtatcctgtgtgtgcttgagaagaatgtatattctgctgttgttgggtgcagagttatc

SEQ ID NO: 382948 - DNA, 122 bp, Homo sapiens
cagtataactcctgaatgctacttaaataaaccaggattcaaactgcaagccagccaggccgttcattatttaaaacgttttaatcggggcttccgggtagaaggtggagcggcagggtgta

SEQ ID NO: 382949 - DNA, 122 bp, Homo sapiens
ggagggtaggccatgtgggtaacagttgacagggccacggggacagagccatggggcagccggccacactctgtgaacatggggtagggattgctgcccagcaggagggggtgtgcagagcc

SEQ ID NO: 382950 - DNA, 122 bp, Homo sapiens
ctgcccaattcatgaattgctgtctgtttaaataaactctttaacattttaatgtgtttacgtttatcttttaactgtttgttaaccagctgcagacaatcacccagacaaagctaggcatt

SEQ ID NO: 382951 - DNA, 122 bp, Homo sapiens
tcctcaccctcccacagggtcccagggccgatccaggcctgcgggccaggaatgtgctaacggggcaacttgggccttgctggtccacgcaggcacctgtggactttgagaggggactgggt

SEQ ID NO: 382952 - DNA, 122 bp, Homo sapiens
ggagcagttgctggggtgtcgatctagagtgctttctcggttactcttcattgcccagaccgctctcctcctgttgcccgccgccggagcaggtctctgccccgcgccctgctcctgccgca

SEQ ID NO: 382953 - DNA, 122 bp, Homo sapiens
atttattgggagggggagagccaaccttcgcctttgtgccaagtctcctaagaacaaacacgcagagcctgctcccagatggacaaaggtccaactccctttgtcttccccttagaaggcag

SEQ ID NO: 382954 - DNA, 122 bp, Homo sapiens
atttggtgaggagtgaaaagagggggagtttgtatctgatttttcatttgattgtgtccacgtgtgttcaaaggcatgcccttttgttaactgtgcctcttgagtctgtgtgtgaatgtgac

SEQ ID NO: 382955 - DNA, 122 bp, Homo sapiens
tctgagctgggagccctggatgatgccaaaggtgatggaagacacagggttagggtctggcgagaaagacacatatattcaacagggaaagcattaaacaaactgtctgaactcgagccact

SEQ ID NO: 382956 - DNA, 122 bp, Homo sapiens
agccgccagctgctgctccagctcgcgcaccaccagccgcaggtagtcgaagctggcacgcgacagggccttgacccagccctccatggcatcctgactctcagcggccagcacgtaggtgc

SEQ ID NO: 382957 - DNA, 122 bp, Homo sapiens
tcagttcggtccgccaactgtcgtataaaggcgctgcctcaggccagaggcctcacaaagcgttgggtgagactcctcttgctcgtcatgtctggccgcggcaaaggcgggaagggtcttgg

SEQ ID NO: 382958 - DNA, 122 bp, Homo sapiens
cccggttccggccgcggaccccactctctgccgttccggctgcggctccgctgccggtagcgccgtcccccgggaccacccttcggctggcgccctcccatgctctcggccacccggagggc

SEQ ID NO: 382959 - DNA, 122 bp, Homo sapiens
ctcccacgtccacagggacctgacttccacctctctgcccagatttgcttatgtcactgtcgccccgggacggggaggtggggagctgagggcaagtcgcgcccgcccctgaaatcccagcc

SEQ ID NO: 382960 - DNA, 122 bp, Homo sapiens
tgtatagaaaacgtgaaatcatccattcccttggggatggctgccaaggagccatagcaccgcaagaggtcagagattcagtgttcctaagagctacacatggaaggttttgtaactgttta

SEQ ID NO: 382961 - DNA, 122 bp, Homo sapiens
ctctaagcattgacactatcagcaaactgcttttgcttctggcaaagattcccaaagagccggagaaaatcctagtgtgaacataatcagaaagccagcctccctgacttccattgttggag

SEQ ID NO: 382962 - DNA, 122 bp, Homo sapiens
ggggcggggggggtgtgtggaccgaaccaccacgctgttgtttgcggttttaattcctcccgtgggatcatgaggaaccgaagctggcagagtcccaggaatatgcccgctccccagaagca

SEQ ID NO: 382963 - DNA, 122 bp, Homo sapiens
ttgcgggccagcactagttccaggtgggcgtggcctcggggggccccacactctgagcctcgggctggcgtggccagcacagctggccccaggcagtgaggaacttagcacccgggccagca

SEQ ID NO: 382964 - DNA, 122 bp, Homo sapiens
actgcatcagatgacactttaaataaaaacataaccagggcatgaaacactgtcctcatccgcctaccgcggacattggaaaataagccccaggctgtggagggccctgggaaccctcatga

SEQ ID NO: 382965 - DNA, 122 bp, Homo sapiens
ataacatataaacatcaatattactaaaacaacttgaaaagtatttctttcacatttttccggtaagctactagcccagggccacaggtttccaccttgacagatataatttggtctgagga

SEQ ID NO: 382966 - DNA, 122 bp, Homo sapiens
ttttccctgtctctaaaggtattaaatccaccccttttgcccgcagagtatctgtcccgacggtcatccttcatgcctcctctacccctggaacgacctgtcaagaaaacaattgcaaattg

SEQ ID NO: 382967 - DNA, 122 bp, Homo sapiens
gtgcctgtggggttcctgccctggtcgacactcggttctctctggcagcctttttccctacgtcattccctagactgggaacgctgtagacagaaagggtggcaagtgtgtgggtgaccggc

SEQ ID NO: 382968 - DNA, 122 bp, Homo sapiens
tgcagagcctggagggaagccaggaatcctgcctcctcctccccagccgcagaggacatgcggacatgtgtgggcaggtcccttctgacccatggcaggtccctgttgatggtcaggctggg

SEQ ID NO: 382969 - DNA, 122 bp, Homo sapiens
tttggagtaaagtagaatatgtttctagtcttttatagttggtgttaattttgttctaaacgtgaaagtgttaacagcaagttgaaaatgtgacaaagctcaatttcatttcttgtttattg

SEQ ID NO: 382970 - DNA, 122 bp, Homo sapiens
cgcttccctggggacggccgagcctgcccccgtcggcgcctccccaaaaagaggcccccccgcagtggctcccgaatgtcgggctcgccagcctcggcttcctacatggaaggtccgcgggg

SEQ ID NO: 382971 - DNA, 122 bp, Homo sapiens
aggcgaagggccttctgggaggtgaggtcctgggcggccgctggccaccaggcggaagtgcgtaccggaagtgccggcggcagtgtgtaagacgctcacgggcgcgcggactatcgggcggc

SEQ ID NO: 382972 - DNA, 122 bp, Homo sapiens
ggacgcccggcgtctccgggctgcgacccgctgcgctggaaagtgtggggcgccttggcgcgggctgaggtctctgacccgggcgagtacccccagcccgccggccacactgctgccgggca

SEQ ID NO: 382973 - DNA, 122 bp, Homo sapiens
tgcttctctgcttgggacgtggattcctttaccctcctcctcgcctgactacttctgacgcgggtcgtcaggactccgcttgggtgtcacccgtccaggaagcctcccttaattaagggccc

SEQ ID NO: 382974 - DNA, 122 bp, Homo sapiens
gtgaatgaagatcacgctcaggggccttctctctgtctttgctttcagggtcatggaggacgctggcggcggcgaggagaccccggccccggaggccccgcacccccctcagctcgcgcctc

SEQ ID NO: 382975 - DNA, 122 bp, Homo sapiens
ccagaggggaactgccctataaacagagaactcccaaaaggctggctccagccaaggccacgggtgagacaagcctgtgttatgcgcttatataatgcacaggcttcacccagagatggaac

SEQ ID NO: 382976 - DNA, 122 bp, Homo sapiens
gaggaaggcagcctcctactctacagatgggttgcctcttaccgcccacctccaacttcccgatggcccaagcatcagaaggtgtttaccagcaagttgcttagaacatggagcccagaaaa

SEQ ID NO: 382977 - DNA, 122 bp, Homo sapiens
ctaggatgtattagctgcagcacataataatgacaacgtgaaatgaccgtgccctctctgcgctgcgccgcccggcccccgacctttttggatggtcgatgtcagcgccagccttccggggc

SEQ ID NO: 382978 - DNA, 122 bp, Homo sapiens
ctgctgctgctgttgctgctgctgctgctgctgctgctgctgttgcagggactggtggtccggggccggatgctgcaggggcggccccgaagggaagctgtcgggcacaggcggtgtgaact

SEQ ID NO: 382979 - DNA, 122 bp, Homo sapiens
tgaatctctcctgcggaggagtctctcatcccatccgctgggtctgggcacccagcttcccggcctgcaagggcctgtccaaaggacgccgaccgatcctgtgggcctcttcgagcgggacc

SEQ ID NO: 382980 - DNA, 122 bp, Homo sapiens
tttctttgggatttttattttttggtaggtttggttttgcttttgttttttctctgaactcgatccatgaccttggtagattatgacgtcagaaactctggaaatctggcttattggaggag

SEQ ID NO: 382981 - DNA, 122 bp, Homo sapiens
tcgggggctccgaagggggccgcctggtgggtgtcaggacgagtctaggacctccgagagcgacggtgcttcttgtgactttcgattaatttctgggaacggatcttgagtgatgcgcgggt

SEQ ID NO: 382982 - DNA, 122 bp, Homo sapiens
gtgatggttagataatgaaacaagggctttgggatgtaagcagagatactaacagagagccgcatttgtttgtagcacttttaactactcaaggaatcttgaggtgacttaatttgtagttc

SEQ ID NO: 382983 - DNA, 122 bp, Homo sapiens
ttttttcccatgttatgcccagaaatatccaatgatgggcaacacaaacggacaccttgtcgttagtattaggatctttgggaaagttgaggtacaaactattcatgtggcacatggtgtgt

SEQ ID NO: 382984 - DNA, 122 bp, Homo sapiens
taacacgggccctgtcgcgctcccgccccggtcctgcacagccccgaagttcgccgggcccggccaccctgccccaagggcaagcaaggaatacgttcccccagccccaggggccaccgcgg

SEQ ID NO: 382985 - DNA, 122 bp, Homo sapiens
tggctggggctgctggattgaagccctgagccgggcaggctgcagagcgtgaggatggcgcggggctctggtgtgggcgcctgggagcgggtagctgccattccgagtgaggagatattggt

SEQ ID NO: 382986 - DNA, 122 bp, Homo sapiens
caggcagccctccctgcccgggccgtcttattttcctatgtcattcctgtcaccacctggcgctcaccttggctaactggagctccagcccctttggacgaaaagagctcccagagccactc

SEQ ID NO: 382987 - DNA, 122 bp, Homo sapiens
gtcataattcattacattaattaaccacttttgagaactgggcgcgggccagaggggatgcgggggagggaagcctccatattgttgtgtctcaacctcctaggtcagaatttccacggttt

SEQ ID NO: 382988 - DNA, 122 bp, Homo sapiens
aagaaaatttagttattttacatggaattgtcaggcacttacaaaaatcctccaaactgacggtgattctgctgttggccaactgggagtgtgctgagtgcttcagtggaccagtggataat

SEQ ID NO: 382989 - DNA, 122 bp, Homo sapiens
aggattacaggcgtgagccaccgcgcctggcccagcattgcagtttttaaagtcctatttcgtatatgaggaaactgatgtctgaaagaaatgacctgtccaaggtcactcagactagactc

SEQ ID NO: 382990 - DNA, 122 bp, Homo sapiens
agcagggacggggcatgggggtggggtgcggtgttagccgagaagggcactgggccaacccgattgagatttgagctaagccaggaagggggcaagggtgtgagtccggtggctgcctggag

SEQ ID NO: 382991 - DNA, 122 bp, Homo sapiens
ccagtctggagggtggggagcatctctgcccggccgccatcccgtctgggaggtggggagcgcctcttcccggcagccatcccatctgggaggtggggagcgtctctgcccggccgcccatc

SEQ ID NO: 382992 - DNA, 122 bp, Homo sapiens
atattccctttgcttacgacgtgcttagggaatgaagaggcgtggttaagataaaagaggcgtgcctacagggaaatgaggttgcaacttgttttaggtgtaatcgcgccgccagtccggtt

SEQ ID NO: 382993 - DNA, 122 bp, Homo sapiens
caggtggacaccttccgagccaaccttttctgcaccgactctgagtgtctaggtgctttgcgggcccgatttggtgtggccagtggggatagggcagaggggagcccacattttcatctgga

SEQ ID NO: 382994 - DNA, 122 bp, Homo sapiens
aaaaggccgcggcagcacccagcctcctttctgaggaagcgattccacgagccacaaaagcgcctgggctgtggtcatcagagtccaccacaagacaaccttcctgggtccctacaccctgg

SEQ ID NO: 382995 - DNA, 122 bp, Homo sapiens
attgcaggttcagttccagaccaccataataaagtgaatatcaccataaagcaaattgctcgaaattttcggtttcctggtacataaaaaaagctatgtgtttacacgatactgtagtctag

SEQ ID NO: 382996 - DNA, 122 bp, Homo sapiens
acgtgacccgcgccccactgcggaggccgcgcgccccccagcccgggagccccggctgcccgcgggaccccgccctgcccgcccctcggcctaacccggcctcaagccccctcccgcggggc

SEQ ID NO: 382997 - DNA, 122 bp, Homo sapiens
gtgaaatggttctgattgaagcttcaatcaacgcaggaaacaattgagctccctgggagtcggagaaaccagacctatggtttccatggtgacagatccggctagtccggactcctggctct

SEQ ID NO: 382998 - DNA, 122 bp, Homo sapiens
gctcagggaaggcagagctgtgtgttaagtggaagtgactctccgtggagggaatcaggccggactgctcctgcctggccgctcagttccgagaccttccaacggcagcctcccctgcagcc

SEQ ID NO: 382999 - DNA, 122 bp, Homo sapiens
caaagtgatacagaaagcacgtaaggatgatatgggagctaacctaccctttcattgatgcggaggtttggatggcatgcggacggtctggatggcatgcggacggtctggcagggcctcaa

SEQ ID NO: 383000 - DNA, 122 bp, Homo sapiens
atgcattttaactttttggttcaatttcaagtctgctgtggctaatagtggtcaagattccgaactaggactttcctctgtgaagaggatgcctctgaagaaattttaaactggtgattttg

SEQ ID NO: 383001 - DNA, 122 bp, Homo sapiens
cttcttggacattcagggtcaagggccaccacgagccactgtcggggttggcagcactcccgaatcatgatctgcgtgactttgcatcccactgtcttccttaggacgctcttccacagaaa

SEQ ID NO: 383002 - DNA, 122 bp, Homo sapiens
gggcgggcgcggtgtagcggcccgcgggctgacttgctcccggctgtcccccggccccagcgaccatgccccgtaaaggcacccagccctccactgcccggcgcagagaggaagggccgccg

SEQ ID NO: 383003 - DNA, 122 bp, Homo sapiens
ataaaaggtaaaagtgatgcatgccaaaccaaactaaaccaatttggattatctgctattcgggtaatcttcacagaaatgactgagagaagaatctgcagtttactgagggcatttcagtt

SEQ ID NO: 383004 - DNA, 122 bp, Homo sapiens
cggcggggcgcagtgggcgcctggtggcagcgccgcccccagctccctgccgggccggcgcgcccctgattttctcgtaaggacgggctgaaagaggaggggagacagaaggagacactccg

SEQ ID NO: 383005 - DNA, 122 bp, Homo sapiens
taacacagccggtgaggggcacagccagaattccaacttaaatccacctggtccaaaagtcgtggtgcttccctgtctgggacatttcctcttccacctctcatatccccagattttctggc

SEQ ID NO: 383006 - DNA, 122 bp, Homo sapiens
gcatgggggccccacagagggttcatgcagacaagacatgctagaggcctgtggggacctcgagggccgttctgccccattgctgcacagcgaaaagaaaataataataatttctaagactt

SEQ ID NO: 383007 - DNA, 122 bp, Homo sapiens
gctcgcgcccccacggttctccagcgacccctgaagatgcttccgtccgcggataggggacgtttcagacctggggtgggcacagcggtccccggtgagatggtcttttctcctggagtggg

SEQ ID NO: 383008 - DNA, 122 bp, Homo sapiens
ctctttggaatgttagtgcctaagccccccaccaggataacccagagtggggtgcttgggcggaggctggtcagcacctccacgtggtcatgactgaccagtctggggagggggagggccct

SEQ ID NO: 383009 - DNA, 122 bp, Homo sapiens
ccctcatcccgcagccttcacagggggtggggttcactcctcggatctcacgggggctaacgtgtcccccggaaagagatgtccccgtcctggcccccagcatcggcgagtggaccttattt

SEQ ID NO: 383010 - DNA, 122 bp, Homo sapiens
tttatccgtccaggactccgtgcgttgggaaaatcacgccgcgagggggcgcaagagccgcgtactccagagcaagaagaaaaggctcggggatccaggcggagagtccaggagaagagccg

SEQ ID NO: 383011 - DNA, 122 bp, Homo sapiens
gcacacaaccatccacctaggggcacaggcagaactccccaacacacctcttggctacctcggtatgtgtggccaggccctcctgcaggtgcctgtacttaccacgtgagggcgccctggag

SEQ ID NO: 383012 - DNA, 122 bp, Homo sapiens
ggggagcgtattggtatctgtcttgtcacttaggtgatctagatctgccggctcacctcccgccatgctgggcgcgggtgtggtcagctccccacctcctgtcctggtagaaaatgggggtg

SEQ ID NO: 383013 - DNA, 122 bp, Homo sapiens
ggtacgcaccgttggagcctcctgcctggtctctcgtgcttctctgtctcttctctaagtcgatttttcgctctttcttctgtttgtgcccctctctctgtctatttctgtcctcccccagc

SEQ ID NO: 383014 - DNA, 122 bp, Homo sapiens
ttccctttcaagctgagccttcagattctccaaaggtttcgacctcccacaaagtcttcacgaggtgactcgctcttcaaggagccctgctattatgccatatggtgttatgactcagcaaa

SEQ ID NO: 383015 - DNA, 122 bp, Homo sapiens
ctacaagttagcaaccgaaggcgtccttagcagcagtggccgctgagatgtacgaacttccggttctccgggcagctgccactgctgtagcttctgccacctgccacgaccgggcctctccc

SEQ ID NO: 383016 - DNA, 122 bp, Homo sapiens
tcaagtgctcacattcatgccccctgacctgtgaccccaaggagctccaggtggtcgggacgcaccggccccagcgcacaggctcaggctgacagacagacccctggacgttggaacaggtg

SEQ ID NO: 383017 - DNA, 122 bp, Homo sapiens
cagccaactaaagagccagcaataacgtgtgcctaggagtgcgagagccttctccacctccgtgatgcctccgggttcgtgcatggccacttgtgctgcgtgagcgtcgtaggtttagggga

SEQ ID NO: 383018 - DNA, 122 bp, Homo sapiens
gggcggcgcgctggaacaatgaggcggagcgcgccgggtcccggacggacggtagcagaccgagcaactgggagaagggccaccctcttgggaattcctgagcactgcagtactcctcttaa

SEQ ID NO: 383019 - DNA, 122 bp, Homo sapiens
gagctgtggagggagcagcgtgggcgggaactcaggctgcgtgtggcgtacgcgggccagcgtgagttctgggtgggtgcaggcttggcagccccgcacctggagcagccggccagtgccac

SEQ ID NO: 383020 - DNA, 122 bp, Homo sapiens
cctccccgactccgcctctggcgcccaagcccgcccaccgatgagccaatcgccgcacggcggggcccggcctttcggagtttccagtccgccaaccaatcagcaattgcctctccgcaagc

SEQ ID NO: 383021 - DNA, 122 bp, Homo sapiens
ggtattttctttccaggccactgctagacacccagggggctcaatttcttgccacagtttcggagagcttgctggttaggtgctgctcttggttggaaccagtcggcccgcatgcaaaacag

SEQ ID NO: 383022 - DNA, 122 bp, Homo sapiens
tctccaatctgagggcccacaagtggcatcatcgctttgcggttggagtttacccatcttcggttatttgggagggtctgtacccttcctttcccccaccccaaacccccttcctctggcct

SEQ ID NO: 383023 - DNA, 122 bp, Homo sapiens
ccttccagggtacatgcatctgaagttgagtcagctgtttggtatgttaagaagtttggtcgttatctggagcacctggaggtcaaattcatgaatccttacaatgctgtcttgaccaagaa

SEQ ID NO: 383024 - DNA, 122 bp, Homo sapiens
aatttgcagccgacgattatggaagacggcaagcgggagaggtggcccaccctcatggagcgcttgtgctcggatggcttcgcatttccccaataccccattaaaccgtatcatctgaagag

SEQ ID NO: 383025 - DNA, 122 bp, Homo sapiens
gttacagattgaagaccagcaaaacccagtcatcccaacacgcctgtatgctctttgcctcgaggggacaagctccccatcgcggcaatagggaacggaaaggctttatcaggtgctctcca

SEQ ID NO: 383026 - DNA, 122 bp, Homo sapiens
agagcagtaataacaatggctaccatttattgagtgtttacagtgcaccagacaccatgccgtcactttcttatttgtgccaattctatttaatgtctattttacagatgtagaaactgagg

SEQ ID NO: 383027 - DNA, 122 bp, Homo sapiens
cacttactctgtgcggatgagaattccattaatgttcgctctgacctttgctaatcccagcgtcattcgcagtgcctccatctcaaaatctccttaatgccaaaggcggtaatgggtgtctg

SEQ ID NO: 383028 - DNA, 122 bp, Homo sapiens
actgcagacgctccgcaaacggtcaataaacgctgaggggccaaaagccactcctcaggacgcgcggcggagagacctagcctcaccccagcctcgccccgcgcagttgtttacaagcgctc

SEQ ID NO: 383029 - DNA, 122 bp, Homo sapiens
gtggcaatttcgttgtagccaggcttgtcacaggactgatgaatgggccctagtctagcacgttacaatctccctcaggtccaagccgaggcctacctcacccgtgtgcatccagggacggt

SEQ ID NO: 383030 - DNA, 122 bp, Homo sapiens
ttcacgggcctccctaagcccaacggtggtctggggtcagttccactctagggactggcccggtgcagcccctagatgggggctggttgcaaacagctgatggtcagagaagccgcttcagt

SEQ ID NO: 383031 - DNA, 122 bp, Homo sapiens
cagggagggctcaggaaaggagcaggcgccgcgtggtgggacagcgtgattccagcgcctcggcatgtctcaaggaacagacgactgttgttcgccctggctcgctctgactcatccttcct

SEQ ID NO: 383032 - DNA, 122 bp, Homo sapiens
ggtttgttgagatgtaatgttcatctgttttaagtatacagtttggtgaattttgacaagcgtatagttatgtaaccgctatcacaatcaagatgtagaacacttccattgccagaaaggtc

SEQ ID NO: 383033 - DNA, 122 bp, Homo sapiens
ggctggagtcgtgtagccgaggagaagcccgtaaatctgagacggaatcaaagagaagcgcgaaggatggcttcgggttcgttagctaacctttctacacggaaacaagtaaacagggttgt

SEQ ID NO: 383034 - DNA, 122 bp, Homo sapiens
ggccaacttcggacttagggccccaccatgatgagccagatggagctgtggggagatccacgctggcacagcagtccgtctgccgtagcgaagccccgagcacggccaacagcgacccacag

SEQ ID NO: 383035 - DNA, 122 bp, Homo sapiens
gctggtggacatggccctgacaggtcctgggcaagtcagccctgtctggctcccaagggacgttgcagatacctaccctctgggtgccagcggagcgcagtcacagaccctggcacgtccca

SEQ ID NO: 383036 - DNA, 122 bp, Homo sapiens
actatgaacagtaaaataatattacagtaagacattaaacatctgtatcatatttcagcacgtgttaacactcgcatttttcttgaagctataatatattttcttggaaatggatatagcaa

SEQ ID NO: 383037 - DNA, 122 bp, Homo sapiens
ttctaggccccgcctttcctctattcgcgctctgacaaagtgcaggggatatagaccaaccgcttgtgaaggctgctggttctgttagaagcccgctttcgattgtcagtggctttgaggca

SEQ ID NO: 383038 - DNA, 122 bp, Homo sapiens
atgggtctacctttcccagcagagcacctgggttggtcccgaagcctccaaccacctgcacgcctgccagggcctctctggggcagccatgaagtccctcgtcctgctcctttgtcttgctc

SEQ ID NO: 383039 - DNA, 122 bp, Homo sapiens
agcataccagcagcgaggagacgaggactagcagcagacatctcgccagcagcagcatctcgcccatggaactgatgacttccgagctgtccccgtgcgggtccgtgcgcgagtgcgcgcgg

SEQ ID NO: 383040 - DNA, 122 bp, Homo sapiens
ggctggggactgctgggagggccggaccctgcgagaacgggtgggcgtgtgcccggtgggcgcgggaggggcccgggctgcacgagcgcgcgtgcgcgtcggaactggagccgcgggaggag

SEQ ID NO: 383041 - DNA, 122 bp, Homo sapiens
gtgcgatgggatggcatcgtgctttcaatctgcactcgcctaatgagaaattatgttgagcgtcttctcatgtgcttatctgccatctgtataccttctgtggcgctctgtttgcgtggctg

SEQ ID NO: 383042 - DNA, 122 bp, Homo sapiens
tgagcagagggaggctccgaaaaacaaccgggtggggggcggaggctcctcgccgcggcccggcacatgcaaacagggctggaggcagcagaaaccccgactctgaaatccacgccgccccc

SEQ ID NO: 383043 - DNA, 122 bp, Homo sapiens
gtgctcatcacgtgatgtggtccaaccactcagggcaagcctggcctcccaaatgttgcacgaggggaccacgactcccaacatgctgcacagccaaggcgacccctaccgcagcctttctc

SEQ ID NO: 383044 - DNA, 122 bp, Homo sapiens
cgcctctgggctccagctgcagctgcgcaaagcggggctcggaggggctcactccagctgcgcctcagcagcggttggggatacagcagccaaagagagcagcgctcactgctgggatccgg

SEQ ID NO: 383045 - DNA, 122 bp, Homo sapiens
gcccccactccacgccaaggggcacagccagcccctagggctctgccacatcgtacacgccgcccaacgaagacaccccttggtctccatgcatggtctctgagcctggcatgagattcagg

SEQ ID NO: 383046 - DNA, 122 bp, Homo sapiens
gtatacccagttccccaaataacatcttacataacactgggccagcgctgccagtcacttcgcagaaggctcctcggtttgggtctgtgtctgttgtctccttgggattacattcaggccat

SEQ ID NO: 383047 - DNA, 122 bp, Homo sapiens
gagctgtgccaaggaaaatgcggatttggggaaagtgagaagtgggagagctcggaagagcgggaaagccaaggccggaggtggcgattcgcacccccacactcacacgcgcttccgtttat

SEQ ID NO: 383048 - DNA, 122 bp, Homo sapiens
gcccgtctcggggtcctccacacagcgctccagaagctgcaggtacgtgaggttctcgtgcgtgttggggtcgaagaagcccttggtgtcgtcgctggggtccgccaggatgcggttcatct

SEQ ID NO: 383049 - DNA, 122 bp, Homo sapiens
agggaagtcaggggggacaggaggagagcgggaggggagggatagaaggccggcaggctccgagggccagcacacactctcacagctcacagcaacactgctgtctccggctgcatcttaac

SEQ ID NO: 383050 - DNA, 122 bp, Homo sapiens
ccacgctcactctccgcccctgcccacaggtggggtcctggatcggtttcgccatcatgacgcagtgtctcccaggtgagcctgccgccctccctcggcggggccctgcccctccgggccgg

SEQ ID NO: 383051 - DNA, 122 bp, Homo sapiens
tttgaagagcttctagactgctgaaccatggaggtacctggagtgggcatggaaggtctgcgcccccatcctttgccctgggtaccatctcatctggctgtttatctgtaacctttgtcaca

SEQ ID NO: 383052 - DNA, 122 bp, Homo sapiens
ggccgcccggtctgggaagtgggcgcctctgcccagctgccccgtctgggaggtggggggcgcctctgcctggctgccccgtctgggagttgaggggtgcctctgcccgaccgccccacctg

SEQ ID NO: 383053 - DNA, 122 bp, Homo sapiens
taccaatgttaactgtcacctctcatctccaaactaaatcacacctggaattggaggagccgaggagctgatagagtcagcctcgcagaggcgacaagtcaatcagcgcggagatgcccgcg

SEQ ID NO: 383054 - DNA, 122 bp, Homo sapiens
acggcaccatgggcctcgggggtctgtccaagactacaaggcccgaagcgccgcgcgccgcgcacgcacagtaggcgagggtggtagggacttatagtttttaaactgtaacggtggagaga

SEQ ID NO: 383055 - DNA, 122 bp, Homo sapiens
caccgtccctctgcctctccttcacaatatacaagacggtgccgccaggatacgaaaggccggctgcttcacccacccctccaggctaagattagggccaggaccctagccgaaggcggggt

SEQ ID NO: 383056 - DNA, 122 bp, Homo sapiens
ctgagacagctccgagctgcctccccgcagccgcgggccgctacaatacggattcggcggcgagaggaaacagtctggccctccaggggacgcagggaaatccaacctttgggtcgggggca

SEQ ID NO: 383057 - DNA, 122 bp, Homo sapiens
caggcactgtggccggagcaggtgagggtagcagcaatgtgtgcctcccagccctgcacacggttgtcaccctttcacactcacacatcacacccgcaagggaagctgccaccaccctctta

SEQ ID NO: 383058 - DNA, 122 bp, Homo sapiens
gagtgcttggagggctctgagtcgctcctggtgtaggcgtcctggcggaccagtgagggacggccccgggccagtgggccacctgctctcctggccacgggcctggggggccccaggttaga

SEQ ID NO: 383059 - DNA, 122 bp, Homo sapiens
cgtggggccgtggcaaccccgtgcctcgcttgcccaatgagaacacggtttggggcggggcgcggccaggaccggagcggaagtggcgatcggagcggaagtggagctaccgccaccgccgc

SEQ ID NO: 383060 - DNA, 122 bp, Homo sapiens
cgcggagccgggcctagtcgcgcgcctgcgtactgcggtcagagggccgaggcctgggggcgagctggggtcgtgcagtacagcctctttccggcaaatcacgcgagatttcgttcacccgg

SEQ ID NO: 383061 - DNA, 122 bp, Homo sapiens
cctccaaacggaacgtcaccctatcagctgggagacagcgccgcactgactgacaagccgcgcatatttatcctcgcgcgcggaggggagactctcagaacgctcctcgaccagcagcgagg

SEQ ID NO: 383062 - DNA, 122 bp, Homo sapiens
tgagctcagatagttggttagcctcccccatgaactctttttggccaaactgagcactaacgttaggtagacactggcttggggcttacctgggcctgatacatcacctacattggttgaac

SEQ ID NO: 383063 - DNA, 122 bp, Homo sapiens
cgcgactctcagacctccaagtaggactacaaaacagaggtttctgggggaaggaagtgacgatcggcgcaaagcatgctggtctcaggcggtctccgctcaacgatccttcctcaaagcat

SEQ ID NO: 383064 - DNA, 122 bp, Homo sapiens
gtattttctcccaggctttctagaggaccatttgctagaggaccagtccccaaacggccgcgcttttaggattggttttaggagtgatggcctcacgcacacggcagcggccattctgagca

SEQ ID NO: 383065 - DNA, 122 bp, Homo sapiens
tgcattacaaatcgattgcaatttcctagaaggtgcagcaagttctctgcctgcctgccacgtgcgagacgctccacagcgagcttccccagctccgggcagcagaaaggggatggttcaga

SEQ ID NO: 383066 - DNA, 122 bp, Homo sapiens
ttagggtgaaagaaatgtgaagttactagaataatagcatttaggagactgttagcttctcgagttgctgcaagacgctcttcaccatccacccacaaagccttatgcaggctcctattctg

SEQ ID NO: 383067 - DNA, 122 bp, Homo sapiens
atagatgttaaaatggtgaacacaggaacagctggagtctgcagctcccagcgaaatcaacgcagaaggtgggtgatttctctatttccaactgaggtacccagctcatctcattgagactg

SEQ ID NO: 383068 - DNA, 122 bp, Homo sapiens
tcacagcactcagctccaggccgcctgttaacgaagttttgctgtgcaccaggctgttttcggcatattgggagattttttttgttcctcacatgctggttagtttcctggtgctcggttgc

SEQ ID NO: 383069 - DNA, 122 bp, Homo sapiens
actgttcttcagctcccatcaccaactaaacttgagtatcaatggtggtaaaaataacaacgacaaaagctaacatttaccaaactttacatttataaatctccatttgatcttcgaaacca

SEQ ID NO: 383070 - DNA, 122 bp, Homo sapiens
cacccaagatgtgccaaaagctgctgaaaggaaggaaacctgaaactctacttacttgctcggttgggaacagggtattgatatactcaacagcattgaaatctgctcgatctagagggtcc

SEQ ID NO: 383071 - DNA, 122 bp, Homo sapiens
ccaccccgcgagtgagtgcggtgcccaggcgcgcttggcctgagaggtcggcagcagacccggcagcgccaaccgcccagccgctctgactgctccggctgcccgcccgcgcggcgcgggct

SEQ ID NO: 383072 - DNA, 122 bp, Homo sapiens
gggtgcccctgcattctgtggggctttgggggtgtctgtgtggggtgcacgtggacaccacggccctgaaaggtctcgtgttgggcacttccaggtttgcagggagtgtgggctccagggag

SEQ ID NO: 383073 - DNA, 122 bp, Homo sapiens
tctccgccatcgcctcggcccgtccccgacccacacagcctcaaccagcagcgccgcaggcgtggccctacgctcccgcttcctgcttccgtccggacagatacgacttccgtttcctctgg

SEQ ID NO: 383074 - DNA, 122 bp, Homo sapiens
cgggcgcgaccacatgatggatgccatcgcccggtgtgagcagatggcccaggagaggggcgagagccagcgccagtcaccctggcgcatctacttccggaaggaattcttcaccccctggc

SEQ ID NO: 383075 - DNA, 122 bp, Homo sapiens
aacagctccgccccctcgcttcctgagccgccacatcccggcagccctcctacctgcgcacgtggtgccgccgctgctgcctcccgctcgccctgaacccagtgcctgcagccatggctccc

SEQ ID NO: 383076 - DNA, 122 bp, Homo sapiens
ctgtatgccaagttttatgccagattactgcatcatctcaccaaatgcggtcaggattctcgtcacttggagctctgtgatctagcacctgcctacctctctgacctcatctcctccctctc

SEQ ID NO: 383077 - DNA, 122 bp, Homo sapiens
gacttcctcactgcccgttcagcccctactgccgtgtacccccggtgggtccctgctctgcggcaggcatgctccaagtggcagggctcccacctgtcatcaggaatcaccagggccccaca

SEQ ID NO: 383078 - DNA, 122 bp, Homo sapiens
aaaggaaaaggttcactttcctgagcccgcaaaatcagatggcccaggacacagaagctccgccctccactgccctgggtcgagatcttcctctgtgtacagtgaattcaccattttaccac

SEQ ID NO: 383079 - DNA, 122 bp, Homo sapiens
aaaattaatatggtttactttttattataaaagtaaaacttggccaggctcagtggctcacgcctgtaatcccagcactttgggaggccgaggccggtggatcacgaggtcaggagtttgag

SEQ ID NO: 383080 - DNA, 122 bp, Homo sapiens
tcaagctcgtgctgataggcccaggcggtatacaggcggaagcacttccctgcagccacccgacctgccctgccagctcgctgattggctgaggcctggaaagaaaggggaacaggctggct

SEQ ID NO: 383081 - DNA, 122 bp, Homo sapiens
cgatggcactctgggtacctgagaagaggttgtctgtgatgagttcgcttttattaatgacgaatataacacagatggcctgttttcagtaccgctaccgcccggtggtgtgcgggcgccac

SEQ ID NO: 383082 - DNA, 122 bp, Homo sapiens
tgtcccttcacggttctcactggaggcagaaccggacatcttttctttctcttctttgggcggtgagccctcctcgggtcctgtatcatcatcttcagcctctttgggctccacatcctcag

SEQ ID NO: 383083 - DNA, 122 bp, Homo sapiens
cagtttcgccaaagcgcggtaacaggtaccctagggttccacagctaggagttctggtgacgccatccaccaggtgtcaggagagggccgggaaggtcaggacccgcgcccaggctccagag

SEQ ID NO: 383084 - DNA, 122 bp, Homo sapiens
cctgactctcagttggagcaagatgactcacaggaaatgctcaacagactgaagtggccacgatgaccagcaggatgtaaaggcactcccctcaacttccccactcccctctccctcctatc

SEQ ID NO: 383085 - DNA, 122 bp, Homo sapiens
acaatcacaatgaaaaccagcagtgtggtagccattggagtaggcagaacagagttgtagcgcctttaatgcctcactcaaagaaaattgtcattatctgatccatctggtggttctctgga

SEQ ID NO: 383086 - DNA, 122 bp, Homo sapiens
aatccagcgattttctgattgaacttcgaatgcggaaacatcttgcccttactggggcaacgaggggaggcaaggcgtgcgccaggcagagacaccttggaatcccacccagcccagatgtg

SEQ ID NO: 383087 - DNA, 122 bp, Homo sapiens
agaaacgggactggacctacatgcaagtgattccgcttttcgtctttggcccatagggagcgctgggcccactatggagaatcaggtgcaaacactgaccagttatctctggagcagacatt

SEQ ID NO: 383088 - DNA, 122 bp, Homo sapiens
gctgtccagcagcggcggcctctgcggcgtgggcagaggtaacttggccgtgtgcaagcccgtcacctgagggcaggtggccccaccagggaagctgctggcttctgctgataccaggggct

SEQ ID NO: 383089 - DNA, 122 bp, Homo sapiens
cacgtacttcacaggagcaagggacataaatgtgtaaataaatcctctaacaaagtaacacgcacatggcagatactaaataaacactagctattattttattttatttatgttttatttat

SEQ ID NO: 383090 - DNA, 122 bp, Homo sapiens
atgccagtgcactccagcttgggcgacagagtgagactctgtctcaaacaacaacaacaacgataaaaatactcaaaaaagaagaagaagaaaggaagaggaagaagaagaagaaagaagca

SEQ ID NO: 383091 - DNA, 122 bp, Homo sapiens
gagttgaagtttgcattgaaaagactggctttccatgacgtagccacgtgctttcagacccgtcaccagtgagatgcttcaaccagcccagggagggcagtgtcactgcagtctctctgcta

SEQ ID NO: 383092 - DNA, 122 bp, Homo sapiens
ggtatgatgctgagccggggagggcatgggggcctccccccaggcagaggctggaaccctcgcctgcacccctccaaggatacagatgaaagacgtcgtcactatggccaggatggtccccg

SEQ ID NO: 383093 - DNA, 122 bp, Homo sapiens
gcagccctcggcttccccgcggccctgcggacctcggcctcagcgcggcgcggcggggcgcggagcagctgctccttctgcgcagtggacaatcggccaatcggcgcctccgtcggtcggtc

SEQ ID NO: 383094 - DNA, 122 bp, Homo sapiens
tttgagaaatgcgcttcccatcggggcagggacaggaacaaggagcatgcttctaatcaccgaagatttatcctgcttcagacgaggcgtttaatgaaggcaggggaaggggctggaggaga

SEQ ID NO: 383095 - DNA, 122 bp, Homo sapiens
tggaaagagaggcagggcccacggacaaacagactgggatggatgcatagacagacggatcgatcgggtggatgggctcacttgcaagtgcgctcgcggccaccggcgtggcagtcgaagtt

SEQ ID NO: 383096 - DNA, 122 bp, Homo sapiens
aggcagagaatggatcgacccagttggaacgtcttaagatggtggagacagaagacttaacgaggcggtgtgaaaagctcttgagcagccaacgtgtcttttgcagcctcagtgtagaatac

SEQ ID NO: 383097 - DNA, 122 bp, Homo sapiens
caacatgtgatctcctacagcttgtcaccttttgagcagcgtgcctccccgtactacttccgtaaaggaatccccaacgtgctgcgccgcactcggcagtctttccttcgcgtaatgccgcc

SEQ ID NO: 383098 - DNA, 122 bp, Homo sapiens
agagagggtctttggaaagtttaacagctctgaacgactcaattgccagagagaaaccagcgtgccaaaaataaagcattaatcaaagccaagaaaacagtgttggctgaaacatggcttgg

SEQ ID NO: 383099 - DNA, 122 bp, Homo sapiens
actcccaggggtgacggaagcacccacaggcctgcacagggagtgaaactggggcaatcacggggctgcgcgttgccacgggactgcgcgttgccacgggacgccggtgccactgcggggaa

SEQ ID NO: 383100 - DNA, 122 bp, Homo sapiens
aattcaccaagtcagtggtagagctgcctcagacctgaggagcccgctcaggtcctcaggcggccttactctatgtacctatggggtctttgagccccattcgaccacctcccactcaggca

SEQ ID NO: 383101 - DNA, 122 bp, Homo sapiens
cataaatctttcgccttttactaaaagtagcttcctccagcagagtacatggtttgggaccgtttaactattttattttgttttattttatttatttatttttgagacttgagtcttgctct

SEQ ID NO: 383102 - DNA, 122 bp, Homo sapiens
ggcagccccgcagggtggtctccctggctccctgtttgttgtgaaacacacgcagctccccgacagcaggcaacgctcgtggtaaacacaaaaccccagccgggaaccaagacaccatcaga

SEQ ID NO: 383103 - DNA, 122 bp, Homo sapiens
ctgccacgctgagctgtcccctcctcccagagggagacccgcgtggcccccgggcagtgccgaccctgtctgcctgtctcgtagggcagcagcatttcagatgctgactccgccaatcctct

SEQ ID NO: 383104 - DNA, 122 bp, Homo sapiens
ggaggatctagggggaaagaggagcattcatcacaagtttcctagagagaggagacaaatcggtgtgccattgacaacatgagccagggtaaaggcaccctttggaattactgatttcaaag

SEQ ID NO: 383105 - DNA, 122 bp, Homo sapiens
gaactgtggtctgctgtggtacctgaggaatgtggtccagcatcaagtgcatgcagcggacggtgctcttaaagcaaaggcaccggctggggcagggcaaccctggcaggcaccacccggcc

SEQ ID NO: 383106 - DNA, 122 bp, Homo sapiens
aataaataaatgaaaaattacatgtagggtgaactgactcctcacttacctacttctgaccgttgcataccctaatttttttatttttagatagggtcttgctcagtcactcaggctggagt

SEQ ID NO: 383107 - DNA, 122 bp, Homo sapiens
aaaaaaatctttagacaaaaaatctttagcagttctctgcaatttctattcctttttgtccgtctaaactttctaatttaaagtgctttagaatgttcatctttatcgtagcctgccaagat

SEQ ID NO: 383108 - DNA, 122 bp, Homo sapiens
tttcttcacattcacaacaatgaaaagaaaacaagcagcgtcctgtgtgttgcgtagagacgtgtgtctccggtgtgcataggagcctttgatcattcctgcagccatttatctttgctcgc

SEQ ID NO: 383109 - DNA, 122 bp, Homo sapiens
ctgggacgtagagcccggcgtgacagggctgctggtgtctgctctcggcctggctgtgggcgggtggccatcagtccaggatggtcttgaagtctgagggcagtgccgggttggctgcggcc

SEQ ID NO: 383110 - DNA, 122 bp, Homo sapiens
ccctgtcctcagcttgtccccttcaagaaggccttgtcttcccatcagtgacaggctcagcgccaggagaatccacccccaggttcagtgcctccaactctcaccccatccccattttatgc

SEQ ID NO: 383111 - DNA, 122 bp, Homo sapiens
aagccaagctcctcaccatgcctagcatgccctttgtgttctgggcctttgctctccttccgtcttatttcctgctgctcacatagcattgctgcagccatcatgaccctgtgggatcattg

SEQ ID NO: 383112 - DNA, 122 bp, Homo sapiens
tacaacagctttgaaaccggctgccaggattctgggtctcttgggggaaaaaggcagacgcggattccaaatcctgcccggttgccgacttgcggcgtgacctctcgcgaggtcatctgcaa

SEQ ID NO: 383113 - DNA, 122 bp, Homo sapiens
cggggacagggcagagcctgggccaaaggaagccacacccagttcttgccctgccctgcccgacacaggcaacgtgaccccaagcgacagccagctgatgcttgcttctccgagcccggcgg

SEQ ID NO: 383114 - DNA, 122 bp, Homo sapiens
cctgactgtgtagatgccagcaacatagtacacatagcttttcgagcgcctagtgggggtcggctgataacccgcatcttatttcgtcctcacaggcatctcttctcctggcttcccagata

SEQ ID NO: 383115 - DNA, 122 bp, Homo sapiens
gtcacagcttctgctgggcggagacccccttccagtaatcaaggatgtcatgcagatcctcgtccttggcgaactggaccttcttgcgcagggcgtgaccggcggccatgtacacctcctcc

SEQ ID NO: 383116 - DNA, 122 bp, Homo sapiens
actaaaaattaaaaaattagctgggtgtggcagctctcacctctggtctacccaggatgccgaagcaggaggatcacttgagcctgggaggttgaggctgtagtgagtggtgtccgcaccac

SEQ ID NO: 383117 - DNA, 122 bp, Homo sapiens
ccgacgcccggtgtggaccctcaggtgtctgccgacgcccggtgtggactctcaggtgtccgctgacgcaggtgtgggccctcgggtgtccgccgacgcagatgtgggccctcgggtgtccg

SEQ ID NO: 383118 - DNA, 122 bp, Homo sapiens
gccccccagtgccagacgctccagacagactgccactcttggggggcaagagttggttgtcgtcatggcgacggcgctgatggctgtggttctgcgggcagctgctgtagccccgaggctga

SEQ ID NO: 383119 - DNA, 122 bp, Homo sapiens
cgctggtggccgcctccccctaggttgtggatgagtcttggcctagggttcagggccctccggccgcgggaggatctcccgccaagcttgttgcttttccaagttagtgcctggcgtgtgtg

SEQ ID NO: 383120 - DNA, 122 bp, Homo sapiens
ctggacgcagcggggcgccctgtccctgcctggagctcttccagctcagggccccatcagcgccaccaccttggactgccgccatccagggcgcagggcccgctgccccacacctgagggac

SEQ ID NO: 383121 - DNA, 122 bp, Homo sapiens
atttagaagtaagacctggccaggcatggtggcttacacctgtaatcccatcactttgggcggcaagacaggtggattgcttgaggccaggagttcgagaccagcctggccgacatggccaa

SEQ ID NO: 383122 - DNA, 122 bp, Homo sapiens
ctacatcttgaaggcaaggaatctgaatcttgaagagattaaatgaattgtccaaagtcacgtaagtactgaatggcaggggtggaaatccacatcctttgattctgagtgtagcattcttc

SEQ ID NO: 383123 - DNA, 122 bp, Homo sapiens
ccaattcctggcctcaagcggtcctcccggctcggactcccaaagagctgggatcacagacgtgaaccacgcgcccggccacattccccaattaatggtttttggagagtggccggtttgga

SEQ ID NO: 383124 - DNA, 122 bp, Homo sapiens
tgttgagtaataggaaaccattgaaggttttagagaatgaagggaaggttaatggatagccggagtaggcagagatagtgaattaggaagctattttagtcagcagaggaagagatgatagg

SEQ ID NO: 383125 - DNA, 122 bp, Homo sapiens
cagcaggggtgggggcgggggagtcgggcctaggggccatgtggaagctccgggcccggccgcccgccctgtctgaccccggccggcttctccttcctatcccgtggcccctgtggctctcc

SEQ ID NO: 383126 - DNA, 122 bp, Homo sapiens
tcaggaacggggacttggggctgggctggaaggggttcaggagccggtgcatagggttgccgcggcccggggacacgggcggcggcgtggagctgttgcccgccagctcgcggagccgccgc

SEQ ID NO: 383127 - DNA, 122 bp, Homo sapiens
gacggccccgcctgccccagcccacgcccgcctccccttcctcccgcctgtggctctgctcgtctccacctaagcctttggtggtttaacgcacttttgcagagacatctaccaagagatag

SEQ ID NO: 383128 - DNA, 122 bp, Homo sapiens
ccggaagggatgcactctcaccttggcagctgctgctgctgtttgctgagttagggactccgagtccctggggctgttggagcccaggttcccggcctacctctcccttgctgtgtgctctt

SEQ ID NO: 383129 - DNA, 122 bp, Homo sapiens
cataaaagaaacctttattaacttatgtctaagtaatggattctgtgttcccagaccactcgacccggagttaaatatgagttaagattaatttgcttaaaacactatttcttttacacgta

SEQ ID NO: 383130 - DNA, 122 bp, Homo sapiens
ggcccctcgccgggttgataaatggcaagtggcactcagtgggtagagaaatcaataaaacgaacacttcacagcaaacagccccaattaacacgggtacccgggagcgaagcaaccacacg

SEQ ID NO: 383131 - DNA, 122 bp, Homo sapiens
cttacccatctctccctctgtgccgagaactgccctgaaatactgtggtattaattaactcgtttaacactaacaatctcatgaggcgggtgctgttactattcccgtaatgtagacgagga

SEQ ID NO: 383132 - DNA, 122 bp, Homo sapiens
tgcccctgggccacaaagtactcctcctcctcattgtcaccttcctcccgctggctgctccggagcagcagctccaggtcggggctggagcccagccccttcaaggccttggggccaccatc

SEQ ID NO: 383133 - DNA, 122 bp, Homo sapiens
gaggtgtggagggacaggcgcgggcgggagcccgggctgcgcagggcgctggagggctggcgcggttccgggttgggcgcgcctctgctgccctgcactccgcgccgccgtcgggcgcctgc

SEQ ID NO: 383134 - DNA, 122 bp, Homo sapiens
ctcaggcgggtgggtgtttctccagcatgagcttttgctctcttatcccagccactggcccgtccatcctgggaggtccttcagggagacatgggactgtgccctcagagtcatgggcccgc

SEQ ID NO: 383135 - DNA, 122 bp, Homo sapiens
agaacttggccaggaggtgctggacagctccggaacccgcgcgccccctgccaaataaagcgtggagacccggactcgggctctctgggaccagcatacagcagaaggcaaggggaactgag

SEQ ID NO: 383136 - DNA, 122 bp, Homo sapiens
atgcccgcagcccaggattcctcctaagccatgtcccatctgtgggaccccacttgaaatcggactgtccaactcacctggcagccactaccagagccactggaactctggcccaaggctgt

SEQ ID NO: 383137 - DNA, 122 bp, Homo sapiens
gagggacgggatgaaggggtgagaggagaaggaagaaaaagaaagtgggtgattttaaaacggaggtccctggtcacaccatgagcctcacagatgggaaaactgaggcacgggggatggtg

SEQ ID NO: 383138 - DNA, 122 bp, Homo sapiens
taccgtttaggtgagcgctctgcgtgagtgcgtgctgctccactgggcctcaggtggtgccggtgccattctaggagagcgctctgagtgagtgccggccactccacccagcctcccacgcg

SEQ ID NO: 383139 - DNA, 122 bp, Homo sapiens
tcgtctcgcagagccggggacaagagaagtcgaaggtgagtgagcctccgggccgggggccgggagaaaaaacctagcccctcggtgtccagcgctcagtgcaatgcaccccttttcccagg

SEQ ID NO: 383140 - DNA, 122 bp, Homo sapiens
gcggttccccaggaggcagaccctgggcgggacagggaggcacggcacgtgtgctgccaccgaagtggcttttactgccccacccagctcccccaacgggcacccatggtgtcgcccgcgag

SEQ ID NO: 383141 - DNA, 122 bp, Homo sapiens
gacctgcttgagcttcgacttccagactccagaactgtgagagcagcagctcctcttgcccggcgcggtggctcacgcctgtcatcccagcacttcgggaggctgaggcgggtggatcactt

SEQ ID NO: 383142 - DNA, 122 bp, Homo sapiens
caccatggcgagctgcttcttggtcctgccgtccgcccccagctgaagcatccccaggaccgacgcaatcccatggggagagatcacgatgttgtcatgaggcctcgacttcacaatctgat

SEQ ID NO: 383143 - DNA, 122 bp, Homo sapiens
tgctgggtcggggctgcaggatggcagggtgcgggtcggggctgctggaaccctagacctcgctccgcgcaggctgcaaggggctgcggagtgtcggtgactgcaggttgtcgaccttccaa

SEQ ID NO: 383144 - DNA, 122 bp, Homo sapiens
ctcacagaacgctggaggcctcgagtccggaggtgaaagatggaaaggcctgagggtgggcgctgtagaccccgctcccggtgacaagccccacactgacactacgccgaccaccgagaagt

SEQ ID NO: 383145 - DNA, 122 bp, Homo sapiens
gcacaggcgcctaatttgtgttcctaggtgacacagtcattacttataaatgttcctggccggtcccaggaggtgggagggttgggagttacttcggttctctcaaaggttggggaaggaga

SEQ ID NO: 383146 - DNA, 122 bp, Homo sapiens
gcagtttgttcctctgtcttcccgcttcctggtgccccgactgcgtccccacgaacgccccgtccttaccgccggctgctgtggagtgcctcgctgtctcccaggtccccgagtgagcgtcg

SEQ ID NO: 383147 - DNA, 122 bp, Homo sapiens
tcctgtcgcccagaggggacctccccagcctccttttctgtggggtaaataccgaggcgccgcaggctggctcacacagaggcgaatgtctagctttggaaagctgctggagggtttccaga

SEQ ID NO: 383148 - DNA, 122 bp, Homo sapiens
agattgacatgtcatctggccaataggttggctcctctatggaggcactcaggaaccagtcgggtctttggtccctcgagcgagatgcgagctgtgtgcgtcgacgtcagcgtgctgacgtc

SEQ ID NO: 383149 - DNA, 122 bp, Homo sapiens
aaattttaagaacaaatgcaacaaatctatacagttaaagaaattcggtcggtcgcagcccgctcgggcccgttcgcgcccgtcctgtcggccacgtcccgcggggtggcgggcgcgctgcg

SEQ ID NO: 383150 - DNA, 122 bp, Homo sapiens
ctgattggataatgcttgaggccccgccccctcaggtcctgagttacagaagacgtgatccgatgctggactgagtgaagaaagagagacagtctaagctgcagccttttctttttttaaaa

SEQ ID NO: 383151 - DNA, 122 bp, Homo sapiens
tttgaaacgcacaaagtattaactgcgcagtccagatcctttatcctgggcgcagcaggacgggacggaagagctggggctgccccgtactctgtcgtgggctgaaggcacccggcctggga

SEQ ID NO: 383152 - DNA, 122 bp, Homo sapiens
cccggcacctgagaaccacttccggtgagtagcttctacttccggagacgatgactcccccgcgtcccagaccggaagaagcccggcggagaccggcctcgctcggccacttccggcaaggg

SEQ ID NO: 383153 - DNA, 122 bp, Homo sapiens
aacagaattagaactcaggccccctgactaaggccagtgtctttttccaccaccccactccggtctctgaatgctagtgaagctgaactgcaacatgtcccaaccatatctttcaaagctaa

SEQ ID NO: 383154 - DNA, 122 bp, Homo sapiens
ggcagtctgagtccacccctagattcatcagatgttaacaaaatgcctgtctcagccaggcgtggtggctcacacctgtaatcccagcactttgggaggccaaggcaggcagatcgcttgag

SEQ ID NO: 383155 - DNA, 122 bp, Homo sapiens
agcagctggacgctttctccctggggctcagccacacattttagtcacagttacagactacgggggatttgaagccttcgctttagtttttattaagaaacattgaaaattccatggcttgc

SEQ ID NO: 383156 - DNA, 122 bp, Homo sapiens
caagagcaaaactccgtctccaaaaaaaaaaaaaaaaaaaaaaaaagaggggagagccagcgagggtacaatcccttaaacttgcagatgcctggtctttgaagtgtgcctagatcaagatt

SEQ ID NO: 383157 - DNA, 122 bp, Homo sapiens
accatatcatacagaatagtttcactgccctaaaaatcctatgtgttcccttgatccctccgtccttcccccttgaatccctgtcaaccactgattttgtaaatgtttctatagctttgcat

SEQ ID NO: 383158 - DNA, 122 bp, Homo sapiens
cagctgcctcactgcggaaagagcacggccgctcctggactccagccctgttggggctggcggggtcagcaggcgctgggttccagcctcaggtggggtctttggaggtggcctctgggcac

SEQ ID NO: 383159 - DNA, 122 bp, Homo sapiens
ataggagtgagccactgcacctgccagaaccttttttctccccattctacaagctgtgcacgtgaggaggatactctaggaaaatgccctataaagatctggttaggacccagtcatccaaa

SEQ ID NO: 383160 - DNA, 122 bp, Homo sapiens
aagggagggagcgcgagcactagcgcgcgagagagagagcgagagcgcgcgcgccgatgacgtcacgctcggcgtctcggccatcttagctgtagatagaggcggcaacctcggaagtgcgg

SEQ ID NO: 383161 - DNA, 122 bp, Homo sapiens
cggctgggcacacgcagtcggaggcggcgccggccaggccgccgggcgcctatggacgcgcggagcccgctgtctccccgagccagtgcgttcagcatcgcctctctggttgcagcggaggc

SEQ ID NO: 383162 - DNA, 122 bp, Homo sapiens
gcggggcgagccgcactcgttaccacgtccgtcaccggcgcgggagccaatcgcctccctcgcgagcgggttcggtttactagaaccagacgcggctcaacaccccttaaaaaacaaaacca

SEQ ID NO: 383163 - DNA, 122 bp, Homo sapiens
gcgcttcggcctgggcccggcgccattcagccgcaccgctttcccgtcgctgcccgacaccgatgaccacaagaccgacaacactgggacgctgcctgaggacgtagccttccgcatctgcg

SEQ ID NO: 383164 - DNA, 122 bp, Homo sapiens
gggtaaagccctgctgggcgcgtgtaggagtgggaggcgcctactcaggtgcagaggaggcgctggtaacccctgccctcacaaaatgcagaccctgcagatcctgcaagaaagttaggccc

SEQ ID NO: 383165 - DNA, 122 bp, Homo sapiens
gaaggatggagctcgctggggaggagctcacctcggaggggacagtggccaaccagggcgcggcctgggtgggtgggttttaggctgtaagggcgatgcaaaatatgatgttcctcaccgag

SEQ ID NO: 383166 - DNA, 122 bp, Homo sapiens
tgggcttggggagtttgccagcaactccccacggactcatcttaaaggtgagctcagcagcgactctggggctccctgaagtcttgaagatgttattaaggagactgcatttgaacttttca

SEQ ID NO: 383167 - DNA, 122 bp, Homo sapiens
aggagccgtggtgagggcaggtgagggcgggcaacggcgaggcagggctgggactgggtccggaggttgagctgtctctgctccactgggctgcgggactgacgcctcctgaggctgcaaat

SEQ ID NO: 383168 - DNA, 122 bp, Homo sapiens
gttgaggggccgctcgaggcaggcccttccatgaggcctggactggaggccttctctagccgccggcgctggcctgggccgcctgccgccacgcaggggccgcgcgcctgggccccagggcc

SEQ ID NO: 383169 - DNA, 122 bp, Homo sapiens
gacatgcctttcccccgcccctctctgaacctggggcagaatgggggcagagtagctccccgtacccccaggactgttgacctgcagtgctctctgtggacaaagggtgggcctcacacagg

SEQ ID NO: 383170 - DNA, 122 bp, Homo sapiens
accccatcaaattgattgacacaaggcatacaacgatgttacacaaaaggaggtcgctaacgcagatctgaaaggtcagggaagctttccagaggaagtgatgtctaaggcaggacctgaaa

SEQ ID NO: 383171 - DNA, 122 bp, Homo sapiens
caaaattaaatgccacttcaaaaagccacagtttccataattatgttctattcttccagtcgagtataggcttaccagccaggactgaggagttaatattcatcctgtggctctaactaatc

SEQ ID NO: 383172 - DNA, 122 bp, Homo sapiens
cctgtcctcctgctctttgctccgtgagaaacatccacctacgacctcaggtcctcagaccgaccggcccaagaaacatctcaccaatttcgaatccggtaagtggcctctttttactctct

SEQ ID NO: 383173 - DNA, 122 bp, Homo sapiens
ctctcggctcctcccacccaaggctgctgcaggacttgtccttctctggtgctctaggttcgctcttccttaagacatttattaatgacaaagggagaaatggttaccctgtgctggagaaa

SEQ ID NO: 383174 - DNA, 122 bp, Homo sapiens
gttccctcctcccccagccgctggcggccaccactctcctttctgtatctctgatgttgacggttctagggacctcacagaagggaagtcatcacatagttgtccttccatgactggctcat

SEQ ID NO: 383175 - DNA, 122 bp, Homo sapiens
gatgcaactcacagcagccacctctccaactctgctctcgagctcgcccacctcggctcccggccccttaagggtgacagcccatgggggaaacgcctcccctgctctgatttcagtctctc

SEQ ID NO: 383176 - DNA, 122 bp, Homo sapiens
tgttcatggtgggaggacaatttccataacagtaatcctttgtgggcagacagagaatcccgtctagcgtagttttgcatttgcttccctgaggccccggacctcgaccatttttatgggaa

SEQ ID NO: 383177 - DNA, 122 bp, Homo sapiens
ggacattagttgacttttttgttgaacacagaggtcagttaaaagtccaactggcttggccgggaaatataatgcaacatgtcaacaggtgtgtatattttattacattttactcatactcc

SEQ ID NO: 383178 - DNA, 122 bp, Homo sapiens
agcaagccctgtggggggttgaggacagcttgggttggatgtccctcactgcagcctgtccgtggatgtctctgccttaagggaattggaggtggaaccatccagtcttgaaggtcaacgga

SEQ ID NO: 383179 - DNA, 122 bp, Homo sapiens
cacatgcttccctgcaaaatgcttaagctagacacagtgtacagataactttcacagaaccgcaagggcttgatgctcccccaacagaacggcttgagctttccccagcgcaattcagaaat

SEQ ID NO: 383180 - DNA, 122 bp, Homo sapiens
tgctggatcccccagctaataagtagcagatctggcatctgaggctcatggcagccaccacgtcctggtgccccttgcttctgaccaaggacagttctctggacccatctggctctgccctg

SEQ ID NO: 383181 - DNA, 122 bp, Homo sapiens
ctgacttaaagaatagaagccgctgaccctcgcggtgagtgttacagttcttaaaggcggcgtgtccggagtttgttccttctgatgttcagatgtgttcggagtttcttccttctggtggg

SEQ ID NO: 383182 - DNA, 122 bp, Homo sapiens
catctctattctttgaagctggtctgctttgtttacaattatgccctagtcattagccaacggggactttgggagtagcttgttctgggaatacttcctgtcaggtttttcccagcctgtct

SEQ ID NO: 383183 - DNA, 122 bp, Homo sapiens
tacccaatctgtacaagctttgtgtaaaggaaggaacctgagtctggagtaaggcagtcacgggtatgaattccagttttgctatttagaacttgtgtggccttggataagtcactcgatca

SEQ ID NO: 383184 - DNA, 122 bp, Homo sapiens
aggcacgctccgagatggccccgtctattggcttttgaatatgcacattagcagagggttcgtcccactggccaataagctctggctctgccgcacggatcgctgggagtggtagtccccgt

SEQ ID NO: 383185 - DNA, 122 bp, Homo sapiens
gacaaggcccgggggctccgccagcagcaggtccctcgggccccagccctcgctgccacccgggcctggagccccacacccgaggtaagccagcccacttgcctgtttctggtcccagccct

SEQ ID NO: 383186 - DNA, 122 bp, Homo sapiens
attatgttaagataaagtgacatacacctgtgttccttgccccctcccaatggcacactgcgctaggcccatcagaactagaggaaggaaacagaatgtttgggaaactcgtgctggtgact

SEQ ID NO: 383187 - DNA, 122 bp, Homo sapiens
ttaagtctccaatcctgggacgaggcccatttcagggttttctgtcaccttctagccgcccgccaccccagaggggtgccagatgccccagtttttgagtgcatgcaggcaggcgaaagtgg

SEQ ID NO: 383188 - DNA, 122 bp, Homo sapiens
ctgactcacacctgcatcctggggcccaggcccgtgtgcctgagacccctggacctcacccggcatcgccagcatttacccaataccgtgccagctgtgggcaaggaacccaagtccccgag

SEQ ID NO: 383189 - DNA, 122 bp, Homo sapiens
ctcgagaagatctttggagtagacacaaaagccgcgctggcgcatgcgcacaaaaagcgccggcaattggggtcgcagctggagatgctgcggccggcagggctctggcgcttatgtcggcg

SEQ ID NO: 383190 - DNA, 122 bp, Homo sapiens
tggcaggcttccattgcaagtcactcctccatccacacagatcactcacgtccctcattccgtccctcgttccacagagcgtgttgacacccactgcggggcaggcctggctgcaggcctgg

SEQ ID NO: 383191 - DNA, 122 bp, Homo sapiens
aggcttaaggcttagttcctcccaggggtacttggatatttggtggcaatcagttcttttcgtaggggcggtgacagcttcagaatttggtaatgtccttctgctttcctgtttattctgta

SEQ ID NO: 383192 - DNA, 122 bp, Homo sapiens
gctcttcttcctcctgggccaggtctttgaaacgacaattcctgccgcggctcctggctgcgcccgagccagattccctgccccagccccgagaatccagacggcatcctcctatctttcat

SEQ ID NO: 383193 - DNA, 122 bp, Homo sapiens
tttacgcgtcgcccaatgacaggacctggaatgtactggctggggtaggcctcagtgagtcggccggtcagggcccgcagcctcgccccatccactccggtgcctccatttagctggccaat

SEQ ID NO: 383194 - DNA, 122 bp, Homo sapiens
ttaagtaacttagccctctaacgccagacatccagagctgtgctatccaatacaacagcacgcatatgtttttgtgtgtgtgtttttgtttttatttatttttatttttttgagaccgggtc

SEQ ID NO: 383195 - DNA, 122 bp, Homo sapiens
tccatccgacagaatccaagccaatctcgtaatgtttacttccggcttttcgcctaattccggcggccactgcggtaacttccggatgaccggcacatgcgcactaatttcctggcggggcc

SEQ ID NO: 383196 - DNA, 122 bp, Homo sapiens
tcagacgccttaccttcctctggaaggtcccatccagtgcagccacaattacggtcttcccggcgttggccatggcctcgcagaactccacgatgtcagggaactggaaagggcacgtggag

SEQ ID NO: 383197 - DNA, 122 bp, Homo sapiens
accatgttggccaggatggtctagatcgcttgactttgtgatccacccaccttggcctcccgaagtactgggaattacagatgtgagccaccacacccggccaagaccattgttcttaagca

SEQ ID NO: 383198 - DNA, 122 bp, Homo sapiens
acccagcagaaaatgagctggccaggatgccagggctagatcagcctggagaagtcatcccgttcagcctctgctcttcgctggtgggaaaagtgaggcccagggagctgagcaacactgcg

SEQ ID NO: 383199 - DNA, 122 bp, Homo sapiens
tggtgtacgagcccttggcccctgtacaaggtaagacccggggttggggagatgggagcgcgggccacaccagtgcccagccctctgcagtctacacagtgagccgcacctgaccgcttctg

SEQ ID NO: 383200 - DNA, 122 bp, Homo sapiens
ggccccttggggcagagggatgtttcagagaacagccgggtgacctgcctccctgctctgcgtgacgcagccctaggcccctgtgaggctagagtcacccccgcaaggtgggaggtcacggc

SEQ ID NO: 383201 - DNA, 122 bp, Homo sapiens
cgcgggtggccgcggtgtccgtgggccacgctcagctgcggtcagaggcgacatgagtgccgcggggctgctggccccggccccggcccaggctggagcgccgccggcccccgagtactacc

SEQ ID NO: 383202 - DNA, 122 bp, Homo sapiens
gggagggggtccgcttggagccggaagctaaggcttgaaagggggctggctcctctttcccgagggtgtaatggggatgatgcaaacccaacccaggagcaaaagtctggctctgacaagaa

SEQ ID NO: 383203 - DNA, 122 bp, Homo sapiens
ttcccctctcaggaaactagaagtttcttatacatccttacaaatactaatgtgtttgaacggcttccacttttttttgtttttggtgagacagggtctctgtgtctcacaggctggaatgc

SEQ ID NO: 383204 - DNA, 122 bp, Homo sapiens
acgaaaccactgaaagcttccttgtttcatctgttcatgaggatagtattttttacctcacggcagtatgaggatccattaagatgtatatcaagagtttttagaccagtgcccggcacatg

SEQ ID NO: 383205 - DNA, 122 bp, Homo sapiens
acttgcgcctcctgctcaggcaattgtgcaggcgaccccggagcccccagccgtcctccccggccctcgagcatttccgtaagaacagagcttggcttaaaaaggagaaatataggggaccg

SEQ ID NO: 383206 - DNA, 122 bp, Homo sapiens
acccggcggctacagcgcccccatattttctgggagacttcccttttgacaataggtatccgagagtgtaactactttatggcaagtattttagattctgtgtataatagatgttttacata

SEQ ID NO: 383207 - DNA, 122 bp, Homo sapiens
gtcatcacaaatggtccatggctcacctacaactagcccaacctcacacggcctgacccccggctcacagcccatcatggtgcccactgtgtcgttcaccacagcaaccacgtcgatgttgt

SEQ ID NO: 383208 - DNA, 122 bp, Homo sapiens
agccccattattttgcatagtttttgctctccatctttctgattcctgtatctatttatccgctggctacaacatgaggtaggcaaaagagacaatgaattaacccttcaagattctcatat

SEQ ID NO: 383209 - DNA, 122 bp, Homo sapiens
ctccctcgccgatcttcagtgattccttggccttcggctgcagctccgaggcggtttcctcgcaagcccagtcagccagcaacttccacgtcggactccaggcgggggcgggagcgagggtc

SEQ ID NO: 383210 - DNA, 122 bp, Homo sapiens
aactggagttgagggaatgtttggggatcccacctggtatcagtaagggaaccatggcgacggccagccttgcccatgtgaggcatttgctttgtcaggccttctcagtagtggagaaggga

SEQ ID NO: 383211 - DNA, 122 bp, Homo sapiens
gaggaatggttgaatatacctctatgtaagaataccctcaaggtaaacactaaactcttacgtgttttatcttgggcccacatgaaaaaagtaaatgtttttaaagaacctattttcctttg

SEQ ID NO: 383212 - DNA, 122 bp, Homo sapiens
gatggaggctgagctgcgcaaatcccaggtgctgttcagcgtgacccgaggggcacaccacggcgagctcgagctagacatcccgggagcccaggcacgaaaaatgttcaccctcctggacg

SEQ ID NO: 383213 - DNA, 122 bp, Homo sapiens
ttgtagcagcaccggccggcggccaaagtcgaagaccacccattgctcaaaggtgccgaacgaggcagcctgcacacgcactcccacctggaagtcggcagtggagctgggcacacggaagc

SEQ ID NO: 383214 - DNA, 122 bp, Homo sapiens
catgcctgtcttcctacaatctccattaggctacctgctgggccctgtgtgtgtacccttcgcttacctctgcttttgcatttcacctaaatgcctttctctttggcctgtttccagtctct

SEQ ID NO: 383215 - DNA, 122 bp, Homo sapiens
tcccacagaagggggaacgcaaggggcgtcccaagacctcatctgcctgcagcgtcacaccgatggcctggcctcggcttctcattatttgcaactgccatggatgtttacaggaacccagc

SEQ ID NO: 383216 - DNA, 122 bp, Homo sapiens
cacagacccccgtggtagctgtcccgcaacagggcccaggcagtgacggcaaccggggtccgctgccagctgtggcggttcagagtttttgagggaaaccaggtagtggagcaggtacttgt

SEQ ID NO: 383217 - DNA, 122 bp, Homo sapiens
gcacctgaggctcacatcagttcggagctccttttggcatccctctgggaaggtactgagcgttctgtctcctccatgtcaccactactttcccatggagcaatgtctacctcccagtgagc

SEQ ID NO: 383218 - DNA, 122 bp, Homo sapiens
tcccacaagtcctggaggctctgaacgcggcgctgacgccgaatacctgtgaaaaagactcggggaggagacccgcagaccgccgagcttctgccgcgggaaccgcgcccccggccccgcaa

SEQ ID NO: 383219 - DNA, 122 bp, Homo sapiens
tttaaggaaaaaaattgctaatacctgacatgtctttcggttcataattgcgattgttagcgaagtggtctcgaattccatttcactccccgttcgccgctctcagactaaattgcaaatat

SEQ ID NO: 383220 - DNA, 122 bp, Homo sapiens
cccggtcagctccaagcccctgtcccggtggcccaggatcttctgctaagggtctcattccgtcccgcgctccagtcctggcttggcgtgcctccctcgccttttattgtaggtctggtctc

SEQ ID NO: 383221 - DNA, 122 bp, Homo sapiens
ttgattgattgattccatgcacaggcaagcgctgttctgggcaccggagacggagcagtgcgctgttgcgtccatccacagatggcctccagagtcatgcggttgcagggaggccgaagggc

SEQ ID NO: 383222 - DNA, 122 bp, Homo sapiens
ttggctttgaagagggctttttccttgtcgaaaacaggaagggctctggtgggagaaaggcggcaggtgtacttcggtttatatgcacaccacaggtgacaaggagaaccttctctcctaaa

SEQ ID NO: 383223 - DNA, 122 bp, Homo sapiens
tcctgtaacctgatgcccacatctcggaaggcatcctgagccatgagctggagctgctgtcgggggaggccaaggctgtgtcgggcagctgccttctctacagcccgaagcacatccccata

SEQ ID NO: 383224 - DNA, 122 bp, Homo sapiens
ccggggagccggcgccttcacgccccgcggtctgcagcgggaggagcgcgggttccatcgcgccagatggcgctgtctggcttttctcgggcctcgggcgccagtctccagaggtctccggc

SEQ ID NO: 383225 - DNA, 122 bp, Homo sapiens
caccctgccaggcttcgaggcagggcagtttgaccatggtctctggcttagcatatctcccgtagacactggcaggaccacggtgtctgacagggaagggaaaatcctaatcgttgtcatga

SEQ ID NO: 383226 - DNA, 122 bp, Homo sapiens
agggaagagtcttttcagcgctgaggactggcgctgaggaggcggcggtggctcccggggcgtttgagcgggctcacccgagcccgcgggccaacgcggatccaggcccgactggcgggacc

SEQ ID NO: 383227 - DNA, 122 bp, Homo sapiens
cacttaactaaactcttgcggtgtcttatgaccagggacgaagtgcggggccccttcagacgtcgcagctggagtaactgttttctttccatttcacagctcttgaaggaggtgtgactgag

SEQ ID NO: 383228 - DNA, 122 bp, Homo sapiens
ctgctgcgccgccaggcaacccccccccccccaccccgccccgagacgcgctctctgcgccgcaccaagtccttggaaatttccacggcggcccgggaccgctatcctgccccgggctcctc

SEQ ID NO: 383229 - DNA, 122 bp, Homo sapiens
gcatcatgagggtgggagccagggctgcccatcatgggaccagatccccaactaggccctcgagcccaggagcaagaggtcatgcaggccagcaggtttcaggcacagccaccctagaatgt

SEQ ID NO: 383230 - DNA, 122 bp, Homo sapiens
ttcagaggctttgttcaggaagcaacatggctgctccctggagctgtttccgcatggggccgccatcttgagagcccggtcgtcttcgtactagcggaggattcgcccagtgctgagcccga

SEQ ID NO: 383231 - DNA, 122 bp, Homo sapiens
gggggaggccgagccggggatggggatgtctgctggggctgggtgatgagtatcaatgaacggggcgattctgaaaagaggctgatgaaaatcgagcccgccctgccccggctgggctggga

SEQ ID NO: 383232 - DNA, 122 bp, Homo sapiens
cacagtcttccatagtactgtcctcacctcagatgccagctgcaagtcttgggagtcccccggctacctgcaggtcagccagctaacagcaataaattaaggggtttccaaggtctcaggtt

SEQ ID NO: 383233 - DNA, 122 bp, Homo sapiens
agtacaaactatatccccgaaattgagctaggcagtttcttgtttaagttttacagaccacgctgtgaggtaagtactgttagtatgcccttttttctttctttttgagacagagtctcact

SEQ ID NO: 383234 - DNA, 122 bp, Homo sapiens
ttctaccttcaatacatctttccctttctcttcttcatgaatgcttatgagccgagattgcgccactgcacactagcttgggtgacagaggaagactgtctcaaaaaaaaaaaaattgatca

SEQ ID NO: 383235 - DNA, 122 bp, Homo sapiens
ccatccgttgccagcacatgaatgactgtaagtcaccaacaactgccagccaaggacgcacgaaggatcagcctgtgtctccgtgaaaattcacagcacagacgccgctcgggagggagagg

SEQ ID NO: 383236 - DNA, 122 bp, Homo sapiens
cgctattcaggagaacagaaagcatccaacccactgaaaagacaggcattaaaggagcttcgcctacagagctgctggaggatacactctccagggggttcctgttaaaaaccagagcttca

SEQ ID NO: 383237 - DNA, 122 bp, Homo sapiens
gtgacggtggtccagaaaggagagcgcgacatcctctccaacggccagcagggtgagtggcggctgccctctgtgcatgggccagtgccaggtcagtcagcatggccacaccgagcatgagc

SEQ ID NO: 383238 - DNA, 122 bp, Homo sapiens
tatgaacaagaaaaggacagactcaaccggccttggggtctttcatgtattcggggagtgcgaggtgtcagggtacaaagaggcgaggccgaggaacagctgggcaggcagcgcttttgcgg

SEQ ID NO: 383239 - DNA, 122 bp, Homo sapiens
agcctttaacacctaacaaccccaaggggagtatttcggctcttggactgtatttcaaagcgattggaccccagaccattcccccagttactcaaaagatccagcctctcctcaggtgtagc

SEQ ID NO: 383240 - DNA, 122 bp, Homo sapiens
ctgcagacggacgcacctgccagccctgtcctgccctggccctgacgcctggctgccccccgggaaggccttgcaagccctgagtgcgagtttctcatgaaatagaaaaggccgaagctgtg

SEQ ID NO: 383241 - DNA, 122 bp, Homo sapiens
gaagagagagcctggcgtcctgctccttcggtggaagcgcgcgcggggcggggcccggctcgaccaggtgtgtcctcacgggtggacacacacctgccccccacctgcccgggcgtgcagac

SEQ ID NO: 383242 - DNA, 122 bp, Homo sapiens
cggacagagaccgcagcgggcgggaaaggcgactggccgcggcccgacggagggtccccgcgaagttggaaaccggagacttgggcccctgcccaaaaagcagaatctgacgttaccgaggg

SEQ ID NO: 383243 - DNA, 122 bp, Homo sapiens
gggcaggaacgccggggcggggacacgcacgcttcgcccccaggaatgacctcatcgctccggagctccactcacagaccccacctaccacagggaacgggggcgggtgccagcgtccgggc

SEQ ID NO: 383244 - DNA, 122 bp, Homo sapiens
ttttttttaagtcaccaagttcatggtaatttgttacggcagcctttggaaggtaagacacggggcctggtattaaataagggctcagtgtttgtccaatgaatgaaaggggccaggcacgg

SEQ ID NO: 383245 - DNA, 122 bp, Homo sapiens
gtgagttcatgctaggcttggagcgactattgtttgtaaaaggtataattatcctgctaacgctgtacatatggctcgtgcctggactcgctcgtgcctagaaagagtaaagccatgtcgaa

SEQ ID NO: 383246 - DNA, 122 bp, Homo sapiens
gaaactagacaaaaaggtaagagaaaaccaagcaacaaatgcagtctcagctgttgctaacgttattcacaggagtgacaaactgaatgaatcttagggtgagagactggtctttttacctc

SEQ ID NO: 383247 - DNA, 122 bp, Homo sapiens
gccccgtcactccctctgccccgcctgcacagcttcttgccaattcattcccgcccctaccgcccctataagccaccaggtcgctccagtttggtgccagcgcctggagggagaggcgtggc

SEQ ID NO: 383248 - DNA, 122 bp, Homo sapiens
tttgggtaatgcatgtgtgtagatgccccgtgtatcctggagcagacagctcaactttggcgtaccatctaagaagccatttcccaaaaggttctatgaatttggtaggattgttttcattt

SEQ ID NO: 383249 - DNA, 122 bp, Homo sapiens
tggtttctcaacggctatagaatctgaatccccaattctttagtactcttagcttttcctcgtacaatatacctttcatttctacattgctgtgcctttgctcatgtaggaatgacatgcct

SEQ ID NO: 383250 - DNA, 122 bp, Homo sapiens
gcggcggcgacggcgacagcagcggtggtggtgtctggttagctcggcggctgcagatctcgcggcgacgcctgcgagggacccgggccgcgggtcgaggcgggcggcgcctgcgagggacc

SEQ ID NO: 383251 - DNA, 122 bp, Homo sapiens
ggagaaagggtcctgggagcttcaggtttgtgtagggcgaggacggggcggttctgcgtccggccaggttggccctcgaggacccagccgtccccaacctcctaaactgctgtcggatgtag

SEQ ID NO: 383252 - DNA, 122 bp, Homo sapiens
gcagggatagcaggggactgctccttcctgcggcgggcaggtggagttgctgagcagcttcgtcattaggagagagatgcccactaccttaaaaatcagaagctttttggcttctggaagct

SEQ ID NO: 383253 - DNA, 122 bp, Homo sapiens
ctgggcccacggaggacgggctgctcaaatgtcaccgcctttggcaatgtggctgtgagacgtcagaagggcgtcgcaggagagcttctgtgtggatcgctccattttgtagaagggaaatc

SEQ ID NO: 383254 - DNA, 122 bp, Homo sapiens
gccctgatcacctcagcacgtagccacctgttcactcatttttctcttgcaattttgccacgggtggtgcaatctttgctcttcttgtcccccacccctaagcgctgggagctcctgcaggc

SEQ ID NO: 383255 - DNA, 122 bp, Homo sapiens
aatgtctcaacctttcccactgctgccatcctacttgagataaggccaggaaccagccagcgtctggggcagtggttctgtgggggaatgcgaccttagtccactttacttgtcctttaact

SEQ ID NO: 383256 - DNA, 122 bp, Homo sapiens
tagttcatagtctccattttcctctcagagtgcaacatggtaaagtattttactcccccacgcgcatgtatacacacagctgcacaaccgaatgctggaattatgatgtgccattcaacctt

SEQ ID NO: 383257 - DNA, 122 bp, Homo sapiens
ataacctaaaaaccctggaaatgtgagaatgctcttcccttatcctctttcctatcatgacgttgacataacagaaaaggaaacagcattggtcagggagccagaaagagcaggttcctggc

SEQ ID NO: 383258 - DNA, 122 bp, Homo sapiens
cgtgtggtggttctgcagcagcgtgtactgcgcggtgagcgctgcgctctgggaactcagcgtggagttctccacctgccgagagggagaagcgcggcgtggcgcaggccccacagtcagcg

SEQ ID NO: 383259 - DNA, 122 bp, Homo sapiens
ctcgcgaggtgtgcctctgcaccagtactgtgcccggcctggcctacggcatctgcgcggcgcagaggatccagcaaggcacctggattggacctttccaaggcgtgcttctgcccccagag

SEQ ID NO: 383260 - DNA, 122 bp, Homo sapiens
ctggctgctcagcgggaaggcagcaggcaagtggtctaacgttggcggcggtggcggtggcggcggcggcggcaccgacagtaaagcggggagcaagagaatttgaaaagagacatccgctc

SEQ ID NO: 383261 - DNA, 122 bp, Homo sapiens
gctcacaaatcaactcaatgtggtccttactaagtagagatccaaaacttcccaagtttccgtgacttgcatacacaaaaagttacaatggtacagaatcttatcaaaggtatatagcttca

SEQ ID NO: 383262 - DNA, 122 bp, Homo sapiens
ctagtaaaatataccgaaatatttagttttaggttataatgctgagcatgcatacaatgccgaaagaagtgaagatcaggagcaagaaactaaaattgtttgtattgtagtaactatgtcta

SEQ ID NO: 383263 - DNA, 122 bp, Homo sapiens
ctcacccagcctccgaaaggcagccattcccttttctcagtgtcctgctaaacctggagccgggtcgccccagcatcttccagtggcagatggggaggagcagcacccaccgcgaaggtgtc

SEQ ID NO: 383264 - DNA, 122 bp, Homo sapiens
acagggaaaccgtggccctgcgggagaccccctaccccacccagtcctccctgcacaccacgccccttcctcagaagtcctgagacaggagcctggctctgtgctgccctcaagtggccaag

SEQ ID NO: 383265 - DNA, 122 bp, Homo sapiens
gaaagggttttgccatgctggtcaggctggtctcaaactccagacctcaggtgatccgcccgccttgtcctcccaaagtgggaggattacaggcatgaaccaccacatctggcctaacgaat

SEQ ID NO: 383266 - DNA, 122 bp, Homo sapiens
cgtgtgggcgccgtcagggaagtgcggacaagcacactggagaggggtccgcgtgggcctcgtcagggaagtaccgacaagcacacagagagggggccgcgtgggcgccgtcagggaagtgc

SEQ ID NO: 383267 - DNA, 122 bp, Homo sapiens
caaggctgaataatacgccattgtatggagagaccacattttgtttacgcgttagtctgtcgacggacatttttgcctccacattttggcgactgtggctaatgctgctatgaacatggctg

SEQ ID NO: 383268 - DNA, 122 bp, Homo sapiens
tagatcctggtgggtttggttgggtgagggtgcctgtcgcactgggtgcctggggagggacgagggactcgtgtgctgggcagtcccatgaggattgacgctgtacacactcagggtgtgtc

SEQ ID NO: 383269 - DNA, 122 bp, Homo sapiens
agctgagcggagaaaaaaggctctgtggacacatttgttgacataaccaaaggtcatattcgttaccctggacttcatgcagactcttcagtcagaatacctgcattcgtgtattttctcag

SEQ ID NO: 383270 - DNA, 122 bp, Homo sapiens
gccgtgtgcagttgcctgcagggaaacactgatgggcgcccttccagatacgtcgattcccgggttatgagctacatttcccagaagccctcaaggcaggacgcccttagggtcgcgtagag

SEQ ID NO: 383271 - DNA, 122 bp, Homo sapiens
tgcttctcccccacctagttcccactcacccctcaacaatgagtggtcaagttctggctgcgatcatgactgcttttccacctcagcagtgtatagcctcttcttgcagggatatttattta

SEQ ID NO: 383272 - DNA, 122 bp, Homo sapiens
aaagagagagcacccacaacaacacacaacagaaacacgttcattttcttgactccgaggcggtcccgtccctccctgcggcgcggctgggaccacgttcacgtgcgtcacaacggcgcccc

SEQ ID NO: 383273 - DNA, 122 bp, Homo sapiens
cggtgtcggggagttcacaggcaccgtcccgcggtcacaggtggcatgttttgaggagttcgcaggcaccgtcccgtggtcacaggtggcgtgttttgaggagttcgcaggcaccgtcctgc

SEQ ID NO: 383274 - DNA, 122 bp, Homo sapiens
aatgtggcaaaaccccatctctacaaaaaatacaaaaagtactcaggcttggtggtcagccgagagagagagagagaaggaaagaaagagagagagaaagaaagaaaagaaagaaagaggcc

SEQ ID NO: 383275 - DNA, 122 bp, Homo sapiens
atatcatgtggcaaagaggagatgtcattagaccataagcaaaaaaaaaaaagcattgcacgggcattaacacaacatttaagtgtcctcctcaaggagccacaggcacagggagtggtgca

SEQ ID NO: 383276 - DNA, 122 bp, Homo sapiens
cgggtggctgcgcgtctggaaacggtggcgccccaggagcccggcgcttggccccgcactcggctgcaggtcaaataagcctgtagtctgcatgcccagatttataatcacctgcactcccc

SEQ ID NO: 383277 - DNA, 122 bp, Homo sapiens
acgagccgttgactagcggacctcctggtcgtcatggcgactgtgaaatgtagggtggggcgcatgcgttggaagccattcgcgcgggcagtccctgcgtgtccccccacgtgctccccagc

SEQ ID NO: 383278 - DNA, 122 bp, Homo sapiens
cgctgaatcacctccacagccagcccatggaaacgctgaagtgggtccagatggggaggacgtgagcagggccatgctcagctcaagcaggagccgcagccagtagatcccgggggtgcagg

SEQ ID NO: 383279 - DNA, 122 bp, Homo sapiens
gctcgagaaacccatctgtgggggtcaagcagtcagggtctaggcctggccttccatgcccgagcagagcccaaggcagggccccaagccctgggcagagcgtgcccctcccgcggtccagg

SEQ ID NO: 383280 - DNA, 122 bp, Homo sapiens
cttccttggccgtttaagcagaaagtgacactcatgctgatggatcaggggtcctctcgacgtcatttgggagatgcattcaagcccgaccccaacagcagcagcttcaagaagcccactgg

SEQ ID NO: 383281 - DNA, 122 bp, Homo sapiens
gagaaaccattgcggagcccaatttgccggtatggttgccatagaaactgggacctggagcgtgcccattttcggaggttccgaggctgttccacttgcctcatccctgcaatccttgagca

SEQ ID NO: 383282 - DNA, 122 bp, Homo sapiens
ccctctctgacccaggctgagtccatactgcccctgatcccagaaggaatgctgacccctcgtcgtatgaactgtgcatagtctccagagcttcaaaggcaacacaagctcgcaactctaag

SEQ ID NO: 383283 - DNA, 122 bp, Homo sapiens
gcgggggcgtgggagtcatcgctctccccgcagccctggccgagctctctgctgtcctcccgagtttgggccagagaccacggctcactccctaacgccctcgcaaggacggctgcccgtcg

SEQ ID NO: 383284 - DNA, 122 bp, Homo sapiens
aaattatttcaaaatttagcgtcttagaaaaatacttattttcacatagttttagtgtgtcgggagaccaggtgccgtttaagtgggtggtcctggctcagtctctaataagctcatggttg

SEQ ID NO: 383285 - DNA, 122 bp, Homo sapiens
ccgtctctccgccggctaatggcaagcggcggcagcacggggggcggttccaggaccgggcgcgggctactgacgccatctctagaggcctagagttgcttggagaggagctggttgccaag

SEQ ID NO: 383286 - DNA, 122 bp, Homo sapiens
cttcctcttccacaagatcacagtctcagccttgcccattgctgggccccgatccccagccgcggactggctacctcactggcttctttcagtgtacctagatgatccaggcccagatgtcc

SEQ ID NO: 383287 - DNA, 122 bp, Homo sapiens
ggacaagctggcgctgtgccacctggaactgacacggaagttacaggatctcatcaaggacgttctccgctacggcgaggaacagctcaagacccacaagaaggtgtgtgtcgtgggcgccg

SEQ ID NO: 383288 - DNA, 122 bp, Homo sapiens
atctttgaaaggacaaggcctctgtgaatgaatcagtcccagggaagcatttggtggtggcggcagtggaggattgcccggtgaacctataaatcagcagtctcttgggcagaggagcaagc

SEQ ID NO: 383289 - DNA, 122 bp, Homo sapiens
ctttgggagcccaaccccaactagtttctttgtttaaatgcctgtgaatccctcccacgccggagtcaagaggctgtggcgccgccctttattagcctcacactttgattacaaaacacacg

SEQ ID NO: 383290 - DNA, 122 bp, Homo sapiens
gggctgccgccgccgccgccgcgaaacgcagctccaggcgggcccggctcgggcgctcagcgggttccacagccgacaggtcgaagacgactgtccactcagggcaatgccccgcggccgag

SEQ ID NO: 383291 - DNA, 122 bp, Homo sapiens
ggagagcagggactctgctggtgtcttatttacacaatgggattgaaggtgtttgtctcgcgaaactaatcgatggggtgagaagtagctgaataacctgcagggggcagcagagcccaagg

SEQ ID NO: 383292 - DNA, 122 bp, Homo sapiens
cgcccgctgctcggtggcaggagggccggcggagcgccatggcctgcatcctgaaggtaacgacttggatctgtggctcggacgcgtggttggccagccccttgctgctcagaggcacggag

SEQ ID NO: 383293 - DNA, 122 bp, Homo sapiens
gaaatgttttcatttttcatttataagcattacattaatttccatgcaaaaacccaagatcgcatatgtctgatttcaattggccaaaatccaacccttgagtttggacattcaagaccaaa

SEQ ID NO: 383294 - DNA, 122 bp, Homo sapiens
cctcacactggacacctgcaaacagagagacattggtcagaaactgtcacacacatccaccgtttctctcactcatatccacacacactaaatctctctacttttccatgattcaccttcta

SEQ ID NO: 383295 - DNA, 122 bp, Homo sapiens
agagaaaaaggctggagctcccgcccccggggctgtcagatggcttgggtttctgcgacgcgattggctcgcggagggcagaaattactcagcaaacatgactattattagctgcttagcaa

SEQ ID NO: 383296 - DNA, 122 bp, Homo sapiens
gccatgtggtttaaatgatataatagaccagttgctggtatcataccacatcccatactacgggtcgtctcttcccaagtgaaaatctgctttctggcctacaaaaggattatactaaaccc

SEQ ID NO: 383297 - DNA, 122 bp, Homo sapiens
ggccccgccggggagctgggggtcggcggccgaggcggggggagctgagcggcacccacacgtcctgcgggccgggtcaccggtgggggcaaagccaaggtcgcccaggtacagcgctggcg

SEQ ID NO: 383298 - DNA, 122 bp, Homo sapiens
tgcttgtacaaagagatttgttagtaaggaataatgaggctggatgggggatgggagggtcggagaaagggatagctgtttgccacacttaataactgttcaaagcttaagtcatgtttaca

SEQ ID NO: 383299 - DNA, 122 bp, Homo sapiens
agacagggtcgggtcccactaccgcgcaggcccggctcgcccccgacgtcaggcacggggcgggacccttgcagctgtccgtccagtcccgttccccggaaagtgaggggcgggaccctcgc

SEQ ID NO: 383300 - DNA, 122 bp, Homo sapiens
cctgggtatcctgggcgtgtgtgtgtccatgtgtgcatcccacgtgcccctgtgcccatgcgtgtgcatgtatacttacatccacgtgtgctagtggaatgacatgtgtgtggctggttcct

SEQ ID NO: 383301 - DNA, 122 bp, Homo sapiens
ataaccagagcaagctaatcccctgcgcaccatcaactccactctcctggaacatcctcacgctgggccctcaggttttcacagaaacaagggccttttcctaccaaggttccacagtaaca

SEQ ID NO: 383302 - DNA, 122 bp, Homo sapiens
gggctggggacccgcatctccgtgtctccgactgtgcctcccgcggaaaggggcgccgtgcgattatttttatgttggtgtctggtttttaaatttcacagcccccatttcagggatggcca

SEQ ID NO: 383303 - DNA, 122 bp, Homo sapiens
ggtgcggctgggactgcggcaccgcgagggggagccggggcgcggtgcgaggtgtgggggcgctcgccctattgctgctgccgctgggtctagggtgggcggccggcctcgcggtccggcgg

SEQ ID NO: 383304 - DNA, 122 bp, Homo sapiens
tatgagcttcaaaaaagccaatattagctaaaaagatatgctgcatctctggaaaccatgcgaagctcatattaggtattaaaatattctcagtacttagacccgaaccacagtgttgagag

SEQ ID NO: 383305 - DNA, 122 bp, Homo sapiens
gcgaagggcgcgcaaaggtccaagcaccgagacctcgcaaaccgctccctgtccgctcctcgctcccgcacagctggattactgcggggaaatgaaaatgaccgcggatacccttagagact

SEQ ID NO: 383306 - DNA, 122 bp, Homo sapiens
cccacaggctggtgctgactggcttgtgatgaagtgatcatctcacagcacttctgtgaacgcaagcccgctctccccaccgcggctctgcacaaacggtgctaccacgaggaccgcctgct

SEQ ID NO: 383307 - DNA, 122 bp, Homo sapiens
tggcagtgacgactgcttctgttttctggaagcctccatagtgattagcacagtagtttgcgcgctctgtgtactccacactgcacgtagtggtgtctgtaaccccggggtttgtgaatggc

SEQ ID NO: 383308 - DNA, 122 bp, Homo sapiens
cggaagccagcctcagatgactgaaacccccaagtcagtagctctcctcaaaatttccggcgggttattatagataatgacttttcccaccgccctaagcagccgaagcttgactcagtgat

SEQ ID NO: 383309 - DNA, 122 bp, Homo sapiens
tcacctcccggccactgcttcccaggcgtcatgtgctcccggggacggcagaaaaccgcacgcatcctgcccgggagatggaagtcgcctccgctcctggtcaggactgtgcccgagagagc

SEQ ID NO: 383310 - DNA, 122 bp, Homo sapiens
gaggcggcgggcgctcggacccctcctgcgcctcagagcacgagatgcgtgtagtgtcgccggtcttcctgcagctgcccagctacgaggaggtcaagtatctgcccacctacgaggagtcc

SEQ ID NO: 383311 - DNA, 122 bp, Homo sapiens
gcggctctagggctgcgggggctcgggggtggggccgggtctcgggggcggggcctagctcggtctgcgggggctcgggggtggggccgggtctcgggggtggagccgggactcgggggcgg

SEQ ID NO: 383312 - DNA, 122 bp, Homo sapiens
atactcttttatggaaagctctgttggttcagtttccttctggataaaatccaactccttcgttcagatggacaataaatcataacccagcctcaatctttctttaggatctattggatttt

SEQ ID NO: 383313 - DNA, 122 bp, Homo sapiens
tgagcaacacccttctgggagatgaaatttctccctgatgcagccagttcagcagagtctcgcagagtaaattttgatacaccacctccagaaatttctgagctttggcttgtaatgtggac

SEQ ID NO: 383314 - DNA, 122 bp, Homo sapiens
tacttttttacactttggttatttgaatcaggatccaagtaagatccagatattgaaatccgttgctatatctcagaagtctcttttaatccacaggtttccccctcttttccttcgaaatg

SEQ ID NO: 383315 - DNA, 122 bp, Homo sapiens
cctcaggtgatccacccgcccggcctcccaaggtgctgtaatgacgtgtgagccaccacgcggccttgctgccgggtttcttgatgtcttgccctgcacgtgtgctcctgaggcagcagcca

SEQ ID NO: 383316 - DNA, 122 bp, Homo sapiens
acagccactttccagtgccttcatcaagtatccttcccccggccagtcactggtgctcttcgttcccacgctgaggacagcgcggatggacaatcttcctaatgccacatccctggatggcc

SEQ ID NO: 383317 - DNA, 122 bp, Homo sapiens
gttccgactccggtctggtgtatgggttgcactcggtctctctggctattttgtgtgttccgatctgacagcccacatgcctctgctgtacgcctcggccacaggacacagagcactaagaa

SEQ ID NO: 383318 - DNA, 122 bp, Homo sapiens
ccaaccagcaactgctggatgcctgcggcctggagctgaggagctggtgggcagcgctcccggggtgaagaatcctagcaggtgggtctggtatctctccgggaggttgctggcagctcctt

SEQ ID NO: 383319 - DNA, 122 bp, Homo sapiens
tggggagtggcgactgtattgtctgtctgcagcatccctatcagcgctaccgttgttccacgcacacagggagtaagtactgggagtcccagccaccgccgcggaaaatctgggatgccagc

SEQ ID NO: 383320 - DNA, 122 bp, Homo sapiens
ggggaaagaaccacctggaaagtgtcagccacacagggtctgtggtcaggtatgttacaccgggggccctggggcaggctgaatccgaggaagtatcacaaaggaaaggagcttcctgagaa

SEQ ID NO: 383321 - DNA, 122 bp, Homo sapiens
agttggagactagcctgtctctataaaaaataaacaaaatgagcctggcgtagtggtgcacgtctggagtcccagctactcgagaggctgaggtgggaggttcgggatcgcttgagcccggg

SEQ ID NO: 383322 - DNA, 122 bp, Homo sapiens
actggattctgctggagccgtcgaagctccctattcattccccagggcatggaggggacgcggagtgaatgacacgagcagcgttggggggccgtgcgccactttcccaatcctggggtcag

SEQ ID NO: 383323 - DNA, 122 bp, Homo sapiens
tcttccctccggcctgcgacactgcggccgccactaggacccgggcacaggtggccagcgcggtgcctgagcgcaccacagcaggccccgcccctaggcccgcccccgggcccgcgctgcgg

SEQ ID NO: 383324 - DNA, 122 bp, Homo sapiens
gctgtcaccaccacttgcggaaccgcagcctcatcgtgagccattagcccagttgtttcccgtttcgcttttctttcctcagtttctccatgcaatctttataaatctcccctggaggagaa

SEQ ID NO: 383325 - DNA, 122 bp, Homo sapiens
tcagccctttctcggaatatgccttccgcgtgctggcggtgaacagcatcgggcgagggccgcccagcgaggcagtgcgggcacgcacgggagaacaggcgccctccagcccaccgcgccgc

SEQ ID NO: 383326 - DNA, 122 bp, Homo sapiens
ggtgcaccccagtcctgcctacacaaccaggaccacacacagcagaagtcttctcacactcgtgtcattcctgagaggttttacacagaaaactgaggctctgctgaactttagcggggaat

SEQ ID NO: 383327 - DNA, 122 bp, Homo sapiens
ctccctctccgcgcggcccgggaagcctgcaggtgtccttggccgctcggccgccgcccccggtacaccttcgccagtgcccagagcccggctccccagagcggccccgccccccaggctcg

SEQ ID NO: 383328 - DNA, 122 bp, Homo sapiens
gtcagagaaatgggaaatcccatctccagctcctggagcagaggatgggtgcccctaccacgtccccccaaaatgctttgaaaagcaaggactcgggagggcatcacccaggctagaaaaag

SEQ ID NO: 383329 - DNA, 122 bp, Homo sapiens
cttcaaattagcttctctgagcttcaatttctttggctgcgattctagaagaatcacctccgtctcacacaccataggggaatgtgagcaaaaacaccagcagagatatacatgctctccaa

SEQ ID NO: 383330 - DNA, 122 bp, Homo sapiens
cctgggcatggagaagtggtgatgagagcaccgctgcacgtggccgggtcaccatgtagacggactgtcctgcctgaacattgcatctgttctcagctgcaggagaaagcagtgctaccccg

SEQ ID NO: 383331 - DNA, 122 bp, Homo sapiens
gatcactttcatcatccctattaccaacttgttacaattcagggaggggaaaggctgctgcgggaacagactcagtgtatggccaagcagagaagtccgtttactgaccactcctggcttta

SEQ ID NO: 383332 - DNA, 122 bp, Homo sapiens
ccagtgcctagcacctggcaagtcttttcataaaaatgagctattaccaatcatcagtgtcgctttttagtccctgctagctgatccacctccttttgctactcctcactgggttcccagtg

SEQ ID NO: 383333 - DNA, 122 bp, Homo sapiens
ctccagtcaggaaagagatagacgaggttggggctgcttttccaagtacgggaatccaaccgagccgggcgggagccctccagctgggacccacccagatctgcagcttgatcctcttgtcg

SEQ ID NO: 383334 - DNA, 122 bp, Homo sapiens
agcgcgggaagggggctgggatttgaatgggagcctgtgattggccgatccctggactgacgtcacttccccgcggggcgattagcctgcgagaggagggccggcggtccagtgcgctgggg

SEQ ID NO: 383335 - DNA, 122 bp, Homo sapiens
agttgctctgcttagagaaaatgaggcgagtgggagctgtcgggaggaggacacggagcgcgaccctgctcccagcgcgtggccaataaccgcgccgccccgccctgccgctttcccgcgcc

SEQ ID NO: 383336 - DNA, 122 bp, Homo sapiens
gtaggatagacgtctgaagctcaggggacaggccaagactgcagatataaatttaagagtcgactgcatgtagatgatatttaaagccaagggactgaatgagatcaagggactgaaatcac

SEQ ID NO: 383337 - DNA, 122 bp, Homo sapiens
gagcctcgagccgttgccagggactggttgcgtgtcccagaacgtgccaaaagcctgcctcgtgagcacggcaagagctctgccagggcagtcccagctggcccaggcgccgcagcgctccc

SEQ ID NO: 383338 - DNA, 122 bp, Homo sapiens
gacaagtgaatggcaatcctaaatatgccaagaggtgcaatgtggtgtgtgctaccagcccggaaagacactcgcagcccctctacccaggggtgcacagacagcccaccaagtagtgccta

SEQ ID NO: 383339 - DNA, 122 bp, Homo sapiens
tgttgacagttacacaaatgcaaaggctctggatattaaatcaggctcctactcctggaacgctttttattgggttagtttacacaaattctttcaaagtcttgttctccaactttctggtg

SEQ ID NO: 383340 - DNA, 122 bp, Homo sapiens
atggagccgcgggcgccgtgggtggagcaggaggggccggagtattgggaagaggagacacggaacaccaaggcccacgcacagactgacagaatgaacctgcagaccctgcgcggctacta

SEQ ID NO: 383341 - DNA, 122 bp, Homo sapiens
aacaggaaggagagaaaaggctgctggggacatggccctgggaaggggtgggggcgggggcgatgaaggagacacacaggaaagtccagagagacccagggagagacagtgacagtgcaaga

SEQ ID NO: 383342 - DNA, 122 bp, Homo sapiens
gccaagctctttggccgcctgtccacgctgctggagcaccggcacatgcacacgggtgagcggcccttccagtgcacgcaatgtggctgctgcttcagccgcctgtccacgctgctggagca

SEQ ID NO: 383343 - DNA, 122 bp, Homo sapiens
ccccatcatcttgcttctcgccttctggatctcctcgacttttggaagccgcgtgacctacgtcattcagattccaagagagaggtcatcctgggtgattccttagctccaagaagaggctt

SEQ ID NO: 383344 - DNA, 122 bp, Homo sapiens
ggagccaggggcaccggcggagacacgagcgcagaaggcacgcgctcaagcccacgcccgcgactgccgggactgaaggtgttgcgagccccggctccacccctagcctgcggtgcgccgtg

SEQ ID NO: 383345 - DNA, 122 bp, Homo sapiens
agcaagaggaaccctgtggtaaaagtcaggggcttccccagggatgctgaccagggtccacgtggtatgagttggccctggcccctgggcagaggtgggctctgacctccagactgcagggt

SEQ ID NO: 383346 - DNA, 122 bp, Homo sapiens
aacaaacgttcagctaggggcaaaaagcatgactgctttttcctgtctggcatggaatcacgcagtcaccttgggcatttagtttactagaaattctttaccttaagcagcacacacattta

SEQ ID NO: 383347 - DNA, 122 bp, Homo sapiens
gacaccaacccgaagggggttgggacaaaggggagggacgcccgggaaggggagggacaccgtcagggcagccaatcatatttctagccgcgtgacgctatgacccgcttgacgctatgaca

SEQ ID NO: 383348 - DNA, 122 bp, Homo sapiens
cagttctgccgtgcaatcccagctcgcagttcttgctccgcgtgtactcacgggaggactcgcaggcgttaccgccttcccgcgtgccccgcccaccctcccgagcgtctttcggcgcatgc

SEQ ID NO: 383349 - DNA, 122 bp, Homo sapiens
gctcaggagttttcattccttgagccaggcttccccctgctggtctctgccagtagcgctcggtaagcttccagtaaagtgttctaactggccgttggtggggcaggagctggagaagctcg

SEQ ID NO: 383350 - DNA, 122 bp, Homo sapiens
tatctcttttagtcttcacagaaactttacgaggtagttattaatatcatccctacttaacgggtaagaaaactgaggcacagaaaggtcaagtaacttgcccaaggttattcagtcactga

SEQ ID NO: 383351 - DNA, 122 bp, Homo sapiens
gtgcaaggaatttagcggcagaagcctttcgggggggtggggaaaggcagatccgtgcctcgtctgagcctgggggtggggacagcccctggccttgtagcccctgttccggggatcagctg

SEQ ID NO: 383352 - DNA, 122 bp, Homo sapiens
gaggcctatccggaaagtctacagtcatagtccaggtggttgatgtcaacgacaacccaccggaactgaccttgtcttcagtaaacagccctattcctgagaactcgggagagactgtactg

SEQ ID NO: 383353 - DNA, 122 bp, Homo sapiens
gtgaggggagcaagcggattttcccagcaagatctccatgtacagctacatctttagggccgctcgggttaatatatgtcgtcagaggctcctcacgccaatcccggggcggcaggggcggc

SEQ ID NO: 383354 - DNA, 122 bp, Homo sapiens
gagaccctcatctgtgctggctcactttctgctttgtttctctagctctattactggaggcgctttgaaaagcttttccatctgtagattgtcccgatggaaggcaagcagcgccggggagg

SEQ ID NO: 383355 - DNA, 122 bp, Homo sapiens
attcacgtggggactcgcttcctcctcggcatgcaggcagcgctggagggcacgatcgcccgggcattgtcatagcagctgacccagccaagcagatgttcaggccccacgtgcttacgacc

SEQ ID NO: 383356 - DNA, 122 bp, Homo sapiens
ccccatcccccgaccccggccactccgcaccccctgccaccagctcccccaccccactcgcgcccgggagacctggtccccaagttggcaccaccatgtgcccaggatcgcccaccccctcg

SEQ ID NO: 383357 - DNA, 122 bp, Homo sapiens
atttataagctaacaccggcattatcttcctcttttaggacgcagagatccattactgcgcgcggcggggaagaggacgccgccgggagctggtgcgtgacacactgcagcctcgcgggctg

SEQ ID NO: 383358 - DNA, 122 bp, Homo sapiens
agtttcttcagatcaatatcacacgctactcaagagggtccctcctgggtgctggctgggcggctgtggatggtgacaaagtttcagctccacaaagctgcaactcactgtcagggttcccc

SEQ ID NO: 383359 - DNA, 122 bp, Homo sapiens
gcggcgcgctcaaagccaagccgcatgtgaagcggcccatgaacgcattcatggtgtgggcgcaggcggcgcgccgcaagctggccgaccagtacccgcacctgcacaacgccgagctcagc

SEQ ID NO: 383360 - DNA, 122 bp, Homo sapiens
taatcatgatttactcactctgtgctaaggatggcgagggtgtcgcactgctatggggaacgggtggtcatttttctaagacctatcctgtactcatcataggtacctgctcagaaaaaggc

SEQ ID NO: 383361 - DNA, 122 bp, Homo sapiens
gagttgtgagctttactccagaggaataagacaagaagtcagaggcacatcccaaccccccgctatgaagcaagtgcccagagactggtagcacatttctggccaagtcctctaacatgccc

SEQ ID NO: 383362 - DNA, 122 bp, Homo sapiens
ttttttttaagtgcaataatgtggagaggaagaacatagtgactcccagcactgccttgacgtgtgtcagaggccagcagtgttaagccagcgttgctaccacataaaggcttagtacagtt

SEQ ID NO: 383363 - DNA, 122 bp, Homo sapiens
cactttatcttccaggttttgatcctctctctgccgcctccatcttctcagagacacagtcgcactctgactcacggcctcttcctctgctccgcactggccgtcgactcctgcagcgccgt

SEQ ID NO: 383364 - DNA, 122 bp, Homo sapiens
agggcggcttccgggtttggcggggcctttgtccctcgctgtggcctgagctccaggtctcgtcttcagcgctctgtgtcctctgctcctagaggtccaggctctgtggccctgtgacccgc

SEQ ID NO: 383365 - DNA, 122 bp, Homo sapiens
ccgtctctgggatgggcagggtgagagtcaggtcagccctgaccctgtgccagcccaccccgaggcttgctccagccctcctgtgacctctgagattcatggcgatccccatcaacactttc

SEQ ID NO: 383366 - DNA, 122 bp, Homo sapiens
aagtttccgcccatgtgacttccagcgtgagttaccagaaaccacaagagagagagagagcgtgcaagccccaaagcgagcgacatgtccctttggggagcagtccctctgcaccccagagt

SEQ ID NO: 383367 - DNA, 122 bp, Homo sapiens
atactctgggtttgagtcactggtaccaaaaaaagcctgaaaacccatgctggccacatccggtagcttctgcttccagctgggttttggggctgagggtggagctgaggctgcgttgacca

SEQ ID NO: 383368 - DNA, 122 bp, Homo sapiens
ttctctggtctacaggtttgagccactccctggggcctgtgcagatggagggagagagggcgcacatcagtgttgactctgagctacagaagcttccatcaggttcttccagcaaagaggca

SEQ ID NO: 383369 - DNA, 122 bp, Homo sapiens
cagtatgaatccgtttgtccattgaacaaaaatgtattgggcctcactatgagctttcaacgcttagtaatgcctctgttgtctctgtcttgatctcctgtagcaaaatatcaccctgaaga

SEQ ID NO: 383370 - DNA, 122 bp, Homo sapiens
cactgtcctggacgcccggccactgcatcctctgcccttgtgtgacctcctgcaagaaggcgggagcacgccgttcccgggcctcatggccagacacaagcccaccttgtgaggaccccagg

SEQ ID NO: 383371 - DNA, 122 bp, Homo sapiens
aagcccccgcacatctttcaggtgcaattatctgtggcctggcctcggcggtgtgcctcgcgatgggatccctacaccttgctggggtaagaagttaggcctcaaagatttctcagcacaga

SEQ ID NO: 383372 - DNA, 122 bp, Homo sapiens
tccaaacaaagttacaaggttaagtgcaactccaagttcctgacacagctaatccctgctcggtcttcaaaaaatagaggtctgtaattcctttttgaacatgccttcgaagtggaggtctt

SEQ ID NO: 383373 - DNA, 122 bp, Homo sapiens
gttggccaagctatacatattaaattcctttcatctctcctatgtccttccttccagcagcgttggctcctctttaaattccttccaatctgtcaacatctttctggagctgatgtacaccc

SEQ ID NO: 383374 - DNA, 122 bp, Homo sapiens
taaacactcaataaatggtccttgtggttgcactgaggagcaacatgatagtttatagaacgtgggctggaaagatgggcacgcaaaggttcaacatgcagctttgcacccaaaagctgtga

SEQ ID NO: 383375 - DNA, 122 bp, Homo sapiens
atttatcaaatattaacctcttcctaaacatggggttgaattcctcccgtaacattgtaacgttgttagaattatgtgaaagggggctttgtctcaactatcctgctagtcattcattcaac

SEQ ID NO: 383376 - DNA, 122 bp, Homo sapiens
ctcttactgtccccagtttatgcatgaacagagaaagctgagatacggagactagtgatccgtcgaggtaataaacggcacaggtggggtttgaactccatcagtttgattgcagaggcctg

SEQ ID NO: 383377 - DNA, 122 bp, Homo sapiens
acccacattctcatttaatgttcacaacgtgggtattgggagggcaaggatgactacctccgtcagacagatgtgaaacgtgccaagcccagccctaaattgagctttctaaacaccgagtc

SEQ ID NO: 383378 - DNA, 122 bp, Homo sapiens
gctggagccgtgtttcagtccgtgcgtggcaggtactgccctctcccctgaatgcgacagcgagcatttcctgaaaccagcaggtgctgggctgccgatcctcgtctgtagcaggctcagcc

SEQ ID NO: 383379 - DNA, 122 bp, Homo sapiens
tgacaagtattccatagttccctaatgttgtatggatgagccaagttcctagcttccctacggctcccttgggaagaaccacattcatctctagtgacttcaattcctctgttttcacttct

SEQ ID NO: 383380 - DNA, 122 bp, Homo sapiens
ccgggtcatcatgatcactggggacaacaagggcactgctgtggccatctgtcgccgcatcggcatcttcgggcaggatgaggacgtgacgtcaaaagctttcacaggccgggagtttgatg

SEQ ID NO: 383381 - DNA, 122 bp, Homo sapiens
ctgcacttgcgttttctcctcagactctccttcctgtgctctgcccgttatcaaccgagccgtccctgcctgggttgtctatcgtgtgactgtttcagataaaggcgggttatcttggtttg

SEQ ID NO: 383382 - DNA, 122 bp, Homo sapiens
gtggtgttttgaagggctgatgaagattcagttcagcagaagaacttataaaatgcctctcgggaacctcaccatcgcggtctcaggagataaagtaagcggggaaggcctcgggttctaaa

SEQ ID NO: 383383 - DNA, 122 bp, Homo sapiens
gacgcgcccccaggcgagctggagactggggcactccttgcttggtagaggggcggggcgcgcctagcggccacgcgcgcgggcgtcggagggggcgtgtctcgcgggcgcgcgcgggcgtc

SEQ ID NO: 383384 - DNA, 122 bp, Homo sapiens
tccagccagctcctgagtctttccgggccccccactcatgacccgggtgaacctaacgtgcgttcacctcccatttatgtgagggtgacgttctaacaacttgagaccacgaccatgcccag

SEQ ID NO: 383385 - DNA, 122 bp, Homo sapiens
tcctagaggctggggacccaccagagaagtgacaagtccttgatctcagggggcagacagcggggagaaggatggatgctagcacggagaacacgcgtgtaaagacagaaacgcacacatcc

SEQ ID NO: 383386 - DNA, 122 bp, Homo sapiens
ctttagacagagcagatttgaaacactctttttgcggaatttgcaagtggagacttcaagcgattttattccaacagtagaaagggaaatatcttcaaataaaaactagacagaattattct

SEQ ID NO: 383387 - DNA, 122 bp, Homo sapiens
ggtatccgggcaggaggtggcggcctcgccgccctggtcaggcctccgggagggagcaggcgcgggagcgggaggaggaagtcgggaagagggaaggcgggggcgcggcccgcccggcgctc

SEQ ID NO: 383388 - DNA, 122 bp, Homo sapiens
ccaagggccgggacgagggagggggaggcggacaaagggtcggggtcggggagaatcgcgcgccgggaactcatttggggcgcagctccaccgacccctcggctactcgcctccaccaggca

SEQ ID NO: 383389 - DNA, 122 bp, Homo sapiens
ctcagatggaaatgcagaaatcacccgtcttctgcgtcgctcacgctgggagctgtagagcggagctgttcctattcggccatcttggctcctccggcttacattcttgtatgtatgtatct

SEQ ID NO: 383390 - DNA, 122 bp, Homo sapiens
cctggtggtcttcgcctcgccgggttcggaacagcaggctgggatcagcaaccatcgagacgcatccgccgagacctccgagcatcctagagaggacacggaagcgagtctttccttacgca

SEQ ID NO: 383391 - DNA, 122 bp, Homo sapiens
cacaagcttggggacacgccacatcaaatggacacacatgcacacacaaatgaacccaagcgcagacacacttggggatgccaaccatgtgtgtatctatcacatcacacaccaccaaggcc

SEQ ID NO: 383392 - DNA, 122 bp, Homo sapiens
agcttagcgggcgtccgggtgtaaggaagaaacccaagggccgcgagggagcgaccaggacgctgcttcccgggcgctcccgggactcccagatacctgctcggtccccgcgtgggaggtcc

SEQ ID NO: 383393 - DNA, 122 bp, Homo sapiens
gaggcctggccctgcctgcccctgcctgccccgaccccacgaagttgccgggatgcaaggcgtgcacctggcactcacccaaagggtggctgcgcagacctgcagcctctacaggattaggg

SEQ ID NO: 383394 - DNA, 122 bp, Homo sapiens
ccgcgaattagaggggccccgggaggcaccttcagagccggcaccaggcagaggcgggggcggggcaggccgggaccggcgtctccatgccgggcctcgctcacctcttccacctcgatctc

SEQ ID NO: 383395 - DNA, 122 bp, Homo sapiens
atggggcaagagtgtttcagggaggaagtggtcccaggcaaaagcgatcacagtttcctacgcagaggatctgataaggaacaatgactaaggaccaggtgggtgcagcagtcctgaggtca

SEQ ID NO: 383396 - DNA, 122 bp, Homo sapiens
cgaccgcgggcgccggggatgcctggaggggccgcggccgagaggagacccgggactggacggccagacctgccgggcgcgcgggcaggtgcttcggctttttttttttttcccctcctcct

SEQ ID NO: 383397 - DNA, 122 bp, Homo sapiens
ctgggctcaagtcacagccctgccacctactggccatgggattgcctgcaacatatttaacgcaggggttttcaaccaggctgccctgtctggggattaccagggattgggcatttaaaacc

SEQ ID NO: 383398 - DNA, 122 bp, Homo sapiens
cagttcactgtggaagaggcccatggaggactgccagtgggggtcctccctcaccaaacacggaacgctgaacaaccagcaacacagccgagtagctgaagccatagaaccctctctccagg

SEQ ID NO: 383399 - DNA, 122 bp, Homo sapiens
aactaccctgtggccactatactgtgagaaggctgacctagccaagtggaaagggcacctcgcggagaactgaagtcctggccaacagccaggacctatgccacccacataagtgacatcat

SEQ ID NO: 383400 - DNA, 122 bp, Homo sapiens
ctctacattaataagcaggttttatccctgtaggattgttagaagcaattttctgtgaaacgggcaatgccttggctctccaaaaatcacagaactgtctgtctgtttgatagttctgcgaa

SEQ ID NO: 383401 - DNA, 122 bp, Homo sapiens
cttcaagagagaagcccttgacaaagctggggcaagaccggcccttaggacagccagcaacgctacttcaccaccctgctccagcggactgcggctgccgcgctgcccacaggaactcaagt

SEQ ID NO: 383402 - DNA, 122 bp, Homo sapiens
ttagtgcagttttacaacttcccttagtatcattaacacttctgtgaccaaacaaacaaacgactactgcaaactggtttattttttataggaaagtgtcaacatgtttattgctaatataa

SEQ ID NO: 383403 - DNA, 122 bp, Homo sapiens
caaggtaggctgtcattctgcaaaagctgcccgaacaggctttcctctgaaaagcagtgccgttcctttttagaaagactgaatctaaatgttgtctctggagacaagaagccttcagtatg

SEQ ID NO: 383404 - DNA, 122 bp, Homo sapiens
cgatggctcctctctggcgcggagggcacccacatttgcatgataaattgaccagactggcggcagccaatgaaatattcaaattaggctgggtggcggtagtaggggtggagtccctgggg

SEQ ID NO: 383405 - DNA, 122 bp, Homo sapiens
aaccaaaagccagagaggcccacgcacgagtccggaagtgagggagggaggactttcgtacgcagccgcctcccagctggaacctcatctttagtgctcggccgcgggcggcgtaactcggg

SEQ ID NO: 383406 - DNA, 122 bp, Homo sapiens
atacctgtggtgtgggttctacctggctgatggctgagggtctagaattgtgtgcagtagcgttgatcgtgtactgaggttgcaaacagtgaacagcaccatctggacatcgtggattagaa

SEQ ID NO: 383407 - DNA, 122 bp, Homo sapiens
atcacaagaaggcctatctgtaagtgctttaagataaggtgcagaagcagactgcaatgtcgctagtgctgcctatgtacatattcacaagaataaaaaattccagctagttcacattatct

SEQ ID NO: 383408 - DNA, 122 bp, Homo sapiens
cgcgtctcccgcagccggattgtgcccgagagtctcccgggtctggactgggcctggcggcgtgggaggggcagtgcggcgggcggcgcttccggagagcggggcctgcgcgctgctcttcc

SEQ ID NO: 383409 - DNA, 122 bp, Homo sapiens
gcgcctccacctgtgttttccggccatgggagaacccacaccacatgctgaccgatggctcggagtgcagggcacgtcttgggcaacccagcagcccccggggcgccttgtcacagccagca

SEQ ID NO: 383410 - DNA, 122 bp, Homo sapiens
ccctcaggggctttcttggaggcacgggggttattgaggggggcaagagaatctcaaccccgatacgtttatgtttcgacttccccgaatttccttgtgcctgcgttttgctgcctgggatc

SEQ ID NO: 383411 - DNA, 122 bp, Homo sapiens
ccgaagagtgcgggcccggggtccccgcggcgccccttcccctcctcagtcccccgggggcgaccgcgctccccgccgaggtccgtccccgccgcaccctcactattcccgctgggaggacc

SEQ ID NO: 383412 - DNA, 122 bp, Homo sapiens
tggtctgagcactcactcttgttggcccggtgagggatgggcacagccacgtttttgccccggtccgcatcctggggcttgggtggtgaggcggtaaagcggcagatgccaggctctgaggg

SEQ ID NO: 383413 - DNA, 122 bp, Homo sapiens
tcagctctaggtggctggtgggaggacttgctcctcttgcaggggcacctctgggcctgacgagggttggaggtttcctctctggctctctcttcagcacagcctaagccctgcccacatct

SEQ ID NO: 383414 - DNA, 122 bp, Homo sapiens
ctcaagtgatccgcccgcctcggcctcgaaaagtgctgggattacaggtgtcagccaccgcgcccggcctgcaggcagctttatacccaccactagttgtcaaggtcacccctgccaccacc

SEQ ID NO: 383415 - DNA, 122 bp, Homo sapiens
agagccctctaccctctccttgagtcatacatgcttttttttttttttttttttttgagacggagtctcatttgtttgcccaggctgtagtgaagtggcaggatctcagctcactgcaacct

SEQ ID NO: 383416 - DNA, 122 bp, Homo sapiens
cgggccgaggcgctcagcactgagcccagggcctgttggtgaaaaacgcgtcgctccaggcgtcctaagcgccagtgatgtagctctgcgctcatgcacggaaaggcacctgagagcgcgga

SEQ ID NO: 383417 - DNA, 122 bp, Homo sapiens
tggatattaacgtgtacctcatcatcgccatctgtgcggtgtccagcctgctggtgctcacgctgctgctgtacactgcgctgcgttgctcagcgccgcccaccgtgagccggtgcgcgccg

SEQ ID NO: 383418 - DNA, 122 bp, Homo sapiens
cccaccccttcatgccctcctcctccccaatcagggaccctcatgtgcaacccccttacccggcactgcctgggatgtggggtccccatcaccggccgctcagccctgccgcccactgcgcc

SEQ ID NO: 383419 - DNA, 122 bp, Homo sapiens
aagtgaatcaaattttgaatggattggtgtttcgaccaggcaactcaaccatttatgtagcgcccccgaccttgcctacccccacccccaaaatctatgatgaatcttcttcagttcccaag

SEQ ID NO: 383420 - DNA, 122 bp, Homo sapiens
gcgaagttcgggcccgggaattccgaaggaggggtaggcgctgcccgcgcgcagaggccgcgcccctcctggccccggcttcttggctgtcaaacagatgcagcaacgtcggctcctgccga

SEQ ID NO: 383421 - DNA, 122 bp, Homo sapiens
gggagacctgagacaaggagggattaagctaagaggaaaatgcttagatttgtgaagggccgtcctaaggaagagggaactggcttgttcaggtccactcagaggaaacttctgtttaaaag

SEQ ID NO: 383422 - DNA, 122 bp, Homo sapiens
agccaggcttggtggcacatgcctaaaatcctagctattgggaggctgagccaggagaatcgtttgaacttgggaggcggaggttgcagtgagccaagatcacaccactgcactccagcctg

SEQ ID NO: 383423 - DNA, 122 bp, Homo sapiens
ggattgaaacccaagtatgtatgattccaacgctagcgccctttccactgtatcaggctgcgtcatgtgataggcatcaccacatatgacatggtctcaagttgctgagcaggcctgggatc

SEQ ID NO: 383424 - DNA, 122 bp, Homo sapiens
tccctgtcatgcgctggtcccaccgggctacggtcagctcagtcaagacagacatcctggcgtacttgaagcaattcaaaaccaaataggaaggtggagttaagggcaggagcaaccctact

SEQ ID NO: 383425 - DNA, 122 bp, Homo sapiens
agttctaataggttgttacttccccacaccacccagcaaggaggtggccgaggcaggacccgaccctgggagaccctgggggacccatgttcagatctatctttggtccagggcgataaacc

SEQ ID NO: 383426 - DNA, 122 bp, Homo sapiens
gcagttctccgccctgcctggaaaggaagcggccccgccaggtagtgggatcggccgccgcgtcccgtcctcacccttggccccgagggggtgacatcctcgatgtgccctcggcccagaaa

SEQ ID NO: 383427 - DNA, 122 bp, Homo sapiens
ggggtgagggggacgcttaccacaggcaggcccgacctactcggtagttctcaggagagacgtgcgagaccgacagttgacgcccgggaaataaaaacacggggggagggggcgtggaccct

SEQ ID NO: 383428 - DNA, 122 bp, Homo sapiens
atgatctcgagactcagcgtcttaattcatctacacaatatctagtgcttaattaagatccgtaataagcaaaaaaggaaagaagaaagggtagagagcagctgataacaagatggcttatt

SEQ ID NO: 383429 - DNA, 122 bp, Homo sapiens
acatgtgcacctgctaaatagccctgtcaagtagccaaatggtagtgccccacttgtctgcgcatgtgggaggcagacattcctataccacagactgcagtgataaccaaggactaactttt

SEQ ID NO: 383430 - DNA, 122 bp, Homo sapiens
ggagatgggcgtcactactgctaccctcatttcacctgcgctgtggacactgagaacatccgccgtgtgttcaacgactgccgtgacatcattcagcgcatgcaccttcgtcagtacgagct

SEQ ID NO: 383431 - DNA, 122 bp, Homo sapiens
caccccctcgcgacgtcaccagcggcagccccggaaagcggggcggggtcgcggtcccggcggagactctgcgcctccggcctacccgccccgcccccatccggcttcgctcgcgaagctgc

SEQ ID NO: 383432 - DNA, 122 bp, Homo sapiens
gaattgtaaatacaccaatcagcaccctgtgtttagttcaaggtttgtgagtgcaccaatcgacactctgtatctagctgctctaggccttggagaacctgtgtgtggaaactctgtatcta

SEQ ID NO: 383433 - DNA, 122 bp, Homo sapiens
tttaatatttgaaaatgaaaacagatctaaataattcacagggccatgcatggtggctcacgcctgtaatcccaacactttgggaggccaaggtgggaggatggcttgaggccaggagttca

SEQ ID NO: 383434 - DNA, 122 bp, Homo sapiens
ctaaagccagacccactggcttggaatcctaactccactaacttaccagcaatgtcatctcggacagatctacttaatttttctagacttaatttctccatgtgcaaaacagggaaaatact

SEQ ID NO: 383435 - DNA, 122 bp, Homo sapiens
ttcaagggtggctggcaaaggtgccattcttttgttcgttcattcattcattcataaatacgaatggagtggctactatgtggcaggcaccaagtgctgggatgctgcagggaatgagcaag

SEQ ID NO: 383436 - DNA, 122 bp, Homo sapiens
tctagtcagacccaggctccacaagacaacagagctacggaaacagccaaataccaaccacgtgccaggcaccaggctgccggcattagaaacctgactctgattcagggcttgccttcagg

SEQ ID NO: 383437 - DNA, 122 bp, Homo sapiens
tgaagttaggaaagtctgtcaaagcaagagatggctagtgctccatccagccgaagaggtcgaagtggttctggaaacttaggtggtggtcatggaggtggtttcggtgggaatgacaactt

SEQ ID NO: 383438 - DNA, 122 bp, Homo sapiens
tgcgcggaggtctgcggagggcgcctggctcggtcggtcgctccttccttggcgggccctcgccgacccacggtgctcagccagccccattcttggcattcaccgcgtgccttaattgtatg

SEQ ID NO: 383439 - DNA, 122 bp, Homo sapiens
gaatgcctaattcccacagttaaggctcggtgggtgggcgcatgcgcacaggatcctcgccgtcaggcacctgcggaacacacttggaaatcgctttttccggaggcccaatttcatttcat

SEQ ID NO: 383440 - DNA, 122 bp, Homo sapiens
cagctgagccggactgagggcgacgagtgccgggtccctaagagaagccgagcccggccccgcccccgccggccccgcctccttgtaggccccgcccccagccgccaagtcctgcctccgga

SEQ ID NO: 383441 - DNA, 122 bp, Homo sapiens
tgctgcagctctgggggaggcggctgttgcctgagccaccacagacggcgtaggtcccaccgccacagaccccagagctctgactgctgcagccagccctcagcgggctccagctgctgcgg

SEQ ID NO: 383442 - DNA, 122 bp, Homo sapiens
cctctaaaccccgcctcttcttgcaacctgtgttggcctcatctacccagcaactgtcgacgtcacacgacctgggcctccctgaatgggagatatttactaggcaatcccgcctactgttc

SEQ ID NO: 383443 - DNA, 122 bp, Homo sapiens
cagcagctgctggcccaggtgctaagcccctcactgcccggggcttgcaggccagccggccgctctgagtgcgggtcccctgagcccacgcccacccggaactcgtgctggcctgtaagcgt

SEQ ID NO: 383444 - DNA, 122 bp, Homo sapiens
tccctggctcaagagatcctcgcatctcagcctcacaactagctgggactaaaagcacctcgcttctttttttttttttttttttttttttttttttttttttttgtagagatgaagttttg

SEQ ID NO: 383445 - DNA, 122 bp, Homo sapiens
gctctatggggtagagacgctaggccggcactgcctaggtgggccgggcggtgcgagggtcgcctttcagcctttacctctacccactgaaatggagtaggtcggtgagcgccgatctgctg

SEQ ID NO: 383446 - DNA, 122 bp, Homo sapiens
gctggccagcgtgagcaggtgcaccgagggcggcaggtccctgcgcagccctgagaactgcgggagagagggcggggctgagttggagaggggcggggcctggatggagaagggcggggccg

SEQ ID NO: 383447 - DNA, 122 bp, Homo sapiens
tccgccgctccagaccctgcgcttggtgcttcaagtgactcatccttatgttcacatgatcgccgagagggataatattcccagatcagttacctcctagcctttcctagtcacattatccc

SEQ ID NO: 383448 - DNA, 122 bp, Homo sapiens
tttgcgtactgggacttgtagtttagcaggcggtataggcaaattggatactgttttatccgtagtttcctcgtggcctcacggcctaacctggaccatcggacagcggagtgctaccaacc

SEQ ID NO: 383449 - DNA, 122 bp, Homo sapiens
gtgaatggagccaggtagcaggccagcggtgtacccgagcccagtgctttgcttggcattcggggtgtgaagtggacagaccctcgcgcgtcctggggaggacagccaaatgcctggcgcag

SEQ ID NO: 383450 - DNA, 122 bp, Homo sapiens
ggatcgcagatcgaagatctgcaaggactgaggatcgttcctagtgtctgtttggaagcccgtgggtcttgcaatgcgagggcagacaaactacgaagcgggttccggattccgatgagcca

SEQ ID NO: 383451 - DNA, 122 bp, Homo sapiens
gaaagtcataaaagtgaattttttcatgaaagaaatagtcttcatttaagaaagtgttgccgttaaagggttatcttggcactaatgattggctttgggtgattttaattctgagatgtctg

SEQ ID NO: 383452 - DNA, 122 bp, Homo sapiens
actaaccagaatccaaaaacgagtcacacagtgtctctagtcccctccttccctgctgtccgtatcagtcagctttcatagcagaaggaaatctggtttttaaaattttgctactaactggg

SEQ ID NO: 383453 - DNA, 122 bp, Homo sapiens
catataaggtacttaacaccgtgagtcagtagggagatgcaaatcaaaaccacagcgagacgcgaattcactaatccgttagagggcctagggtgaaaatgaccgaccacatcaagtgcggt

SEQ ID NO: 383454 - DNA, 122 bp, Homo sapiens
aaatattgagaaatcagtgaaggatttgcaacgctgcaccgtttctctaactagatatcgcgtcatgattaaggaagaagtggatagttccgtgaagaagatcaaagctgcctttgctgaat

SEQ ID NO: 383455 - DNA, 122 bp, Homo sapiens
cagtttgcagtcagagcagagtggccgctttggggaactactcccttccctgcttggccgcgccgcgccctccctgcatttctggggctctgtcctctagaccctgggactcggcgtttagg

SEQ ID NO: 383456 - DNA, 122 bp, Homo sapiens
ccacctgcgcccagcagtgcaggtgaaggcctggctgcggagagtggctgggaaacgctgcgctttggggtcaggaatgccagctccactactcaccgcctgtgtcaccctgggaaaacagc

SEQ ID NO: 383457 - DNA, 122 bp, Homo sapiens
ggaggctgaggcacgagaatcactggaatccaggaggctgaggttgcagtgagccgagatcgcgccactgctgaattcccagctaggttttactgagctgtatctggataaacctaaatttg

SEQ ID NO: 383458 - DNA, 122 bp, Homo sapiens
aacatgcgagatcagtttttcaccaccagctcctgcgctggccgcatcctactccttgaccgggtgaggcccctttgcgcctgtccatcgcctgccttctagtgcgaaacttcaggagccct

SEQ ID NO: 383459 - DNA, 122 bp, Homo sapiens
gacagtatttgtggacttgaccgcatcccaggaaatccagcgggcctggccacttctgggcgccaggaccacagccggccaccccacggacgcctgggacgctcttctgggcccccttcggg

SEQ ID NO: 383460 - DNA, 122 bp, Homo sapiens
gctcatttttgggggagaaagcaagtgctgggctcctgggtgcccacgcagctgccatcacggcctatgccctgacactgaccaaggcccctgcggacctgcggggtgttgcccacaacaac

SEQ ID NO: 383461 - DNA, 122 bp, Homo sapiens
aggggcgaggaggccgggaaccaggtccccgggaggagcgcggggcggccggggcaggggcgagggcggggcgggagcccccaaaaccctcccgaaccctcccggccccagcggccgcgccg

SEQ ID NO: 383462 - DNA, 122 bp, Homo sapiens
ctcaagccatcctcccgcctcggcctcccaaagtgctaggattacaggcgtgagctcccgcgcccggctgatgccagcgttttaactctacaacaaactgaaactcaaacgagaggaagtgg

SEQ ID NO: 383463 - DNA, 122 bp, Homo sapiens
ctgaaagaaaaccaaatgacttagtagcctctttcactgattttaaggctagtaatgattcgagtagccatgttattaaactagaatgaagcactactctcctcactaatgaggttaaaaaa

SEQ ID NO: 383464 - DNA, 122 bp, Homo sapiens
gcaactatcgttccctagagctcccacacagagcttctcaccctgatgtcacggccccagcgcccagaggatcagccgtgtcagcagctcctcatcaaaattgccacctgctctcttcaatg

SEQ ID NO: 383465 - DNA, 122 bp, Homo sapiens
atataagaggtccaaaacaggaccctgatgattacatttatgaagaatggcagccaggtgcggtggctcacacctgtaatgccagcactttgggaggctgaggcaggcggatcacaaggtca

SEQ ID NO: 383466 - DNA, 122 bp, Homo sapiens
attacaggtgtgagcggctttagcttcttaacgttttaaaaatcaatcaccagctgggtgcggtggctcttgactgtaatcccagcactttgggaggccgaggtgggtggatcacctgaggt

SEQ ID NO: 383467 - DNA, 122 bp, Homo sapiens
gctcagaaagtgccagcctttgttattatatacagcaagcggggaaacccgtgggaaatccgggcgcctctgggaagctgggtgtggtgggtcgtccttcccggagcggggggcggggcgtc

SEQ ID NO: 383468 - DNA, 122 bp, Homo sapiens
atacaaacgatggtaaatgaggctactacataggcccagttaacaaactcctcttctcctcgggtaggccatgatacaagtggaactcatcaaataatttaaacccaaggcgataacaacgc

SEQ ID NO: 383469 - DNA, 122 bp, Homo sapiens
agagtgctatttatcttcgcgtttatcttctaattcgtatgtctcctaaatttttttatacgtttttgaagtaggatgtagtatttgagcaatgcagtgagaaaactgaaaaatgactattt

SEQ ID NO: 383470 - DNA, 122 bp, Homo sapiens
gggtttcccactcagtttattactattagaccattccctttttccccactcacatttctgcgcatttccatggtcttcatagaatctaagcctaaaaatagagttttccttgagtctttggg

SEQ ID NO: 383471 - DNA, 122 bp, Homo sapiens
attgggacgcagctgccaggggtaagcgtcgggccacgaaggccacgggcctgggtctcgcgtggggccttcattgggaggaacagcgaagaggccacccccgccctcagccgttcgtgcac

SEQ ID NO: 383472 - DNA, 122 bp, Homo sapiens
ccggccggtgtggaggcggggtctagtcgccggccggcgccgacgctctctcccattggccgctcttcgccgtctgtcagtctcctgttaaaggggccacgaccgcccgggagccgtggggg

SEQ ID NO: 383473 - DNA, 122 bp, Homo sapiens
ctgatagatgtaaacctgacttcgatggcctgactataaaacttcctctcttcctggacccgcctgcctcctgccatagaaactaaaacttctaggtattcactgctatgggctgaactgtg

SEQ ID NO: 383474 - DNA, 122 bp, Homo sapiens
tggcctctcttcactttcttgatagtgtctttcggagcacaaaagttttttagttctggccgggtgcagtggctcacgcctgtaatcccagtactttaggaggccaaggcaggaggatcact

SEQ ID NO: 383475 - DNA, 122 bp, Homo sapiens
aaaccggacacggtagtagggtgcacgtgtcaggttataaatgaccctgtctcctttatgcgtgtgtgctctcgtggcaagactactagcgagcggcaacctttctgcagaaagtaaactag

SEQ ID NO: 383476 - DNA, 122 bp, Homo sapiens
ccttttcacccctccctctctccgtcatccagtctgactgggctaaaaacgatggaataacgctattcctgccctccaggaaatcttcaacactaaaactacaatgtaaattgagtgtgtta

SEQ ID NO: 383477 - DNA, 122 bp, Homo sapiens
cccggaaaggtagcacctgagcatcccgggctgcgccgacacctgtctcaccgcgggtgccgcttaccgctccggtggactccagtccccagattccgccccacgggggctgggggaaaagg

SEQ ID NO: 383478 - DNA, 122 bp, Homo sapiens
ctctgccctgatttattaccctggggtagatggcagggcagtcagcaataaatctcactgcgggacagagctaggtgggtgaagggtacccaggtttccggatggggagcagaggggctgga

SEQ ID NO: 383479 - DNA, 122 bp, Homo sapiens
atgcgcgggcggtaggcgggacagccgggatttcccggagaagagtttccagggcatttgcgggaggactcaatggtttggaagcaaagactttgggggtgggggcgacggggagtgcgatg

SEQ ID NO: 383480 - DNA, 122 bp, Homo sapiens
ccgccgcggccagtggctatggagcaggcgggcaccagacctgcggcgacagagcatccacggctccggcggcccatgccctggctgctgctactgcctctcctgctgctgttgctgctgct

SEQ ID NO: 383481 - DNA, 122 bp, Homo sapiens
cgaggaaaaacaggcggagagccggcgggcggtctcggcctgtcaggagatccaggtgagcggggccgggtcctaagccgagcggaggacggagctaagcgcgggggcgggtcctcagctgg

SEQ ID NO: 383482 - DNA, 122 bp, Homo sapiens
aagctctgccttcaccagtagctggtgccaggacagagctctgggacagcaggcagaggccgagcctgggccacagctcagccactgacttgggtatcagtttccccttctgagaagtacag

SEQ ID NO: 383483 - DNA, 122 bp, Homo sapiens
tagctgtgcgtctcccaggacttgcagatcacagggtaacggaggctgcgacaaagtcaccggggattcccgagttggagaacgcggaaaagcagaggcgggtcccaaggtctagcgggagc

SEQ ID NO: 383484 - DNA, 122 bp, Homo sapiens
gcacccgcctcctgcggcgctgcctctgctacccggaatccaggaggggaaggaacgactcgagctctaaggatgggacccggaaggcagaaaaaaataatggattggggcgggcggggagt

SEQ ID NO: 383485 - DNA, 122 bp, Homo sapiens
gattgacctcattggggccacagaagttgagcgtggacatggccacagtgtgggtcagtgcgttggtgaaggcacaagccaaggacgcagccaccaacatcctctggactgtctgactcatg

SEQ ID NO: 383486 - DNA, 122 bp, Homo sapiens
atctgcccgccttggcctcccaaagtgctgcaattatagacataagccaccatgtcctgccgatactggttgttgaaatactgaaaagctttcctagcagttggtaaattactgccaacagc

SEQ ID NO: 383487 - DNA, 122 bp, Homo sapiens
cgtcgcggttgaggcggtacacgtagagctgcgaggtcccggccactaccaggttgcgctcgctgttgttgaagaagttgcagtacatggagaactccagaccggtgggcggatgcgcctgt

SEQ ID NO: 383488 - DNA, 122 bp, Homo sapiens
tcaaaattctctaattcttccacaaagactatgaaaatcaccttggagtgtatgaaccagcgtcctggccccgccaggtcggggctggggcgggcgcgggccgggagcgcttaccccgcggc

SEQ ID NO: 383489 - DNA, 122 bp, Homo sapiens
cctccggggttcgtgtagcctaggcgggcagtgaggatgagcgtgctactctggactgcgcgctggcctgctgcctctgcacctaacccagcgcctgacactaaagctgccagctttagtta

SEQ ID NO: 383490 - DNA, 122 bp, Homo sapiens
ccatctcatgaattccaagacagtattaaactgatgcatattttcataagtcgctcccggcgtctcttcccgggctccttgccagcgtgccgaggcgcaggcagggtgatggaggcgccccg

SEQ ID NO: 383491 - DNA, 122 bp, Homo sapiens
ctgctccatgctacggaccaacacagtattgagtcaactgtgaccttaagatcagaggaacgtcaatactgccacaaggccacctttccagaactcgtgggcaggtaaactatgctttggat

SEQ ID NO: 383492 - DNA, 122 bp, Homo sapiens
gcacttggcagccatgcacggccacgtggaggtggtgaagctgctggtgggggcctacgacgccgatgtggacatcagggactacagtgggaaaaaggcctcccagtacctgagtcggagca

SEQ ID NO: 383493 - DNA, 122 bp, Homo sapiens
atttgttcattgcctcctgagcgtagtccagttactttcaggctcggggagtgaaggcctcgttgagagaaggtctcattcggtgttttgggaagagagtcgtgtgggcccaggtatcgtag

SEQ ID NO: 383494 - DNA, 122 bp, Homo sapiens
tcctaacaggcccctgagctctgcggagctgtggaggagggatgagctcaggttgaaatccgacctgagcctggaatttgaataattcgaagtgactggaaacccacagctctgccaaaaat

SEQ ID NO: 383495 - DNA, 122 bp, Homo sapiens
gataaatagatcatgaagagtcctagtatatactgtgtcgggacaagccaagatttgcgacgaccgaagttcttaacgtagaccgcatcaaccaacggggcccagagtaatttgagactgaa

SEQ ID NO: 383496 - DNA, 122 bp, Homo sapiens
gagcgccggcgccggcgccgcgccacagccaagtaccgcacggcccacgccacgcgagaacgcatccgcgtggaagccttcaacctggccttcgccgagctgcgcaagctgctgcctacgct

SEQ ID NO: 383497 - DNA, 122 bp, Homo sapiens
ggcccctctcggacgagctatttttaggtctgtaacggatgggggaaggcgggaatgccacgtttaatccgttagtaaaatccaggatccaagtgaatggcttcctggccttgctgagaggc

SEQ ID NO: 383498 - DNA, 122 bp, Homo sapiens
ggcggctgagccccccagcctgcaccctccgcaaacacaagacgaaccgtaagccgcggacgcccttcaccaccgcgcagctgctggcgctggagcgcaagttccgccagaagcagtacctg

SEQ ID NO: 383499 - DNA, 122 bp, Homo sapiens
aacaaccaccaccaatatttattcactgagcccactttgtgccaagcattgttctagacacgggtatgtaaccgcgattgagagagacagaccacgcacagcctggattttattttaagagc

SEQ ID NO: 383500 - DNA, 122 bp, Homo sapiens
agagggggtcctgcctggccgtgcaagtgtggaggtagcgcagtagctccctcggagatgcggggtagaggggacccaccgccacctctgctgctcccacagttgctcctgccgccactact

SEQ ID NO: 383501 - DNA, 122 bp, Homo sapiens
ggggggaggtattatcatatagtttaacctcatgaaaacaacttatgtgggtgtgatgcacgcagacctggcacaggtactttcaaatataacatatacacccacttgcacatggaagcata

SEQ ID NO: 383502 - DNA, 122 bp, Homo sapiens
atcgcgggtgtccctttcccgtcattttaaaccaagaagcagtgcgaggcctgcccaactcgcgagtttgtggaactggcgcgcgagagcgctgcctgtggggaaggtatggtccccagccg

SEQ ID NO: 383503 - DNA, 122 bp, Homo sapiens
aggctcaagtgatctttctgccgaagcctcctgagcagatgggaggcgtgcatcactgagcgcagcaattttactaagttggtctagtcctagctcagtagttctttacttagcacagaggg

SEQ ID NO: 383504 - DNA, 122 bp, Homo sapiens
ccttgcctcccccggcccccccgccccgccccgccccgtgcccagtaaatcacatgcaaccgcagtgtgagtttgccgggaatttccactgaaaccacactaagatattcttgactttacct

SEQ ID NO: 383505 - DNA, 122 bp, Homo sapiens
tgcggcctctgccaattagtgctccagttaatcacacttagcaactccctggagaagcagcgaagccgggaggagcccagcgtgggagaccccctcaggctggctctgccgagacggagatg

SEQ ID NO: 383506 - DNA, 122 bp, Homo sapiens
actgcaaatccagagaaatgatgaaaaaccacatgcccgaaacaagaatgccgcagcaggcggggcacacaggacttcgatggccgtgaaacaattccatttgattctgcaaggggggacac

SEQ ID NO: 383507 - DNA, 122 bp, Homo sapiens
ccgatgcagccgggcttccccgagaacctgagcaagctgaagagcctcctgacccagctccgcgccgaggacttgaacatcgccccgcgcaaggccacactgcagccgctgccgcccaacct

SEQ ID NO: 383508 - DNA, 122 bp, Homo sapiens
gctcggcagcgcaggctcaccgcctggccttccaccaccagggcccggccccccgcctgccgtgtgatcagcgggggctcacacaggaactcctcctcggggatggaccagaagtagcggtc

SEQ ID NO: 383509 - DNA, 122 bp, Homo sapiens
gagagtccatttcacatcctatcagaaacactgcctgatccatattgcagagagtgggaacgggtgtgagtccgtaagacccgtagcatcaatctcacatataccacggaaaaacacatgaa

SEQ ID NO: 383510 - DNA, 122 bp, Homo sapiens
gcaagatacttggtgacaggaatcgcgagcatactcttgtgttgtacggattctcagggtcggccctgcagaggaaagagctcagtcaccgcgaggtcctgcacaacatgccaaagtcccgg

SEQ ID NO: 383511 - DNA, 122 bp, Homo sapiens
atttgtatttttcctctctcttactactgtatcataaatgggactcccgacaaccactcccgtgtgtctgcctggaggcagcagttttaagaagggttggccactgagcctcacagagggac

SEQ ID NO: 383512 - DNA, 122 bp, Homo sapiens
gggagcgcacaacttccctctgtcgtccttctccagctactgccatcccctcttccctcccgcccggactcaggaaatcccggagccagcagcctgctactcctccagcccccacacgcccg

SEQ ID NO: 383513 - DNA, 122 bp, Homo sapiens
accaatcggtgagtccagctgctgaaggttactctcccagtttgggtaggacgcgaaaaccgcttctctcagcctctccatgagctgctctttctccagctgtttgccagggaaaacacaac

SEQ ID NO: 383514 - DNA, 122 bp, Homo sapiens
caagagcccagcggagtgcagctcgagcgccgaggtcgccaacgttccacacactgttgacgcaggacacaagttcgtcacagtggtcctccgccggctacgcggagtcagtggctttcagg

SEQ ID NO: 383515 - DNA, 122 bp, Homo sapiens
gggccggggcacgtggacccgcgcagcctgggagccaggaaccccaaccccggcgaggggcgcctcgcacccccgtcctcacgcagtccccgaggcctcccggtgactgccgggtgtgggag

SEQ ID NO: 383516 - DNA, 122 bp, Homo sapiens
atttctgccacaggcgccatcttcagctctgagtcaccagggctggaaaaatactagatgcgctactcgtggactcgtgaatacactcgtgaatacaggccatttcctgtacctacagccac

SEQ ID NO: 383517 - DNA, 122 bp, Homo sapiens
agtgcacctccctgggcagacttctgctgccccagtgcccaggaataggcaggggtttgccgcaaaatgaatgacacctggcagacaataagctgaagctttcattagcagcttaagctgag

SEQ ID NO: 383518 - DNA, 122 bp, Homo sapiens
taaggctagcttgtccaacccttggcccatgatggttttgaatgtggcccaagacaaattcgtaaactttcttaaaacattatgctattttggccaggcgcggcggctcatgcctgttatcc

SEQ ID NO: 383519 - DNA, 122 bp, Homo sapiens
gatacactttgagaaacgctagcccagagccactcctgcaggaagagacaggacaaccagcggtcacaactgcaggcatcaactggttcctgagggctggcaagtgagcactgaggtgtcac

SEQ ID NO: 383520 - DNA, 122 bp, Homo sapiens
ccgcaacagaacacagtgggaggggcctgctcttccgcagcaccccaggcaggcctggaccgcccgagtggccgtggtccaggggcgcggagggcgcagcgcgttccgtttcggctcctctg

SEQ ID NO: 383521 - DNA, 122 bp, Homo sapiens
gaggagctgggggcagtggtcgggagaggagaaggtcgtggggcacagtagaaatggcaccggactgggaatgagttcctactgccaacttctcatcagctcagttcctacagtcctctact

SEQ ID NO: 383522 - DNA, 122 bp, Homo sapiens
tcctaaggaagctgcccctggattcctcagggttggctcaaagcacacagcatccgacaccgtgatgagcattgctggggccccagaatggattggttttgggctttcctacaaacactaaa

SEQ ID NO: 383523 - DNA, 122 bp, Homo sapiens
tgtctgtgaattttcgtgttttcatgcccacctgcgtgtctgtgaatttccgtgttttcacgcccacctgtgcgtgtccgcgaatttccgtgttttcacacccacctgtgcgtctgtgaatt

SEQ ID NO: 383524 - DNA, 122 bp, Homo sapiens
aggcacgtggtgccgcgagaacttggctcagggacggtttttccgccatgcgcagattctcgcctctcgcgggggcgccagggggcagctggttgaggtgcgcatgcgcactggcacctaac

SEQ ID NO: 383525 - DNA, 122 bp, Homo sapiens
gggaaaccaggccttggaattgctggaattgtgcccgtgatcacacagataaagcagcatcgggatcgtgatttgaactcaggacctctagttcccagtcccgtgctctcttcacgattctc

SEQ ID NO: 383526 - DNA, 122 bp, Homo sapiens
catgagcaaagcacagaaccttataactatgcttgcttgtggaaagacatcccttgtccacgggccaagtatttgaaaataccactccatatagctccagggccctgagagaagctaccgtg

SEQ ID NO: 383527 - DNA, 122 bp, Homo sapiens
gccccaccaggagccgggctccaacccaggcggactggaccgaccccgagggcgcaggcgcgggttccctgaggtcccgggtgtctttcacgctccccggaagcccaggcaattcattcatc

SEQ ID NO: 383528 - DNA, 122 bp, Homo sapiens
ggttcggcctggtctgggccagccgaacagccacccaaacactatcacagcttgcccttccgcttgctctggctgcctgcagacttggagccattttaaggagaaaccacctggccacgccc

SEQ ID NO: 383529 - DNA, 122 bp, Homo sapiens
gtcagctccatgccggcgaggccaggacggactccagagcctcagtgtgctgagcgcaggcgcccagtactcggcggagctggcgccccgctagacgcaaggactccacaaggaccccagag

SEQ ID NO: 383530 - DNA, 122 bp, Homo sapiens
aggccctggtccagcccagctcccggccagccctgctactcacctgagccatcctccttgcgttctctgggtccccggggctcccgggccagctctgagatccggaatgacagctctgaaaa

SEQ ID NO: 383531 - DNA, 122 bp, Homo sapiens
agaaaaatatgaaatcatattttaaatatagtagcaaaaaaatatagacatagcaaaatacggaatcttattttaactatagtagtgactgtatggctgttgattctgttgtttctgggcat

SEQ ID NO: 383532 - DNA, 122 bp, Homo sapiens
ataattcctagaaagattctcttctctgtgtgataccaaaaggctcagaataaaaaattacgaagctgaggcccaaggtcaaagagatttctacagagagtcttagaatttgttttatggct

SEQ ID NO: 383533 - DNA, 122 bp, Homo sapiens
gggagatgaggcatgcacgcgaggcaaagacaaacaggaaagtgtctctatcgggaccaacgtgtgcgaccctacctgaaacggcaagcagaattcggtgttttcttccttttgccctgatc

SEQ ID NO: 383534 - DNA, 122 bp, Homo sapiens
gcgacatgcgtgtgctgaggaggaaccctggacgccaccatttcacatggaagaggcaggcgacatgcgagtgctgtggaggaaccccggacgccaccatttcacatgggaaggccggcttc

SEQ ID NO: 383535 - DNA, 122 bp, Homo sapiens
gatctaggatcatttcagagtgataactctctctctctgctagagccacagtgagagattcgagatcttaactgtgagaactagtggctttctgagaaaacagtccagaaaagtatgggctt

SEQ ID NO: 383536 - DNA, 122 bp, Homo sapiens
atgtggagggaaagggaataggacctggctggatattcagctcttgggagtaactcaacacgctccctaatcctgggtgtcccatgaggtcacttttcagcggtcacgtgacagctcgatgt

SEQ ID NO: 383537 - DNA, 122 bp, Homo sapiens
gcaaattgccggagcgacggcgctctcccgaccagtgagggggacggattgcagccgaggcggcgatatcggggtcagactcaccctgctgcgagcgccatatgatctatcaatcaaactcc

SEQ ID NO: 383538 - DNA, 122 bp, Homo sapiens
tccttgctgccgtgagctgacaagagttctcggagaggacccgacttctgctggggcagtcgcagtaaagcccggagacaggaagggcccgggggcgggggcgggggcgcccccgaacccaa

SEQ ID NO: 383539 - DNA, 122 bp, Homo sapiens
gactggctcgatcgcatggggaacagggccagatgccggaaaacatgcaaggtaaggaggcgccgcgcggcgctccggctcccgctgcttccccacccccgggctcgccctgcaggcttcag

SEQ ID NO: 383540 - DNA, 122 bp, Homo sapiens
cgttgcttcactgagtctttcagctgccagctccatagttcccctaggagaggtgggcggcgacctcaacccacagcgccttccactgcgatattgctccaaatccgaggaaattcaaactc

SEQ ID NO: 383541 - DNA, 122 bp, Homo sapiens
agttttgagcaggaaaactacgcgacaggaagtgtatacatcgccctacagcagaaagaccggggacagcccagcctcagggcgactttaaacccaaaaggaagcgatatccggactctcat

SEQ ID NO: 383542 - DNA, 122 bp, Homo sapiens
tctgttcttccctgctgtccagttgacttcacagattctgtggagtgcgctggcaggccacgcacatctttctctcctgggtcgtttgggtttttaccaggagagaggggcctcatgagcgc

SEQ ID NO: 383543 - DNA, 122 bp, Homo sapiens
agcaaaaagctgggaatgaccatacaggaaacagacttcagagaaatggaataagtgctccgaagttaaaagttaaggtcttgcttatataggcagaaaataaagaaattcagtaggatttt

SEQ ID NO: 383544 - DNA, 122 bp, Homo sapiens
ggacagcaaaggcgaaggaagagggaaaacagtaacaaataactaaagccatataaggagcggcccatgttcaggagataggattgtgtgtcctagtattatggatgtcctgagctgcctgc

SEQ ID NO: 383545 - DNA, 122 bp, Homo sapiens
cattgtgagggatgaggggtggaggtggtattagacgcagccgaatcctccctcagagtccgccaggtgggcgtctcaggggtgggagtggccgcgtcgtgaagcggagagaggatttctct

SEQ ID NO: 383546 - DNA, 122 bp, Homo sapiens
tcgcaccttaaatcggagacctcattttgtatgggtgctgctggggctgtgccttccaagcgacaggacacacagcagaagcagcttctgaaattccgagtgtgtgtctgtgtttgcaagca

SEQ ID NO: 383547 - DNA, 122 bp, Homo sapiens
ggaccctcccgcgcgcacccagcgccccgttccggggcagtgccaccctgggcgccgcctcgccactcctacggtgcctcgccgccccccattaccaggatggagggcacttcccagcacga

SEQ ID NO: 383548 - DNA, 122 bp, Homo sapiens
ccactgccgctactgctaaggaaaaagtggtccctcgctggcctgtgctggtgtgggccccgattctcgtgcagttacccttgcatgggtgagcagagtcctgggtatttgctctggcgaca

SEQ ID NO: 383549 - DNA, 122 bp, Homo sapiens
cccaaggtcatgaaggcctgtggggtggagggcatggtctctccttccaggctggaatggcggaagatgcggcggcagaggggctgcatgtcctcctcacagcaggcccctgaggaccttta

SEQ ID NO: 383550 - DNA, 122 bp, Homo sapiens
cagtggccaggtgagtgcacatggctgtgggtggtccctcaattgctccctcctctctttcgctaccccctgggctggagggaggcagggcacccagccggaatggcatgatcctgaagccc

SEQ ID NO: 383551 - DNA, 122 bp, Homo sapiens
gctgattggtcaggtaggagatgaaatcacaggggatcaaagggggttcttgcagtcttccgttcctaagtgggatcaaagaactggtggaaccagatcaccagcctggatggtgtcagctg

SEQ ID NO: 383552 - DNA, 122 bp, Homo sapiens
ccaaggcggagccaggactctagcccccgcctcccggccactggtcccggtctccttccccgccaccactcggccaccgtcattggtgttcagagtttcggttctcttttctgtgatcgtat

SEQ ID NO: 383553 - DNA, 122 bp, Homo sapiens
aattaacagttgggagtcaagggagaactccaagtcagagtgagtaagtttagggcacatcgcaggttgtcaaacccaacacaaggagaagggcatggaaatcttttctgagaggaaatagc

SEQ ID NO: 383554 - DNA, 122 bp, Homo sapiens
tttcttctggcagcactcccagaaactaaggtaaagtctccgttattcctgagggggatccggatggcttatcatgtccatcacactccacaatgctatataataccataaaactttgcaaa

SEQ ID NO: 383555 - DNA, 122 bp, Homo sapiens
ttcaggtagatccggcttaacatcaggtgcgagtagggaccacccttggtagtctgggcccggcccaggtcagaaccttactaaaacaaccactgtgagtattttctattggtcccagcaca

SEQ ID NO: 383556 - DNA, 122 bp, Homo sapiens
ccattggccgcaacattggtaatgtgcagcaggacaaaaaagcgttcaaagagccggccccggatattcactgaccgctggtcattgccattggacaggatttctccttcgtatccctgcag

SEQ ID NO: 383557 - DNA, 122 bp, Homo sapiens
acttggaggcgagaggtggcggcagtttccaggagctttgacgtagacttggagaggcgccgagcactcccactgcttaagtagaggcacggtagcctccaggacgcggaagctggggacag

SEQ ID NO: 383558 - DNA, 122 bp, Homo sapiens
aagagtaggtgtgaggtattgcacctaggcccactgctgggataagctggcacagatacacgggacatgatgctttcattctcaccttaaagaaagagacagagaagaaaaggaaggggagc

SEQ ID NO: 383559 - DNA, 122 bp, Homo sapiens
ggctttcacgctgctgtgcgaggaactgcgccagggcctgagcggaggcgggggcagcctcgccagcgggggccccgggcctggccatgcctcactgagccagcgcctgcgcctctacctcg

SEQ ID NO: 383560 - DNA, 122 bp, Homo sapiens
gagacggggcacgcatgcaccaaaaagtggggaggcagagctgcagggtgtgcaggataacggagtgaattttaggagtctgcctaataaggggccgcccccaatagttttccctcgactta

SEQ ID NO: 383561 - DNA, 122 bp, Homo sapiens
cgccccgaaggacagggccatgccggcccctggaggcgagggcactaggccgggtggcggcgcagccagcatagcggccccccatcccggcacaccgcgtcctcccgtctgagcgggagggg

SEQ ID NO: 383562 - DNA, 122 bp, Homo sapiens
tggcagcctctgttgaaaccaaacacactcggagcgcccagtgcaacattcttggggtgccgagtagaagcgcagtaaagagagaccctagcggactcctgtctggtttgctttttaccgac

SEQ ID NO: 383563 - DNA, 122 bp, Homo sapiens
aggtggcataatggcgggacttgaagtcgttgtggcagggacctggcagcgttgttttctcgggttttgaaccggtgtggagaagtaacttcagctgctgagttggggccgccctggctgcg

SEQ ID NO: 383564 - DNA, 122 bp, Homo sapiens
tactttgagtacttttctgaccttcctctctcagatgcccagatttccatatataaaaaacggaaaaactctacttttcctcaggtacagatgaggcgttaacaacttgacagaagtacttt

SEQ ID NO: 383565 - DNA, 122 bp, Homo sapiens
gtcaggcctgcctgcagtcatctggaggcctaaccgtctccctgtgatgctgtgcttcagcggtcacgctcctagtcctgaacacctggctccgccttttagatagcagtagcagaattagt

SEQ ID NO: 383566 - DNA, 122 bp, Homo sapiens
ctcaactgagcctctctccaagacaaggtgtgtgggccacaacgtgtgtgggcggcaagccgtccaggtgccgaggcaagagaccgagggcacgagctggtccagtatgataaaatatataa

SEQ ID NO: 383567 - DNA, 122 bp, Homo sapiens
gctggagagggtgggctgagggactggggccagcacggaccacccaaggcctctgcttcccgccgccaccctcctcgctgccattctctgggctggaatgtgaagcctcagtcactctaaat

SEQ ID NO: 383568 - DNA, 122 bp, Homo sapiens
taagtggcttttctactggctgccgctgtagacccacctccttctccagcacataaatatcgctgttaacattaactaaatcacctctgggcagagaaacaaagctctatatgcacagccca

SEQ ID NO: 383569 - DNA, 122 bp, Homo sapiens
aagctggacaaaaactcagaaaactaacaataacaacaaagctttaaaaaaaatcctgcacggccgggcgcagtggctcacgcctgtaataccagcactttggaaggccgaggcgggcgtat

SEQ ID NO: 383570 - DNA, 122 bp, Homo sapiens
caatccactcccgagtttccagccacgccccaatgtccggcggaagggagggagggtctccggccgccacggccggtggtagttgtacaaacagctgtgtgcttattcatcagcggtgctgt

SEQ ID NO: 383571 - DNA, 122 bp, Homo sapiens
tgatggccgccgctatggccgctgtggcctgcacggagtaggggtcctggtggtccatgacggggcgggaggtgggcagagggagcgctgcccgcccagtgcgcaccgtggacgacagcgct

SEQ ID NO: 383572 - DNA, 122 bp, Homo sapiens
cagcccttataaaagtctggatgcattttttccaaaggagacaccatccaggattttaagcgggaacatggcatgatctcgattacatttttaagtgagcagcctgatagattctaggatgc

SEQ ID NO: 383573 - DNA, 122 bp, Homo sapiens
taacacatcactgaggcacattccaccttagacattacataaaacactaatgagctctgccgccttggaagagtgagagtattgtggccttgctttccaagacacagatgcagaatcattag

SEQ ID NO: 383574 - DNA, 122 bp, Homo sapiens
gtctcttcttggattcttccttctcttgtttcctgctgttcccacttcccgtagctcccacgttgctttccttgtgtgctcttacttggtggaatagggcctgtgcaccatgacaacctacc

SEQ ID NO: 383575 - DNA, 122 bp, Homo sapiens
tgggatcccagagggctggggccagcagtgacgttccgaaatcttgtccaggacggggaccggctgcaaaccctctcagccctgcacataaaagccagcatggtccgtcgaggcactgttgc

SEQ ID NO: 383576 - DNA, 122 bp, Homo sapiens
cgccctcgggcccttccgggccgcttgcttttcatcttccctgtgggactcgcccagagacgccttcacgcagctccgcgtcatctgtgattctgtagcttcggggatcctcttgtaaactg

SEQ ID NO: 383577 - DNA, 122 bp, Homo sapiens
agcgtcattcctttgttggctcctccctgtcctcttggtgctgtgggccctgaaagttgtcgagtgcgcctgtccctgtggtgggagcagtggcgccgagcgtgcccacgggccgccgcttg

SEQ ID NO: 383578 - DNA, 122 bp, Homo sapiens
ttctggatttgtttcctttgcaaatcacacctgtaaccttctcaatggcaccaaaaacaacggcactgaccctggacactcactcgccagagtttccaacgatgtcaccagtgctgaagccc

SEQ ID NO: 383579 - DNA, 122 bp, Homo sapiens
aacaggaaaggaatcagggtagcatcgtgcctctctggttcctacatggatgaaaaccagcgccaaggagcccattccttagcagggcagcctgctacgtagcagaaatgtaagacagaagt

SEQ ID NO: 383580 - DNA, 122 bp, Homo sapiens
tgatttgaagccaaaaagtcaaaatatcttatttcgcaactgtaattgctggatgccctgcgcgcagctgtggggcagccctaactccaccaggccaagcctgaagcttcctgcggcgcaag

SEQ ID NO: 383581 - DNA, 122 bp, Homo sapiens
gaggaaggtgagagcatcaggaaggacagccatgagaggtgggcatgtgtggggaggcagcgatgatgtggagagcctgccagagagcatgtgcagcaggcacagtgtgaacagaggctccc

SEQ ID NO: 383582 - DNA, 122 bp, Homo sapiens
cacctcttggtgagagttaacgaagtgcacatgctcatgtcactgtcatgtggaccagagcgagcaggcagcaccagaggttccctccaggcccaggttccagaaggggctgttggctcttc

SEQ ID NO: 383583 - DNA, 122 bp, Homo sapiens
ggaggctgaggcaggagaatcacttgaacccaggaggcagaggttgcagtgagccaagatcgtgccattgcattccaagcctgggcatcaagagcgaaactccatctcaaaaaaaaaaagtg

SEQ ID NO: 383584 - DNA, 122 bp, Homo sapiens
ccccacaactttttgaagaatcctgaaagaatcctagggggctgggagccgcacacgtgccggggctcggcttcccagctcggcagtctcagcccgctgggctcgcccggcagctccgctgc

SEQ ID NO: 383585 - DNA, 122 bp, Homo sapiens
ttgggattagtggccgaggcttgaggctcaagtgacccggatcacttgaggtcaggagatcgaaaccagcctggctaacatagtgaaatcccgtctctactaaaaatacaaaaacaattagc

SEQ ID NO: 383586 - DNA, 122 bp, Homo sapiens
ggagttgtcctgccccaggcaggaacagagagcatggcttgccctgaggcagaaggctggcgcctgaggcggatggtcccacacagaccccagccctcgggagcactgtcacgtgatgggct

SEQ ID NO: 383587 - DNA, 122 bp, Homo sapiens
gtgcggttccaggaggccctgaaggacctggaggtgctggagggtggtgctgccacactgcgctgtgtgctgtcatctgtggctgcgcccgtgaagtggtgctatggaaacaacgtcctgag

SEQ ID NO: 383588 - DNA, 122 bp, Homo sapiens
aaggatcaagttggaaccgtcatccccttccctggcagtccctaaaatccttcgagatgacgtcacccaacgagttcaagagggcggtgcgttcctaaccacaccttctgcaacccaagtgc

SEQ ID NO: 383589 - DNA, 122 bp, Homo sapiens
agcaacagtaattttacctacgtaaataaatgtcgattgtgctgagtctggaagcgcggacgacccaccttgagatgcatctagcgactgctcccagcatgtaggagcagttgtaaaatcac

SEQ ID NO: 383590 - DNA, 122 bp, Homo sapiens
gacgttcccacgctggggcggccccgagaaaggctgtggggcgggccgggggcgggcgcccgcactcaggtccctccgcagcgggttctcagttgctcgctgggcagacccaggtcgcgctc

SEQ ID NO: 383591 - DNA, 122 bp, Homo sapiens
gatagatgaggatggtcacgtggtggagaggcgtgtttttggctaccagcccttcacctccgtcgaccttctcaactggaaaagcaatacaccgccctataccgaaaagccacaagccctaa

SEQ ID NO: 383592 - DNA, 122 bp, Homo sapiens
aagcgcgtgccaccacgcctggctgctctctctttgtttccatgaactgtcagttgcaaacgtcaattcctaaaattctcatacctaaaaggcaaaagaattgaaagtgaccaaaagatgag

SEQ ID NO: 383593 - DNA, 122 bp, Homo sapiens
gggacggggcgggagctcgggccgcttcttccagccgggaccgagctctgcgcctcgccccgccagggagggatgagggaaacctgtggaacaactttagttcgcccaacttgaaaacggag

SEQ ID NO: 383594 - DNA, 122 bp, Homo sapiens
atcaactgataaacctgtgtgtgatgccaataagaaccagctagatcccagctgacccaccgactaactacagaaccaacagctgagcacagatgcaagcgtgaacccagccaagcccagca

SEQ ID NO: 383595 - DNA, 122 bp, Homo sapiens
tgtggggagcgcctctgccccgctgccccgtctgggatgtgaggagcgcctctgcccggccgcaaccccgtctggaaggtgagcagcgtctctgcccgaccgccccatctgagaagtgagga

SEQ ID NO: 383596 - DNA, 122 bp, Homo sapiens
ctgggttttttgcgttggcccaggtcctctccacgagcctgctgtttccctcttagacaacgctgacagtcaggcaccgcattatccaaaaagacggcttctgtgtcacccaattaaaaaga

SEQ ID NO: 383597 - DNA, 122 bp, Homo sapiens
acgtcagagccgattagcgcttcttattggtcccaaattccccgggccgcggctaattatcgggagcttgatgttgataagtaaagcgccggagtgcgggcgaagcatgtgtggggctccgg

SEQ ID NO: 383598 - DNA, 122 bp, Homo sapiens
ctgtgctttttcctctttgccctcgaggtgtctttctttatcgacgtgccctctcatccccgcttgcctatcccgggaccttgcccgcgccttcggacaggacaagactaaatcttggctcc

SEQ ID NO: 383599 - DNA, 122 bp, Homo sapiens
tgaggttagagttcaagaccagcctggccaacatggtgaaaccccatctctacaaaaatacgaaaattacccaggcatgatggcaggtgcctgtaacgccagctactcggtaggccgaggca

SEQ ID NO: 383600 - DNA, 122 bp, Homo sapiens
aggagaaggtaagaagtgcccctgccccagtgcacacccagagcgcccacgtgggaagcacgtctcacctccgtgatgatgtaaaagtcgtccccaggctctccctggaccacaattttctc

SEQ ID NO: 383601 - DNA, 122 bp, Homo sapiens
cttataattcgctgactaaaagcatacaagtttgctaagacaataactaaatatcacccacgtagtctccaggggaggaggaatcgctgaaaaataccatcaataaaagttaaaaactgaaa

SEQ ID NO: 383602 - DNA, 122 bp, Homo sapiens
gactgcttaatttctcccactagctccccttctcgtcatctgctccaggctcctggagggcggaacccactacagggctttgaatgttacccaccaaccttcccagggccccgctgccgcct

SEQ ID NO: 383603 - DNA, 122 bp, Homo sapiens
gcgcgggagcgctgctcgctgcctctcgggggcagtccagaaccagttggtgtctgactgcgcttttgccgcccatttcctgctttcgagcggctgaggcgacgcgctcccctcgggcagtg

SEQ ID NO: 383604 - DNA, 122 bp, Homo sapiens
ggtggggccaagccaaagggctctcacactaagtgaagcttctccattctgtaagctttccgggaacatccaaggcaagactggcacccagcacagcaggtgagggaccggcagtgacagaa

SEQ ID NO: 383605 - DNA, 122 bp, Homo sapiens
tttgatttttctggtcaagggcttcttgcaaaatcaaactacgtttgccaaatatagccccggtgaccacaagccatcagcaggcctgggtctgagttcacacctgctcaacattcctgcat

SEQ ID NO: 383606 - DNA, 122 bp, Homo sapiens
tcaaaggcccacctctagcttgaagtaagacttggaaagttattcaacctcttagtgcctcgacttgccctggaaaatggagatgttaatagtgccatctcaaagagctgtcctgaggatta

SEQ ID NO: 383607 - DNA, 122 bp, Homo sapiens
ctacggaactctccgttttccagactcgggggaattaggaaactcgcccggcgaccctcgcgcagtagcaccgggccaggtttgctttcggaaccgctgactgcactcgccgcctttcccgc

SEQ ID NO: 383608 - DNA, 122 bp, Homo sapiens
ttcttcagcctccttgtcctaggtgaatatggacactgtcatccccatcatctgccatcccgtgtctgtgtgctcggtctgtgtgtttaaccctgtcactcctcttgactgtcaagtcttcc

SEQ ID NO: 383609 - DNA, 122 bp, Homo sapiens
agtgatgaaagaaaacaaagcagaggctgcagtgctctttaccgccagcttcagaagtcacgtgccatcagatctgtaatatcctactggtcacacaggtcagccctattcagggtaggagt

SEQ ID NO: 383610 - DNA, 122 bp, Homo sapiens
agcaaggggatttaagtcactgcttttaggaggggtaatccaaggtcagcactcaccaaacgtctgtcacacaactggttttgtgggaggaattcttttgtactaaggctccatgtgggggc

SEQ ID NO: 383611 - DNA, 122 bp, Homo sapiens
tgcaagtatgtacatgtacacacatgcacctgtccatggctgtgtgcgtgtgaatctgtgcgttgtgcataagtgtgtacatgcatgtgcgtccatgtatctgtgtgcatgtgaatatatgt

SEQ ID NO: 383612 - DNA, 122 bp, Homo sapiens
tctggccgctcccagctgcaccctgcccctacctgccaccacctcaccttcatcctcaggcgctgcggccctgagcccctgccaggaatgcacctttagcccaggcctgctcagtgagctcc

SEQ ID NO: 383613 - DNA, 122 bp, Homo sapiens
aaacaagttgaaacaaatatgcgaataacatcgtcaaagcacgttggtcatgcgcctacccggggtgcctttcccctctttgacaacagccactgattttcattttggggtccacccgtctc

SEQ ID NO: 383614 - DNA, 122 bp, Homo sapiens
ggattccattcttaaacttttttttttttttttttttttttttgggacagagtcttgctgcgatgcccaggctgaagtgcaatggtgctatctcagcttgctgcaaccttcacctcctgggt

SEQ ID NO: 383615 - DNA, 122 bp, Homo sapiens
gagtgagtagggagatcattaggtgagagctggctattcacaagagggcagcctttgatgcgagccgagcagaaagtttggccgaaactcaacacctcttagaagtacagattagtggagag

SEQ ID NO: 383616 - DNA, 122 bp, Homo sapiens
aattttgtaaatttttatttattttttcttttttcccctcttttgtagagaacacggtctcgctatattgcccaggcaggtctcaaactcctgggcttaagctataccccacctttgcttcc

SEQ ID NO: 383617 - DNA, 122 bp, Homo sapiens
aggaagggggtgcacagaacagagctttgtgagtgagactccagtgcaccatggcgacatcgtgccataaaagtgtcttctctcattttcaaggtaaactaatgttattgccaccaggaaat

SEQ ID NO: 383618 - DNA, 122 bp, Homo sapiens
cccgtgggagtgtgggcggcgctgagcacgagcacctggggctcctcgacgcagtgtggacggaccactcgcgcacactattgatccacgttagccagcacagcagtgtgcccaccacgtgg

SEQ ID NO: 383619 - DNA, 122 bp, Homo sapiens
gtctaaaattgtcttcagtggttaacctttgctctccctggtagaagtgggatgggataccgtttgtctttatacatctatatcctgcctttaagcaaatagagggaggacagagagcttcc

SEQ ID NO: 383620 - DNA, 122 bp, Homo sapiens
gtcgggtttgttatccgagtccccctgcgaggagaaggcgccgatgacctagggttccttcgcagtcgggtttgttatccgagtccccgaggagaaggcaccatgtgtccttggacatttta

SEQ ID NO: 383621 - DNA, 122 bp, Homo sapiens
cgacgcatgagcttggcctccagagggcctccgtgaggcaggagctgggcctgcggaggccgtcccgaggtgggagcctggcccgaggaggccacggcgaggcaagaggtgggcctggaggg

SEQ ID NO: 383622 - DNA, 122 bp, Homo sapiens
ctggcccacgtcacaacagggtggagtttgagcccggggagtctgagtccagcctcatgccgctgagtgccttaggagcgctgtgagccggccaagcccctgagggcgggcagcttcctgcc

SEQ ID NO: 383623 - DNA, 122 bp, Homo sapiens
gaatacagctcatgcagcctcagcctcctggggtcaagtgatcctgccacctcagcctctcgagtagctgggaacacaggcacacaggctgcataccaccatgcctggctaatttttttttt

SEQ ID NO: 383624 - DNA, 122 bp, Homo sapiens
caatcattctgcctcagccactcaataactactatagtcctgctcctttactccttcatgcgaataataaaaatgctgtcaaagaaaaatcacaaaacaatacagattgtaccactaaagat

SEQ ID NO: 383625 - DNA, 122 bp, Homo sapiens
tcctgaacttgagaaatctactgctgccgctgctactgctactgaagctattgcagcttccgctttcagggttgtaagcagaataaataactggttttttcctcgattttagctgtaatacc

SEQ ID NO: 383626 - DNA, 122 bp, Homo sapiens
tgcgtgtgtgtgtgtacacgcgcgtgagcattcagcaacccaggagcccacagcaatggccggatccgtgggggaggagagagcctagaaccctaaaaactcctttggcctccagaaagacc

SEQ ID NO: 383627 - DNA, 122 bp, Homo sapiens
cccggcgcgaccatgcttgcaaggatctgaccgccgcctaggactgggaaagtgggttcccggcaggggcggggcctgggcgggggcgaggccgactccacccttttgcagtcctcgcagcc

SEQ ID NO: 383628 - DNA, 122 bp, Homo sapiens
caagattgagcaggaggctcgcgacgacaatgtggcagagtatctgaaactggccaacaacgcggacaagcagcaggtgtcacgcatcaagcaagtgttcgagaagaagaaccagaagtcag

SEQ ID NO: 383629 - DNA, 122 bp, Homo sapiens
tgccgctcaccaagatcaggaagaaggaggaggcccaggtttggggtgagaagcacagtgcgtgcttctggcttgcagagccaactgctcgtgccagaggccgctcagaaagcctgagcaga

SEQ ID NO: 383630 - DNA, 122 bp, Homo sapiens
ttctcatccaacgtcttcactgaggataggaaagccctttctctccaattgtgaactgcacgcatgtgtgtaagctatgcttgcatagcaaagtccacttgggcattagagtcaaagttgtt

SEQ ID NO: 383631 - DNA, 122 bp, Homo sapiens
gaggaagggaggagggggctttactgggatcctgccggggagggaacggggcacagggaacgggatgggctcccccattctaaggcgaccccctggcccgagtcccccaccgcgtccccacc

SEQ ID NO: 383632 - DNA, 122 bp, Homo sapiens
gggtgtagtctggcgggcaggtgagcctcagtgtgtcgtgtgcctgcagcgactcacactcgtgatcgtgttccagctgcttcatctgcagagacatgatctcttcgttctggatgtgagcg

SEQ ID NO: 383633 - DNA, 122 bp, Homo sapiens
atattgaaaatatctgatttaaagcctttttatctagtaagtccagcatgtaggcttcctcgggtgagtttctattgattaatttttatcctgtgtatgagccatacattcttgtttctttg

SEQ ID NO: 383634 - DNA, 122 bp, Homo sapiens
gagaaagtgagaaagaagagaccctgaatttcaagctttccgacttaatgtcacctttaacgacgcagattatcgtagagattctcaggtggaaaggtttttgcctcttgcatttggaagct

SEQ ID NO: 383635 - DNA, 122 bp, Homo sapiens
cccacggaaggtcctcgccgcccacctccccgtcctccctgtcggctcagcatgggccgccgtcacaaactctgtagccctgacccgggccaggccaacaacagtgaaggcagcgaccatga

SEQ ID NO: 383636 - DNA, 122 bp, Homo sapiens
agaacggttggtaggaaccgcggcttccgggtggcgcgggtgaatgacgtaagtggcaagcgcgctggccaaccaaatagccagttggggaggggcgggcctgagtggaagaagacgggcca

SEQ ID NO: 383637 - DNA, 122 bp, Homo sapiens
ccacgcccacccggcgtgcgtgattggtggtcactgaggatcaccgtcctccaaacgcgacgatgcaagacgctctggaatcacccgtcctcagtcccccagtcctacggttcaccgaggat

SEQ ID NO: 383638 - DNA, 122 bp, Homo sapiens
ttttattgtattatacttagcagattttcaaagtcttagctttgggcacccacttgcgcgcgcgtacacacaaacacacacatacgcacactcactcaaacacacacactcgagtcccttca

SEQ ID NO: 383639 - DNA, 122 bp, Homo sapiens
gacagaagcccatttcaagcttgcttgcaggggcgagtgatgggctcgctccattgtgctcgtatttgcatggatgtgatcgcggccttgattggccggcgctgagaccgccccgccccctg

SEQ ID NO: 383640 - DNA, 122 bp, Homo sapiens
gctcccccaacggccatgtgacggcgttgagtgtccgtggtcaggtgtgtgtaagagacgcgcagagaattccacgccgtcccaacctcccagccggaggctctgacgaggcctgcagccac

SEQ ID NO: 383641 - DNA, 122 bp, Homo sapiens
tagtgggtggcctagtgtcctggggcctgcaccctagagccagtggcttcctgagtgggccgtgccccgggtcacttcccgggggcgggttagcctcactgaggcggccgggatgctcttgg

SEQ ID NO: 383642 - DNA, 122 bp, Homo sapiens
cgccggctccgggttaagactctgctcgtccccaggaggacggggtcgcgatccagagtgcgatccggagaaaagggctgcatcttgcgtggctggcgggttagactggaatccgtctgggg

SEQ ID NO: 383643 - DNA, 122 bp, Homo sapiens
tgagtcacgaagacctgggtcctttctctgagctcggcaactcagggacccccccgaagtcgcttagccttctgggcttgttcagcttggggaggaaaaggggctgctccggaaccaacgag

SEQ ID NO: 383644 - DNA, 122 bp, Homo sapiens
ccacctggcagtccctctaggatttcggccagtccctaattggctccagcaatgtccagccggagcttctttgggcctccgagtgggagaaaagtgagagcaggtgcttccccagcggcgcg

SEQ ID NO: 383645 - DNA, 122 bp, Homo sapiens
agaggcaaaggtgggcaggggctgccaggggcagggctgcagagagggcagggggagaagcgaggggtgcagggatcacagagatcaccactcacgtccagaccatagcagagcaggcctag

SEQ ID NO: 383646 - DNA, 122 bp, Homo sapiens
cccttcaacttcgggtgggcgcgaagaaaacacaacgttgatctccacgttccattggatcgctacatatcttcccccgagggcatttctctcgctttagcaggcgccggaagagggctggg

SEQ ID NO: 383647 - DNA, 122 bp, Homo sapiens
tttccccgcggcctccgctgccgccatccaccgctgggtgccgtctgcattccctcgccgcgccacggtgcttctctgttgccggctcacatcaaccgaggttccagatgggtgcaaggaga

SEQ ID NO: 383648 - DNA, 122 bp, Homo sapiens
gcaattttctctcacctcacgaggaggaaaagacccaataatggattttacttccctcctcgatgtattagattttacgggaaatttaacatggtatgtcttttgtatcaaatcacagagtg

SEQ ID NO: 383649 - DNA, 122 bp, Homo sapiens
ctcctaagtttgacctgtatcctaaacttaggggtttcacagggctctatcctaaatctccgcaaaaatggggtatgacccgacttcctcgggctcttgctggagactggtttgtccatcct

SEQ ID NO: 383650 - DNA, 122 bp, Homo sapiens
tatgaattcccgctttttcttattgtatctgctgttgagtccagtctctcttccccactgcggaagccactgccatggccctacacctgtccccatggcccctttgaacaaagcctgcctta

SEQ ID NO: 383651 - DNA, 122 bp, Homo sapiens
agaacttcctcgggggaggctgcaggggagcaggcgcatcctgcacagaacgctctagagcgcgcaggccaaagcaccaggctgctcctgacacgtgctgcaagagggtccccgacccgggg

SEQ ID NO: 383652 - DNA, 122 bp, Homo sapiens
tggggtgcttgcctgtgatctctctcacgttttcctttgaggcctccactcggaataagccgccggcgagggagcggcccattcgtgggaaacgcgcccaccgcttgggttctttcctaagg

SEQ ID NO: 383653 - DNA, 122 bp, Homo sapiens
cagcttatcaattccaagtcatctaaattcttcagatggtttctaacctctacttgtactcgaagttaatattcctactcattgattatgataatttcttgtcctgctaggatagcagggac

SEQ ID NO: 383654 - DNA, 122 bp, Homo sapiens
aaaggaaatgatctgactgttctgcatctgctagtgattgaaggcaaatgggaagcagtgcgcaagttcccgttcaagaaatatatagtgaacacggctattgtgaaggtaaacactgcaaa

SEQ ID NO: 383655 - DNA, 122 bp, Homo sapiens
gtcctggaactctttgcagtcagcacggtcctcctcgacctgggtgcctaggagtggggacggcggtggcggggtcatgcagcgcaccccgccaccctgtggctgggtcccagccagcagca

SEQ ID NO: 383656 - DNA, 122 bp, Homo sapiens
cagggcagggtgttgtcccctctgttcatggtggtgtcccggcgccttggcagagcccggcgtgtgatgattacctgagtatttctgacgaaggtgtgccagagccggccctcaagtggctc

SEQ ID NO: 383657 - DNA, 122 bp, Homo sapiens
ggaccaatcccaggaggaggcggtgtctgccacgacagaaaatgagtgtctgccccttgccggggctcacgcccctaactccagcactttgggaggccgaggcgggaggattgcttcagccc

SEQ ID NO: 383658 - DNA, 122 bp, Homo sapiens
caggaggccgtcgccgtgggaatgcagtcggccctgcgcatgtggtgtctgagcagggcccgagaccttccagggaggggagaaatactttttggctgactctcctgactctgtgtttccta

SEQ ID NO: 383659 - DNA, 122 bp, Homo sapiens
tacgaaagcaccacagtttaattttgcctaaattttaacttttgctttagattcttgtcccgagaaagtaaagaaactcttttcctttgctactctattgtaaattgcatggcccccagaac

SEQ ID NO: 383660 - DNA, 122 bp, Homo sapiens
ccattgcccagtgagtgtgtacacccttaactcggtgcataggcttgggttggcttgatccggtctcattcatttctccccacctgaccctacacttgagtcagagtatctcatgttggctg

SEQ ID NO: 383661 - DNA, 122 bp, Homo sapiens
cagctccatgtcctccttccttgggggcgcgtcccgggtggccagtgccaggcagcgcagcgtgtctgagcctgagccccaatcccggatctttgccaggatctgctccctggaggtggggg

SEQ ID NO: 383662 - DNA, 122 bp, Homo sapiens
gcggggggctgctgctgaccgcctcgcagcgctggccgggctccgggaggagggccccggcgggtggcggcgcaggagcccgaggggacagaccgggcggtggcgggggcggcgggggtggt

SEQ ID NO: 383663 - DNA, 122 bp, Homo sapiens
atagcgtgggttgatgaacatgaacaggtggggcgggcctacagcaaggagcagcaccagcgcctgtgtgtgtactgtggccgctgctcggccccgggcggtgcactttacctgaaccgtcc

SEQ ID NO: 383664 - DNA, 122 bp, Homo sapiens
ccaggtcacccacggtccaggtcacgcacggtccaggtcacccacggtccaggtcacgcacggtccaggtaactcaaggtccaggtcaagcacggtccaggtcacgcagggcacttgcacct

SEQ ID NO: 383665 - DNA, 122 bp, Homo sapiens
gcccctgcctctgcccctacacgtgctccacagcgccactctgcccagaggagaagcccccggtgccgcctagctgccgccctggtcccctggcccagagccgcactgacaccactgtcccc

SEQ ID NO: 383666 - DNA, 122 bp, Homo sapiens
gaggagtcccagagcgggtgccagatcgtagggagcagccagcaccccgggtcccctccacgacacaaccacgtccctcggccacttctgggtcccgcgcgcgtctcggacgcggcaggaca

SEQ ID NO: 383667 - DNA, 122 bp, Homo sapiens
tgtacagcctgcagcactgtgaatccattacacctcttttcttcatgaattacccagtcacgggtagttctttatggcaatgtgagaacagactcatgcaggtactaagttaggttgcagtc

SEQ ID NO: 383668 - DNA, 122 bp, Homo sapiens
tttggtacaaaaaaaaaaaaaaaaaaaaaaaaaaaaaacaagcttggggagttcaaataacgcctaagatggccattggtttaaaaacatgcatgaggaaaaaccatgtagctggctggagt

SEQ ID NO: 383669 - DNA, 122 bp, Homo sapiens
cttcacacaatcccatccacctgctcggatgtgcacactggggtcaaagaattcaatggccggcaccaaggcatagataattctaattgttgctggtccctatctgccaacaggtggttatt

SEQ ID NO: 383670 - DNA, 122 bp, Homo sapiens
gggagggactctgggaacagcagagccggcactgaggatgctgccagggaagggcactgacgtgcatggacctggaggatgccactggccaaaagctaggatctcactcacatgtgggatcc

SEQ ID NO: 383671 - DNA, 122 bp, Homo sapiens
aaatcaacggaacccccgaaatcacagagagcatccattttggattccccgaagacccttcgttcctgcatcctcttctgctctccctttctcagcctcttctgctggaagctgagtcctgc

SEQ ID NO: 383672 - DNA, 122 bp, Homo sapiens
ccggccctgccacaggccagaacacagaactgtgatcatgcaaagagccgtgactgaggccggggtcagcgtcgggggtggagaggaggggacatctgccttttacattagatctgaagcaa

SEQ ID NO: 383673 - DNA, 122 bp, Homo sapiens
cgtaagtgctgtggagaaaaggagaaattcaaggttgaggacataggggaggccaactggcgggttagagtattaaatagggtggtctcagtaacccccatggaaaagatgagttgaataaa

SEQ ID NO: 383674 - DNA, 122 bp, Homo sapiens
acagatgggagagtgaggcgcggccaggggccggtgaccgtccgggacaactcaggtccgcgctggcctgcctgtgggcttctctccaatgccagggccgtcaccttcagatgttgctatag

SEQ ID NO: 383675 - DNA, 122 bp, Homo sapiens
ttcccagtctccccattggctggctcctctgtcattcacccttctctcctccctttttcccgggccctcggtgttgggtcgacagacctttctaaccgttttctctacccccacccgttctt

SEQ ID NO: 383676 - DNA, 122 bp, Homo sapiens
gtcggccaggaactcgtcgttgaaggcggccgggtcgatgtaggcgctgatgtcgatggacgtctcgtgctcgcagatgccgcccagcggctccggggcggcaggtggggcgggaggctgcg

SEQ ID NO: 383677 - DNA, 122 bp, Homo sapiens
gattttcctcctgggccagcccttccctgggcagggctctcagcaggcgcgaaggtagggcggccggggctctgcagggaggggccggcttatcaggcaggaaacactgggctccagccaca

SEQ ID NO: 383678 - DNA, 122 bp, Homo sapiens
cggcgctccactctcggattggctgattgatccgagtcagtttttttcctcgccagaaagcggttcgacaattggtccttcttttggcccctcctgcgatgcccgcggattggacggctgag

SEQ ID NO: 383679 - DNA, 122 bp, Homo sapiens
ctgtcgagggcaacccccaggagcctgagaggacgtggcgtgaaaccctgtgggttagagcgacccgcaccttccgtttcccggagccgcctgcgtgaatgttcttcccggctctgctgccc

SEQ ID NO: 383680 - DNA, 122 bp, Homo sapiens
tcccctggattccagtggacagattttccatccctgcatggtggcagagcaggagcttcccgtgtctgctgcgtctgattatggcaagctcactgggcccttgcagcaaactcagagagggg

SEQ ID NO: 383681 - DNA, 122 bp, Homo sapiens
tgatggtagcgttggtgccaggccgtgggttcaggtgtggcagaagcttgcagatgcgtccgaagggaaataaagtgtgttggcgttagactttgtgctgcattcatctgtgtgttcagggt

SEQ ID NO: 383682 - DNA, 122 bp, Homo sapiens
atcgtcctctcccttcctggctattaggaacaatatcacagggtggctgtacacaacctgcgatattgggggtaatatcaccctctccccgtccggatattaggaacaatatcacagaagtt

SEQ ID NO: 383683 - DNA, 122 bp, Homo sapiens
tattgatgtggggagaggcaggcccaggcgtctatatatagcagctcctcagaccttaaacgggagggaggcacaggcgcttgctttgcaggagtcagctctgccttcctcggctggagtgt

SEQ ID NO: 383684 - DNA, 122 bp, Homo sapiens
acaatgcagccctggtcacagatggctctgcctaataagctggcaccaccccgaagtgggcgccccagcacggcagcgccacctgggtgtgggaggccaggcctgcacgacaggtgcaaagg

SEQ ID NO: 383685 - DNA, 122 bp, Homo sapiens
aatttccaaagttaactacctttagcctggggctagagcaatcacctaactatacacccccgccccccagcccccgcctcattaacaacttccctaaatctcactgtcacaacaaaatactt

SEQ ID NO: 383686 - DNA, 122 bp, Homo sapiens
aacttgaaggaaacgtgattaaagggctatgcgagaacgctctctttgctgcccgcggtccggtgggcttcgaagccaatcgtgagaaggaccggttccctccgtgctgcttcctccccgtg

SEQ ID NO: 383687 - DNA, 122 bp, Homo sapiens
gggaggggggcgtggggaaatgtgccgaggggcccgggctggctgggccagtcccagcggcgcagccacccatgcgcgcgcgctcgcaagaccaccagcgcccagagccccagtctgaggct

SEQ ID NO: 383688 - DNA, 122 bp, Homo sapiens
cagtgtgggtgtgacagagatcaacaagactgcaggagcacagctggccagtgggactgacgcggctccagaggcttggctagaggatgaaaggtgagcccctcacccgcccaacatccatg

SEQ ID NO: 383689 - DNA, 122 bp, Homo sapiens
ctcctggctccctgatccctgccgtccacctccctctgtctgaaccatgagacccacgggcgaaccaacaggcactctgccaccatcagatgccaccccccaacccaggaaaagacagggcg

SEQ ID NO: 383690 - DNA, 122 bp, Homo sapiens
agagtctccagcgagactcagtctaaaaaaaaatatatatattttgagacagtctccctccgtcatccagcctggagccaactgctgcgatcttggctcactgcaacctctgcctcccagat

SEQ ID NO: 383691 - DNA, 122 bp, Homo sapiens
taaaggtcccaactcctgacaccttctcactggggatcaagtttctaacacatgaactttcggggacgcagtcaaaccatagcacagcttaaatattttatagcctgccaaaagatcatttg

SEQ ID NO: 383692 - DNA, 122 bp, Homo sapiens
gccggagacgcccccagcgaagttgggctctccaggtgtgggggtcccggggggtagcgacgtcgcggacccggcctgtgggatgggcggcccggagaagactgcgctcggccgtgttcata

SEQ ID NO: 383693 - DNA, 122 bp, Homo sapiens
tgttttaggggtaactcccctcgccttgtggggaggcttaggacgggcgggtgcaatcctcgaaggggagtctcagcgaccatgggggacaccatccactgtaagacagagaacaacggcag

SEQ ID NO: 383694 - DNA, 122 bp, Homo sapiens
ttggccagccaggcctgagaaacgtccccccgctaccttgcgcaaacccagccccctcttcgaaacgcaggtgggcaaacaaccctcaacctcgcaacaactttgtgtatttcaccgccacc

SEQ ID NO: 383695 - DNA, 122 bp, Homo sapiens
cgcgggaaggtcctcgctcacagcccccagtccttagcctccaaacactggcatctcaaccgcctgctcccacgacatccattccattgcctgctcgttctgagcttgtaggcaaggatggg

SEQ ID NO: 383696 - DNA, 122 bp, Homo sapiens
cttcttgaattacttaaagtctatcctttggttatgtcccacttacaaggatcaggactacgaagcataaatccactttgggggcagaaaaatctgagagccattggttattgtgtaaaaat

SEQ ID NO: 383697 - DNA, 122 bp, Homo sapiens
tggaccgggaggagcggcctgagctcagcttaacactcactgcactggacggtggggctccgcccaggtccgggaccaccacaattcgcattgtcgtcttggataataatgacaacgccccc

SEQ ID NO: 383698 - DNA, 122 bp, Homo sapiens
gccgggggccgcgagttgcatttggtaaaacccagccccggaatatatagatcgttggagcgcaatgaagtagcctttggagagaagggagagggcccgtcggacagccacagcggccagcg

SEQ ID NO: 383699 - DNA, 122 bp, Homo sapiens
gcagctcgtcctccagggcctgggcccatggggcttccgtctcgtgggtgtcaaggacttcgagcagcctcactatttgccgggtcactcctggaagcaaggtggctctagctaatttatgt

SEQ ID NO: 383700 - DNA, 122 bp, Homo sapiens
ccaaaggccggcttcatttgagcggggtaactgccttccctgccggccactcttcatttccggagcagttttaatagtgtatgtccagttgtagaggtcaaaaactcgagtttgtgaaactg

SEQ ID NO: 383701 - DNA, 122 bp, Homo sapiens
cgcctccctctcctcctcctcctggcgcctccgccgtccggcagctgccacagctgcgcccggccccgcgcacccccagcctcaccaggtcccaggcgcgcacctctacccacccgcggccg

SEQ ID NO: 383702 - DNA, 122 bp, Homo sapiens
tagcgaggggggcggggcgtggggggggcttgcaatggctccaaccggaagggcggtgctcgagctgtggtgcgtgccgctaagttgtgcgttccagggtgcactcgccggcgaggctgcac

SEQ ID NO: 383703 - DNA, 122 bp, Homo sapiens
caacgagtatgtattctcatcaggatgttccttcttctacgtataaaacctttgaaaatacggttatcagaaattgacatcatgaagaattaagtggtgttgatcattgctaattgtagtag

SEQ ID NO: 383704 - DNA, 122 bp, Homo sapiens
cttcaaagggtggtaatgaggtgggaatatgggggtaaggacaggaattaagctccacctcgtctatagaagagtgtccacatccacatgtattatttggaaggcactgttttgagacctgt

SEQ ID NO: 383705 - DNA, 122 bp, Homo sapiens
gctgggcaggtagggcgcgttaggaaacatcctggcctggccggatgacgcctggctgggcggaggaggaccgaagggcccgtagcgacaggctccggctgtgccagtgaactggccggaaa

SEQ ID NO: 383706 - DNA, 122 bp, Homo sapiens
ggggttccggggggttccgggagagtgggccagcagggacgaaccagccagggctgaggacgggggagggaggagagagccaagacattgagcccttttaaggcagcaggaaccctggcccc

SEQ ID NO: 383707 - DNA, 122 bp, Homo sapiens
ttccactaaacattctgggtcatcactcttaaggttagccttctacaaagccttaaagcacggacacaatgcagttgcaacctttgctaggggttaacaagggtgatcttcgctccagtccc

SEQ ID NO: 383708 - DNA, 122 bp, Homo sapiens
ggaatgacaacaggtcgtgggagcaacaagtgccgggctgcccggaggtgtcacaggatccgcgactgtcagcgatcccgccgccgccaacgcgcccaaaatagccggcggctgcagggcgg

SEQ ID NO: 383709 - DNA, 122 bp, Homo sapiens
aagcctttggggtgtgggtccgggacgccgctcggagccgtaaaaccttgcctgacccggcgctcccagccactgcggtgcagccgccttcgccttctgggtgcgggacacaatctggccca

SEQ ID NO: 383710 - DNA, 122 bp, Homo sapiens
ctccggaagggacgccccatctgggcaggaatctctgcggactggagtcgtaggcggatccgacccagaaagctcagtcgcaaaaaccctcccgggcttcgcgtcccttcagaagtggtttg

SEQ ID NO: 383711 - DNA, 122 bp, Homo sapiens
ccacaattcacaagttcctgtctcttttaaggtttaacttttaatcagccaaacatcttgcgcagaccctgagccagccctgcatcctggttcttcccctgaatgaccaccttccccagttc

SEQ ID NO: 383712 - DNA, 122 bp, Homo sapiens
gcgcctctcagtttagtggatgaagactactatcccagaagccgtttcgcctcgggctggcgagctcctccccgccctactccctccgcgcgaagaagactgagcatgcgcaacagggacag

SEQ ID NO: 383713 - DNA, 122 bp, Homo sapiens
gcgcatgcgcctggggaagaaagaagcggccgagcgctgcgcttgggggaggggatttcacgatccgctcctgtggtccagctttacagcagcttggttttatctagccctactcgtcccca

SEQ ID NO: 383714 - DNA, 122 bp, Homo sapiens
cccccagagaccaggcctctgattagcacctgattcacggaggcagccaaggctgggtagcgactgctggtaactggcccccggagtcgccccaggggaaaaggccaaagggggatctggag

SEQ ID NO: 383715 - DNA, 122 bp, Homo sapiens
taactactccgaggaggagtatgagagcttctcctccgagcaggaggccagtgacgacgccgtgcaggggcaggtgacctggggccggggctccgcgccctctcctggctcacaccgggtgt

SEQ ID NO: 383716 - DNA, 122 bp, Homo sapiens
tagaagttttctgcttatacagatcaagttaagacttcagtaggcttcctatctatttcacgtctaggaaaaccatgatcaactagccaaagcataggtctacaagtgagattattctaatt

SEQ ID NO: 383717 - DNA, 122 bp, Homo sapiens
tgccacttttctgtaaatctaaaattattccaaaatacaagggttttaagaaaaaaaacacgtataaaggattgtaagaacaatttaagagtttttcacaagttcattggtccatagtcagg

SEQ ID NO: 383718 - DNA, 122 bp, Homo sapiens
gcttcaggaggcggcttgacaggtgtgtccggctcgcactttgtgggcgtggacggggttcgggctttcctgcagacctattcccacgaggtctctctcaccgcggactcgcgaaagagtca

SEQ ID NO: 383719 - DNA, 122 bp, Homo sapiens
tggttatgtgctcacgagcacacagtggggctgcaagtacacaggtgcccgaagcccttccgggaaaacccagaagcgactcctgtaagagcaaggcctgggctgtgagtgtgcatttcctc

SEQ ID NO: 383720 - DNA, 122 bp, Homo sapiens
tgattaatgtctccctcgcctccaagacagacctcacctaattgagctgaacatctttcccggcctctggcacttaataggtactcaataaatatttgtagaatgcatgaatgccagggtcg

SEQ ID NO: 383721 - DNA, 122 bp, Homo sapiens
aactcattgttggttaagaagcaacctccctttgcctctcagtgctgagagcaggactcacgtgtgactgaggctggagatattgagtgatggaaatgatgcaattgtcactcactgacttt

SEQ ID NO: 383722 - DNA, 122 bp, Homo sapiens
gtcttccaacgccgtggtaacagcccttccgggttctctggtgggagtcgccgagatgggcgtggccatgatacgtcacaatacgaggccgagggaggaattctgtcgtctgggaacggctg

SEQ ID NO: 383723 - DNA, 122 bp, Homo sapiens
gaagcaaagctaagcatgcgccccaataagaaacacaccactgtgctgtgcacactggggcgcctgcttcctttttcccccggttacgtttggagtcacccttttgggaagaaactcagcgc

SEQ ID NO: 383724 - DNA, 122 bp, Homo sapiens
accaccggtgtcagtcccaaagggctcctaaaatggctgtgtcatctttcagccttggaccgcagttgccggccaggaatcccagtgtcacggtggacacgcctccctcgcgcccttgccgc

SEQ ID NO: 383725 - DNA, 122 bp, Homo sapiens
tcatttgctcacactcaggtggaaaccgggaaggcctggaaatcgcaggtcctgaggacgcggcgagttcacggagaggacctgccgggcaggggctctgggagcctccgcggggaggggag

SEQ ID NO: 383726 - DNA, 122 bp, Homo sapiens
cggctgccggcctgggggtcccgtcgcctcccggagccgcccgccgcgtcccccagcccgcgccgccctgcgcggcccgccggcctcctcacctatcagatttcctgtgcgcatcgccgcgc

SEQ ID NO: 383727 - DNA, 122 bp, Homo sapiens
agggagcggacgtgtaactggggaatccccaagacccctgggcgcgcgtggagttaactgcgagcctgtcctcattctggcgatcagacgccccagggcctcgtgaccgcccatttcacgtg

SEQ ID NO: 383728 - DNA, 122 bp, Homo sapiens
ggaagctgtgcactttgacggcctccacctcgttggcagtcgagtccatcttggcgatgacgatgttctcatggtccttgtacgtctctcccagtttatcccaaatgggagccaactgtttg

SEQ ID NO: 383729 - DNA, 122 bp, Homo sapiens
gcagctctgcctccatcccatccaccccagtgcagcttctggctgtcctcggagacttcccgggtggcctgtgccagtgctggccagtagaactcaagtgttcttggacatgtttgagagta

SEQ ID NO: 383730 - DNA, 122 bp, Homo sapiens
gattacatttttataatcaaagctgtttttgaactacaagagtgcaagagagcgtgtgaacgtgcggtgctccatgggcctttcttgttcacttgattaattccaaaccgtccatccgagtc

SEQ ID NO: 383731 - DNA, 122 bp, Homo sapiens
cgaagtttttctgagggttctccaggtcaaaatgattttcctaataataggcattatttacgtgctgacatttgcaaaatcagtggtgggtaaaactgccagcaccttggcacaaattaagg

SEQ ID NO: 383732 - DNA, 122 bp, Homo sapiens
gatggcgttgacgcagagcagggctgcctgcagcagtgagtacagggtaaaggccatggccgtccgaggccgccccgaagtccaagcgatttctctcccgccgccgcaagggacgtggcgcc

SEQ ID NO: 383733 - DNA, 122 bp, Homo sapiens
aaagaactttgatttatttggattttatgcagaaggcattagagagccattagaggccaccgaatacatgattaagatacttcaaaaacaaaaactgctcttattgctctattagagttaga

SEQ ID NO: 383734 - DNA, 122 bp, Homo sapiens
gcggaagtgaccgcacctcacactcctttagatagcagcctggctcccctggggtgcaggcgcctcaactctgctgagggtccagaaggagggggtgacctccggccaggtgcctcctgaca

SEQ ID NO: 383735 - DNA, 122 bp, Homo sapiens
agtttcagtatttgagattttttcatcttttcaataatgtcaaagaaatgttgggtttagcggtttttaaacttgggatctggaaaaaagaaaaagatcattcttgttgaaaggtttcagtg

SEQ ID NO: 383736 - DNA, 122 bp, Homo sapiens
cgcgggggcggggccaggttctcacaccatgcaggtgatgtatggctgcgacgtggggcccgacgggcgcttcctccgcgggtatgaacagcacgcctacgacggcaaggattacatcgccc

SEQ ID NO: 383737 - DNA, 122 bp, Homo sapiens
cacgctggagccaatcaaaatgctgcaagggtcaaagccgaccaattatcacagcaacctcgccgcggggcggaatcaaaagagggcctcctccaggagagaggcggggcgatgcctcagcg

SEQ ID NO: 383738 - DNA, 122 bp, Homo sapiens
agcaaataataatcagattgtgagcaggtaaacataccaactatgcaaaacacaaggagacgtatgactcggtcagaaatccaatacaaattgaggacaagcatttctcaaataataataag

SEQ ID NO: 383739 - DNA, 122 bp, Homo sapiens
ggagctgcttgcattcctctatgtggtggtctcttcaggagggcgttggattacatcgtccggcagccaccagctcttcctttggcctcagcaaactttgcagtggtgcgtttttttcccta

SEQ ID NO: 383740 - DNA, 122 bp, Homo sapiens
gcccggggacgcggggttggtccaggctgcggcctgtggcgcgtgcaggcctgaaggaggcgagatgccgatgccgccaccgctggtccggtggaccaggccccttggtccagcctcccctc

SEQ ID NO: 383741 - DNA, 122 bp, Homo sapiens
cttccttttaaccatttctgtccctacaagtttcccggagagcaggtgttctgagcacagcggagctctcattttagaaggaaaggcaaaaagacaaggaatagaacaagcgtgggctgggg

SEQ ID NO: 383742 - DNA, 122 bp, Homo sapiens
agccggggaactacagcagcggcgaagtcactgccgctcggtgcgcactccagcgagaagcgggcgcgtcctgtgacgtcacaggcaaccacccctagcagggcaccaatcccggagggcgg

SEQ ID NO: 383743 - DNA, 122 bp, Homo sapiens
tggatgagactgaggccagagagggggctggcggtctgccctgaggacccccgtcccacccgccgccatagctgcatggccccgggacctccctgtcgtacctgagaggagggcctggcccg

SEQ ID NO: 383744 - DNA, 122 bp, Homo sapiens
aaagcctgctctgacacagactcttccttggattgcaacttctctactttggggtggaaacggcttctccgttttgaaacgctagcggggaaaaaatgggggagaaagttgagtttaaactt

SEQ ID NO: 383745 - DNA, 122 bp, Homo sapiens
gtgggaaattgcaagaagtataaaatatggaaaatggctttgtgaggctgatgagataggcgagaatgaatgctgcaaggccctttaggcaaaattgaggatattggtttttatcaaatgca

SEQ ID NO: 383746 - DNA, 122 bp, Homo sapiens
tccgggcactgaatcagggattttggatgaccctggtacatagttacttccaggagattacggagggggggaaatactccacttcctgtttaggattacactctcaaccctcccctcccacg

SEQ ID NO: 383747 - DNA, 122 bp, Homo sapiens
ttcagtactttgccttggcttcactagagggtgctgtcgtgcagggttgttagaggtaaacgttttctggacttaaatggaccagatgatctgtatttgcaaaggaaacagattttccaagt

SEQ ID NO: 383748 - DNA, 122 bp, Homo sapiens
cccacaaccaccagggagggaaacaggctgcccgagggctccatagccgccacgcggagccgccagggctgcccttcctgcgctgggaaccggctgctccaggctagacagccccctccctg

SEQ ID NO: 383749 - DNA, 122 bp, Homo sapiens
ggaaatagctgttcataagccctggggaaatttagccctttggctggtaatgggagtatccgagatgagagggcagctggaaactttcggaatgacctcccacacttaatttgggaaatgcc

SEQ ID NO: 383750 - DNA, 122 bp, Homo sapiens
gggcggaactcagggtggggcaacttcctatttcgagtctaaagtaatcttggtctcttccggccgccgtaaaggggttgggtttagtgttctcccgccaatttaagcctgtggcatggaac

SEQ ID NO: 383751 - DNA, 122 bp, Homo sapiens
ttcaaaaaggcaaatctgagaggagttgcagtacagtcgtgtggtttctagactacacggcgtttcgaaagtgggtaaaggcagacatcacgcgtcttcaagaagttcagaagaaagaggaa

SEQ ID NO: 383752 - DNA, 122 bp, Homo sapiens
aaccctctctcttgcccctgaactgcataggtttcaaaggtgatctgtccccttgtatctcgacctgttgctcaggaaccattcccatcagtttaatttctttttccttttaatcctgtggc

SEQ ID NO: 383753 - DNA, 122 bp, Homo sapiens
gagtcacttaactccttcctccctagcaggccagtagctaaatctcccagcatcactccacgccatccaagagggttccagatagaacccctgcgccacctcctcaagagccctggattctg

SEQ ID NO: 383754 - DNA, 122 bp, Homo sapiens
gtccgtgacattcagcaacttgctcttctcaccccacagtacccttctgaggttaatccgcgttgatagaagcaggtgtggttcatctggaatctgttggtgtgaactgcgcggcggcgtcc

SEQ ID NO: 383755 - DNA, 122 bp, Homo sapiens
gccagacatttaccttccacaaccattccccccaagcacctggggaggcattttggatgacggactaaaggctcagagcccaagatcactcacagcttgtaaggagacagtttggcaccctg

SEQ ID NO: 383756 - DNA, 122 bp, Homo sapiens
cagcggcacccggccactgtagcggtcactggtgcagccactgccagcagccagggcctccggcccagcccaggtacagcggagtgaactgtgttcatgtagaatcacagcggcgatgccct

SEQ ID NO: 383757 - DNA, 122 bp, Homo sapiens
tactttatggagcaccattccctatttgactttgatgataagatgtagatgttgataacacgtgtctctggacaccaaggaagataagtgtctacctgggtttaaaaatgtgcctactatct

SEQ ID NO: 383758 - DNA, 122 bp, Homo sapiens
cctaatatgccatggtggccgtggaccctgagggcggggaggagggaaggcgtgcacgtgcggaaaaaactacatctgtgggcaggcaaagtagaaatgccaaataatattaataacctctt

SEQ ID NO: 383759 - DNA, 122 bp, Homo sapiens
gtgctgtatactttaaaaaaaccctagggggttctgttaggtgcccccactgcagcataacgagttgcccctagctgagaagccctgtcctggggcctgtccacaccatcctcttcctgaga

SEQ ID NO: 383760 - DNA, 122 bp, Homo sapiens
agggtgctgctgagcagtgtctctggcctccacccactccaggccaggagcaccccccatcgtgacaaccacaatgtccccaggcatcgcccagtgttccctgggggcagttcacgctgggt

SEQ ID NO: 383761 - DNA, 122 bp, Homo sapiens
ccatctgccgctggagtgcagcacttcctcggacccagctgttcttctcatggccatggtcgtgggccttgctgcaggtgctccccatggtgggtttgcaggatggaagagcgaaatatctt

SEQ ID NO: 383762 - DNA, 122 bp, Homo sapiens
ccacctccggcctgtcaattccaagcccctcagagtctttgttgtacatcgctgccatggcgactgctggggacaacacctggccagcggaagcctgccaaagcccactgcagcaagagcaa

SEQ ID NO: 383763 - DNA, 122 bp, Homo sapiens
tcacagagacagaaaagtagaatggtgactgctcggtggcaggagggggaagtggaaagtcgctgttcagtgggtacaaagtttcagttttgccagataaaaggagctctgcagtttggttt

SEQ ID NO: 383764 - DNA, 122 bp, Homo sapiens
gctggccagggccaggagggcgggagggagggaatgggggtgggctgtgcgcagcatcagcgcctgggcaggtccgcagagctgcgggatgtgattaaagtccctgatgtttctctttgcag

SEQ ID NO: 383765 - DNA, 122 bp, Homo sapiens
tgagcctgccgctgccttggctaccaggctcctcaggtggcagcgcttgcagtcgggctacggaggccgggttgccagattacgggtaagtttgcgttttgctttgtgactgttactcccac

SEQ ID NO: 383766 - DNA, 122 bp, Homo sapiens
cttcctcggagtgaggcattaaattgtgcccgtgttctggggtagcaccgtgaaggcccgcgtggaacatggtttttatttagagtaaaaacagctcgatgcagcgttgcctgtctgagcca

SEQ ID NO: 383767 - DNA, 122 bp, Homo sapiens
ctcaaggccagcagatggcgcgtggcgtcaggctgcgagatagcgccgagacagcatggacgccgggagcctgggaaagccaactgtaccacaggagtctaaactgtagctaggaatagaag

SEQ ID NO: 383768 - DNA, 122 bp, Homo sapiens
atttaactcaggctgtcatgatccttccactgcagcagacgcctcttctgccttgcccaccgccactggcagagatcacccctcagacaccctggggcctaatgagacctgatcgccctctc

SEQ ID NO: 383769 - DNA, 122 bp, Homo sapiens
agagctggggaacgggagcccgcctgagatggaggatccaggcccctcggggcgtccccacgtcagatccctggggtcaagcctgtccccaggatgactccccaggttttgacctgatcgct

SEQ ID NO: 383770 - DNA, 122 bp, Homo sapiens
ctggcgacagccggtgtgtgaaaagcctgtttcctcccctagaaaaagcacgtttggctccgctctccactgacacgtttttagctgagtgacgatggaagccgctggcttttaacagacgg

SEQ ID NO: 383771 - DNA, 122 bp, Homo sapiens
ctgccaccagccaggcactgccctgggccggaagctgcagcatgtccatctgtccatcctcgggaagcctcttagccccacatctaaacacagggcacgacccggccaaatcaccaaaaccc

SEQ ID NO: 383772 - DNA, 122 bp, Homo sapiens
cgaaacagacgggttcccttttcacctattcaagtgttgtgcattctagggtccccttcccgccttgcagacaaatgcgctcattgtgccactccagtccctggatcctatgcagcgggcat

SEQ ID NO: 383773 - DNA, 122 bp, Homo sapiens
ctccgcagaccgtggggcggagcctgatggagtttcgtttccgcggtgcccgagggacgccggggtaacggaaaccttggccaccttctacgaagactagagagggtcaaacctatcagaac

SEQ ID NO: 383774 - DNA, 122 bp, Homo sapiens
caggccagttctacgtcatgatgacgccccaggatgtgcttcagacaggaacacagaggacgatcgccccccggacacacccttactctccgtatgtgcaggggacacctggagggcctggt

SEQ ID NO: 383775 - DNA, 122 bp, Homo sapiens
tctgcttggcagatcacccaagggcagttcgacgagcattacgtgctgtcttctcgggtgcgcactggccgcagcatccgtgggctgagcctgcctccagcctgcacccgggccgagcgaag

SEQ ID NO: 383776 - DNA, 122 bp, Homo sapiens
cttgaggcaagttatttcacctgtctgggtctcggttttgccatgaatatgaaagctagtcgtgtcactctaggagaagcggtttgtgttggtggcaggtgcgccccctcccaataggtgac

SEQ ID NO: 383777 - DNA, 122 bp, Homo sapiens
actcagggccacaggtggacttggattgtcatgagctttctcttctcctgtcttttggaacgcagggctaccttttcatctctgtgttggtgaactcaaacagtgagctgatccgcctgatc

SEQ ID NO: 383778 - DNA, 122 bp, Homo sapiens
gggcagtggtgatgctgacgagctgtgccttcagctcactctgatgggcattgggagggtcggtcttagctgtcagcttggtcaggcgatgagcccaggtatccagtcgaacatgaatccag

SEQ ID NO: 383779 - DNA, 122 bp, Homo sapiens
ggggagggacgaatcccaggggctctttggggggtttaagtgcgtgtgtgaggtctgctgcgatgcccgtacctttggtaataaaggaaccgttcctgctcagcgcggaggagccgctggat

SEQ ID NO: 383780 - DNA, 122 bp, Homo sapiens
tatttttcccgggctttaaattctgcacccatgtcctctattttaccttgtttcttcttgcggcctctgtccctcaggccatgtgtcgtcctacattctaactgaaggaaagttcaggaata

SEQ ID NO: 383781 - DNA, 122 bp, Homo sapiens
cttatttggcacatatgtatccacagcgcctagaacactgcctgtaacgtggaaggtgttcgatctatagagttttgtcgaatgaatgaatgaagccgactagtgcacagggagtgcagcgg

SEQ ID NO: 383782 - DNA, 122 bp, Homo sapiens
cgtcacttttttccttgttggcttgtagctggtctgatgtccccttactgctatctaaaccgcccccctctactccctgctcccacctaggcacgcgtttgccactctccatttttccttta

SEQ ID NO: 383783 - DNA, 122 bp, Homo sapiens
ggacctggtggaaggcctcgctgaagtgctgcatggagctgagcaccatgccctgcatgacgtcgggcagggcgcggctctcgtcgcccacgcccacgaccgcgccccgcgagctgttctcg

SEQ ID NO: 383784 - DNA, 122 bp, Homo sapiens
tgagataaaatgcaaatgttgaaagtcagtccacacattatagtcaaaataaactttgttcgtgtgtatcaacatatcttacacaaacctagtgcctgtatctagctgggtgttatttaagg

SEQ ID NO: 383785 - DNA, 122 bp, Homo sapiens
tggttcaaatatatcaagacaccaggacatctgggaaacccaaatggagtttccatttcccgccctctgcccaccccctgcctctaatccccagttaccccagcaatgcaccattaaaaata

SEQ ID NO: 383786 - DNA, 122 bp, Homo sapiens
tgagtaaaactgtggtgtgtgaatgaatgtctgggcatgtgtgtaatgtgtgtacatgtacgtgtgtgcctgtatgtgcacacacatgtatccaaggacagcatctgtggcacagcctaggc

SEQ ID NO: 383787 - DNA, 122 bp, Homo sapiens
tgtgcttctcactggcactctggctgggtgcttgtctgctggagggtttggaaagcgagtcggctcactagagctattgttttacaccacctgtttgtgggagcgacagctgggctgccctc

SEQ ID NO: 383788 - DNA, 122 bp, Homo sapiens
agactgaaagctcctaaagacaaggaatcatgccttgctcatctttgttccctgaactgacggtttcttaattcactgaacactcactatgagtgagctcaagagctgggaataaggacccc

SEQ ID NO: 383789 - DNA, 122 bp, Homo sapiens
atcagtgagtgctccgtcaatgtttgacaaacggttgactccactgccccgcgctgtgggcgcactagacttcgggggcggcgtccaggtcccgcctaatcttctaggctcaggacccgcgg

SEQ ID NO: 383790 - DNA, 122 bp, Homo sapiens
ctgtccggtgcgtggccgcgaatctgcgcctgcgtgcatggcccggcggcgtgcggaaggcggtgtgtgttggaatgagtgaagcactttaagtggccaagagcaggaaacccggccggagg

SEQ ID NO: 383791 - DNA, 122 bp, Homo sapiens
agtaatgagcatgccccctcccctgtggctcctgggctgtcggcgctctgccaggcatgacggggtgcaccatgcgctcggggcccgcacaccgccagtctctcatccccttgtccatagca

SEQ ID NO: 383792 - DNA, 122 bp, Homo sapiens
tttggacgctctgcttttagcaaccgcagctttcgcgtagcagaataaatccgagaataacgctcccaacttacactcttttctatagctgtactccgcgcgatcttttagaaaccagaggc

SEQ ID NO: 383793 - DNA, 122 bp, Homo sapiens
gctttgcgcgcggcgcttagcctgggatacggcagcgaggccgcaaatgcaatcaggcggcgctgagggcagcccgggggcggggcgaacggggcgggggccggggtctggtaaggccccgc

SEQ ID NO: 383794 - DNA, 122 bp, Homo sapiens
gaggcagagggtggccacagcagtcgcctgaacaaatttccctttacagaggattcttcacgaaacagcgggaatggcaggtgaagacaaagaggcatcctatcggagaggcagataataac

SEQ ID NO: 383795 - DNA, 122 bp, Homo sapiens
agccaccgtagctatatttggtagaacaacgagcactttctcaactccagtcaataactacgttagttgcattacacattgggctaatataaatagaggttaaatctctaggtcatttaaga

SEQ ID NO: 383796 - DNA, 122 bp, Homo sapiens
caaggcttggcccggactagctgggtccgcgcagggctcgcggaggcgacgtctcgcctgcggcctctccgtccccaggagcaccggccggccccacccagggccctggccctgcctctgcc

SEQ ID NO: 383797 - DNA, 122 bp, Homo sapiens
ggccggggcgaggccctgcgggagccgactgggaaggtctggaactctgacaccccgccccgcgagctgtgctctcagtctcatgtcatcccaccacaaggacagatattaagtaccatata

SEQ ID NO: 383798 - DNA, 122 bp, Homo sapiens
cctggaaacccggaagtgaatcatggggcgtgaactcgcaagcgcagtttcctgaagacccggaagccgatcgcgtggggagccggtcttggagcagcgggtgagtttccctttgtctagat

SEQ ID NO: 383799 - DNA, 122 bp, Homo sapiens
aatggaaataaactacctacggcttgttgtaatgtctttttcattttttaacttaccagtcgaatgcttctcaaaagtaacattattccagctatggccattccagtgctgatgttctacag

SEQ ID NO: 383800 - DNA, 122 bp, Homo sapiens
atcaatagataggtgcttttcaggttggaatgtttcctagagttattcaacacaataagacgcagagtatgagttgttccctgcctttcagcccttccctttggtctcctctacaggactca

SEQ ID NO: 383801 - DNA, 122 bp, Homo sapiens
tgagtaagcctccaggggctgcctctcctcctaacccccagactcaaatgcccccaacctcgccctcccagtgagcagcagctctgcactcgtgctgcgctcatgtctggggccagccagca

SEQ ID NO: 383802 - DNA, 122 bp, Homo sapiens
tgcgaacatgattacatgccgggcaccgtaagaggctaatttttgtttttcttgtagagacggcgtttcaccatgttgcccaggctggtctcaaactcctgggctcaagggatcggcctgcc

SEQ ID NO: 383803 - DNA, 122 bp, Homo sapiens
gaatccgaggccggcgagggctgggtcggagggcttccagaggccatggtcagcaagactcggggtagcaacaaaaggcgggaggccacaggcagcagcgccggcatccaaacaaaagacag

SEQ ID NO: 383804 - DNA, 122 bp, Homo sapiens
gggcgctcgtcacggcgctcagcctcggcctcagcctgtgctccctggggctgctcgtcacggccatcttcaccgaccactggtacgagaccgacccccggcgccacaaggagagctgcgag

SEQ ID NO: 383805 - DNA, 122 bp, Homo sapiens
agctcccgggcacagcccggggcacagccccgcgcacctgccccgcccacgcccgccccgcgcacctgccgggtccgcacctgccatttgcccgactggccgcgcacccagctggcccgccc

SEQ ID NO: 383806 - DNA, 122 bp, Homo sapiens
gtgccccgggtcaccaccaaagtttccatcaccagattggaaactgcctcaccgcctactcgtattcgcaccaccaccagtggagtgccccgtggcggagaacccaaccagcgcccagagct

SEQ ID NO: 383807 - DNA, 122 bp, Homo sapiens
cgtgggcagtgtctgggcaggcgggggcggtgacagccccgtgggcagagtctgggcacgcgggggcggtgacagcccagagctgctagggtggacacgtgtggcaccacactgcacgccct

SEQ ID NO: 383808 - DNA, 122 bp, Homo sapiens
ctaatctctgggcatttatggccgtagaggcagcggcagcggcacaaaatggctttgagacgagagtgaagagactcccgcaaccttggccgtttccccggatccaggggcccgacgcgctc

SEQ ID NO: 383809 - DNA, 122 bp, Homo sapiens
agccgagcaactctgcaaaaccctactcggctccccacgtgtggtttgctgtgataaggccggcaaagcagccagccttgaaaatgccatttaatgagaaaagacccacagccgccgtggcg

SEQ ID NO: 383810 - DNA, 122 bp, Homo sapiens
tcaaagcgtggccgaatgcctaggcttccgggtatcagtggccccgcctcttaatccgaccggagccgtccctcgtgattcctgggtattgtagtcagtttcctgggaaagagtcgctccta

SEQ ID NO: 383811 - DNA, 122 bp, Homo sapiens
tcactaaaagtagaacaaatatgatgagtctcactgatgggacccattagaaagtgacagcgccacctaggaagtgttcttgccttaaaaagtgaacctaaatctaatcaagtctctggatc

SEQ ID NO: 383812 - DNA, 122 bp, Homo sapiens
ctccctttatcccagacccgccccggccctccgtagaccacgcccctccgattccgggcccgccccaatccttggtttctggtcccggccccgcccctccgcagacctggccccgccccgcc

SEQ ID NO: 383813 - DNA, 122 bp, Homo sapiens
cggctggttcagagaccgaaacaaaggcaggatcaggaccctggatcagaatggggtccacgcgtgagtctctgtaattaacgctctggtgtctcaaattacgagaaaatatataaaacatg

SEQ ID NO: 383814 - DNA, 122 bp, Homo sapiens
gtgtgaggacaggtggaagggatccaatgtgggatctaaggggtctgagaccaccgtggccgcgggaggcaggagaaggtaccgcagagctcccggtgatgtgtcaggaggccctacactcg

SEQ ID NO: 383815 - DNA, 122 bp, Homo sapiens
ctcaggtctgtttatggggaaacccacatgaggctgggtgtggagaaaagccagtatcctcgcccctaagtggggccacactgagctgcatgctcgacattgtccccagtggccccaggatg

SEQ ID NO: 383816 - DNA, 122 bp, Homo sapiens
tgatctttcaaaattaaaggtgaacaccttcacttaaactgattaaaattgcagctccaccgtccggcctctagagggcagtgtatggatacatttgtccagattgggggactaggtttgat

SEQ ID NO: 383817 - DNA, 122 bp, Homo sapiens
tcactcacacttactcacctgtcacacccacagcggacactgggcccacgcgctgcccctcgtggaggccgtacaggtgcatcttgtatttgcacccgggctccaggccccccacggtgacc

SEQ ID NO: 383818 - DNA, 122 bp, Homo sapiens
cgtaccctccgccccttcagtctggggctccgggtaaagtttcagcctccgcacgtgactcgctatggccgctgccatcgccccgcgcccctgagccgcggccccctggacggctcctctcc

SEQ ID NO: 383819 - DNA, 122 bp, Homo sapiens
agagccgcgcaatggaaacctgggtgcagggactgtggggcccgaaggcggggctgggcgcgctctcgcagagccccccccgccttgcccttccttccctccttcgtcccctcctcacaccc

SEQ ID NO: 383820 - DNA, 122 bp, Homo sapiens
gaacagagagccatacccctgtcgcaagtcctgcaaggtgcgcagtggtgggttggggggcggggagcagggaactctcccatctcaactgggctattgctgagtttcccttctgttttttt

SEQ ID NO: 383821 - DNA, 122 bp, Homo sapiens
agcccgaccccctgcagatacggctccatggacactcaattcaacccaaaccacacaacacgcatagagaacaaggtggagaacacggtcccagatccacagtagcatgaaggggcccacac

SEQ ID NO: 383822 - DNA, 122 bp, Homo sapiens
agtgttcttcctgggccaatattagaatgatgaaacgaaagtggtcccttttcccaaaaacgtcctgatgagggtaccagcagccacgaatcctgtaagagctcagggcaggggagggcagg

SEQ ID NO: 383823 - DNA, 122 bp, Homo sapiens
attagtcacacacgtgccaacagaagttcaaagatgctccgataatgtgatttgtaaacacgaagtcccagcagcggcggctgctgcagcttcttggctctctcactcaatcccctacacct

SEQ ID NO: 383824 - DNA, 122 bp, Homo sapiens
cctcatcgccactcttgttaatacttttgccactgcacagtctatcacagcctctaatcccggtcctgaaacagcaatcatccattcagggggactcctctcattttccaaacaattggcca

SEQ ID NO: 383825 - DNA, 122 bp, Homo sapiens
gtcactgctcgttgcctgaactgtgctgtctcccacagaatcatggagaacgggcaggagcgggtggaagtggaggaggatgggcagctgaagtcagtcacaatcaatggtgaggagcagct

SEQ ID NO: 383826 - DNA, 122 bp, Homo sapiens
cattaggactttgcgtaaggcccataccaactaacaaccacaggaggagttggtgttggccgcacccttacctctaaccagggttggctctcagaaaaatgcagtgaggctgggcacagtgg

SEQ ID NO: 383827 - DNA, 122 bp, Homo sapiens
ttgcgtggcggtaaaaattatttggaagttctgtgcaaccgttccaatattccgcttttacgtgcacggaaatagcctaagtccagatgccagccagggaagccactccgggccccgctgac

SEQ ID NO: 383828 - DNA, 122 bp, Homo sapiens
cttttgtttcacaaatgcagagcaagtgagagagaggcaaccgacccgcatcccacaggtcgcctccccaccaccaggtgcatgagcagagctgggggcaagcatggtacggggaactgaat

SEQ ID NO: 383829 - DNA, 122 bp, Homo sapiens
gcagccgccaccatcgcggtggtgaggacggaggcggctctggagcttacccctggagtgcgtgtggttagagaagccttgagactcgggctcccatcggtgatgctaagttttcatttttc

SEQ ID NO: 383830 - DNA, 122 bp, Homo sapiens
aggatgcttggtctgatgagagcagtttcacaatgacagaatgcactttctttttcttttcgcaaacaaaactttttttttttttgtttgtttgtttgttttgagatggagtctcactctgt

SEQ ID NO: 383831 - DNA, 122 bp, Homo sapiens
ttttgtttatggggaaataaagcccctggccagcgttggtttctctgctgccttggtgagcgtgggcttgctcccacctactctcccaggttccgaggctcctgtgcacacggtgaatgtgt

SEQ ID NO: 383832 - DNA, 122 bp, Homo sapiens
agggcaggggctgtggaagctgtcacctggggctgtaccatgaacgggggattcttttaacgcgaagccatcggcgactggccccggaggctgaggaccccgagacaggccctgccctgggc

SEQ ID NO: 383833 - DNA, 122 bp, Homo sapiens
ggggtttttgatgcgtaacctccccctcccataggcctgcttttctcgcccaccatctgtcgttgtgtcctgtgcgggcatcacccaggatgagtttctgctgcacatgtctgaggatgact

SEQ ID NO: 383834 - DNA, 122 bp, Homo sapiens
tgtggtaaactaggcaggcaggatgctggtggcactgaccagggtggtagcagtggagagcgggaagtggacaggttttggatataatttgaaagcagagctaacaggatttttttctgaag

SEQ ID NO: 383835 - DNA, 122 bp, Homo sapiens
gaatgacgtaatgaacttccatatgcccaccacttaggttcataagtagaacactacttacgctattgaaggcccttgatggaatatattcttaaacatttcatcctgctccccaccaattt

SEQ ID NO: 383836 - DNA, 122 bp, Homo sapiens
ttcaggaaaggcttgtctgcttggggctggcctggggtctctcctgctgctgctgcaggacgatagctggatgggaaaagtgggggctggaggagctgaggcatctttctctccatacatct

SEQ ID NO: 383837 - DNA, 122 bp, Homo sapiens
tactgtcttgcccccccctgcccgctgggcccaggctctgtgtcctcactttcccccgcccgtcatgcccagggcctgtgacgccctccttaccgtcctgctgccccccacccaacatgccc

SEQ ID NO: 383838 - DNA, 122 bp, Homo sapiens
cgtaggcggcccctcctggtcttcctgctgcatccgtgcgatcagctgttgccgctcggccgcctggcgcatgcgcatcatgacgaggctctcgtagtccctctctgacagcactgagccct

SEQ ID NO: 383839 - DNA, 122 bp, Homo sapiens
aagcatctctccttctaattaccggtttaattaaccttggcacacagtatgtaccagacccgagggacagagtcagaatggctgctctgggtgaacatcgcccatctgctctgcgctaggct

SEQ ID NO: 383840 - DNA, 122 bp, Homo sapiens
ttttgacagggtgctgatgggtgcgtttacaatcctggagctggacacaaaagttctccacgtccccactagattagctagatacagagtgtggacacaaaggttctccaagtccccaccag

SEQ ID NO: 383841 - DNA, 122 bp, Homo sapiens
ggcgacagccctcatccgtttatttcctctcttgaccatttgttcagcgactctcccctccgttcagcatccaggttccttacggctacagtgccccagccccgcctcaccagcgcgacatt

SEQ ID NO: 383842 - DNA, 122 bp, Homo sapiens
cccccggggtggccctgcgcctcctggctctttctggatggaggcgcctccggaaggagccggctgcacgccgtggccttcacctcgcagcctctgctgaccacacctccctagcgcagagg

SEQ ID NO: 383843 - DNA, 122 bp, Homo sapiens
agaagagcactgcacttagggtaagcaaaggagctgagcgacgcgggccaatcactgccccggatgagcagcggcctacagccctattccatgcacgtccctgccgtggtctgaggctgtag

SEQ ID NO: 383844 - DNA, 122 bp, Homo sapiens
gtattagctcactgcagcctcaaactcctgggctcaagcagtcctcccacctcagcctctcgaatagctgggagtacagacttgagccattgggcctagcacatcagctatgttcttagtat

SEQ ID NO: 383845 - DNA, 122 bp, Homo sapiens
taggaccagagaacaggtgtgtctgtacactgtgcaggtccccggggcaggctctgagtccgtctgcacacggtgcgggtccccggggcgcgccctgagcccgtctgcacacggtgcgggtc

SEQ ID NO: 383846 - DNA, 122 bp, Homo sapiens
tagctctacgcccatgttccaggtgggcgcgcccaagcagggggcctgggagcgcaccttcggcagatgactgggactcttcggttctagaggactcaactttaaatatgaacaaaaaaccc

SEQ ID NO: 383847 - DNA, 122 bp, Homo sapiens
ctccaggtcttgaaacctgcccaagataccaacaaccacctgtaataaggtgcaggatcccgctcaagcccttcagagcatctgtggatgtgttacctcatatgccctcaccaaatcctata

SEQ ID NO: 383848 - DNA, 122 bp, Homo sapiens
cgagtgtggcaaaaagagaaatggagatttctctcttttgctgcaatcccaaggcgtcaacggcgggtccttctcaaaggaaggtgttaaaaatataagtagtatgtttaaactgtcaagga

SEQ ID NO: 383849 - DNA, 122 bp, Homo sapiens
agaggccggcctgggggcagggcgaggccgttgcggggcagcctcggagctggtccatctcgggttacctctcctcctcctcctcctcctcctccgtctcctctctccctggctccgcgcct

SEQ ID NO: 383850 - DNA, 122 bp, Homo sapiens
cccccccccgctccacgccgtgtgtgggcgggggtcaggaggtgcggggcggaggcggagcgtgggccgcggagatccggcgttcgcaggaggcttggtgcgcggcggggctgcacggggcc

SEQ ID NO: 383851 - DNA, 122 bp, Homo sapiens
tccaggttccagcctgtcactgcctggttgtgtgactgtgggttagtctcataacctggccgagccctacattcctcacctctacaatggagatagccacagtgcctttctcatgagcttgc

SEQ ID NO: 383852 - DNA, 122 bp, Homo sapiens
tggtgatctggaagaggcacagcatgctgttggcgaaggtctggaagttgaacatgtcgtcgatgccagcctcccacttgacataagcgaagttggccatgccaaagatggagtagatgaac

SEQ ID NO: 383853 - DNA, 122 bp, Homo sapiens
atggtagacaaggcttccatgtgtcatctcgtgtaagaagaattgtaggtgttttaaccacgtccccagctagggtctcattgccagacgtgagtgagccttctgatgattatagctcccag

SEQ ID NO: 383854 - DNA, 122 bp, Homo sapiens
ttgggctgtcagcagagatgaggccagagggatatgcagggatgagttcaagaaaagcctcgaatgtcaggctaaggagttgggattttcttctataggccagtgttgtcaacctgtgggtg

SEQ ID NO: 383855 - DNA, 122 bp, Homo sapiens
ccgcgtggggagtctcagggtggctggcaatgaacagctcagccagagaagagtcgaacacggattccggggcgagtcaggagaatttcctgggacagcgaatggcagggagtgatgaagca

SEQ ID NO: 383856 - DNA, 122 bp, Homo sapiens
tgactgtgaccacagagcacgtctctgctctccagcctcaaagatgatatgacctctcttcggacatactggctctaagaaaacaaacaaaaacttggtaattggggcttctgcaggaatgt

SEQ ID NO: 383857 - DNA, 122 bp, Homo sapiens
tgtctaaagcataaattgaccataaacaatatattgaataggtgcactgtatacaaaccccgtgaaaaaaataaaaccaactactaccaaaggaagtgacaaagacctacaaaccaagaaga

SEQ ID NO: 383858 - DNA, 122 bp, Homo sapiens
tgggactggtgagttcaagttcctgaagccaatatttcctaatctcttggttcaggacaccgggagggaagttaaggaaaaccccaagttcagaaatagcttggtattcagttaagtattgt

SEQ ID NO: 383859 - DNA, 122 bp, Homo sapiens
gcagcagctttctctttcccagttcaaatacctttctgatgccaacatcattcctgcctgcggattctgtaaaaacactctatatctttagaataagtgctctcatcttttaatatcaccct

SEQ ID NO: 383860 - DNA, 122 bp, Homo sapiens
gtgcagcgttcctggcaccacagtatttgccctaccacagagggtcaacctggattatcccgagttcttccaactctgcgcttcctcccaggttggtgtttcatgagtaagtctgagatcaa

SEQ ID NO: 383861 - DNA, 122 bp, Homo sapiens
ggaaaaaaaaaccagctctcttcctaggagcaggcttgatgggactggctttctcctctgcgcagtttgatttttaaggtggaatgctaagaatctttgtgaaggtagtattaactcatgct

SEQ ID NO: 383862 - DNA, 122 bp, Homo sapiens
tttgtaaaaagcattctttctattatagaatccataaccacgctggttagccactgacagcggcggttagccaccgcacctcctctcacccccgaactaatctcgtttcctctatgggtgta

SEQ ID NO: 383863 - DNA, 122 bp, Homo sapiens
tgcatcactccagttgctgcctctgtcttcacatggcctttttccctctgtatgtgtctccgtatccctttcttctttctcttataaaaacaccagtacagccaggtgcggtggcttacgcc

SEQ ID NO: 383864 - DNA, 122 bp, Homo sapiens
tgtggtgcctcacgtctgtaataccagcaatattgggtggatcacctgaggtcaggagttcgaggccagcctggctaacatggcgaaaccctgtttctactaaaaatacaaaaaattagcca

SEQ ID NO: 383865 - DNA, 122 bp, Homo sapiens
gtctacttaatctgcatttcctgatctgctttggctggcaatcaaaagctgtatctatttcggagattgcgcaataagacttttaatgacaagttaaaagacaaagggttggtgggattgaa

SEQ ID NO: 383866 - DNA, 122 bp, Homo sapiens
cattccttctttcacgctccagctcgctctttttactcctacttccctttctccctctcccggatcaagcgttaatctgcgaatctctgaccgcaaaagaagaaaaaaaaaaaaggtgggtg

SEQ ID NO: 383867 - DNA, 122 bp, Homo sapiens
tgaaacaaagtttgtgcacatggagcagcagaaagcaaaggtgtccctatctcagccatccgggtggacaatctgtggtgggttggcatcaccaacattcctttttttttcttttagaccaa

SEQ ID NO: 383868 - DNA, 122 bp, Homo sapiens
atatgtcattggggcgccgcgctggcagcttttcatggctctaatttcccgaggactctgcgccagcgtgatctacagtcttcctgacatttcaccttcctctgctgaaaaattcatcccag

SEQ ID NO: 383869 - DNA, 122 bp, Homo sapiens
ggaagagacataacagaaaacgcaggcctccactcagcaaaaacaagccacgcgcgaagtcgaggtacaaggcaagggaaggccagaaacgaggcaacccgtgcacagaccgggcttggtca

SEQ ID NO: 383870 - DNA, 122 bp, Homo sapiens
ggtcagctccagtatttgagacaaaggagcactgtctgattatggtcaagtgggggtggacggtcacacaggggggcagtcccccacttacatgttgctctctctacatatatctatctcca

SEQ ID NO: 383871 - DNA, 122 bp, Homo sapiens
actgggccggggcctgggtgcccccgcgggtcagcccccgacgtttccctgttcttcaggcgtctgcaaccctcctgggttgcggcgtctgctcgcccttctgcgtccgcagctcggtcccc

SEQ ID NO: 383872 - DNA, 122 bp, Homo sapiens
ggagtttcttctgggagtctgcttctggctcccttgacttcagcagggcttggcgtcagacggaaggattttaagtcaaaacacacacggctacagggaatacgatgagtcatgttccgccg

SEQ ID NO: 383873 - DNA, 122 bp, Homo sapiens
tttgatggattttccttaatcacctggaccctcacagctctgccactttccttgctagttcggattagtttgatgtttatgtgtctgtaataatggaaacaataaaaaccaccaacctccct

SEQ ID NO: 383874 - DNA, 122 bp, Homo sapiens
gcccacccacgcagggatgagaccaggccctgggttctgggctccaccagtttctggtgtcgccccacggcgccccctggcgggcgggctgagggactggggcactaaaggagggggtggag

SEQ ID NO: 383875 - DNA, 122 bp, Homo sapiens
cgcaccgccgagaccaataacggaccgggagggttacggcgagtgcgcagagggctccagcgcactcccggccctcctcctttagctgtgggcggggctcaggggcgcgtgcgtcctgccct

SEQ ID NO: 383876 - DNA, 122 bp, Homo sapiens
gcgtctctagactggggtggagccgggaagggtcgtgcgtgagtgggggacagtgtgtctcgctcaaccgctgtccgcgcagctgggcccagatattgtgccccaccccggaattgcgtgag

SEQ ID NO: 383877 - DNA, 122 bp, Homo sapiens
ttctgggcttactgggctctgctctgaatcacaggtgctcaccccttatcccagagatatcgacagaaaggccataagacacacacgcctcacccatcaacattggcgtctaccatccccac

SEQ ID NO: 383878 - DNA, 122 bp, Homo sapiens
atccgcaccgcgggagcagctcggaggggcggccctggggggcaagggcgggccgcggggcggcgacgggggcggggccaggccgagctgggggctggggccgcagccgctcagccggagcg

SEQ ID NO: 383879 - DNA, 122 bp, Homo sapiens
agttcgcatcagccccttccgggccggcgggtgcctcactagcgacagtccgcaggaccgcgtcgccgagcgccctaggttccgcctcctggcagtcttgccgccaattccccagttgagcg

SEQ ID NO: 383880 - DNA, 122 bp, Homo sapiens
tgggaaccaggggccctggacgtctgtgcacacctccggccccacagccaaagctgagctcggccccttcgccaagtctgtccctcccgccgcctgcccactgcaggacatggtgtcgccgc

SEQ ID NO: 383881 - DNA, 122 bp, Homo sapiens
ttcccccggggaggaaaggggaagtgggctgaaggctgttgggctggtaaacagcggcaccgacacccaaagggagacctgaagctctctatcatccctgggggattctcccaccccttctc

SEQ ID NO: 383882 - DNA, 122 bp, Homo sapiens
tgctcaggggaaacacctctcatctatgagcctccaccgtgctcaggggaaacaacctctcgttcttgagcctccaccgtgctcaggggaaacacgtctcatctatgagtctccactgtgct

SEQ ID NO: 383883 - DNA, 122 bp, Homo sapiens
ggggcagcccccgcccggccagccaccccgtccgggaggtggggggcgcctccgcccggccgccaccccgtccgggaggtggggggcacctctgcccagccgccccttctgggaagtgagga

SEQ ID NO: 383884 - DNA, 122 bp, Homo sapiens
aaacacctccccaaagaaaaccgtgactgtctttctcagccctgggtacccatgctgccccgcaggcctcccttcaatctgtgcttgcacaattctagatgggcgttctccagcggggtctg

SEQ ID NO: 383885 - DNA, 122 bp, Homo sapiens
tggggattctggcctgtgtggtaggaagggatctcccttgctcccatgttgctggctgtccgtacatcaccctgtcccctgcaggagggggctacaggccatctccctcctgtaggcctctg

SEQ ID NO: 383886 - DNA, 122 bp, Homo sapiens
caaaactcaggggctaggagaggcgtggtgtgagcctttggccccagagtctttccaactcgtccgttggacctgccccaagttatctgaactcaatgaacttcagttgttcaaacagaaaa

SEQ ID NO: 383887 - DNA, 122 bp, Homo sapiens
agtagctgggatcacaggtgcgtgcctctatgcctggatacttttttagaaatttcttgccgagatggggtttcaccacgttgcacaggctggtcttgaactcttgggctcaaagaatcctc

SEQ ID NO: 383888 - DNA, 122 bp, Homo sapiens
gctttttaatgctctttttgtggaatctgcaagtggatatttggatagctttcaggatttcgttggaaacgggattacaaacaaaatgtagacagcagcattctcagaaacttctttgtgat

SEQ ID NO: 383889 - DNA, 122 bp, Homo sapiens
ccaggtcgtcacacgggaaggcctgggctaaggagctgattaaacccagttacgattgaccgggcgcggtggctcccgcctggaatcccagcagtttgggaggccaagacgagtgggtcacc

SEQ ID NO: 383890 - DNA, 122 bp, Homo sapiens
tgaggctcattaggacggcagtctccacggtcctgtgcagacagccagggatgcgggcgccgttcagtggcttggaggcggagtaccgctcccatatgcgcatcaggcctggcatcttgttc

SEQ ID NO: 383891 - DNA, 122 bp, Homo sapiens
ggcgccggagggggaactctgaccatgattggttcctcctaaccaggtgaccgcaggtcgcgttccggttggcaggcaccggccagggccagcggccttcagtcggtaggcggcggcggaag

SEQ ID NO: 383892 - DNA, 122 bp, Homo sapiens
ttccctgcagggagccacccttttcctctctcagccctgtggtttgcaggcacctcccctcgatgccagtggtgggccctggctggtcaatcagcatctgccatacccttggccccagtgct

SEQ ID NO: 383893 - DNA, 122 bp, Homo sapiens
gcctgacttggggtgacaatggcttggaggggtgggtgagtcaagggtcaaatgagtgcccgtgagtcatgatgcctgccttgtacaattgataactgaacatcggtgagttagggccccag

SEQ ID NO: 383894 - DNA, 122 bp, Homo sapiens
tttgaaaattaaccaaaacatagtgttatacccaaaaggaactaggcagaggaaggacagcgtgttcccagttgatatgtcctttgacctctgacccctgacccgttctctctgctctccag

SEQ ID NO: 383895 - DNA, 122 bp, Homo sapiens
gtcagactcgccctattactgcgtgaacgactgggtttttttttttttaacctccagaaacggaagcctcagcctatcagcgatgcctaagtcccagtcacgataaccaaacggcgtcgccc

SEQ ID NO: 383896 - DNA, 122 bp, Homo sapiens
tggtagctattattcgtgcgtgtcttctacatgaagaaagtcagtctgtgagttctgtgacggcatcctatggaaacggttgggtggatttgcgcccaagttggagagtatggttagcgtga

SEQ ID NO: 383897 - DNA, 122 bp, Homo sapiens
ctgcagtgtcatcccgctgacaaacacgggcgcacctctcatcccagtgggctcctgacccgtgtaaaaaggctcccacagacaggacacgggccatgccgggcctcaccaatggtggtgta

SEQ ID NO: 383898 - DNA, 122 bp, Homo sapiens
ggacgcctggtagttcctcagctggtggatccgctgctgctccagcaggagggcttgctgcggggaagaaacggccgtgttggcggttgcggatgtctcccgcccctgggctgcagggctag

SEQ ID NO: 383899 - DNA, 122 bp, Homo sapiens
tacttgggaggctgaggcaggagaatcacttgtacctgggaggcggaggctgcagtgagccgagatcacaccactgcattccagactgtgcgacaaaacgagacctcatctcaaaaacaaac

SEQ ID NO: 383900 - DNA, 122 bp, Homo sapiens
atgtgagaagagatgggattcttcaatcaaggccacaagcgggaaatcagtctgcaggaccgatgccagcaggctcacgcaccgagaacggctactccgcccagctgagaagcgcggggccc

SEQ ID NO: 383901 - DNA, 122 bp, Homo sapiens
tcatgcccctcgtccctggagcacgctcttccattcagcctctgacgcctttcccctctccgtctcccacaagcccctgcagctctcacaaaatgagcccagcgggctcctgcctcttggcc

SEQ ID NO: 383902 - DNA, 122 bp, Homo sapiens
cggggcctggtctctctccctgttgatcttctgaaaagattgttatttgagagcctttgtcgctgacatcagagcctgctctttggttcagcccacggccaagactcagggaggggcaagga

SEQ ID NO: 383903 - DNA, 122 bp, Homo sapiens
tccccttgggctgccgggacaagatgggggatgggaaaccaggacacactttccctagagcgcctgccggcagggatggggctccacgggcaccacagggttaacagcccatcaggcagggg

SEQ ID NO: 383904 - DNA, 122 bp, Homo sapiens
ttccaggtgctacagctcgagagggcagagccacagtccctggacggcgtggactgaggccggttccttcctggaggcctcctgtcctcggggaccccagcacctcatcatcagcattgctg

SEQ ID NO: 383905 - DNA, 122 bp, Homo sapiens
gtatccttataagaagaggagatcaggacacagatacacaaagggtgtgtgaaggtagcacgtttaccagaagaacatggccatctacaagccaaagagagagacctcacaagaaacaatac

SEQ ID NO: 383906 - DNA, 122 bp, Homo sapiens
ttgacaagccctgagatttctgaggggaattcacataaatgggatcaggtcattcatttacgttgtgtgcaaatatgatttaaagatacaacctttgcagagagcatgctttcctaagggta

SEQ ID NO: 383907 - DNA, 122 bp, Homo sapiens
aaatttcacttccattgagaaatgtcagtcccacactgggctcggtgtggacgtaaacatcgcaggtacctgcactggaatccaacaagcagctgtctacttggaccatttcaataaggccg

SEQ ID NO: 383908 - DNA, 122 bp, Homo sapiens
ggggaccggacctgcacaggccgcctatggcgggcggcgggtgggaccgcgagttacagccggccaactggggccagccaggagcctgagggtcggaagcccccaacacaagatgctgagct

SEQ ID NO: 383909 - DNA, 122 bp, Homo sapiens
agtaactgagatgtttcttaccaataagcactttaacataaaacagcagatttaatgacccggaaattaactcaactaactatgccttgatcttgtgaaattactgttggtatttgccctaa

SEQ ID NO: 383910 - DNA, 122 bp, Homo sapiens
tggctgattttggtattgcaaaagtcctggttagccactttccctccccctgagagcccacgtcctgaaatccccactcgggccccactcctgggtgccttgacaagcgacgtgaccactgc

SEQ ID NO: 383911 - DNA, 122 bp, Homo sapiens
tataaaatggcactttccagggaggtaccgggccccaaggtggaggctgtcgaggggacccgtttccaaggtccttcttcctagagtatgtgctgagggctgacacacacgtgcagtgtgag

SEQ ID NO: 383912 - DNA, 122 bp, Homo sapiens
gacgcacgcaggccgcggggcggggcggggctgggcggggcggggcggggcggggctgggcgggactggaaccggcacttggcaccccttacgccttacggtggccgctgcgcccagtcaca

SEQ ID NO: 383913 - DNA, 122 bp, Homo sapiens
tcaagggatggggaaagtgtggtgcacacgctccgtggtgacccccgcgagactggcctgcgcacagggacggcttcacgcgtgtgacagcaggggagcaggacctccgggccagacaagcc

SEQ ID NO: 383914 - DNA, 122 bp, Homo sapiens
catccaggttgtggtattttattagacactggggctgactgagacagctgggtcctccgccgagggtcccatcgggctgaaactgtccactggcagcatcctcactggggggctggactggg

SEQ ID NO: 383915 - DNA, 122 bp, Homo sapiens
tctccttcccaggagcttcggagccgtgaggaggagctgctgcgggcggcacaggagcagcgcttccaggaggagcagctgcggcggcgggagcaggagctggcagaacgtgagatggacat

SEQ ID NO: 383916 - DNA, 122 bp, Homo sapiens
tttcccgaagctgtggggctgcagccaccccttccacaccaccctggataacagcggagacgtaagaaaggagcagaggccaggagtgtggggcagctaaggtttatttcaagggcaagggc

SEQ ID NO: 383917 - DNA, 122 bp, Homo sapiens
cgggcgcggtaaagaagtttagagatctccgaagtcgctatcgacagtgttactctgaggcggaggagaattaatcagcggtctcatcaatgctccagaaatcatgctgggtgatagataac

SEQ ID NO: 383918 - DNA, 122 bp, Homo sapiens
ataaagggggacaggtagacctgaaaattatccaagtgctggcccgagcccctccttcatcgccatgccccaaaagaagttatggcttgcaagttcagcttccctctccagaactatgggtg

SEQ ID NO: 383919 - DNA, 122 bp, Homo sapiens
gtgagacagccctggggtggtcactagaaatctccttcagaggctgggtgcggtggctcacgcctgtaatcccagcactttgggaggccaaggcgggcaggtacctgaggtcaggagttcga

SEQ ID NO: 383920 - DNA, 122 bp, Homo sapiens
gcaggggtgaaggagggcagccggggcccaggcgtggagggcgggcgcgtttgagagaggcgcaggcggcgggatcccggcggacggcagaagactcaggaaccagtccagaggcgccgagg

SEQ ID NO: 383921 - DNA, 122 bp, Homo sapiens
tctcttctccccgaggacgaaatcagatccaagaactaaagttggaagaaatcaggtcaccgggaggaagccacacatctgacgtgcacggctctctgtataacaacagcgtcggcggctac

SEQ ID NO: 383922 - DNA, 122 bp, Homo sapiens
ttcactgctcactctgccacgatcaatctctgttgtaaattttcctcccagagcacgtgacgatgcacttcttgactatatatcccaactgcagcagcggagttgtcagagcgcagagccgg

SEQ ID NO: 383923 - DNA, 122 bp, Homo sapiens
cccgcactccgcccccgaggcgggtcgggggaaatagccacccccgagactttcggaacccgggcgtcagggctgccagcgcgttcccagaaccctggcgtccacccccaccctgtcctgtc

SEQ ID NO: 383924 - DNA, 122 bp, Homo sapiens
cggaaaggggactgcacgacttttccctgaagcccacctgacaatcgctgtatcaggcagcgagcgttgcctgccaccttcacaccctcccggtgtgcgcttgaagtcgctttgagattgaa

SEQ ID NO: 383925 - DNA, 122 bp, Homo sapiens
ctcctgccttgcccgcgaggccagctcaaaagcctttatgcccgggccgcccgccaggggcgcccttcccagcccgcgctcgcccgctctgcctcgcccacgctcgcccccacccctgccct

SEQ ID NO: 383926 - DNA, 122 bp, Homo sapiens
ccgtgcgtcatccggaaggctgccataagcctgcgtttcgcagagctgcgctgaggctcccgtgtcgcggccgtccggccggcgcgctgatgtggctgcaaacctgggtatcagatcagccg

SEQ ID NO: 383927 - DNA, 122 bp, Homo sapiens
gggagctgggacctcactagccactgataacttccagcgccacccgggtgacagaaaaggcgcagaaatggaaagtgaaaggttcagggctagccaggcaggcccctccttttctccccgca

SEQ ID NO: 383928 - DNA, 122 bp, Homo sapiens
tccgccggattatgctctggaaacacactttctgctcccagcctccgagccattgctccgcgcctcgagactgaactgttgttgccctgcgtgcgtttaggattatggccgccgtggtgtct

SEQ ID NO: 383929 - DNA, 122 bp, Homo sapiens
cctccccctcaattccttgtcccctctgaaagagtggtagatacagtctgaacaccaaggcgttgtattttgtgctcagttaattgatttacaatgattgccacaccgttgtgttctaaggt

SEQ ID NO: 383930 - DNA, 122 bp, Homo sapiens
ggtgccacggaccgacacagttcgctctagcatctgacgctcggactccgcgccctcagccggatcccagagcccttccattcgccaaccgcccactgcaaggcatgagccgcacgcgggag

SEQ ID NO: 383931 - DNA, 122 bp, Homo sapiens
acaagtagtgacatcgtgaagtgccctagcctgttgtgacacacggtgtggggatgaacacgccgccctagcccgtgacacacggcgtggggatgaacacgccacataatgcactggtgacc

SEQ ID NO: 383932 - DNA, 122 bp, Homo sapiens
gcagcagccccgcgatctccttgtggccgtgctcacaggcgcacatgagggccgtggagccgtcatcatcttgcacgttgacatctgcctcacaggccagcagggctttgacaacgtccacc

SEQ ID NO: 383933 - DNA, 122 bp, Homo sapiens
aacaaaaaaacagctcggcaccaacacgctcaccctcaaatggaccccgggacaagggcacgtctctggtgccacttgcaaccctagcgcttttgcgacactcaggacttgctgaggcaggt

SEQ ID NO: 383934 - DNA, 122 bp, Homo sapiens
gagaccagaatgcaacagcagcccccatgcatgccctctggctggtttatgctcttcctgcgcagtagggctgtctatgtccacagctttatgccctgtgccctctaaaaccctgagtcagg

SEQ ID NO: 383935 - DNA, 122 bp, Homo sapiens
gacctcacaggcaggcagcccagtcaaagcctcctctctcccatgggtccttgagcaatccgagccccttcctgaggcttcacagtggccaaaagaacattctgtgatgatagaggcatgcc

SEQ ID NO: 383936 - DNA, 122 bp, Homo sapiens
ataaacaccttggttagctggttctctctgacccactctcagctaccacacaggctgctccgctgtaggctcagtcccgttttaggtgagttgccccctggtcgcttcaggtcatggcagga

SEQ ID NO: 383937 - DNA, 122 bp, Homo sapiens
taaataatttgaaggagttgtatgttaaaaatccagcaataggccaggcgcggtggctcacgcctgtaatcccagcactttgggaggccgaggcgggtggatcatgaggtcaggagatcgag

SEQ ID NO: 383938 - DNA, 122 bp, Homo sapiens
catgctcagcttccacctgctggcatctgtgtgcccagcacacaaagcctgggcaacgggcgactcctgtgagcagagcttcaccctcttcccctctcactaccccccaccccacctgcagc

SEQ ID NO: 383939 - DNA, 122 bp, Homo sapiens
ctctttgtccatccaatgcctttgctgcaagagctctctgtcacctttgtgcctcatccacggccctctgactatcctcacaaggtctctctgggctgtaaactaggatgctgctccaacat

SEQ ID NO: 383940 - DNA, 122 bp, Homo sapiens
tgccctacaaacccgtcctactgagccacagatgattatgctgaggattgtcaccttcctcgtggacagcaacccacagactggccagcgacctattagaaagcatggcatgaagagatggg

SEQ ID NO: 383941 - DNA, 122 bp, Homo sapiens
ggcccatgttgcagggggccgtggagcccatgcagatcgacgtggacccccaggaagacccgcagaatgcacctgacgtcaactacgtggtggagaaccccagcctggtacggagcccagtg

SEQ ID NO: 383942 - DNA, 122 bp, Homo sapiens
tttcctgaaattatctgcagtgaaaagctcctgtgtgtgtgggtggggtccggttggccgcgccccgcccccaccgccgtgcgctcgctccctccctccctcccacgctccctgccgccagc

SEQ ID NO: 383943 - DNA, 122 bp, Homo sapiens
aaatgtaaaacccaaaactataaaaccttggaagacaacctaggcaataccattcaggtacgagcaaatatttcatgaaaaagatgccaaaagcaattgcaacaaaagcttctgcacaacaa

SEQ ID NO: 383944 - DNA, 122 bp, Homo sapiens
cacagaaggccgccatgttgagcgagggcaccgatgccgcaacctgacaggcaatgacgccgttctttccgccatctttactaagggcagtcgatttccggttgccttacatagagccaggc

SEQ ID NO: 383945 - DNA, 122 bp, Homo sapiens
acaccgctgattgcattaacttgtattcataccctgtaggatctcagaaaagcaaaggcccgggctgagcttagaggtgacaaaagaacagcaagagcttgcagaccgcacaagaaccacct

SEQ ID NO: 383946 - DNA, 122 bp, Homo sapiens
cctgggctggaaccggccagggtttcatccagctcctcccccaaaacacgccccccaaatcggagccagaggagagcccaaccacagaggacttccactcaatgagggcaacccctgagtaa

SEQ ID NO: 383947 - DNA, 122 bp, Homo sapiens
gcccgaggacactgcctaggccttgtgtcctgattgggactcagcgtctcccctagacgtcgccacttcagtgggacctagggttgtcagtcacagagaccacccaggcaggatgtgtgttt

SEQ ID NO: 383948 - DNA, 122 bp, Homo sapiens
ggattgtggagcatgtttaagtgctgcttttagaagtttgacatttggggaaaaaaagttcgacgtttgggaggtaatgagaagttaccaaggtctaatagagtagtgtgcagaatgatttg

SEQ ID NO: 383949 - DNA, 122 bp, Homo sapiens
tgcgataaacacaggagtacagaaatacattagctccaaaggtcatgcctccaatcactccgttccctcggggctgccaagtacctcaatccagggacatagcaaagttgagacagttcaga

SEQ ID NO: 383950 - DNA, 122 bp, Homo sapiens
gtgggcgtggcctggtggcgtgggcgcggggcgggggtgcggggggcgtgtccgcccgggcgcggcccagtgaggcggtggccgagtcctctggcctcagacgcgtaggctggcagcccgct

SEQ ID NO: 383951 - DNA, 122 bp, Homo sapiens
ctttggtgtccaatctcctctcatccccttaaatgccgctgtcatgcaaggcttagtcttcgagccacaggaaagcgccccgcatgccttaatccctccgtactcagccctctttttgcagg

SEQ ID NO: 383952 - DNA, 122 bp, Homo sapiens
actgcctcaggcactcttccaggaatgtcttccatctcccattgaggacaggggccttgccgaccccctagactgccccacctacgtgtcttagtttatgccattttccccgcctgaaacac

SEQ ID NO: 383953 - DNA, 122 bp, Homo sapiens
tcccgctcgcccttccccagcccccgccgctcgccctcgcccttcttgagtccccacacccgctccaacaccagtaaaacttgctgtctggccaagctcttggacactacggcttctcctgg

SEQ ID NO: 383954 - DNA, 122 bp, Homo sapiens
ctttcatctccaaaccctccggccatgctgcgccccggctccccgctgattcctgtagaccggcagctagggtcaaaggcctgggagaaaggaggcattcctagccctcctccaccccctgg

SEQ ID NO: 383955 - DNA, 122 bp, Homo sapiens
atttgggggctgtttggtttgctgttgctatgaagcaagcaaggaaaacatttgggaaatcgatccttgaggggaggaattttcactacatgcaggacaagtgagacctcagggaggatggg

SEQ ID NO: 383956 - DNA, 122 bp, Homo sapiens
catggcagaacgcaaaagagaaataaggaccttcttcacaaggggacaggagagagacagcgaggaagggctacaccttaaaaccatcagctctcatgagaactcactatcatgagaacagc

SEQ ID NO: 383957 - DNA, 122 bp, Homo sapiens
ggcggcgaaggaagcgcccgaacccgctccatagcccgggcgctgggggttggaagcaaacgcacaagaagtttgttctgggaaggctccggtagcgaaaaccgaacttgaggctggatatt

SEQ ID NO: 383958 - DNA, 122 bp, Homo sapiens
ttcgccgaactctttctcgcttcctgccaggttgcctcatgtctctctctctctgagctgcgaaccccctcctcccagccctgacgtgagcgcctacaccagccgccgccgcagctgccgag

SEQ ID NO: 383959 - DNA, 122 bp, Homo sapiens
cgtctatagtccagatttagtctttgtgcactgcctaatgcacagtccatatagatcatacgttctttttccttttacagtcttgtcttttttaggctagagaagaatcttaacacttgcaa

SEQ ID NO: 383960 - DNA, 122 bp, Homo sapiens
ttaatctctatatttgagtacagatacacagtcatacgccttggcctcctccgtgcccttcgcagagccccggccagagaacctgtccatcccctcctgcctctgatgtccaggctgcataa

SEQ ID NO: 383961 - DNA, 122 bp, Homo sapiens
tgaactcctgaagtcaagtgatctgcccaccacagcctcccagagcgttggtattataggcgtgagtcaccgcccccaaggagcttcacgaatagctgggattacaggcatgcgctaccaca

SEQ ID NO: 383962 - DNA, 122 bp, Homo sapiens
gtcagcacccagagggcgccgcgtgcaggctgggccagtgccaggggtcgcgacagcgcacgcaaagagtgcctgtgatgctgctggtggtttttgtaaattgtgacacagccctgcccccc

SEQ ID NO: 383963 - DNA, 122 bp, Homo sapiens
cacagtcaggtcgccagttccccagtagcgtcctagcagctcaggcggtggcacgtcagtcgtcaggtctcctgcatgtctggagcagctccttgggcttcttcgtcttccgtgacactgac

SEQ ID NO: 383964 - DNA, 122 bp, Homo sapiens
tcctgtttctgcgctttttaaactagccgataccgagagccagccaactctagctaaaaacgaaactcaagccaggcggggtggcgcgcgcctgtagttccagatactcaggaaggtgaagg

SEQ ID NO: 383965 - DNA, 122 bp, Homo sapiens
gggccgtggcggaaccggaagccgggaacctgctgtcggcgtgggcggtggcggtgccagcgcgcgtgcgtcgaacggctagggcgggtggctagaattctgcggtgaatcagaaaagctgt

SEQ ID NO: 383966 - DNA, 122 bp, Homo sapiens
cagaagagggaaaagttttactgtgtgttggctaaggaccattttaagtccttcagtgaccgattaccacatgagaacacaagagggcgctctaactaatgagttccgcggccgagaaaact

SEQ ID NO: 383967 - DNA, 122 bp, Homo sapiens
gcgactatttccggagtcagacttgcctggggctcctttgggctccatacctcgggcggccgctatgcccagggcttggatcctaggaaatgccaggccgtccaccctctcggggcccagaa

SEQ ID NO: 383968 - DNA, 122 bp, Homo sapiens
tgctccggagcttcttcaccgacggggtgagagctgcaagtgtgtgtgcgtgcgcaggagcgagggtgtggggagagagggtgtcagggaggtggggccacagcctcggcatgggggttcct

SEQ ID NO: 383969 - DNA, 122 bp, Homo sapiens
agagaacattcaccagctgtaactgagagatctaacagaagctcaacttgtgttaatcagcgtatcgttggtattcctataggtccctaccacttcagagttcaaatacgcacttctgaatg

SEQ ID NO: 383970 - DNA, 122 bp, Homo sapiens
cacgaaatgaattgcaagaacatagcactgaaaaaccccaccctctccaagtgcagacgacgtgcacgcctggccgctggaaaccctgctcctcgcctgcagataagccacgtgggtctcag

SEQ ID NO: 383971 - DNA, 122 bp, Homo sapiens
tgtttgtgcacattttgacagaaaaagtatttcgttgcatatggatcagcaaccccttcgcggttctgcttgctcccctccccctcctcccgctgctccattcacctccatctcagatcccc

SEQ ID NO: 383972 - DNA, 122 bp, Homo sapiens
ccccggttggagagaggagcggaactcctggacaagccctgacaagccaagccaaaggtccgctccggcgcgggtgggtgagtgcgcgccgccccgcgggggcggggagagagcctgcagcc

SEQ ID NO: 383973 - DNA, 122 bp, Homo sapiens
tcagaaagagctgggcggcaagattcacacaagtaagcatgttgcagactccccagcacacgccctctctggcttgtgctcatatgaacatactgtcaccctcgtgcagatgtgaagatgtg

SEQ ID NO: 383974 - DNA, 122 bp, Homo sapiens
ccttctttgatggtatttcctatatgtacacgagtatgggccaatgacttgaaatgacaccgtatgttttataagcatgttatacattttgatgttaaataatcttaggaatatcagtttta

SEQ ID NO: 383975 - DNA, 122 bp, Homo sapiens
cccaggaccccgagaaccaggcgctggcgaggttttactgctacactgagaggaccattgcgaagcggctcgtcttgcggcggtgagacagccacggggcgggcggcgggcgggacgcggga

SEQ ID NO: 383976 - DNA, 122 bp, Homo sapiens
ccccgccccccgaggcggaagcggagtgccaggctactcctcccgcagtgtgggtggttccgaggctgactaccctgcggcggcgcggctcgcagtccttctcagcatggaccgcacttgtg

SEQ ID NO: 383977 - DNA, 122 bp, Homo sapiens
actttaaagttggcatttgattcacgaactagaggtctgtctttctccaatggagcatgtcgttcactcccgacatttgagggaggttgcagtgctggtaaagtaatgtttcttctagaagg

SEQ ID NO: 383978 - DNA, 122 bp, Homo sapiens
ggtctgtgctgtgtccccaccgggagtggctggttggtgggaggtgctgttttctgcacccgggggccccccgggtgtggacgaggttggtggcctcagagttgtgccagagggtggatgag

SEQ ID NO: 383979 - DNA, 122 bp, Homo sapiens
gccgtagaagcatgtcacacagccctgcaccgcaggagggtgcaatcacgggaatgagtacggagcacagtgtggaagacgtgggcagacatacagagtagtagcactgggacacaactgag

SEQ ID NO: 383980 - DNA, 122 bp, Homo sapiens
tgactgcggccaatggggagccaggcttgaggactcgcgagatgacacctgccggtgggacgcgggcttgaggactcacgaggcgatggcggctggtggggagcatggcggcccttgctagg

SEQ ID NO: 383981 - DNA, 122 bp, Homo sapiens
aaaagggtcactgcccttgcaaggaaaatgcgatcccagcacggcctggcgtgttcctggcggcagaaaggtaaaggaaagcagcagaaacaggccagcgcagtggggtgcaagctggtaga

SEQ ID NO: 383982 - DNA, 122 bp, Homo sapiens
actggccaagttctctttcagtggagtagcaatgtgaaataaaacgcaatacaatggctccgaaggattgtttgtaaggataaataggacaggagacagactctcatgtgctatgtttttcc

SEQ ID NO: 383983 - DNA, 122 bp, Homo sapiens
aggcggcggcggcagcggcggcggttggtcaggggcgtgttggccccgcacagattgagccgagttgtcgccccgctgggagaagtgaccctcctgcgcctggtgagtacttccctgtttgt

SEQ ID NO: 383984 - DNA, 122 bp, Homo sapiens
caaaagcaagcatacttactggtttgtcatcaaaggcttgggaagacagctctgctgagacgcatgctctggctggacaggttagggctttgggggcccttctggaagtctgccagtgtcct

SEQ ID NO: 383985 - DNA, 122 bp, Homo sapiens
agcccatgatttcctggaagagccctagagctttgctttttctctcctgcagcacttaaccgaaaccagttttgcaatcaattcctgttcaaaggccaccctactcttcctatccgtctttc

SEQ ID NO: 383986 - DNA, 122 bp, Homo sapiens
aggaaatagtcaaacatgaactaggaagccaggtgagtctcctttctccagtggaagagccgggaccttccccctgcacccccgacatccagggacggggtgtgaggaagacgctgcctccc

SEQ ID NO: 383987 - DNA, 122 bp, Homo sapiens
ctgagtaagccctgctgcctcagcttctcgagtacctggaactataagtgtgcaccaccacgcctggctaattttttttttttttttttttttttttttttgagacagagtctcgctctgtc

SEQ ID NO: 383988 - DNA, 122 bp, Homo sapiens
cctggaggccgataataaagcaggaggagggagatggatggacgggagggcggggcgccgcgtggtgccataaagcccagctggaaggggcctgtctcgggagtgtccagccccaggagccg

SEQ ID NO: 383989 - DNA, 122 bp, Homo sapiens
tccctcttgaatggcccttggaagctgagtatctggattcaccctccctagggaatttcccgattgtcttgcaggcttacacactcatcaagatgacaaaaataatgacagtaacacttatg

SEQ ID NO: 383990 - DNA, 122 bp, Homo sapiens
acaacacttgccattttaacaattttgaagtgcaccgttcagtgacaataaccacattcacgctgtggtaccgcggacacctcttccatctccagaaccttccaccttcttcttccccggaa

SEQ ID NO: 383991 - DNA, 122 bp, Homo sapiens
tacaagataagccaaagcaagaagcacagacaccatgcctggcagaaaagcggccgtttgcggaactattttatgtaacacaaaaccacgttttcggtccgtaaggcagggtctccacctca

SEQ ID NO: 383992 - DNA, 122 bp, Homo sapiens
tttctggctgcctccttcagctttctctggagtcggtgcatagataaggtctggggggcacgtgccactgaccggaggtgcaggaaaagctccccctggtcctcggcctccataggccctct

SEQ ID NO: 383993 - DNA, 122 bp, Homo sapiens
ggcgctcagcctggaccacagcggaggtgtgcaggactcagcgaggcccccaagcttgtacgcctccttcctccgccggcttctctgtctgcctcccactgtccctattctgcccttcacag

SEQ ID NO: 383994 - DNA, 122 bp, Homo sapiens
ggaagccgagacggctgaggccatgggcagtgccagaggaggtgctgccaacagctggagcgaggtgagggctcttggtggggtctcggggggaacgagtggaatcccgaagccggccccat

SEQ ID NO: 383995 - DNA, 122 bp, Homo sapiens
atgagctctgatggttttataagtgtttgacagttcttctttcactctggtctctcctgccgccttgtgaagaaagtgcttgcttccccttcgccttccggcatgattgtaagtttcctgag

SEQ ID NO: 383996 - DNA, 122 bp, Homo sapiens
catatttaagaggatggatttaaattgtgtgagaccaaagcatagagactagataagaggcgatcaaaatatttcaaaaagaaataatgaagatccaatgaaggaagtggaaattaaaatag

SEQ ID NO: 383997 - DNA, 122 bp, Homo sapiens
tgggacttctggggggattaactttcagtcacatacgttcaggactgtgcgtatgcgtgtcgggagacgcgtgaaccaaagaagccacagagcccgaaaaagacctgcaacaggaggtagag

SEQ ID NO: 383998 - DNA, 122 bp, Homo sapiens
gcagcagtggtgtactcaggatcagggtaacccccagtctaaggagggtctccactggtgcgatggaagcataaaggaggaacatcaaactcagacctagaacggaactgggggcaagaaag

SEQ ID NO: 383999 - DNA, 122 bp, Homo sapiens
aacttcgtaacccagtttgctcaacttatggaagcattggttgtgcaatgtgcattcgggcgttgttgtggagaagaactgggcccctttctgttgaccgatgcgaccgtagacctttcagt

SEQ ID NO: 384000 - DNA, 122 bp, Homo sapiens
tcctaaggaccaacgttaaacagatctttgtgccaagttacagcttctacagtctctcaccgccgggccacatcatctaccaaagataaagtcagattttacagaagactgtaggcgacaaa

SEQ ID NO: 384001 - DNA, 122 bp, Homo sapiens
ggaagtttgaaaagagaggcgaaggcgggaaccggggctgcgcgaggcgttcgcaggctgcgcgggttccgggtgggcacgggatcggcgggccccgcactcaccgcggctggccggcgcct

SEQ ID NO: 384002 - DNA, 122 bp, Homo sapiens
ggattaccctttgtcttcctctgtggtctctatcttggggagagttcgtctgcccgatagcgcagggcaagggcaggcccagggagaggccgatcctgcaactcaggaaataaaggtcgctt

SEQ ID NO: 384003 - DNA, 122 bp, Homo sapiens
cggaggagtctgctgaacgccgaacaaaaggatgtggccgtcgtctcttaaacaaatacgcgaatcccaagccatgcacatttggaaggcatgtgtatgtgtgtgaaggagaaaggccaccg

SEQ ID NO: 384004 - DNA, 122 bp, Homo sapiens
tgagtcaaagaaggccatcatccgggggtcttcctggaccgactggttggcgtagtcatgcgacaggccactcccactgttcagcacaaggctgatgtactcttcatgggtatagaggcagc

SEQ ID NO: 384005 - DNA, 122 bp, Homo sapiens
ggcctctgcatggccccggggggccaaagctgcgggaagagcagagtcaggctcaggaggcgcagcagcccgacggggctcccaggcaccgcgaggagagacgcaggcctgggtgcagaggc

SEQ ID NO: 384006 - DNA, 122 bp, Homo sapiens
ccgggactatgctaaagactagagtctcagacttggaatttcgaggaaggtgttccaaaacgctgcgctccctccggcgagggacaagagcaggagcctggcttgcctgggtccaaggacag

SEQ ID NO: 384007 - DNA, 122 bp, Homo sapiens
ggcttgcccctccgtggcaccatgtgcctcgtcatttccttcattgatcaggattgaaaacggtgcctcctggtcctggaggcatagagggctcggtatagaaatgccattcccctcacgcc

SEQ ID NO: 384008 - DNA, 122 bp, Homo sapiens
gggagagggcgcggtctcccagcctttgcgcagattgcggggcaccaggtggggccgaggcgacgccgaacgccggcaggccggaaaccgcgcagccccgctggacctcgctgattgccggc

SEQ ID NO: 384009 - DNA, 122 bp, Homo sapiens
gctgtgtgcagttttcggggatctatcagtggattcgctagagaaaggtatccagaggcccgctgctgcttactggccctgtccaaactggagctcaaacagaggaaacatgccatctttct

SEQ ID NO: 384010 - DNA, 122 bp, Homo sapiens
aggcatccccaaggagaaatactgaatagactcagaaggctctctgcatcagcagtgtaacgtcacacatacataaaaatgtgaaacatattgataaattagggcagaagttcttaattcag

SEQ ID NO: 384011 - DNA, 122 bp, Homo sapiens
gttttcctgaggtactgttccactcatcacagtagacatgggtccacacactgcctaccacggtctccaaagcatggagaccccaggttggcattgcctcagtcccacatgctattgagagt

SEQ ID NO: 384012 - DNA, 122 bp, Homo sapiens
gcaggcagaagaaggggaactcctgctgcccactcaggtgaggacgaccaggtgacagggcggctgtgggtgtacgagggaggagaggcggggaggcccccggtcctccccaccccctgtcc

SEQ ID NO: 384013 - DNA, 122 bp, Homo sapiens
ccgctcgctcggccgggagctgctctgtgcttttctctctgattctccagcgacaggacccggcgccgggcactgagcaccgccaccatggggaagggggtgagtgtccggcgcgcccgggg

SEQ ID NO: 384014 - DNA, 122 bp, Homo sapiens
gagtctcccaagagaaagtgggctgtagccaggcagcactcacgtgttgcacacggccatcgtctgacacgtctctcctgtgcagaactcggagatggtgctatactgcaggttgatgtggt

SEQ ID NO: 384015 - DNA, 122 bp, Homo sapiens
tggggattggggtccggggtctaggtcagggtacaccgtgtgggcaggaactcacgaggtcgggtcacaggcacgccaccagcagtcgtgcacactctccgggaaacgaggggcagtagtgt

SEQ ID NO: 384016 - DNA, 122 bp, Homo sapiens
cctgcagcgggagctgggcggtgagtgtgagcggcgcgagaaagctaaaggtgatgtggccgccctcaaccgacgcatccagctcgttgaggagaagttggacagggctcaggaaagactgg

SEQ ID NO: 384017 - DNA, 122 bp, Homo sapiens
ctccgctctggatggtgagcggagcacagccttcgaagtaagaactcagagggagctcggcgctcccgcagcgggtcccccacccaggcacgcccccggcccggccccgcccacagcactcc

SEQ ID NO: 384018 - DNA, 122 bp, Homo sapiens
agagtttcgctacatttcccaggatgctttgccaatagcgacgctattagtcgtcatcgacggaagtgcacctgactgagcggaagtaggagctctcagaggctaagaaggtggagaccgga

SEQ ID NO: 384019 - DNA, 122 bp, Homo sapiens
ctgaccgtggcgcaagagctccagcatgcattgtgcaagagcagaggggaggggcagagccgatggggcaagcagcacatcaggactcagcttcggcagagaaggaagtcagtcgggctgtc

SEQ ID NO: 384020 - DNA, 122 bp, Homo sapiens
ggcaacgcacgcccagcacaggtgaaggagctctctgaagccacgctgtggtccgagtcccgattctgaagcgggtcagattttgaatcctggccaaccagttaactagttggtttgttagc

SEQ ID NO: 384021 - DNA, 122 bp, Homo sapiens
agataccgagaaggagcagggatatttttcctccgagttcttatcaggggctctagttctcgctgttcctctggatcaggtggggaagaacctggctgctgtggaagttgatgctgtctgtc

SEQ ID NO: 384022 - DNA, 122 bp, Homo sapiens
cagcaatagttccttgaggcatttttaaatgcacaaacgcatacccatcttaggtgttctcgagggacacggattccctaagcaaacgtccttagggtcctgagttcagcagcaaactttcg

SEQ ID NO: 384023 - DNA, 122 bp, Homo sapiens
ccgccttggcacagagcagcgtctggcactgcggggagatggaggcgagccacgcgcacccgttcccttactggccgacccgcgaggcgccagcttgttctggagactcagtttccactgga

SEQ ID NO: 384024 - DNA, 122 bp, Homo sapiens
cactgtaaccagcatttgatgcaccacctctgtgagatccactttgtaaactcccacgtacgagtgagaacacgcgctgtttgtctttctccacctggtttatttcacttcacatcgtgacc

SEQ ID NO: 384025 - DNA, 122 bp, Homo sapiens
ggagggcccctgccgcgcggggggctgggtctggttgagtcgctgctttcccgagggcagcgcagggatccggggaagctgcggcagggagcgggcgccggcttcgtggctctgaggtgtaa

SEQ ID NO: 384026 - DNA, 122 bp, Homo sapiens
cgactgctgtcaacgtggtggaaaccagtggaacacaagggccttgcccccaccccagaccgcacatagaaactacactgactttgttcatgagcacaatgtgaagaatgcaggaatccgtc

SEQ ID NO: 384027 - DNA, 122 bp, Homo sapiens
cggtcgcacaccacgcagatgggcatctggtcctcctcgcagtacagcttcaggggctcgcggtgcttctcgcacacgcccatctcgccgccgggccccgacggccgctcggtgcgcagctg

SEQ ID NO: 384028 - DNA, 122 bp, Homo sapiens
agtttaggtttgggacgagtctggagtccaagcactcattgtattccgaggtctctgccccgactttgatcaatcctgtcgtttctgtgcttggaagccgccttgcagactgctaggcagga

SEQ ID NO: 384029 - DNA, 122 bp, Homo sapiens
taaaggcgcagcttcaaccagaagactagaagtcagccaggagctgggagtagtgtcacgcggggtgggggttcctatgagcatcactttacaaaaccaggagggacggaagtgcgaggggg

SEQ ID NO: 384030 - DNA, 122 bp, Homo sapiens
attctgaaatgctaaagaggcatgctggggagtgttcataacttctctctttctttgttccgatggtgtgctttcacacaatgctcacctcattatttcagacggtcactattttgtatgct

SEQ ID NO: 384031 - DNA, 122 bp, Homo sapiens
ctaaagtttcactttccacacaatgtgcttcccttccctctcctatcaagctggtgctgccgacatgtgtttagaatatggggttactgcttttaattgcagtcccactcatgccttttcaa

SEQ ID NO: 384032 - DNA, 122 bp, Homo sapiens
gtcgcggccgcaggctcttccggggcgggcctagcctgacgcaggaggaggggcggcccccgtcgcacaagaaccaatcacgactgtcgcttctacgtggctagcattgaccaataggagac

SEQ ID NO: 384033 - DNA, 122 bp, Homo sapiens
gcagtgctgtgaggggcacggcagacctccggcacaggcccaggttgggggccaggagggcgcgacgtggcgtctggacatggaaggggtcacactcccgtctcacttggtctcctgttgtc

SEQ ID NO: 384034 - DNA, 122 bp, Homo sapiens
gctttaggcagaaagtgctcgctctcacccagcacatctctctccttgtccctggagttgcgcgcttcgcggggccgatgtagaacttagggcgccttgccgtggttggcgcgccccgggtg

SEQ ID NO: 384035 - DNA, 122 bp, Homo sapiens
ggcgtcacaaaaggaacggcgcaccgctgacgtcatttacgctctccgcctcgggccaggcggggtttcgggactagggtttctgccgtgtaatacctcctcgaggcagaaaaattctactt

SEQ ID NO: 384036 - DNA, 122 bp, Homo sapiens
tccggtcccctcctgcccctgtactaaccctgaagctgctcgataagcgtccatgccatccgagagccgctggcatcaaacaccacatggccctgagggaaggaacatgtggagcaaggcaa

SEQ ID NO: 384037 - DNA, 122 bp, Homo sapiens
accctttaaagagcaggaggaggagtgtaccgagcacagggaataggagcataagacctgcggccggaaagaaagcttggtcatttggagaaattgacagaaaggtatagccacttgcgcga

SEQ ID NO: 384038 - DNA, 122 bp, Homo sapiens
tcattcctcagctacatcaccccaggctttagacagcattcaagaacaagagggcagaaacggtcacattctttgattgtatggaaaaggaaccagcagaattttccatctgggccaagaac

SEQ ID NO: 384039 - DNA, 122 bp, Homo sapiens
tggttaagggcacagatgaactgggacgtcgacaccagctggaactggaaaatcatcaggcggggagtggcctaccccgggaacttccttaactctgctcttgacctccatcccttagaagc

SEQ ID NO: 384040 - DNA, 122 bp, Homo sapiens
atatcacagggtggatgtacaccccctgcgatattgggagtaatatcagcctctcccctccgtggatattaggaacaatatcccagggtgggtgtacacctcctgctatatggggagtcata

SEQ ID NO: 384041 - DNA, 122 bp, Homo sapiens
acaagccctgctttggccacctgtctgcaagagaggcggcccctgtgcttgcaacgcttacgtgttgatcccagtgtccttttccaaatgagtgctgtagctttagaagtggccctctatag

SEQ ID NO: 384042 - DNA, 122 bp, Homo sapiens
gcgctgtaggggcgcgcgcagcccggggccgggggcggggagggaggggacggaggggcgcgggggagaaggccacttacaccaccagcctggagatgatccatgacaccatggcgggcagg

SEQ ID NO: 384043 - DNA, 122 bp, Homo sapiens
ggaagagagaggccacaggagagacagacatgggaatggccggtgggctgagcagtcagacgcacacacctactgattaagttcactgtcttacatgggtgatgttcgtggtgccccagagc

SEQ ID NO: 384044 - DNA, 122 bp, Homo sapiens
cctctcttatctccctactttccttaccaatgtttagtatttctccctatgcatgttgatcgccatcccgatttttttttttttttgagacagggtatcactttgtcactcaggctggaatg

SEQ ID NO: 384045 - DNA, 122 bp, Homo sapiens
actcccacccagtggggcgcagggctcggctacacatgggtatccgcctgagccagtccccgctggacccgcgcagctggacagagccctgggtgatctacgagggccccagcggctactcc

SEQ ID NO: 384046 - DNA, 122 bp, Homo sapiens
ttgtgaacaacaagtagtgcatggtcacttgacgaccacctgtgtcacaccatccagacccggggcctctaccaccccttatacaccagggattcccaggcctcgctctctaaccccagcct

SEQ ID NO: 384047 - DNA, 122 bp, Homo sapiens
cggtgctgaagcctgcagcagggcaggatgggcaggagagcagagccgcggagtctgcggcgcgggtgaagagcggcgcgtaattcccgcagcaagattgttccgcgcccgcagcccctgga

SEQ ID NO: 384048 - DNA, 122 bp, Homo sapiens
ctcaaggctgccagagagtgatccgagagatggatgacttcgcaaagccgcgcccacagacggcccagcggggtgagcgcgtcgcagcccgcactcaaggaggtcttggggcgcggcgaagg

SEQ ID NO: 384049 - DNA, 122 bp, Homo sapiens
tgtcgggtgggtgggacctcgcggcaaaagctgcggagggcgggaccaaccaggaaaggacgggactgtcgggtaggcgggaccttgcgggagaaactgcggagggcgggaccaaccaggga

SEQ ID NO: 384050 - DNA, 122 bp, Homo sapiens
tgggagaactctgacagaaaaggaagacctgacttaaatccactgggaagctgtggttgccgtcctacatccttaagtagactggtgccacgtgtggtctgtgagttttgtgagactgaata

SEQ ID NO: 384051 - DNA, 122 bp, Homo sapiens
cattagaacttaaccctcaccggcgaccttgtagataacgtctataagtcaccatggtaacggtcgcttcagttgtttttcaggaacctggggcaactcctgtccagtttaaaccggttgag

SEQ ID NO: 384052 - DNA, 122 bp, Homo sapiens
gtgtggaagtcggggaccggggacgaggcatggatgggagcgctgtttgggcagcctcgccgcggccagggcttaaaaatggaagtcaggaaaatttagccaagggtcgggtcacaccttaa

SEQ ID NO: 384053 - DNA, 122 bp, Homo sapiens
gacccccgcgacctccggcgttccctccctgcccccatctttgggtctttctctgaatggcgcgactccatcagtcctggactctgggcctgaggccctccctggccacacctcccctcaca

SEQ ID NO: 384054 - DNA, 122 bp, Homo sapiens
atcacagctcattgcatcttgcacctcccaggctcaagcaattctcctacctaagccttccgagtagctgggactaaaggcatacaccacgacactcagctaattttttatttttagtagaa

SEQ ID NO: 384055 - DNA, 122 bp, Homo sapiens
aaatgtgataagaagatgtacctcagattctgaaagacctgtccttggcccttggctggtcgcggggggcccagccggcgggacagaaaaagagcggagggatcctcagcccgcgcgcagag

SEQ ID NO: 384056 - DNA, 122 bp, Homo sapiens
tgcaatctccgccctccctggttcaagcgattctcctgcctcagcctccgggactataggcgcgtgccagcacgcctgactaatttttatgttttttagtagagacggggtttcaccatgtt

SEQ ID NO: 384057 - DNA, 122 bp, Homo sapiens
caaggtgtgtgtttatttgattgcttttggtggcgaggcgcggggctcgggctcgtcgcgcgccccatggccggggagcgcatccgccaaccccgggcggaggtgggcccctccgagcgcgc

SEQ ID NO: 384058 - DNA, 122 bp, Homo sapiens
acgcgtgccgctcaggctgctgtggtgtttctcccaccctgccgtcaccgcgccgtagcacggcgtttccctgcacccaggcacaaaccagccgcctggcagagtgccacgtggcttcgcgg

SEQ ID NO: 384059 - DNA, 122 bp, Homo sapiens
agaaggcccccatggtctctgcctcctgtgttcacaacgtgatataaataaatgataggccgggcacagtggctcacgtctgtaatcccaacattttgagaggcggaggcaggaggatcttg

SEQ ID NO: 384060 - DNA, 122 bp, Homo sapiens
tacctagtaaagttatttactgtacacatcattcatttaacatagaaatttacactcacacgcacacacacctctatttatgtatatacatatgtatatatatacacacacatatgtatata

SEQ ID NO: 384061 - DNA, 122 bp, Homo sapiens
gagcgaactcgtaccaaatgccctcgtatgcccttgtgatatactcttctaaatgccatgcgaggggcgactgggatccaggcctgatgctccagatcgtacggtctgggtgcacacacaca

SEQ ID NO: 384062 - DNA, 122 bp, Homo sapiens
ggatggaagagatctttctttttaatctccctcaagacccagtagagggcattatacagacgagggctgcttgtgtgggtgctgttggctcactgtggatatatcctcaatggcaactctcc

SEQ ID NO: 384063 - DNA, 122 bp, Homo sapiens
cggctaacccacaaaggccgacggaccctgagaatgcagcacgtccatgagaatgacaaacggctcaaatgcacagtgggcaagggatttgagtagacattttactacaggtgctagccaaa

SEQ ID NO: 384064 - DNA, 122 bp, Homo sapiens
atcacatcaccagcaatctccctcctaggtagaagccccaaagaattaacaacaaaaggacgcaaacagatacttgtacacccatggtcacagcagcctgactcacaacagaacaaacagcc

SEQ ID NO: 384065 - DNA, 122 bp, Homo sapiens
tctctctctgtctcctggaggtgccctgaggcgatgctttaaggttcctctgtcctagggcgattgttggcgtaggtttaatctctgctctctcttccagttctgccccctcaaggaagccc

SEQ ID NO: 384066 - DNA, 122 bp, Homo sapiens
ggaacaaaaactatttctgggtaagcggggccaggaacaacagacttagcactgagtcctcgcggcccactcggctcaggattggctgaagctgggccggcactgctgggcccggtgcggca

SEQ ID NO: 384067 - DNA, 122 bp, Homo sapiens
ggcgtccctgggggtgtgggttttggaggggttcctgaggaactggattccgagcttgctcgcaaggcgagacgttccgtggaggcggagtttacgatgtatccaagtctgacggccccaga

SEQ ID NO: 384068 - DNA, 122 bp, Homo sapiens
aaaagaaaacctcaaacatgactgccaatctaacccattccattctgtgtgtcatgctgccgaagcagcacttggaatctagaagtaccaagtgccacaattcgtctccttgtgactcatgg

SEQ ID NO: 384069 - DNA, 122 bp, Homo sapiens
tttaaaaattcctctggtaatcctagtgcctatcagggctggaaaccactgaagcagagccgtactgcagggcccaagagcatacaaagctagttatttggatccaaagttggtcaagtgtg

SEQ ID NO: 384070 - DNA, 122 bp, Homo sapiens
cagaagtcaaggtcatggcaagaccatttggcccatgtttgttggggaaggataagcctgcgtttcaaaaagactggtcaactggatttgcattcccagaaaccaggaaatttctgaaactg

SEQ ID NO: 384071 - DNA, 122 bp, Homo sapiens
ttcccttaccactgatcccatcattaccatattttcctcataccttcttcccctcgaagtcgctcagcctgtccacgctcaatcaaagcctcagcctccttcacaaatgccactaaaccccc

SEQ ID NO: 384072 - DNA, 122 bp, Homo sapiens
tagtgagatttatggaagttgaatacctaagcaggaattgctgctagctccaaaaatttgcgaagcaaaagctagccccaattggtttggaagtttgaaactgattaacagatttgcatttg

SEQ ID NO: 384073 - DNA, 122 bp, Homo sapiens
gtcacagagatcacatgcttcacaaggtaatagaatatcacaaagcaaatggaggcagggcgagatcacaggaccacgggacggggcgaaattaaaattgctaatgaagttttgggcaccat

SEQ ID NO: 384074 - DNA, 122 bp, Homo sapiens
gtggccgcgtgtgcgcattgaggcggcggcagcggagagaagacggtcacgtttcccgaacggcagccttacttaggctaagaaaatagctgcagctcactccaaaagcaaaaagattccag

SEQ ID NO: 384075 - DNA, 122 bp, Homo sapiens
gtttgccttcttctcaaaccaatagttcctttatacaaaaacaccagatgaggccgggcgcggtggctcacccctgtaatctcagcactttgggaggccgaggcgggtggatcatctgtcag

SEQ ID NO: 384076 - DNA, 122 bp, Homo sapiens
ccgtagacttgtgccccagtaggaaactttctgcctagaaagttagctaaacactgtgggcgtgtttatgtaggaagaagcctcctagtttagaggctggcaaggtaaaaggaggcacagga

SEQ ID NO: 384077 - DNA, 122 bp, Homo sapiens
ctgggttttaagagttctaaaagctccccaggaaattctaatatgtgccaaattgagaaccgctatactcgatcagtgtttcccaatgatagttaatcatcagaatcactttggggaataaa

SEQ ID NO: 384078 - DNA, 122 bp, Homo sapiens
ccacaaaccacttcctgcccctttcctggcaccaccggcctgaggctcgtggcagctgcacggccctagtctctgctgctccactggccccagcccacccctagcccactaccaccccaccc

SEQ ID NO: 384079 - DNA, 122 bp, Homo sapiens
acacgacactgaggcgagcgagtgggtgtgtgcgtggggggtcagccaaacttcctgtcccgcgctcgagctgcttccggcgggagccggaagacgctgtgtgtggacggaattcgggaccg

SEQ ID NO: 384080 - DNA, 122 bp, Homo sapiens
actctgtcaaaaaaaaaaaaaaaaaaaaaagcatacttggaagcagactatgaagaaatccgaaatctaaacccataagtttgtattttatcctagacaatggggagccattaaatgttcca

SEQ ID NO: 384081 - DNA, 122 bp, Homo sapiens
agcacctcggcccgggaagaggagtgagccagggtcgagtagtgtcccccgatctcgccgcggcaactccggagaaatcccgggctgggcaaacagcccttaatataataatagcttgtctc

SEQ ID NO: 384082 - DNA, 122 bp, Homo sapiens
cttcttccacccaccataagagaacagctagggatgatttttagggagggcgtcttgcctcgctgccatctagtaagggcatttaagtgttcacacactctggaatcacaaaactgtcctgc

SEQ ID NO: 384083 - DNA, 122 bp, Homo sapiens
tagtagccaattcttttgaatattctcattttgtctctgggatagttgactaagataacacgcacaggtccttcagcttgggaaaccaaaaagattcttgctgtttcttttgctcctctgat

SEQ ID NO: 384084 - DNA, 122 bp, Homo sapiens
caaagaaagtgaagttgctgtgagcattgtggaaatgacaacaaaggatttagaatattccgtaaactgaattgataaagcagtggcaaagtttgagacgattgactccaattttgcaagaa

SEQ ID NO: 384085 - DNA, 122 bp, Homo sapiens
caggtggcgagcaaggcaggtgatggggacgccgctgagccgggggtgggcggggacggccgccagcagcacagaggacactggcccggcgcggatgccttcggggagaccctggaactgca

SEQ ID NO: 384086 - DNA, 122 bp, Homo sapiens
gtctccacgcccagagatgctccccggtctccaccgtcgggcaagccccaagcgcagcagcgcagagtcctggggtcaccagagctcgtactaggacatcgtctccccatttaacaccgcct

SEQ ID NO: 384087 - DNA, 122 bp, Homo sapiens
gaaaacaaacaaccaaaaagccaccaaaaccaaacaaacaaccccaccccccaacaaaaacgttactctggtatatatgttcatatatgcctgagtatggaggaatttaattatgtgagggt

SEQ ID NO: 384088 - DNA, 122 bp, Homo sapiens
gtggtttaaggtctttgcataggcggtgctcgctgagtttgagcttgctttacagaactacgaaagaaaatattggtagagctaagaaatttctgagccagccaagggacagtagtccagaa

SEQ ID NO: 384089 - DNA, 122 bp, Homo sapiens
cgcggattctcccagccgagtggattccccagctgcaggcgggagccgttccaagagcttcgcggggcgcggcttggcagcagagccccggctgctcggcccccgcagacggcaccttctcg

SEQ ID NO: 384090 - DNA, 122 bp, Homo sapiens
ccagcagagccttgcagtgatcacaacttatgtgaaatacagaccatcacccacagtttacgtgttcacactaaagtgccagtctctctatgggttttagagctgatttagatacatgcatt

SEQ ID NO: 384091 - DNA, 122 bp, Homo sapiens
gattcagtcaacaaaatgagtaagtcactcagagaaaagctccccaaagttcagggatggcgtggcacatgccagaaatgtatcaccttttcattatttaaaccctctgtattgaagtcagt

SEQ ID NO: 384092 - DNA, 122 bp, Homo sapiens
ggccgggcggcgatttgcaggtccagccggcgccggtttcgcgcggcggctcaacgtccacggagccccaggaatacccacccgctgcccagatcggcagccgctgctgcggggagaagcag

SEQ ID NO: 384093 - DNA, 122 bp, Homo sapiens
tgacggtgatggtgcaggcctggcctttcacctgcctccctctggtatcgctgatgaagacgcttcatctggagccattgaaagcattgctggaagggcttcatatgctgcttacacagaag

SEQ ID NO: 384094 - DNA, 122 bp, Homo sapiens
ttccttaccacagcccggcacccaggcagcccctaaacggagatggtctgcatctgcaggcgcggggaaaggcatagcaggcagcgccctgaacaaatcagaaaaacagccttcggctctgg

SEQ ID NO: 384095 - DNA, 122 bp, Homo sapiens
tgctcagagaatgcttgagtgtcctctttggagaccaccctagagctagagttccagccacgccatattgttttattagccatcatccattttagacaggattagttaaaagagacttattc

SEQ ID NO: 384096 - DNA, 122 bp, Homo sapiens
accagaagatccgcagaatcaaggcccggcaagccaaagggcgctgcatcgccccgcgcccggagagtcgggacccatctggcccattgtgctgtgccctgctgtgcgttatcacatcaagg

SEQ ID NO: 384097 - DNA, 122 bp, Homo sapiens
cgaagcagaaatgccttgtgggatgtgcagcccaagaagccacaggcaggacatgggagccggaggcggcacgagagcgtcacccgcaccaaaggattctcggggtctcgggacttgggagc

SEQ ID NO: 384098 - DNA, 122 bp, Homo sapiens
ggccgccccgcgtgctccgaggacgggctgaagttgcagcgagaaagttctgagcccgggcgcggggcggcctggccggtggcgctgctcctgtgagccgcgtggctgtgggtttccaagcg

SEQ ID NO: 384099 - DNA, 122 bp, Homo sapiens
gacagcctttacagcaattccgccaccggtgacagtgagaaactgtcagcttggggaggccgcgccacgactggaccccgcccccgggaagcctccccggagccgagggcccccgggccttc

SEQ ID NO: 384100 - DNA, 122 bp, Homo sapiens
gattctggcagccagcacagaatgactgtgcacagacactcaggcatcactagctctgggcgccgcgcatttgcctgcttcatccaggacagtggctaacacttcaggtagggcccacatac

SEQ ID NO: 384101 - DNA, 122 bp, Homo sapiens
gccgccagagcggtggaaaagcgctgggcaggccggcctggggctttcgagctctgccgccgagcgcagcagaaatacggtgtgcaggcaggacccgaaacaggagagaccggggggaccgg

SEQ ID NO: 384102 - DNA, 122 bp, Homo sapiens
gattatcgcggtcccggtctggaggtgattatcgcagtccaggtctggaggtgattttcgcggtccaggtctggaggtgattttcgcggtccaggtctggaggtgattattgtggtccgggt

SEQ ID NO: 384103 - DNA, 122 bp, Homo sapiens
ctgccgggctgggcagcgtcaattactttcacctcatctcctcccgaagctctgcctacccgctcccctggccctgcccctccggccagtccccatgcagcccagcacgggtgctccggagc

SEQ ID NO: 384104 - DNA, 122 bp, Homo sapiens
gaactatgaatcagatatctccattgaagaaaccgttttctggtaatgtcatagcaccaccgaaatttactcgctcaactccatcactgactccaaaatcttggattgaagataatgtgttc

SEQ ID NO: 384105 - DNA, 122 bp, Homo sapiens
tgtgtccttgagtcatgtagaagctcatcagtggcggtggcctttccagcttccatgctccgtgtgtgcagaaacagctcaggtgaagcaagtcatttgacataagcaattacatcttgtcc

SEQ ID NO: 384106 - DNA, 122 bp, Homo sapiens
tctgacgaggcgttttcatcgcccctcttggcatggtgccatgatagcggtcgtgttgtgcgtgaagcctgagctctgccgaatggaagggctgtctgcaagtgcggtgcggaagaccgcgg

SEQ ID NO: 384107 - DNA, 122 bp, Homo sapiens
ggccctgagggagactgcggagggtgagtgcgcggtgggctcggctgaccgttggccctgcggccggcgccctaggctacctcccttcgcctccccgcgcctccccgcgcctccccgcctcc

SEQ ID NO: 384108 - DNA, 122 bp, Homo sapiens
gccgagttaccggggaagcgagaggtggggcgctgcaagggagccggatgaggtgatacacgctggcgacacaatagcaggttgctctttgtgctaagactgacaccatgaggacacagatt

SEQ ID NO: 384109 - DNA, 122 bp, Homo sapiens
cactgaactaacggcttttgggggttcttttttcccagttgagtttctgtgtcttttacacgtttggttttatggtccgttggaggttttttcacgctgagggtgaagattcttagtttcct

SEQ ID NO: 384110 - DNA, 122 bp, Homo sapiens
tctctgctttccttttctctgcttgcctagccccaggtcttttctttgggaccctgggggcgggcatggaagtggaagtaggggcaagctcttgccccactccctggccatctcaacgcctc

SEQ ID NO: 384111 - DNA, 122 bp, Homo sapiens
gctggggccggcgccgggaattcaggccgcgttcgccgccgcttcctgctgcgccaagcgcgggacacgtcacaccagtggccccggaaatcggctcaaccgtacttccgctcagaacgccg

SEQ ID NO: 384112 - DNA, 122 bp, Homo sapiens
ccccatgagaaggactgatgcgacccagctgatggtctacccagaagccttcctgacacacgcgtggcctcaggtccccaagatgtctggggtccgggatgagcggcccgccccactcacag

SEQ ID NO: 384113 - DNA, 122 bp, Homo sapiens
acccttagctcttcctgcaggcctcccaaaacccactttcccccctctcccaaccctcgccgttgctagggtccgcccccgttactagacacccacagttcctcaggggctacctctccact

SEQ ID NO: 384114 - DNA, 122 bp, Homo sapiens
taataactcctctggctcaggtgagatatattatcgccatttcacagatgaagaaaatcacgagtgacttacaccagatcacacgggtagtaggtgggaagtaggtaaacactgatgcaaat

SEQ ID NO: 384115 - DNA, 122 bp, Homo sapiens
agaggacagaaggttttggcatgaaggaggtcctcaatctaagaatgtacttctggtaaacggatctgacaaatcaatggaaataaaagctaattgaaacagggctgtggagaaatcagggt

SEQ ID NO: 384116 - DNA, 122 bp, Homo sapiens
tgagattccaagaatctcagatctgacaaggcctgggtcaccaccagagagtcctctctgcgtttccggatttccttcccagcaggcagcaccccaagtttcactcaccaaggccacacccc

SEQ ID NO: 384117 - DNA, 122 bp, Homo sapiens
gagcagtgctgcccctggaccttcatggtgaagctgataaaccagaactgcgactcagcccggacctcggatgacaggctttgtcgcaggtgagtcctgtcccctccgtgggattgtgggtg

SEQ ID NO: 384118 - DNA, 122 bp, Homo sapiens
aagttaaaaaatacaaacaaaaaagaaacgtgtggtgagtgtgatgtgagagagaggctgcgagacagatttatgtatgctgatgaagctcaagaagctactatttacatttaactccccac

SEQ ID NO: 384119 - DNA, 122 bp, Homo sapiens
tgatgagcactgctgtgtcatggttagccacaccgttctctggaatggcattgccatggccgctgtggttcacgatggatttctgccacttacagaagctgtccagggacttcccggcatgg

SEQ ID NO: 384120 - DNA, 122 bp, Homo sapiens
tactacattcagcccacttactcacgtaacctcattggtcccagtaggcactggagcttgcgactgcctggtttgccaaggaagcataagactcagaggcatgcaatataaatctgcatggg

SEQ ID NO: 384121 - DNA, 122 bp, Homo sapiens
gcgttgggaacgcaggcgcgcttacgcatttagtgagggtttggcggtctccatagttaccgccgccgcgcgtgacgtcatagtggagcgctgagggcttggtggcgtggggtgggggctgt

SEQ ID NO: 384122 - DNA, 122 bp, Homo sapiens
agagggtttacaaaaggctattgttctgcaacataatgtgctattatgttatactgtggccgtgacacaattttgcattgcagaatagactccaaaggtttattttgcatgttcatactgtc

SEQ ID NO: 384123 - DNA, 122 bp, Homo sapiens
gtaagtggtaggctggaaatggaatactctcaaatattttttcttcagaaacaggaaatgcgagtgtaaaaccagaatttcttagggtttcttaggaatttgaaggaacttatttttgttta

SEQ ID NO: 384124 - DNA, 122 bp, Homo sapiens
ccacgcagcggcctggagcctgtccccaagtccaaccaatgggagtagtgttaagggctccgccctcgactactttccagcgctcggcaaagccgccaggcccgcccactgactccgcggag

SEQ ID NO: 384125 - DNA, 122 bp, Homo sapiens
acgcagaaccaggacgcaatcggagcccccgcccgtgtcctcgccgaggtcgcccccacgcgccccccgccgggcggccgccctgcactcaccgggtccctttgtcgcccatggtccgcgac

SEQ ID NO: 384126 - DNA, 122 bp, Homo sapiens
gcctactctggacccgcccctcttttttttttcatgacacacaccacagcgaagtctgtgcggaatcctaaaccagcccaatttacatccattcatgaatctgtgacgtcagcaagcctttg

SEQ ID NO: 384127 - DNA, 122 bp, Homo sapiens
ggcgtccacgcggtgagtgtgcagcgctttcattcaaactttctccagtctcggttccggcgtcagcaaggtgtgaccaatcagagcccagagacgggaataaattatgcaaatcaccatct

SEQ ID NO: 384128 - DNA, 122 bp, Homo sapiens
cgggctgcaggtgcatggtggtctggccgcagtgcgcgatctggaactgcaggtgcggggcggccaggtgcgcgggcggcgggtgcgggtgcgggtgcgagggcggcggcggcggcggcggc

SEQ ID NO: 384129 - DNA, 122 bp, Homo sapiens
gaacgcaggagcagaatgacgaaggtgacgaaagagatgacgacacgccgcctgccaggccgcggccggcagtggagagcgtccgcaaaccgcgcccggccagtacaggtcacccgggcgct

SEQ ID NO: 384130 - DNA, 122 bp, Homo sapiens
tcttcacgcaggcaccgagaagctcccactagtgtatgccttaatggtgccgctcttgtccgcgtctacgcttgggaccttggcttctgacttggagagtgtacagctctgcccgacggcaa

SEQ ID NO: 384131 - DNA, 122 bp, Homo sapiens
cgcgcgcccggcgggaggcgcctcgggatgtttccgtctggtccttccctccgccccccgcgctgactccatccgctccccgccccctgctcggagccgccgccacgcgggaagggagggag

SEQ ID NO: 384132 - DNA, 122 bp, Homo sapiens
tgaattcatccaagcctactgggacactgggcaggtcaacatcatgaagcagcacttccccgggcccctcatgatgaagcctaaaggcacaaaggcctagccctcccggagtggggttatca

SEQ ID NO: 384133 - DNA, 122 bp, Homo sapiens
atcacaattccaacttaatgtaatccaatacaacttcatacaaatagcagttaaatcacacgtagtaaaatttcgtacaacatttttttaaagtttcaaattcaaatgttccaaatgtttaa

SEQ ID NO: 384134 - DNA, 122 bp, Homo sapiens
gcgccgcaggtgcacctcggtgatgatgggctgcaggaacaccaggtaccacagtagctgcgggacgccccagccgctcacggcacgcggccgccactgcacgtgctgcagctcctcgctct

SEQ ID NO: 384135 - DNA, 122 bp, Homo sapiens
aaggacaggggtaggactagatgttcaccttaaatccagccactgctccagactgcaaatcggattcaatatttcctggatccaggtaggcaatgctcataagaaaacctggtccggtgaaa

SEQ ID NO: 384136 - DNA, 122 bp, Homo sapiens
attgttatcatataatgggatattacacaacaacgaaaaataacgagctattgcttcatacgatactatggtttgaatgtccccgccaaaactcagattgaaatttaattgccattgtgtca

SEQ ID NO: 384137 - DNA, 122 bp, Homo sapiens
tcagtggttcccgaatcactttggaaattggcctttcactcgctgacttcttggaagctacgacaaagcacaggcaccctggtgaatgtggcttttcagaagtactcgaaggatacttaatg

SEQ ID NO: 384138 - DNA, 122 bp, Homo sapiens
tttagaaaaggactttcccttcaggacagcacatggagagcccctagagactggccagtccggctccagggcccctgcggattcttctcgctcaaactcaccgccattgcaccgcccagccg

SEQ ID NO: 384139 - DNA, 122 bp, Homo sapiens
acagcggactgcggtgaaatgccagaaaattacgcaatacgtaaaccaaacggcagactgcggacagcagactgcggtgaaatgccagaaaattacgcaatacgtaaaccaaacggcagact

SEQ ID NO: 384140 - DNA, 122 bp, Homo sapiens
gcccattagggcctggggtgggggggtcggcagatggctgggggctgaggctgcaatttccggaccatttccctggtgctgggtctgtgggaagatctccttggtcgtcagcacctcttcct

SEQ ID NO: 384141 - DNA, 122 bp, Homo sapiens
tgactgactctccacatttgccttatcatctgctctcaatagcagctgctgggccaggcacggtggctcacgcctgtaatcctagcgctttgggaggccaaggcgggcggatcgcctgaggt

SEQ ID NO: 384142 - DNA, 122 bp, Homo sapiens
aattttttttaatggaaatgtctttaaaattgtacagattttcagaatgactgacactgccgaagctgttccaaagtttgaagagatgtttgctagtagattcacagaaaatgacaaggagt

SEQ ID NO: 384143 - DNA, 122 bp, Homo sapiens
aagtcggcgatggtcctgggcagcctcgtccggccccagacgaagcgaaggaaaagagagcgctctgtgttggagaaggactccatcacctcccagaaccactggatcagcgatgcggaagg

SEQ ID NO: 384144 - DNA, 122 bp, Homo sapiens
ccccttagcttcaagaaacccgcgtgggcggggtgaggagcgcagtcctcctactggcgccgtgaaggagatcgcgatgcgccggagggaaggaggctgcgggcggggaaggacggagggcg

SEQ ID NO: 384145 - DNA, 122 bp, Homo sapiens
gactaagccccgaacaatctgcccttgggcttgttctcttcgcagttgtcggccctgggccgggagctggagtcccagactcataggtcccggcccagcccccgaagagccgcctcagccgg

SEQ ID NO: 384146 - DNA, 122 bp, Homo sapiens
cctcgcaagcccgtgtcccttcttagatgctggcctcgggagcgtgaggcctggggccagcggaatggcagtgtcagcgtgtttgattcagttttgctggagttcggttcttaacatttctc

SEQ ID NO: 384147 - DNA, 122 bp, Homo sapiens
ggcgccccaggcgcctgagtccccgccccggccacgtgggcctccgaaccacgagtcatgcggcaggccgcacccagacccgcccctcccacacgggacgtttcaataatgaaagcgctagg

SEQ ID NO: 384148 - DNA, 122 bp, Homo sapiens
ccgctcccgggaccgcgaccccggccgcccagagatgaccgcgaccgaagccctcctgcgcgtcctcttgctcctgctggctttcggccacagcacctatggtgagttccccggcggcccgg

SEQ ID NO: 384149 - DNA, 122 bp, Homo sapiens
cattagcaaccactattacaggtgatctcactagaccaactcaaaatactggctatggctcgaagtgactctgctaagtaaacagaggtggggcattggaatcactccacattttcctgccg

SEQ ID NO: 384150 - DNA, 122 bp, Homo sapiens
aaatatttttaaatcgtgttttaatttctgagtggtaaatgccaatatacataataaaaacggaagcttcattgtgtcttcaataattttttttaagagacagggtcctgctctgttgccca

SEQ ID NO: 384151 - DNA, 122 bp, Homo sapiens
cccgcttcctgcgtttgcccctcaggtttcccgtttctccacaaaggcctaggggagcctcgcccacaggctgaccctgcaacctctggcccggtggctaccttctgcttttctgaaaaaga

SEQ ID NO: 384152 - DNA, 122 bp, Homo sapiens
tacccgagaaattcactacgatgggccattggtttctgctcggctcgcaggcgcactgcacgagtggaggtgtggctagtggctgtgatgagataaatccatgcatagccttttcattgcga

SEQ ID NO: 384153 - DNA, 122 bp, Homo sapiens
ctgcgcctcctgagccgagtagatatcccggagttccgcgcggcgccagcccttccgccacggccgtctctggagagcagcaggtaagtggtttcccgcactgccggtatccgccgccatcc

SEQ ID NO: 384154 - DNA, 122 bp, Homo sapiens
atcaagacgagtcctgcaatgaaggttccgtcattaaaaaacccactggacgtgtgttttcgtttcttcatgttttacaaggtcaatatatttgttctgtgactcaatttcaaaaatttgaa

SEQ ID NO: 384155 - DNA, 122 bp, Homo sapiens
cctcaaagatctgtttccagacatcccaagcccaacgcacgtggcaggccctgcagacagcggacaatgagaactgacaacaacccgctctcagggccagcagacgcgcctgcgcctcccgt

SEQ ID NO: 384156 - DNA, 122 bp, Homo sapiens
ggataggcagtgaggacagacttgcttccaagctgggtctgacctggagactcctcccagcgtcgttcctgcctagggcgaggggcgtcacagcgaagcacagatgctcaagtcactggtgg

SEQ ID NO: 384157 - DNA, 122 bp, Homo sapiens
ctgaccaatcagagggcgcaaagtgagtcggatggggcgggcccagtttggcgctgacgacgaatcacctgcctcagacagcaggggcggaagcggaaaagagctgaaagtcttggtttggc

SEQ ID NO: 384158 - DNA, 122 bp, Homo sapiens
atggccatcagggcaaaaatgggcaccaacactttgaccacagagatctgccaatgaagacgggtcctgccatggctggaagcttttaacaccttcaaaaggaaagaggattgttagagaat

SEQ ID NO: 384159 - DNA, 122 bp, Homo sapiens
ggccctagaggtgctcggctactgggtgctggggcggatcttctgtgacatctgggcagccgtggatgtcctgtgctgcacagcgtccattctgagcctgtgcgccatctccatcgatcgct

SEQ ID NO: 384160 - DNA, 122 bp, Homo sapiens
taattccatgcaatcaccaaattttcctaaacaacagtagtagtagtaatttcttagagtcgctgtaagctccttaactgtcttctgaattaataaggaaaattaaattatgttttctagac

SEQ ID NO: 384161 - DNA, 122 bp, Homo sapiens
cgaggcacaacctaccctccaaacaaaacgcccatcctgcccttctccaggccttctcagcggccacgatctgacctcctgaggctgtggatggtggagactgatcgctggctgcgtggccc

SEQ ID NO: 384162 - DNA, 122 bp, Homo sapiens
acacgggattctcactgtgaggacaggctgcaaaatgtgcccctccaagctctcttgacccgtgcccaccagggcccactctcagcctcccaatttctgtcctgtacacttttgacaagagc

SEQ ID NO: 384163 - DNA, 122 bp, Homo sapiens
gattgagatccattcacgggtaatgaaaataatttagtgggtcccaaccagcatataaaacgtaaatagaatccaatataacaactagaaattatcaaagtatcccatctagtaagtaaaaa

SEQ ID NO: 384164 - DNA, 122 bp, Homo sapiens
ggagaggttcccgacagcccgccaaccccagaacctgcaggccaggtaggagaagttccccgacagtccgccaaccccagaacctgccggctaggtaggagaagttccccgacggcccgcca

SEQ ID NO: 384165 - DNA, 122 bp, Homo sapiens
tccgtatactgcagatggagcagcggatacagatgcaaatcgatccagaggactgtttggcgatatggatcagaagcctttaaaatatataacagtccgggcgcggtggctcacgcctgtaa

SEQ ID NO: 384166 - DNA, 122 bp, Homo sapiens
gggctggtcccagaaagaccaaggcaggattaggaggttggaactttcagccccactccccgcaaacctcctctggggagaggagacaggctggagattgggttaatcaccagtggtcaatg

SEQ ID NO: 384167 - DNA, 122 bp, Homo sapiens
ctgagtgcccatgtgtttcacggtgcttgtctagtatatttttaaaaggtggcaccagggcgcttctgctaaaatgggtctgttgttcatggaggagctgggagtaatggctctggaagtgt

SEQ ID NO: 384168 - DNA, 122 bp, Homo sapiens
tgctcttctcatttgtaagttttagttttctacagtctaataatcttataaaaggtacatcgttttaaatttgaaatgtagttggaatgtcttattgaatgtcttcagtgatgacttctggt

SEQ ID NO: 384169 - DNA, 122 bp, Homo sapiens
tcctgtctgccccgggaccgcctccgctcgggtatctgtccgtctgcgccccctcctccccggcatgtccgtctgtccagcgcctcccgcgctgtggctgtctcatatcccccccaaaccat

SEQ ID NO: 384170 - DNA, 122 bp, Homo sapiens
aacaaccaggggctcttaactctagtttcggcaggagatcccgagttacagacctgagctcgtaaacaaacgctcaccactttacagtcgccgcctcatcctgaaactccggtcagaaatgc

SEQ ID NO: 384171 - DNA, 122 bp, Homo sapiens
ctggagcatttggggaatgggctggggtggccgccatccccgcctgccctctgctaatggcgcctccggctgcaggtggccgcgcaccagttccctgaggtacggttctccatggtgcacaa

SEQ ID NO: 384172 - DNA, 122 bp, Homo sapiens
cagcccggcagtccgggatccccgggccgtcgccccgcttggggcctccttggcccttcccgcctgtccgtcattcgagcctccctcgcttgtttaagccgctccgggcccccctccactcg

SEQ ID NO: 384173 - DNA, 122 bp, Homo sapiens
cctgaagaggttggggtgcatggggagcagcgaaagcacctagtctcaagcaacataacacgagtttaaggcccccactaggacggagtccagagtagtctggcaacggttgcaaggtttgg

SEQ ID NO: 384174 - DNA, 122 bp, Homo sapiens
ccctcttctccttgacgggtgcagggcagagggcaaagagagcaagggcaagcgccgacccggagcaggaggagtccttcagagcttcacatctccgtggccacaactagagtcccaccact

SEQ ID NO: 384175 - DNA, 122 bp, Homo sapiens
agaaaatggaggggaacatgctgcctcaggcactatttgcctgatggcaggacataaatccgtatttactggagaaagcacttgcttttcagcccggagaaggcgccaccaggaacctgagg

SEQ ID NO: 384176 - DNA, 122 bp, Homo sapiens
cctcccaaagtgctggaatcacaggcgtgagccagccagcaggcggcgctcgcgagagtgcgcagctcccgcgaagggcctcgcgggcaggctgaggtgcgcatgtgccctggtgcctaagg

SEQ ID NO: 384177 - DNA, 122 bp, Homo sapiens
tcttgcggatgctgcgcccggaggagatgaggtccgcgtagccccgctggtgcgagaaggcgtaggccgagcgccgcgttgacacgccccggcggaacacctgctgccgtcgctgccactgc

SEQ ID NO: 384178 - DNA, 122 bp, Homo sapiens
cttggccttacccctcccctgagctccaaagacaacacagagagcagaggacacattccgcgtcatccagaaatgggtttgcttgtcagccaagggagagcaggactggtagagactgtcag

SEQ ID NO: 384179 - DNA, 122 bp, Homo sapiens
gataagagagcaagaaaatgaagctcaagagcctcctgctccggtattacccgccaggtacgcaccagcccggccccgtcatccccacgtgggaccctgggctcccagactgggagggtttg

SEQ ID NO: 384180 - DNA, 122 bp, Homo sapiens
gccgttgcccgcggccccgggcgccgcccgggccccactcatcgcgccgcggcccggccacgcgcctgccccgctgcagcgaaccaaggctttcccccggcccgcccccttcccggcggtgc

SEQ ID NO: 384181 - DNA, 122 bp, Homo sapiens
cactgagacagagtctcacagtcacccaggcagtggcacgatcatggctcactgcagcctcgaccttgtttctacaaaaaataaacagttagctggatgtggtggggtactcctgtagtccc

SEQ ID NO: 384182 - DNA, 122 bp, Homo sapiens
acccggacgacatgtgggggagggaggaaacccggcctggaagtggcggtggcgggtccccgggcaaaggaaaggctcaattgtgcaaaggcttcctgccctgccagctcgcgggtccgcca

SEQ ID NO: 384183 - DNA, 122 bp, Homo sapiens
agggcaggacagctggacggcgcacagcttcctgggagatgtagtccggctgctcgcgggcgcgcgagttcgaccgacgcgttagaaggaggtgccttgcgaagccgggctgcgaccttagg

SEQ ID NO: 384184 - DNA, 122 bp, Homo sapiens
cgctctctcctgaagccgccatttccccggcccagccaccacgtgacccttctgcgcaggcgtcgcctcacgtgattcttacaggtccgctcctctagccccgcctcccgtctgagaggttc

SEQ ID NO: 384185 - DNA, 122 bp, Homo sapiens
ggttctacttctcttgcaggcacaagagaagtagaagagtggccgctttccttctgggcacgcacttgggaaaaggcttggtgagagcagcgagaagaataggtctaatttcttgagccagt

SEQ ID NO: 384186 - DNA, 122 bp, Homo sapiens
cagctcagaatcaaattgggtagcaagcatactcatttctcagatcagtacacctacttacgttcctgctgtggtgagcaaattttatactcaatgtagtatcaggtattgatgaatctggt

SEQ ID NO: 384187 - DNA, 122 bp, Homo sapiens
tatcgatgcctggtcagcaacaatcatgtaaataagtttccattcttttgaggaagataacgaagtcagcgtttttcagaagtggtgcctaggaagagacaaaatccaggacacacctctag

SEQ ID NO: 384188 - DNA, 122 bp, Homo sapiens
gagggggcggcgggggccgtgggttttgtttggcggccgggccgttaggattcccagcgccgggcggctctcacgccggccccttgggcaaggtaacaaagcccctttctccagcgagaaag

SEQ ID NO: 384189 - DNA, 122 bp, Homo sapiens
ggggcaggcggctggctggtgctgggcgggcgggccccggaattgtcatttctttgtttccgaaggcggaggaggctccgagccccccctccccgtgctaccccctccccccgggtgctggc

SEQ ID NO: 384190 - DNA, 122 bp, Homo sapiens
aatagcctaaaatgcgcatgaaggagagaatgattaaatgaatgaggcacaccctcatgacggaagacagaagctgtaaggtaagaaggggacgccctccatgcaggcacacaggaaggacg

SEQ ID NO: 384191 - DNA, 122 bp, Homo sapiens
aagggccagatgggcaggtgaaggcccaagtgggtagtgaggagaggcccagggactgtccggccttgaaccctggccccgtgcttcccaaccagaagttctgtgggaaaggagagtgcctt

SEQ ID NO: 384192 - DNA, 122 bp, Homo sapiens
gcatttttgccatgttgcccaagctggtctcgaactcctcctgagctcaagcaatcagcccgccttaggcttccaaattgctaggattacaagtgtaagccactgtgcccatctttcaaaac

SEQ ID NO: 384193 - DNA, 122 bp, Homo sapiens
aaacggggatgacttggcccgctaggtgaagaggagacggaagcttcctggcagtccccgcgtcacgtggggccctacctagtcagcctcctaacgcccctccttacgcatgcgcccattca

SEQ ID NO: 384194 - DNA, 122 bp, Homo sapiens
tgagctgctcgccgggcaggaggcggccgagcagtcccagcccgcttgccgccgcagctccggccacgcctcccccgcccagcgcgcccccgcgccgcctgctccttctgggcgcccgccgg

SEQ ID NO: 384195 - DNA, 122 bp, Homo sapiens
caccgagcggtggggcggcgcggttaatggggtctctgctgggctagtgtcccgcatcagcggtaatggggccggcccacccggaggcagcccggagcagcgtcgccccagcaggcttatgc

SEQ ID NO: 384196 - DNA, 122 bp, Homo sapiens
cgggcaggtgtgtgggcgcgggttggtgtccgggggtgggggtaaaggaagctctgggagcgtaacagtggaggctctggtctcaaccagaggattcgacctgcctggtgccctaacagctg

SEQ ID NO: 384197 - DNA, 122 bp, Homo sapiens
caggaggatattcctgacagagtatctaattcaaccttctgtccctccagttctaccctgcgccagggtcaaaactgccacccttatgtaactatttatttttatcccgaccataaaatagg

SEQ ID NO: 384198 - DNA, 122 bp, Homo sapiens
cccccccagcgtctcctgcacccgggagacccgagaactcagcgatcagctggctgcccgcgattcatcgctccattcacgcccaggcagggaataccgacattaaggcactccgggaagac

SEQ ID NO: 384199 - DNA, 122 bp, Homo sapiens
tgagaactcctttcttcagcacatcctctcaccatcgccccacctccactcatgtggcaccggcaggcatgcctgctcacacctgcccacactggctcacacctgctgacatctgtccacag

SEQ ID NO: 384200 - DNA, 122 bp, Homo sapiens
tacgaggcggcgctggagggtgcggtgcgcgcgctgcacgaggacatgcgggggctgcagcgcggcgtggagcggcgagtggcagaggcgatgcgcctggccggccccctggcgcgcacggt

SEQ ID NO: 384201 - DNA, 122 bp, Homo sapiens
tggcgggcgggcgcagcggcaggaccaggctgtggcccagctggagcacccagagctgggcgtggcaggcgggccgtcccacttcctcatgacaggccgggaagcagccacacccagcaccc

SEQ ID NO: 384202 - DNA, 122 bp, Homo sapiens
attttggttgaactttgctttcagaactagaactacctgctatccaagacttgttaaccacgttttcatgggcaaattacaaaaccctttcaaccccagtttcctcttctataaactagtgg

SEQ ID NO: 384203 - DNA, 122 bp, Homo sapiens
gcccccgcggctctccgcgctgcccgccaccgcctcggccagtggccggaggcaggagcgcgtctgagcccatggcgaggggacccgccgccaccgcctccacccccgccgccccgccaccg

SEQ ID NO: 384204 - DNA, 122 bp, Homo sapiens
cacagggacacggagatgccgccgcacggagaccggcgagaacagaaggtcagaggcgggcggaccgagctggtcagcgccgggccgcggcggccggggcggggaccggggaggctgcgcgg

SEQ ID NO: 384205 - DNA, 122 bp, Homo sapiens
acatgactactacccactattgttgtagaatctggagaattcagggtctgaattctcagacgtcggaagatcaaagaaaagtcactaaccagccctcctggcacaggtgggcaagttccagt

SEQ ID NO: 384206 - DNA, 122 bp, Homo sapiens
tgaaacatctttgatcaagaagagaccctggcaaccaaagcctgctctttacaaatataacgggctgaaatgcagcaatggcaatgcctggaggtatttagccccaaggaggtggtaagggc

SEQ ID NO: 384207 - DNA, 122 bp, Homo sapiens
ctgagtaaaacctgatgatgtattccattcatgtctccaaaaagtcaaaagcggtttcagcgttgatttcccttaagagttatcagtcctcattcaattggtttaatgagtgtaagaggtga

SEQ ID NO: 384208 - DNA, 122 bp, Homo sapiens
agccctacagtaaagaataactctttgctgtttggcattccggcttttccctttccttgccgatccccacacaaaatacaaaccttaagaaagagaacttattatgagattcttatgagatt

SEQ ID NO: 384209 - DNA, 122 bp, Homo sapiens
gccgacttgtccttttctgcccttgtaggcaccatctccagagttctgcagggcctcatgcgtggagggccagggtgtagcttgagcaggaggctaggctgcacctgccttcaccacagcct

SEQ ID NO: 384210 - DNA, 122 bp, Homo sapiens
aaaagacaaggcgatgggcaactgggccagccaacctcatctgacatctcaacaccctctcgacaccttatgggttggattgtattgcaagaatccaaagtaaaaggtgactttcaatgttt

SEQ ID NO: 384211 - DNA, 122 bp, Homo sapiens
tccctggcctgccctcctaactgcacttcctggtagcccctctgcacccctctctcctcacgtgtcctgttggtcagtgatccccagaagggctgggtgtgtgtggcacaattctgaagccc

SEQ ID NO: 384212 - DNA, 122 bp, Homo sapiens
cgccggggccggggccggcggaggaggcgggcagcgaggaggcgggcccggcgggggagccgcgcggcagccaggccagcttcatgcagcgccagttcggcgcgctcctgcagccgggcgtc

SEQ ID NO: 384213 - DNA, 122 bp, Homo sapiens
tctgcatggactcggcacttaactgggcagggcacctccttatgctcacagtgccaggcacggactgccacgtccagactaggtccctggcatgaatccctcactgccccttccagccaccc

SEQ ID NO: 384214 - DNA, 122 bp, Homo sapiens
ctgggcaacatagggagaccctatccctacaaaaatacaaacattaggtgggcatggtggcgcatacctatagttccagctacttgggaggttgaggtggagggtcacttgagcctgggagg

SEQ ID NO: 384215 - DNA, 122 bp, Homo sapiens
agtgatccacctgccttgaccttccaaagtgctgggattataggcatgagccgccatgcccgaccacttgggaactgaggtcttaagacacacttgccctcagaaggacagggcagacttgg

SEQ ID NO: 384216 - DNA, 122 bp, Homo sapiens
gctatggtgctggggctaaccgtactggccatggctgcaggcagtgctatacccattccacgcatgagccatctttatataagttctgggttaatgatcagcctcaggcaggtggggcgaga

SEQ ID NO: 384217 - DNA, 122 bp, Homo sapiens
ccccagaaggggtctgctgagctgcatagatgccctgcagggagggccagggtttgacgccgtttgtctgggctcatcccagctgtgcacacccagtagcttgtgactgcctgccaagatgt

SEQ ID NO: 384218 - DNA, 122 bp, Homo sapiens
tcactgacatcaagactgaagccgcggaccctcgcggtgagtgttaacagttcttaaaggcggcatgtccggagtttgttccttctgacgttcggatgtgttcccagtttcttccttctggt

SEQ ID NO: 384219 - DNA, 122 bp, Homo sapiens
aaactcccgctgttgtttatttacaaaataactgctttcaatcaatcattgtgagaggtccgtacactgacaatgcataatggacaactaattaactgacccctaataagagtgtgggaaat

SEQ ID NO: 384220 - DNA, 122 bp, Homo sapiens
acacctccgctgcctccgtctggttcagcgtctgctaactgaggaggcagattaggggcgcggagtctcttcccttgggtgcataggtcccggttggtagaggctttgagtcctcatcgcca

SEQ ID NO: 384221 - DNA, 122 bp, Homo sapiens
tgtttcgttgctgaagacacagccctgacctcgacaaaggaggtccttgctctcaggaagcgttctgcctttccctcttttaatatattttttaactatttgagttgacacataatgattgt

SEQ ID NO: 384222 - DNA, 122 bp, Homo sapiens
tgtatcctgtgctggtcaggtggcatcagagagttagagaacgcctattaaccacacgggcgtggagtgtaaccatatataaatggccattataaacacaatggtatttagtaataagagga

SEQ ID NO: 384223 - DNA, 122 bp, Homo sapiens
acaccatcagcttccagataatcttctgtctcctattacactcagagcaggagtggcacacgacatcccatgactaagcatgagcaggcaccttccctcccaacagcaggagccagcagcaa

SEQ ID NO: 384224 - DNA, 122 bp, Homo sapiens
tcataaaagaaaaatgttaagagaaactttcctttaaaaccatgcttcatatgtccccttcggtgtcttgataaaatgttatcatacaggaaaacataagcttctaaatcaaagatttcctt

SEQ ID NO: 384225 - DNA, 122 bp, Homo sapiens
cgcttacagtcaactactttgggcctcggtttccctgctccttgtagatcagagaagggacgggcgaaatgcctgcgagggagggttggcgaatgggttggttggtggcaagactgcagttc

SEQ ID NO: 384226 - DNA, 122 bp, Homo sapiens
cacggctgtgaagattcgccatgatttgcactcagacataaccgaagcaggctgtgagcccgtttccatgtcctaccaatcccacatttggatgtctcctaactccatctgcctctaatttc

SEQ ID NO: 384227 - DNA, 122 bp, Homo sapiens
agagacgttattcaaagaccggattttgtctggaaccagtttgtggtcacagaattagcacgtggtttttatttggtgcatgtgctttgaaaagtactttacatttactgcctcacaacagt

SEQ ID NO: 384228 - DNA, 122 bp, Homo sapiens
tttatttccatggaaaataaagtttggatcagaattttctatacaaccttataagacccacgtctccatatagttataacagtcaacttttcttaaaattatttttggacaactcaactcaa

SEQ ID NO: 384229 - DNA, 122 bp, Homo sapiens
ctcaggtgatccgcccaccttggcctcccagtgtgctaggattacaggcgtgagccaccacgcctggccttaggttgcccaattcttagcaatctgagatggaagggagggggcagcccaga

SEQ ID NO: 384230 - DNA, 122 bp, Homo sapiens
cttataccagaaatcccttctggcagcatagcaagttaacttgtggcttgtaccccacaacgttcccaagattcccccccaccccctttaaatagaacttacaagttagaaaatatttttgt

SEQ ID NO: 384231 - DNA, 122 bp, Homo sapiens
gtgcccctgcctggtgcttttcatgttttctcaatcctcacaggaatcatgtgaggttcacgttagaatcccattttacagaggaggaaactgaggctcagaggaataaagacttgcctgta

SEQ ID NO: 384232 - DNA, 122 bp, Homo sapiens
tttggctgggctgtggagatgcgcttctcagcccttctagatgttaccaccacgccctcccgagtggccttctggtaggctctcccatgttcgctcattttctgtgcctcaggcagccgcct

SEQ ID NO: 384233 - DNA, 122 bp, Homo sapiens
cacactggtccttggaagcaggcggtgcttcagttcctctgccaggtggtgtcaggagaacggagaagggtgctgatctttcattccccttgctgggcagaactagttagtactccatggca

SEQ ID NO: 384234 - DNA, 122 bp, Homo sapiens
gtaagccactaaaaggaactgaaaacctaggtgtcacaataaacagtctacacagtctcacgtagaccaaaattctgatcattttccaggctgttgcatgaagtgatagagtatgattataa

SEQ ID NO: 384235 - DNA, 122 bp, Homo sapiens
aggcccgtcggacgcgatttggaaacgggtcgtgcccggcctagcccgcatctactcgcccggccacagcccagccacagcttagggactttgaggcgcccgcgcccctttgtcgcggtatc

SEQ ID NO: 384236 - DNA, 122 bp, Homo sapiens
tatacaatgtgtgttattactcacagttgtcttactgtgaccaaacactttataagcctgcggcaagtcagccttactctcagtaagtggacaatatttggggaaggagaagcagcaggata

SEQ ID NO: 384237 - DNA, 122 bp, Homo sapiens
acaccaggtccgcgatggagccatctgcactgggaccttggtccttgttccctgaccttgcgccgagggaccaggaaggtcaggtgctcgccccgcgtcggtgcttcaggagggaatgtggc

SEQ ID NO: 384238 - DNA, 122 bp, Homo sapiens
gagcccagacagtctagtgcccagattctctcctctctgctctctgtgtccccctgctgccgtgacagatcccaacatgatttctcagcttgcaggattggtgttcactagcccatttgttt

SEQ ID NO: 384239 - DNA, 122 bp, Homo sapiens
aaggtccccggggagagggcaccttggtgggcagagcctgaaggaagcaatagccaaggccgtgtggggctctcccaatgccagggaggtcccagccgagggagctgaccctgctctctctg

SEQ ID NO: 384240 - DNA, 122 bp, Homo sapiens
ggatggtggttgccaggggctgaggagagagggatataaggacttattgttaaataagtacggtaacagattttcaagatgaaaagctttctggagatggatggcagtgatagtaacaaagc

SEQ ID NO: 384241 - DNA, 122 bp, Homo sapiens
aaaaagcctccccgcccccccaccttaaatagtggcatcaagtcatgaaggccagtgaaacgtggttagtctcgtaaaatgacttccagttcttccaggtccttctggatagccaaatccta

SEQ ID NO: 384242 - DNA, 122 bp, Homo sapiens
ccagagctgcaaagataagatggcacccgagacaggtttcctataactgggcccagcacacgggggctgggagataataatgccaaagagaaaaagacagtcgcgggttcattactggcaca

SEQ ID NO: 384243 - DNA, 122 bp, Homo sapiens
cggagcccaaggtggcttgggaagctcaagaggaggccagtgaaccccgcgacccggagccgctctcattccgaaccccgacagcaggggcctccgcctcccacaaacggtcgtgctgacgt

SEQ ID NO: 384244 - DNA, 122 bp, Homo sapiens
ccagcccctcctgcaggatgcggactggttcttgggaagcagctggtacatttacatcaccggctgggagcagacaggctgggagttaaaatgtgttggaagaggacatgagcatgacacat

SEQ ID NO: 384245 - DNA, 122 bp, Homo sapiens
gctggagtggagcagcctctagaacgagctggaggattctgcctaccgatacagagccttcgagtcgtccggggccgccattacaatccacctccatccgcttggaaatggccttcgtcccg

SEQ ID NO: 384246 - DNA, 122 bp, Homo sapiens
ttcttttttttcttctcagcttaccacagtgcggagactcctttctgaaaaggccactcacgtgaacactagggatgaagatgagtatacccctcttcatcgagcagcctacagtggacact

SEQ ID NO: 384247 - DNA, 122 bp, Homo sapiens
ggcgggcacctggggtgggagcttgaggaagagctcaccaggcgagtcagggccaggcaccgagcccgccggcggcttcaggaacccgtccgcagaggtagacaagccggcgggggtagtgg

SEQ ID NO: 384248 - DNA, 122 bp, Homo sapiens
gacgtcccctcccgctctagacgtcctggccctgtgagactgaggccccgccgggggcaccgtgggagtctttgatggatgtggctgatgcagggtttccatgcaaatcacccacaatgctt

SEQ ID NO: 384249 - DNA, 122 bp, Homo sapiens
gaggcgcccccagccagtgcgctcacctgccagactgcgcgccatggggcaacccgggaacggcagcgccttcttgctggcacccaatggaagccatgcgccggaccacgacgtcacgcagg

SEQ ID NO: 384250 - DNA, 122 bp, Homo sapiens
ctctcccatcgcaggtgaccatggggaaagtgttggcagtcagctccctgcctgcagggccgccgccaccacctgtgccggccctcgtgggactgccgccacctccgccctagcatccaggc

SEQ ID NO: 384251 - DNA, 122 bp, Homo sapiens
gtccttgttgcctctgccagcttctgggggccccaggtgttcctcggcttgtggccacgtcgctgcactctccacccccgtcttcacgctgtcttctctctctccaatccgcctttgccttt

SEQ ID NO: 384252 - DNA, 122 bp, Homo sapiens
tagccttgtgctaagttggagggtcctagatgttacttcctttctcataattttctaaggcgtcctacactatccttactgagctttctcccttctggcttttcatttcctcttctcttctc

SEQ ID NO: 384253 - DNA, 122 bp, Homo sapiens
aaggaatcgctcaaaggaatcaaaggattgcagcgggctggtcctgctctgccttttcttcgggattccatgggaggctggagcccggcagatctcctactcaattcctgaggaattagaga

SEQ ID NO: 384254 - DNA, 122 bp, Homo sapiens
aacagcccctcggctgagggccagcacagatgagtgaggaacaaaggccagtgtgactcacggcctcattacagagactctgccaggccctgctgtccctccctgaaggtcaggctctcctc

SEQ ID NO: 384255 - DNA, 122 bp, Homo sapiens
gcaggcgtcactcccgcccgagggacgctcagggccccaggacagtgctgcgggccttaccgtcgccctgcaccgtggtgatgaggtgtccgtccaggtagacatccacattggacaggtag

SEQ ID NO: 384256 - DNA, 122 bp, Homo sapiens
gctgaggtcctgagctgcactgagagaagccccaagtacagcatgaagatgtaggtctgccggaaccgctgggccccccacccccattagcccctgctcccaggatgcaggatgcattccca

SEQ ID NO: 384257 - DNA, 122 bp, Homo sapiens
gtctttttaaaggagattggggacgaatattaatgactgtagccgagaatctatcaaatccgcccaattccatgccagggatagactcaggtccttgcaccgaaggcgagcccctgacacta

SEQ ID NO: 384258 - DNA, 122 bp, Homo sapiens
tctggtttccctgtgacctgcaggtactgggagttacatagctaagatgccaggacaccccgaaagccggaaaacggtgagagttcccgggagggtgttccaagatggcggtccggcctccc

SEQ ID NO: 384259 - DNA, 122 bp, Homo sapiens
tttagccaacagtaagaagtacacgtctttgcttccagaagggttcccctgatgaaacaccggaggaaggtgaagttgaactttacctgagccctgtgttcctggaaaacagcggtgattaa

SEQ ID NO: 384260 - DNA, 122 bp, Homo sapiens
cccagccccttctgctccagcagctgcctcagcaactagcccgagccccgcgcccagttccgggaatggagccagcacagcagccagcccgacccagcccatccagctgagcgacctccaga

SEQ ID NO: 384261 - DNA, 122 bp, Homo sapiens
cgactggagactgtagtcccccggtttccctggagaccaggcggaagcggccggaagtagcgctgcggttggcagcggcgggatggagaagctgggggtggagccggaggaggaaggcggcg

SEQ ID NO: 384262 - DNA, 122 bp, Homo sapiens
actccccacacccagttgatggctttccgtaataaaaagattgggatttccttttgattgcgcgtttgtgtgtttctgtattagaaaagcctgacaactgcagaggaattgcccatcttaag

SEQ ID NO: 384263 - DNA, 122 bp, Homo sapiens
tctgctgcgaggtgatgtagtcattgatgatggtctgccggttctccagcgccgccgtgtcggggtagccgcggatgaggtagggtgggtacaggtgcgggtaggtggggttgggggccagg

SEQ ID NO: 384264 - DNA, 122 bp, Homo sapiens
gcgcggccggcgttgccgctttaaggcggccgcggcgcgagcaggtctatggtaatgagccgccgccgcgactctgcagagctcgcccgcccgccggggaggcgagggagcgcggggctggg

SEQ ID NO: 384265 - DNA, 122 bp, Homo sapiens
gctgggggctcgagaactgagcggagctggttgagccttgaaagtgctaaaacgcgcggccgtgttattgattgaattccagcggcgcgggagcctctgcagagaacgcgagagatgaagat

SEQ ID NO: 384266 - DNA, 122 bp, Homo sapiens
tatcggagattcgctgggaaaaaaacatcgcgttgggagaaccgcctgggtttttgcactcgtggtggtgtgtattttgggacctttactgtgcagctactaaaaggagagacacttgtgaa

SEQ ID NO: 384267 - DNA, 122 bp, Homo sapiens
gcataattcaaacctgtgggcctcctgcattggggaaaggggatggtgagttgacaccatcgagtgaggtggcacctggcacggcccagctcacctcttggccagtgtgatgttgtaatagc

SEQ ID NO: 384268 - DNA, 122 bp, Homo sapiens
attcctcctttctccctccttcagccttgcgggcagaccctgtgggccgcctggaccgcgcgcaggagggctgggattgcggtggctgaaccctgcggacctctcccatctgctccaccccg

SEQ ID NO: 384269 - DNA, 122 bp, Homo sapiens
ccacccagcggggcaggctggcctttacctcctggaagagctccagactataggtgttgtcgtcgtcagcgaagaagagcacgccgggctgcgcgcgctggtgctggtgcctctggcgcagc

SEQ ID NO: 384270 - DNA, 122 bp, Homo sapiens
tggtaactctttgtttaacattttgaagaactacaaaactgttttctcaagtggctgccccgttttacaaacccaccagcaatatatgaggactctaatttatctgaatcatcaccaacact

SEQ ID NO: 384271 - DNA, 122 bp, Homo sapiens
cctcggtctcaagaagctcccgacagttctcagcagcgccaaccaggccatcagtcccttcgcccatggccaatcagggctcgggagatgaccgccaacccccgcccccccaagacacgccc

SEQ ID NO: 384272 - DNA, 122 bp, Homo sapiens
aaaagaatggagttgtttttgttgttcttcttattgttcaatattgtttggttgctcccccggccctccctcggattagaagcctctgctgctgcttccttcgaggctacggtcgggccttc

SEQ ID NO: 384273 - DNA, 122 bp, Homo sapiens
tgcaggggctgagtgcagagcctgagctagcaggtcagagtaggggacacctttcctacacgcatgggttattcccacatcaacaccaagcctggggccagctggtcaaccaggcaccttgc

SEQ ID NO: 384274 - DNA, 122 bp, Homo sapiens
aatcgtcgcggcaaagcagaggcaggcagtgagtggggggctttccggcagctgccctctcgagccagtcggagccgtctcagggtgtttcagcatcatcgtggctttctctctccgtcacc

SEQ ID NO: 384275 - DNA, 122 bp, Homo sapiens
cccgttgggttatgcagagacacagtagcagagacacagccctaactacagcctgccctccggaaaacatgtgtctgttcatatggaaatgacacaagtctagtgcttgtctgaaagtcatg

SEQ ID NO: 384276 - DNA, 122 bp, Homo sapiens
cagcctcctgggccttccaccaccaggagaaggctgccccccaaaggggagcagggccaccgtctgggtaagctgcatttttagagtcccccacaagagactgcagggagccagaaactgcc

SEQ ID NO: 384277 - DNA, 122 bp, Homo sapiens
taataaattctcaccaacataaacaggagttgatgtctctagaaagattctcagagttttcgttcttcctctctctctctttctctctgtctttccccctccggtgccacctccctacattt

SEQ ID NO: 384278 - DNA, 122 bp, Homo sapiens
tggtcccgaggcatgctgggataccgcgggccggtctccatagtaactggccgacattcgcgcaggccttcggcctgcagggaaggccctgatggttcagtgctttgcagacggtgcccttc

SEQ ID NO: 384279 - DNA, 122 bp, Homo sapiens
tgagaggactgcaagttgtgcatgttaggggaacacacattcactcaacccacttgcttccgtggtgtccaaacagcctgcatactttcctggagggattaggtgaaggtagaaataggctt

SEQ ID NO: 384280 - DNA, 122 bp, Homo sapiens
gacgctttcagtctttgacacaaagacacagagcagtcatttttggcagcgtttcatagccgaagacccaggatcagaaaggcaaaataacttgttcaaggttatagaactattaacaaaga

SEQ ID NO: 384281 - DNA, 122 bp, Homo sapiens
tagaagatgtgctccaccaagaaggggtaaaccaagaaagaaaatgacatgaaaggcacacgacagagactcaaacccaagagagaagccaagaaaggtcctaggaggatggccaagggccc

SEQ ID NO: 384282 - DNA, 122 bp, Homo sapiens
cctatttcctgctgcaggagcagaccttgtctccctacgggaactcagtagtgtctgccccggaatcagaaggtgctggctccttggggtgaggggatgggggcttgggctgagccccggga

SEQ ID NO: 384283 - DNA, 122 bp, Homo sapiens
agaaaggtgggggtcgaggagggctacttagctgagggagacgcgctccgctcacgtgtgcgggcacaagcgtctgtgctaatttactgccccaagtttccggggacttttcaaagcgtttt

SEQ ID NO: 384284 - DNA, 122 bp, Homo sapiens
ccaggctggagtgcaatggtgcgatctcggatcactgaaacctctgcctcccaggtactacggattctcctgtctcagcaccccaagtagctcagattacaggcatgcatcaccatgcccgg

SEQ ID NO: 384285 - DNA, 122 bp, Homo sapiens
aaattccatccagtttgttctccccgagtcccacctgtgttaaaataaacaagcaaatagcgccacaaacaacaacaaaaatttcctctctgatgctctaatgaaattcatccaaagatgca

SEQ ID NO: 384286 - DNA, 122 bp, Homo sapiens
cttaatgttaccaaaacattttaaaagcctatattctttgctctcaccagttccatagaacgtaccttttaaactctaaaatgctcttctggagcaccacatatttgagagtgactgactaa

SEQ ID NO: 384287 - DNA, 122 bp, Homo sapiens
gttgggcaggtccggggatttggggcgcggaggcggagcgcccccggagctcaccaggtgcgccacggccgagcgcacccggtttagcatgctgcctccctgccccgccctcggccgcggcc

SEQ ID NO: 384288 - DNA, 122 bp, Homo sapiens
cgacgcaagccctccgcgcgccgacatcctcctgccgcgccgggcggtctctggtgggggcgccgggggacaccccacctccgtttcctacgcggttccttccggacgaccacggccgggtc

SEQ ID NO: 384289 - DNA, 122 bp, Homo sapiens
cctgtgggttctcaggaggcgacggcgggaggccagggccatagctgggggactctgccacgctccttgcctgtggcctaggatgatcagaagcaggaattccagactctgtgctgaaaccc

SEQ ID NO: 384290 - DNA, 122 bp, Homo sapiens
cacaccctcctcctgcccttcctcatgaaccccagtcgcgcctctgccttctcatccctgcgcaccacacaggctcactcgtgcccagtgagtgctgaggctgctctgcacgtggagtgttg

SEQ ID NO: 384291 - DNA, 122 bp, Homo sapiens
gtgaggtttctgatacggcaagaggagccaaagagaggggacccaggccttcccctagctcgagagaacaaacccagaagaagggcagatccgaaggaaaagcgcaaaggcggcccaacccc

SEQ ID NO: 384292 - DNA, 122 bp, Homo sapiens
cgaaggtgactctctggatggaccagaatacgaggaggaagaggtggccataccgttgaccgctcctccaactaaccagtaagttaagactgctgttcaggaatttgggaagctggctccag

SEQ ID NO: 384293 - DNA, 122 bp, Homo sapiens
ggcagtgctggtacactctgagaccccctggcctgccctccgcctcaccttgtccagcaccggcttgtccagctgctgctgctcgatgcacaggtggcagacccgggccaggagctcccggg

SEQ ID NO: 384294 - DNA, 122 bp, Homo sapiens
ctatccgggctcacggtagtaacgttgcttccattaatgaagactctgttaccattatgccgtgaactaacaggcaaggtgcaaggtggtgaacgagttcctgggctcttcttttgtgtgtg

SEQ ID NO: 384295 - DNA, 122 bp, Homo sapiens
tccagacacggaagacagtggttttaatagagtaaaccaaaatgtaggatttgctctctccgatattctggaaaatcccactgctttagggcatagacttttcctgaaaatagaaggctgtg

SEQ ID NO: 384296 - DNA, 122 bp, Homo sapiens
cgggaggaagcggtccccctcccccaccgtgactctgcgcttcctgccccagccccggggcgggaggagacatttcccgttcacaccaaagttttcctggcagcgcctagacctgggcttag

SEQ ID NO: 384297 - DNA, 122 bp, Homo sapiens
agaacaagaagggtttgggacaagggtcctcttcaagggtagtttaatccccaagccatgcgccacgatcagaggggttagagatcctcccacacaggagggcagagggggattagtgctgg

SEQ ID NO: 384298 - DNA, 122 bp, Homo sapiens
aatactttcttattaagaaaccccatggttctctatagaacatgttctccttcagggtaccgagtaacacattcaacttgttcaactgcaagtgtgctcctggtggtctttaagtctttggg

SEQ ID NO: 384299 - DNA, 122 bp, Homo sapiens
gacgtcagcagcttgctgggcctccagctgcacccagctggtgatgttggtctgtgtgggcgtgtcagagactctagctcaacaaggaagtcccatgacatggtgtcatcactgcttttagc

SEQ ID NO: 384300 - DNA, 122 bp, Homo sapiens
ctaggagcaacaggctgggtgtgtggccagctaagccatctaggtttgtgtcagtcactccgtgatattggaagaatgacagaatcacctaatgaggcatttctcagaagggaacaccgtca

SEQ ID NO: 384301 - DNA, 122 bp, Homo sapiens
ctgtgtacagtaagagctgtgatataagtggaggtgttgaaccggtctatttgtattgttcgtagcctaaacattttagtgcactcaaaggctcatagactgtaaatggccttttgacagtc

SEQ ID NO: 384302 - DNA, 122 bp, Homo sapiens
gagctgctgtttgtataatgggacggtgctctgttcagggagttggagttcctgtaaggccgtcggagggaacccctgagttacaacgtggtgatggcaccttgggctagtggcgacccact

SEQ ID NO: 384303 - DNA, 122 bp, Homo sapiens
cgggtccggagatgcccccgagcgttttaaaatccagaaacatcacatggtagccacatccggcggctgttacctgctcgcagcacccagaccctcgccctggtttcccgggagcccgcaaa

SEQ ID NO: 384304 - DNA, 122 bp, Homo sapiens
cgtccaggagatggggggcagccccgcctggccagccgccccgtccgggaggtgggggggcgcctctgcccgaccgccgcgtctgggaagtgaggagaccctctgcccagccgtcaccccgt

SEQ ID NO: 384305 - DNA, 122 bp, Homo sapiens
ttctgtcgctttctctccttcaccacgcagtctgtgaacagcactttctacactcctcgccggcaagcaggctcgtgtcgagggtagcagattccactggcgattccactggtgctgtgagc

SEQ ID NO: 384306 - DNA, 122 bp, Homo sapiens
accaggaagtaggaggagacagggggcggagcgaagtgagcgactgcagggagaaaggggcgggggagcagaggatgctcatcttcagctgtgagtttggggtcacctgaggtgagctcagc

SEQ ID NO: 384307 - DNA, 122 bp, Homo sapiens
gaaaattcttgcaaatcagacagctaaccccggggcaatacgaaccattttcgcgccactcgctcaggaccgcgcagctgcacaaggagagtggtccccgtagcccctaaagcccccctttc

SEQ ID NO: 384308 - DNA, 122 bp, Homo sapiens
taaatgtcattagtgggcccagccacacaggctgtaaaggatgtgggcatgcgcaaaagtcgcactaattgtttctaaaaacatatttgtagccacgttttaatgtatcagtataatgctct

SEQ ID NO: 384309 - DNA, 122 bp, Homo sapiens
cggggccggtcactcaccactccgccgagcaggaccgcgggagcccgccccccactcatgcggcctacgctggtacaggagagttgatctcaaaggccacacgtcacacggagaaacaaccc

SEQ ID NO: 384310 - DNA, 122 bp, Homo sapiens
taaggtgccccaggctcctgtgctcctggccaggccctgcactcagacactgctggcacccgacactgctctctgggtacagcaagggcaatgtggcacttcttgtcctgcccgatgaagag

SEQ ID NO: 384311 - DNA, 122 bp, Homo sapiens
accggcgcgctttctgcccactgctgcccactgccttcctctttcagttgggtcacagatcgctacaccgttcccatcgccctcctgctcgaacagttccttctctttcctggcagtgagac

SEQ ID NO: 384312 - DNA, 122 bp, Homo sapiens
tcggtgcgctgcacccactatcctgcacccactgtccggcactccccagtgagatgaacgcggtacctcagttggaaatgcataaatcacccatcttctgcgtcgctcacgctgggagctgt

SEQ ID NO: 384313 - DNA, 122 bp, Homo sapiens
caccgggctccccggtagagttataggggattaggcggtgagttttgccccaaagggaatcgaatctagatcagaaccactggcgaagtggagcgaccatctgcccgaaacagcggagggaa

SEQ ID NO: 384314 - DNA, 122 bp, Homo sapiens
tggtgccatacctagaggactcctccaaaaaccccaggtttgagaactgggaccaaaagtcgagagccatgtgaagtggtgcccggcgccactccccccccacagccaggttacctccttgt

SEQ ID NO: 384315 - DNA, 122 bp, Homo sapiens
cccggagtctcgccgcgggagggtgcccagggcgagggcgtgcgagggggagtgactccgcgcgcgagggtgtgtatgagtgtgagtgcgtgtgtgtgtgtctgtgtgtgtggagaggggcg

SEQ ID NO: 384316 - DNA, 122 bp, Homo sapiens
tagaaactgccatgccatacaatactagtaaaaatattaacagggttccagttttccccacgataaacacttcaatatttttttctaaaatatcaaatcatttccattttttctcattttct

SEQ ID NO: 384317 - DNA, 122 bp, Homo sapiens
gcatgtgtgcgtgcgtgtgtgttcacgtgttctcgtgcgggcgcgtgagtggtcttcaaacgagggtcccgatccccggggcggcaggaagggggccgactccacgctgtcctttgggatga

SEQ ID NO: 384318 - DNA, 122 bp, Homo sapiens
acaataatgtaggtagatacatataatatatgatctaaaatattttaaaaattcacttaccggtcaagggaatttgaacttcttggttgaataatgctattaaaataaccataagtattaaa

SEQ ID NO: 384319 - DNA, 122 bp, Homo sapiens
cgtgcggactgaaagaggtgattcatggaaagcaattagaagagagcctggcgcagcacccgcagttaatgagagacacttttgtgatcatcgtcgtgtgaatgcaggtgcgcgtgcccgtg

SEQ ID NO: 384320 - DNA, 122 bp, Homo sapiens
cggagaggctacgggcactcacccttacttaagcgcactgccctgctgttgaactgcaggcgaggctaggtagcatctgggatgggacaggcgttcacaccggtgccactgaaaccccagac

SEQ ID NO: 384321 - DNA, 122 bp, Homo sapiens
gtttcccggcggcctgtgtctccgaggcggtagacagacattgacagcttgacagcgccgcgttctgctggaagagctaaactatagtgcaaaacccttaacccgtcccttttttcagcagt

SEQ ID NO: 384322 - DNA, 122 bp, Homo sapiens
tcggaagatccacagggcgctgtcaagggcgaagccgcggaagtggagcgctgcctggagcgcaggagcagagacctggaagccggggacaggcagcacaggcagtggggtgggggctcagc

SEQ ID NO: 384323 - DNA, 122 bp, Homo sapiens
gcgcgcgggggccgccgggaattgtagtttgtttacgagactccttcacatccccagtcacgcagcactaggaggaaacggactccacttcccagcagccctgctgactccggaaactgggg

SEQ ID NO: 384324 - DNA, 122 bp, Homo sapiens
tcctctctccaacctccgcgccccccggtccaggagcaagtattagtggtgggtgggaggcgtcgccagagagagggtcgcatgttccctgggggtccgttcagagtcaagggaggggcctt

SEQ ID NO: 384325 - DNA, 122 bp, Homo sapiens
cacggtggagctggccattgctgtgctggccatcctgggcaatgtgctggtgtgctgggccgtgtggctcaacagcaacctgcagaacgtcaccaactactttgtggtgtcactggcggcgg

SEQ ID NO: 384326 - DNA, 122 bp, Homo sapiens
cctcaggtcagaaacctgcacagggactgcgcgcacaaaatatgaggcccacagggaccgcgcgcgcaaaatatgaggcccacagggaccgcgcgcgcaaaatatgaggcccacaggcaccg

SEQ ID NO: 384327 - DNA, 122 bp, Homo sapiens
cccaggtggagagacagctaaggagctccttctttggtctgaatggggtcccctcaccttcgcacacaggaggccgggaggctttgagccggtagccggggtagcagttgcacttgtagtga

SEQ ID NO: 384328 - DNA, 122 bp, Homo sapiens
cgtcctggggtctgtgccgcgcctcgccgtcctcccctggaactcggggctgggagaggtcggcgtcaggaaggacctcatggggctttcacacgagagcacacatcctcagagccccccag

SEQ ID NO: 384329 - DNA, 122 bp, Homo sapiens
ggtagcctccctgccctaatctcatcactccagcagataattttccttccaatctaaccacgaagatttaagccaaccaacatgagctctcacacttttttcagcacaattctattattact

SEQ ID NO: 384330 - DNA, 122 bp, Homo sapiens
acaattttgccatcatcaaatcactccttgctgttaccttgtgtctcctgggagtgaggacgccccgggcacagatggaaattccctgaccttcggatgctatttcaaggacttcctaagac

SEQ ID NO: 384331 - DNA, 122 bp, Homo sapiens
cgccatgggggtgactctgctggaagctttgaactccatcctcccaacaacgcgcagggtcgacaatcccctgaggctgcccctgcaagatgtgtacaagatgggaggtgacccaggcctga

SEQ ID NO: 384332 - DNA, 122 bp, Homo sapiens
ataaaatccaggactccagagatgacctgttacttttctttcagcaagtctctaatttgccgaggagtaaacttgtaatgaaaagaaaccagaactccccaaggtagctccccctcacagtc

SEQ ID NO: 384333 - DNA, 122 bp, Homo sapiens
caggggccagttaatcagacacacataactttgctcctctctcctctacctgggtctgcccggccccttcaataggtgtgtgacgaggccctcttctgcctccgggtgcaggacaatgggtg

SEQ ID NO: 384334 - DNA, 122 bp, Homo sapiens
catcctgccttccctctcagcagacaccccgcccacctgggcgatctcagccgtgacccccgggcccctcgagtcaggatccccgcctcccaaggaccttgggcctttcaggggggcccggt

SEQ ID NO: 384335 - DNA, 122 bp, Homo sapiens
ccacacccccaggtgagcatccgacagcctggagcagcacccacacccccaggcgagcatcggacatcgtggaacagcaccccacacccccaggtgagcatctgacagcttggaacagaact

SEQ ID NO: 384336 - DNA, 122 bp, Homo sapiens
agccagcacctgtgctggtgcctagagctgcctgccccgccgcagtagccactggctatgcgcagtggccggaccccatgttcactcgcctacataccccttgccattccgcacctgtctcg

SEQ ID NO: 384337 - DNA, 122 bp, Homo sapiens
ggctctgttttctgcgtgaggcagataaatgttggagaaatgtggcaacatccgattcaccgctcatggctgtgtactgtctgcttttcctttccaaggggagaggtgacagtccctgaaac

SEQ ID NO: 384338 - DNA, 122 bp, Homo sapiens
caaaagtccctctttattcttcattagctggaacagatgagtcacttgcccacaatgtgacgaagtggccaaaaggaatgagattagcacaggtcatttagaccagtcataagtcatccatt

SEQ ID NO: 384339 - DNA, 122 bp, Homo sapiens
ctgctataatcagcattaacaccctgtattcatctctagaggtgcctttctgtcaaagggcggaaggagcaggacagacaatgtctcaccatctttatgacatcctagtgagtcagagaacc

SEQ ID NO: 384340 - DNA, 122 bp, Homo sapiens
gtctgaagaaactccaggtggcggccgcggcggcggcgaacactccctccgaaagagaagcgcagttctccaaagggtagggactctgggcggggctagcagtcctattccgcaaccgcctc

SEQ ID NO: 384341 - DNA, 122 bp, Homo sapiens
gcccattcattcgttgattctctcagcagacacgcacaggctgccttcagcgccagttgtcgccttccagctattccaaggactgaaaacacagatctgatcgtgcctcttcctggcctgca

SEQ ID NO: 384342 - DNA, 122 bp, Homo sapiens
ccgcccacaacgcgaggtgggccaataggaaggcggaaggatctgggacccgcctcataacgagccaggcccagcctctaatgaggcaagacgcactccagacctgggaaccttgaaatggc

SEQ ID NO: 384343 - DNA, 122 bp, Homo sapiens
gtgtgatcggggacagtatgtgctacgcactggctgtgtgatggtggacagtgtgggccacgcacttgctgtgtgatcggggacagtgtgggccgcgcactggctgtgtgatcggggacagg

SEQ ID NO: 384344 - DNA, 122 bp, Homo sapiens
cttgagaagatgctagaaattgttggtaactcatcagggaagtggaaattaaaatgacagcgagtccaggcgcggtggctcttgcctgtaatcctaacactttgggaagctgaggtaggagg

SEQ ID NO: 384345 - DNA, 122 bp, Homo sapiens
atcatgcctggaatgccgcttgccacttgggttatttctgctatctgtcgctcccggtgccgcagtgctaacagtttggcagatgggacactttttcttggaatttgtgtctttggtttgtg

SEQ ID NO: 384346 - DNA, 122 bp, Homo sapiens
ggaaggggtactgtcggaggtagtcggccatgcgccggggcagtggcaggcagtccacgtcggccaccagacggttgatgacaaggcggcacaggtgttgcaggctgcgggcactgcttctg

SEQ ID NO: 384347 - DNA, 122 bp, Homo sapiens
gagaggacagtggaccaggagagaggccagcattcttctgctctcttggtgagaatgaaccgtccattaagcctgtttgagattcatagtcatcacaaaaatgaaacagtggaactaggtta

SEQ ID NO: 384348 - DNA, 122 bp, Homo sapiens
ctcctgatgctcctttttctgacctgtctgtgagcccagtgttagactgatgctgaatggcgttagtcattatgagatggccttgatgtcaccatgggctttacaggaaatccacatttaaa

SEQ ID NO: 384349 - DNA, 122 bp, Homo sapiens
tcgtctctttgcagcctacacagacgacctgggtgctgtgggtggcgcctgcctggaggacgaggccagcgccctgcgcctggatgaggacagcgagcacccgcccatgattcttcggactg

SEQ ID NO: 384350 - DNA, 122 bp, Homo sapiens
tttgaaccctcttttcttttcgctccccttttgcccccttggggtgtgtgaagcgaggaacgtaaaggaaggcgaacatttggctctctttttccttcccctttctccgtggctgtgtagcg

SEQ ID NO: 384351 - DNA, 122 bp, Homo sapiens
gctaccaacagaccacaaagtcacaatgcaaaggatcagagctccctcaatgggaggggccgggggtggaagggaggagaaggagctggtaaaaaagagaaagcctcactcaccaaatgaaa

SEQ ID NO: 384352 - DNA, 122 bp, Homo sapiens
cccagcctgctttccctccgcgccctcccctctcctttctccctctcagaaccttcctgccgtcgcgtttgcacctcgctgctccagcctctggggcgcattccaaccttccagcctgcgac

SEQ ID NO: 384353 - DNA, 122 bp, Homo sapiens
gctgacattgaacttggctgcggcaactttggctcagtgcgccagggcgtgtaccgcatgcgcaagtatggccgcccctgccgtggtgggagcaccgccgcctggggcagaggggagtggct

SEQ ID NO: 384354 - DNA, 122 bp, Homo sapiens
tgtggagggtacaccaggtcccccagcagtgccggcccaccagcgctgcgcttgatttctcgccaggccttagctgcctactggcgaggtagggctcaggacctgcagccctccatgcctga

SEQ ID NO: 384355 - DNA, 122 bp, Homo sapiens
aggtggctggcgtgggattccaagctctgccaccaaagagactccggccgccccaggatgcggcctcggagcatcgtgccagcctccagggatcccagcgccgtttcctctgcacagctcct

SEQ ID NO: 384356 - DNA, 122 bp, Homo sapiens
ccggccctggtcgggagaggctctggcccttccctctcgaaagtgcaaacactccattctcgcttcccctttgcccctcctcttccagggacgacttcctcctccgcaatttctcacttctt

SEQ ID NO: 384357 - DNA, 122 bp, Homo sapiens
tggagattaaatgagtaaacataagaaatacctaggaaaatgcctggaatagacagtactcgcgataccttagtttctttccctcagctaagtgtcgaaattggacccctatttcttcttaa

SEQ ID NO: 384358 - DNA, 122 bp, Homo sapiens
tatacatttcaaatgtatagagtgtttgaatttttcaaaatgacagttttggggacgcaccgcttaggaagcagagacaacacagggtgtgggagcctagctgttaggtctctctctggcag

SEQ ID NO: 384359 - DNA, 122 bp, Homo sapiens
ggggcgcggcgtatataaggctaggggcgggcgccgctcttttgtttcttgctgcagcaacgcgagtgggagcaccaggatctcgggctcggaacgagactgcacggtgagtgcggcgccgg

SEQ ID NO: 384360 - DNA, 122 bp, Homo sapiens
gcgtcggggccgctcgtggggacctggggtggcatcgtgggctgggtggtcccctctccgcgcctcggtctgcacctctgtgaaacgggaaaatacccgccatgggccgttgaggggttaaa

SEQ ID NO: 384361 - DNA, 122 bp, Homo sapiens
agggcagctcgcttttgaggcagggattgctgaatgaggggagtggctttccaagttaggcgtttaggggaagaataccaactgtcagggacgaatgagagaacaggccaagcagccctgga

SEQ ID NO: 384362 - DNA, 122 bp, Homo sapiens
cggataaggtgagctaaagcttcaatgccttgaggggcttggcagggctcgggctcatcccggagaagcagccccgctttccagactagcagttcccagggatgggtgtgtgctaatcgcag

SEQ ID NO: 384363 - DNA, 122 bp, Homo sapiens
ctgcagctttctatgcaggaaacgaggatttgaacagtgatggagagatgagtaatggttcgatttggaacatattttatgggcagaacaaatggaacttgttggctcagaagtgggtggtg

SEQ ID NO: 384364 - DNA, 122 bp, Homo sapiens
ggacaacctgcagccccgcccctgcaggtgaacggcggcccagtccctgcaggtgacccgcggaccctccccgcccgtcctactaccgtcataggaccgcctccgcaggcgcactggagccg

SEQ ID NO: 384365 - DNA, 122 bp, Homo sapiens
agggggcgcgccgcgacggggcgggtggagcagcctggtttggggaattagcaccaaggacgggcgcgcgcgcaggtccccagcacatctgggcgagagcggcgccgctggagccgaggggg

SEQ ID NO: 384366 - DNA, 122 bp, Homo sapiens
caaacagcattacctagcaatagacaaatatttacctattagagatttctccactcagaacgggtacacttaggtagtttgactttttaagacttattgattttccctacattttaaaagtt

SEQ ID NO: 384367 - DNA, 122 bp, Homo sapiens
tatttcacaaagcctttaaaaagagtcagaatttcacttttcaccttttgtagatgtgcacgtgtagctgtagagctcatacttacgtttcacatggcatagttgatggatatgtaggtgta

SEQ ID NO: 384368 - DNA, 122 bp, Homo sapiens
cccggggcgtgcagggaggggcgccctccagggagaccctcgggtgctggcctggagctgcggtcccggagcgggagaggtggtggagagggggctgctttcaccctcttgcggggaggccc

SEQ ID NO: 384369 - DNA, 122 bp, Homo sapiens
atgcgcggcccgccctatccgggggggggggggttaggccgcgtcacgtgacgggctcagcgctccgcagtcacgtgacgctcgtccgcaacctctgctgtcctccgcggcgcccccttccg

SEQ ID NO: 384370 - DNA, 122 bp, Homo sapiens
aagacctaaatagagaatcagaggacctaataccgtcaagatgtccgtcctacccaatgtcggtcctacgcaatgtcggtcctaggcaatgtcggtcctacgcaatgtcagtcctacccaat

SEQ ID NO: 384371 - DNA, 122 bp, Homo sapiens
tcaggcaagaggacagaaatgctcctttcattcacctttcgaagcagagcatttggtccccgttggcctctgactctctgttgcggcaatctagatgttaccagaattcccgtgtttccttc

SEQ ID NO: 384372 - DNA, 122 bp, Homo sapiens
tgttctgccatcttgagaacaagctgccgtcgttatttcgtggctgaaatgggatctgctcgtgattcaccgtcattccgggaatgatcacagacattttcctaggaccttcagatcccact

SEQ ID NO: 384373 - DNA, 122 bp, Homo sapiens
caaactggaaagtcggcctaggtttccgaggataatgaaaggcacagcgttttttgacctcgacttcaggcctgaccccccactctctcggtcccgtacctcttctgcgggatgtaactctg

SEQ ID NO: 384374 - DNA, 122 bp, Homo sapiens
gtcttgaaagcttcttcaccgccttcactccccacacgctccctgtcactggctgaacatcggtgaagagacaaaactgtgaacgaggacattatctaaagtgcagagccccacatggtggg

SEQ ID NO: 384375 - DNA, 122 bp, Homo sapiens
ttctcctgtctttcttattttgagagtcaaggagtaacaggggctttctctgtgcagacccgatctaacctaaggctgtcctgcttctgctctcagacttggcaagatgacccagttcctgc

SEQ ID NO: 384376 - DNA, 122 bp, Homo sapiens
ggatgagaaagactgagacctagatgccctacagggccaatttgcacaaagctgtaaactcggggcctcttcccatttcagagatggggagagtgagggtgagagaagggcagtggcctgcc

SEQ ID NO: 384377 - DNA, 122 bp, Homo sapiens
cgccggcggtgcctccctggggggcagcggaggcagaggcagtggcggcgggatcttcgccggggcccgcgggaggaggaggaggagagggagaaggaggaggggaagaaggaggaagagga

SEQ ID NO: 384378 - DNA, 122 bp, Homo sapiens
actctgcgcccgcggcgtcccagctgtggaaaggacacagcctcctcgcccgggcaggagcgcccgcgggggaccagtcagtccctcaccctagcagtgggacctgagtggatccaaaagcc

SEQ ID NO: 384379 - DNA, 122 bp, Homo sapiens
agggtggcattactttgagcattctttgcaaggaaagctgagtgccttagagattaatatcgttccaagatttctaaatgaaagatccagggacagaaaactgataggcagaggtgttaggg

SEQ ID NO: 384380 - DNA, 122 bp, Homo sapiens
tagatatgagccactgtgcctggccttgaataaactattttaactggatcttgagcctttcgattattttaggttgacaaagggaaaaaaataaaaggcatcagctctttatatcccccacc

SEQ ID NO: 384381 - DNA, 122 bp, Homo sapiens
atctgcaccctattgtggcctcatccaaactgtatcttcctttactatgtataccttcaccgtgtaatggtcgggaccagaccaatcccttctccacttactgtaattgttggaactaaatg

SEQ ID NO: 384382 - DNA, 122 bp, Homo sapiens
cgtctcctcctgcctcagccgggtcagagcagggcccctgaagactggcgatcccgcgcccgactaccttggtcgtccggatatgctccatcgcaaggagacgtcagccggcagccggtctc

SEQ ID NO: 384383 - DNA, 122 bp, Homo sapiens
cctctttttatgttattctccattcaacaggcacttactgggcagctgccatgtaccagacgctggactagagaccagagatttaaagtaaaaaaatgaaataaaataaaaactccccccga

SEQ ID NO: 384384 - DNA, 122 bp, Homo sapiens
ggtatagggatgtattattgagaatcaacttctggtcagttttcagaaaaatggaatagtcgtatcactgatctacgtaaacaagttgaagaattgtctgaaagaaaatacagtgtgtctaa

SEQ ID NO: 384385 - DNA, 122 bp, Homo sapiens
ttctcagcctggtcagatcgcctggcccgggaacatgcccagaagtgccagcagcagcagcgagaagcagagggatcccgtcgacccccacgtgctgagggctccagccagagctggcgaca

SEQ ID NO: 384386 - DNA, 122 bp, Homo sapiens
gaccctctgccctgttctccatgttgcatttctcgtcagtttctcgggcggtgtagctgccgctgccaccagagccggcggggcatcgcgctgctcattcatccggccgcactttcttttcc

SEQ ID NO: 384387 - DNA, 122 bp, Homo sapiens
aactgcagagaggatatggggggccctaaaatctgacagctcagtgcatgtccggccttacgtgccttactttgtgctttgtagcctcagacctgtttctgctggtctgaggcaggagattg

SEQ ID NO: 384388 - DNA, 122 bp, Homo sapiens
ccagcccggccgcccccgcagccgccgccctgacccggcctggagctgtggaaccgcccgcgcgacctccagttcccgcccgcccgtgcctggcgctccagacctgggatcctcccggcggc

SEQ ID NO: 384389 - DNA, 122 bp, Homo sapiens
tactctacccagagtcgtggtacccctccattttaaagcaaaatccaaaagcaagcacggcggaatcttctggaagggggctaagatggaactcaggaggcgggggtcggtatggaaagagc

SEQ ID NO: 384390 - DNA, 122 bp, Homo sapiens
agggcgccggcggaaagttgaagagcgtttttctcgccgccgcgtgcattaggagctcgacgagtccgccctgggcttcctggtggggctgggcgggcgggggaggggccgcgcagcagcag

SEQ ID NO: 384391 - DNA, 122 bp, Homo sapiens
aacagaaggggcgtgtgacgcagtcaccgttgcctagggccacgttctgatcagatctgacgcctccagcgcccgaccccacgccaagagggccgggcctcagtttccccacttccaaggag

SEQ ID NO: 384392 - DNA, 122 bp, Homo sapiens
cctgtctagagctcacattgatgtctaaccatgcactgtcttctcactaagacatagtcacgtcatcagatatttccactcttcccatccatcttgctgggcatagtagcacaagtgttaat

SEQ ID NO: 384393 - DNA, 122 bp, Homo sapiens
acctcaacacagatactgaacaaaacatacccacataatactagaattattcatctttgacgatttagagaaggaactaagaaggtctcagaagctacggcatggatgatgccatttgagaa

SEQ ID NO: 384394 - DNA, 122 bp, Homo sapiens
ggacgggggcgaagggggcggggacgggggcgccccggcctaagcgggactaggagggcgcgccacccgcttccgctgcccgccggggaatcccccgggctggcgcgcagggaagttcccga

SEQ ID NO: 384395 - DNA, 122 bp, Homo sapiens
gtgaggccggcaagtttggagcgtggtcagacaataggggcgtggctacggctcgcggagcgcaaccaacgctctagaccagacctgggctcgagaccataactgtttggctttaacagtac

SEQ ID NO: 384396 - DNA, 122 bp, Homo sapiens
atccgtcctggaggaagaacggcacagacggagggaggctggggttggcagagactgggacggaagtccctcagtcccccaggagcctccttcatggacccggggatcccaagaggggctgc

SEQ ID NO: 384397 - DNA, 122 bp, Homo sapiens
gaacgccgaggtgcacgcgcaggtactggctaagtgcgcgccagggtgctcgggagggggcgggtgcgggccgcactgccgggcggggtgcgcgagtgaggagggcggggtgcgcgagagag

SEQ ID NO: 384398 - DNA, 122 bp, Homo sapiens
tcctagtttcgcttcatattttataacctcctgctgaaacaggtgtcctccacctagttgcggttatagatttccaagcccttccacaaccagatttggaaatatcccagatcttagatgtc

SEQ ID NO: 384399 - DNA, 122 bp, Homo sapiens
gggaaacactcagagttgcactgtcgtcgctgccgtttaattttcacaaataaaaatgcccgtgagacggaatcccccgcccacccacctgcccgagaccgtacaaccacattgaatcggat

SEQ ID NO: 384400 - DNA, 122 bp, Homo sapiens
atttccctattcactgcccttccctcacatgagcttgctaaagttcatagtcaaaattcacgtctgaaataaagaggcttgcaaaagaagctcatgtaatcccactccttaaataccactaa

SEQ ID NO: 384401 - DNA, 122 bp, Homo sapiens
gtgcttggaggggctgtggggcctgggtttcatgaacctattatggcacttgggtcttggcgtgacattttgctctctgttgtaggggtagatttaggttgccacagagtcaggatctgtga

SEQ ID NO: 384402 - DNA, 122 bp, Homo sapiens
acaggcccagcctcagcctcacagcggactctccacgcccagctagctctcgcctcactgcggcctcccaagtccaaagctcctgcctctcggccgctttggcaggcccagctcccgcctgc

SEQ ID NO: 384403 - DNA, 122 bp, Homo sapiens
gcagactaaatattttccatacaagtatgtaaatgaaaagatatacagtaagtgcacactcgatatgactatgcaggcaacagttagtttcagatactcttgtatagttcatgcacaaacct

SEQ ID NO: 384404 - DNA, 122 bp, Homo sapiens
ggaagagatcctgtgattcccatcccagggtgagaggtcaggtaagccagatgcctcaggcgttatgattactaaattaggccgccagcggtgcctcacacctgtaatcccagcactttggg

SEQ ID NO: 384405 - DNA, 122 bp, Homo sapiens
ggaggggcggcgcagggacctcgaggggacgtgaggggcagtgtgggaaccacgggggggcggtgaggggcagtgcagggaccgtggggggatggtgaggggtggcgggggggcggcgaggg

SEQ ID NO: 384406 - DNA, 122 bp, Homo sapiens
gcttgcaaaatagattccactgttactcactgtctgggccctgtaccagttcacttgggacgtttggaagaaaagcggacaagaggaccctgctaaggaattctcccttttaacctttaata

SEQ ID NO: 384407 - DNA, 122 bp, Homo sapiens
gagccagcagcattggtaacacctgggagctcgttagaaatgcagaatccaggctgggcacggtggctcacgcctgtaatcccaacactttggggggctgaggcaggcagatcacaaggtca

SEQ ID NO: 384408 - DNA, 122 bp, Homo sapiens
agcggtcttcggcgggcgcctcgggaggcctcttaccggcgggcagcgggaaggcggacgcggtgtggagcagcaccaggcagacagccacgacatcccataacttcatcttaaagtcccgt

SEQ ID NO: 384409 - DNA, 122 bp, Homo sapiens
gacggagcaggccagtgagtgacgggcaggtcgcccaatagcagcgtgcagaggcaggggcgtgccccggcgctgctacctgcgcgggcaagctcagcgcacttggcttaaggggcggcgcg

SEQ ID NO: 384410 - DNA, 122 bp, Homo sapiens
aaggttaaagtcagtaccctctggggtgggcctgtctcagttcagggaggaagtcctgcccgaaaaggctgcagcctacgctgtcactcttcattcagtccagcatctgatcacatctgtca

SEQ ID NO: 384411 - DNA, 122 bp, Homo sapiens
tcgtccgccatcttgagggaaactgacgcctgcagttgccgacccccggccagaggcaagcggaaacctgtggccggtcggagagacagggacgacacttttacgacggcccctgaagtcgg

SEQ ID NO: 384412 - DNA, 122 bp, Homo sapiens
aagcatcttggatgagtctatcacagatggttctagaccaggcttcacagacagcaaaaacgatgagaactaatgtggaagcaggtgatccttggtgcagtaagatgggtcccaaagtgtca

SEQ ID NO: 384413 - DNA, 122 bp, Homo sapiens
agggaaatgaagtgacaggacaatgaccacagtctgttcctgcagtaggaaccagttcctcgggtttcttcctagtcctttttagatatagctaagggaatcttacagacatggaaacaatc

SEQ ID NO: 384414 - DNA, 122 bp, Homo sapiens
gagcctgtctcttgtgatcaatgaaaagttttattaccccaggcatgctcaacagtcctacgttatgtcagcattttgtaggaaaagcattgaaggagcctcggaatatgttttccaccacc

SEQ ID NO: 384415 - DNA, 122 bp, Homo sapiens
ttttaacacacgcttcttgcccactatccggtccctgcggtcagtgggtgcagcaggggtcgcagtccaaacaaccaatcgcgacgcggctgcggggcgggggccacagcgctccgcctccc

SEQ ID NO: 384416 - DNA, 122 bp, Homo sapiens
cttctctctcagcactgcacgccgtgcacgagccgggcggtgtccccgtgtgcacaggcccgcttctcggggctgctgctgatccagtttaaacaggtctactgaaataggtcactctcgaa

SEQ ID NO: 384417 - DNA, 122 bp, Homo sapiens
aggagcgggagctgcgcgaggcaggcgggcgggcggaggatggggcagtgcccgggctcccgctgcagccgcccggggacacgccgtgcaccctccggctcggggctttctcggcggcggcg

SEQ ID NO: 384418 - DNA, 122 bp, Homo sapiens
tttcatgtcactgccatgcccaaggcctgtggcgataagccagatgagtttaaattaacccgtgcgtgtaccgtgccacaccaggctcaataaatattggttcaacgtatgagtgagtgatt

SEQ ID NO: 384419 - DNA, 122 bp, Homo sapiens
ccagggagcaggcacaggccagggtccgaattcgtaacaagcatccgggactccacatgacgcaggtctgagaatcgatcccgggttccagcccagccatcattttcagagaatacgggccc

SEQ ID NO: 384420 - DNA, 122 bp, Homo sapiens
gcccaggcgcctttacccggtttcattttcagtttaggccaaaaatccccccgggttggtcggggctgggcggggctcgggggactgggctgaccgcggggtcggggccaggttctcacacc

SEQ ID NO: 384421 - DNA, 122 bp, Homo sapiens
gagcaccgtggtgctggccacggatggaatcacgtccgtgctcccgggcagcgtggccaccgttgccacccaggtaagcaggttgcattacggcccgcacagtgtcctgctctccagctgcg

SEQ ID NO: 384422 - DNA, 122 bp, Homo sapiens
aggtaaagagcatcttcaaaggaggggaactatatatacttataaagtgaaaatgggcaacgagaatgttatttctccatgagaagccagttttttagatagtgctgctacttcaggtgggt

SEQ ID NO: 384423 - DNA, 122 bp, Homo sapiens
ccgcttcttagccccaagggatctttcctttggacccctggggtgggatgtctcagggcccgcggaatccgactcaccttcccgctgggctgcccgggactaaattaaccagcctgcgcccc

SEQ ID NO: 384424 - DNA, 122 bp, Homo sapiens
gtgcctctggctgcaaaaacaggcaggatcttccggccggtttgcccgccactcaccttccgagcatgcgcaccctccgagattgccaggaattgacttctctgtggccaatgaggtgccgc

SEQ ID NO: 384425 - DNA, 122 bp, Homo sapiens
tttaaaatgaaaccatgatgatagtagatagtagtttgtttgtttgttgtttttaagtttcgtaaccccaagtccatctgcagaattctggagttaaatttcctgacccatgaccctagatg

SEQ ID NO: 384426 - DNA, 122 bp, Homo sapiens
ttgaggttggcccacggccaggtgagaggcttccaaggcaggatacttgtgtctcagatgcggtcgcttctttcatacagcaattgccgccttgctgaggatcaaggaacctcagtgtcaga

SEQ ID NO: 384427 - DNA, 122 bp, Homo sapiens
agtcgtccacagcactaggccgccgccagcccgggcgagctgcctagggaccgcggacgccgcagcaagcagctccctgctcccgccacacccgccgagccagccgcgcggaacccactccc

SEQ ID NO: 384428 - DNA, 122 bp, Homo sapiens
gggctggggtccggaacgagtctgggctaagggtagaccgggatccggccaggaaccccccggctacaggcccttcaacaacacagccatcgtcaaccccggacttcctgctagttaggccc

SEQ ID NO: 384429 - DNA, 122 bp, Homo sapiens
agcatcacagatctaaggggaaacaaagcctgaaaaagaggaagaaaggaaaagactattcgtaagctttcaaaggagattggatggaaattctgtaattagaaggttaccatgtgtggagg

SEQ ID NO: 384430 - DNA, 122 bp, Homo sapiens
actgtcccccaaagtcagttcaatccccgacgtcctccgctaggctccaccccaccggcccgggcagggcctccaaggcacctcccacctacgggtcacccagtcagcccacttctttctgg

SEQ ID NO: 384431 - DNA, 122 bp, Homo sapiens
ttttgatcttctgccatcacaagtatgcagcttggtgtgtgtgcatctgtcatattcgttcgggtgtctctgtaagacagactcctggaagtgggattactgggtcaaaggtagctagtaaa

SEQ ID NO: 384432 - DNA, 122 bp, Homo sapiens
cgggggcagaggttgctttattctgtttacgataaagtattaatgtaaaagcattaattgcgtagcaccaggtatgtaataagcattcaacaaatggcattagtatcaaatgagatgagggt

SEQ ID NO: 384433 - DNA, 122 bp, Homo sapiens
attgaattgagttgtagaaaggttagtaacttgcataaaatccaacagtaggaaagtggccgatcccctgagacttcttataatctcacagtaggtaggtatattagtttcctagggctgct

SEQ ID NO: 384434 - DNA, 122 bp, Homo sapiens
tgaagtaaacccgagttgaaagctaacagggtaaaagtgcatcttaactgagtcaagaggcgtgaagaggcagaaggaacaatatatgcaaaagcttgatggagaaacagaatagttgagtt

SEQ ID NO: 384435 - DNA, 122 bp, Homo sapiens
attactgcaatattgcttccagatgggcaaacgcgcgctcggagcctggccctgcagacacgatggcccagcacgccgctcactgccgcgcctttgttctctgcttcctgctcggttcctgc

SEQ ID NO: 384436 - DNA, 122 bp, Homo sapiens
cacagacccggggatggacatccaacccggacacaaacacccagagcagctagtcgcgcacgcacatgggcttgggggggacccacacctgggcacacaacccacgcacacacacacctgca

SEQ ID NO: 384437 - DNA, 122 bp, Homo sapiens
tgtgggtttctcgggggcggggcgcaggggcggggcggggcgaggggctcgcagaggcctcgggttggccgagccgggagggaggagcattagtattagcatagcccccgccccctgcgcgc

SEQ ID NO: 384438 - DNA, 122 bp, Homo sapiens
caacccactgcagtaccacatcatgatgtccaagaaactctgcattcagatgaccacaggcgccttcatagctggaaatctgcattccatgattcatgtagggcttgtatttaggttagttt

SEQ ID NO: 384439 - DNA, 122 bp, Homo sapiens
ttgtctgtgactcgtcctgctacatttcttggttccctgaccgggaagtgaggtggttgacgggcaatcaaggaagccacttaggtggcttaggcctgccctgcagagcatccctgtggggg

SEQ ID NO: 384440 - DNA, 122 bp, Homo sapiens
gagaatcaggtttaatagtggtccattatctcactgccacagacacacaactgccattaacgctaaaaagtgacacagagttggaaccatgcttgagagaagacagcccttgatcatcagtt

SEQ ID NO: 384441 - DNA, 122 bp, Homo sapiens
ggaggtggcggggaaggaggcgtatgtgtgttgtggacatgtgtgttagcgtgtgcatgccggctgtggggcctcacagcatgtgtgtgcacaccccggcatgcgcatgtgtgtgtgttcca

SEQ ID NO: 384442 - DNA, 122 bp, Homo sapiens
ttggtaaatggtgcaggtacacttgaaaagaatgtttattcttctgttgttggatgaagtcgtctgtaaatgtcaattagatcaagttggatgatacttctgtttaaaggttgtatatccat

SEQ ID NO: 384443 - DNA, 122 bp, Homo sapiens
cagccttttttcctaattttgaatatgggacccattatgaatttgggtgtcacctatgtgcgggggctatggaaatctctgtcaccccattcatttgtgtgtgctgtcaaagcaccaatatg

SEQ ID NO: 384444 - DNA, 122 bp, Homo sapiens
ggcggccagagccttcgaagtcagaacccgaaaggagcgataattcaccctagtgtcccgcggcctcccgcctgccccctacccccgcctcgcagcctctggtttcaaaggcggacaaacag

SEQ ID NO: 384445 - DNA, 122 bp, Homo sapiens
gtccccagcctgcctgtgtgtgtttcctccttgcctggcttcctgaggtttggcctagggcgatgtgcaggcccctcctctctgcacagagccttccctgcatggctcctggagagggactg

SEQ ID NO: 384446 - DNA, 122 bp, Homo sapiens
tactgggccggtccatccggccctggcaggtgaggtctggcccagggcgggaaagaagggcggggcccactaggaggcagctccgcctgtcacccggtgaccccgcccccgagatgggctgg

SEQ ID NO: 384447 - DNA, 122 bp, Homo sapiens
ggagatcagaatttgaagttccactaaactgtatcacctggcatagactccgaggtagcccgaaatccagtaggtcacactggtgtggacagaaagatcttcaagggaagcccttgcttcct

SEQ ID NO: 384448 - DNA, 122 bp, Homo sapiens
cccctgggaaagcaatttgagaacactggtgaaagctagctctgtgcacggtgaaagccccgggctaggcaacttctcctctaaggaggtacccggggaagccccgccagccctgcatagaa

SEQ ID NO: 384449 - DNA, 122 bp, Homo sapiens
ggttgcaaggtgctcagtgggggtgctttttgagccaggatgagccaggaaaaggactttcgcacggtaatgtcatcacttaaggcaaggatcagccatttacacttcttttgtggtggaat

SEQ ID NO: 384450 - DNA, 122 bp, Homo sapiens
tctctgtgatgttcctgttcaaaccttttccccattaaaaaaatgggattgctaaccgggcgaggtggcaggcacctgtagtcctagctactcaggaggctgaggcaggacaatcacttgat

SEQ ID NO: 384451 - DNA, 122 bp, Homo sapiens
aataaaggatacatcaaaaagaaaagtttgaggccaaggggatcccccacatcagggaaccgtgcagtgggagcctgctgggtcctccaaagaatacacatgtatctcccaagaggcccgtc

SEQ ID NO: 384452 - DNA, 122 bp, Homo sapiens
gtgtggtcgctgctcaatttaactattgtgttatgacaaaaggacaatgcagattgattacgccattatcccccactgggtctccaagctgaatggccaatttggtatgactgctcagtttg

SEQ ID NO: 384453 - DNA, 122 bp, Homo sapiens
aggtcgtacctctgtcgggacagacgtggtgactcaagcgggagcttctcacgcactggacgtggcacagcctgggcagcgccggcccctgtccttcctgcggacctgtgaggagcatccgg

SEQ ID NO: 384454 - DNA, 122 bp, Homo sapiens
gacgtcgcactgtgtgggcgcaagggcatcgccttaaagagtgaacactgtccactgtctcggccgcagcggctgccatgggccccgtgttcatcactcacagtgagccgtgagtgtctggg

SEQ ID NO: 384455 - DNA, 122 bp, Homo sapiens
ccgtgcggctgctccagagcctgctggtgctgcgccgccggccctgctcccgcgacggctcggggctccccacacctggggcctttgccttccacaccgagttcatccacgtccccgtcggc

SEQ ID NO: 384456 - DNA, 122 bp, Homo sapiens
tcggctgctgccccgggtctggcagaactcgggtgttttgggctgagacagtggcagctgcggccccgaccccaagtgcggggacctccggcgaataaaggtcggcctgcgggtaggccggt

SEQ ID NO: 384457 - DNA, 122 bp, Homo sapiens
catagtgggcgtgtcggcgcgacccgcgacgtcgccacgcgccgacaatggcggctgcgtcggcctgagcagggcttagtttagaagtaatttcctgacgttgccgagggagccgcagtcgc

SEQ ID NO: 384458 - DNA, 122 bp, Homo sapiens
aggcagcctagtaaatgatactgtcccgccagggtggatgtgtcagtgctaaatacctgacgtactatctggcttatgagtggagcacaggctgagatttgggagaagggtcttatcaccaa

SEQ ID NO: 384459 - DNA, 122 bp, Homo sapiens
cagagcaaggccctgtttcagaaacaaaaaacaaaccccaaaattagctgagcctggtggcgcacgcctgtagtcccaagtagctgggactatggtgcaggagtttgaagtgggaggatcgc

SEQ ID NO: 384460 - DNA, 122 bp, Homo sapiens
ctgcaccctcctccccatcccccaggctgcacagcaggaggtgagcagccagcaagcaagcgaagcttcatctgtgtttacagccgctcctgatcaactggcattactgccttagctccgcc

SEQ ID NO: 384461 - DNA, 122 bp, Homo sapiens
tcctgcctcgcacacatatgtagtgtcacaagctccacactttggcccctgcctcgcacacgtatgtagtgtcacaagctccacactttcgctcctgcgtcgcacacgtatgtaatgtcaca

SEQ ID NO: 384462 - DNA, 122 bp, Homo sapiens
ctgatcatcttcttcttcctgatcccgctgacggtgtttggcctctcgctggccggctggcgggtgctggttggtgtcggggttcccgtcgtcttcatcatcatcctggtactgtgcctccg

SEQ ID NO: 384463 - DNA, 122 bp, Homo sapiens
ggcttggggaggggtccgggatctgcagccccgaggagcgggtagaagggtctgcgattgcgaggagggggctgggacgggggatctaggaaagggatctgggccccgcaggtccgggagaa

SEQ ID NO: 384464 - DNA, 122 bp, Homo sapiens
aaggaagcagttgattgacctgagagctcgctgctaaaaagcagtgcaagtggccatgcgcggtggctcacgcctgtaatcccagcactttgggaggctgaggcgggcgcatcacgaggtca

SEQ ID NO: 384465 - DNA, 122 bp, Homo sapiens
atctagcgtttcagacaccgccaacaagtggtgctgcccacccaggcgtgcaggtagaggcgctccggcaagatggcctctgcctcccacccctcaggccctgcagggcaccgggacccagc

SEQ ID NO: 384466 - DNA, 122 bp, Homo sapiens
aaaggagaacaggaggggctctgtggtacaaaggtggaagtcgccctgacagggactgcccgacagatgactaggctccaaagagagggatagagtgggccagaggatgccatgagggccac

SEQ ID NO: 384467 - DNA, 122 bp, Homo sapiens
tttcccgcgaaactcggcggctgagcgtggaggttcttgtctcccctggtttgtgaagtgcggaaaaccagaggtgaggctagtgggagtgggactgggactgggagccagcaggcatctgg

SEQ ID NO: 384468 - DNA, 122 bp, Homo sapiens
tccccagagccaggcgtgcgggagaggtgaggactggccccggtgggctgaggcaggggccgctgtcgtcaggcctgagccagggtgagctggtgcctgccttgcattttccttctggtgct

SEQ ID NO: 384469 - DNA, 122 bp, Homo sapiens
ccggccttccctaaggcccagctgaccgccatgcgtctcgcctcctccccacctcgcggccggcagcagccctccaggtttggctccatggattgattctctcagagcagctgctcggggcc

SEQ ID NO: 384470 - DNA, 122 bp, Homo sapiens
agaagcccacggctgcaggaggctcaggttgcccaggacactgccccaactcacagaacacgctggcccggtgacacagcacccgcccccgctcggggcagtatgtaggggctggttcctcc

SEQ ID NO: 384471 - DNA, 122 bp, Homo sapiens
cccaccctccgataagccctggaactacaaatcccgtcctgccatgcgccagggtcgccgcgctttggggttttggctgagactcaaattggcaggagggtctctagaccaaccgaggtgca

SEQ ID NO: 384472 - DNA, 122 bp, Homo sapiens
gtgactgcctcaggtttatgacttgagagaatttccaggccacagtacagagaaggagaacgtaggcagaatccagcaggctcctggatgtgagcaggtattgctgagaggccaggaacatg

SEQ ID NO: 384473 - DNA, 122 bp, Homo sapiens
aacttgaccacactctttaattcccttactattttttttttttttttgagatgggggtctcgctctgacacccaggctagaggacagtgatgcaatcacaggtcactacaggctcaaactcc

SEQ ID NO: 384474 - DNA, 122 bp, Homo sapiens
gaccctgcgtagtgctcctgggaggtgcatttgagctgtcctagaagggcttccagagctcgagctgttgccaagtttagaagtggccgcatgtgtggtgccagccacagcatcctattcct

SEQ ID NO: 384475 - DNA, 122 bp, Homo sapiens
atacttgaagtgcaaatcctcactcacctatcttttggcggaggccgatacatgcacatgcgcgcgcacatgcacacacacacacacacacacacacacgcacacgcacacgcacacgcaca

SEQ ID NO: 384476 - DNA, 122 bp, Homo sapiens
ctgagaagagacgctctgtgtgtggattcccactcgaaaggggagggtacagctggaggtcggaacggcttggttgctcccattcctggactaactcattattcactcaacaaatactaaca

SEQ ID NO: 384477 - DNA, 122 bp, Homo sapiens
aagacatagaatttacattaaagttactgggaagaaggtatccctagaagaattgtgttacgatagatgggtctggaacccgaaagaagctcagacctactatattggccagtggcaaaatc

SEQ ID NO: 384478 - DNA, 122 bp, Homo sapiens
gatggcaaacagatgcgcgcttccactgagagcgtgcatgtgtgtgcgtgtatgtgagtgcgtgcatgtgtgtgcgtgcgtgtatgtgtgtgcgtgcgtgtgagtgcacatgtgcgtgcagg

SEQ ID NO: 384479 - DNA, 122 bp, Homo sapiens
ggcgcggaagggaaaaggcctctgagatgctcgcgtgttttgcctgggcgcggtggcgcacgcctgtaatcccagcactttgggaggccgaggcgggcggatctcctgaggtcaggagttcg

SEQ ID NO: 384480 - DNA, 122 bp, Homo sapiens
tggattttacaatttcacaagtggacgtgtggctgaaaggccagtgtgggggatcctggccgggatgggcactgggtcccctccatgcacccttagggaacatcttctttcatgtttgaaag

SEQ ID NO: 384481 - DNA, 122 bp, Homo sapiens
tcgcaggtacatagaaaagtgacttataactgagagaccttgcggggcaggggcctgggccgcgggccggggtcagtcctccgggccccattctccaggtggctggatcgcgctgccagagg

SEQ ID NO: 384482 - DNA, 122 bp, Homo sapiens
cctactccgccccattccgcctctcccagttgggctgcaaccaatcagcaatgggaagggcggggccggggtaggagtgcagccagccggcgcgcggaacctggaggaatttacttagcccc

SEQ ID NO: 384483 - DNA, 122 bp, Homo sapiens
aaccaattgaattccaggtttcgtgggtccgctctaggcggctgatagtactcaatgctccggcagtcctgctccttcccggttacgtcccttccagcccttggcggagtctgcgggcgaga

SEQ ID NO: 384484 - DNA, 122 bp, Homo sapiens
aatcaccaacaacattagtttggaaacagcaatttgaaagcgaggctctggcggtgtcgccgattcctacaagatagcatcgcacccctgggtgtcaggaagctaagaggcccgcaggccgc

SEQ ID NO: 384485 - DNA, 122 bp, Homo sapiens
aaggcgagtagcaatccctcggttcggaaacggcgaaaggaaaccgcaaggaggccaccacgtcgggtgggagctacgaagttgcccgttcccggttacttccgggcttgcgagcgacgact

SEQ ID NO: 384486 - DNA, 122 bp, Homo sapiens
taaagataccttacaggggaatatgataggaaatgatcagtcattggggcagggacatgccgtatacttctgaatttcacatggtgctaagtatatctgtggccctctggaataatttttga

SEQ ID NO: 384487 - DNA, 122 bp, Homo sapiens
tgacttcttgttctgagctctgagtaaagaaagaaatatgttagaattgtattgtctgcccgcagtaatattgtaaagggttccaatggattccaatgtgattgagcaattacttcctccag

SEQ ID NO: 384488 - DNA, 122 bp, Homo sapiens
tgcaagataaagggctggctttgtctggtctagttcattctttagcaagaggatttctagcgtgattcttcttatatgttcttggcctcagatctcggaatttgatgcctctttcctttagg

SEQ ID NO: 384489 - DNA, 122 bp, Homo sapiens
accggagcaattgttatcaggttgaaaattgttgtcagacctgaaaaatgtgattttcctcggggaaaggggaagtaaaacaaggaacagagagagatccatttatttgctaagaggcaccc

SEQ ID NO: 384490 - DNA, 122 bp, Homo sapiens
gcccccggggcgggggcgggcggcggcggcatgggcgggaagggcatagtgcagccgagccgccggatcctcagcccctggaaagagaggcgggcgctcagccactgtgcgcggagcgggtc

SEQ ID NO: 384491 - DNA, 122 bp, Homo sapiens
cctgctgaacctccagaggcctgcggggaactcagcaggtttcttcatccaggaccagatcgctctggtggagagtgggggctgctccctcctctccaagactcgggtggtccaagagcatg

SEQ ID NO: 384492 - DNA, 122 bp, Homo sapiens
aattgagaaaccttttttcccccatcagagatccatcctgcaaagaaacctaatgtaattcgatctacaccaagcctgcaaaccccaactaccaagcggatgctaacaactccaaatcacac

SEQ ID NO: 384493 - DNA, 122 bp, Homo sapiens
gaatcccccagccctgcaatctcgggtcctgaaatctaccttagtccgtacctcgagaggcggagaggatcatgtccgggaactgcggggtagtagcgatctgggttacccagccgttgtgg

SEQ ID NO: 384494 - DNA, 122 bp, Homo sapiens
accaagtggcctgactcgtgtttgctttcttcatgggttagcatggggacggccacggtgcggaggctgcgaggtgctttaggcaggacatgataaattatcctaaggcagccttgtgaact

SEQ ID NO: 384495 - DNA, 122 bp, Homo sapiens
cttttcaaatacaaaatgtagattcacggagtgctaatcagagcctcacaagaatggaaccgcttgcctcattacctattctgacttcttcttatttttttcttttttcttcccctccttct

SEQ ID NO: 384496 - DNA, 122 bp, Homo sapiens
aggcagggttgtaatctccaaaggcttgcttccaagctcactcactttcaagctcattcacgtagctactgaggagcctttttctcctctcgatgttgacctctttatggacctgatcacta

SEQ ID NO: 384497 - DNA, 122 bp, Homo sapiens
tgctccaggctttttgcatagacgcccgggcaactgaatacaaaaagggcaggcctcctgcgccctccttcccaccccccttcctgccctgggcgtggagcaccgaccaggtgtgggcttgg

SEQ ID NO: 384498 - DNA, 122 bp, Homo sapiens
gggaaggcagcaggaggtggtgcggggacccgaggcgcctcgtacccggccgggctgacgcggccccgctacacacaaagcgcttcagctgcacagggcgctattttccgaaaatgccgcgt

SEQ ID NO: 384499 - DNA, 122 bp, Homo sapiens
aaaaaggaaaaagcactggaaaacagcatcgaagtcaccggaaagcagcatcgaagccaccggcgccagcctcatacctgcgcttcccgctcccctcctcggcgcctagtgataacctcacc

SEQ ID NO: 384500 - DNA, 122 bp, Homo sapiens
aactcccgacctcagatcatccacccgcctcggcctcccaaagtgctgggaatacaggcacgaaccactgcgcccggccttgagtttcttcattggcatttctgacaactttgtatccattt

SEQ ID NO: 384501 - DNA, 122 bp, Homo sapiens
gaggcccggccgacggccgccgcctggtgctacccacccaggggcgcgcgaccctcccttcggtctggctccaaagacctagcagcactgacttcacccagctgtggttccaacggcgggtc

SEQ ID NO: 384502 - DNA, 122 bp, Homo sapiens
gatttttttttttttttttttttttttttttttcttttccctgctccctctagaggaggacgctctgcctggctgcaagtgagaaacaaacccaaggtgcatacttaaaagtcatgccagtt

SEQ ID NO: 384503 - DNA, 122 bp, Homo sapiens
cggccatgactgtgggtgggtttaactcagctagcagctgcggcggtcttggcgcgctctcgccgagggctgctcagccccaactcggaagcgacggccccggctctccctcctctggcagc

SEQ ID NO: 384504 - DNA, 122 bp, Homo sapiens
aggaggacagcgggcgcttagaaggcaggcacccagcacactgaggaggagtggccgggacgagcaacgggcagtaattctacaacgggacatctaccttcgtagcacagaatgccgatatt

SEQ ID NO: 384505 - DNA, 122 bp, Homo sapiens
ctttgggtgtcaggtacatggagtatctcttcatggtgtccggtgcactccactcacccccgaagctgttcgtgtagttgttcacatagcgatggtcaccacctaggaagcagagggtcggg

SEQ ID NO: 384506 - DNA, 122 bp, Homo sapiens
tagtcactggccacgagcattttctcagggcagagatcacatttctgctctcagtggggccggggtgggccggaagccggagagggactggaacgccggtccggggaagccccgcgcgcacc

SEQ ID NO: 384507 - DNA, 122 bp, Homo sapiens
tgtaacgtgttagtcatccattatctgcttctatttttgcaggttctgaatgatgactgacgcgggtttgggtgatacccctcacagcccctgtcattccggagtcataaggcacccgcgcg

SEQ ID NO: 384508 - DNA, 122 bp, Homo sapiens
ctaggagtgcataggcaagaatgtctgctgctcacagagatggtggcctggctgggtctgcgctaggctgccctgttctgccttctatcctctagtctttgttccttcaactgatatttcct

SEQ ID NO: 384509 - DNA, 122 bp, Homo sapiens
cccggctgcccccaccacactggtgggccacaaagaaggccaccttctcctttgtattcccgggcttgatgacataccacgtgtccaggaggactcgaccctcatcaccagcagctgctgct

SEQ ID NO: 384510 - DNA, 122 bp, Homo sapiens
gtccattcaccactgcaggccaccttacctgtggggggttgaaactcaagtacagggcatcgcctgcggggaggctgcgccgccgaggatccacaggtctgcgggcccagggggcctcagct

SEQ ID NO: 384511 - DNA, 122 bp, Homo sapiens
aacagactctcagccattgtctgtggataggaagaccccctgagggtgagctaggtcatccgtcctccctctgcatcctccgtgcgtggcgagagcagaaagagcggctgtcagctgggatg

SEQ ID NO: 384512 - DNA, 122 bp, Homo sapiens
agcttggtgggttagtgctgggcaaaagccaggaacactcaagcggcctgtggaacacagcgccgtcctgcatgcccaggaaggagtcgggacttgtttcttctgtacccatacatcccctg

SEQ ID NO: 384513 - DNA, 122 bp, Homo sapiens
tggcatgccagttggctgacccaaccattgctttccctttcagactggcgatggcgtgaacgatgctcctgctctgaagaaagccgagattggcattgctatgggctctggcactgcggtgg

SEQ ID NO: 384514 - DNA, 122 bp, Homo sapiens
tcaggccccacggagattcccttttcggcacttggaggcctgaactcaggtctaacctttcgtgtgcgcgctctgatactcaaccaccgttcagtctccggaggctgttacaactgtcccca

SEQ ID NO: 384515 - DNA, 122 bp, Homo sapiens
ggaagagcaccagcaaaggcagagatgagagtaaatggagcattagggaaatggaggcagcggctgtgcctctgacagtttcctggtctggttaactccaatatgcctttcaggaccctagg

SEQ ID NO: 384516 - DNA, 122 bp, Homo sapiens
ttacttaatcatagtccaatcattacagctaggaaactaaccttggtacaatcctgttaacgaaactgtagactgttttgcatttctcatttttccactaatgtcctttttctgttccaaga

SEQ ID NO: 384517 - DNA, 122 bp, Homo sapiens
cactgttcttttttaaccaatcagaaacgtttttcaaacgtttgccctccccgctaagtgcgcaggctcctggaaagttgtcttcacttccgggccgcggtctagggcggctacgtgtgttg

SEQ ID NO: 384518 - DNA, 122 bp, Homo sapiens
aggtgatcacgttaccttatccatgtttgtgcattttcattgacccaaatgccttttacccgaactattttgttcagtcactcttcttttagaaaacttgtttttttaaacagtatcaaaat

SEQ ID NO: 384519 - DNA, 122 bp, Homo sapiens
gctgtgcagacgccacacacacagactctgtccgtgtgtgccctcaggcttcagtccctgcggtatcgcccatgcttagaggccgcccagtgctcagtaagtgctggcagaatcgggtaccg

SEQ ID NO: 384520 - DNA, 122 bp, Homo sapiens
accgccctcccctttcggtgaggcagcgccccctggtggactgacacgggcagttttggacgtgagcgttgtgaaagaaggaagtgatttcctaccctgcgctcggtagacacgtttaaatc

SEQ ID NO: 384521 - DNA, 122 bp, Homo sapiens
ggctttgctctccctctcccccctcagctcgtctgtatttggagctccggaagctgccggcgactctcccctggagcagcgtgactgacaccggctcctattcagctgggaggagggagagg

SEQ ID NO: 384522 - DNA, 122 bp, Homo sapiens
gccctcacaccttgagcgccaggtggccctcttccttttgctgttgatgaatgttcttgccgtggtgccgggatcttattttgcagctttacagagtaggctttgtgctaggtgttgtttat

SEQ ID NO: 384523 - DNA, 122 bp, Homo sapiens
cccaaagtcccagtttccctggagaaccaaaccatccaacacatcctgggcagcggaaaccgaaatggcaaatgaatgaccgcgccggggcgcaagggaggaaaaacaaagccacctcccgc

SEQ ID NO: 384524 - DNA, 122 bp, Homo sapiens
cagaaacgaaccaaccagttataagcccaggctggggcagcctaagttggcacaggcactcgggggcatgagtcaagagggtagaacccaggaaaagaagactcacagctgtgatatgccaa

SEQ ID NO: 384525 - DNA, 122 bp, Homo sapiens
agagaggcttcagaaccagtcctcctttcatttcaaaaccccagcgggccctctggagtccgccctgcccctcccccggccccccatccctcacttctgggctgtcatgctcctggtgtgcc

SEQ ID NO: 384526 - DNA, 122 bp, Homo sapiens
ggctgccccgcgcgcgcccccgcctcggtgcgcgctcctcgctttcgcggctgggcgcctcgcgcctgtcccgcccgactcgtgcctcttctgagccgcagccccagccccagccccaatct

SEQ ID NO: 384527 - DNA, 122 bp, Homo sapiens
ttccccacccacagcctagcccattgctcctgcctgtcccctcctggctgcccccagcagcgcttacctgtccatccaggcatgcaggagcactgtgggcggcccgaggcctggatgtggca

SEQ ID NO: 384528 - DNA, 122 bp, Homo sapiens
gatgtttaaaaggccagtggacaagctctgctgctctggcttcatgatgacatcaaagaccgttttcctccgccatccccatcacatgaatctcctcatgctccaaaatgattgctacatct

SEQ ID NO: 384529 - DNA, 122 bp, Homo sapiens
cagagtcctcctcccaggaaccgcctcggcgctgccaaggcctgtgcaccttcttcagcccgaactaaggagaatgtgcgggactgagagccatagaccctcgtgagccaggcttgagcgtt

SEQ ID NO: 384530 - DNA, 122 bp, Homo sapiens
agctcagggtggcgggcattcacaagaaggtgacccggaccactggcatctctgtggatccgaggaggcagaacaagtccaccgattccctgcaggccaatgtgcagcgtctgaatgagtat

SEQ ID NO: 384531 - DNA, 122 bp, Homo sapiens
cagacctgttatcggaaatgccagcctgttctcacatccacacagtgtgcctctgaaaagcgaataattgcttttacctgtgccaattctacaatttgagtccactgccacccacatttact

SEQ ID NO: 384532 - DNA, 122 bp, Homo sapiens
aatatgttgcatgtagtaaatgcccacttcactacgtaatcactcccttcacatttcacacgaacaaagattatattatcttcaagacagctgcaaaaacacgagtggtttcatggcagcat

SEQ ID NO: 384533 - DNA, 122 bp, Homo sapiens
aaaatttccacccttcctgtcaactgcttccactgtgggtgtatctggtgtatgtgagaacgaagaatcatgcattttggggaaagtaaatcctatttccttgcttttatggggaatactac

SEQ ID NO: 384534 - DNA, 122 bp, Homo sapiens
gagaggcatggggttggtggggaagcatggccagcatctctcagagagtatgagtgtgcacgtcaaacaccagcatcagagcaaggttgtcatgtgcagggtcaatgtgcaggacccaatgg

SEQ ID NO: 384535 - DNA, 122 bp, Homo sapiens
cctgctgtattcctccctctgaaatgccttcctcagccctcccctaaattccagttcaaccgtcaaaagccagaagccacccctgctgatgcgtagatgaccccaggcagcattcgtctacg

SEQ ID NO: 384536 - DNA, 122 bp, Homo sapiens
gaggctggcggagaaagaccggccccttcaccccaccttagacttcctggaagggccgcccgggtccacaacctggcccgttaactccctgggcagctgctggggaggaagaagcactgccc

SEQ ID NO: 384537 - DNA, 122 bp, Homo sapiens
gctaaattcagctttttaaaatctacccaacactctctagatttaaaaatgtaagtaaaccgttcagatcctattgttaagtaaattttgtttggtgagtggatttgttttgagtggctgtg

SEQ ID NO: 384538 - DNA, 122 bp, Homo sapiens
tttggtgaacagattttagctcatccagtgaaaatccacttttgtaatgtggatggtgaccggtgccactggatgggaaaattacaattcatcgctgaccggattccctgggccctgcaggc

SEQ ID NO: 384539 - DNA, 122 bp, Homo sapiens
cctctcttgtcttccggagtgtggctggcggagctgggatggcggaacgaggcctggagccgtcgccggccgcggtggcggcgctgccgcctgaagtgcgggcgcagctggcggagctggag

SEQ ID NO: 384540 - DNA, 122 bp, Homo sapiens
ttcaccttctccctgcacctctgcacttccctctgggtttcctgtctgtacatccagtgccgcgcgtggcgtggggcgtggcgtggggtggttcctcacagttaccctcgctgggtgtgcgg

SEQ ID NO: 384541 - DNA, 122 bp, Homo sapiens
gcgcctctcccaggacccgcctggctgcgagatatgtaagccgcgatacttccgcgaccgcgctcgtcttggtttccgtggttgttgctggggcaacagcaggctcctcccctagctttgta

SEQ ID NO: 384542 - DNA, 122 bp, Homo sapiens
ctgtccgttcagagatgctgcggctgggccagagtattccttggcatccccaggccccaacgcagcacaagagggaggaggaaaaggaggtcccagggttgatcctcagacacacgtctgcc

SEQ ID NO: 384543 - DNA, 122 bp, Homo sapiens
aagttcctaaatgaaacacgtgggtttagtggaaaaaatgggagtagtccaaattcaattcgctgaggcagaaaatacgattaacttgatcaaactgaaatggagaaagcaagatataaaat

SEQ ID NO: 384544 - DNA, 122 bp, Homo sapiens
aaggccttccaagggctgcgggttcatccagtgctcacctgcctgtcctatgaagggacacgagcagctgaccagggacagcagggcagccccagggatgggctccttttaaaaaaacagct

SEQ ID NO: 384545 - DNA, 122 bp, Homo sapiens
gtggttaaagaagcccatcccggctgtgagaatagcgtgcagtagctcgcgcgttaagaacgggcagaacgccactcaaaagcacgtcgggatggtgggtttcggattggggtgagtcccgc

SEQ ID NO: 384546 - DNA, 122 bp, Homo sapiens
ccaggatgcagtgttcagagcaatacttctcagtgcacgtctggctgtgtccctgcccagcgctcccagggtcacccctctctctagactcactttctgccccgtcaccccactgtacaccc

SEQ ID NO: 384547 - DNA, 122 bp, Homo sapiens
ccagggcgcctccacacatttttttaaatacacaaaacatatgtactaaaaacaatggggcggtgaaaacaaaatattgcaaactagaaaaaagacaaaattgacattttaaagactttatt

SEQ ID NO: 384548 - DNA, 122 bp, Homo sapiens
tcccggatactcaccggcgagccgcagctgcctccccctggctgctcctcacagcgccgccgccacggtagcagctccgggggctccacttcccatcccgaagtcagtcccgggtcgcagcg

SEQ ID NO: 384549 - DNA, 122 bp, Homo sapiens
agaggctcccttctcatagagtgaaaaccacagctttcaatggctcccaaggcctctacacgacctgcaccattagccccctggcctcccttcctaccaccctccccctcactcaccctgtc

SEQ ID NO: 384550 - DNA, 122 bp, Homo sapiens
aggaaagataagaatgagggagaaagaggaagagagaaagaaaaagagaaatagagttatcgaagatgactgcaagtctggcctctctcaacccaaggagccaaggaggggaaggccggcct

SEQ ID NO: 384551 - DNA, 122 bp, Homo sapiens
tgagaagacagtggatcccaccctatgccttaacctgagggcactgggtttcattttccccgcggggaggcgcggcgcgggaaagggtaatggaggccaactgcggcggccaagggatccgc

SEQ ID NO: 384552 - DNA, 122 bp, Homo sapiens
gaatggacggaatccccattgtgtgcgggcgccttgtgcccaccctccccttaccctcgccggacgttgccaacaaacagctcattgagcccagggaggggcccaggagacaacaatgtccc

SEQ ID NO: 384553 - DNA, 122 bp, Homo sapiens
ttcctgtctcctttcagctgtaacctaggccggtggccacctccccgtcaggcagagaaacgtacacaaagaattggggatttggatttacaccgattgtggctttcagtcccggttgtgtg

SEQ ID NO: 384554 - DNA, 122 bp, Homo sapiens
ggtgtgggatataatctgctggtgtgccgttttttaagcccctcggaaaagcgcagtattcgggtgggagtgacccgattttccaggtgccgtctgtaacccctttctttgactaggaaagg

SEQ ID NO: 384555 - DNA, 122 bp, Homo sapiens
gagttcaacaggattgccattattttaactagaattcagttgagagcagagcgccatcgccgtcttccgccttagtcactcggccctgggctggctcacgcccgccccgccccctccccgcc

SEQ ID NO: 384556 - DNA, 122 bp, Homo sapiens
caagtcccacagtcttctttccaataataaacaataccccaacaaattcccttctaggagcgcagtggccctggataccaagtggcatttcctgtggattcttttcctgggggaggcctttg

SEQ ID NO: 384557 - DNA, 122 bp, Homo sapiens
actgctgcctcaggcaacgggctttccgactccttggcttcttatgtgaggaaaccacagcgcggccggcatccagagagtcggttagccgcgaagttcccgccggacgaagggaccagcca

SEQ ID NO: 384558 - DNA, 122 bp, Homo sapiens
agttctagttacacccaatagcaatggcagaggatttgattcagagaccctaggaggttgcggggctaagcctgagcaattccagactgtcctgccaaagcccatgtggacagagatataat

SEQ ID NO: 384559 - DNA, 122 bp, Homo sapiens
gttgtgctaggtctccagtgggttttcagagacacacaccgcagtgtgtgggaacctcatcgagaatgaaaagataatccaagaagggggaagagaaggcaaaaggactcaggagagcaaag

SEQ ID NO: 384560 - DNA, 122 bp, Homo sapiens
atgtactctcagcagacagagctgtccttgaaaggaccgcgcccagctttgtgagaaactcgccactctgtcctggttcttttcatcttgtctccaaccacagacccgcatcagatgccgga

SEQ ID NO: 384561 - DNA, 122 bp, Homo sapiens
cacagtgcaaaggcgcctttatatggtggccggcgactgagccagacctggtaatttagccggaagatgcgctggggagagcagggccggcctgactcatgccactaggcctcactctgccc

SEQ ID NO: 384562 - DNA, 122 bp, Homo sapiens
aggcagggagggagactcacgttggggacctcccccaagtctgggtaacaccgtcttggccgcggcccgcgggttgggaaggtagggggcagtgagccgtagcggagaggctggccccagcc

SEQ ID NO: 384563 - DNA, 122 bp, Homo sapiens
tgggcggggcggggcggggcggggctgggcgggactggaaccggcacttggcaccccttacgccttacggtggccgctgcgcccagtcacatctgtaagtcggttaattttggcgctcggtc

SEQ ID NO: 384564 - DNA, 122 bp, Homo sapiens
gagactctgtctcaaaaaataaaaataaaaaataaaaaataaaagtcagttgccaaatcacggtgcttcactcctaagtagttcagcatgtatatccaaaggggcgttctcctgtgcaacca

SEQ ID NO: 384565 - DNA, 122 bp, Homo sapiens
gctgcccggaacttagagagtttccctttaagccggagatgctgctcggacacccccccgcgtccaacaggaggcgatgacgtctgtagcctcgttgccagaacagtccccaggctaccgct

SEQ ID NO: 384566 - DNA, 122 bp, Homo sapiens
aggcagcagccaaaattcaagtcagagatgctagggaggcccttctcctccagaggggcacgtagaggcagggaggggcagtggtctgggagtttcctccagcctgagggagaccatgaagt

SEQ ID NO: 384567 - DNA, 122 bp, Homo sapiens
agctccagcccagccagtccagccagccccaggggtccctcccagccccgtcggcactcccggaccctgggcagccctgccagccctcccagcggccactcctgggtcagcgcagctggccc

SEQ ID NO: 384568 - DNA, 122 bp, Homo sapiens
gagaccgggaacgccggaagaggcggggcaggggctgccgtgagcggaagcggcgccattcgtcttccgagcgctactgccagctgatgccgggagctaactaccgcgccggggccggggcc

SEQ ID NO: 384569 - DNA, 122 bp, Homo sapiens
gaagaacctattaaattatttacagacaccacctccgagggtaacctgaagcctcttccccgcgctgcaggctccatcctggagtccagaaatctgcaggtgggagacagacctggcctggc

SEQ ID NO: 384570 - DNA, 122 bp, Homo sapiens
ctgggcccggcgcggggtgggccgagccccccgcccggccagggccacgtggcccctacccggaagaaggcgcccacccccgcaaagggaaagccgcaagggcaagacctcggggcgcctgg

SEQ ID NO: 384571 - DNA, 122 bp, Homo sapiens
cctggaatccaatcctgtcttcaccacaccttttgatatcccaggaaagttatttcacctcgctgtgcctcagttccctcatttgtaaagtacagaaaatgtcacagtagtgcctatttcat

SEQ ID NO: 384572 - DNA, 122 bp, Homo sapiens
ggcgcccagtggtcctgccgcctggtctcacctcgctatggttcgtctgcctctgcagtgcgtcctctggggctgcttgctgaccgctgtgagttgtttttgccccgaccagacgggagttg

SEQ ID NO: 384573 - DNA, 122 bp, Homo sapiens
ttcacacacagctttcagacaccaaacaccaagagctggtgcccctggttgaaaccaccacggcaacacgatacctaccacccacctgacagccacccactcatcagtgacactcccctacc

SEQ ID NO: 384574 - DNA, 122 bp, Homo sapiens
ctggcgacggtaatgagggagccagggacagggccagagcagaggcgctctgcctcaggccgcgacagccgtgctcggggctcctcacagctggcgggaccccgagccgcccggagccgcca

SEQ ID NO: 384575 - DNA, 122 bp, Homo sapiens
aaggcgggggtggggtggggtgggggtcagccaacacccaattaacacgatttcacgccgcgtatccgagaagccgcagggtgggcttctagggtcccaatccaccctcaccttggccccgc

SEQ ID NO: 384576 - DNA, 122 bp, Homo sapiens
ttctactcagtcctggtgccgcagacccctcctcctggttcccagagatcctggccagcccggtctcaggcaaggccatgtagaatgccgggagtgataattgcgtattgtttcatgactgc

SEQ ID NO: 384577 - DNA, 122 bp, Homo sapiens
gcgatgcccgggtgcccctggcaacaccccctggcatagcctgagggggtggggttgggccgcagcccagctatggggagagctcccctcaccccactgaggtcactgtgcccagaggcaga

SEQ ID NO: 384578 - DNA, 122 bp, Homo sapiens
aaatggacctttctctgacatagttcttggcatgggagccagccacaaatgagattctgacgtgtccaggtttctcctgagctcatctacatagattggtagacccttcctttggattagga

SEQ ID NO: 384579 - DNA, 122 bp, Homo sapiens
ccaggcccaacctgctttgagttttcggctcgtttttctttctcccccagcaggggccagcggcacccgccagtgcccgtgcccacgccgcggcccgccctcgccgtctgcgtgctgttccc

SEQ ID NO: 384580 - DNA, 122 bp, Homo sapiens
cctttgaccccggaaaagagatcttccgggttcctctctccccaagatggctgctgaggacgagttacagctgccgcggctccccgagctgttcgaaactggtagacagttactggacgaag

SEQ ID NO: 384581 - DNA, 122 bp, Homo sapiens
ccttagtcccaggcatctgactaccgggaacctcagccagagtccgggagccccccaccccgtccaggagccaacagagcccccgtcttgctggcgtgagaatacattgctctcctttggtt

SEQ ID NO: 384582 - DNA, 122 bp, Homo sapiens
ggcgggactaaaagggcgtaggtagatcgccgggggctgacgagtgcaccatggccaccgcggcaacctcacccgcgctgaagcggctggatctgcgcgaccctgcggctcttttcgagacg

SEQ ID NO: 384583 - DNA, 122 bp, Homo sapiens
gccccaaggaggcattggtgatttgaagcatcagctcctgctgtggctggaaatcgagctcggaagatgtcagttgcagctctgtgaccttcaccctacaggaggcctcagggtcagatcca

SEQ ID NO: 384584 - DNA, 122 bp, Homo sapiens
ccagtcggcgccgaggtgctcagatggattagtgagacgaccaattagagttgcacactgcgccgaggaggcgggcccataggcggaaaggctttgaacgcaagggggtgtggtcggggtga

SEQ ID NO: 384585 - DNA, 122 bp, Homo sapiens
cacggcgggtgacagttcacaaggcacatgacatccctcatcttgatctcccggtatccgcgcattttaggaagaaacatgctcaaagggatgaagggtccgctctcaagcattttagctag

SEQ ID NO: 384586 - DNA, 122 bp, Homo sapiens
gactgatcatctaggaaactgcctggtcctcagatatcagagctatctgctccttgaccacgatctcttgtttgttgctctagctcggggagacaccctccatggtcactgtcatttgttta

SEQ ID NO: 384587 - DNA, 122 bp, Homo sapiens
aaacctgaacataggacacgctgtgcatctcgcaccactctgagcatctacctgctgtaacgtactgcctttcagccttagtagtggactgcttcaggaaatttgtcagataggagctgagc

SEQ ID NO: 384588 - DNA, 122 bp, Homo sapiens
ctccgttatcctggatccaggtgtgcaggtgccggttcaggtactcagtcatccacagggcgatgttgtccaccaggggcgacatctcccggttgacgctctccacacacatgaccccaccg

SEQ ID NO: 384589 - DNA, 122 bp, Homo sapiens
caggacaaagaggcacgcctggctggggtccgaggtgtagaacctggagccctcgatggccgctagaatgttttggtaactttcggcgattttctcccctttttgctgtgggtatacgtaga

SEQ ID NO: 384590 - DNA, 122 bp, Homo sapiens
gaatgcctcagtaatgctctattaacccgcaggaagtgtttctcaagagaagcttgcatacggtaaatatattatgtggaagaggggggtgggtggggggcggcggggggctgggctgcagt

SEQ ID NO: 384591 - DNA, 122 bp, Homo sapiens
gcagcgctgggctcctcgtgcttctgtgaacggaaaaccagaggtagcaaatagcagttccgttctcgtgattcttaattctttttccacaaggacattacctttaaaagtatgctttccgg

SEQ ID NO: 384592 - DNA, 122 bp, Homo sapiens
ctttacacttggttctccctggctgacttctcttgctgccagggcttcagtgatgggagccggcagcatggagggagaggggcaaccgcagatgtggtaaacattctgcagcagaggtctga

SEQ ID NO: 384593 - DNA, 122 bp, Homo sapiens
cgggagtaaaacaaaagcagcagaatgtggaggagtcgacacatggaatgagctcgcccacggggtggcggcgcctcccacttttccctcgacctttcctccacagtgtggaaaaaaatgcc

SEQ ID NO: 384594 - DNA, 122 bp, Homo sapiens
ggccggtggtagttgtacaaacagctgtgtgcttattcatcagcggtgctgtgcgagatccggtgggatgcgtgtcatctcccgcgctgtgcaccggagataagtgcggcctggagatttct

SEQ ID NO: 384595 - DNA, 122 bp, Homo sapiens
gagcctcgggacagcaagagccaagcgccgggacagccaggtgccagccagtgggggagccgggttgtgcccaacgctgccaatggctgggcaggccagcccccgcccacgtggcagcaagg

SEQ ID NO: 384596 - DNA, 122 bp, Homo sapiens
gcggaagcccgagccgcgcgtcatctgcacgcgccggaagccacgagccgcatttcctgccgcgaggctgagtgtctccagttcctaccggcccggcgaccccgcctttagctagtggccaa

SEQ ID NO: 384597 - DNA, 122 bp, Homo sapiens
cacctctcggctggaagtacgtaatttttagcgagtcacagaaaaatagggaaacttatgcggcgtttccttggccacttccccatctgggtgatcatgtactcagacccagcactgcagcc

SEQ ID NO: 384598 - DNA, 122 bp, Homo sapiens
ctctcacttccttctgttaatctgcacttcagagcctcagggcttttcttgagctgtcctcgccagggctcaaccccctcactgagtcttctcttgggaaggtcaggtttcccgtcctggct

SEQ ID NO: 384599 - DNA, 122 bp, Homo sapiens
ggcaaaaccttggtcactgcccggccggaaccgccatgttgaggccgaaccctgaccaaccggcagtactactcccagctgcccccgcgcgcgtccctcacgtgactgtgttaaaggagacg

SEQ ID NO: 384600 - DNA, 122 bp, Homo sapiens
gttgagtggaattcctgagcctgtgttaactggtcacagtctactgactctcataattagcgcaagaccactgtgttgtgtaaatgccactcagtattcaacaatgactaaccactccattt

SEQ ID NO: 384601 - DNA, 122 bp, Homo sapiens
ctgcgccgccgccaccgccatggtcaggtacatgcgcagctggttccgggccccacgcaccgggaccccctcagctgctgcgtctgccaagatcttcagccgcagcgtccggatctgggtgg

SEQ ID NO: 384602 - DNA, 122 bp, Homo sapiens
acagagtctcactcactcagtgctcaatgttgccctggctggattgcagtggcatgatctcggctcactacaacctctacctcccagccgtctgccttggcctcccaaagtgccgagattgc

SEQ ID NO: 384603 - DNA, 122 bp, Homo sapiens
agcgcggcgcgggggaggctggtgatggcagggccgtggggtccacctggacagggcattcggccgtgacccctgcgagggtgcccttagcctctgcccccgagcaaccccttcttgccggc

SEQ ID NO: 384604 - DNA, 122 bp, Homo sapiens
gcccgcccccggggggaggacctggggcacagagacaacacgaagatgagctaaggtgcccggtagctttaatgagcaccttttcctcactttgtccctccctctctactcttccccttccc

SEQ ID NO: 384605 - DNA, 122 bp, Homo sapiens
taaagtgctttgtcagtgtctcttctattttggccaagaatggtttctgcctacccacctcgtgacactccccaccccatatagttacagcagttgggggtcccagcaggaaacagatggca

SEQ ID NO: 384606 - DNA, 122 bp, Homo sapiens
gcttgggcaaggggaaatgggattggagaggtgactggcgctgacccaagagaggacagacggggtgaccagagtggaggatgagccaagccttggcacagacccaagcgggtggaggcccc

SEQ ID NO: 384607 - DNA, 122 bp, Homo sapiens
tgcttgcctctctagtaacaactttctatttaaaaagaagaagatttttctccaaagcagcgtgcactgagctcagtaactttggatcccacgtacacaagcttaaagcacacacactttcc

SEQ ID NO: 384608 - DNA, 122 bp, Homo sapiens
tcgcacggaccgcctcaaaagagcccaggatattgcagagcgcactggagccctggccagcgcgcagccttcccggcgccggcgggctgggtcttgggaattctggtttgctttggctcact

SEQ ID NO: 384609 - DNA, 122 bp, Homo sapiens
aaagagataaaaatggaaatatcaaggcagcaacttctcttctgattacaaagcaggcagcgggaagcagcgggagcccatgaggacgcagctgcacagccgggcgggcctgataaggcctc

SEQ ID NO: 384610 - DNA, 122 bp, Homo sapiens
cggagcccggtgctgtttggtctggagccgagcggagcttgcattgatccattgattgcgcgcggtctgcgcctgacctccctgctcccggggaagccgtctccatggagaccaggcccgct

SEQ ID NO: 384611 - DNA, 122 bp, Homo sapiens
gggagccaagaaagacttccaacactccccaagtttcagctcaagtcgtctccgaggctgcgtgtgccccagcctcgcacgcctccctgcaacgtggccgcatctggggcgccctcataccc

SEQ ID NO: 384612 - DNA, 122 bp, Homo sapiens
tcaaatcttgcctccattatttactagatgtgtgacctgatgaagatcatttaccttcttcgtacctcgatttccttacttgttaaatggagtttataatggtacctatttaagcacgttgc

SEQ ID NO: 384613 - DNA, 122 bp, Homo sapiens
ggggtgaatccatggcaacaggagtcacaggtgaaccaatgggaaaccaaacacacgcatcgaaagccaatcaaacacaaaccccaaatgtgaaggcagcagcaagttctttgtgtaataaa

SEQ ID NO: 384614 - DNA, 122 bp, Homo sapiens
agtccagcaaagatcagaaagagagcataggctgtgtagtaaggggacgattttgccctccgagggacatttggcaatgtccagacacatttttggttatctgactcagggtaggggtttta

SEQ ID NO: 384615 - DNA, 122 bp, Homo sapiens
gtcaagaagcgccatttatcttcccgtgcgctctacaaatagttccgtgagaaagatggccgggaactcgatcctgctggctgctgtctctattctctcggcctgtcagcaaagtaagaggc

SEQ ID NO: 384616 - DNA, 122 bp, Homo sapiens
tttccactcacggaattccacttctgttctccaagcagctctctgtctaaccagtaactgcgactctcctccaggtggaagatctcaccgccagccatgatgctgctctcctagagatggaa

SEQ ID NO: 384617 - DNA, 122 bp, Homo sapiens
cgggatgaggtgcagctcttgggataagaacagttgccgagtccttgccgcctgatgccccggggtggggtgggggatgggtctaaatcgaaggaggccagagattgcccggttctgggcaa

SEQ ID NO: 384618 - DNA, 122 bp, Homo sapiens
acgtgcggctcagagcccaggtgggtatggggaaggaagcggggcggagtggcctgggatcgcccccggctcaggagagagacctcttggcactaccgtgtccctccattccggccaccaga

SEQ ID NO: 384619 - DNA, 122 bp, Homo sapiens
ggcccttctgaaaggctccatggtctctggagagcagtcaggtgacagactgaacccaaccgggcccagtgacacaacttcccacttaggcaactacacagcccccagatcccattcctggc

SEQ ID NO: 384620 - DNA, 122 bp, Homo sapiens
agaaaccaaggagtcactttttcatctagattacttaggattccttgacttttcagaagtcgggaagcagtatgtttgcctgttgtagacctacttgctcacatgcagatttgagaggacct

SEQ ID NO: 384621 - DNA, 122 bp, Homo sapiens
cgccgggcccggctcccccggcgccgcagcgcggggctccagccactgccggccggttggcggccgccgctccggctctgcccgcgctccccgcatccctccgccgcccccggggccgctcc

SEQ ID NO: 384622 - DNA, 122 bp, Homo sapiens
ttgctaaatgaggcataagtctgtctcacatacgttctttttccacgtccgctacaggttcgggggctcagaaactttttgcggcttcctgcctgctgccagaaaggcagctagtcccccac

SEQ ID NO: 384623 - DNA, 122 bp, Homo sapiens
agaagacagaagcggctggtcacggagagcatgtcagcagaagaacacacctacagacgccggctcgcccgcgggctccccggcaggccatcgaccggtgggacgaggtggagtttgtcctg

SEQ ID NO: 384624 - DNA, 122 bp, Homo sapiens
ccctcacggctcttctcccggtccctgaaactcggctgccaggggagctggagccacctgcgaaggtgtcctcccatactggacccctacaggtaacacgtgtcggtgccagggtcccctgc

SEQ ID NO: 384625 - DNA, 122 bp, Homo sapiens
cactcctcccaccgccgctgcaaggtgttccccagggtaccatttaaaaagccggcggggcggcagtcggcgcgggaatccccctcgccggcttcttattggccggcgccgcggtgtcgtca

SEQ ID NO: 384626 - DNA, 122 bp, Homo sapiens
tgtgtctggaattggttccttccggtgggttcttggtcgggctgatttcaagaatgtagccgcggaccttcccggtgagtgttacaactcttaaacatggtgtgcccggagtttgttccttc

SEQ ID NO: 384627 - DNA, 122 bp, Homo sapiens
aataattatcttttgaagacacttgctgtgtgggctctagactaactgagaccaagtagccgtcaaatgctgtgcatgctatagttcaccaatgcatagccaatcactaaccaatgctattt

SEQ ID NO: 384628 - DNA, 122 bp, Homo sapiens
taaagtattgtacgtgcatttatatcatttaatcccaaaaccaccttttgaaggggatagcgttattattagtctcattttacataacaggagactcagggcacttgctcaaactaacacag

SEQ ID NO: 384629 - DNA, 122 bp, Homo sapiens
gcccaggaaagtcctgcggcaggggttggtaccgcctcccgcgcaggtatgtgacgtcatcgcgccgacgaaggcgcccgctaggccccgcctgctctatttaaacttctggactcaacctg

SEQ ID NO: 384630 - DNA, 122 bp, Homo sapiens
gtactggaccccaggggctcgggctccggcggggcctggagtcctgtgtctagggttgggcgtgcaagcctctccatcacttgtcctcgacgctcgcctccgctcacagcctcagcatccca

SEQ ID NO: 384631 - DNA, 122 bp, Homo sapiens
gccagatcagaaggtcccactccttttaagccccttattgcccaatcatttttccagtcacgtgtctgaagcagtttatcctgattggattttcagttgttgtccagcttgattgccaaaag

SEQ ID NO: 384632 - DNA, 122 bp, Homo sapiens
gagcccgctggagccacctcccctcttgtgtcttcggcagtacatcatctcccaggccgacgggcagagattcaagttcacctccctgtgttccacttagtgattcatcaacccagcatctg

SEQ ID NO: 384633 - DNA, 122 bp, Homo sapiens
aaattattgtagtttatgccatttgggtttcataggtgaatacagttaaggtgtactttacggctctaggctatcccaggcagagggatttttaacactggtctctccagttttattgtcag

SEQ ID NO: 384634 - DNA, 122 bp, Homo sapiens
ctaaagaggcgtagcaacccgtggaaagaaacagttccagcaattgcaagcgccaaatcccgccctctgagagcacacctgctcatctcaatggcagctagatgttatttcaggagcgagga

SEQ ID NO: 384635 - DNA, 122 bp, Homo sapiens
ggcgacacagcaggaggcgcccaaggacatgacgttgagcctctcagggtcccccttggccgggccagggagcagcgccccacgctccatcaccccctctccccctcccgcggtcctggctg

SEQ ID NO: 384636 - DNA, 122 bp, Homo sapiens
attaggaataaggggcttaaggcaaaatcagggctaagaatttaaaacccaaatagttcccggatgtgagaaaacttcgtgagaatttactttaggatttatcatcggttcctctccacatc

SEQ ID NO: 384637 - DNA, 122 bp, Homo sapiens
cccaccgagaggggccagcccatggtgcacggtgccctgagcctggcattgagcagcgtccgcagcaccgaaacccatgtggagcgcgtgctgagcctgcagttccgagaccagagcctcaa

SEQ ID NO: 384638 - DNA, 122 bp, Homo sapiens
attcttttaattaactgccctgctcaggtggtcagtgggccccacttcccagacacaccacgccccagagaatgcagggtagatgggccccagatccagagaactgctcccggcccacgggg

SEQ ID NO: 384639 - DNA, 122 bp, Homo sapiens
aggcagggccacataaactatgtccagagtgtccataaaggggtggaacctgtggaggaccgatttgtatttcgttgttctgatggcattaacttttcagagagacagttcttccccattgt

SEQ ID NO: 384640 - DNA, 122 bp, Homo sapiens
cagttaccgccctcatggaattcacaatcaaggtcaaaaggcaagcaaacgctgacaatacggctataaaacctaactcatcccattttcagccaataaaacctttctagaatgtgaaacaa

SEQ ID NO: 384641 - DNA, 122 bp, Homo sapiens
aacccataaacttgtctaagaccaccgaagttgtccaaaggcccgataagtcaccaagaacgttttagagcgcctccaggaggcttatcggatttacaccccttttgacccggcagctccca

SEQ ID NO: 384642 - DNA, 122 bp, Homo sapiens
aggctaagcagcaaggccctgctggaggagaaggggctgagcctctcgcagcgacttatccgccatgtggcctatgagaccctgccccgggaaattgaccgcaagtggtactatgacagcta

SEQ ID NO: 384643 - DNA, 122 bp, Homo sapiens
gaaaaatatgacatttttagtgttaaatagagatattatggaacataggttaaaattttgcgtgcatttttactgtgaaagaagactttaaaaatgtgggatctgtagttggatgctttggg

SEQ ID NO: 384644 - DNA, 122 bp, Homo sapiens
ttggttttctttttcccgtcttttctttcccctccccctacaggtcaaagcctttaacgtcgtggctaaatcagaaccgtattttctcggcgcagccccgcaggaaggaggggagcgcgttc

SEQ ID NO: 384645 - DNA, 122 bp, Homo sapiens
cctcccgcacggcccctcccttggcctagttctgtccaaagacacttcccagccctcgagcggcggctcctccactcgattcctgcctacacgtgaagagcttggacccagcggggctgcac

SEQ ID NO: 384646 - DNA, 122 bp, Homo sapiens
gtctgccccaaacaacccaaagtcttttgaaacctctactaggatgggaaagcaccaatgcgatgggtgaaggtttctggtggtctcagcttatacagatcaaagcctttccaacctggttt

SEQ ID NO: 384647 - DNA, 122 bp, Homo sapiens
cactattctatgatttcacaaggaagaccttcggttcaatgggcagcaaactctaaaggtcgctacagatcaagtatacaaagcaaagcttttagggcttagtcttaaatgctacaggaatg

SEQ ID NO: 384648 - DNA, 122 bp, Homo sapiens
ttgaggcagaaggtaaaagctgttactaagggaaagagccaaacggttcggagcagccaacggctcagacactcaacactggggagagaggaatggggaccagccaggcacaaatgagctcg

SEQ ID NO: 384649 - DNA, 122 bp, Homo sapiens
tgtataactctaggtaaatcatttgccttttctttagtttcctccactataaaatgagaccgttgccttacagttcctctaaggtgttttgaaagacattacaatcagtggaaaagaagagc

SEQ ID NO: 384650 - DNA, 122 bp, Homo sapiens
gtcaacatgtcacattgtgacacatggacaaacagcaggcctggacaggcaaagtcacatcgattccaggccacacaccacacacaacaaagggcaggggaatgggtgggggctgctggaga

SEQ ID NO: 384651 - DNA, 122 bp, Homo sapiens
tttacatttctcctcgacttagatttcgtgagcaaaatgggcccatgttttattttttctcgtgcgtgggccgtcgtgaggctttaaacaggaaactgggacagcacccgggctccgctacc

SEQ ID NO: 384652 - DNA, 122 bp, Homo sapiens
ccccaaagtccattgtatccttcttatgcatttgcatcctcatagcttagctacctctcacgagtgaggacatacgatgtttggttttccattcctgagttacttcactgagaataatagtc

SEQ ID NO: 384653 - DNA, 122 bp, Homo sapiens
gttcagctctcaatcttccatctattgctttacactgagaattttggagcctccctgattcgggagcagctcaggaattgccaaataatttaggcagaatgtatttgtagaccttgacaggc

SEQ ID NO: 384654 - DNA, 122 bp, Homo sapiens
aaagaaggaagggagagggatggaagaagactggcaagtggaacgtgacacctttttacacggaaggcaagggtttctgaagttccttctttagaagttaataagactggccgggcgtggtg

SEQ ID NO: 384655 - DNA, 122 bp, Homo sapiens
gcccggagagagctggccgggatgaggcgccggctttcccgggtcttctccagctgccaccgctttactgcaaaactgacgggcgcaaaaacatgagtgactccgcgggagggcgcgctggt

SEQ ID NO: 384656 - DNA, 122 bp, Homo sapiens
ctccgtacagcacccccgccgccgccgccgcggccgccgcctcccgggcatcgaacctggcggctggcagcagcacagaccccagggacccgcccgggatctgctgggtctgagaggcggtg

SEQ ID NO: 384657 - DNA, 122 bp, Homo sapiens
aaggtgaaagtaattcatctctgacacagcatctcacacttagcctggttagataggagtcgagatgtccctccacaacctctctctgttttcccttcctcaggaagcggcagctccagcca

SEQ ID NO: 384658 - DNA, 122 bp, Homo sapiens
agggcccacgtctcccgagaggctgtggcgcagtctggacccaagccattgtgagagcggcggcgatttcgaaggtccccaagacccactaggtagcagtaccacccagcgggcaggcagca

SEQ ID NO: 384659 - DNA, 122 bp, Homo sapiens
acgagacggcggcggagtcggaggaggagccggactccaggtagcgcgagcctctctcctcggcccagggcctgcagggcagctagcagcacccttgcttgtttgctttaagtttttaagct

SEQ ID NO: 384660 - DNA, 122 bp, Homo sapiens
ccccacccttagctcttccataaactgtctatctttgtacttctaaaacttcaaagaaaacgatcccatttcctgactacaacttatctctctcatttgatgtggatttgtagttcttggac

SEQ ID NO: 384661 - DNA, 122 bp, Homo sapiens
ctgataaaagtgagtgaagcccgagtatgtgaaagaggaagagagctgccctctgtgactcgcctttccactggggacctgagcaacccaggcctactgagcatactgtttctcccaagccc

SEQ ID NO: 384662 - DNA, 122 bp, Homo sapiens
cgtccacacggaagcccgacccacaacaaagctagtgacagttcatttccttcctgcttacgggggccggcgagaggaaaggatggcggatgtgagagggggaggaaggacgcgggctggga

SEQ ID NO: 384663 - DNA, 122 bp, Homo sapiens
agagccactgaaagctgaatacctgtttcaaagagtcaaccggtaactcctgaaaaacatcgagctagaaaaagacaggcatggcttcaggaagaagacaagaatttgagatctggcatgag

SEQ ID NO: 384664 - DNA, 122 bp, Homo sapiens
ttgtttccagtaaatcttagggactcgtccgggatcccattctccttcgggaggggctagcgattatctttcatggggagacgcgtcccattgcctcgtggtggccccaggagcggaggatc

SEQ ID NO: 384665 - DNA, 122 bp, Homo sapiens
gaaatgcagtcggccatacaagcatgaattgtcttaaacacaacaagcagacctaaagagcgtttgtgcgtctctctcctcttggctcgagtcacaaccccataacgtaaatcaatatcact

SEQ ID NO: 384666 - DNA, 122 bp, Homo sapiens
ctccaggcagtgtacagcatgatgagctggccagatgacgtccctcctgaaggctggaaccgcacccgccatgtcatcatcctcatgactgatggtcagaagggacctctctcctgtcccag

SEQ ID NO: 384667 - DNA, 122 bp, Homo sapiens
ctccctcctccgtgttgtccgcctgcagtccttcgggtcactgttctcgggaggccgccccgccccacagtcaggctgtgcccatcccccgccgccccccacggtccccgagccccagcgct

SEQ ID NO: 384668 - DNA, 122 bp, Homo sapiens
catcaccatgttcctggggaggacaagattcctaatgctgaggcaaatggactgctatgccgttctattcaagcctgaacattacggactggacactcatttagggatgtgagaaggaggga

SEQ ID NO: 384669 - DNA, 122 bp, Homo sapiens
tctttacaagctacccaaacaaaaacattttcacacatatgataaaagaaattcttaggccgggtgtggtggctcatgtctgtaatccccgcactttgggtggcggacactggtggatcacg

SEQ ID NO: 384670 - DNA, 122 bp, Homo sapiens
cgggctcgcacacgtgcggcgcagcgacgcgccgcggcccgactggacccgccccgggggcggagtccgctccctgccgccggccccgcccccggcccacccactcggagcggcctgcaagc

SEQ ID NO: 384671 - DNA, 122 bp, Homo sapiens
gctccgactctggccagggcgcgcccccgcacggctccccagcgctgctgctgctgaccacgctgctgggaaccgccagccccctggtgttctaggtgtcacctccagccacaccggacggg

SEQ ID NO: 384672 - DNA, 122 bp, Homo sapiens
tggcccccagggtgccctggctggtggccaacagtccagggccagactcccctgagtttgcggcagttggtctctaatggatggtaccaccagtgccaaggacagcaaacgctctgtgctgg

SEQ ID NO: 384673 - DNA, 122 bp, Homo sapiens
gggtcttggagtccataaaaaacattcaattagcagtgcgcattagagaggagaatgatgcgcattagagaggagaatgatgagaaactgaatacataactatccaaaaccctcaatgtggt

SEQ ID NO: 384674 - DNA, 122 bp, Homo sapiens
tcccccacccccaggcctctccatattgctgtggtgcagggtaacctgccagctgtgcaccggctggtcaacctcttccagcaggggggccgggagctcgacatctacaacaacctacggca

SEQ ID NO: 384675 - DNA, 122 bp, Homo sapiens
ggcagggctcaggacctgcagcccgccatgtctgagcctcccacccactccatggactcccgtgcggcccgagcctccccaacgagcaccaccccctactccacggcgcccagtcccatcga

SEQ ID NO: 384676 - DNA, 122 bp, Homo sapiens
gctgaccacgtcgtccgctggcaggtggagtttggtggacagctcaatgaggctgtcgatcgtctgcggatccatctcctcgtcgtcctcctcctccccgccctcctctgtcccctcggcct

SEQ ID NO: 384677 - DNA, 122 bp, Homo sapiens
acagggggaccctcagcgagacgcagggactggcccgcacctctggccgccgcctcccgccgagaaccgagttctagttggggaaacgtctgacatctggacatcaaggtaagaccctgatg

SEQ ID NO: 384678 - DNA, 122 bp, Homo sapiens
tgtcagttcatgctatcatttagtctgctaatcaatcattcaacaaatatgtattgattacgtcctacatactagctactgaggtcatgatgattagcaaaagaggcactgtccgtctgctt

SEQ ID NO: 384679 - DNA, 122 bp, Homo sapiens
gagcgagacggaagcagctcaggagacttgaggcgtaggctgcggtccccaaggtgaccgcgccctatgtgggactcgccctaatgcctctgaacctgggtttgaggtaatgacctttctcc

SEQ ID NO: 384680 - DNA, 122 bp, Homo sapiens
ttcttcatctccctccccggcccttggcaggagcctcgccctacattggctcttcaagtccgggcgtccccttcatgtgggagacacagcccagaccattccatcgccctggattctgcccg

SEQ ID NO: 384681 - DNA, 122 bp, Homo sapiens
ggggcatttcctccctaactcaatttcaggaagcaggaggctagctctgcagggtgggggcgcacctgggctgggctgcgcggaggcggcggaagcactaggcgcggcgcccacaggcggac

SEQ ID NO: 384682 - DNA, 122 bp, Homo sapiens
ccttcggcctacaggctgagcaacgcggacaacagcgagggggctccgtggcacagctggcggggtcacggcgcacgcctgggcgccctggagcccggagactcagcagccatcgctcgggg

SEQ ID NO: 384683 - DNA, 122 bp, Homo sapiens
gcaactctcccccacctctctcctaagcatcaccaccaaatattcaccatgtggagggtgcgtgctgggtgaggtcccaaagatgtaaggatggcctgtctctaccctgagaacttatagaa

SEQ ID NO: 384684 - DNA, 122 bp, Homo sapiens
cacctcattcatttcatttattcttccttgtatttactttgtggctaatctctggccttccggctgcttacatccaggcctccttctagctctagaggatcttaccatagtacagagtcact

SEQ ID NO: 384685 - DNA, 122 bp, Homo sapiens
cttggcagcctgaactcgatttctcagaaagccagctctatcagagcgggggcgggggggcggtttcccttcaccagactcagctgttgccttatctaaaatgccttagcgatctaaaactg

SEQ ID NO: 384686 - DNA, 122 bp, Homo sapiens
atcccactttaatagtttttatgtggcgtggactgaatgtctcctgcagtttgccagggtcggtgaaattagaggcgccttgtcagagcagtcgcgttcattggctcgagtagcgggtgcca

SEQ ID NO: 384687 - DNA, 122 bp, Homo sapiens
cgatcgcagctccgagaggcctttcctctcacaagacatgtttatgggtcacttcagggccgccgacgggacaccccgccgccgaggggaagcggggacggtgccgccgcctgccctatagc

SEQ ID NO: 384688 - DNA, 122 bp, Homo sapiens
aagccgcgcgggcggagaggcgctggtgggtcccaggttggaggctgtgggtctgagaggcgaagcccaggggagcccggggccaccgctgaaaaggatggcagctgagcgcaggcgaggga

SEQ ID NO: 384689 - DNA, 122 bp, Homo sapiens
tagagtttttggatacctcggtttttgtcacatttgcttttcccagtaattcatttataacgtatggtacggaagtattggtctgtgatgggtttgaaataggaaaaagaaaacagccaggt

SEQ ID NO: 384690 - DNA, 122 bp, Homo sapiens
ttttttgacagtgaaatatgcataaatgaatgagctctaaaggtgactaaacaaatgcttcgtataggaagataatgtgcacaaataataaaatttgaaaaagcaattgagaatttgtttct

SEQ ID NO: 384691 - DNA, 122 bp, Homo sapiens
ggtgaactgtctaggtagcttccacctccctaggaccccctagaaatctaatctcctccacgagaaagcctttcacataactgtggagctgccacctatcattctctgctaagccagctgca

SEQ ID NO: 384692 - DNA, 122 bp, Homo sapiens
ctctgagagatgagtgctgctcagggtggtccagtagctgctgcattgtttggtgaggggcgtgtggtcaacaagtccgtctgtcaatgactggccaggccccctcgatgtctatgccctct

SEQ ID NO: 384693 - DNA, 122 bp, Homo sapiens
ggatggggcagagggatgggaccacactctccccataaataaataaatacataaacaaggcgctgaggactcaatatagcacctgcctcttctccacccttgtgcacaatctccaactgtta

SEQ ID NO: 384694 - DNA, 122 bp, Homo sapiens
gggcacccgcggcggggcccacaactcgagctgggagccgccccaagcaacccgttcctccgaatcaggctgcttttctctgtaaagaaaagagaaagcaagcgattaactgatggcttggc

SEQ ID NO: 384695 - DNA, 122 bp, Homo sapiens
gctttggtcccaccacccctcagaggatgccctgcgcagagtcttgggtctgactgacctcggcagcacccagcccataaggtcctgttaatcaaaatccttgctggggcctgggagctcca

SEQ ID NO: 384696 - DNA, 122 bp, Homo sapiens
ttcaaagccgcctcctccaggacaccctgcctgcttgctcctcccttcctttgcctcaggcgagtgcctgtccctggtgacttgagccacagctatttctgtgcctgtctctcctctggggc

SEQ ID NO: 384697 - DNA, 122 bp, Homo sapiens
gcagagccgaggcctgggggcgcggctcgctgtagaggcgggggcggtcgtggggcggagcgggtcgtggggcggggctggagcggcccgcggcctcagctctctctgcttccccaggatgc

SEQ ID NO: 384698 - DNA, 122 bp, Homo sapiens
ttaattgcccatgttaacgagggccgaggctgtgagggctggagctgcggggaaggctcccggctcactgacacgaggggagcttcaccgtggctcttcgcaggatcaggaactggcatttc

SEQ ID NO: 384699 - DNA, 122 bp, Homo sapiens
gggtggattttataaaagacagcaaaaccccagtgaacatctcatttattctccgtatctcgaaatcaaatgagagaaggaaagggtgtccatgagcattgtatttagtgcattatttaaag

SEQ ID NO: 384700 - DNA, 122 bp, Homo sapiens
tgactcgtgggctctgcaaaaggctttcagttgttctccgggagccgattctaccggcttcgccagaccctgcctttggtgacctttagaggctttgatcagggctaaagcgtgcgttgatg

SEQ ID NO: 384701 - DNA, 122 bp, Homo sapiens
ggtctgagcatgaaaaaaaaatatgaggaaaaacattcacacacgcaccaagctcttaaccgtggttacctcagggcatgggcaggggaacttaactttctttaatacacttctggactatt

SEQ ID NO: 384702 - DNA, 122 bp, Homo sapiens
ttttattggttactactatcagtatctgttttagatggtttgtcttgtgtgtctaacagccgtgaacactcttttttttttttttttttctcctgagtcgaagtattcctctgtagcccagg

SEQ ID NO: 384703 - DNA, 122 bp, Homo sapiens
tactaaaaatagctgcgcatggtggctccgcctgtagttccagctaccggaaggctgaggcgggaggattagagactgaagctatagtgagccatgatcagaccactgcactcaagcctggg

SEQ ID NO: 384704 - DNA, 122 bp, Homo sapiens
gattcaggggcatggtcggggacttgggacgcccagctcagccctcatcgcaggccaggacgaacagagggctcaactgtctgcacccagctcggcaaaaaccagagagatgctgctgcgac

SEQ ID NO: 384705 - DNA, 122 bp, Homo sapiens
gctggatgggctgtggtgggagggttgcagcgccgcgagaaaggcgagccgggccgggggcggggaaaggggtggggcaggaacgggggcggggacggcgctggaggggcgggtcgggtagg

SEQ ID NO: 384706 - DNA, 122 bp, Homo sapiens
agaccgaaatcacgtgaagccagaggccagctagctataatcagaaaggcactatgtagccgttttgtatacctggacccggagcggcaaataatcttcacagagatcatcccacagctcct

SEQ ID NO: 384707 - DNA, 122 bp, Homo sapiens
ggggaaatggatcagcaagaaagtgcccgccccaggcatgggtgccgtgcgggacggggacgcggcccagccgggaatcggggtgcccagggtgcgatgtgcgaggggctcctgagcgcgtg

SEQ ID NO: 384708 - DNA, 122 bp, Homo sapiens
ttccttccttcttctgaaaaatattccactgtatggatctaccatactttgttcatccatcgatggatgtatactctgttgcttctaccttttggcagttgtgaataatgttgttataaaca

SEQ ID NO: 384709 - DNA, 122 bp, Homo sapiens
agaggtgagcagtagctttcccaaaggcccagagccaagaagcgttgaagcttaaaagcacgccgcggcagggaagatcaagcaagccctgcgcctatctgcaggtgagctgttgggtgcca

SEQ ID NO: 384710 - DNA, 122 bp, Homo sapiens
cccattttcctgatgagcacctccagtcctggaagccacaagccaggcacgcagcccacccggccggccctcccggccagctcactggctcccatgggccccggacctccttgggctttgcc

SEQ ID NO: 384711 - DNA, 122 bp, Homo sapiens
agactattacgacccaaataaatgcactgtgtagcgtgttcacagggctccggggcctttcgaaaggttctctgtttgcttttgcgttttgcctctggaaccattcgacatccgtggctgat

SEQ ID NO: 384712 - DNA, 122 bp, Homo sapiens
ggctcaagcgatcctcccacctcggcctctcaaagtgctggaattacaggcgtaagccaccgcgtccggtcaaaaaatcaatttctagggaaaaatgtcaactcaaaacaagtaacctgcat

SEQ ID NO: 384713 - DNA, 122 bp, Homo sapiens
gggcttctgggctcacccttacacctgtgtactaaagggctgctaccctcccgaggtgtacgtccgccgcctcggcgctcatcggggtgttttttcaccctctcgcggtgcacgctttttct

SEQ ID NO: 384714 - DNA, 122 bp, Homo sapiens
gcaggttgcattctcctgatggcaaaatgcagctcttcctatatgtataccctgaatctccgcccccttcccctcagatgccccctgtcagttcccccagctgctaaatatagctgtctgtg

SEQ ID NO: 384715 - DNA, 122 bp, Homo sapiens
gttcctggacccccaagcggggcccaagtcagtgaccacctaatcctaggccagggccggcggcctcttccgatccctgaggccagggaggctcagaagcccagggctccactcagccgcag

SEQ ID NO: 384716 - DNA, 122 bp, Homo sapiens
aaataccaatcattatcactccggggaggcgggagtgcgccactagaatgcatagaggggcggtgaaaggcggcaagattgcctttgaaattaaggcaatgaacacatctagctctaatttt

SEQ ID NO: 384717 - DNA, 122 bp, Homo sapiens
ttcccaggcattccaagtccagcaagttcgcagggagctgtcagtccgtccaggaaggcccgggcctgggtttgcctcttcaagcagctactgcaggggcgtggggagggggcataagagac

SEQ ID NO: 384718 - DNA, 122 bp, Homo sapiens
ctgtgccaaccctgtgctgggcctgcgggtaccaaggtgaatcaggcatggtgccagccccggagaggtccctgacctgtggggagacagaccattagcacacagacaacgaaatgcaggcg

SEQ ID NO: 384719 - DNA, 122 bp, Homo sapiens
cccgggggggcagaggcatgcacaagtggggggcggaaggagggggtggatgaggaggctcgggcccttccacccacgcgtccattgggcggcgccgccatcactctcttctgggctacacc

SEQ ID NO: 384720 - DNA, 122 bp, Homo sapiens
acagtgagttttggaaacagactgccaaggttctagttctagctttgctgtttactagctcggtgatctcaggaaatttacttacctcctcctccagaccttagtatccctgtgggtaaaat

SEQ ID NO: 384721 - DNA, 122 bp, Homo sapiens
ttaaaagaatgatcaattttccagacatagtagatagaggtggtggtccccgtgtttgaccgcagagagctgacagttgggacagcgatcgtgctgtctcaattacagaggatggcaaccat

SEQ ID NO: 384722 - DNA, 122 bp, Homo sapiens
ttccgatcggctgtgggggtggaggagaaagccccccttgctctgcatgcctctgcgtgccgttcggtgtcagagtcacagagtgggaaccgctccagaggctgatgtcattccccaggttt

SEQ ID NO: 384723 - DNA, 122 bp, Homo sapiens
ggcctcccagcgaagtggccagattcaggaacccttcgcacagcgggcactaggaccctgcgcggcgccgcgtctcgcggggggcgggcgggcggagggggttgggggatccgctctttctc

SEQ ID NO: 384724 - DNA, 122 bp, Homo sapiens
agaaagaacggagccttcgagcagcgaggcagctactggacgacgaggagcagctcactgcgaaaactctctatatgagtcatcgagagctacctgcctgggtgagcgaccaccctcggtcc

SEQ ID NO: 384725 - DNA, 122 bp, Homo sapiens
cccgtttctgcggagggctttgttccacggtggccacctgacagatacccctcctgccggcgcttagaaatatttactctccccccgacgccctcaaacggtgctccccgcgcacccggcag

SEQ ID NO: 384726 - DNA, 122 bp, Homo sapiens
tcaaaggttgcaagaataatatgttgtgttaggatggcccttccatccagatatcatggccgtttctatcttgagaattatttgctgaccaaacgatgttacggtacatttacttaataaca

SEQ ID NO: 384727 - DNA, 122 bp, Homo sapiens
gagggtggccctcccctgtggccaccggggaccctctgtgctccagccccccaggcccagcggtcaggacatcataaggaatgctgtggctggggctttgagaatccggtcccccaccagct

SEQ ID NO: 384728 - DNA, 122 bp, Homo sapiens
ctgcggcgcgcggggctgaaggcccagccgcggtcagcatcggtcaggggctcgcggctgcggctgcgctgaccgtagtactcctccaaggagtcgtcctggtagaagccgctgtgcgcccg

SEQ ID NO: 384729 - DNA, 122 bp, Homo sapiens
ccaacatagtcagggtcaaagccaaggccaggccgggggctggaagtgggggccgcggcccggactgcatcccggcgggctgggcggcaggacttgcgaggagccagcggagtcctgggagc

SEQ ID NO: 384730 - DNA, 122 bp, Homo sapiens
ttttttcctgaagccagatttggatcactcacttgagctgggcctgggggagaaacatagcgtgtatgaggagctgattaattaccagaaatcaaatgccttgcagtccagagctctgtgtt

SEQ ID NO: 384731 - DNA, 122 bp, Homo sapiens
ttttttgatttatgatgactccacccctcttcatcacccccgctcccaggccaggctcagcgattaagccgagcccttgcgtcctaggaaggggccttgccaacctcagccctcctgcccca

SEQ ID NO: 384732 - DNA, 122 bp, Homo sapiens
tatgatatccctccctcacagatcagcccactcctcctttaaaattctatgcagggactgcggtgccagccagcccctctcattcactgtctggaaacacagtggcagttttcccttttggc

SEQ ID NO: 384733 - DNA, 122 bp, Homo sapiens
gattcacggccatgaaggaaacgccaaggagaacagagacagacacccctggcagctccccgggattgcttctgctgctgttgttattgcttcgggcagaggggctttgcccccaggaggcc

SEQ ID NO: 384734 - DNA, 122 bp, Homo sapiens
aattccagtgggtttgtttacacagcgcgggggagggggcctgagccgggtactggggcccgactgactgggagccccagctcagactgggccagctccagctgtgcagcctgaggactgcg

SEQ ID NO: 384735 - DNA, 122 bp, Homo sapiens
ctttttctatttgaaaatgcaataacttttgcaaatagaaaataatcagaaagtctaatacgtttgcccagaagaccagctaatgagtggctgagctggcattgaaacccaggtagatctgt

SEQ ID NO: 384736 - DNA, 122 bp, Homo sapiens
ggcaagatcatctaaagcacaccacagcttgggatggtgtgcatgaatccaaaactttaacgtaaaactagactttgaggcatggtatatgagataggagagaagcatttctcaattttcta

SEQ ID NO: 384737 - DNA, 122 bp, Homo sapiens
aacaaggtccccggggattccaatgcatattaacatttgagaagtgctgccccagacctccgtttcctctgcggaaaatatggttgttagataagaagcatctctacggtcgcttatagatc

SEQ ID NO: 384738 - DNA, 122 bp, Homo sapiens
tataggaaggtccccttttagcccctctattttggttccatttgtcactgccttgccactcgtcgaagtttgtcttgggctctaaaagtggtagccgggaacggctgggaaggtctccacag

SEQ ID NO: 384739 - DNA, 122 bp, Homo sapiens
gaagcaggtccaccccgacaccggcatctcgtccaaggctatggggattatgaactccttcgtcaacgacattttcgagcgcattgcaggcgaggcttcccgcctggcgcattataacaagc

SEQ ID NO: 384740 - DNA, 122 bp, Homo sapiens
atgaaggcatagagggccaagtgactgaaacaatatgccgacaaccccaaagcaccactacgctctccaaagagggcagcatcccaccctcaggcgctggaggcttgaccactctccagctg

SEQ ID NO: 384741 - DNA, 122 bp, Homo sapiens
gtttcgcttcctttcccgggcagctctcctgcgacgacctttgacttgggaggggcaggtcgtccatgagcacgagtgaccgggtccctgatgctttcctcgtggttacagcctcgcctgca

SEQ ID NO: 384742 - DNA, 122 bp, Homo sapiens
gaatatccatggatatttgtttctatggggggaatcctaggactaatctcccaccaataacgtagggacacctagggacaactgcattgggattcaggttgaaatagtgactgattttggta

SEQ ID NO: 384743 - DNA, 122 bp, Homo sapiens
caagcagttgggggagggggtggtggaacccttatgactggattgtgacaaatggggctccgcttgaataattttggtttagtagcaggcagttcttaactaacgcgtattatttcgaggct

SEQ ID NO: 384744 - DNA, 122 bp, Homo sapiens
gtgtcttttatagactggggctcacagaggcaggtgactggttcagagtcacagagcagtcgtatggacccaggtccacctggtgtcagtatccctgtacctaccactgcaccacactgcct

SEQ ID NO: 384745 - DNA, 122 bp, Homo sapiens
ggccatgggtactaggcttcgctgcgcccaccctggagcctgccaccagggttcccacgacggcttcacttcgtcctggctgcgtgagcaaggcccttaatcttctgacaccgcagttcctc

SEQ ID NO: 384746 - DNA, 122 bp, Homo sapiens
cacggcagggtctcagcctcggccgcgtgtgtctgtgagtacacggcagggtctcagcctcggccgtgtgtcctcgagtacacatcagggtctcagcctcggccttgatcatctatccttgt

SEQ ID NO: 384747 - DNA, 122 bp, Homo sapiens
gcaccccaccctctgtctggtacagcttaccaaaccaaagtgcccaaagccgtgacatcccggccggcggctcgcaggcccccgccctccgcacgtcacggccgccgggtgcagtgccccct

SEQ ID NO: 384748 - DNA, 122 bp, Homo sapiens
agcgattcccctgcctcagcctcccaagcaggtgggactataggtgtgtgccaccatgcacggctaatttttgcatttttagtagagagagggtttcatcctgttggccacattggtcttaa

SEQ ID NO: 384749 - DNA, 122 bp, Homo sapiens
ttcaggtccatgcccctttgctccctggaggtacttctacctcttgtgcaaatccatgggcggaagttctcatccatcctcacctgcagccagccccttgtgtactaaattcaaatgaagct

SEQ ID NO: 384750 - DNA, 122 bp, Homo sapiens
cctaggactggaggcgcgacccctcggcccaccttgaggcccggcctaggaccggaggcgcgacccctgggcccacctggcggcccggccggcacagcccgcctctcctctccaggccaggg

SEQ ID NO: 384751 - DNA, 122 bp, Homo sapiens
caccgcgcagccagagtgcaccgtccctagggctttggcggtggccagagccagcaagtgcggcggcctggagctggggtggtgagggcggatggcaggttggagaaatgcagccgagccgc

SEQ ID NO: 384752 - DNA, 122 bp, Homo sapiens
gttggcacccaagcagttttggcaattttgaccttcctgcaatcacagagaagctctggacgtcagtgtggcaaaaaagatgtgatctctgctgcaggctcgattgagaaaagatgtattgg

SEQ ID NO: 384753 - DNA, 122 bp, Homo sapiens
gagaggtacaaagtttgtctttattacccaagaatcaggaatggaacaaatgaagtgggacgtttgagttagatttcttggttgggaccctggtttcattactgtcatggtcacaaaactga

SEQ ID NO: 384754 - DNA, 122 bp, Homo sapiens
acagcggatgaaagtactcaagaaaacacccggcggaggcggaacaaacacacttcccgacgcagccagacggactgtgcggcctctcggaactggccagaggccgcaccaggaggactgac

SEQ ID NO: 384755 - DNA, 122 bp, Homo sapiens
atggctttggcctctttgaccaccagcagcggcggcaggtctttgttaagtgagcaggggcggctgggtcccggggctgggagtggggcccgcgaggactcccaggacctagcagcactgac

SEQ ID NO: 384756 - DNA, 122 bp, Homo sapiens
tgaccagtctgcagatcacactttgaactccagaagttgtaacgtttgccagcgcttgcacgtagaatccccctgcacgggaggtccttagaggggtcctattggcaactcatatattatga

SEQ ID NO: 384757 - DNA, 122 bp, Homo sapiens
acaataattaaaacggtaggatttgacataaatataggtaattaaatcaatggaacacaacgtagggtctagatgcgcaagcataaagtcagttgactataaaaaacaaaaattccaagaca

SEQ ID NO: 384758 - DNA, 122 bp, Homo sapiens
agagccagagcctccagtatccgcacctccactccggaaacactgagggaaacaggggaacgtacctgaaaggccaagtccggatggtcctcagagtcccatccccttgagcgtctcgggct

SEQ ID NO: 384759 - DNA, 122 bp, Homo sapiens
ttgctgttgtccacctgaactcccaagcaaccagagtccggtccttccaatcaggaaagtcggaatctctgatgtcatcggtcattccaaactggcaactactttgaagaaaaacacatgta

SEQ ID NO: 384760 - DNA, 122 bp, Homo sapiens
acattccccaccctgctccaatgcccatcttccctgtctttgatgaatgatcaccaagcccgccagacactaaaagcaaacccttggagttactcagactcatttattcattcagcaactat

SEQ ID NO: 384761 - DNA, 122 bp, Homo sapiens
caggggaaaggattggtgcctccaaggtgagaggcgtaggaggaggggtggggaacctaacgggtcatccctgaccctgtaggaccagactatcatcaggtatgtagggggggcgggagagg

SEQ ID NO: 384762 - DNA, 122 bp, Homo sapiens
ccacccctgagtctgagtagaaagactcataaaatgcgagtgtgagtgtggatgggggtacgcactttgtctttttgtccaaaattgttagaattccaagatggacaggctcctaggggttc

SEQ ID NO: 384763 - DNA, 122 bp, Homo sapiens
gcgggcctgctcctccggggagttctgccgcattctcccaatctctttcctgagaagtggcggagttgggggcacttcgaggtcgccttggggcgaggtggtcgtgagggggtcccagatat

SEQ ID NO: 384764 - DNA, 122 bp, Homo sapiens
aggcccagaaaaatctggaaaggaattccaccgtgtttgctccttacagaccagacaaaccgtagatctttcagaggtacagcgactctcctggttccctaagatagtctcgacttttcctt

SEQ ID NO: 384765 - DNA, 122 bp, Homo sapiens
ctgtttgtgaccgggctttccttgccctacttccttttttaggggtttaggttgcctcgacggccatttccacttagatagatggaaaaggggtgtgtgtgcgttggattggaagggaaaca

SEQ ID NO: 384766 - DNA, 122 bp, Homo sapiens
gcccctcactctctcaggagcccaaatgtcttcctttggggaatggggacaaccccggggcgcaggtggctaggagcacaccaacatccatggaccaggaaggacactgctgatgaagaccc

SEQ ID NO: 384767 - DNA, 122 bp, Homo sapiens
gggtattcctcctttggtgactctaattcctgcccatcctcaaagacctgcttcaatactcgaccgctgtaggaggaggagattttaaatcgtactttccggggtttgccatcactcttctg

SEQ ID NO: 384768 - DNA, 122 bp, Homo sapiens
gaggagcggaggggggatgtgtggattccggtgaaagggacctgacaatcgcccccaacccgtgagaaaaggaggagcccagttcttgcttgagaatgataaacttggaaacccttgggaaa

SEQ ID NO: 384769 - DNA, 122 bp, Homo sapiens
aggagaaaaacattttgtgtcatttataggccctgcttgggcgagactctgggccgggaacgtccacatgcagccagtgtggggactgttttactctgagcctgaatctttctgctttggtt

SEQ ID NO: 384770 - DNA, 122 bp, Homo sapiens
ctccttaggcagaggacaagctttgccttgtttgtgtttgcgtttcttttacacatccgtcgccacccgtaaagccaaagcagacaggactcgggtctcgtgtttctcagtgtagctgtatc

SEQ ID NO: 384771 - DNA, 122 bp, Homo sapiens
actattgatgctttaggctggctgcacctttgttgtggaggggctttcctgtacgttgggcgttgtagggtgctcagcagtgtccttggcctctgtcattggatactaataacatgcccact

SEQ ID NO: 384772 - DNA, 122 bp, Homo sapiens
ctgtgcctgttacccaccccgtcctcctagggtgcccttgagccgcaaaactgctgtccacgtggaccgggggtgacatcgcacgtccatctgccaggacccctgcgtccaaattccgagac

SEQ ID NO: 384773 - DNA, 122 bp, Homo sapiens
gcacaattctagtgacaggagggagcagtttggcccccagtttccagctaccagcacctccgttcccagccgaaggtgactgcagaaggccctagaattattactgttactagtattcctag

SEQ ID NO: 384774 - DNA, 122 bp, Homo sapiens
gcagcaccgggtctcgaactctcacgccttactcccaagcaggttctgtagtccagcccccgcggctccctacagccagccgatgctgcgcaagcgccgtacccacgctttagcacatgcgt

SEQ ID NO: 384775 - DNA, 122 bp, Homo sapiens
acgccagcgaggccggaagtcccgcccctgtgtcgcggtcgcctgccacgccttttcctgcgccggcccactgccttctaggtaatgtagtcttgtcccgtaagaggccaggcttggctctt

SEQ ID NO: 384776 - DNA, 122 bp, Homo sapiens
ggccgggctcggggtcgcggagagggcgggctggggcggcggcggggagccgggcttgggcgagggaggtggctccgcttacctcagcttttccattcgccaccgttcggcccccacacgcc

SEQ ID NO: 384777 - DNA, 122 bp, Homo sapiens
tgggacgaggggcaccctgtggcctctgaccctttgggattggcagtcgcctgccccacacggaagcagaggtggacgcaacggccctgcagcagcacctgccccagccgggcacaggctcc

SEQ ID NO: 384778 - DNA, 122 bp, Homo sapiens
gtgggaaacccacaggggcaaatggaacagtccatgcagccggggtgacgggggagcgctcggaggaaggacgctatgcagagaaagcccccctggctcttctctctcaatccataatccag

SEQ ID NO: 384779 - DNA, 122 bp, Homo sapiens
gtaattaaatttagccttagaaaagtctttgaaacgttctaatcaagactttcagctttccgattgtgtgcgctttatttttcaattcttcctagtcccggttttgcatttctaatgacagt

SEQ ID NO: 384780 - DNA, 122 bp, Homo sapiens
tggccattggcggatccaaaggcggaactggcgccaagggcgaggccttgttccctgcttcgccgcggtccagcagccgccggccccgccccacggccccggcctcgccccgagggtgacca

SEQ ID NO: 384781 - DNA, 122 bp, Homo sapiens
cacaatagaaaatatgtttcacagagagacccagctcacatacatattataaaatcgaaacgaaagtgttagttataatgtacttggatcttttctattgttttattttattctatcacttg

SEQ ID NO: 384782 - DNA, 122 bp, Homo sapiens
aagcttgggaagagtcagcatttcctaacctaagtgtaatcctctagactaaactgatgccgtgtaaaattctaatttacattccagagaaatcttcaagtaggacacagctactttgttgg

SEQ ID NO: 384783 - DNA, 122 bp, Homo sapiens
gcaatggataacgcgtctgactacggatcagaagattccaggttcgactcctggctggctcggtgtaagcagggtcgttttacaactttctgactccgcaggagtaaggaaattcctgcaag

SEQ ID NO: 384784 - DNA, 122 bp, Homo sapiens
aactcctagaaagaaagttgactaaagcacatgtcacagagttcatacatttcaggactccgtagagatagaaagaaatctcagctcttcgtgcagtttatttacgattactacatgcatta

SEQ ID NO: 384785 - DNA, 122 bp, Homo sapiens
cgcttctccatgctgactgttccttaccctggttgtcgaccttgctctaactggtgcaggcgctcctccactccaaccagcttgtaagctctgcctgggcagagcttgtactcttccctttg

SEQ ID NO: 384786 - DNA, 122 bp, Homo sapiens
ccacaaacatttcaatttatctgcctttttacaacctgatttacacaagcaaattgcaaacgaaaaccaggcattctttaatcatccaaaatgcatgtataaaatatagaacaaaccctagt

SEQ ID NO: 384787 - DNA, 122 bp, Homo sapiens
ctttcgtcgcctaatcttagcagatcctttcgtcgcctaaatggtaagagcgacttgtaccgacagtccctcggcaatttccggaagtgttcgggataggcccgagcgtggcgccctctggc

SEQ ID NO: 384788 - DNA, 122 bp, Homo sapiens
cgtcactaaactcgctaccgcctgctcccctccagagaccgggggccttccagcagttttcggacccccgagcacagagaccgccaagccaaaggcgagtagcaatccctcggttcggaaac

SEQ ID NO: 384789 - DNA, 122 bp, Homo sapiens
gctctgcccagctggccctgttgtgcagccgtggctctgaaggctgatcccatgccaaaccgtctgcttggtgatgggaccgcacacagcactccccggtcaccagcgagggccagatggaa

SEQ ID NO: 384790 - DNA, 122 bp, Homo sapiens
caggtggctttcactccctgtgtgtgaggccatcgctcagcatctgcacgctgtctgctgcgtctaacgacccctcctctaggttggggatcctgtccaggagccctgcattttgtcatcca

SEQ ID NO: 384791 - DNA, 122 bp, Homo sapiens
cctgcacttagtcatcagttaaattggtcaataaatatttcttgagggtctaatatacgccgtagactaaggcactgggaatacagaaatgaaaactacaaagaatagtctttgccctgtga

SEQ ID NO: 384792 - DNA, 122 bp, Homo sapiens
ccttccagcggccgtcgggatgctgttctagcacctgcggccaggggtggggggcggggacggtcactcccagcaccaggcaagtggcaaacggttgtccctgcagctgcggtccggcaacc

SEQ ID NO: 384793 - DNA, 122 bp, Homo sapiens
ctcaagtgatccacctgcctcagcctcctaaagtgctgggatttcaggagtgagccaccacgcccggccaaagataactttttaaaagaaaactaagaggttaatcaaggttaactggcaaa

SEQ ID NO: 384794 - DNA, 122 bp, Homo sapiens
ctcattattgcccagatagtccaaaagctcaagggctccaatttgtactctcagctggaacggcaggcctgggtaagtgaggccgagtgggaagggatgcagacgggcggggccgcggcgat

SEQ ID NO: 384795 - DNA, 122 bp, Homo sapiens
tgcctcttgattgtggtggtggtgacacaaatctaaatgtgtgataaaatggtaaaaacacgcacataatgaatgcatggaaaactagtgatatctgaaagaagttggtgcattgtgtaatg

SEQ ID NO: 384796 - DNA, 122 bp, Homo sapiens
gatttttggcaagaggtcactgcctgaaactatgactgctgtttaatagcaaagtcatcccgggtaggtagcaggacctgcgcgcaacagacatgtcacctttgctttagcattgtgccgct

SEQ ID NO: 384797 - DNA, 122 bp, Homo sapiens
ccagtgtggagaccagaagcctgcgtggggcaggagttcccggcgcagcaagggacgggacgaggaccttggtcccggggcggggcgggcggggcccttatctctcagaacactcacaggca

SEQ ID NO: 384798 - DNA, 122 bp, Homo sapiens
gcagtggggaagccccattcatggtaatttccagagaaccatttgcctcacttggggaaacgggtatagcacaatccctgatagtttctggacaaaaaggttccatgttttcccctatgctt

SEQ ID NO: 384799 - DNA, 122 bp, Homo sapiens
catgttactggacacctggcaggaggtaaggtggccatccctgcctggtggggctgtgaacgggggtgtgtttctgtttgtgtaactgggtgtgtgtgtatctagccatctgcctctgtaca

SEQ ID NO: 384800 - DNA, 122 bp, Homo sapiens
acaaggtgctggcagagcctagttttagcacctatagaaatagggcctagttcggctgggcgcagtggctcatgcatgtaatcccagcactttgggaggctgaggcgggtggatcacgaggt

SEQ ID NO: 384801 - DNA, 122 bp, Homo sapiens
tatcctaaaagggactgggaaggacatttggctcccggagccaccccccacctcacctgacgggagaccttccggaaagggcagaaggcaaagggtcctactgatggctggggagggtggag

SEQ ID NO: 384802 - DNA, 122 bp, Homo sapiens
caaacagggggcgacgcagaaagttatcaaacaggaacaccagctcatttgagccgagtccgtgggtgtccccgcgtggccaaatgggtggaaacgagacgaggtctccggggagggggctg

SEQ ID NO: 384803 - DNA, 122 bp, Homo sapiens
aggtgccgccacgatgtaaacagaacagagcagctgagccctccaggtgggctccaggtgcgatctgcacagaccgcgcgtgtgggaggcatggagtcagaggtgcatcctcaaaatgcatc

SEQ ID NO: 384804 - DNA, 122 bp, Homo sapiens
ggagcctgggtttgggggctgctgcaccttgccgacccggtgcggggacctggaggtagccgggcacagcagcttcctgtgcagctgtgggtgctccaggcactggcagactagtgggaagt

SEQ ID NO: 384805 - DNA, 122 bp, Homo sapiens
ctgtgcagtgggagaaggcagcccgggcccagggtccacggagaagacgcaaatcgacagcgcgggagcgcggaccttctggaggcgcgcggcgcttaccgctgtccgtcctcgaagccccg

SEQ ID NO: 384806 - DNA, 122 bp, Homo sapiens
tttgtgttttgttttgaagtcactctcccctgttcagtccagagtaagtgcacagagcaccgtgtaaagaacgcgacttgcacgtgggaaggcttcagagcgcagggccacggccgccgaaa

SEQ ID NO: 384807 - DNA, 122 bp, Homo sapiens
tttgcactgttgtccaatcccaggtggggtggttgcctcttcatttcctttgatagcaaccgcctgttgcgtgatgtagtgtgggtgtcctcagaggtagctacctaagtttgcatacttcc

SEQ ID NO: 384808 - DNA, 122 bp, Homo sapiens
gaagcaggcagaacggatctggagaggtgagggagttcagaatagaagacacccagcacacggggcatgatgaccttcctctgctaatgccattgcccagatcaagaaatctaaggatccct

SEQ ID NO: 384809 - DNA, 122 bp, Homo sapiens
aaaaaatgtgtatgtgtttgttgttccacccaaacatgggattgcataccacacgattcacgattccctgtagtagataagctctccataaagatcattagaggacactgagtcaagtctgg

SEQ ID NO: 384810 - DNA, 122 bp, Homo sapiens
gggtagggaaggtggagagcaccccatatccagcatagaacgcaacagactgtcttcctccggtgatttttctttcccctttacttaacttaccagagctgggaaaaaatgagtttccccaa

SEQ ID NO: 384811 - DNA, 122 bp, Homo sapiens
gtggggaggggaggagggaacccaagaggggtagcctgccaattcccaggttctgcttttcgggttagcatcttggggtatttcttccccgtgtaagcgtgcgtgcagatgcacgtggctac

SEQ ID NO: 384812 - DNA, 122 bp, Homo sapiens
gattggtgatctgaccttttcgggaatctggtcccctctcagcagtggggagtgccacagcgctagttctgaaacaggatattgctgttgcgtgtggctccatttaactgcctcaggctatc

SEQ ID NO: 384813 - DNA, 122 bp, Homo sapiens
cggttacagtgtagtcctccccagggtcatcctatgtacacactacgtatttctagccaacgaggagggggaatcaaacagaaagagagacaaacagagatatatcggagtctggcacgggg

SEQ ID NO: 384814 - DNA, 122 bp, Homo sapiens
aaagtcttcaaaaatgtataatgtaaacaaagaaccagccgcagaaaccgccttcccgcacgtgtatgcagcactttgtagtttgcaaagtgttcagatatctaagttcttcctgattctac

SEQ ID NO: 384815 - DNA, 122 bp, Homo sapiens
agtggcttgggtgaagaaccacactttcaacctgagtgctgctgaacagctggtactgagcgtgcccctggacactgcaggtcacccagagccctgcctcatgttccggccaccccccgcca

SEQ ID NO: 384816 - DNA, 122 bp, Homo sapiens
ttagcaggctctgaaagtagaatgcccgctgaagcaaacggcagggttgttcttccaaggcgtattaaatatgggtacacttagtttgcagacttggtgtgctgcagaatatcacatatgaa

SEQ ID NO: 384817 - DNA, 122 bp, Homo sapiens
cgcccggccacattccccaattaatggtttttggagagtggccggtttggaacgggctagcggagtcgttcgttagttaggtccctgcagtgtagatggaggacggaaacggcgctgtgaca

SEQ ID NO: 384818 - DNA, 122 bp, Homo sapiens
ctggcggtcgccctcggtgatctcctggtcctggtcttccgcgagctcagtgctgcacagcgccccgctagcctccgccctcacctgaacgcatctgcggctgacacgtcggcggccgcggc

SEQ ID NO: 384819 - DNA, 122 bp, Homo sapiens
agtctttagtgactcatagaccagatttaggtatccctgccatgtactttgatggaaacccgcatttttcctaccaaagcacttaccacactttactgtaattactgtttagtatatatgca

SEQ ID NO: 384820 - DNA, 122 bp, Homo sapiens
acaaacgaatatgtagtagggaggaaacctgaaaagcccatgacagagactgtgaatgcgcgtgacccccagtcagcattaggtttcaaagaggggatttaaaacaaaagtcacttcacatt

SEQ ID NO: 384821 - DNA, 122 bp, Homo sapiens
tgttcactggacaggtgaatatatatggatgaggagtttgggtggccgtgctgacacgggcgacataaagttaggaatgtatgggtggtgataagccttgaacagaacaagcctgagacaag

SEQ ID NO: 384822 - DNA, 122 bp, Homo sapiens
cagtcattggctgaattgggccagagaggtctcattggctgaattcctgcaccggctcgtcggaggcgggacccaaagtaggctaggcctacggaagctgggtcttcttgctgtgaggtcgc

SEQ ID NO: 384823 - DNA, 122 bp, Homo sapiens
accttggcctcccaaagtgctgtaaaggcgtgagccaccgtgccgggcccactccagtgacgatttattgagcatctgctcaatatcaggtttgttttaggcactgttttaggcactgagga

SEQ ID NO: 384824 - DNA, 122 bp, Homo sapiens
gagaggtgaggaggaatctccgttttcttcaaatgtttgggtctcccacagaccagtcaccggatcctcttggcaaaatgaggaccccaagggtttagaatctgaataactttgccttcctt

SEQ ID NO: 384825 - DNA, 122 bp, Homo sapiens
tttctgagcatacatcccccactggttatgtgcatggactgctagattcccttgactatacgggagcttgtcccagctcttagtgcccccaagtatttcctccctagtctttctgtctcagg

SEQ ID NO: 384826 - DNA, 122 bp, Homo sapiens
tgaaaagttgagctgcctgaggattatgtagtggtgacatgcaatggcaatctccctgcccgaatgctaggggaccttaacctctctgcatctcagtctccttttctgtaaagtagggacaa

SEQ ID NO: 384827 - DNA, 122 bp, Homo sapiens
aaattgcagttttcctttttcttttatcaaaatctttgagacggaataaactgctctgcacgatttctcttacaaagaaagaaatgtgtgtcagacagacatggctaattgcaagacaatct

SEQ ID NO: 384828 - DNA, 122 bp, Homo sapiens
agttcaattatttacctacagattgctgagtcatgggtttctccagccatgttacctgatcggctgatccgggagttgaactgtaatcaggggcttgtaggagttagagctgtgtgggcctc

SEQ ID NO: 384829 - DNA, 122 bp, Homo sapiens
cagcccgctcccaggccagggggaggagctttctgctggcttcctagctccagtggtgcccgtgtaaagggcctaggtcatacacagcgggtagtgtctacaaatcctcttcggaataatcc

SEQ ID NO: 384830 - DNA, 122 bp, Homo sapiens
gaaggtaccagggctggagctttaggctgatccaccccctctttgtttgggttcaagccacgggaaaatgggagcttgaggggaaggtcagggattgagatgcttccctttccctcctcctc

SEQ ID NO: 384831 - DNA, 122 bp, Homo sapiens
ctggaatcctcttcctgcagatctaggtacagccagcttcttttcaatcttcaaatctcacggcagatattatattccctttgcaaggaaagcttccctgatgacttgatttaaaaactcct

SEQ ID NO: 384832 - DNA, 122 bp, Homo sapiens
ctcctgatttcctgggtctgatatggaagattccgggattttattatttctaatcaacatcgccttcccaaaccccgccccttggcagccatagcaaggccacatctagcccaggatcacat

SEQ ID NO: 384833 - DNA, 122 bp, Homo sapiens
tgaaaatatatgacagtcttcaaggatgaaaaccatatacggtcaagtggttaaaattaccgttgtcatcacaacctttaagaagcgcaacacaatcaaaattgtgtttacagaaacattca

SEQ ID NO: 384834 - DNA, 122 bp, Homo sapiens
cccgcagccagggcctcgcgggtcccctcgtttctccctcctgggactggggcgggggcgcgggcccgagattcaacccccaaccctcccagcggctttctccgcgcgacccctcccggccc

SEQ ID NO: 384835 - DNA, 122 bp, Homo sapiens
caactacagagaaagaaagagaatatcacaccacaggcaccactgtcaacacgcctcgggcggcagtctcacattttctaccccggtactggaaaaagataaagatatccaggaaacctagc

SEQ ID NO: 384836 - DNA, 122 bp, Homo sapiens
tcagagaaagtgaggtcttctcaggctcttaagagcatggcgtttggtccaggctgtacccgctgctctcagctgggcccgtgggtgggccgggcgcccctgctatagccaggaggtcaagg

SEQ ID NO: 384837 - DNA, 122 bp, Homo sapiens
ggaaccagggaggcggaggctgcggtgaggtgagatcacaccactgcactccagcctgggcgacagagtgagattatgtcttaagaaaaaaaagagtctgggcgtgatgtctcatgcctgta

SEQ ID NO: 384838 - DNA, 122 bp, Homo sapiens
tcgctccaagatcgtcaccattgctccctgcggttcctttatggtaggcctggactccaccgtggagccagaggggctggcatgcccctccccaagtcgctgtgcaggcgggcggggccgag

SEQ ID NO: 384839 - DNA, 122 bp, Homo sapiens
ggcttttacctggtctgcgagaaatcaaactttgggcacaagtcatgaagccgacaagcccgggagacacagtgtcagaattacaaggtgagatcagccgcccggccaagctatcttctcgc

SEQ ID NO: 384840 - DNA, 122 bp, Homo sapiens
taaggaattcagtttagggggcagtggggaccagggaacccatgattaatagtgtctgcccgctaagcgtgctcacatagtagcctgaggagagagggaattcctgagctgtggttttcagg

SEQ ID NO: 384841 - DNA, 122 bp, Homo sapiens
cggaaggctccacaccccccaggtagagcagggtgtgcaggttgaggccctggctcttgccgggcgaggagcgcagcacagggcgtccaccattcacccgcaggctgccgtccttgttgaga

SEQ ID NO: 384842 - DNA, 122 bp, Homo sapiens
attctatttgtgtagagttatccagccattctttaatttttagaaatctctctctttggccgggcatggtggctcacgcctgtaatcccagcactttgggaggacaaggtgggcagatcacg

SEQ ID NO: 384843 - DNA, 122 bp, Homo sapiens
tcaagaccagtctggctaacatggcgaaatcccgtctctactaaaactacaaaaattattcgggcgtggtggcgggcgccggtaatcccagctagtcaggaggctgaggtagcagaatcact

SEQ ID NO: 384844 - DNA, 122 bp, Homo sapiens
atcctctagtggagagcaaatgaacaaaaggggaaagagagacgcgatgaattgcacgtgcgctattatatttgcaagcgggttacattgtccttggataagaattttatattccccgtgag

SEQ ID NO: 384845 - DNA, 122 bp, Homo sapiens
ctggaaaggaggatggaatgggtttcttgttttttcccgggttccttccgctggctttttcgcttcagcccaggttccgcagggtccgggggccctgcgccgcagccggggaggctgcgttt

SEQ ID NO: 384846 - DNA, 122 bp, Homo sapiens
tctcgcttcgcagaggcgctgactccagagacagacttcctggctgcaaactcccagctccgccacgaggaaacagcgttgggttgctttctagtacctgtttccccacttagagaacctca

SEQ ID NO: 384847 - DNA, 122 bp, Homo sapiens
tcttaaggacgcaatttactgtaaattagcattccttaatcatttgtaaaccacccacttcggattttgtatgtggtatgtttctaaatacgaattccatttcctgaattgctggttcagct

SEQ ID NO: 384848 - DNA, 122 bp, Homo sapiens
ggagggcgagactacagctcccaggagtgcacggggctcctcggcagtacgcgtgtgcggcgccaggagaggacagctccagtgctgatgttggagccggttagcgaaccccaagagtgcag

SEQ ID NO: 384849 - DNA, 122 bp, Homo sapiens
tcactgtaacctcaaacctgggttcaagtgatcctctgtctcaccctcccaaattatagccgcttccggctataattttgtatgaaagaggccaggcgtggtggcttacacctgtaatccca

SEQ ID NO: 384850 - DNA, 122 bp, Homo sapiens
gcccccacaggccccgcctctccctggcagcccggagcccccgcctgcgccgccgctgcccggagacctgccgcccccacccccgccaccgccaccacctccgggcactgacgggccggtgc

SEQ ID NO: 384851 - DNA, 122 bp, Homo sapiens
gtactgataagttcgtctttcaaagtaatccttgagttcaggccccagtgctggagacgtcgtaaatatttacatgattttgcctattgtgattatcgctatcactacatcccctgactaag

SEQ ID NO: 384852 - DNA, 122 bp, Homo sapiens
gctcagtgatgcccagcacgcggcagtactgccggtggtagtagtaatacctgttctttgcgtgctgccactctataaactctcacgagggtcgccggtcggtccactaggaggtcgaaggc

SEQ ID NO: 384853 - DNA, 122 bp, Homo sapiens
agaagctggtgaaggggcacgcgtactcggtcaccggagccgaggaggtaacggccggcgcggatgtgcaggggtcctgctgtcctgacacgatggccacaggcacagtttgtggtgatgcc

SEQ ID NO: 384854 - DNA, 122 bp, Homo sapiens
tctccaaaaggtgtttaattttatggagatgttgaaaggtacatgccaaatctgagtatacgtgtgaaaataatatgaaagaggagcaaatactaaaccttgtatatcaagtttacatgggg

SEQ ID NO: 384855 - DNA, 122 bp, Homo sapiens
tagccacacagcctcagatcctattctaacatcgatccatcctgttacccttttaagaggcggatcccgcagtgtcctttcctccctcccagccacctctacccccagtcggctgggcggag

SEQ ID NO: 384856 - DNA, 122 bp, Homo sapiens
caccaacagaaaggggtccattatggaatgttctcttgcatcttcaaattcttcctccttcgtctctcttaccctctgcctacaaaggcttcaagaaagagatgcaagacaatactgaggga

SEQ ID NO: 384857 - DNA, 122 bp, Homo sapiens
gtgtcacccgcttccagccccactcttaccccggcaggacttgaggggtcgtaaaagggtcgggggagacgggggtgggggaggctggggacagctgggcagccaccctctgagcggccaga

SEQ ID NO: 384858 - DNA, 122 bp, Homo sapiens
tctaatcagcctgcctgagctaatggacgagggggtcaggctgagagttattgacacgcccgtgcccttaacctgtttcccaataaagctgattagtttttgtcaattcatcagctaaccac

SEQ ID NO: 384859 - DNA, 122 bp, Homo sapiens
tggcatcaggggggcctgggaggtgaggggcatggggtttggcacagcagcagtctaggccgtaggtactacaggcatagacaggacccgcatgtcaaaaaaggactcggttggtggctcag

SEQ ID NO: 384860 - DNA, 122 bp, Homo sapiens
agaaatggctgtgagaatacggatggaagagaaacatacaggtatacagtaagagaaatacgagtaaagaccaaaaaaaggtcaaaatatgacatagaattaaagggagaaaatagcaccag

SEQ ID NO: 384861 - DNA, 122 bp, Homo sapiens
caaaggaaaaagcacaaagcgtctgagtcaccaattcatcatggcttgtgactgagaaagcgctgtggagtcctggccccgtcggggcagcagacctgcatcagaggtttctttggtaactg

SEQ ID NO: 384862 - DNA, 122 bp, Homo sapiens
tctcccagattgtgcaagaaccatgggaggggcgtcaggtgagaatagtgactcgggatgcgggttcatgagcgggaagagctttggtccgtggggttcccagttcccattctctcctatta

SEQ ID NO: 384863 - DNA, 122 bp, Homo sapiens
ccctggctgaggttagggcaggaaaccacatgtctttcacttccttttctccagaaacctcgtctgaactccaggcccagtggggaggccctgattcagagagactcctgatcacagggcag

SEQ ID NO: 384864 - DNA, 122 bp, Homo sapiens
acagtccctctcccacctccctattttaaagtgcaagtttggttgtggtgtctgtccatacggaagcacagccttccagcagccttcgtatttaacatattcgcagattatggtgtgactgg

SEQ ID NO: 384865 - DNA, 122 bp, Homo sapiens
gaggaacggggaagttcaggggtgacggcaatcgccccagcctgggaacagttgcagccccggggaggagccgccctgagccccgcccctggcgaccgctgccaggaggtgcgtttccgtgg

SEQ ID NO: 384866 - DNA, 122 bp, Homo sapiens
aatttgaccttatgtaaagcagcttgggtgttggcgtgagcacggagggcctgttgttcacgttagaacagctgctgatcagcccgagtctccgtgaagttgccctgtggagaagcttgggt

SEQ ID NO: 384867 - DNA, 122 bp, Homo sapiens
gcctggcgtcaggttaccaggcagcgcccctctgctcggcccactggcaagcgctcccagcggcaggtataaaagctcaggctggcagtccttgaacactggtgctgaaccccgccgcgcgc

SEQ ID NO: 384868 - DNA, 122 bp, Homo sapiens
tacagagccttcgtcaggagcgtgccctgcggacagagccttcgtcaggagggttccctgcggacagagccttcgtcaggagggttccctgcggacagagccttcatcaggagggttccctg

SEQ ID NO: 384869 - DNA, 122 bp, Homo sapiens
gcaagctatcctgacggggaaactgaggcctggagaggagcagtgctttgtgcaaggtcacgcaaaggggctgaaagccaggtcccccgcgctccgagccccgcatccctccctctccggga

SEQ ID NO: 384870 - DNA, 122 bp, Homo sapiens
ctgccatgggaacgtacattgggaataatccagggcagcccagaagcttctgcatgtgggcgtgtgcatgtctgtgagacaggatttggggctgtccctcagtgagcctccgttgttatcca

SEQ ID NO: 384871 - DNA, 122 bp, Homo sapiens
aggagcatctcctggaagaccacgaagtcattgtaccgtctgtataccgaggacttgaagcgctgcaagagaagggtcggtgcttagatccgacgttggaaactatgctgtcgcgtcacttc

SEQ ID NO: 384872 - DNA, 122 bp, Homo sapiens
ctcaagacggacgatgatgtgtatgtcaacgtccctgaactggtatcagagctggtcttgcgagggggccgttgggggcaatgggagagaagcacggaaccccagagagaggctgagcagga

SEQ ID NO: 384873 - DNA, 122 bp, Homo sapiens
gcgtaggaccctccgagccaggcgctggatataatcttctggtgtgccatttgctaataccgttggataagcgcagtattagggtgggagtgacctgattttccaggtgccatctttcaccc

SEQ ID NO: 384874 - DNA, 122 bp, Homo sapiens
caggggggctagacaagccaattcatttcccatcgctgagtgggtcgggggaggcagcgccgaccttaatcacatggtgttaaaaaaaaaaaaataactaggggcacgtggcaggaagggga

SEQ ID NO: 384875 - DNA, 122 bp, Homo sapiens
ctcgccgccttttccccacaccaaatgtgccatttatcccttgtcctgttcagcaatgtccgtggccccaagcccggcgcgtcggagggcggggtgcgtctggcgcccggctttactcgaga

SEQ ID NO: 384876 - DNA, 122 bp, Homo sapiens
gaaatgcatccagaacttaaaacaggctgggtcagcagcagggcggcggccgggggacctcgggggccaggtgtccgccatccggttactttaagctggcaaagccatcgtcccgtggaccc

SEQ ID NO: 384877 - DNA, 122 bp, Homo sapiens
ccagcctaagtgacagagtgataccctatctcaaaaaaaaaaaaaaaaaaataggccaggcgcaatggctcatccttgtaatcctcgcactttgggaggccaaggcaaatggatcacttgag

SEQ ID NO: 384878 - DNA, 122 bp, Homo sapiens
gcagccagtaatagttgaggtgggggctcttaaagtctttacccagccccgggatgcgaccggagaaaaaaaagaaggacaggacccctgtggaataattctgggggttagtgctgcacctc

SEQ ID NO: 384879 - DNA, 122 bp, Homo sapiens
aggttgcccatgtgagggagccggtctccgcaccttgaatttctctactgttctggcctccggggccatgacattgaggatggctggccactgggcattgctccttgcaccattttctctgg

SEQ ID NO: 384880 - DNA, 122 bp, Homo sapiens
aaggtccgggtcgcgtttccgctcagtttttgccagggttgaggcgattccagagagcggcggaaaggataagcctcgacttagaagctaccgagttaccctaagaaaggtgagggcggagc

SEQ ID NO: 384881 - DNA, 122 bp, Homo sapiens
aagtccgggccctgctcaaacttcagccgtgaagacactcggcagcctaaccaccgttcacgcaaacttagcgatctgcctggtaaacaaaagcggaattcagacgctcagtaggacccatg

SEQ ID NO: 384882 - DNA, 122 bp, Homo sapiens
ctgggaaagagagcgtctgaagagaaaggcacccggagggttcggggtcctgcgggctgacggccctaccgggtccagcagtggccagctggcctggttgacacctgtacgcattgttttta

SEQ ID NO: 384883 - DNA, 122 bp, Homo sapiens
cgtaaccgggaccaaagcccctttgcgaaacacccatgcctgagcttagctcagctgggccggcgcaggggcaggaaaagcccgtcctggcaggcgtccttgcccctcttcagtctcggcct

SEQ ID NO: 384884 - DNA, 122 bp, Homo sapiens
cttgtggtgcgccgttttttaagcctgtccgaaaagcgcaatattcgcgtgggagtgacccgattttccaggtgagtccgtcacccctttctttgactcggaaagggaactccctgacccct

SEQ ID NO: 384885 - DNA, 122 bp, Homo sapiens
cctggaagacaccccggcctgtggagagactgccagggcctcaaatcacttaggaaagggcgcgggtccggttggaccttgaaggacaggcaggcgagggtactccagggaacagctaagca

SEQ ID NO: 384886 - DNA, 122 bp, Homo sapiens
tgggggtgggaatgcggggatggggtggtcgcgatgcagggagggcgacagggtccaggtcgtgctcataagtttggagctgtactctcagctactcggggctggtccttgattttggctgc

SEQ ID NO: 384887 - DNA, 122 bp, Homo sapiens
caagaaaaatatttgtagggcctggaaaaaacatccaggctttttttatttctgccacagcgtgttaggctggcagggccccaccttccactccctggtgaaggaaagtttgccgaagaaag

SEQ ID NO: 384888 - DNA, 122 bp, Homo sapiens
ggtgatccacccgccttggcctcccaaagtgctgggattacaggcgtgagccaccatgcccggcagcaactgtagtcttgtagtatagtttgaagttgggtaaggtgatgcctccagatttg

SEQ ID NO: 384889 - DNA, 122 bp, Homo sapiens
cggagatggcaagatcccaacagcagggcacagcactcacttgagcatcccacggtgttccgcatgccacacctggatccggtcctcccactggtccctggtaagtttgtgctggtccatca

SEQ ID NO: 384890 - DNA, 122 bp, Homo sapiens
cagggaaacttcaaaaagagcctcttactctgcaaagaaactgcagcagctgtaaccgcacgattctcagctggcttaatgatgtccgtgtcacacgaggagtactgcggcccgggaggggc

SEQ ID NO: 384891 - DNA, 122 bp, Homo sapiens
ggggtactacccgtctcgtggacggtcgggcctgggggtgggacctccgtgaccttggatcgcgttgtcaagggcgacgggccttgcgcgcggaggtgggggaggtggccccgccgcccccg

SEQ ID NO: 384892 - DNA, 122 bp, Homo sapiens
ctacttacatatttgttttaggatggatcagagtttagagagccgcactggcaagctagacgagctgcaaagttgtcagttccagggcctctgagtcaaggagctggttcaggtggagtttt

SEQ ID NO: 384893 - DNA, 122 bp, Homo sapiens
aaaatggattgtactttgttttccttcataaagggtaatgaggatataatctcaaagctacgcttgaccatcatctgtcaaaccaaagcaaataagccagtgcctgtctttccttattgtaa

SEQ ID NO: 384894 - DNA, 122 bp, Homo sapiens
ggcctagaggatctggattctgagagccccagaatgtgggcagcacaacatccagcaagtcgtgctcactccgccggactacaattcccttgcgtctgttctgcctggcgcctcttacgtca

SEQ ID NO: 384895 - DNA, 122 bp, Homo sapiens
ttggcatacttattgtaatgaattaaaacattaagccaaagcaaaggtcccccgagcaaacgcagctttatttcctgccccggattgctttttctacgtttaaacatatatgtatcacacat

SEQ ID NO: 384896 - DNA, 122 bp, Homo sapiens
tcctgagcggcggcctgggcaggtccccgttcttgccgatgcccatgttttgggacacagcgacgatgcagtttagcaaaagaaacatgacagcagcggttaacacctccgaacttgctggc

SEQ ID NO: 384897 - DNA, 122 bp, Homo sapiens
ggatgtccatctggaagtgaccgcccagtttgctccctgcaggtacaagcggagatcaagcgaaaatggcgaagctggaaggtgaaccgttacttcgctgtggacttcaagcaccgacaccc

SEQ ID NO: 384898 - DNA, 122 bp, Homo sapiens
tatagcctatctttgacaaaccagctacaagtgaggctaaggagtggttacaacctgtcccgacctcttgcaactggcacaaggtcccccggtgtaaagttagaggttgtctgatgcaaacc

SEQ ID NO: 384899 - DNA, 122 bp, Homo sapiens
ctgaacgcaagatagagaagactaccaatcttttagggcacagactcactgacactgccccgagggcggcaagtaccagtggtcgatcaccaacagaggccccgcctccgaggacactttcc

SEQ ID NO: 384900 - DNA, 122 bp, Homo sapiens
tgagttctaccctcgcctcaggtcccctttctcaccagcagcgcacacccctcccttccccgcccctactttagccctctgggtcgatcaaggcccgggcaccgcctttgcccagctcagag

SEQ ID NO: 384901 - DNA, 122 bp, Homo sapiens
gaatctgactcgcttgaaacagcaccgcggtggattcggatccgggtgagtagggaaatgcgcctcagcccctcccacgggccgcccacggattccaggatccgaaaacgcttccagctgct

SEQ ID NO: 384902 - DNA, 122 bp, Homo sapiens
gatggcattctgtgcagggggggagggggctttctgccatgatgacccccagatcctgaacgcaaaccccaccagaagactgagtcacaattagagacaagagcaagatctcgatgcccaac

SEQ ID NO: 384903 - DNA, 122 bp, Homo sapiens
caccatagagtgttctctaggaaggaaaatacccagagcccctttgttacttcagagaagcggaggaataagagaagcagcaggactttaacagagactagaatatttaaatttttgcaaaa

SEQ ID NO: 384904 - DNA, 122 bp, Homo sapiens
aggcctgcaggtgctgatgggcaggatggagagcgtgttcaaccacgccatccggcacaccgtctatgccgcactgcaggacttctcccaggtgacccttagggagccgctgcggcaggcca

SEQ ID NO: 384905 - DNA, 122 bp, Homo sapiens
gacctgggaaccagatcttagggcctgcagacctccctctgccttgagatcagactccaccgccagtaactgggaggaaacatctgtactccaggatttagagacaccgacacgggagcagg

SEQ ID NO: 384906 - DNA, 122 bp, Homo sapiens
ctcctgggttcacaccattctcctgcctcagcctcccgagtagctgggactacaggcacgcggcagcatgcccggctaattttttgtgttttactagagacggggtttcaccatgtggccag

SEQ ID NO: 384907 - DNA, 122 bp, Homo sapiens
gttgcatggagcctgatgagtaaattgaattgcctgggcgtcccgggagcgtgaagacaccgggcaccttagggaacatgtaccgcccccgccccggctggagctgggcacctggtggggct

SEQ ID NO: 384908 - DNA, 122 bp, Homo sapiens
agagccaggggagggtaggggctggctcttactccccgtaccgcggtagggggcctcacccgcctgcgatggggctcctaagagccaggaggggagaagggctggctcttactccccgtatc

SEQ ID NO: 384909 - DNA, 122 bp, Homo sapiens
actcagcagggtctctgtggggtgtgttccacaggccactgacccactggggaagcggcacgttagccatggtggacgcacaaaatccaaccagggggcctttgatgatcacacacggtaca

SEQ ID NO: 384910 - DNA, 122 bp, Homo sapiens
tcccatccctggcgccaagctgggccccggacagacgtggtccacctgtgttccagtgggcgtggcctccgggagtgggcggggctcctgggagccttcggccttaaccccttccttcccgc

SEQ ID NO: 384911 - DNA, 122 bp, Homo sapiens
atacacatcatgcttttatttggaaaacctcattccacatggagggcatttgggctgtgacggggtgggcagatgactaagtcggagtcagaacatctctatttgagctctgtaacttcctg

SEQ ID NO: 384912 - DNA, 122 bp, Homo sapiens
tttgttagggacaggacaaagaagaagaagcggagtcgaagccgagatcgaaaccgagatcgagacagagatagggaacgaaaccgagatagagaccacaagcggagacaccgatcccgctc

SEQ ID NO: 384913 - DNA, 122 bp, Homo sapiens
atgggttaccatgaaaacagccgcctactctccagggctgtcacgtggaaacccctttatcgatgagccctcctcacatctccacccgcgggctctctgaccatgtgtccatgtcgcactca

SEQ ID NO: 384914 - DNA, 122 bp, Homo sapiens
cccatccgctgggtctgggcacccagcttcccggcctgcaagggcctgtccaaaggacgccgaccgatcctgtgggcctcttcgagcgggacccccaccgtgcctcccctccagcctttcgt

SEQ ID NO: 384915 - DNA, 122 bp, Homo sapiens
gggctcgggttaactgatcgcagggaaaaacccattaagcgcctgcctctcccagtcatccgttatcgcgcggacggtcgctcttcttcacgtaattggagaaacttttcccattacccgct

SEQ ID NO: 384916 - DNA, 122 bp, Homo sapiens
tcattacagattgacacgagtgctcccagaattgggagatggctacgtaacagcacttttcgaagataaggcatatgggagatgcatctctacctccagggcaatgtcaaataaacctacac

SEQ ID NO: 384917 - DNA, 122 bp, Homo sapiens
ctcccatgaattgcaaatcgtgctgagtgcccagttcttatattgccctcttcgtgggtgcgcgggaagtggatgctgtccggtgccccgagcggttcgcactgcatgcctggtcctcaccg

SEQ ID NO: 384918 - DNA, 122 bp, Homo sapiens
gaggctccttcagatggagcgttagggaattactctttgaggaggtgacatttcagagagcgttcattcacttatcctgcaaagattggctgaggatctactggcagcccaggcacttccca

SEQ ID NO: 384919 - DNA, 122 bp, Homo sapiens
aggatcagagcgctcggagaagcggacgctaagcgaggatcagagcgctcggagaagtagcgcttggggaagtggcgctcgggaaagtggcactcataagtaccttacgctacgctccctga

SEQ ID NO: 384920 - DNA, 122 bp, Homo sapiens
acacacggcatgcgactggcgtggatccctggcgagaatggaagggggggtggcaggagacggggacgggaccctccagggacacaggaaacacacaccaagcacggagaggccaggcgggc

SEQ ID NO: 384921 - DNA, 122 bp, Homo sapiens
tgaggggtttggaatagatgtctgttctctggggcaggatgcagaggaaagagctgtctgcgaatgggcaagagagaaggtgggtaaatacagttaaaccacagtgaccgagggcccagcac

SEQ ID NO: 384922 - DNA, 122 bp, Homo sapiens
tcaagccatcaccgctggccttagtctgccgtgattgacaccgtgctccagccaggataacgcacttgcagctcctggaatgggagaacgtcatgagaaagtcagcaagctcctcaagggtg

SEQ ID NO: 384923 - DNA, 122 bp, Homo sapiens
gtgccgggcggttggcgtttgtgccgggcggtgggcgtttgtgccgggcggtgtgtgttgcgctaggtaacgtgtgtttaaagagccagatggtttgtgtttcaggctttgctgtaatgcct

SEQ ID NO: 384924 - DNA, 122 bp, Homo sapiens
gcggcgggggggtgggggctgcgcgggggcgggagtggcggaggtggccgcccctggcggcgggtttgtttatcccggggaagaagtttaggagcgggagatagggaaggagggcgggtcgg

SEQ ID NO: 384925 - DNA, 122 bp, Homo sapiens
tgtatgttatctggaacatctcttgcacatttatagcgtaagtcacctattagtgaactacgtatagttccttctgcagtttgagtttctcaaccagctggtctgttgttaaattcacaaac

SEQ ID NO: 384926 - DNA, 122 bp, Homo sapiens
atcttctccaccttcttgcggctgctggcggggggatcgggtgggggtgttccctctgttcgagccggaaggaacgccttttcccacgctttcccgtctgctctcaaaaaaagagtgtccaa

SEQ ID NO: 384927 - DNA, 122 bp, Homo sapiens
tgcgtcttcaccacttcctgcttctctatggtcggcgcctccttcttggcctagcataggcgcctcagcagcgaatgcggcttgagcctcagcattccgccacaggccgtggttcagccgcc

SEQ ID NO: 384928 - DNA, 122 bp, Homo sapiens
tgcctctgactactcagccttgttttcggtgtgtaggccccagctgcccactggaactgccggctaatgcttgctctcccaagatctttaactcctcctggctgcacctgggtagggatggt

SEQ ID NO: 384929 - DNA, 122 bp, Homo sapiens
gcacagaggccaggaggttgctgtgcaggacaaggagccgcaaggaccgaagtcccgctgcgggcagttgctggcttaggcttggcaccagcccagcccacggcgctgggacactcctgctg

SEQ ID NO: 384930 - DNA, 122 bp, Homo sapiens
ggacctctagttcccagtcccgtgctctcttcacgattctctgctgaaacagaccatcaacggttgagaagcacaattagaaaagggcctttgtatggcttcaccctgccaggcggcctaat

SEQ ID NO: 384931 - DNA, 122 bp, Homo sapiens
caagcaacagttataagtcaagagaaagacgaatgctagccaaggctagaggtagctaaccgccctgttgtgggtttggcgccgcctggcagagtcaaaccactgcagccctcactccaata

SEQ ID NO: 384932 - DNA, 122 bp, Homo sapiens
aggaggggagaaaaaagagaggggagaagttgggtttatcttattcgtggctgtgtttgccgtgctctgcaggtgatgtttgctgaatagtcacacacaaaacagaggtgccgtcctggcat

SEQ ID NO: 384933 - DNA, 122 bp, Homo sapiens
tcgggatctgaagatgacttccagatctcaattcctatgaattaacaccagcaatcatcacgcaaagtaaattatgtggaatatggcaatgtattacatcctctctgatggtgggacctcaa

SEQ ID NO: 384934 - DNA, 122 bp, Homo sapiens
gagcatgatatgcttttccatttcttcgcatccctcaggagtgttgtaagcttttcttcacgtagaatgtacatttatcattaagcttattcctgggcatttgacctttgcattgttgctgt

SEQ ID NO: 384935 - DNA, 122 bp, Homo sapiens
cggcgcggggagcggcgagcggcgcccgggctccttccctccaccaggcagtgtgcggcgcgagcttgcacaggcacctactgctcactgagtgtcgtaagctgctcacgattgtgcgtctt

SEQ ID NO: 384936 - DNA, 122 bp, Homo sapiens
gctgaagctacaggggttagtttagtcgcagtttgttggccgtgttgccctcgcctgctgcgcttggggaggagccgatgtcaccgcatcgctgagcacagcccatccttgcaccggccttg

SEQ ID NO: 384937 - DNA, 122 bp, Homo sapiens
gctccgaaaagaccttcctcctttggggtaaacggggctcggcccgcgccgcagcgtggacggggaccacgcccaaccctccccgcagatagctacagacattcgggcggaatctgggctcc

SEQ ID NO: 384938 - DNA, 122 bp, Homo sapiens
ggacgggaagtgagcacggtgagccgggagctgccccagaggtccctttggagaacctcccgggaacgccacgcctctcagcgttctgcaagtgttgctggattgcacgggcacctgcagga

SEQ ID NO: 384939 - DNA, 122 bp, Homo sapiens
ggggtgggggtgaagcgagggagagaattgaagactgccggggaagctcagaaaattctccgcattacttataaacagccgggtaaggtcaggctagccacgttttattctttcctacgcct

SEQ ID NO: 384940 - DNA, 122 bp, Homo sapiens
cggggtttcgccatgttggccaggctggtttctcaatcttaaatcaccccccccaccacccgccgactcctcccaggcatggtggtgggagcattggtctcttactattgacaacgcctcca

SEQ ID NO: 384941 - DNA, 122 bp, Homo sapiens
tcccacctcttccagcatttcctggatgatgactctcaaggctcttcccagcaggctggccgggagcccgcgcgatagtggagggacatggatgagtgccgcgcagccctttccatgatgca

SEQ ID NO: 384942 - DNA, 122 bp, Homo sapiens
aagcaccgccccgcaggcatcgggccaatctcagagggcgcgcacgccgcatcaggaccccggaacccgccccgttggggatagggacagatggagaatccagctcagacccaggtaagctg

SEQ ID NO: 384943 - DNA, 122 bp, Homo sapiens
ttaatgatgaaaggtgatgcagctatcggcaatggctggagactagctctgcggtctgctcgtggataaccgcgctccctcgctgccgggccacccgcacagccgggcaaaccaaaaggccc

SEQ ID NO: 384944 - DNA, 122 bp, Homo sapiens
agcgcgggctgctggggcgcgggcgcgggcggcttgggtctggtttttgcggggagtccccgggctgtgctctggggccaacgtcctgactttcggggccggcagcaggctgaccgtgctgg

SEQ ID NO: 384945 - DNA, 122 bp, Homo sapiens
cgagtccacctcaggaccagaggacaccagagcagcgtcagtccccggtctcttttagagcggatgagagtattctctcagagcctgctttccactgggacctagttgttcctagactattc

SEQ ID NO: 384946 - DNA, 122 bp, Homo sapiens
acacggcctggtgcaagtcagcgtttagtgtttgacagctttctcagcactccctgactccgtttacctttactccgcatcccattctcttactgcctatctgaaggattggatgggcagag

SEQ ID NO: 384947 - DNA, 122 bp, Homo sapiens
agaggtcaggacaaagtcccaggccccaggcgtggctctctgggtctcaggccccaagagcgatgactgcactggggagtcacagggttggggattgcccactcccctgagttttggttctc

SEQ ID NO: 384948 - DNA, 122 bp, Homo sapiens
tgagaatcgccttcccacggggtcaggaaactgacaggcccaagagtgcatctcagcaaacgctccgtttcctgcgggcagcctcagatactggggaccgtcctggggtctcaattaagcgc

SEQ ID NO: 384949 - DNA, 122 bp, Homo sapiens
cacaatacacatttgacaaatcctagagaaaaaccgattggcttattttagaaacatgcccgcccctgtggataatgcatgaggaattggggaggttgtagaattatgatctttcatctcct

SEQ ID NO: 384950 - DNA, 122 bp, Homo sapiens
atttggcagcaaaacctgacccgaactgatgtgatttgtaatctttagttatccatttaccgtaagatcaatgtgtttagctgcagaaatcttaatgtttgttaatagggggttatcctggt

SEQ ID NO: 384951 - DNA, 122 bp, Homo sapiens
tggatttttacagaaaccaaggccagatgtcactaacgaactggccggtatttttcatgccgactctgacgatgaatcattttgcggtttctcagagagtgagatacaagatggaatggtga

SEQ ID NO: 384952 - DNA, 122 bp, Homo sapiens
aggttggcccggaagctggttcgattccctggaaggggccgagggcaggaggtactgttccgtgtggctttggggcttcctgctgcaacgggctccgggcagagaggcctccgctgcctgcc

SEQ ID NO: 384953 - DNA, 122 bp, Homo sapiens
gagcaaggagttgtcagccttacctctctgctccttctgtagtgtcacaccatgtctgaccggaaggcagtgatcaagaacgcagacatgtctgaggacatgcaacaggatgccgttgactg

SEQ ID NO: 384954 - DNA, 122 bp, Homo sapiens
gcccctgggcccgcggggccaggccggggagggacggggaggggacccgagcccaccgcgcgccctccggggactccccacgcacagggcaggtgctagccaggcgcccacgggagacgccc

SEQ ID NO: 384955 - DNA, 122 bp, Homo sapiens
ggctgtagacctggcccctgaagtgcaggccgatccggtgtgcgtggagcgaagcctcctcgccctcagcattccagtagcctgcggacgggcgtggggccccggacactggaacgccacac

SEQ ID NO: 384956 - DNA, 122 bp, Homo sapiens
gcacgaacatctagcactgggggctgcgctggctacaatccgtgaaccatcttgacacaccgtcttcacccagcagcaggtgtgcagacgcggccctccccgtggaggaggcgcgagtaccg

SEQ ID NO: 384957 - DNA, 122 bp, Homo sapiens
gcttctattacgatgcagtgaagttgttcctaaaagaaagttatgagagaaagagaagggcgagcaggagggagccagacagctttctagtgtatcatcagttagatttgcatgtgccgttc

SEQ ID NO: 384958 - DNA, 122 bp, Homo sapiens
aagtgagaccctcatttttctaaaaaaaaaaaaaaccaaaaaaccataagcttaaatgatcgagtattggaaacgctttctaaggccctggaaaaatagaagttttcttaataataatgtta

SEQ ID NO: 384959 - DNA, 122 bp, Homo sapiens
catctccccatgatcttttttaatcctgtatgtaaacaagtattttacctagggtggatgcgttcctcctcttacttctgggaatgccctacctgtctatggagtagctgttcttttaccac

SEQ ID NO: 384960 - DNA, 122 bp, Homo sapiens
tgcatccgccgcctgatcacaacttgaaaatggagtctgaattcttatccatgctgcatccgccgcctgatcacaacttgaaaatggagtctgaattcttattcatgctgcatccgccgccc

SEQ ID NO: 384961 - DNA, 122 bp, Homo sapiens
ggaaactgtggagcttgaaatgaattccagctatgcgtgttttttaagaacacacacttccggcagatccagggggcactggtccccaagcaccggcctgccatgcgcctttctttttggtt

SEQ ID NO: 384962 - DNA, 122 bp, Homo sapiens
gacaatggaagtaaactggatatcaataatagaaagatagctagaaaatcccaaaattctcggaggttaaacaacacacttccaaataacaaatgggtcaaagagggactcttaagagaaat

SEQ ID NO: 384963 - DNA, 122 bp, Homo sapiens
cttttaccatctgtggtagagttagagaagttgggttagggcagggtagctcacagagcacgttgatcaaaaccacaggatctaagaggtgaaggtctaacatgatctggcttggcagactt

SEQ ID NO: 384964 - DNA, 122 bp, Homo sapiens
ggttgcgaacgcgagcagaaaatgcgcctctcactgtcgcgagggattcagacagtcaagcgccaaggcagcccgaggctccccaaagcctcgctcggccgcacgcgggcaggaatctgcgc

SEQ ID NO: 384965 - DNA, 122 bp, Homo sapiens
cgcccggctgccacaccttcccctcagagcagccagccccaacacagaggccaaagggttcgtcagagccacatggtggaaactctagcagagggtttttgaaagcaggttgcacttcattc

SEQ ID NO: 384966 - DNA, 122 bp, Homo sapiens
gcagctggagggtccaacgctcttgctctcagtcttgggcctcagccacacccttctctgcgggtcctttgactggcgtccagctgaccccaaccccggaccttcaaagtctcttgagcccc

SEQ ID NO: 384967 - DNA, 122 bp, Homo sapiens
tggccccacctcccctcaccatcgtccttgggctgctgagctaggctcaggctggaggctcgggtcctgacgtcagtgtccctgctgggggcccccaccaggttgcgcccgggtcatcatcg

SEQ ID NO: 384968 - DNA, 122 bp, Homo sapiens
gaagggctccggtgcccctaccccgaggcagctgctagatggcgctgttactccactctgcgcgctccgcctgccgacaacttgaccccgctgacgtcacggccgtctgaatcatcaaggcc

SEQ ID NO: 384969 - DNA, 122 bp, Homo sapiens
ggaagcagcgtgcaacgagtggcaaaggagcccctaacgctctttcttctgtgctcgccccgccccctccggcgtgggccccgccccgactaagccccagccaggccccgcccccgatgtta

SEQ ID NO: 384970 - DNA, 122 bp, Homo sapiens
gccctcccagatcctgctctgccagacgaccctgaagttaaaggatgttttcccccataacgaatgttcaaagtccgtgcgtcactctgatgttccctacacataaccgggaaacagattta

SEQ ID NO: 384971 - DNA, 122 bp, Homo sapiens
ttgcttttctctaggaacctgctagaccttgataccttctccaagtccgaccccagtaggcggctccaggaccgggagggggaacttggggtctgggcgcgactcaggggcgggtggagtcg

SEQ ID NO: 384972 - DNA, 122 bp, Homo sapiens
tggtgctaagtgcaggcgaattgaagccacagtgagatgccattttgcagcccgtcatgacgtggtagtcatggcaaaacacctaggccagttgcaggcttgtgtgtttttaaagatccctt

SEQ ID NO: 384973 - DNA, 122 bp, Homo sapiens
gtgtagctcagggaatggaagaggcgatgggctgggtgggatgggaggagtgagtttaaacggcttgctgaacaggactcttctgagagcagctaagcgggtcctacattctggctgtgagc

SEQ ID NO: 384974 - DNA, 122 bp, Homo sapiens
gaccctctgctttgtcctcctgctgtgctgttggcaagaaactgagctccggccgagaaccgtgattccaggtagggccccacagggatgtctcagcagaaagagaactgaaccaggtgggg

SEQ ID NO: 384975 - DNA, 122 bp, Homo sapiens
ttgactctctgggagggtgcagcaccctgactccagcgggacagaagctcctgcacctgccgctgtccccgcccccacccctgccccagaccttgctgccctacatctctccatctggctgc

SEQ ID NO: 384976 - DNA, 122 bp, Homo sapiens
aagcagccttgggctgggcgtgaggacaggaagcaggtaccatgcgctcgcaggggtcggcgatgcggctggcctggtccaggaggctgctgtactccagctcctcgcagagccgctgcaga

SEQ ID NO: 384977 - DNA, 122 bp, Homo sapiens
gtatcacctggagcaagtcacttccctacggtgaaggacaaggattttatgacataaaagcgttgccctagaagcagtgtctgctatggattatgtgcccatgaaaaggcagctgctgtcat

SEQ ID NO: 384978 - DNA, 122 bp, Homo sapiens
ctcggtgggaggcacactcacttccacgttcacagttcttggaagcggtcccactgggggcggggctgagcgcgaccgcgccctcaactccccctattgcccgccccggggtggggcataac

SEQ ID NO: 384979 - DNA, 122 bp, Homo sapiens
tgtgcccacaattgtgagccccatgaaaacatgaacttgtgtgtgtcactttccagcttccgcctatgaaagaaaaaggcagccctgacacccgtgagctgccctttccctctgccaggcca

SEQ ID NO: 384980 - DNA, 122 bp, Homo sapiens
gtgatcttcaagatttcagcagggaaatctgtatatctgtacaaggttgaaaacctgggccgggggtcgcgttggaaccccacaggaaaaaggcgcggaaagccgccgggcattttccgggg

SEQ ID NO: 384981 - DNA, 122 bp, Homo sapiens
gagggctgagagtgtcaaggattccaggtaaagtaataattcctcttcagttgcatagcacgggaattttcacagccagcttcgagaaattatctcaaccccgcattcaccctgcaaagaga

SEQ ID NO: 384982 - DNA, 122 bp, Homo sapiens
cccgagcgcgcccgccactccccacatcaggagctctgttcctcgggttcagcaaacgcccgggcgaaagcaatcttaacattctgggctcccggcacccagaccttgggctgatgcccctt

SEQ ID NO: 384983 - DNA, 122 bp, Homo sapiens
ctcagcttttgcttctgtagaatagggtgtactcatcgtacatttcatgggaatacctaacgcagtcatttggatggtcctgtgaggtagaaaacattgtccaacgttctacgcgaggaaat

SEQ ID NO: 384984 - DNA, 122 bp, Homo sapiens
ttgttccaggcctgacgggtgttcagggtgtaggactcagggtgtaggacgagcgtggcgcgtccctccggaccggaagcggggctcaccccagcgacggggggcttcctcactttcgtacc

SEQ ID NO: 384985 - DNA, 122 bp, Homo sapiens
cggcatgctcgccgacgcgctgctgctgctctcctgcctcagccagctggcgcacgatgacggcaagcccatgttcatctggtgacgctggagctgggaggtccaggctcgctcagccccac

SEQ ID NO: 384986 - DNA, 122 bp, Homo sapiens
ggggtcagggagttccctttccttgtcaaggaaaggggtgacagatggcacctggaaaatcgggccactcccacctgaatactgcgcttttccgacggacttaggaaacggcacaccaggag

SEQ ID NO: 384987 - DNA, 122 bp, Homo sapiens
ttggtagtttaggcttttgattgacaaagaaggacaacgatagacctccctcaatggagccgagtgactagaaagaagtgtggtctagcctcaaaatggaggagttccttagccatcctatc

SEQ ID NO: 384988 - DNA, 122 bp, Homo sapiens
gttattaggtggcaaaacagcattgtgggcagagcacggacttgcaatgcaagcagacctcgatctgggtctgttctctgcctcataacagccatgtggctttgggcaagtcacttaagctc

SEQ ID NO: 384989 - DNA, 122 bp, Homo sapiens
tgacggttcctaggagggccactctgcacgtgcccctcggatggccccatgactcacttccgggaggcagtggccccatttgatgggattggctttgaaacgtcacgattgtcactgtgaag

SEQ ID NO: 384990 - DNA, 122 bp, Homo sapiens
tctttttccttcaagtgttgtttagacagtaagtacatgacaaatggccaatgaagctgccgttaagtcagttaaatgtcttcagttgttacttctgtggggtttgaagttgtcatatgtca

SEQ ID NO: 384991 - DNA, 122 bp, Homo sapiens
gtgcccgtgtcggttcttcctggaagttgactttccttagacccgccaggtcaagttagccgcgtgacggacatccaggcgtgggacgtggtcagggcagggctcattcattgcccactagg

SEQ ID NO: 384992 - DNA, 122 bp, Homo sapiens
tctagctggctgcaaggcaggtcctcttctatcttactgggcactgctaaactgcgaagtcggggcgacacggcagcaactttaaaatcaaaccgcatccccaagggctcggcgtgtttttt

SEQ ID NO: 384993 - DNA, 122 bp, Homo sapiens
acaaagacttgcaaggggaaaaagtgagcagctcctggcagatgcaccctgcaaagccggcggccccccggggtgaggacagacctgggctaaagtccagcttctcatgctgatcctggcat

SEQ ID NO: 384994 - DNA, 122 bp, Homo sapiens
aatttacaaacagcaggaaatagaaacttaagagaaatacacacttctgagaaactgaaacgacaggggaaaggaggtctcactgagcaccgtcccagcatccggacaccacagcggccctt

SEQ ID NO: 384995 - DNA, 122 bp, Homo sapiens
gggataagctgaggggagtgagaggtcacttactgcagccggacataacggcgctggccccgccccttctcgagaactcgcagagctgggctggtaaaattgcagtgctgaagacactggac

SEQ ID NO: 384996 - DNA, 122 bp, Homo sapiens
cagcgcgcgggtggcccttggtgcactctcggtgaggctgtcgagggcttgctcaacacccggcaccagtgccgttgtcctcttagccggccatttctacacccatttttcagacaaggaaa

SEQ ID NO: 384997 - DNA, 122 bp, Homo sapiens
ccttgggtgtacagaggactcgaagcacaggcgccccagaccaggagaaacacgggagggcgggcccccctcaaaagggggccatgcctgagaggggcccccagggcacccctgggaaccca

SEQ ID NO: 384998 - DNA, 122 bp, Homo sapiens
gaggtgacgctgaggggctctgggcagtgcatgccatggaaaggccagctcagagccacccgcaggcaggcactgaatacaaaaagctggggttgcaatgtgttgtatcagcataaacagtg

SEQ ID NO: 384999 - DNA, 122 bp, Homo sapiens
ggagcctctgggagcagcagtgccactgtgcatggcgtgggctgagccttggtgtgtggccgtcctggtggctgcacacctggcgtcgtcctgggcccttgggaggagcacagctgaccctg

SEQ ID NO: 385000 - DNA, 122 bp, Homo sapiens
attccaagctcttaatcaatacttataacatctgcattaaaatgcagaggatcttgagtgcgaactctagtggatccagaggggctcttctcacctctgctgcttgactggctgtgtgatca

SEQ ID NO: 385001 - DNA, 122 bp, Homo sapiens
aaacgcagttttggcttcaaacgctgcgtggcactaaggatgaaatccagtttcttcccacgacccagaagacggccgagcttcaccctctggcttcatcccctggcaccctgctccgcgtt

SEQ ID NO: 385002 - DNA, 122 bp, Homo sapiens
cccaggccagagtgatctgcaccctaactatacaaggccctggaatccccgtcccacccgcggcaaggggctggaagccacagggccttaaactccccagggtgacccccgacactgaaggc

SEQ ID NO: 385003 - DNA, 122 bp, Homo sapiens
cgcagacagatgcgcaaagaagccctggagaagcgggcccagaagcgcgcagagaagaaacgcagtaagctcatcgacaaacaactccaggacgaaaagatgggctacatgtgtacgcaccg

SEQ ID NO: 385004 - DNA, 122 bp, Homo sapiens
cagggcaacactgaagacatgggcaagagcatcccccaatacctggggcaactggacatccgcaaaagcgtagtcagcctggccacaggcgccggggcgatctacctgctctacaaggccat

SEQ ID NO: 385005 - DNA, 122 bp, Homo sapiens
caagcctccaccagcagtaagtctgatttgtcggggacagccaatttcctatctgccctgcggaaaaggtgggggggtttgcaaagggagtagcctttggtccttttgttacttaggcatgg

SEQ ID NO: 385006 - DNA, 122 bp, Homo sapiens
gggagcccggccccttacgaacctaggtctccccttgaaatactccgaggtcttgttcctcgcccccaggccttctggttctaagctccacccctttgggttgttctccttagcccctcccc

SEQ ID NO: 385007 - DNA, 122 bp, Homo sapiens
gaatctgtcttgatagttagagtgagagccgcgcagccgtgatcctcgtttgggggcgagcgaagaattgacaagaggtctcggcatcccgaccccgcccgccttacctgtagcaccattcc

SEQ ID NO: 385008 - DNA, 122 bp, Homo sapiens
acctccccgctccactcgtctgcgctgcagccggttcctatttgcccgacgccgcgactgcgacccaggctccccgccgcagccgttcttgggggggctcccgcaactcagcgggcgcgacc

SEQ ID NO: 385009 - DNA, 122 bp, Homo sapiens
agttcaaagtcctttatctggcattccaggcctccataatttaaccccagactatctagccgagtttatcacccaaccatttaggccactgccatccctttacccactaccctctccactct

SEQ ID NO: 385010 - DNA, 122 bp, Homo sapiens
tttcgccttgacagcctcagcaaaagtggaagggggtttgcagaattgcactattagcagcgtccacccgaaggtctgcacagaattagactgagctgattctggacaaagcccactgtgta

SEQ ID NO: 385011 - DNA, 122 bp, Homo sapiens
tggaaagacaagctgagttttggaacaaaccatggcagaagatcagacacagacagagaccgtgtgtggaggtttctacattaaagaagttccacttccctccctttgaaagtcagtttact

SEQ ID NO: 385012 - DNA, 122 bp, Homo sapiens
gcgcggtgcagcgtgactgggggctcaccatcttcagcttgtgctgctgcaagatctcatcgaggttctgcctcttcttgtagttgaagtagaagttcttacactgcgacacagtcttggag

SEQ ID NO: 385013 - DNA, 122 bp, Homo sapiens
gtcttaaggcttgctcttatccaatcagaacatgataataaagtccaatccgagtaaccccggaggttccttctcatccaatcagagcgtgcagtccaggaatcctcctgtatataacctca

SEQ ID NO: 385014 - DNA, 122 bp, Homo sapiens
aaaaaatctttgtttctatagtgctatcctcttttatccaccatgtgagaggtcaggagccgactcaccccaagggtctaggagttgtgccattgaccttactgcctagggtcacaggctgg

SEQ ID NO: 385015 - DNA, 122 bp, Homo sapiens
gttctgggaggcggggggaaggaggttggtggcgactccctcgctcgccctcactgccggcggtcccaactccaggcaccatgttccccgcgggcccccccagccacagcctcctccggctc

SEQ ID NO: 385016 - DNA, 122 bp, Homo sapiens
gaaggccggcaagacagcgagcggtgcgggcgaggtggtgcgctgtctgtctgagcagagcgtggccatctcgcgctgcgccgggggcgccggggcgcgcctgcctgccctgctggacgagc

SEQ ID NO: 385017 - DNA, 122 bp, Homo sapiens
ctccgcccagaggccgctcgcgccgggtccttcctctaacccaagtgcaggcagagcccccggagccatggccagcccttccggcagctccaaagccacaggcaagccccgaggctgggatg

SEQ ID NO: 385018 - DNA, 122 bp, Homo sapiens
attacttagatttcccatccacattcactgattatttattttgatcatcataatctattgcgcacagcagggactggggtcctgtccccaccttagggggattatttacactcctaaagatt

SEQ ID NO: 385019 - DNA, 122 bp, Homo sapiens
ttaggtagttatcatagctctcctgtgcagcctactctcctggctgaagaccccaggttccgctgccttgggtggttattgactggcttgggtcatgaactctaggccctacctccctgctc

SEQ ID NO: 385020 - DNA, 122 bp, Homo sapiens
ggacagagtcttaggcatatcaacattagaaaccagagaaaagataaggattcagcaaaacgtattgacaaggaacaaccaatgagacacgaggaaaatcagatctgaatgaattaaatgaa

SEQ ID NO: 385021 - DNA, 122 bp, Homo sapiens
aaggagggggaggcctggggaccctcctgcccagcccaaagccctcacctttgagtacatcgcagcccatcaccgagaggcggccgctctccaccaggtagcccacgggcacgttccagccc

SEQ ID NO: 385022 - DNA, 122 bp, Homo sapiens
cgtgggattctggggctcagtcacttggagtctctcctgaaaggaggcctcccggcccgccggtgcccagccccacctgcaggctctcctctgagtggcccccacgcatctccccctttcca

SEQ ID NO: 385023 - DNA, 122 bp, Homo sapiens
cagtgtgagcacaatgcagcactgccaagaagtgtgccggtgaacacgtgcgtgtgcaggcgcatgtgtgtgtgttggtgcgaggactctagagcacagctggaggccggtggtgagagtgt

SEQ ID NO: 385024 - DNA, 122 bp, Homo sapiens
aaaaacgaaatatcctttctgggagttcaagattgtgcagtaattggttaggactctgagcgccgctgttcaccaatcggggagagaaaagcggagatcctgctcgccttgcacgcgcctga

SEQ ID NO: 385025 - DNA, 122 bp, Homo sapiens
atgcgaaggaccttgaaaaggctatctaatgtggccctgcatttgagtgacgtggaaaaccgagattagggacttttcaccaaagccctctaggatttaaacccacgtaggtttctgcgtct

SEQ ID NO: 385026 - DNA, 122 bp, Homo sapiens
gaacacagatatcatgtagctgcagtaagcattgggatggctgcacaccattctgtggaacggatatagagtcatttgttaaccagtgatactgacagagagcaagcagatcagtgaagaca

SEQ ID NO: 385027 - DNA, 122 bp, Homo sapiens
gggcggggcacgagaagttctggtcctttaagtgggcctgtctcgggccgtctgttatggcgcctggctctttctatttcggtaggttttgcgctgtctgtcgcttgtgcgctgtctgtccc

SEQ ID NO: 385028 - DNA, 122 bp, Homo sapiens
aagctcttctcaggaatgtcagctgctgccacgcagcccccttaccccagggtccatggacgccagtactccttggcccttgcgccgctctgcctctgagtcaccgtctccgagtcaccggc

SEQ ID NO: 385029 - DNA, 122 bp, Homo sapiens
atcccctccacccaatttttgtcataaaaagtgttctgaacccgatttccaaagacataacggtaatatatgaactacaatattgcaaattttgagctgatgtgtgactgtattggggaaaa

SEQ ID NO: 385030 - DNA, 122 bp, Homo sapiens
actgggcgtttcctgctgctctgggctgcaggggcgagacttctggcgtcgccgtcgtgacgtatttttcctatgcccggtccgtgcattctggttgtgaaggctgagttctagagatcggg

SEQ ID NO: 385031 - DNA, 122 bp, Homo sapiens
ccacctctaaccaatgacgactttcattacatcttgacagttgtcactggttagaggtggcgagagacaaatgaagatgctgcttcagtattgcctcctaagtctcaggtaacttcaatttt

SEQ ID NO: 385032 - DNA, 122 bp, Homo sapiens
tctccaccctaattccccctcttcccagattccacccgctccgctacttccctccgcccccggctccgccagcccaatctgtcagagaagttgtgtacaaactgcgcggccgccctgcgcgc

SEQ ID NO: 385033 - DNA, 122 bp, Homo sapiens
tgactctcagcagccggcttgcggagcggttgccgcgtcctctgccgagcttcttgtgcccgcctccgagcctgaggaaacagctgattgatcagcctggctcaggcttggggcggggattg

SEQ ID NO: 385034 - DNA, 122 bp, Homo sapiens
cttcctgtgctcccgacagcaccgggtgtgcactgctcccctccacagcactcactcacacgactgccaggcatccttgctaggcacggcctgggaaacattctccgtttcatttcaaatgc

SEQ ID NO: 385035 - DNA, 122 bp, Homo sapiens
ccctctccttgaccctgaaacgtgcagcaagtagataacctcctgatccctgacagtctccgcctgtgttgatgccccgccccctctgctggagtccgagccgccgattggctaggagcact

SEQ ID NO: 385036 - DNA, 122 bp, Homo sapiens
tcttaatagctgagcgcccgcaaacgcccggcctgggctcgaggcctgcccctccagcgacgggcgcccccaacattgaagtctttctctgcaacttggacggacccaccccgagcgccccg

SEQ ID NO: 385037 - DNA, 122 bp, Homo sapiens
atcacagttggcatcctttattcaggtctcttctctccagcgtacacttaaaattggtgccgagcagggatataacctgcagttaagtgaaaagaaaatccagcctccccctccaaaaaaaa

SEQ ID NO: 385038 - DNA, 122 bp, Homo sapiens
gcagtttagcaatgagataggtatgcaacacaggaaaggcctaaggaggcacctcgctcacgaattaccacgggtgccacactcagcactgagcagtgttggccatggactacattacagca

SEQ ID NO: 385039 - DNA, 122 bp, Homo sapiens
gcctcatagggctggggtgaagataaatgatttttttaagtgaactaaattaggcccacacgtgaaaataagggtaagctgctttttaaaaggaattattagccaggcacgatggttcactc

SEQ ID NO: 385040 - DNA, 122 bp, Homo sapiens
gaaggagcccctgctgtcaaggggctctgggtgcccagcggcctgcattgtagctgggaccgttgacgatttgcgccctgggcaggtgggaggtgccttggagttgggtatctggttggggg

SEQ ID NO: 385041 - DNA, 122 bp, Homo sapiens
tgtgtgtgtgtatctcctactggttctctggagaaccctaatatactgagtgaaatgtaccgcctgctttagactgagtaaaggatgttcaccaatgtggatggacatcgtccaattcattg

SEQ ID NO: 385042 - DNA, 122 bp, Homo sapiens
gaatgaatgagatggtcgcgtttctgcagagctcacaactcagcacaatgcccaaacacacgtttcccacgagggcactgcaaattccgcccactacttttgactcgaatttttttttaatg

SEQ ID NO: 385043 - DNA, 122 bp, Homo sapiens
gacccggccgctaaagggcctcgccgtgggctcccagacagcgaggggacggcaggccggcgacagggcctccaaaggaccatgtgcgaggcaagaggcaaggctgaccgggggtttgtttt

SEQ ID NO: 385044 - DNA, 122 bp, Homo sapiens
gccgggtgtggtggctcatgactgtaatcccagcactttgggaggccaaggtggatggatcgcctgagctcaggagttcaccaacctgggcaagatggcgcgaccccatctctactaaaaat

SEQ ID NO: 385045 - DNA, 122 bp, Homo sapiens
acattggaatggggtgggccccgcatccaataaaaccactgtccttataaaaaagaggcacgccacgtgaagaccgagacacacaagaagaacacggggtgtggctgaaggcggaggttgtg

SEQ ID NO: 385046 - DNA, 122 bp, Homo sapiens
ggagcagttaataactgggtaagcggcatttccctaaatggctgttttcctcggcccacccgtctctcccccatcccattgctccccggtcctcagcaatgccccaactccctcccggaacc

SEQ ID NO: 385047 - DNA, 122 bp, Homo sapiens
tcgttgggccccactcccgggccccgggggacccagtgcccacctcatgccaggtgtccccgcagctcccgccttacttgaagtccccgtcgtggtatttgccaaatgcctggaggatgatg

SEQ ID NO: 385048 - DNA, 122 bp, Homo sapiens
accagaatggtaggtgggccagggatgagggggagtgaggatggttaatggatataaaaacgtagctacacggaaggaataaaatcgagtacttggtagcacaacaggatgactacagtcaa

SEQ ID NO: 385049 - DNA, 122 bp, Homo sapiens
tcttcccgacctcggtcgcctgagcgcgcagggattggggatccgtagggcactaggacccggcggggcggagggggcagcccatgtgctgcgattcgctccctcccaccccactgctcccg

SEQ ID NO: 385050 - DNA, 122 bp, Homo sapiens
aaagagatttgcttcagttttttcctcaccgtttgcctgcttgactaccttctgtcaccacgtcatctttccaggattaaccttgaccagtaaaaagctctgtaatagatttatgtggctct

SEQ ID NO: 385051 - DNA, 122 bp, Homo sapiens
agcgctggcaagggccaaatctgcgcttactgcattcaacacggcactgcctttgactctcgggaatggtgtccataatagaagggatgacagtttctctgcctgcacaggagggccatggg

SEQ ID NO: 385052 - DNA, 122 bp, Homo sapiens
aaaaaaaaaatcaatcatgagaaaacatgctgccagcgtggagtcttggcgcggcggtcccggcgaggctgcctgagagggtggcgggctcagcccagactccgtctcggggccacgagggc

SEQ ID NO: 385053 - DNA, 122 bp, Homo sapiens
gcgatgggcgggctaggggcggggcgcgggtgggctctaaaagtcggtgcccactcgctccgcgctgccgcggcaaccagcacaccccggcacctcctctgcggcagctgcgcctcgcaagc

SEQ ID NO: 385054 - DNA, 122 bp, Homo sapiens
ccttgccgcggcaagcgcagcagcagccgagcagcgagagcagcaggcagacgagcaggacgagcagcgcgcccgcgcccatcacgcccttgcgctggttggtttctgtagggggttatggg

SEQ ID NO: 385055 - DNA, 122 bp, Homo sapiens
aaaaatttggagcttgtttcacaaatactcttcctaatgaagaaaaatgcaaaagcactgcgagttccccaaatctcaattcgttttccagacagtgggctaaaaaggcagaatgtttgggg

SEQ ID NO: 385056 - DNA, 122 bp, Homo sapiens
ggtgatcctcctgcctcagcctcccaatgtgctgggattacaggtgtgagccactgcacccggccactcccaaatggttctgatgccttaagtggaactaccattgagtcaacacatattca

SEQ ID NO: 385057 - DNA, 122 bp, Homo sapiens
acacttcccatcactacaaactgagcacaactacagttgtctacacattcatatttttgacgtgccaacattttgcattctacatgaaacatttggtttaaacaaaatcttaagaattctct

SEQ ID NO: 385058 - DNA, 122 bp, Homo sapiens
taacagaaaagccacaaagaaacatggtaagagcgtggcagataacatccacggtgctatcgggaggtgacaggtgactgacctcagccttggtgttcaagaagattccagaaggtgggtga

SEQ ID NO: 385059 - DNA, 122 bp, Homo sapiens
gggggcggcaaggccaccaggaggtgataggatgctggggtgagctcgacactaacccctcggggggcaagaggtagacaaggccaggggggcgcaggagtggctcagcggagcgccccagc

SEQ ID NO: 385060 - DNA, 122 bp, Homo sapiens
ttgaatgaaatgacattgaaggtctcttccagctggaagattctgtgtgtgcctacacaccgccctcaccccttcaccgtgggggctgttctccttccccatggagcgctcagggctctagg

SEQ ID NO: 385061 - DNA, 122 bp, Homo sapiens
agtcgccgccgccgccgccgccggaggagcgagccgatccctcctcttccctcctcgaagcgaagtcctcaacacagacacgattacatagcctctgcccaagcgcgtctcagtccagaatc

SEQ ID NO: 385062 - DNA, 122 bp, Homo sapiens
ttccatgtacttatgagtttcttaaacttctttctcttactgatttctaatgtcattccacggtggccagaaaacatacctagtattatttctattgttttgtgcttgttagatttatttac

SEQ ID NO: 385063 - DNA, 122 bp, Homo sapiens
gtaaacgcggataaagagcagattacttgaccctacattttaagagaagacgacgccttccgggcgcacgccgagcagaactccaccgacaccttatccttgtccacatggagacagactcc

SEQ ID NO: 385064 - DNA, 122 bp, Homo sapiens
cagtagtactaggggcagggggctcacctagaaattggatgtgaaattcagggtggaggacggcttgcagctctgcttcccgtgcctgctgcagcacacacagggcccacaccaggtccacc

SEQ ID NO: 385065 - DNA, 122 bp, Homo sapiens
atccacgagggctagaattagctcattcatcccctacgtaccagggggcaccatgctgggcgctggatgtgcagaaatgaacaaacaggccggcctctgctctcgtggagcctgggatctag

SEQ ID NO: 385066 - DNA, 122 bp, Homo sapiens
tggtgccagcacttcttggacacctcaaccccctcagctaaacctgagatccaagcgctccggattccaaacgtttcctcgagcaggtcctctctagccggccgcttatctatggtttctgc

SEQ ID NO: 385067 - DNA, 122 bp, Homo sapiens
ctggtcagagcggaggggcttggcaaaagcccacacaaaaccctcctgtgtggacatgtccgggcctgcctgtgggagaggctctaggactttaagagggaagagcagctgggagatgaagt

SEQ ID NO: 385068 - DNA, 122 bp, Homo sapiens
gttggatggtttttaaagctgccacttactcaaggggctattttggccactcactcagcacgcatgtgtctgggaaataaggtggaagtatttctagctgacatgcttctctaaatagaaaa

SEQ ID NO: 385069 - DNA, 122 bp, Homo sapiens
atatgatcccatttgtccattttctttggttgcctgtactgtgacgacatcttgaagttgcgagtttggggattgcctgccttgtatattcttttctgttaccatcatctttaatagccaca

SEQ ID NO: 385070 - DNA, 122 bp, Homo sapiens
ccagccccccaccccccctgccccccctagcccccacccccagcccccagcacctgtgtccggccctcgaggtcctcctgggccctcatctttggggcacaggtttgagcagttcctgagga

SEQ ID NO: 385071 - DNA, 122 bp, Homo sapiens
gggccctaagccaaaaatgtgtcctgtgtgaatatgcctttcttttaagtcaacaagccccgtctactttgaacctctctttttctgggccaccatgagtgtggttttgaaataactctctc

SEQ ID NO: 385072 - DNA, 122 bp, Homo sapiens
agcactgtgaattccttggggctgaggttcaccgagtaggcttgttttgaatttgaataacgtggaaatgtcactcctgtaaattcaggtggcttgctgactggctggacttgcccctacgt

SEQ ID NO: 385073 - DNA, 122 bp, Homo sapiens
tatcttatccatatggacaggggcccctcatgtgtccatttataggctctctacaagggtcgcattccattcccagagctatgaacatctgcttttctgggataggaatcttggtgatgtga

SEQ ID NO: 385074 - DNA, 122 bp, Homo sapiens
ggtaatgcttgcttgcctgccgctcacttcctgctgtgcagcctggtttctaatgggccacgaactgctactggtccacagcccaggagttggggacccctgtcttgggagtgtctccctat

SEQ ID NO: 385075 - DNA, 122 bp, Homo sapiens
gggcaccactccagcatgctgcaatcctgccccctttagaggagacagtcttccttttgtcgccgttgcttcctggtgatcttcattgctttgtttgtgtttcctacctcacccctgaagga

SEQ ID NO: 385076 - DNA, 122 bp, Homo sapiens
tcagccccagctccctggtccccagcctggccctctactgcgggccactgggctgcctcccgtacccgagcctgggccaggctgtcactgtggtgctcctgccaacccagatgccctggggt

SEQ ID NO: 385077 - DNA, 122 bp, Homo sapiens
ggtccctcggagggggccttgagagaacatggggcgcagggaagggggctggagggggagcgcaattgcaaatctgcgcctggagcctccccaccatcagccaggccccttcaccccactta

SEQ ID NO: 385078 - DNA, 122 bp, Homo sapiens
gggccaatcatagtaccacacctgcctctgatgcagtgattggctcaggggatgggcacacgaccaaatctgggccaattctagtaccacacctgcccctcatgtagtaattggctcagagg

SEQ ID NO: 385079 - DNA, 122 bp, Homo sapiens
tctactgcccactgtcgacgaaaacagcctcgccctgcaccgccaccgccacgcataaggcggtgtgtgggcagctcggacgtggcacctgccctcagctgctcaatcccgggcgccgcgac

SEQ ID NO: 385080 - DNA, 122 bp, Homo sapiens
ggaggggctggtgtggccggtgggcgctgcctcttcatctgatggagccaggaggtccgccggtgggggaaaggcttcttccgaggcttctgcactcgcctgggaagaggcccagtcactac

SEQ ID NO: 385081 - DNA, 122 bp, Homo sapiens
accttgggcaactgagtccagcttacctggggtagacctgattgtgccagtgcagcagcgcgtagcggtcggccagcggcagcctgcgacgggcggaggcccccagccactcggccagggcc

SEQ ID NO: 385082 - DNA, 122 bp, Homo sapiens
aacctgcaagaaaatgtatgtccctcaggaggctttcattttcaagcggaaaaacaaacccggtgtcacctcaacaacgggaccacacaaacctcgccattacaaaacccaagtgccaaagg

SEQ ID NO: 385083 - DNA, 122 bp, Homo sapiens
ccatttgccttcatcactgaggaggccgtctgcaccccagccttcagcatgcagggggagcgaagggggtgcccagcctcgccccgcccagcgcacccctgcagcagcccgggagggcaggc

SEQ ID NO: 385084 - DNA, 122 bp, Homo sapiens
agctcaggcacagagcaggggctggggccccacacaacacacagggcggcttgtctccagcggtatagcctctccacacccccaaaccgtttgctcgaaacttgatctccttggccctcaga

SEQ ID NO: 385085 - DNA, 122 bp, Homo sapiens
caggataagagaaaaggtcatcatacctgccagtcttcctgaaatacaaaaatgacatcacggctgctacgttggattattgaaagcaaaagttcctaatcctggaggagctgtcatggaaa

SEQ ID NO: 385086 - DNA, 122 bp, Homo sapiens
taaaagaaagcatttatgagcaagttcaaacttaacctaaacctgtgtctcgtctcatctcgtctcatctcttttcttttctttctttttttttttgagacagagtcttgctctgttgccca

SEQ ID NO: 385087 - DNA, 122 bp, Homo sapiens
ccaggtaatttttgtagttttattagagacagggtttctccatgttggccaggctggtctcggactcctgacttcaggtgatgcgtccacctcggcctcccaaactgctgggattataggcg

SEQ ID NO: 385088 - DNA, 122 bp, Homo sapiens
tgcgcatcgctggctctgggttccgccgaatgcgtcctcctggcggtgatggctctggaccgcgcggccgcagtgtgccgcccgctgcgctatgcggggctcgtctccccgcgcctatgtcg

SEQ ID NO: 385089 - DNA, 122 bp, Homo sapiens
ggctcagacaatccaccctccttggccttccaatgtgttgagattacaggcttgaggcaccgcacctggcctgagtagtctatgaatttttaaaatcccaaccacaggagaatctttatgta

SEQ ID NO: 385090 - DNA, 122 bp, Homo sapiens
ggccagctccttacccggcgcccttgacttcattcggtggatgtccccgtaagtgcgtgccgccaacactggccatggatgtcgtcatcttttctgcttgtgaaaatgtcttcgtagcaccc

SEQ ID NO: 385091 - DNA, 122 bp, Homo sapiens
agcatctgaccaaacgtgacctttgggaaagtcctcttgctgttcggggggcgacctctgcgggtttggctccagctgcagaaagagcgccaaagaaatctcaactccagcccggctaggct

SEQ ID NO: 385092 - DNA, 122 bp, Homo sapiens
aggacccaagaattccagattttacggactccctctctcctgtctttgcctctaggtagacgttaacgagccctcgcaaggggccctcccgtcagcccaggggttctcgccccattgcacgg

SEQ ID NO: 385093 - DNA, 122 bp, Homo sapiens
gctcctcccttcctatggcctttagcctgctgcaaccacatccctccttgatgtgtcactcgaccgccagtgtggcaaaactctctaacctctgcccatgtcgtggtgaagaaaaagggctc

SEQ ID NO: 385094 - DNA, 122 bp, Homo sapiens
tttttgttatgctgtgaaggcttttgttataaacaaaagtatatgtggggatctaatgtacggcatagtctgtagttagcaatactgtattgtgtacttgaaatttgctaagagagatctta

SEQ ID NO: 385095 - DNA, 122 bp, Homo sapiens
accttccagaaggctggctgcacaagcggccgccctaaatgcggtcaaagcgggcaaattcgccgtgggtgccttccttccctacctccggcccactctggttgctccttcccaggtgctcc

SEQ ID NO: 385096 - DNA, 122 bp, Homo sapiens
gaaatcagcagcccacataataagaaatctttgtctctggcctcattagaaccaggttcccggcaagtaaccagttccagacactggccttggaagggagcccgtgctgctggccacttcat

SEQ ID NO: 385097 - DNA, 122 bp, Homo sapiens
gcgcattcctctctgtgaaggagagcaggaggaagagagcctgactggcccggcacagttcgctttgccatgataggaacaaagaaaatctgaatgaaagaggatacagtgcaaggagagga

SEQ ID NO: 385098 - DNA, 122 bp, Homo sapiens
aaggagggggatgttcccagaactagagagagctgcagtgcagagacagtagctgccacccggggcagtagcccttgtcctccgtgaagaagactgacccctgtggaaagcctgcggtgagc

SEQ ID NO: 385099 - DNA, 122 bp, Homo sapiens
atggccttatcagctgatggcttacgtagggctagatctccacttggataaggcaggtctcggtgggcgcgccagcattcgctctccggagctgcagcctccgaaggggtggcgggggcaac

SEQ ID NO: 385100 - DNA, 122 bp, Homo sapiens
ttgcaccgcccagccctgcgggcactgataaggccctgcaggagggagtcagcaagggcgcgccccctggaggccaggcccctcgaccctgcccgccctaggccccgccccttcatctggcc

SEQ ID NO: 385101 - DNA, 122 bp, Homo sapiens
cagctaattttttgtatttttagtagagacggggtttcaccgtgttagccaggatggtctcgatctcctgaccttgaatcacaagagtcttaacagggaatgtttcaggaaacaaataggat

SEQ ID NO: 385102 - DNA, 122 bp, Homo sapiens
ggccaaggccagaaagttctagtaagcagtttccccttgttggagggaacggggggcgggcggtggtggtggtggaggaactgtgagtatagtattctcttgtgtgcacttttcagttgttt

SEQ ID NO: 385103 - DNA, 122 bp, Homo sapiens
ccaccactcacctcctgctgtgtggccggttcctaataggtcacgggccaggaccaataccggtctgtgacctgggggttggggacccctgactcggtgattcagcagttgatttgggatcc

SEQ ID NO: 385104 - DNA, 122 bp, Homo sapiens
aaattccccgagccctttgatcctgccccagctgggccccgccgcgctgagccttgggcgcgccccctgctgcccgcggccggagccgttcgccacacccccgtgtttatgtcggtccacgg

SEQ ID NO: 385105 - DNA, 122 bp, Homo sapiens
caccgcatgtgtgctttccacaggggcgtctctgcgtccacgcctgcacatcccggcgcacgtgtgggcaccacagaggacacgtgaggggaatggtcaccagtgagccatatttattattt

SEQ ID NO: 385106 - DNA, 122 bp, Homo sapiens
cccccgctggcctcgtggcaagaacgggggcgtcccgagccgggctcctccccgcggggccgggccatataaggaaaagctaggcccgctccgcccgccctgcgccccagcgtctggccgat

SEQ ID NO: 385107 - DNA, 122 bp, Homo sapiens
ttggagggacggtatgatgaggtttgtctgtatcatatccgcgcaccttcccagtttagccgcccgtcccgcccccaaggtcgcacactgagatcactgggaggaacaggcgcccatttcat

SEQ ID NO: 385108 - DNA, 122 bp, Homo sapiens
cgtgatccgccggcctcggcctcccaaagtgctgggattacaggcatgagccaccacgcccggccgacacggaattatatcttgaaaagttgtgtggagaaaagcaaagtgggattagagag

SEQ ID NO: 385109 - DNA, 122 bp, Homo sapiens
tggcggagctctacggccgcgcagaagacccaatattcctcgaggcgaacgtatttgtgtcgcttttctgaagatttcgattgtcaagttgcagctgactctcttcattgtaccaaaattca

SEQ ID NO: 385110 - DNA, 122 bp, Homo sapiens
tcagtggactcaagaatgatactcagtgtaaggattctcaaaacgagcatcagcaggttccgcccacgccggcctcctgggttcagttctctaataaccacctcccttccccgcctactcca

SEQ ID NO: 385111 - DNA, 122 bp, Homo sapiens
ctctttagtaagaggaggaattttaaatcaaataaaaacagtgatttttacactgaatatcgagggagtttattgtcattggtagaatacaaaaagcattgaagaggacctagagtaagtta

SEQ ID NO: 385112 - DNA, 122 bp, Homo sapiens
ctcaccctctccaggcggggtggcctctgcttccttcgccgccggtggcgcttaaggaggcgggaggcactgctctgctccgtggagctgctgaacctaccaggaggttgggaaggagagca

SEQ ID NO: 385113 - DNA, 122 bp, Homo sapiens
cccaggctgagcaggacggggccgaagagtccgagagcagcagcagcagcagcagtggctcggagacagaaggggaggaggaaggcgacaagaacggggacgggggctgcggcgccgggggc

SEQ ID NO: 385114 - DNA, 122 bp, Homo sapiens
atcagagcgtgcagacggaggatggcactggcgggatggccagggctgtggccaaggcggcgctgagcccggtgcaggaacacgagacaggccggcgcagcagctctggcgaggcgggcaca

SEQ ID NO: 385115 - DNA, 122 bp, Homo sapiens
cggggtgagggtgggattaggcggccaattttacaaaactccagggagcgtcgccagcctcgatttcctggggttattcctgggagagaggcgttctcacggacagccaccctggggaggag

SEQ ID NO: 385116 - DNA, 122 bp, Homo sapiens
ctctgtcgcccaggctggagtgcagtggcgcgatctcggcttactgcaagctccgccccccgggttcacgacatcttagcattactgagaattctaatccatggacatgatttgtccctcca

SEQ ID NO: 385117 - DNA, 122 bp, Homo sapiens
gcccgccgattggctgggtgtgggcgcacgtgaccgacatgtggctgtattggtgcagcccgccagggtgtcactggagacagaatggaggtgctgccggactcggaaatggggtaggtgct

SEQ ID NO: 385118 - DNA, 122 bp, Homo sapiens
ttttctgttcacatttatctttttcaagccacatcttcctctaacaaatctctcagtatgcgattggtctcaagctaaaacaaaaataaatgtcagtttatattttacacatccacaaagca

SEQ ID NO: 385119 - DNA, 122 bp, Homo sapiens
ccagacaatggagtcatgataggtggaacctgatcagtgaggccttgtcagtaaggacctcgtcagtgaggccttgccagtgaggccttgtcagtaaggtcctcgtcagtggagtcctggtc

SEQ ID NO: 385120 - DNA, 122 bp, Homo sapiens
aagtgaatgaatgagcacgagagctggaagccctctgaggcctctctggtgtcccttgtccgcccgccgcctcggccccggccaggttggaaggaccgggtgcccctaccgcccggagtggc

SEQ ID NO: 385121 - DNA, 122 bp, Homo sapiens
tgattcctttcacaatttcccacgatttgtgatttcatttaccacactgtattcgccacacggggtcccgagggcagagactccgctttactgatctctggtaccccatgcctggcccacgg

SEQ ID NO: 385122 - DNA, 122 bp, Homo sapiens
gggcgccaaggcttggcggccccgtggttgggcgtcccggcagccgcttgagggatggggcggggtcggccgggacctcctccttcattccctcggcgggccgagcctcccctctctcccgc

SEQ ID NO: 385123 - DNA, 122 bp, Homo sapiens
tctctatttttaagtaaataattaaacatttttttaaaaaacgacaatctccagtcctgtcgtagactaactgtaaaaggagaagaagcactaatccatgagaaaactttcagaacttgaag

SEQ ID NO: 385124 - DNA, 122 bp, Homo sapiens
cctccttacttaccccccttctccttcggctggagctcggcgagcgagaggcggcgctggcgttggagagccaagtatgtgtttcttatagcaatcctgctcccacataaaagctgcatttc

SEQ ID NO: 385125 - DNA, 122 bp, Homo sapiens
aaagcaagcagccggggtccagtcctgtacctggggagggggcaggaggggctgcggggccggaggcacaccaggcatataggatactccacgactggggcctggccggttctgcctagcca

SEQ ID NO: 385126 - DNA, 122 bp, Homo sapiens
ggagagaagtttgagccccaggcttaagcctttccaaaaaataataataacaatcatcggcggcggcaggatcggccagaggaggagggaagcgctttttttgatcctgattccagtttgcc

SEQ ID NO: 385127 - DNA, 122 bp, Homo sapiens
gggcactcccgagcggtaggagaccaaaggcccccccccccgggaagatgggccgagtgacgctgcttgtctctgtgtcagtgcaatgggatgtccaaccgcttctggggctggggccgcga

SEQ ID NO: 385128 - DNA, 122 bp, Homo sapiens
atatatctaccctaggtcacattttctaatgtcaggttttgagatataggtatgaagtcacgctgttctgtgagttttgacaaatgtatacggttgtgtaacccccaccataagatatagaa

SEQ ID NO: 385129 - DNA, 122 bp, Homo sapiens
ccggaaatgagtggctagcgaggcacccaggagcgccctgtccggcggcgctctagccctcgcgcactgtctctatgctccccagcgtctagtctatttattgtcgcggggaagctgcggcc

SEQ ID NO: 385130 - DNA, 122 bp, Homo sapiens
tttttggcatggacaaggttgcttatgttctgaaccctctcacctactctactgtcctgccgtaaggaatgacttcaagatataaaaattgctcactatcatttctgggactttgcatttgc

SEQ ID NO: 385131 - DNA, 122 bp, Homo sapiens
aaagtcttgccctgtaattataatcttaattacctacgcttaattaggtgaatcttataccgtgcataatgttgctctgcagcgtgaaaatgtagacaatacattatgcgtttacacaaact

SEQ ID NO: 385132 - DNA, 122 bp, Homo sapiens
acaggctgcattcttatttaatgctaggaacacttaaatccaactggctggttctcaatccgtgtcaaaggctcagttacaataaacagtatttatataatattcttaaaggtacacctatt

SEQ ID NO: 385133 - DNA, 122 bp, Homo sapiens
cgccgggaagcgcgtgtgccttttacgtccgcccccgcgcagccgcggccgctgccgccgcgtctccgcctgcctccctgcgccgcgcgctctccagtgccggctctagagggcgctcctgg

SEQ ID NO: 385134 - DNA, 122 bp, Homo sapiens
tgctctttctaaaacaccaggctgcctcctgattggcagccatttcgagggtaaatagaacgcgtcttctactttcatgtcagtctttctcatgcagtgctttatgctgttggatgttggaa

SEQ ID NO: 385135 - DNA, 122 bp, Homo sapiens
agctcctccttccctgttggggcatttgccggggtgtagttttcaccgtttcctgtccgtcgacaggcttcatgccacccctagcccccaccccaagccccagccattctgcctcactatag

SEQ ID NO: 385136 - DNA, 122 bp, Homo sapiens
ggcgttgtcattcctccatgacagatgaaagaacagagacgctgtgaagctcttccccagcgaatcagcgcggcacccgctccctcgagcagctcggcctctttccaaggcattcccccccc

SEQ ID NO: 385137 - DNA, 122 bp, Homo sapiens
aatgggtttgggaagcggagactccttcctctctctatgaccatgccgtgatcgtgtctgcggtcaccactcgacgcatcctcatttctacccgaacccaggagccgaacgctagatcgggg

SEQ ID NO: 385138 - DNA, 122 bp, Homo sapiens
caggctgcgttattgagtgagccagtctccagatgccaggcgcatgacgagtccacggagcgggacctccctccccacgcatcccgggctcccggggcggggccgccgggcaggggggcggg

SEQ ID NO: 385139 - DNA, 122 bp, Homo sapiens
aacgtgtttctaggtgctttgctacctgcggtgctggtacaccgcctccgtatctggacacgagtgacgactcctgctcttttctccttcctcggccccgttagaaataagcccagttccaa

SEQ ID NO: 385140 - DNA, 122 bp, Homo sapiens
gggttccataaaagagccaggtcaccccagcagccactagagggctcacgaagctgcagccgcgggctgccctctagcggcggtgctgaccggagtgtggtggtaaaccttttccggccttc

SEQ ID NO: 385141 - DNA, 122 bp, Homo sapiens
ccagggtgggggctctggatgggcccgatctactcagggaaaggctcaacagtcccctcccgccacctggggcagagctagggcccctgccctcagcacctgcattctcccctgtgccctct

SEQ ID NO: 385142 - DNA, 122 bp, Homo sapiens
acaagggccccacggggacggtgctcggcgtcccagagtgactgctcccctcccgcaggccgcccattgtgtccttgcccaggaccccgagaaccaggcgctggcgaggttttactgctaca

SEQ ID NO: 385143 - DNA, 122 bp, Homo sapiens
aaggaagaggagcaggagcggctgcggaaggcggccgaggctaagcggctggcagagcagcgggagcaggagcggcgggagcaggagcggcgcgagcaggagcggcgcgagcaggagcggcg

SEQ ID NO: 385144 - DNA, 122 bp, Homo sapiens
agattttgagcgtttttccttcagcattcggaggagtgtaatccaaatgctctgtggagtcgtacacactggctccagaaggaggatacaagcaattctgggaatggtagtccagacgctca

SEQ ID NO: 385145 - DNA, 122 bp, Homo sapiens
ttgatcggaagcctccccgaagcccggctgcggagggtggtgggacaactggatccacagcgtctctggagcacttatctgcgccccctgctggttgtgcgaaccccgggcagcccgggaaa

SEQ ID NO: 385146 - DNA, 122 bp, Homo sapiens
ggttggtagaacccaaagtaaacacggaaaaattcattcaagaatttccttaaggcctaccgtgaagacgtcggaggcaagttaagacgttggggagcaggtaagagagaccagagttcaga

SEQ ID NO: 385147 - DNA, 122 bp, Homo sapiens
ccttggaggcccaggtccctcagaaaacgggctactcacccagcaaggcctggaagaggtcgctatgcagcactgtgaggagtgggggtgcccaccgcagcagtgggggtgccaggagccag

SEQ ID NO: 385148 - DNA, 122 bp, Homo sapiens
taaaataaccccctgctgccggcccagcgcgcggctcactagcgttcctgcggctcctggcgcactggccgggcccccagccgcctccagcctggagccgccatccctgcacccgcaggcgg

SEQ ID NO: 385149 - DNA, 122 bp, Homo sapiens
gaggatctctgctgcgcagcccgtgctcagctgtgtgtgccctcctgcacaaacagggcacggagaacgtgtctgctgggaccccttgggcacagcaagcagataagtgggtcggggccggg

SEQ ID NO: 385150 - DNA, 122 bp, Homo sapiens
ccagtagaggtttaggcaaacgggggagagcagggcagtctcagctgagggaagaccctgcgttgcgtctccgtggtccctgctgagagaagagcagtgtgcacaatgctgggggaagtggt

SEQ ID NO: 385151 - DNA, 122 bp, Homo sapiens
agttgtgtcctccgggccgtggggttggcctccagcgcggccatgatctgaggggagcagcggagtcagccgggccatggccggtagccctgcctcagttcgtgggagagaacacacccctg

SEQ ID NO: 385152 - DNA, 122 bp, Homo sapiens
aatggagcccgcgagttcctgcttcctggttccccggagcaagtgtcctttggtgggagccgcaggaagggagcagcccttcctgcgcgccgggagcccgccccttccccggcctcccaggg

SEQ ID NO: 385153 - DNA, 122 bp, Homo sapiens
accgtttacagggcattttcacattcatggcccctttgtcctcattgttttaactaggtacgatgtggttttttttcagcgaagcaaatagtcgtaggctgagttgccgaaagaacacagct

SEQ ID NO: 385154 - DNA, 122 bp, Homo sapiens
aattcccagaatgccgcggtgctacggcagccgaaggggccattccgtgtgcagcgctcccgcccaccctccggtctcggcggctctccagagcgtctgtaaacacccagagactgtcatgg

SEQ ID NO: 385155 - DNA, 122 bp, Homo sapiens
gtttggaaacactctgtttgtaaagtctgcaagtggatatatggaccgcattgaggccttcgttggaaacgggatttcttcatttcatgctagacagaagaattctcagtaacttctttgtg

SEQ ID NO: 385156 - DNA, 122 bp, Homo sapiens
tctgcggcagagaacagcagatgatagcggctcgccttcaactttgctctgaggacctctcgttagtatcccgcgattgtccttcctaacgcctgactgaatcctgaggctagccttcagcg

SEQ ID NO: 385157 - DNA, 122 bp, Homo sapiens
ccgggcccctactcttcccgtccgggcccgccccggctcgccccgccccggtctcggccacgccctcaggacacgccccctcggggctcgccccgcccctgcccttaaaggtacagctcccg

SEQ ID NO: 385158 - DNA, 122 bp, Homo sapiens
ttatggctgctgctgcctcggagcccggactaagcaaggctgttaggcacggggtgagcacggttgcgcctactgctgagagtgcctctccctgccggtctcctgctctctctctgcagagc

SEQ ID NO: 385159 - DNA, 122 bp, Homo sapiens
cacacttcccccacagaagcggtaccgcgcggtgtatgactacagcgccgccgacgaggacgaggtctccttccaggacggggacaccatcgtcaacgtgcagcagatcgacgacggctgga

SEQ ID NO: 385160 - DNA, 122 bp, Homo sapiens
ccaaggagtttgaacacagagagagcccatcatccctccgcctttcattgccatcttcagcgattccaacggctggagggagagtctgggaagcacacaggccccaaacctgacagggccga

SEQ ID NO: 385161 - DNA, 122 bp, Homo sapiens
ccgcagcggagcgggggacttgcgagctgatggcggtggccacagcccaacggaggtggccgggacctcagcctccagtcccgcaggctccagggagagtggagccgacagcgacgggcagc

SEQ ID NO: 385162 - DNA, 122 bp, Homo sapiens
gtgaatctgaccaggacactgtgacggcctcgcggcacagaatgcggcagaagtacagtgcgggacttctggagatagatgataacagacggcatagcttgctctgctcttgctcttccggg

SEQ ID NO: 385163 - DNA, 122 bp, Homo sapiens
ttgaaagggcagggtggttgccagccattcccacacctacacattttctcactctggtcccgtggtgtttaatagcttgcccagaaaaccttccctttgtcacattgatcttaattgagttg

SEQ ID NO: 385164 - DNA, 122 bp, Homo sapiens
ggtaccctcttccgcccctctccgaggggctgctgcaccagccaatcgggaaccccgatgcgcgtctgttggctgccactcagctgtcaaccgtcagtcaacagtctgctggccacgggccc

SEQ ID NO: 385165 - DNA, 122 bp, Homo sapiens
ccccgcattcaggaaaagtgccagctggagatcaacttcaacacactgcagaccaagttgcggctcagccaccggcctgccttcatgccctccgagggcaagctggtctcggtgagctctac

SEQ ID NO: 385166 - DNA, 122 bp, Homo sapiens
ctctgtggcctctaatgctgtagctttcttctctcggcacagctctctggagacccaccccgagcgtggtgggtggtgctggtttgctgcttctgttgctgagtggtgccgtggtttgtgtg

SEQ ID NO: 385167 - DNA, 122 bp, Homo sapiens
cactctacttcccttcctcatcccagaatgtgtcactgtcttacctttctgggtctcctccggccaggatgtccccaggaccctgctcctgtccccacgtccacttcccaccccactcgagc

SEQ ID NO: 385168 - DNA, 122 bp, Homo sapiens
caatgtttgttgaatgaattgatctgagatctggtgtctgagagttgaaagtcttgcccacgagatgtgagaaggcagagcacgatgagaggattgcgggctgccccctgtgccttgcctgt

SEQ ID NO: 385169 - DNA, 122 bp, Homo sapiens
gacgccagagagagagagagacagtcagagcctctcctcaggtgaaaggcagggggataacgagggagaaacctccggaacgccaccggctctcaaacgagtagctggagaagggcggtcgc

SEQ ID NO: 385170 - DNA, 122 bp, Homo sapiens
gggctgacagtgcgcctcgcagtgggctggaacgcctgtgccctcctggagacgatccgtcgcgccctgtacataaccagcaagctctcagatgccaactgctgcctggacgccatctgcta

SEQ ID NO: 385171 - DNA, 122 bp, Homo sapiens
accttttaatcccttaaagaccttctacctttcctttcacatgggacttttattaatgtccgctgaatgaatataacatattcataatatagtcatgtctatacattgattaacatatttgt

SEQ ID NO: 385172 - DNA, 122 bp, Homo sapiens
cggcactacgggaagaagccggccggctagggcacggagctctgggcttgcggggtgcggcgcacgcccctccctcccaccgcctaaggtttttccgaagctgctgggcgtgcgccgcgttt

SEQ ID NO: 385173 - DNA, 122 bp, Homo sapiens
catcgtagacttcatagtggtgaaaaaccttacaagtgtaatcagtgtggcaataccttccgtcaccgggcatcccttgtataccatcgtagacttcacactctagagaaatcttacaaatg

SEQ ID NO: 385174 - DNA, 122 bp, Homo sapiens
tagccccagggacccaggcggccgcctgagaggaggcgggggctgttacctgcaacatcccggttgtccatcttgagactcatccaatcccacaatgctccggcgccccttaaggggccctg

SEQ ID NO: 385175 - DNA, 122 bp, Homo sapiens
cgcggggcggcggcgccgaggggcgcagggaaaagtttcacgtggtcaactccggggcggcgcgctaggggcaccgctggccaggtgtctcgggcgaccccgggcccgcgtcgccgcctcct

SEQ ID NO: 385176 - DNA, 122 bp, Homo sapiens
gttgctgctgtgctaccgcgttgcgttttctaggcatttacttacacgctttgtggtttacgctctcataaccttgtggttttatagtccttaaattattgtagcgcacgttacttaaatcc

SEQ ID NO: 385177 - DNA, 122 bp, Homo sapiens
caaggctggctgcacccacggctcctcattacctgagtggcggtaagttcaggagaggggcggccacgggcggcggcagcacaggggagaaaagaacaggcatgggccgggccggccaggca

SEQ ID NO: 385178 - DNA, 122 bp, Homo sapiens
ctttctcacctgcgttccctcctttcatcccggagcccggaacctccgcttccggctccacgtccgcccggaagaagatctgctgcacacttccgtttccggtccgtgcccttggggctccg

SEQ ID NO: 385179 - DNA, 122 bp, Homo sapiens
ctcctggggtttgatgccggggctctctgaagtccgtgggcagggctcatgggccccttgcggacacccacttgggaacctcacggttcagatccagggacctgctccccgggagtccagcg

SEQ ID NO: 385180 - DNA, 122 bp, Homo sapiens
ggtagtcagccagcttgtatttgggcatggcaggggacgggggtggggaggccacgctgccgcccccggacagggccctgagcctggacacaacacagagagaagaagacagaggtcagggc

SEQ ID NO: 385181 - DNA, 122 bp, Homo sapiens
cttcttcacacacacaatatggacacgggtttgaggctccagccccggatgacaacactccggaaatatgcgagcggcggcggaagcggaagtgcctcagcggtaggggccggggaagtgtc

SEQ ID NO: 385182 - DNA, 122 bp, Homo sapiens
aactcccactgacgtgtcccacactttagattgaaccaacctgtcatctaaaccaaaccacgctgggcctggaccacagagtttccagagctccttcggttcaccctcagtccttactcttc

SEQ ID NO: 385183 - DNA, 122 bp, Homo sapiens
tcgggagcagccgccgtggcccgggctcgcgaggcaggctcccgcccgcaccctcccgtgcgaggtccccgccctgcgctcccagctcttcgaacctctacccgagcttctctcacgttgct

SEQ ID NO: 385184 - DNA, 122 bp, Homo sapiens
aactgagggccaggaggcctaggcagcttagaaactgggactgggacattaataagcttgcgtgagatcaaactaaccagcttcttctgtggaggaagcaagagagaagatgagaggaagag

SEQ ID NO: 385185 - DNA, 122 bp, Homo sapiens
aactttgggtcctattacatgacctgcttgggggtcccgtggaggaggttcatgggctctcgagttcctcccagccctgcatccctcacccctgattctgtagtgcattctgggaggaggtg

SEQ ID NO: 385186 - DNA, 122 bp, Homo sapiens
gcccacgtccagtgcggggcgcagagacgcagcagcgagtgcgcaggcgctggagtgcgacgtatcactccccgactgcgcgcactctgcgggccaccgggatcgtcgtgctgtttggagcg

SEQ ID NO: 385187 - DNA, 122 bp, Homo sapiens
tgggctctggcctgttaatatttccatgttggtgaaaccagaggcagcactctaggtgcacgaactttaggcagcgcagcctcctagtcttatggaacatctgaggcagaagaaacctgagt

SEQ ID NO: 385188 - DNA, 122 bp, Homo sapiens
agaatctcccaacccgcaggtgtgcagtgtgaccagcgcgactcaccgctctaatcgctccgattttccaaggccttgctcagtagtcctgccaggcgggctctgaggctggaagggattgg

SEQ ID NO: 385189 - DNA, 122 bp, Homo sapiens
taaaccaagtccgccatcaggtccagactccccagtcccgggagcgcgagagaagccgtgcggggcagcctccaagaacccggagtactggagcgcctggctgggtttctccaagcaacacc

SEQ ID NO: 385190 - DNA, 122 bp, Homo sapiens
ggacagcgccgcggagctcaccccaggttcaaggcatcgcgcaccctgcggcagcggctgcgctgcctcagcccacagctcagacctgcgggtggccgcgactcaggccgggacccggtcgc

SEQ ID NO: 385191 - DNA, 122 bp, Homo sapiens
ggaagtggcctgccttcattgatggtgggacgactttgaaaagcgcgcttccgctttttccgcagcccaaacaggctcgaccaatctgaggccgagcgcacgatctagtcagctgcgtgggt

SEQ ID NO: 385192 - DNA, 122 bp, Homo sapiens
cctcagctctgtctccttgagcttggggctgggttgggttttataagcatagggtaatgacgcatgatcggattagattttgcgatgaggtgatgctgggatgctcatctgactggaccctg

SEQ ID NO: 385193 - DNA, 122 bp, Homo sapiens
acgggcgcgtccgcggcaacgcctggaagggacccgaggcccttcttgtagagtccccaccgagggaaataagggacgcctgtcagggtactcgggagaccccaagacctcctaaaaaacgt

SEQ ID NO: 385194 - DNA, 122 bp, Homo sapiens
ggggcgtgcgccgcgggactcgagtcgggcgtatctctccgcgtggccgacgcgggcgtgcgtagtacccttcgccgcccgtcgcccttgcggccactgctacgcttctcttctctgccttt

SEQ ID NO: 385195 - DNA, 122 bp, Homo sapiens
gatcgtttttttaaatttgtgtttttaacttgacctttaagattgccattcttttaaaagcgcacctgtgacacagatctttctaattggtggcaggtttaagcttgccctgtcttcagagg

SEQ ID NO: 385196 - DNA, 122 bp, Homo sapiens
gttgaaaggcaggaaggcgtgtgggcgggtagggggcctgcactcccgccccagaggagccgcttgtcgtttgtgttggggagggagctgggaggtctgctctcccgctccatcctgggaac

SEQ ID NO: 385197 - DNA, 122 bp, Homo sapiens
atgggcttactttacacccacccacagtcaccaacacattacctgctctccaaggttaggcgtggcaggagaagtttgcttggaccagcagaaaccatgcagtcaaggacaactggagtcag

SEQ ID NO: 385198 - DNA, 122 bp, Homo sapiens
catcggcttggccatcgcgcgcgaactgtgccgacagttctctggggatgtggtgctcaccgcgcgggacgtggcgcggggccaggcggccgtgcagcagctgcaggcggagggcctgagcc

SEQ ID NO: 385199 - DNA, 122 bp, Homo sapiens
atgcctcatacctggagtcgccattatccctggaattacaaagatctgcaaaatttatagcgctcacagaaaccctggaggctgtaataaacctggagccccctggactctcctcagctcac

SEQ ID NO: 385200 - DNA, 122 bp, Homo sapiens
tctccaggttccatgtgctctcgccgtgccggatcagcaccagtttgtaggcggccatggcggtgggctgcaatactttttataccatttgaagtaaaaggtacaaaaggttatacgctgaa

SEQ ID NO: 385201 - DNA, 122 bp, Homo sapiens
gctgctcccaatggtaggccgggcaacccactcacggctcctacagcacctcctctctgccggcctcaggcggctctggaagaatgatgccctaatataccgcgctgccctccaggtggggg

SEQ ID NO: 385202 - DNA, 122 bp, Homo sapiens
atcttgggaacttaacctggcccctcacctcttctgcaccccccgcccccgaaactgtctcgtaatgaatttctgctgtcctcctgggagtggacggccgggtcccgtcccccgggagcatc

SEQ ID NO: 385203 - DNA, 122 bp, Homo sapiens
gacgaagcttccctcactccctcactcgacaccactcacctcctgctgtgtggctccttacggctccatggctcagggtttggggatccctgctcaagtgcatccaaaacgacccttcccac

SEQ ID NO: 385204 - DNA, 122 bp, Homo sapiens
caacctgcaggcggctgagacaggagaaaaaagagcagcatgcagtggtgtgggtcgctgcgaggacaatactgtcggaaagcggggaaaacatgaccttggaatccaaagggagtttcctg

SEQ ID NO: 385205 - DNA, 122 bp, Homo sapiens
aacatcctccgtcgggagaggaattccccacggattatcagagctgctccctccaccccccgccacgtcccacgcgggccacatcaactccctctgcagcctctggccagcggctgagccct

SEQ ID NO: 385206 - DNA, 122 bp, Homo sapiens
gggtgggaggaggacacggcagctgcggtgacggcgggcgggtactggaggatcgtcttccgcggcagcagcggctttagcgcggaggtcggcaacggcctcgggcgccccgccgcttcgga

SEQ ID NO: 385207 - DNA, 122 bp, Homo sapiens
tcagtttaatgatgtcgtccagagacatgtccattttgtcggccatggcgggcgcggaatcgggcatcggctcgagcccgcgcgtcagcacgccggcacgtcacttccggcgccgcgtgagg

SEQ ID NO: 385208 - DNA, 122 bp, Homo sapiens
ctccagcctgcagcgtcaggttttgtctctgggaacatcagactttttacctaaaatttgcgatgagaaaagcgagtgtaatagaacagaccatctcatatatccctacacccctgcttcga

SEQ ID NO: 385209 - DNA, 122 bp, Homo sapiens
aggacggggggaggcagggacccagccctcacgtgcccctccttcccttgtctgcagccacggggcccccaaaacagtctgagagtcagagttatggggtatctgaagcttgatccccagcc

SEQ ID NO: 385210 - DNA, 122 bp, Homo sapiens
ctgacgaagctgttcccgctcccaatctggccagacacggctctgcgtaattgcgctctgcggtccacctgctcccccgcggcagtcccccagctccgcagcaggtggggccgccgcacaac

SEQ ID NO: 385211 - DNA, 122 bp, Homo sapiens
ccgtagatgtccaagcaccgcacgcccgggttacccgtagatgtccaagcaccgcacgcccgggttacctgtagatgtccatgcaccgtacgtccgggttatccgtagatgtccatgcacca

SEQ ID NO: 385212 - DNA, 122 bp, Homo sapiens
agagaacacaggatggcctctgcgggtggatggatgagaagaatatcccttccctcctgccgatgctgcgccacaccacagcctcacggcttgttctgttagaccgatgcctccgcccggct

SEQ ID NO: 385213 - DNA, 122 bp, Homo sapiens
ccaagtggaaactgagttaccccgtgaagaagacgagttctatttatggtcagaatgccacgctcaagggccagtgaaggcctgtgggcttttctgaatatttctctaaggtcttctaggga

SEQ ID NO: 385214 - DNA, 122 bp, Homo sapiens
acggccgggaaagagtccaggctttctgagcagccgcccctgggaggggtcagtgacccccggtgacgaacgcctgactccccccttcccccacgcgcccagcgcggcctggtccaccctgt

SEQ ID NO: 385215 - DNA, 122 bp, Homo sapiens
gagccgccgcagagagacaggtaccggctggacgatggccgccgcgtccgggacctggaccgagtgctcatgggctaccagacctacccgcaggccctcaccctcgtcttcgatgacgtgca

SEQ ID NO: 385216 - DNA, 122 bp, Homo sapiens
cggggctgggctaggcggccgctctccccgcccccccgcggcaccccgggtggtgagcgccgcgcgagcccggagcccagacggaccccagccccacaagcccaggaacaggagcggcggcc

SEQ ID NO: 385217 - DNA, 122 bp, Homo sapiens
caccccacagcccagtgggcaccagggcagactcccctcgcagcacagacagctgaggcccgggtgctggttcctctaggtacagctttggtccttgtgggctcagaggtctgcctttcgga

SEQ ID NO: 385218 - DNA, 122 bp, Homo sapiens
tcatgaatccatttcaattctccactcactttgtgtttgatactgactgctctgcttgttcgccactctagagttttgtgccaactctagggatacttagaaatatatgtacacctgagtca

SEQ ID NO: 385219 - DNA, 122 bp, Homo sapiens
tcctgggacttgtggtggtggtgagctgagcagtgcgaactgagcctcacgccccagttccgggtgtgtggcctggaggcctgaagacagccggctgggcacagagcctgtggcttggcctg

SEQ ID NO: 385220 - DNA, 122 bp, Homo sapiens
caattcttatcctcaaagagcacatcctgccttggaagataaattatgtagccaaaagcacgcttctaactgggaaaagtgcccaagggctgtgcagaattcagaggtcagagactctcctt

SEQ ID NO: 385221 - DNA, 122 bp, Homo sapiens
cctggtgggttggctgggggcaggggcacgcggctccaccagaggggtcctggagagccacggctgatagacacgatgtcctaaacctggagcttcaggtgtagccagatgcttgggagccc

SEQ ID NO: 385222 - DNA, 122 bp, Homo sapiens
ccacaacccccgctgcagggggggagcggtgagggggacaagagagggtggagcccgaggcggtgccatggcaacctaggccacccagagcccaactcccggctgaaggattgtctcactac

SEQ ID NO: 385223 - DNA, 122 bp, Homo sapiens
tgccctgatctggataaaatagaaactgtgtcagtcaccaaaaccgataacacagcgctccgtggcacgcgacagctcgtggtgaggggtgtgtggacacctggccaccccaggaaggctgc

SEQ ID NO: 385224 - DNA, 122 bp, Homo sapiens
ctggaagatggacttcttcaataaggcagcgggacggtttggctgatggaagatgtttcccggaagcctgttcacgctccaccctgaaagtcccagggccgtgagagtcagccgggccgccg

SEQ ID NO: 385225 - DNA, 122 bp, Homo sapiens
gccataatggcttgtccaaaggctgctgtgaatcccagtggcaaagagctctgcacttcccgctaatttctgttttctttactgtggctggctttattaaaaggacataaggaagcagccta

SEQ ID NO: 385226 - DNA, 122 bp, Homo sapiens
ggtggccaggaagcagagggtgtgatcatcccagccggagagagcttgaccagtgttcaccgcagggcccccgggcaggcttgggacttggccctaaatggactttgacagccttcagggct

SEQ ID NO: 385227 - DNA, 122 bp, Homo sapiens
gttttgttttgttttgttttgttttgttttgttttgttttgtaagaaataaatgcacagacgcttgcaaagctccgggctcccctgaagctgcggaagcccccagatgggagcaggcgggga

SEQ ID NO: 385228 - DNA, 122 bp, Homo sapiens
gccactcgtaggtaggccaggcagagcgaagctgtctgacccgtcgactgcggcagtccgcggaattcttgtatcctgtccagggtatcctgacctttctcatgaagcttctaccgcgctct

SEQ ID NO: 385229 - DNA, 122 bp, Homo sapiens
ggagataaaaagcaaggcaggttctgcacttgagaagcttcaggccaggcacggggctcacgcctgcaatcctaacacttgggtggccgaggcgggtggatcacttgagcccgggagtttga

SEQ ID NO: 385230 - DNA, 122 bp, Homo sapiens
cccaactccgccaaggccagaataagatcccggatgccaggagagcctacagttcacgaccgtgggtgatgctttacgtttagattctccgccggagtcccagagctcggtgttcaggatga

SEQ ID NO: 385231 - DNA, 122 bp, Homo sapiens
ccaccactacgtggagacggcaaagggggcaggagggaaacttccagaccagggaggccccgctgggctcaggtcctgaccccttcgagtggagcggcagagaaagccatcccaggcagacg

SEQ ID NO: 385232 - DNA, 122 bp, Homo sapiens
gggcttgggcagcatgaagcgcccgccctctcgggcttccccctttcctcccaccggagccggggatgtctcctttggcgaccctcaggcagcggctttttgtgggctcccagacctgcacc

SEQ ID NO: 385233 - DNA, 122 bp, Homo sapiens
ccatgggccactgtttactgtcctgacttcacagtgccatgactattgatcatgggtgagcgcaaacataagagtacaacagtgtgatggtccggaagaaaactcacatcaaaacacctgtt

SEQ ID NO: 385234 - DNA, 122 bp, Homo sapiens
agacgtcctgcagggaagggcgtggattttggagacagccacaccgggttcaattggcctcgccgtggcccttaggcaaacaactcattctatctgagcctccgtttctccaactgtaaaaa

SEQ ID NO: 385235 - DNA, 122 bp, Homo sapiens
aaaccctggaaggaaccatgccaaaatattaagtctcctttagggagcaggacttggagtcgtatttctttatgtttttctgtgctttaaacatactctgccatgacatattccttctgtga

SEQ ID NO: 385236 - DNA, 122 bp, Homo sapiens
gtgagaggcgggaggatcgcttgagccctgaagtttgcggctgctgcagttggctttgatcgtaccactgcactccagccagggtgacagcaggaccctgactctaaaaaaagaaaaagaaa

SEQ ID NO: 385237 - DNA, 122 bp, Homo sapiens
tcccaggggcagctccgcgtaccacagtcctcgccagtgtagccggggtcacacacgcagcgcccgtccttgcagcgtccccgctggctgcagccccgagggcagctcctcaccccacagtc

SEQ ID NO: 385238 - DNA, 122 bp, Homo sapiens
catgacagcgaatggaaaggatctgtccgagtcccggcggggctccaatcccttaataggcggttccgggccgctctggtcacgcccctgacccgcccctcaagacctggccttagcctaat

SEQ ID NO: 385239 - DNA, 122 bp, Homo sapiens
gtgatgaaggcacccagaggaggcccctgacctgggccttgggcttcccagaggaggtgacgtggaggctgagatgtgaaagatgaagaggagaaagtagcatggtccatgctgagggaacg

SEQ ID NO: 385240 - DNA, 122 bp, Homo sapiens
cacagccccttccacaccccaagcacaccagggtaggtggatgactgccggcgaggcccccgaacgcctgcttctatgctgtacagaagctcctcggcatcttactgcagctaaaggcacat

SEQ ID NO: 385241 - DNA, 122 bp, Homo sapiens
acagggtgaaacctcatctctactaaaaacacaaaaaattagccgggcttggtggtggcgcgcacctgtaatcccagctactcaggaggctgaggcaggagaattgcttgaacccaggaggc

SEQ ID NO: 385242 - DNA, 122 bp, Homo sapiens
ccagcgagggcatcacccacagagccatcggtgaccccagcagagtcaggacatgctcaccgtgaacacgcacacccggcgagggcatcgcctgcagagccagcagtggggataatcctgct

SEQ ID NO: 385243 - DNA, 122 bp, Homo sapiens
caaatgaaatgccaggtgccagagacatcagggttagactggaacagcctggtccacctccgctgccaaacgcaggacaatccaggactatccacagctcttccctggacgttgaggtgcca

SEQ ID NO: 385244 - DNA, 122 bp, Homo sapiens
gcgctctccggagctccagccgggtcgagtcctctgttgctaccgcgcaccccacgagcgcgcatgcgcctatgctcccacgcgctctcaatacttggagaaagagagagagtgagagagag

SEQ ID NO: 385245 - DNA, 122 bp, Homo sapiens
gagcatcattcgaagagtagcacagcctcacttaaaagtcttgccagagattagaacgggcgcccaatggcagccccatggctgttctattagcatgtcacccgcccatgcagctaagcata

SEQ ID NO: 385246 - DNA, 122 bp, Homo sapiens
ataagtcaggattttattttattttatttttttattttttagcagaacaagtaattatagcgcagagatgcaaactgttgccacagactgacctttaatcataaacatattggtgacattaa

SEQ ID NO: 385247 - DNA, 122 bp, Homo sapiens
aagcagaccttcgcatcaacacagcagacaccaaaaaccagtgagagccccgctctctaccgcccggccccagcactcgctagctttcctgacacctggaactgtgcacctggcaccaagcg

SEQ ID NO: 385248 - DNA, 122 bp, Homo sapiens
gctgcgtctgccctcgttttgtctcacgactcacactcagtgctccattccccaagagttcgcgttccccgcgcggcggtcgagaggcggctgcccgcggtcccgcgcgggcgcggggcgat

SEQ ID NO: 385249 - DNA, 122 bp, Homo sapiens
atgtggctgtcacaagtttaaaatgctttcctgtaagaccatttgtctgttactcacttgcgttctttctcatctatatttagatggcttactgtagcttttaaaggcactggcgttttaca

SEQ ID NO: 385250 - DNA, 122 bp, Homo sapiens
ctgtaccaagagtttgctcctggctgctttgatgtcagtgctgctactccacctctgcggcgaatcagaaggtaagtgtcgctctttccgctagcacagaagaaagactattttcattttcc

SEQ ID NO: 385251 - DNA, 122 bp, Homo sapiens
tggggaaaatacgtggccagtacggggatcgaacccgcgaccttggcgttattagcaccacgctctaaccaactgagctaaccagccgacgctgggtgcagctcttccccccccaccccccg

SEQ ID NO: 385252 - DNA, 122 bp, Homo sapiens
ttagagatgagctgtggtcagcagggagtactgagagaacaggtacaagggacacaaaaacgtagacagaagagacataagctagagccatgcataaaggaatggagtctgaggctaaaatg

SEQ ID NO: 385253 - DNA, 122 bp, Homo sapiens
ccgcaggggtggcctggcgtgcacagctcctgggagacacatttctggtttgtctctttccggcagccctgtttcccgacccactgaatggatgaagtgtcagacaaaacgcctgctgtata

SEQ ID NO: 385254 - DNA, 122 bp, Homo sapiens
ttgcgtccataacataccctttctaaaagttccaaacagtacaaaaggttctgcagggagcgtgatccccctgccctgagccccactgctgcccactgtgtatgctggttttttccgacagt

SEQ ID NO: 385255 - DNA, 122 bp, Homo sapiens
acaaccatgtataattaatgactgtgtacattatggtaaatgtatatacagatacattaacgtaacgtataggattaagtttgatggaaatattactgtcatattttaactgcttcattatt

SEQ ID NO: 385256 - DNA, 122 bp, Homo sapiens
agtccagtactccttctgcctcccacgtgcgttgcctgctctaggaacatctgtggttgccgcccgctgttgatgtctgcgcgctcctccctctaggggtcatcactctggaccctcagacc

SEQ ID NO: 385257 - DNA, 122 bp, Homo sapiens
tgacagcatttattcatccagcatgttttagtgtcctcgctgtgtcaagcatctgcattccgcttttggaagaatcataattgaattccccactgggaaatacactgagttttgttaatcta

SEQ ID NO: 385258 - DNA, 122 bp, Homo sapiens
tgaagagggctgtggggcattgacaagcacaccgtggggggaacacaggggactcagacgcgcccccacccccagacgacagctctctcagcccctgggtttgctcactggggtccgacacc

SEQ ID NO: 385259 - DNA, 122 bp, Homo sapiens
tggtcctccttggaaaaccctttcgggtgacttgaaagggtgagtggggtgggagtagcccgggtcctagaaagcatttggaaaggcaggcacacaaggcacagcctcggggccctgagacc

SEQ ID NO: 385260 - DNA, 122 bp, Homo sapiens
tctttagcctacaaatcactatgtaaataacagatacacaacatgttcagcaaccaatcacgcacttctttcccagactttaggtgactggtcactgcatcagttactcagttcacagacag

SEQ ID NO: 385261 - DNA, 122 bp, Homo sapiens
cccctaactttcaggcaaagaggcagaagggctgggccctttagctgcatctccaagcctcggttcacttacagtgagtttgtttgtttttgaatgggcaatatagtcatatggctgcgtat

SEQ ID NO: 385262 - DNA, 122 bp, Homo sapiens
ccttctagattggactctggatgcatgttcatcttctctgatagataaacattcccaggccgggcgcggtggctcaagcctgtaatcccagcactttgggaggccgaggcgggcggatcacg

SEQ ID NO: 385263 - DNA, 122 bp, Homo sapiens
agagagagagagagagagagaaaataaaaataaaaacaaagtcagaaaggagaaaagtaccgagcacaagttgagcacacagaaaccaaaccagccaaaacaacggagttaaaagttgtgag

SEQ ID NO: 385264 - DNA, 122 bp, Homo sapiens
ttccacatctgtgtcactgttcaaattgaaggcaaaaggcggcccaaggccgcccaggaccggggaatgcccctcttcatcactgtgaagggaagaaaagagagtctatagaatttatttcc

SEQ ID NO: 385265 - DNA, 122 bp, Homo sapiens
attaagggagggagagaggcgcgcgggtgaaaggcgcattgatgcagcctgcggcggcctcggagcgcggcggagccagacgctgaccacgttcctctcctcggtctcctccgcctccagct

SEQ ID NO: 385266 - DNA, 122 bp, Homo sapiens
tgaaaaacgtccctgcacacatgggatggtgggaaaacaggaagaacgtggcagcacccacggcatgatgggaaaacgtaaagaacgtcccagcatgcacagtacggcagggaaagcctgaa

SEQ ID NO: 385267 - DNA, 122 bp, Homo sapiens
agccccagcctcagcctgggcagccacaaccgctgcagtttcagtgcacagcagccactgcgagcctgggcgcccatctgcagactcccagcccaggccctgaccatgcagtttcggtggga

SEQ ID NO: 385268 - DNA, 122 bp, Homo sapiens
aatacaaaaaaattagccgggcgtggtggcacgcgcctgtaaagccaactactcgggaggcggagttcaagaatcgcttgaactccgggaggcggaggttgcagtgggccgagatcacgcca

SEQ ID NO: 385269 - DNA, 122 bp, Homo sapiens
tgggaggccccagatgtgctggtagagctggcagcagccagagggttagggttcttgtcacgtggggcatgatagacacaggctggcctgttggccggggccgataggcacatggatgaaga

SEQ ID NO: 385270 - DNA, 122 bp, Homo sapiens
tgtggctctgaggggtggggcctggagggtgctgtggcccctgtcgggagaggccagaaacgaactatggcccttgacaatggtcaggaccaagagagagctgtggccctaaggggcggggc

SEQ ID NO: 385271 - DNA, 122 bp, Homo sapiens
ctcagaattgctatgctaggagaacatctggtcacacagactggctaatgtcggacagctcgctctccctttctccgcctcgttttccacagcatttctacatattacactgtcaagctaac

SEQ ID NO: 385272 - DNA, 122 bp, Homo sapiens
gctggggaagcctaagctggagacagctccaaagaggctgctggaaatgcagaaccccctcggcagctcaagtgggtgtggcgtcctcctccttgagcaggaccggggtcccggtccccctt

SEQ ID NO: 385273 - DNA, 122 bp, Homo sapiens
cagctctttcaaacacctgtgtccaaagaagcccgtgctgggacaggtgctggggtggcccggctcgctggctccatgcagctctgacggccaacaccgttggcaaaagcagtagccacgtg

SEQ ID NO: 385274 - DNA, 122 bp, Homo sapiens
ggtgagagaccctaccaatcaacttgacaagaacgactgactacctataaccctaactttcgccaggatcaaaagacgaaagcccgcaaccacccccgggtccctcactagccaccgcttac

SEQ ID NO: 385275 - DNA, 122 bp, Homo sapiens
cagacgaagcggacgctcacagaaactgaagattctaactgcccacagacactgttttgtcggaaacgtaaaagaaagggacaggaagtgaatgagagtactggaagtgcccggacgaagcc

SEQ ID NO: 385276 - DNA, 122 bp, Homo sapiens
ctcctccttctctccttttaaagaagcatcactgttgaacgagtcctctactctaccgaccggaaatactgcctgataacggctcccccgcaaggacccccttcgtgaatgtccgtgcagcc

SEQ ID NO: 385277 - DNA, 122 bp, Homo sapiens
tccaaatacgcaagcacattccaaatggaaatttcaattactgtttttctttttttctgccgtaacagttatcacagcattttaatgaaggtcagacttaaatactgacaagcagggaaacc

SEQ ID NO: 385278 - DNA, 122 bp, Homo sapiens
cctgtggtgcttaattgagtgtggagactctgggctgcagaatttgcttaataaaagctgcgtctagagataattgagacacgttatatggacttcaataaatttgaaacagcagtcaatat

SEQ ID NO: 385279 - DNA, 122 bp, Homo sapiens
caggtgcatgactttttccagcaggacctgaaggaaggtttccacgtcagcatgctgaaccgacggacgacccctgtgtgagccgcctgccctttctctccgctccagcctctccccagaac

SEQ ID NO: 385280 - DNA, 122 bp, Homo sapiens
tgtgtcgggcacatccatggggttcagcattgccttctccagggtcctctgtgtaactaccgctttccatgagaggactccagcagcaaggcaaaagaagactggatttaaattcagggaga

SEQ ID NO: 385281 - DNA, 122 bp, Homo sapiens
cgcctttttcccactttggcgtcagcctgggctctgggaactgcagcctgtgcctccagccgcgcgcttcctcctgcttccagaggagcagggcagtgcagccaggcctcgcaaacccctct

SEQ ID NO: 385282 - DNA, 122 bp, Homo sapiens
cgcctgtggatacagaaatccacgtgtactcaagtcttgttttcagtggatatgaaaagtcggccctccatatctgcaggttttacacttggcgaatgctgtatttttgattcatgttggat

SEQ ID NO: 385283 - DNA, 122 bp, Homo sapiens
tatttttagaaatgagaaatttcatgagagaaaaactcgttatgaaaatatctcagagtgcggtaaagaagtggctgatatgaagggatcaagctgagagactgttgttttggtgaagacaa

SEQ ID NO: 385284 - DNA, 122 bp, Homo sapiens
ctcccacttcggactcccagagtgctgggattacaggcgtgagccaccgtgcccggccagcgttcttcatttctgtgtgtcatttctgagtcagctcaatgcaccacattgtttaaaagtcc

SEQ ID NO: 385285 - DNA, 122 bp, Homo sapiens
ctgcctcaagcacttcccgctcgacctgcgcacgtctatggatggcaaatgcaaggagatcgccgaggtatcacctggcaccacccgcaccctcaccccgtgtctccatgccctgcctctgc

SEQ ID NO: 385286 - DNA, 122 bp, Homo sapiens
gcacaggacgcattctgtatgctccacatcattctggggatcagatcagcaccaccgcatcgccagccccaccaaagccgttaacagacgtgcagtttagggaatctaacacatatcttttg

SEQ ID NO: 385287 - DNA, 122 bp, Homo sapiens
ccctccctcccccggcttccgtgtcgggtgtcatctttgtggggtgctgggggaggctgccgcctgcgcccccagcgcgccccgtgctggcagcacttccgcaaacgtaactggagtcggga

SEQ ID NO: 385288 - DNA, 122 bp, Homo sapiens
cagccctgtctgaatcatcctcagcccgcgggcttgcggggaccaggggctcgtgctctgcggggggctgagacagccagggtccccttggccccacagccctcaagagagcacacagggag

SEQ ID NO: 385289 - DNA, 122 bp, Homo sapiens
gacacacggggtagagcccccacaaggctgctgctcagaatgctcctgcaagctcagctgcgattttaggcctgctggagtgaggtctcaggttacaccaactcctcagcttctcagctttt

SEQ ID NO: 385290 - DNA, 122 bp, Homo sapiens
gatggccacatccaatctttgcagggcaccctgccaggtctggaggccaccatctggtggcgtgaagcaggcattgcaagtggatggacgcccatgctcagggcacggtcagggtgtgtgta

SEQ ID NO: 385291 - DNA, 122 bp, Homo sapiens
acagaacttacaataaccttgcaagttaggtattcttaatcacatttgattatttgtagccggtgttactaacttattggttgcttgattgattgattgagacagggtctcgctctgtcgcc

SEQ ID NO: 385292 - DNA, 122 bp, Homo sapiens
tccccaggcctccctgcctggctgaaatggctcacacagcttcccttctctttctgtcatcgtcttggactgctgcccaatccctggccctcaccttcaggggtgaccttatggctggaacg

SEQ ID NO: 385293 - DNA, 122 bp, Homo sapiens
ccgtcaggctgcgtgcattaactcatctggctggaggtcggacgtcttcgcgtgggacggcgggtgtgcggagggcgccctggggtctccggctggactctggccgggaccttgagctcgct

SEQ ID NO: 385294 - DNA, 122 bp, Homo sapiens
tgccacggtcatacttacctgcacacttttgggggcccatttagagcattgagtctgaagcgccttctatttattagcatagaatgtatgcaaacagccatccataagccgttaagtgccta

SEQ ID NO: 385295 - DNA, 122 bp, Homo sapiens
atgtgggctccacaagggtggagattgggtctctctggttcctcactgtatgcggtgccccgcccaaggcctgcacccactaagggctgaataaatacttgttctaagaccaggcccagtag

SEQ ID NO: 385296 - DNA, 122 bp, Homo sapiens
gtactacccagagcggaaatgccaattgcccggttccaagatgaatgcctccttgtaccacgtgtctgacaccgctcacattccggttccacgtcagttttagctccgtccgcctccatagg

SEQ ID NO: 385297 - DNA, 122 bp, Homo sapiens
tgtccatatctgtccaggagccgttggccaggcacttgcggaccttgggccccaccacctcgcgctccccccggcacacatactcaatctcatagtccactggcaggaagttgatagccttc

SEQ ID NO: 385298 - DNA, 122 bp, Homo sapiens
ttggagtttgagtgacaagccttctgaaactgattctgatatatgctaaaatttgctaaccgttgatcaacagggaccaaaacaattctaggcagtttccttactacatgtagaatgaaaac

SEQ ID NO: 385299 - DNA, 122 bp, Homo sapiens
ttgggccagtcttgctcctccggattgtcagactgctcctccctcttctttagactgccacgaggaaaaagcagatgtgagaactcaaggttcagggctgctcttctaagaaacaagtctgc

SEQ ID NO: 385300 - DNA, 122 bp, Homo sapiens
aattaagggccggatgaggaagtgggaaataggaggaagctgtgcctccccggaggagcacgtgccctcagagccataaggcaggagcagaggctgcctgagtttgcagcgcgaggccaggg

SEQ ID NO: 385301 - DNA, 122 bp, Homo sapiens
cggacctgcgtccgctgcggggcagggataccgggtccctgcagggagctcaagccccagcgcgcccgcgaagagctgcgcggactcccggctgcttcccccgaatcccgggcgcaggaagc

SEQ ID NO: 385302 - DNA, 122 bp, Homo sapiens
ccccatgctcaacccaacctagagtttttccaggatatgactgtctcctttcttacaacccgactgctttccatggtctgaaagctagacttagattggtagagtagatggtaggatttagg

SEQ ID NO: 385303 - DNA, 122 bp, Homo sapiens
ccacacggctccgccatgagcctggcggtgtttgacctcggaaaagtttgactgcgccttcgtggcgtctccgcagcccaagaccctacttccccggaggtggccgcggtcccaggctgtgc

SEQ ID NO: 385304 - DNA, 122 bp, Homo sapiens
tgaaccttccatgtgagacactgatagaaaaactaagtccttttgtctgacagaagatggcggggaagaggcaggaccagcttgcagctcccgatcggacagacagagcagcgtgtggggac

SEQ ID NO: 385305 - DNA, 122 bp, Homo sapiens
tggtgccaaaaaggttagggactgctgctttagaatataagaaacaactcaagcagccaacgggtctggagttaacacttccagccctcccctttgtacacactcaacacttcttgctgaac

SEQ ID NO: 385306 - DNA, 122 bp, Homo sapiens
ggcccagcttaaacacacgcatgttgtcacacctctttagctctgtgatgagcagtgcagcgcaaggaactcccagggtcatcagagagatgttgttgatggcaggcttgacaaatgccagg

SEQ ID NO: 385307 - DNA, 122 bp, Homo sapiens
agagcggcagctaaagcggagccgggagtggcccgcgagagtaggcgcgtggagggcgctcggccatctttgatcctgaccaggcgacttcgtcgcctgcggatcacggaagtggctgcggt

SEQ ID NO: 385308 - DNA, 122 bp, Homo sapiens
agtttgtggtttttttcccctcctggagaaatctattctattttaaagtgaggaaggctccgtggagggctggtagctggtagctgttcacttgtggaactttcagcctgaggctggagccc

SEQ ID NO: 385309 - DNA, 122 bp, Homo sapiens
tttagaatgtgaaacttatgctgtgtgcccctccttttatgtggcgaacacaacctgccccgtatggtgcctaactctcctgtgaaccctgggcttccctcatgtttaacattctggtttcc

SEQ ID NO: 385310 - DNA, 122 bp, Homo sapiens
cacactgctattgacttttagttccttggtatgccccacacttttctatttctgtgcctgcgttctttctcctacctaaaaaaatttttccttggctttttctgatgtagtcttgttctttc

SEQ ID NO: 385311 - DNA, 122 bp, Homo sapiens
aaagtcaaggcatgcgagtaagggccggggatccggagaggacgcgagccacgctgtggccgctcccactcagcgcctgtcccggagggcagaggcccagaggccgagttggccgctccgga

SEQ ID NO: 385312 - DNA, 122 bp, Homo sapiens
cagcaatgatcagttcattgccagttaacccagctttaataattgtctcttcatctgaaccgagaaaagagacttttaatttcatttttatatatatttgaattattttctactgtgaggat

SEQ ID NO: 385313 - DNA, 122 bp, Homo sapiens
gcaagcacaccctcgctggcctcgcctgatcgctcagaggccagcatgccccccgcccaccggcacaggagccccaggcaccgtgcatcctcagggcccgtggccaaccaggacagtcccaa

SEQ ID NO: 385314 - DNA, 122 bp, Homo sapiens
aacccaagatggggctataagcacacaaaatgggatctcttcaaagtcagctacagtgggcggttctctggctttgaaatatgtagatgtatataactttggatgcacaatcagatttgctt

SEQ ID NO: 385315 - DNA, 122 bp, Homo sapiens
tcaagctgaggaaacagatgactaaactgactaagtacctgcccctagggcctgttttctcgcagaggcacttatatagtccagtgaagaaagaaatcttccagaatgattcctaaaggcat

SEQ ID NO: 385316 - DNA, 122 bp, Homo sapiens
aacagccccataaaggccctcactctgctcacagctcatgcccaacacatggagtgtggccgggcgcgggactccctaggcctggggcacatgcaggtgcacacccaactcacacacattct

SEQ ID NO: 385317 - DNA, 122 bp, Homo sapiens
gaggggaagaaggaaattcggcacatgttcctttcctggccacccatgagggccccctgacgttctcaaggcatgagatctgaatctgaatcaccctagagatggagggtcgagggaggcgc

SEQ ID NO: 385318 - DNA, 122 bp, Homo sapiens
ccaccccaaggcaggccggtaggcaatggccccgaccaaggagatcccggagcggctctccggctgtcagcaaagggtctgcatctgcccggatcctgacattctgggtacgtctcaacgac

SEQ ID NO: 385319 - DNA, 122 bp, Homo sapiens
gcgtagcacaccgcaccggcagcgcctctgctagcgaacgctcctttaggtctgcacctccgccagctcctagtggccaaaagcctgcccccacgcccgaggcatcccgttttctacccgcg

SEQ ID NO: 385320 - DNA, 122 bp, Homo sapiens
agcgggtgtttggtggcctttgcggatgggcttgttttgaggctgtggggtcagtgcgatcgtttagatttccttggtttcccagtgagaaataagttagccaggaagagagagaggcggag

SEQ ID NO: 385321 - DNA, 122 bp, Homo sapiens
aggagaggcgtttgagtttgatgacagtgatgatgaagaggacaccagcgcagccctgggcgtccccagccttgctcctgagagggacacagaccccccactgatccacttggactccatcc

SEQ ID NO: 385322 - DNA, 122 bp, Homo sapiens
tggaaccggatgaactaagtgatggggctaaccatgcgtcccacgcagccttagtttatccgccttgtgtgatttccctttgacttcctagaacctgcgtgatttgcctgactccctctgga

SEQ ID NO: 385323 - DNA, 122 bp, Homo sapiens
actcacagcaaatcaagtccacagcaagcaatgctgtgtcattctgacagccctgcatcacgcagccacccagcagggcctggagccttcccaggcctcaggctctgaccttgaccttctgc

SEQ ID NO: 385324 - DNA, 122 bp, Homo sapiens
cacagatcatgggcagcgttgggctgccactatcatccacacagagagggcagtcagcagcgtgaggtggttctgcctgctgcggtctcaccccaggcacagaaagcaagagccctgggtgg

SEQ ID NO: 385325 - DNA, 122 bp, Homo sapiens
atctgggggccaagggctgattagggaactgtgtcctacccacactggcatgttggattacgtttgtcctgttaattcactctagacggtgagttactaattaacttttggcaggtacaaca

SEQ ID NO: 385326 - DNA, 122 bp, Homo sapiens
gggtagaagaatctccagaaaagccagccagaacataaacacccaagtcctttctgccctcgcttcattccacaggctcctcattccttctgctccaatcctactggtcactcgagactggg

SEQ ID NO: 385327 - DNA, 122 bp, Homo sapiens
gcggcgggggcggggcgcacgtgcgtgtgtttgtgtcggagccggccgggcggacgcgcgcggggtcgttccctcaaccagcgagctccggacgctgagctaaagacgaaaattggcaggaa

SEQ ID NO: 385328 - DNA, 122 bp, Homo sapiens
gcgcaggcggagagccagtggctgggggcgggaaggcttcttggacccctcgcgcttctccgaaatcgtaaagaaatgactaaacaaacgtgggggagcctttaaaaagaaaattgactccg

SEQ ID NO: 385329 - DNA, 122 bp, Homo sapiens
cggggcggggctgggaaagttgagtactggtcgctcagggccgggctccgccggagtgcccggcgcagaaaccgtaaaaggctggagcgggcggggtaggtgtggctctgtgtgcgtgacct

SEQ ID NO: 385330 - DNA, 122 bp, Homo sapiens
ggagcagctgcgcctggaggccaaggcggaggcccaggagggcgagctgctggtgcgggacgagttctctgtgctctgccgggacctctacgccctgtatccgctgctcatccgctacgtgg

SEQ ID NO: 385331 - DNA, 122 bp, Homo sapiens
tgattttataagagtgactcattcagaacatttcgatgtaagcagaggtggatttaccagcgagctactgaaacttgagcttcagaggcccttgtttgcccttggaagccatggtaggggcc

SEQ ID NO: 385332 - DNA, 122 bp, Homo sapiens
tgcagaggctcacggccacacccacttctgccgcagggactgtctgttgaggagccgaaccgttgaggcacagtagccaggccctcccgagggctccagaagctctaggtttacggggtcac

SEQ ID NO: 385333 - DNA, 122 bp, Homo sapiens
tcctcccagaagaatgaggtattacttgaacctggagttgcaatatagtcttcttcgtctcggtcattcacaaacacgtaaaaagacccatcatagataagatctccaggaaatcccagtgt

SEQ ID NO: 385334 - DNA, 122 bp, Homo sapiens
cgcgggccacggccatgcagcccctggaggtaggtctggttcccgctccagctggggagccgagactgacccgctggctgcggagaggcagtgggatcttggcgcacctggtagctttgggc

SEQ ID NO: 385335 - DNA, 122 bp, Homo sapiens
cctcggtgggaagttcctgccgcaagtttttcccctttgcacacccgtgcgctctggcctcgcagaccgtgcaactccatccaccagccagagcttttcagcttcccgtgcgtcccctaacc

SEQ ID NO: 385336 - DNA, 122 bp, Homo sapiens
actaaagccacagaagcccggcgcagggcgggaagcgtgggaaggccccttccttcgcggcgaggtgcccccctcgcccgaaacgccggcccaggcccgcctccggctcccaggccgtcacc

SEQ ID NO: 385337 - DNA, 122 bp, Homo sapiens
ggggggagttagccaaggtgtgtgcaacgcagccactaaacctccaattccttaacgtcccgcttatctcagcaaagaagctgccagagagagggaatgagccagccctccaaaggttggcc

SEQ ID NO: 385338 - DNA, 122 bp, Homo sapiens
gatacgtgtgagtatgtagtggtttttccctcttcaactgtctttaaatatgtgtgcgtgcgtgagtgtgtgtacaaacacacgtagctttaatatcaaaaaggttatttttgtaggtctgt

SEQ ID NO: 385339 - DNA, 122 bp, Homo sapiens
cgccgcgccggctctgggcactcagcatcgtttccttttcctccgctggagcagctatggcggcggtgaagaccctgaaccccaaggccgaggtggcccgagcgcaggcggcgctggcggtc

SEQ ID NO: 385340 - DNA, 122 bp, Homo sapiens
aagccatgctgtacatgctcctgaatgagctgcaatgtccgttcaaagatttctcccgcccgtgcctgttcaactgtgtaaggatccctcggataccggaacaaggccagcaaatcatttgg

SEQ ID NO: 385341 - DNA, 122 bp, Homo sapiens
gcatccatttcctgtagaggtgcctgctcaaccccctgcactcccttcttgcaacgcttgcgcctcttttccccccgcagagtcccttacttagaatgcagctaccctcctaaaaactctcc

SEQ ID NO: 385342 - DNA, 122 bp, Homo sapiens
ttgaaccctgaactggatccagtgggaccactccgtactcagagaggggcttgggagctgcggggttccgggggttagggatctaagtgaggcaacggcgccccctgctggaacaactcgga

SEQ ID NO: 385343 - DNA, 122 bp, Homo sapiens
ctagctgaggactccgggtggagcaggggctgaggtccgagcgcagatggcgccgccgagcgcctgaaatatacttgcaaggccgcagcaatatacttgcaaggccgcagccggagcagctg

SEQ ID NO: 385344 - DNA, 122 bp, Homo sapiens
gcgactgaaaggggagagcctccgggcactgggagaggaagagatggctacggaaaggagcgagatgagcagatacaacggcaaaagagagggctgagagagcggacacagatcttctccat

SEQ ID NO: 385345 - DNA, 122 bp, Homo sapiens
aagtggattaattttttttctttacaggaaagtgaagaagcaaagaggctaagggaagaacgtcttgcacaatatgaatcaaagaaagccaaaagtaggtcatttgtttttaacttcatttc

SEQ ID NO: 385346 - DNA, 122 bp, Homo sapiens
gccaggtccgccattttacttccttaagccctcccacaaggccccgcgccggcccaggctcgcctgctttctgccagaaactcccgcgcgtgcgcacttaacaagccgactccgtgtgaggc

SEQ ID NO: 385347 - DNA, 122 bp, Homo sapiens
ctcctggtgggccgttttttaagcgcgtcggaaaagcgcagtatttgggtgggagtgacccgattttccaggtgccgtgtgtcacccctttctttgactaggaaagggaactccctgacccc

SEQ ID NO: 385348 - DNA, 122 bp, Homo sapiens
tgcatgtgccatttgtgtcatgcacgtgccatttgcgtgcgatgcgcgtgtgccacacgtcgtttgcttgcgtgccatgcatgtgtggcatttgtgtatgtgccgtttccgtgtgtattgtg

SEQ ID NO: 385349 - DNA, 122 bp, Homo sapiens
accggggaagggggcgactgaacctatcagattgggtccagagtgggtttcctgcccgcgcggatccgcctgcccaccgcgcgtgccccgcctctctcccaagagctacgcggcggcggcgg

SEQ ID NO: 385350 - DNA, 122 bp, Homo sapiens
aaaacaggccagcaagcatctgcaccaggaggccaggccttctggaaatgtgttggacagcgatgggtccacacttccgccttggctcctgaatgtggcatagccaacccatgagagatgtc

SEQ ID NO: 385351 - DNA, 122 bp, Homo sapiens
ggtagggggttggggaggggacaggaaatggcgtggagcaaaagcaaggtgtgggacccccggcccaggggcaaattaaccctgtgtcaggactcctgctgatgggggcatcccagagagtg

SEQ ID NO: 385352 - DNA, 122 bp, Homo sapiens
tttcttgggggctctgtctcggtgatgctagggacttttcctactgaaatgacctgagcccgggggtgggggccatgccttggttgcttgtgtcggcctcgggtgcggtgctgtttctttcc

SEQ ID NO: 385353 - DNA, 122 bp, Homo sapiens
gtggtttttgtgattcacccagatctgttgtgccagttaggaattatctttattacttcccgtttattgccactgctgagaaggctgtccttcctaacttgtgaggagatgaatccttaata

SEQ ID NO: 385354 - DNA, 122 bp, Homo sapiens
tggcgacgcccgcctacccctcccctgtgcgcacagcgcccgccccgccgccgtcgtcgtcgtcgtccctgcagcctccgccgccgttgcgcctattacccctgctaaggcggctgccgcgg

SEQ ID NO: 385355 - DNA, 122 bp, Homo sapiens
ggtgcccaagttcttttacacacaaggtgcgcagagcggccagcgcatgcccagagaggtcgtaaggaggacgaccgcccggagagaaaggacgcacgcttcccgccattttgttcagcttg

SEQ ID NO: 385356 - DNA, 122 bp, Homo sapiens
aggggaaaggaggggaggagcgtggagcgatcgcctagttcccgcgttgcggggcgcatacgagacttggcgactcgctgcctcagggttgcgtgcctccggccctagcctgcgcaggcggc

SEQ ID NO: 385357 - DNA, 122 bp, Homo sapiens
gtctctgtggtttctgcagctgcctatgcatctcaggacccctgattgcccacatgcctacggtagtcctgagccattcaccatgactttggccatggctgagtactgcctattcctggagc

SEQ ID NO: 385358 - DNA, 122 bp, Homo sapiens
ggcgcgcacgggggaggggcgtgcatagttgagacagaaacccggaagacccaactgtggcgcggcactgcttgaccgaggggctccggagcccagctgcaccggctgcggtttgagcgccc

SEQ ID NO: 385359 - DNA, 122 bp, Homo sapiens
gaagcaattgctgggcaccgtgaagccgctcggaaacgccgcatcctccacggaagcttccggtgcctggtgatgtttacctcagcaagggagactatctgtgatttcaccttgattgagca

SEQ ID NO: 385360 - DNA, 122 bp, Homo sapiens
atttaaccagtctttaaggttttgcaggaaagtcccttcttccaagtggtttttccaaatcgcacaatggcaaagccaaacagaggaagaaacattaaaaaaaaaaaaaagaccattatttc

SEQ ID NO: 385361 - DNA, 122 bp, Homo sapiens
aaaaaaggtaggggtcctacgggcagcagccagggcagccctggagctgtcgctggagtccgatcatgtgatcttcaacatggcgacgctcttggttccctacagaaaggggcggagcctgg

SEQ ID NO: 385362 - DNA, 122 bp, Homo sapiens
aggatcttgaaacaggaggtacttgctgctggcatttatggcaggaagtggatacaattgcgatactttgtgccaagtgttcatttattagaaaaattgtgcttcctaaaattaaacattat

SEQ ID NO: 385363 - DNA, 122 bp, Homo sapiens
cacagctgctgaaaaggaatagacacaacatcaggcgtgggattctccctggaagccccccggatggtctgcagtgctgatggccacatgctattaaacaaaatttactttactttgatcga

SEQ ID NO: 385364 - DNA, 122 bp, Homo sapiens
caaccattagctagcccgtaacacgtgccaggtgcaatgtaattcactgaatcctcccaacgactctaggaggtaagctatatgaatgtgtccattttatggatgggaaaactgaggttctg

SEQ ID NO: 385365 - DNA, 122 bp, Homo sapiens
gtcccttaaccataaatgtcaagagttgggatttaaacccaggtctaacgccagagctggcgccctttagattaaaagtgcagtgtccatgacaacgaaagaagttgattttgtcccacctt

SEQ ID NO: 385366 - DNA, 122 bp, Homo sapiens
agccactgggggcagctagctctgagcatcactctggtgatgaccaaagctctgcagatccggactcatccatctgtcttgccttctccctttcttacttgttttttttctctccatgtgat

SEQ ID NO: 385367 - DNA, 122 bp, Homo sapiens
tttgaatttttgctttgcacttactaaatatatgaccctgatcgagttatttcatctctccggtcctcggctcgttcatctataaaataagactaataatagtaaccacctcatagggtggc

SEQ ID NO: 385368 - DNA, 122 bp, Homo sapiens
tggaatcgtgggctcaggacaaagagcagaggcacacacacacacacacgcacgcacgcacgcacgcatgagagtagaaaaacagccaagctagggaggctgggaggccaagccccagatac

SEQ ID NO: 385369 - DNA, 122 bp, Homo sapiens
cttttctactctctttattatactcaatctgcagtgaattcagggcaggaaacaaaaccccggaaaggggttattaatggttccaatagagagtaatcccacttgccaaaagtaagtaggat

SEQ ID NO: 385370 - DNA, 122 bp, Homo sapiens
cgcgtacgtgcccataggcaccttgcggtgcagattccatattaatcaggtgcaaggccccggagcacaggcttggggcaacttgcccttgagggtgcttcctgcttttcatttcgtgaaat

SEQ ID NO: 385371 - DNA, 122 bp, Homo sapiens
tgtgtccccttcctttttgtttctttaaaaaataaaataaaataaaaaagactggagtctcgctgttttgctcaggctggccttgggactcctgagctccagtgatcctcccaccccagccc

SEQ ID NO: 385372 - DNA, 122 bp, Homo sapiens
ccattgttctctctctttcactatctacatggattatccttcattcaaactgctttgtcccggctgggtgcggtggctcatgcctgtaatcctagcactttgggaagccgaggcgggtggat

SEQ ID NO: 385373 - DNA, 122 bp, Homo sapiens
gcgctccctctgtgatcatgttgagtactgccccctgcacctctaccagagaggaggtcccgctttatctgggttgataggctcctggaatcagcagggaaagaggaacctagaggcaggag

SEQ ID NO: 385374 - DNA, 122 bp, Homo sapiens
atttactaagtgcccagtactgtgctagttactaagatcacagttaagaatgaaacaccccgtctgtctttatggagctacctaacattgtctatggccaccatgatagtaaatttaaactt

SEQ ID NO: 385375 - DNA, 122 bp, Homo sapiens
ctgttggccagggacgccgtgcggaggcctacgtggctgcctgagcagcagctgaccgcccgtctcactgttggccagggctttgtggcgtgggtgttttccagtctgcctggagcagcgag

SEQ ID NO: 385376 - DNA, 122 bp, Homo sapiens
ttgggcggatgacactgtgaccttttacagagggcttccttagatgtggttagttttattcgcatttctcatgtgcttgtctgctctcttcagtttggattctaaactccttttggggacct

SEQ ID NO: 385377 - DNA, 122 bp, Homo sapiens
ctcttgcgtgtgcgctgtggtgggtccctgctaggggcgaccctatgggccagcttcccacgcctggtccccaagccgcacccaccctagctccctgggctaggggactggctcctcctggg

SEQ ID NO: 385378 - DNA, 122 bp, Homo sapiens
cagggactgggcgtctgcacagagctcccggctccccgcggcgggggcaggagtcaacgccgtcagttacatgctcgtcagatgtgcacgggcgccacacacgatcctgctaacgtggtcgg

SEQ ID NO: 385379 - DNA, 122 bp, Homo sapiens
ttgggggtaagggagtttctactctgcctacaggtctcgggtgaattcacacaaactcttcggtatgggctgggggcatttccacttccgagcgtacacgtcaaagcctacaacaggaaaga

SEQ ID NO: 385380 - DNA, 122 bp, Homo sapiens
tgccacttcctccagtgttggcaactctgcggctttctctactcaggaagcacttggagccgccagctgcaggcgctcctgtctccgggcaccgggctctgctggagctgcagcttagcctg

SEQ ID NO: 385381 - DNA, 122 bp, Homo sapiens
cctgtcgggggccgcttttcaggagcacaggtgggacgcaggaggccgtccggaggaagccggcgttgtgcccgttccctgccacccccaccctatcactcccttcattttctccctgagca

SEQ ID NO: 385382 - DNA, 122 bp, Homo sapiens
aactttagaggtaccatttaggaaaccatactccggcgacattggagcggttccgatgcccgcccggaagagagcgctctggcccaggcatcgcagctgcgggacagccgggagcggagcag

SEQ ID NO: 385383 - DNA, 122 bp, Homo sapiens
cccatatggcacagccatggaaatgaaaattaatcgcaggccaggatgcgcatgtaaaggcgaacaggtcggagggaacagatgtgtcttacaccaaaatggatatagcgaaaagacaggct

SEQ ID NO: 385384 - DNA, 122 bp, Homo sapiens
cttcagtgtgcctcagtttctctggttgttaaataggaagaattaacctttacttaaaggcgtgctgctagacttaacctaaaaaaagtgtaggtgggtcatgaaactcttagaaataaggg

SEQ ID NO: 385385 - DNA, 122 bp, Homo sapiens
ttgatacaatcacacaaatgcaatccagataagcctttccatcacccccaaaattgtcctcgtgccctttcaattctttctttcctctttgcctccaaatgccaggcaaccaccaatctatt

SEQ ID NO: 385386 - DNA, 122 bp, Homo sapiens
gccatgtggaaattaaggcacagggaggttaaggaacttgctcagagttggcctgggagtcgcaacccaagatctgtccacatggtcccacttcaccgctcgaggctgtgtcctctacggag

SEQ ID NO: 385387 - DNA, 122 bp, Homo sapiens
ggccgggctacctgcgcgcctggcagcgcctggcagccggctgggtggggcgcaggggagcgcagcatcctccccggctcgctagctccctttgttcatctcgctcaaccaggctccgcact

SEQ ID NO: 385388 - DNA, 122 bp, Homo sapiens
ctccaaagacccatcctcccaggcagccttccaggctgatcactgtgcctccaactccgtcgttcctgttccgatccccatcacgggctgagggtgaccgtgtttgtttatgaccgccccct

SEQ ID NO: 385389 - DNA, 122 bp, Homo sapiens
ggtgatccacctgcctcggcctcccaaagtgctgggattacaggtgtgggccaccgcgcccggcctagtttgccttcttactaagtactctggtgttgagcgtgttttttagctttttgggc

SEQ ID NO: 385390 - DNA, 122 bp, Homo sapiens
caggcgcatctctcagggctttcttcgttctgctgatatctatcccctctcaggaccactcggtttcaaaagcggtaactaaacttgtctaacacgtgtgcatgagaggaaggcggccagag

SEQ ID NO: 385391 - DNA, 122 bp, Homo sapiens
cacactgctcgggccgagtccagcctgcccctgctccttccccgagcttatgtgaagagccgtgtcttagattcccaagtgccgttaatctaaatcaaaacctagctggttaaagacagtgt

SEQ ID NO: 385392 - DNA, 122 bp, Homo sapiens
tcccgggatcaagtatcgcacctaaaaggagcgcagagagcgtgcaactggcgggagaggcgtgaccagagtggaaccaaaagtgggtggcctgggaacctaacgcgtgaccagaagtgaag

SEQ ID NO: 385393 - DNA, 122 bp, Homo sapiens
cgggaccgccacctgtcgcgttccaggccgaggcggtccagggtccccgcggaagggcggcggccccccaaccccagcccaggcccactcacagctgcaggaacaagggcgcggcagacggc

SEQ ID NO: 385394 - DNA, 122 bp, Homo sapiens
ccaatggggaaaggcagtgtcgggactaagcaatgaatggctcttcaatggccagctgcccgcccaataggataaaagaaaaccccacataatacttccctttgtctccaaaaaaatttata

SEQ ID NO: 385395 - DNA, 122 bp, Homo sapiens
cgaaggcccaggagaaacccggaacgtgttaaccgctccaactggagccggacgaaaaaacggccccgcctcccgcgagggcgacgcagttcgcaggcgcgtcggcgcgcctgttctggggc

SEQ ID NO: 385396 - DNA, 122 bp, Homo sapiens
ggccttggggcccaggccacccactctcaagtcaaaggacaacatgaggatcttgtttctcgctggtagttttgacatgtcaggctgcagctgttgagtctcatcttgaaaaagatttgtga

SEQ ID NO: 385397 - DNA, 122 bp, Homo sapiens
cttggaatattagttttcaagttaagcattcccattctgctgtcgcagcagttctgacaacgtgtaactcctgcttaaaaaaaaaagtctgccctctgctaacagcttgactccatctctac

SEQ ID NO: 385398 - DNA, 122 bp, Homo sapiens
agactctgttctcttcccataatgtacattatccaaatggtctcttgttgtgggtggattcgggtaaaaattgtcttcaccacgtggggcctcagtttcctcatctgcaaaaaaaaaggagt

SEQ ID NO: 385399 - DNA, 122 bp, Homo sapiens
accagacactagaatacatgacccctggcagacacgggcatcctgctgcggcaaggccggcgctctaggcctcccttcatgctctcctgatctgcatgcgatgcttaatacaagacagcacc

SEQ ID NO: 385400 - DNA, 122 bp, Homo sapiens
tctctctacacttgtaataactccttcagtgagtgctgtcagtgtacctccaaatacagtcgaaatgaccccggggagtgggggtgggaattctatatcaggagtatcaaagtgtggaactt

SEQ ID NO: 385401 - DNA, 122 bp, Homo sapiens
cacaaacttccgctgcaccagaccatgtgtaagtcttagccttcctccctctgtcctgcacgggctgtgtcttctgctgtggtgccctgccttctctgctttttcgccttcagtagcttgtt

SEQ ID NO: 385402 - DNA, 122 bp, Homo sapiens
tgtttcctgaatatcaagtgggatgacttgaaattttgccaaacaggcacaatcttaatacgatcggccttactaaggctaaatggccttatccgtggttgaagttgacaaatcaatatatt

SEQ ID NO: 385403 - DNA, 122 bp, Homo sapiens
gcccaccccggttctctctgggagcctgtgcatctcttcctggtcatgtaaacgtcacttcgtgaagtactggaagcacccggtcagtcccactgggccactgaaattccagagcggatact

SEQ ID NO: 385404 - DNA, 122 bp, Homo sapiens
ttgctacaatgcacagaggaatacaaagtcggcataaaaagatgtagattgtgtgtgtggcggaaatccgcaggtgagctatcaacaccctggtccagaaagtcttggcctaattcttcaca

SEQ ID NO: 385405 - DNA, 122 bp, Homo sapiens
ttatcaaaatatgcaaactgctgattaaggaaggctgggtagcaggagcgcctgcgaaggcgtagggtagaagtgtgaaaagaaatcccagctctcccagggagactgcgtgtgaaagagcc

SEQ ID NO: 385406 - DNA, 122 bp, Homo sapiens
attacatttctcataaaataaatgttcccatttatatacagaagacagactgtacaggcccggcctggccccaggaggggtcacacacagacgggcggtggtggaggaggaagggccatccc

SEQ ID NO: 385407 - DNA, 122 bp, Homo sapiens
caggatgaaggaccgaacacagggcctcgtctccaaaggtgctcagtaaatggtggctgccgcatgctggccgccccccaaacagccccagcgcggcgtgtcctcgccgtcaccctcctctc

SEQ ID NO: 385408 - DNA, 122 bp, Homo sapiens
ttggcccttgcccaaggcagcctcagttgtgaccccagtgtgacctctgcagggagacaccgcgagggctcctccgtggcactggatgaggcgacaggctcagctccaccgacacgcccatt

SEQ ID NO: 385409 - DNA, 122 bp, Homo sapiens
cacacaccaacgggggggcagagcagcagccaccgggtccaccccagcagcctacacacgcgcagctccaggatggcccaggaacaggcccagagccaccaagcagcagtcacacagcccgc

SEQ ID NO: 385410 - DNA, 122 bp, Homo sapiens
tgctaagcccctcactgcctggggcccgcagggccggccagcggctccgagtgcggggcccgccaagcccagaactccagctggcccgcaagcgctgcgcgcagccccagttcctgctcgcg

SEQ ID NO: 385411 - DNA, 122 bp, Homo sapiens
gctgttcctgtaaggcggggagacaatgagtaaactctccttccgagcgcgggcgctggacgccgccaagccgctgcctatctaccgcggcaaggacatgcctgatctcaacgactgcgtct

SEQ ID NO: 385412 - DNA, 122 bp, Homo sapiens
gggcccccattgaggaagtaggtggtcatctcccccttgcccttcaccttgaccacccctcgacactccagctggtagcccttggcagctagaacctggtacaggtccgtggtcacctgggg

SEQ ID NO: 385413 - DNA, 122 bp, Homo sapiens
tcgttctgcccgggctcgaccaggggctagatcggggttcggggagcgaacaaggcacgtcggagggtggcccggtggcccctattcgaggggtggctgtgggccaggaggtagcggtggcg

SEQ ID NO: 385414 - DNA, 122 bp, Homo sapiens
gagggcgggcgggcaagcgaaggggggccggcagtgggcggtggcggcttgtggggccgacgcggcggcgggggctgcggcggggcccggggagggggcggccatctcgctcccgtcggcgg

SEQ ID NO: 385415 - DNA, 122 bp, Homo sapiens
aacacacccagcgggatgcgagcagcccaggggcttccggagaggccggcactgccccgacgggggcgggacctcagagcagcccactcagttctcggagtcagtttctcaccaaaacaagg

SEQ ID NO: 385416 - DNA, 122 bp, Homo sapiens
agtgtgacctttgtaacttcagactctggttggctgctttctgcaaccaatcagactgaacgcgggctaccgcttcatttacaggaggtgagcatgaagtggccaatgggaaaattctagga

SEQ ID NO: 385417 - DNA, 122 bp, Homo sapiens
atggaatgggtgtaacaagtgaggctgtggtgatgccgagtgcctcaaacaaggcacacacgtgaggagttcttggtagcggtcagccatggttctgacctgccacaccatgcagaactcag

SEQ ID NO: 385418 - DNA, 122 bp, Homo sapiens
tctttaaaagttagtcatgtaaaagtaggctttatagcccaacattatggagaggcactgcgagaagtattttatgtacattattttattcaatttgcccacaaccataggaagtaggtact

SEQ ID NO: 385419 - DNA, 122 bp, Homo sapiens
gagcacttcccggttccttccacttctacacgctttcattctacaactgaaaaccacacacgaaggtgtgtgtatcatcatgagagagaggccttcagagcccagcagcaacctataataaa

SEQ ID NO: 385420 - DNA, 122 bp, Homo sapiens
cgttgctcagcttgatcttctcggtgttgaagccgatggtgggcaccgtgttcacgaactcgttgaacttgagccggtagagcaccgtggtcttgccggccgagtccaagcccaacatgacg

SEQ ID NO: 385421 - DNA, 122 bp, Homo sapiens
tccagatccccttgagccagggagctggcagacactgagggtgctgccctgcctatgggtcgagggttttgttgtgtgacccagatgcaccacactcagggccacagcccccaccatgagag

SEQ ID NO: 385422 - DNA, 122 bp, Homo sapiens
ctgtgcagtgagagatggtctcactaaaccctgaagtgattgtgagctcagctaactttgcgatggcatttccccttcttactccctagtgaggggagcacagaagagtgctctccttctta

SEQ ID NO: 385423 - DNA, 122 bp, Homo sapiens
gtctatgctgcaacagctcacccacaacagacagcccggggaagagccagtgccaggacacgaaattgaaggttttcaaatttaactaggtacatctgacacccctgtagccccgagttcct

SEQ ID NO: 385424 - DNA, 122 bp, Homo sapiens
ctgggacccgggaattctggccccgggctccttcccttcctcgtgttgcggacactaactcggctcgcgtgtcccctcatttgaaaggggccctgccaccatgtgatcccctctttctgcct

SEQ ID NO: 385425 - DNA, 122 bp, Homo sapiens
tccacctcgggagccccaggtgactttgtcacagccggtgggtgtgcgggttgagcatcccgagatgggagagcggcctgtgaaaccggctggaccggcctccccacagtccgctcctgggt

SEQ ID NO: 385426 - DNA, 122 bp, Homo sapiens
cttgaacttttgacgccgtgatccacccacttcggccttccaaagtgctgggattatgggcgtgagccaccgggcccagccctatttttgttttttaatgagtgctaaaaaatgaaaggaga

SEQ ID NO: 385427 - DNA, 122 bp, Homo sapiens
ccgccaagtgtaaggtggggccttcaggggcagcgcctcaactccggttgggtctttttgcgcagggggtggagggagcgtccgcagttgggccgagactgcctgttcctggccccgtctcc

SEQ ID NO: 385428 - DNA, 122 bp, Homo sapiens
cggcagcggccggtgtgagaagggtccccgtctcctcagaccagaccgagacaccaggggcgggggatggaaggggcattcacctggtgcccggcaccggtggtggcggggaggacagcggc

SEQ ID NO: 385429 - DNA, 122 bp, Homo sapiens
atctcctaaataagagaggacaacccacagccatgagacactaaaacaaatatggtaggccggatgcagtgactcaagcctgtaatcccagcactttgggaggcagggatgggcagatcact

SEQ ID NO: 385430 - DNA, 122 bp, Homo sapiens
gctctcattgaatgcctgccgcgtgccaggccttgggaaggagtccctggtggggtcatccgggacaggggagcacgcggccctggaacggggaaagcttggcggggaggccagccttccga

SEQ ID NO: 385431 - DNA, 122 bp, Homo sapiens
ctgggaccgagggagggggcaggcctggactctgctgaacacctaatgagcatcagggagcgccactgcaggacgagcagcagagccaagattagagcccctgctgtcctcactacagccac

SEQ ID NO: 385432 - DNA, 122 bp, Homo sapiens
cccgcccgccccctggccttcctgattggcgagaaacactacaacaggaacagcagtcctcgccctccactggcctggccagccgccgctcaaagttgctcctaccttctccccgccccttt

SEQ ID NO: 385433 - DNA, 122 bp, Homo sapiens
aagacacagggtcagaggacaaaatgccatcaattagatatcaaagaaaacctttcaattcgccaggctatgctaaggcagggtttgttagattctctagcaataaaacaaatgcacaatat

SEQ ID NO: 385434 - DNA, 122 bp, Homo sapiens
gggtggcgccgggagcggagctgctgccgagactggagttgatggcgcagttcagagacacgctcctctttctggaggaagaagcacaattgggatagtaggagaagaggaggtgatgaagg

SEQ ID NO: 385435 - DNA, 122 bp, Homo sapiens
tacacccagcgcagcccccaccaccctggcttcctctacggctctgccaccccagaagatcgtgggctccaggtcattgaggtgccgtcagggaccctgagaaaatcacaggggtgggccag

SEQ ID NO: 385436 - DNA, 122 bp, Homo sapiens
ttaaaataataatagctttcatttacatagtgcttacatttatatagcacttactatgtgcgatgtactaatttaagtactttatattaactcatataataaatggacacaacacaaaactc

SEQ ID NO: 385437 - DNA, 122 bp, Homo sapiens
tcccccggccgcagctctgctgggcggtcgaggcggaggcggggcctttcggggaggacccgccctcccagatagacggccccgccccaccttgagagagcgggggacccctgatccccggt

SEQ ID NO: 385438 - DNA, 122 bp, Homo sapiens
cgggaccgcgcaggcgcagcgggaagcgacgcagaaagctccaagcgctgacgggcaaagcgcggccgacttgcggctggggagcgcaagctgggtagagtagaggggaggaggaagccggg

SEQ ID NO: 385439 - DNA, 122 bp, Homo sapiens
tgcactgctgtatgcgagacctgcgcatgcgcgagtctcagtgagcgcgtaaacgctgtgcgtgccagagtgtgcgcatgcgtaagcacggtggccaatcctctagcgttccctagcggtcc

SEQ ID NO: 385440 - DNA, 122 bp, Homo sapiens
gcccacgctgggcaggcagtggcctactttgcgtggggcgccccgtgctcctcagtgactcggagggaagctggcctggctttcgctctggttaaactagtaacagtcaggctctttccagt

SEQ ID NO: 385441 - DNA, 122 bp, Homo sapiens
tctctataggagagtgagggccggggccccagggggttccctgggcctgggccgtgtacccgcccgggcagctcacacggtggtgactgagagaagagggttgtagacccgcttgccatcgg

SEQ ID NO: 385442 - DNA, 122 bp, Homo sapiens
tccctgatgtttgtgcttcagggactgtgctggctgatgggaaccctgcatctgagagcgcgtgcgctgggcgggaggcagagccaaaaccgtaacagccagagctagagactccggcctgg

SEQ ID NO: 385443 - DNA, 122 bp, Homo sapiens
ccggagctccgcggcgtcgcgcgcctccctcttctcgggctcccgctccttcccgccccgcggctccgggctggggaccaccaccaggcgccccctgcctgcgtcctctcggcagtcgcgcc

SEQ ID NO: 385444 - DNA, 122 bp, Homo sapiens
agaccggccctgcagtgcaggatgctccggtggacgtggccgagcggctcccgggcagcgcggctttatatgccgcttctcctgtgcagggctgtcaatcagacacacgaggaagcacgttt

SEQ ID NO: 385445 - DNA, 122 bp, Homo sapiens
gcctcaggaagcatgggtgtgacatgcacaggctgttctgcacaggccttgggaagcatgcgtatgacatgcagaggctgctttgcacaggcctcaggaagcacacatgtgacacgcacagg

SEQ ID NO: 385446 - DNA, 122 bp, Homo sapiens
tgctacttaagcgtgggccctgcacttaacatccggggggcaggcccggtgcgtggtgcacgccgggcgcgctgtgcacagtctccggaggccgccagtgcgaccccgccccacccgcgcac

SEQ ID NO: 385447 - DNA, 122 bp, Homo sapiens
agatttccccactgaatcacactcagtgctaagcacccgctggctttgcacagcacataacggtgcttgaggaagatgcatctgctcttgacactgacatactcgaaggatttcctacccag

SEQ ID NO: 385448 - DNA, 122 bp, Homo sapiens
ctgcagggcccctcaccgatctggatctcagccacctccggggggacccggcccctgccccgcactccacgcgaagggatgccagaccctcggcctcctggacgcacagcgggggctcgcac

SEQ ID NO: 385449 - DNA, 122 bp, Homo sapiens
gagggctgaatttgtatccacgggttccacagaccatatggaatacttgtgttccacagacgagtggctgcgtggagtatgtgcgggttccacggagcggccgaatggagcatgcgctccac

SEQ ID NO: 385450 - DNA, 122 bp, Homo sapiens
agcacagcttcagagtattcatgaaacctcctgtccaccttggaagctcattcacagagccgagcttcaaaaactccatcttagaaacctttcccctttccccaaaagactttaacgtgact

SEQ ID NO: 385451 - DNA, 122 bp, Homo sapiens
gccccttctaagttcattgatctgtcttgtaccagctgagatttcatcttccgaaatgtacggactatcatataaagtagcatctttctgttttaaattaaccttgctctggtttcaaagag

SEQ ID NO: 385452 - DNA, 122 bp, Homo sapiens
ctgggcaaacctgggggatggttcactttaaggccctgagtcagctgctcaacagtgagccgaaatgggggcattgtgagtaggagtaggcagggctggcaaaagaaaggctccaaggacac

SEQ ID NO: 385453 - DNA, 122 bp, Homo sapiens
tgggaaggagtagaaacttccaggagcagcagaaattctcaattgaccttctcaattccccgccttcacatctgctccacagtctgcacttctgtatcttatatctcaggggtggtcacatc

SEQ ID NO: 385454 - DNA, 122 bp, Homo sapiens
gcttgtggtcccgggagtctgagaacccctttcctcagcctcctctgtgccttagcggggcgacccccagaaatctcagaggagtcgtaagtgctgcggtaccgggcggtgcgccgagaagg

SEQ ID NO: 385455 - DNA, 122 bp, Homo sapiens
tgtccggaatcctgcccagccggagtcgtgcagaggcttatggggactcgtagtcccgctcgccggcgttgtccgcaattcctgcaatcggaagactacacttcccggcaggccatgcgggg

SEQ ID NO: 385456 - DNA, 122 bp, Homo sapiens
cttgctgtattatgcttggttgcaatttttcatctttcccttgcggtactatatctattgcgccgatttacaatttctatcgcctatactttatttgggtaaatgatttggttaaagctgtt

SEQ ID NO: 385457 - DNA, 122 bp, Homo sapiens
gtagggtgtcagccaccaggttctctggggaagggactgggaccagagaggggatagaaccgttgaggagtgcgccccccccgtccaccccaggggcttctcaccaggtgggctcggcgaag

SEQ ID NO: 385458 - DNA, 122 bp, Homo sapiens
atgcttctaaaaaacagcattagccttctcccatcaaaagtccggaagctgcccttcagtcgtcaaagtgtttgccttaatttgcaatcgttatgacttgagccaaatgcttatacctcatt

SEQ ID NO: 385459 - DNA, 122 bp, Homo sapiens
gcacgcgcaggctccgaaagcgggccgtcgcacagagggaccacaactcccagagtgctccgcgtccttgctttcgcctctacttgtgctccagggcgcacgcgcagccctgggagcgggtt

SEQ ID NO: 385460 - DNA, 122 bp, Homo sapiens
ggccttctgcgtgtttgtgtccctgggtacttgagattagggagtggtgatgactcttaacgagcatgctgccttcaagcatcgccacagtggttcttgactttgccaggaaccctcttaaa

SEQ ID NO: 385461 - DNA, 122 bp, Homo sapiens
ccctgaacaccaaataccgagacagctgatgaggctggctcagtgtgtgacggaggcccccgggagtcagcagagccgagcgtacagtgcacatcaggcagagcaggccacgggcagggacg

SEQ ID NO: 385462 - DNA, 122 bp, Homo sapiens
ttcggccgcaagaagcagagccgcgtcacggagcaggacaaggccatcctggtgagggcccgggcccggggtcagggctggggccgggacaggcgacggggccggggcgggcggcggggccg

SEQ ID NO: 385463 - DNA, 122 bp, Homo sapiens
tttctgcctaattccagaatgccccactgccagatggcagccagagcagatagtggcatacgttctccttccccatcacaagttatcttcctcccatgcctgtaatccctcaatgactgatt

SEQ ID NO: 385464 - DNA, 122 bp, Homo sapiens
attctctttttaagggtgtgaaatgtaggtatagctaaagaaccactttcctatcttttccgtctttagaggcgatcagatgtaactaagttggtgaaatttatgataaactttgagaattt

SEQ ID NO: 385465 - DNA, 122 bp, Homo sapiens
agcggggcgcccccgaaccggctaagcccgttcgacccctacatggggagcccaggtccccggcgaccggaccccgaagcgcactacttgcctgccaacgccttgctccgaggccctgggcg

SEQ ID NO: 385466 - DNA, 122 bp, Homo sapiens
aggggtcgccgtggctgccggtcctcgagttgggggctgccgcggacactgctaggcagacggcgagtaccgagcgcgggtggccgcggtgtccgtgggccacgctcagctgcggtcagagg

SEQ ID NO: 385467 - DNA, 122 bp, Homo sapiens
ccagcacctccatggcggtgcgggccgcgctgggccgaggatgctaagcgcaggaggggacgcgcagagctgcctcggaccggcaaggttcctctctctccgcgtgtgcttgcgtgtgtgcg

SEQ ID NO: 385468 - DNA, 122 bp, Homo sapiens
cggcggggcgggcccaaaggccccccgcccactttagttttcccgcgactgcccaatcaacgccaagcaaccgcaatccgtagagacctaaggaacgcacatccgccaatcacgagttgcgt

SEQ ID NO: 385469 - DNA, 122 bp, Homo sapiens
ggaaggaggcccccacctgcccagatgtgagcaccaaccccgagccctgcagcctgaacccgcaccgccgctcctgggccgagaagcagtgcagcatcctcaaaagcagcgtgttcagcatc

SEQ ID NO: 385470 - DNA, 122 bp, Homo sapiens
gccacactatctgatcctgctggggcacacggtcatcatctcgcgagggaagcccgtggacgcacactacctggggctactgcactttgtgaaggatttctccaaactcctggccttctcca

SEQ ID NO: 385471 - DNA, 122 bp, Homo sapiens
ggtagggaaattgttgggctgtctctcttgtctctgtcatagctctttgaccccaaatggcgtacatcttaagcctcttgctttcttactggctttaacacagttgtttccttactgctatc

SEQ ID NO: 385472 - DNA, 122 bp, Homo sapiens
ggccctgtctcaaggctgcttggtccctactcacacaccccaagagaatgtgtggtcttccgagatctgaattctttgggagtcccagagggccccaaagcaagagcaaagggcgaggttca

SEQ ID NO: 385473 - DNA, 122 bp, Homo sapiens
ggacaaccccagctgtcgcttgggcctggctcagcttaccccggcggtgagggtgcgggtcggggacggagacgcgtgcaccctgaagacagtaactaggcctgctctacagagggaaacgc

SEQ ID NO: 385474 - DNA, 122 bp, Homo sapiens
ggcgggccaaccgggcagggaacagggtttctgaagggatagaccggtgggcggtgtcgccgggtgtctacctccaggggtcgttcgtgagccagagaaacccggacttaggaaggaagggg

SEQ ID NO: 385475 - DNA, 122 bp, Homo sapiens
gctgacagcccggccggacccagccaacgccccgcacagctcgccagccacgggagggagcggcctccggcagaccccagccccaggcacgaccccaggcccgggcacgaccccagccccca

SEQ ID NO: 385476 - DNA, 122 bp, Homo sapiens
tttgcttctttctcattttctcttgccgccactgtgtaagaagtgccttttgtctccctccgtgattctgaggcctccccagccatgtggaactgtaagtccaattaaacttctttttcttc

SEQ ID NO: 385477 - DNA, 122 bp, Homo sapiens
tgcgcgctgaagaggcactggcgggaaccacgcccgggcgaatcccaagctccccgccagcggcgctaggtaacgtgtccctcacctggactcacccttgagagattctgggcctactctga

SEQ ID NO: 385478 - DNA, 122 bp, Homo sapiens
acggtcatagacatcataaaacagcacacagataagagtcggataacaaattagaccacacgtgacatgaaggaacacggaccgacaaaagcatttaacaggcggatttctggatggagggc

SEQ ID NO: 385479 - DNA, 122 bp, Homo sapiens
cagggccgccgcccgtaacacaagcgggctccgagtgggatctggccggcaggcgggcagcgctgccaagaggaagagcctccagagagaggagaacattttctactggaagccgtctaaaa

SEQ ID NO: 385480 - DNA, 122 bp, Homo sapiens
ctgaggttaatggacaggaagtgccattacctaaatgggccaataagctgatgagaagcccgagaagaaagcctttccaggccttgacccagagagccggcaggaaagcggcaggcgtcgcg

SEQ ID NO: 385481 - DNA, 122 bp, Homo sapiens
gagcggggctcctagtgggcggggctctggggtggcggccgttgccgggctacgggagagcgcggagccctgcgctgggaggtgcacggtgtgcacgctggactggacccccatgcaacccc

SEQ ID NO: 385482 - DNA, 122 bp, Homo sapiens
cggcagctgctccttttatggggctcgcaggcagtaggctcggccagggtgtccccagcccgctcgggcggcagcggcgtcaatgcgcgctattcacactccgggctgcggctggtacccct

SEQ ID NO: 385483 - DNA, 122 bp, Homo sapiens
gagcagggctgactggactgagtaaagagagttgtttccttagacctcccctcccagcctcgcatctgacacccgtgatggtgaccagaagggacagagatatttttgcacaaaggctcttc

SEQ ID NO: 385484 - DNA, 122 bp, Homo sapiens
gggcgacagagcgagactctgtctcaaaaaaaaaaaaaaaaaagagaaaagaaaagactccgagggatcactgattccaaccatatttatttcacagatggggacactgaagcaaggaaagg

SEQ ID NO: 385485 - DNA, 122 bp, Homo sapiens
agatgggagtgcggcgagaactggcttcgaagcgggagggctgcaagtcccatgatacaccggaagaatctggcgtcgaggccggccagctccaaagggcaaacgctgtctcccccacccaa

SEQ ID NO: 385486 - DNA, 122 bp, Homo sapiens
ccagcgacgctctagggtgtgtttttctacttccctaggcccaagcctgcccgctggcgtcgaagccaactccttactggttcaggtatgtgctcgtctctagagtaaaccaatcagagccc

SEQ ID NO: 385487 - DNA, 122 bp, Homo sapiens
tgcaacatgccccgcagacacccggacagatacacccacagacccaccccctcacagatgcggggacagacacgtccacggacacacgcagactcacgcagagacctgcaaacacactcagg

SEQ ID NO: 385488 - DNA, 122 bp, Homo sapiens
aatgccctgtgtaaatccccctttctatggggagatgtgagtgagtgagtggtgaatgagcgaatattctgcttcctgattgctgcctctctgagcaaggtgtctgccccctcctaaccacc

SEQ ID NO: 385489 - DNA, 122 bp, Homo sapiens
agagatggagaagcggcaaagcccacacagctgagggtggcagagccagccaggagaccacgtggctaaaggaacgcactgcgtcgctgtgcacggacacgggaagatggctgagagtgtga

SEQ ID NO: 385490 - DNA, 122 bp, Homo sapiens
tctgaaattcaaatttagaagaactgtacttttacttgctacatctggcaactcagggttcggcgccaggggaccccaaatcctaggcggatcgcgccccgcctgggtcaaaggggacccca

SEQ ID NO: 385491 - DNA, 122 bp, Homo sapiens
ccttttaggctgcaatgcctcgagcattgcattctagtagtctctgggtccacgccccctcgtttctggtttcgggacagttgtgcccaaataattctaaggtgcccaaataattaactcta

SEQ ID NO: 385492 - DNA, 122 bp, Homo sapiens
gaggaggcgggacttcctcaccgcagagtggctgcttccggtagaatccggaagcctgtacggagaaggggcggggccaaaactgcgcgcccaatcggggtgacgctctagccttgccgggg

SEQ ID NO: 385493 - DNA, 122 bp, Homo sapiens
gggcagccaggccagatctgtgcaaaaataactcaccctgagcatccttccagagatacacgctgggagttctgcagggtcccctgagagctgaggaggaggaagaggggaagtgggagttc

SEQ ID NO: 385494 - DNA, 122 bp, Homo sapiens
gacgcatgcgtggcgacaacaacaacaaaaaccacaacccacattacttgagggctcgggcgtgcgcaaagctccgggttcagtttcccgcgctggaactttttcaatagtaaacgagcaaa

SEQ ID NO: 385495 - DNA, 122 bp, Homo sapiens
gcgggagttggggctgggggaggaaatgcagctgtgcacaccgccggttgcggccatcgccggatcttgtgcattgagtctagatgtttgcagacctggacaggtgggagctcaccgaggga

SEQ ID NO: 385496 - DNA, 122 bp, Homo sapiens
tgcgtggcaatcgggccgtaaagaaccgagtctgcgcaccggctgatcctggggactccgcgtccgcacccggagccgccacccctgggagactccgcacggaaaggactcggaaccgaagg

SEQ ID NO: 385497 - DNA, 122 bp, Homo sapiens
tagtcctcacaactgcaaaagcaattgatttccttttctttttctcttagattttgaacacgttgtttcatatgctgttaatgaccgtaaatagcttccctcaaataatgtcagagtctagg

SEQ ID NO: 385498 - DNA, 122 bp, Homo sapiens
ccacccgagagcgccgggaccctgtcccgcgctgcctcccaagccggatggggttgagcgcgcccaccccagtcccaggagctcaggccccgccttgggggaggagccgagaggcggcgcgg

SEQ ID NO: 385499 - DNA, 122 bp, Homo sapiens
cagcgggccagcacccccagccgcatctctgcacagccgtgctgcacaccttctccgtcacgtgttggaggtgggtctcagcaccagcacatccacattgatagcttaaaatgggacttttc

SEQ ID NO: 385500 - DNA, 122 bp, Homo sapiens
cctcccatgggccacgcgctggggattcaaggtggctgggacattcccctgctctagaggcgctcgcaagttagcggggacaccgttaccgcaattacaacacaatgtagcaagtgcttcta

SEQ ID NO: 385501 - DNA, 122 bp, Homo sapiens
agcgcctccctgttaccggccggctgcgccgctcagccgggcctgccacctgagttttagcgggagcagtcatgtcgcctaccgtattgcgacttgcagacaggcagggagggagctgccgg

SEQ ID NO: 385502 - DNA, 122 bp, Homo sapiens
cagagagagagaagagaaggggggtatgaagtagtttatattcactgccttcctttaaaacgtcctaccagctggacttggagcctgacaggtcccgggtcccaggtcccaggcagccccgg

SEQ ID NO: 385503 - DNA, 122 bp, Homo sapiens
gcctgccgacgtgtctgggctgggtgtccgcagagggtgtgcgcaccgagagcccaacgccgccccacccccccgctcccccgccgtcccctcgggcccacgacttggctccaaacttttct

SEQ ID NO: 385504 - DNA, 122 bp, Homo sapiens
cttcctccacagagggctgttcatgtgattccctgcatttggaattgcatttcttactctcgcttcaggtaccctctaccaaaatgggatttggtcagtcacacttccagttatgcattccc

SEQ ID NO: 385505 - DNA, 122 bp, Homo sapiens
ccatgcatgtctgtatttcctttctcctgctgccttgaaacttttgcctttaaataaaaccgcagatgagtatactctatggcaagtacttttcaaaatacccaaactggggaacactatac

SEQ ID NO: 385506 - DNA, 122 bp, Homo sapiens
gccttgtcttcccaaagtactgggattacagctgtgagccactgtgcccagtccccaattcgtttttgactggatagttggatcaataccattaacagactgagaccaagtaacaagaaaga

SEQ ID NO: 385507 - DNA, 122 bp, Homo sapiens
attttcaattatttagtgagagaagagttagagcaaaagacagtggtaaatgttttattccgtctccatgaggaattgaaggagttggtctccacctagagatacatttgatttacagctta

SEQ ID NO: 385508 - DNA, 122 bp, Homo sapiens
gacttctgtgctctcctttttccgttggcaaccccatctccaggctggcaggatcagagtcggtgcctcccacctaacactgacaattgggcattgccatggctgagggcaccctaagatat

SEQ ID NO: 385509 - DNA, 122 bp, Homo sapiens
ccttttgcctaattgtccctagtctccctatggggacaggaggccttcgctctcctcagccgctgtctccgggtggctgtgaagatccaaagagataatccccggagggcgaagttctttca

SEQ ID NO: 385510 - DNA, 122 bp, Homo sapiens
ctgaggcgcgcgctgagaagttgggctgatttggaactgctgcgctagttcggcctctgccgctggggtgtatacgtttatacgccgtacgctccagggtagtcaggaatgtcgcggggctc

SEQ ID NO: 385511 - DNA, 122 bp, Homo sapiens
ccgccgccgccgccgccgccgcccgaacccgcgccgagcgtgcgcctcgccctcctcccgcgcccgctctgctctaggatgctgcggcaggttctgcacaggggcttgaggacgtgtttctc

SEQ ID NO: 385512 - DNA, 122 bp, Homo sapiens
gaaaattcaaccagtataatttgggtgggggggaggtgcatacttaatattaaaagcactcgcttatgatcttaatgagttcattaaaggaaagttattaagtaatattaccatagtaaaag

SEQ ID NO: 385513 - DNA, 122 bp, Homo sapiens
gtggtggtggtgggggggaccacgcaataagccagggttcctgctttccagctcaaggaccgccaccaccccacgcgccttaaatttttttttttttttttttacccttttggtctctcctc

SEQ ID NO: 385514 - DNA, 122 bp, Homo sapiens
cgacagcagagcccgcaagctctccacagatctgaagcggtgcacctactatgagacgtgcgcgacctacgggctcaatgtggagcgtgtcttccaggacggtaactcgggtgccgggtggg

SEQ ID NO: 385515 - DNA, 122 bp, Homo sapiens
gtgtctgagcacctccagcagatgtcactctgagtgtgggtgttggtgacatgcattgcacgggcctgtctccctgtttgtgtaaacatactagagtatactgcggcgtgttttctgtctac

SEQ ID NO: 385516 - DNA, 122 bp, Homo sapiens
tcccctactttgaccctctcatagagatcccaggtcccagactgcttggctgctggtcaccgatagggtctttcctcaaaaacctggagaacagacgcgcccagagacaggccgaaggcagc

SEQ ID NO: 385517 - DNA, 122 bp, Homo sapiens
ctggtccaggctttgtagaccgtgcaggcggctgcatccccgacctgacccaggcctgctcgctctggtgtgcaccgacctgccagctttgtggcactttgtggcatggggctcaggccgat

SEQ ID NO: 385518 - DNA, 122 bp, Homo sapiens
gcacccttgccctgccctgccctgccctgcccatgctgtctccttgcttcccgctcagctcgctcagaagggcccctcccagacagcggccgcgtcagcttcctgggcctggacctggatgc

SEQ ID NO: 385519 - DNA, 122 bp, Homo sapiens
cacaggctggcgttgaagccctggggtggactcacgtccaggggagggcggtgcttcacacgtcccaggcactgtcttgtgtggccccaagtgctgtctgaatctctcctgcgtcttgggcc

SEQ ID NO: 385520 - DNA, 122 bp, Homo sapiens
ccgggagtctctctctttgtagtctttgcccagggccttgccaggcaaagggtagcccgacgaccagcagcctccgctacttctgggcgctcgctagaaatacagattctcgggccccaccc

SEQ ID NO: 385521 - DNA, 122 bp, Homo sapiens
tctccatcttccgcaccactgaggccgcagtctcttctaacggggcacgctcgtcccccgcgctgtttcccgaatgccaccagggggcgccccttgctcgctgaagccgccgggctaataac

SEQ ID NO: 385522 - DNA, 122 bp, Homo sapiens
gttggaggtcgctgtgagacggacaggccctggagcagtcgcccatctgcgagggagacacgtgcgcacagacaccgagcgcacacacggcggccgccactgactggggcccccaggcctgg

SEQ ID NO: 385523 - DNA, 122 bp, Homo sapiens
ccgcctgcagggcagggagccgctgaactgtgttacgtacaccggagcccgtgatggtcccgccggatgcctgacatgcagtgctgcttccctggtctctaggtggctcgcacctgccacac

SEQ ID NO: 385524 - DNA, 122 bp, Homo sapiens
ctccaccccctggcacgttcagatagggatcgtagaaggatcttcctgggttcggtggtgcgaagattgcacaccggtaccggggcttttaagcagcggaaaacctggaggagcccagggag

SEQ ID NO: 385525 - DNA, 122 bp, Homo sapiens
gaggcggataagaaagccgctgaggacaagtgcaagcaggtgaggtgccctccgctgggccgctccgggctgctgggagtcctctctgtgcggaaggccggggtctggagcccagttggggg

SEQ ID NO: 385526 - DNA, 122 bp, Homo sapiens
acgatcaccattactcagtgtttgtggagctgcctcctcaagccacgcatggaatgctggcgagggagggcaatgcagctctgggcaatggcttgggaaaagtcttggcaatgtaaacaact

SEQ ID NO: 385527 - DNA, 122 bp, Homo sapiens
ctgcgtgtgaacccgcggggccgggcggaccggcgccccgagccagacggcgtccccaggcgggggccgggtcctcgcagaacagctgatcgggacccttattttggccacagccacagttg

SEQ ID NO: 385528 - DNA, 122 bp, Homo sapiens
ctgcatctagacatattctagacatctagacatattctagatgtctcgatagaagctgtgcgctaacagcggcccacacgcgcctgctcacttcaggggtcctgtttcagttccttcagggt

SEQ ID NO: 385529 - DNA, 122 bp, Homo sapiens
gtaccaagcaccctctaagaaggacgaacacagctcctgccctctcattatatttggggccgacaaagtggcaggaaacagccaaacaaatcaagcgtgaagatggtttcagcagagccgac

SEQ ID NO: 385530 - DNA, 122 bp, Homo sapiens
agcaactgcgagttcccagagacagatccgggttccagccccagctcaccatgcactgggcgtgccacccagggagtcagccccactgcagcccccgctgcggggcgtccggagaacgcgcc

SEQ ID NO: 385531 - DNA, 122 bp, Homo sapiens
ggtttcccggaaggagcatgtctgcgcccgcgatccgaccggaagttgcacgctgagccgcggacaccatgcagtcggatgatgtgagtctcctccggttgttcttacacccggggtttgcg

SEQ ID NO: 385532 - DNA, 122 bp, Homo sapiens
tacaaggggagaatcagtgcaatagcgaccatctattaacagtgcaagaaagcctgttcccgcaccttaacatgcatgttaggtggttttaatgctcaaaaaatttaagaaatactgatgta

SEQ ID NO: 385533 - DNA, 122 bp, Homo sapiens
gacccccggggtgcgggggaccaagctcaaaagcacctccccagtgccgctggtgtcctgcgagtcctcagtgctttcatcgtgacattttcatgcgaatgttgctgtctgttctattccat

SEQ ID NO: 385534 - DNA, 122 bp, Homo sapiens
caaagccagcggagctgccctctggtgcgttcagcagggagccagcgccccagttccagccgagtaggtcggcgtacggtccatcatcagcagctcgtctccacggcccaaccacaccaccg

SEQ ID NO: 385535 - DNA, 122 bp, Homo sapiens
acgccggcaatcccagctactcgggaggctgaggcaggataatcgcttgaacccgggaggcggaagttatggtaagccaagatcgctccattgcactgcagcctggatgaaatttcacctgg

SEQ ID NO: 385536 - DNA, 122 bp, Homo sapiens
actggcaggggcttgagggccgtggggtccaaggctcacccgtgacttctcctccagccgcgtcatcatgacgatggtcgccgaccgctgctcccacaccatacgccagaagtccccaaagg

SEQ ID NO: 385537 - DNA, 122 bp, Homo sapiens
cctgtggaacttgcgcaggtgcgagtggccagcagaggtcacgaataaactgcatctctgcgcctggctctctaccacctctggtctttgtttcctggagtttgggggtgatttgaggccac

SEQ ID NO: 385538 - DNA, 122 bp, Homo sapiens
tgtggctgctggcaccaagcaagagcaaaagtgtgctttagtttaagatgctgtacttttcgctcaaggaaaagggggaaaaatcagcttgaaacaatacattgcattttgctggacagcag

SEQ ID NO: 385539 - DNA, 122 bp, Homo sapiens
atctgccagatgtgctctcctggcccatgaaatcaagcgtgggtgagacctggtgcagaacgggaaggcgacccatacttggtttcagaggctgtgagaataactgcaatttagagggaata

SEQ ID NO: 385540 - DNA, 122 bp, Homo sapiens
caccgacggctgccgccccgccccacggcacggccgcccacagtggccaaagactcagcgcgccccacagccgggccatggcggcccccttaacagtgacccggcccgccccttccggccgc

SEQ ID NO: 385541 - DNA, 122 bp, Homo sapiens
aatgaaaccctgtctgttccacaaaaaagaaaaagaaagaaaaaaaggaaacagtactgccgcccctggtctgcttcgcatgccaattatccccataccaagtgtgagtcattgtgaactgg

SEQ ID NO: 385542 - DNA, 122 bp, Homo sapiens
gccttactgctccctgaccaagagcagacgagagaaggaacggcgctacacaaattcctccgcagacaatgaggagtgccgggtacccacacagaagtcctacagttccagcgagacattga

SEQ ID NO: 385543 - DNA, 122 bp, Homo sapiens
gcggcctggggtgacgcggatggtggcctggggtgacgcggatggtggcctggggtgacgcgcacctgtctggtggatggcggcctggggtgacgcgcacctgtcgggcagatggtggcctg

SEQ ID NO: 385544 - DNA, 122 bp, Homo sapiens
gtgactgtccaagcactcctctccaacccagttctcacttttatctctccctgctcccagcgcaccccaggctgccgtggaaaaattaagtgagaaactgagaatgatagtgagagaaatct

SEQ ID NO: 385545 - DNA, 122 bp, Homo sapiens
gcacccccggcctcagccagaccgtccgctgcacacctgcatggcactgactgaacatgacgtgtccgatcaacacggggccatgcctccgagaacgcgactgcagctctccctgcacctct

SEQ ID NO: 385546 - DNA, 122 bp, Homo sapiens
ctacctgatggagaacgtattatgctcacccccataattcaagtgaggaaactgaggctccggaaagttaactgatttgcctgcattcacacagtgagtcggggaagaggttcaggatgggt

SEQ ID NO: 385547 - DNA, 122 bp, Homo sapiens
ctaaaagcattcgcagcaggggtgtgggcatggtgaaccctcagtcccccagagtggccacgctaaagccgacattctcacattataaagacctcccaatccctgctttaatttctccgatc

SEQ ID NO: 385548 - DNA, 122 bp, Homo sapiens
cattctggcgggctctacaccagtcagcggcatgaagcggtcccgcggagcttggcttcccggcttcctagggggatacggggcattactagtctttggcacctcacactctccactcccct

SEQ ID NO: 385549 - DNA, 122 bp, Homo sapiens
caggtgtgagctaccacacccagctgcacccatacagttttttaagtcaacaaggagtctcgtttgcctcctcttgttaggaaaagaaatgtacccacaccctcaataccacaggctgtgtc

SEQ ID NO: 385550 - DNA, 122 bp, Homo sapiens
aaagtgatggcctaggcgggagggacaattacaggcctgcgctccgtcccggggacagaacgccgtcccctgccatccacggctgagtgcccggcgtacacgctgcagagccctcactttgt

SEQ ID NO: 385551 - DNA, 122 bp, Homo sapiens
gccagacgctgcccgtttaagcgcagagggccgcgggtcacgtggtgggcggggtgggggcgtggcaccaggaagcggcgtccgcgccgggcccagagccgcagccgcagccgccgctacag

SEQ ID NO: 385552 - DNA, 122 bp, Homo sapiens
tatacttggtaaggggcctgcacgggcatagccccccccagcaagactccgcacacaccccggccacccagtcactggccaatgggctcctaggaagatcaaatgtcactataacacgaggg

SEQ ID NO: 385553 - DNA, 122 bp, Homo sapiens
gtagtgagctgtgattgtgccactgcactccaacctgggcgacagagcgagaccctgtctcgaaaataaataaataagacctgagaacccagtatgggaatggccctgagccgtggctaggg

SEQ ID NO: 385554 - DNA, 122 bp, Homo sapiens
gaacatgtcctgggacactcccccggaacgattgttcaagtcctggagtacgtttcggaacgctgctcccggaacaccgctcctggagcgattgtttcaatgttgcttgctcggaatggccc

SEQ ID NO: 385555 - DNA, 122 bp, Homo sapiens
tgctctgctctgctccggcctgggcagttctgatcggttttcaaggacattctaagtgttcgccataaaccctgggcccaggcgggaaaggggggaggatgttgattgttggaacacacacc

SEQ ID NO: 385556 - DNA, 122 bp, Homo sapiens
tgctcctggggctgaggcagaagaaccacttgaacccgggaggcagaggttgcaatgaaccgagatcgcgccgctgcactccatcctggcaacagagcgagactctgtctcaaaaaaaaaaa

SEQ ID NO: 385557 - DNA, 122 bp, Homo sapiens
agctacagtcttaggtagcatgcaaactccagtctgactccaatcccttatatcttccatcgtaaagtattattgccaactttgtttctttccaatttttgtatgttctgcagtttatgtaa

SEQ ID NO: 385558 - DNA, 122 bp, Homo sapiens
gacagcacgtggaggttctgacacccacttccggaggaaagggcgttgctgcacgccccgcgggttgccaaggtgattcaattcgcttcccacaaagaggtccggctcctccacttccgtta

SEQ ID NO: 385559 - DNA, 122 bp, Homo sapiens
gccccgccccagagccgcttagccccgccccagagccgcttagccccgccccggtgcggccgcactcctatcagaggccgccacccgccccgccaccgcgcctcctccgcgggcccgcgccg

SEQ ID NO: 385560 - DNA, 122 bp, Homo sapiens
caattcgtacgtggagaagtgggaatgcaaaagtactttgacctttaaccttcggtccggcgcggtggagggaaacgcctccgtctctatataaggaattttccggtctcttcgggtccttt

SEQ ID NO: 385561 - DNA, 122 bp, Homo sapiens
tggcaggcacattttggagaaactagtaaaagggctcttcgggtttgggggcgggaagaccgaggacttataagatgttacttaaaagggcttctaacggtccgagaaccgggcagggagag

SEQ ID NO: 385562 - DNA, 122 bp, Homo sapiens
ctaatgacggcagaaaggggtcttgggggacgggggtggggttcacagcagtggcctgggcgtgatgaccctggcgaaggacggggtcgcagagcccttaaatcctggaccagtggctgatt

SEQ ID NO: 385563 - DNA, 122 bp, Homo sapiens
gggtgaggcctgcagataaaccacaggatggcagaatgctcagttagcaccaaccaaaggcgactaccctacctccactattatcgttctcggttgaacttctccccctgccccgcaatatt

SEQ ID NO: 385564 - DNA, 122 bp, Homo sapiens
ggaagcccttggcaggcccgggagggccggcaccccagcccagtcaggactccgggaggtcgaagaccccagcccaggcaggactccgggagggccaagagcccagcccaggcaggaccccg

SEQ ID NO: 385565 - DNA, 122 bp, Homo sapiens
tcctctgcacctgaaccctcctagtctttattctgggagcagcgcgggaggcagtggagacgtggaagcaggctccggctgctgggcctgcatgaccggtttccctgcagaagattctgcgc

SEQ ID NO: 385566 - DNA, 122 bp, Homo sapiens
tttctttccaaaatggagagaactaaagaagagtcccaggtaagactgatcagtctacatcgaaggtgctaatccacttaaggtgggctgggtaactggaaggattagtgcacagttgctat

SEQ ID NO: 385567 - DNA, 122 bp, Homo sapiens
tctacggtgtgacgtacgcgtcagggccacgcggaggtgacgggaacgggaatgagcatgcgcattctgacaaagcgaagccaaaggtggccattttgactaatgtcaacggtttttcggtt

SEQ ID NO: 385568 - DNA, 122 bp, Homo sapiens
gccggcggggcggcgtagggagattctgcgcgaaactaagcgtcaggtgctggaagaaagcgctgcgcaccggctaccccgcagttcagggaaagggcggccgccggacggtcgcagtgcaa

SEQ ID NO: 385569 - DNA, 122 bp, Homo sapiens
ttccgcacgctgccacctctgattggctgttgctcaagtcgtgggggcgggaccaatgggcgcccttagatgctgggcatcccagcatgcgttgcgagatcccaggtcccagcaagcgcgat

SEQ ID NO: 385570 - DNA, 122 bp, Homo sapiens
aatgccctttcgtgatttatttccccttttataggtatttttaaacgttattttaaattacgtgttgacagtattcccctccagacgaatttagtagggcccattgtccttacgactacact

SEQ ID NO: 385571 - DNA, 122 bp, Homo sapiens
ctgaatcatcactagctatggcattaaaaggcctctcttctcatctggtgccaaaggttccgttgcagctttttacaaccatccggtgtggtttggaggatttgttttttttttttcccaac

SEQ ID NO: 385572 - DNA, 122 bp, Homo sapiens
caaggcaaaaatgaagtgaggttgggtggtgtgaacagccttccccttccatgtcagccacgtctatagagaagctcacgcggccctttccctttgcacttctctcctctgtagcaggccgc

SEQ ID NO: 385573 - DNA, 122 bp, Homo sapiens
cctgcttctgtctcattgtattaaatgctgtatccagaaaacattttcttaatatttaaacgtagcatcttacaaatggatggcatcacagcagatccctgaggatgctataaggctcagcc

SEQ ID NO: 385574 - DNA, 122 bp, Homo sapiens
cccaggcgatcctcctaccttggcctcccaaagtgttgggattacaggtgtgagccaccacgtttgacctagagacggggttcttgatcacagtgtgggtgtggtaccaagggaactcagct

SEQ ID NO: 385575 - DNA, 122 bp, Homo sapiens
ggttcccgccgcactcgcgcagacctagcgcgtccaggtgggaggttagtgtggcccgggcgtccgctcctcagcggatgtggcagccccgagccatggctctcgccgtccgagtcgtttat

SEQ ID NO: 385576 - DNA, 122 bp, Homo sapiens
ttgccttttctcccggcagcagggagcggactctcctctcccgggccgccgtgggggtcgcgctcaccctccagcagctccacgtggccccagtccttcctgcggtcttggtcttgctcctg

SEQ ID NO: 385577 - DNA, 122 bp, Homo sapiens
aggcaggagggaggtggccagcgtgggggagggtgccaggcctggaggaggaaatgcctccgggaaatggaaatggcttagaaacagaggctctgtcccatcccatcccatcccggggatcc

SEQ ID NO: 385578 - DNA, 122 bp, Homo sapiens
tctcctgggggcggcggcagcagcaccctcgtcctggctgtggtccacggtgcctggctgcgactaaggctgcagaatgttgagttgctgttctgcggttttgccacattcatcaaatgtgg

SEQ ID NO: 385579 - DNA, 122 bp, Homo sapiens
ttggttgggttgagccaggagcacccacaagtcatcaggggctgtggatttgttgcttgccgcgtaccgctgaagttcaaggtagctaaagggtggagtccatcagtgggtggccgttctcg

SEQ ID NO: 385580 - DNA, 122 bp, Homo sapiens
tgcaatcgtagaatcgcaaggtctgagacttgtgaaaacttcggttcatggtttcggccccggtcagcctcgccgtcgccctcgctcctcaggggccgcagaaagactcccgggggcggcgc

SEQ ID NO: 385581 - DNA, 122 bp, Homo sapiens
tggtctctgggaacaggccatgagcaggcccatggggagtggggcgcgggcttacccgggcgggagtggggagtggggagcggggcgcgggcttacccgggcgggagtggggagcggggcgc

SEQ ID NO: 385582 - DNA, 122 bp, Homo sapiens
agaatgcagcactgtttattgttggcatctgtgtcattgatgtggttatttcgtttctaacgtcttgccacatgctggctgctctcctgaggagcggcattgcaggctttggttacctgttt

SEQ ID NO: 385583 - DNA, 122 bp, Homo sapiens
tgcctaccgtcatgtttcgaggtgcgtccaccccgttgcctggatcagcatccatcccctcgctactgggtagcccgccatggtgtggctgctccccaatttgttgtccacatcccgtgatt

SEQ ID NO: 385584 - DNA, 122 bp, Homo sapiens
gtattacccaatagtctcgaaacatttaatttaatatggagtgtagcaggttctgataggcgttgggaacctagctaatgatttatgaggtcaccacttagcacccctagtaagaagaaggc

SEQ ID NO: 385585 - DNA, 122 bp, Homo sapiens
ggtcaaatgcccttcggtgggtcagcacctccggcccatcatgctgtgctggtcagtccccgtgggcgtattcttacccgttcagcctggcagctcttccgggtcccacaagagtctctgag

SEQ ID NO: 385586 - DNA, 122 bp, Homo sapiens
gcttaaaggaatacattactaaaggagttgtgagtgccacattacctatttttagataggcgaatcttaattggaagcataacaagtagaaggtagaggaagaatggaagggaaggttatgc

SEQ ID NO: 385587 - DNA, 122 bp, Homo sapiens
aggttggccaaggtcacagaagtcatgggaaggggaagggctgggtctgctgagctgtgccgctgccagacagcacctccctacccggagccgggcttctgaagggaggccctgagagtgca

SEQ ID NO: 385588 - DNA, 122 bp, Homo sapiens
gctccgcacctcctcccccgaccaacgattggccacctgggaggactggagtaaggggtgcgagcggagggatttccctcaaagcccagggtccggggacctggaaagtagaagtggaggga

SEQ ID NO: 385589 - DNA, 122 bp, Homo sapiens
ctttggcccaaccccctgctgggggcccatatccttttgatatagggtcttgctccctgacgaatgcaaggaggagaatacttatgagcagggggcctctttttcccctaggactgattcta

SEQ ID NO: 385590 - DNA, 122 bp, Homo sapiens
agtgccggtgccctcactgcgaccgaggcgccctggagtcgtggcggaggacgtttcctgcgttaagacaggtgtctgtgctgcgctcaaagaaaatgtaccccctaagtttgtgtgtgtgt

SEQ ID NO: 385591 - DNA, 122 bp, Homo sapiens
cagccacctagcacctacggcgactcagagaggacatgctttctttgtgcagcgcttgcgcgctgcaagtatatcctattttcttcctcttctcttgtccagggtttgattaggccgcagag

SEQ ID NO: 385592 - DNA, 122 bp, Homo sapiens
cccgccgcggcttttcgcccctcgctgtcgcgactttttgcaccaccccccccgccgccgcgactttttgcccaccgcggctttttgcacccccgccgccccgggtttttgccccccccccc

SEQ ID NO: 385593 - DNA, 122 bp, Homo sapiens
ggggccagggctttccgggcttaggtgaggccgccgtgggccccatcttccggcggtcgccggagtttgtggtgattgttgctgccgccgccacccccccggctgccatctcctcctcctgg

SEQ ID NO: 385594 - DNA, 122 bp, Homo sapiens
cctgcccccgccgcccgccgcccgccgcccgcctccgctgctaaacccgcggacaaccgccgggacgaccacccagagccaccagagccccctgacacccgccccgaggcaccggtaaccca

SEQ ID NO: 385595 - DNA, 122 bp, Homo sapiens
tagatggggtaagttcctgcagctatctgaccacatttgtctggtccctctgagaatccacgttttctagcccgagaaggggcaggcggccctcatggcgcctccttcggcggtttcctggc

SEQ ID NO: 385596 - DNA, 122 bp, Homo sapiens
ccgccgtgggaatggaaacatctgccccacgtgccggaagccaagtggtggcgacaactgcgcgccactccgcggcctaccgcgcagatcctctacgtgtgtcctcgcgagacaagctcacc

SEQ ID NO: 385597 - DNA, 122 bp, Homo sapiens
ggtggcactagcgttaagcctactgcctttaaaaaattgtgccagcatccattctcagtccgcattatattaatagttagagcactttacaatccccgctccccacttcccaccacagcccc

SEQ ID NO: 385598 - DNA, 122 bp, Homo sapiens
gttcttactcctatttataaaggcaaagtccttctgattggtccgaatcttccagtttcgcgccctgaattatgtagtgtgataggacttgtgatcagctactaggtctcattttagaaaat

SEQ ID NO: 385599 - DNA, 122 bp, Homo sapiens
gctttgacttcagttagtaacatcaattctaagagaactgagacaaactcttctatgttccgcaaaggaatggagaaaaaagcctgccattcgcaagcagctgtgggcaaaaccagcgcaga

SEQ ID NO: 385600 - DNA, 122 bp, Homo sapiens
gggtagggagggggatggaccccgcagccaggacacagaccctgagtggttcctctgctccgtctagccaaagcctctccatgaccccgagtgctcccctgccatctcccccaacccacctg

SEQ ID NO: 385601 - DNA, 122 bp, Homo sapiens
cccagccagcggaaggcgcctatgagccctgagcctgtggtcctcagcttgggcggccagcggcctctagcaggcccccccctcgaccccacccccgtcaggaagtgccgaaagaggaagag

SEQ ID NO: 385602 - DNA, 122 bp, Homo sapiens
caaggcctccttacccaacctggcaataccccaggcatcagatcaccctgccaagtccatcgtgggaacaggaggttgccaaccagaaaacccaagacatgatgaagggagtagggaatgag

SEQ ID NO: 385603 - DNA, 122 bp, Homo sapiens
tggtcgcctgcagggatgggggacgagcggccccactactacgggaaacacggtaggcagcgacccccgcccgtagccccgggccgacccctcggtccctcggagggggccttgagagaaca

SEQ ID NO: 385604 - DNA, 122 bp, Homo sapiens
gtctgtttgggggtctgaccagtgaggccgcctggcactcagaagacgtctcccccattccggagaatcctgaccttcctgtatttgggaatggctctgggctgctctccttctggtggctg

SEQ ID NO: 385605 - DNA, 122 bp, Homo sapiens
agagtgactggcggtgccctggagacccaaactgaataaagtaagcattattttcaaattcgccaagaccttgaaggcggcgccaacgggagccgtcccccgggtcccacgcagcgcagagc

SEQ ID NO: 385606 - DNA, 122 bp, Homo sapiens
cagggtcggcccaggtaagagttgctggtttggggcccgatgccggacagacctgcggcgcgcaaagcgcggagctttgttacctacgccgacccgacgttcccggcttccctcctccgagt

SEQ ID NO: 385607 - DNA, 122 bp, Homo sapiens
ggagcttacagtctagtaggggaaatggatattaatcaaataatcacacagatgtaaaaccgcatctggtaagtagtatgaaggaaaaatacctagtgctctgattgtcagtagtggaggat

SEQ ID NO: 385608 - DNA, 122 bp, Homo sapiens
gtttttcatgtttttctccagggtggaagaccaacacacacctccccagacagcccagcacgccagaaacggccacccgcaggccctgccagccgctcacgaggctgtctacagggagggca

SEQ ID NO: 385609 - DNA, 122 bp, Homo sapiens
cagacagagggccgcagcacgtactgtgcgctcttgcatgaaattcccacccacagaggacgagctcgccaggcagctgtcaaggagatgccctcctaatggccaccgtggcagtgcagcct

SEQ ID NO: 385610 - DNA, 122 bp, Homo sapiens
atttcaatttgatcagattctacctggtcttttctgactttcctttatctatgcaatgatcgtcatcaaatctgaccctacctcatgtcagcctgaacagagacggataaagtcagaattaa

SEQ ID NO: 385611 - DNA, 122 bp, Homo sapiens
aactggagtaatagtaataatactaacaatgcttagtatatgaccagccctattctaattcgtttgtacataatggctgacataatcctcacactagccctacatattattctcatatcatt

SEQ ID NO: 385612 - DNA, 122 bp, Homo sapiens
gatccccgggctctgggcggtgtgggcgctagtgaagccccacgcagccgccctcctccccggtcactgacctggtcctgcaggctcttcacggtgtaccccagcaccaaggtctacttccc

SEQ ID NO: 385613 - DNA, 122 bp, Homo sapiens
ttattggttgggctgagcagtcagaagacctggtcgtcgtcttgactttggcaaatgagccggagccccttgggcaggtcacacaacctgtcccagcgagggacaccgagtggcccttcatg

SEQ ID NO: 385614 - DNA, 122 bp, Homo sapiens
tgacctcgtgatccacccgcctcagcctcccaaagtgctggaattacaggcgtgagccaccgcgcccggcacacccctggttttaaaaataaagtttcgagccgagagtggtggcgcccgtg

SEQ ID NO: 385615 - DNA, 122 bp, Homo sapiens
tagctctgccaccaacatgttcagcggcttggagcatgtcacttggtgtcaccacgcctccgttttctctctgtaaaacaatccaggtagtacggtatttcagtgttgcaaagatccttaga

SEQ ID NO: 385616 - DNA, 122 bp, Homo sapiens
tagttttctgattctgtaattatccagggaacatcatttaataggttggaatcctgaccacgaccctcggggcctcagtttgctccctgtaaatagtagtgtctgctccaaaacgttgctta

SEQ ID NO: 385617 - DNA, 122 bp, Homo sapiens
ggattgcccaaagccacaaagcctcagtgtagtctgtgtctaaacatgtgcagagttctgcggatctaatctctcattctatcccctcaacaatcctgagatgttaagcaacctgtcagacg

SEQ ID NO: 385618 - DNA, 122 bp, Homo sapiens
aaaatcagcgtctggatttttccaggccgatattttggaaatttcgactgaaatggagcccgccatccccagccttgacgggaactcattgagatagtaatcaaagaagatggccagttcac

SEQ ID NO: 385619 - DNA, 122 bp, Homo sapiens
gctaagtgaacacacaacaagtactttattagggaatagacttggcactgcttctccaggcgtgcacctgacactttaatctcaatctgtctctctctcaatcaatcaatcaatctctctcc

SEQ ID NO: 385620 - DNA, 122 bp, Homo sapiens
cggtctcagttgaccctctgcggccccgccattctccttcccggctccctcttgtgccgtcgcagattcctgggcgcagcacgaggctacacctggtcctggatcctctctatttggccaga

SEQ ID NO: 385621 - DNA, 122 bp, Homo sapiens
cgtttctaatttggagcaaatctaaaaggtgctgagggattggacagctctgactttcctcgagactatggatatagtccttctcagattagctggaaatggggacagagttctcatttatc

SEQ ID NO: 385622 - DNA, 122 bp, Homo sapiens
ccacgtgttctgtgccagtgcggccgcacctgtgattaaggcctacagcccggagctgatcgtccacccagttctgtgagtcgctctgcgccggcttctcgtaggttctctttccctcctgc

SEQ ID NO: 385623 - DNA, 122 bp, Homo sapiens
tgaagactaaaactatggccatgaccgctcatgttctttgaggtttccacgcccactttccgtatgaattggggttttaagtcccggtgtcagtgccaatcttaacttagaaattacattct

SEQ ID NO: 385624 - DNA, 122 bp, Homo sapiens
ctaattaaggccaattgtagtggctcgcgcctacaatcccagtacgttgggtggccgaggcgggcagatcgctggagtgcaaggagttcaagaccagcctggtcaacatgatgaaactctgt

SEQ ID NO: 385625 - DNA, 122 bp, Homo sapiens
gaaaggttatttgccagaaatgtcttggctttttcatttattctgtcttacctagcccttcgccgccacctccagtcgttggcctcttaccaccttcaaatgccaccttttccggaagatgt

SEQ ID NO: 385626 - DNA, 122 bp, Homo sapiens
cgcagtttgggctctggacgccacactatctgatcctgctggggcacacggtcatcatctcgcgagggaagcccgtggacgcacactacctggggctactgcactttgtgaaggatttctcc

SEQ ID NO: 385627 - DNA, 122 bp, Homo sapiens
agttatgctgttagtcataaggttctttgtctctgactcaggaatcttgggtcttccacccgtaatggacaaagttattaacctgtaagcagggtaatcaaatcctgataccaggtaaggta

SEQ ID NO: 385628 - DNA, 122 bp, Homo sapiens
accccacaggtacacacactccacacacacaccccacagtcgcacacagacacagaggcacgcactctcttagaagaagctgctaaaacacagctctattatcagtgcagatttcaacgctt

SEQ ID NO: 385629 - DNA, 122 bp, Homo sapiens
cgagacggcttcggcggctccgggtccccagaccccgctcgccgctcctgattggctgagcgcctgtcagtagtaaagggtatcagatggcaaagttgggaccttcataaaggcgtggtggc

SEQ ID NO: 385630 - DNA, 122 bp, Homo sapiens
ggcaggggcgggagtggtggaggcgccggcggttggcactgacaggggcggtgagcgagccgctccggtctccgggcgaggcttggccttccgagcagagacggcgggaagcggcggcggca

SEQ ID NO: 385631 - DNA, 122 bp, Homo sapiens
ctgggttcccagaagtttctagaatgaatacggagggctacatatttcacatgcgcggggcggggaaactgctgggcgattacagattcccgatggagctggccccttcgtggcgaccacaa

SEQ ID NO: 385632 - DNA, 122 bp, Homo sapiens
gggcaggaccggccgggtggatttggctgctcgtgcaggagctctgaaggggtccgctggcgggggaccctcggacttacccgagctggcactgcggacccctgcgaggttcatagaagcac

SEQ ID NO: 385633 - DNA, 122 bp, Homo sapiens
agtagctgtataatattggataagtgaattttcacactttgaaaaccagcttcctccatccgcaaaatcgagccaataataatccctaactcatgaggctgtgagcagattaaaggagatag

SEQ ID NO: 385634 - DNA, 122 bp, Homo sapiens
gactgaactcagtcacctaatttgacttgtcaaagtggctcgaggatctcagggggtcagcgtgtaccctctctttatttcctggttacctgtgggcagtcaaggctgctttcaggatcagg

SEQ ID NO: 385635 - DNA, 122 bp, Homo sapiens
gtccagcgcacctctgcccagggccggcatagctcacaggtcagcaccacacgctccaggcgcacggctgccacatacaccttgccgctgggatacacgatccacgaggagacgtctggagg

SEQ ID NO: 385636 - DNA, 122 bp, Homo sapiens
attaaagaaaacctgtgcctgagttggctgagtaccttcttgcagagtcctctgtcctcgcggagtgggagggtcacactgggagagactaataagggcagagatgcgtcccccttccccac

SEQ ID NO: 385637 - DNA, 122 bp, Homo sapiens
acgctgctgctggtcctcgctgccatcaagggagtgttctttttgactgcctgaactgaccgaggcggccaccctttaagaagagcccttgattcggtcgagtcggaggagaaaagacccta

SEQ ID NO: 385638 - DNA, 122 bp, Homo sapiens
gcttttcctgctgcactggagcgggaggatgtggggagcagcaggcaggagggaaagctgcgggacagggtctgccaggcttcccagccaggccatgagctcttcccttgaggcccacgtcc

SEQ ID NO: 385639 - DNA, 122 bp, Homo sapiens
actttacaactgagggccagcccagtctggaagcatctcttattaatgttacaaggaaaccgctacctcagcaaacaaaaggaatggaggaggagacttacaacaaacgccatttaaaaaaa

SEQ ID NO: 385640 - DNA, 122 bp, Homo sapiens
tactcacaaattaatagcaccgccattggcaggaaacatggagccgccgtcaggccttggcgtagctggatggcggtgtcccggagaagttgcagggatgtggctgagcccagctcccagcc

SEQ ID NO: 385641 - DNA, 122 bp, Homo sapiens
attgtatttaactttctattggctcatttagctcttctgttcgccacttcttggctgtttcgaacattaatttacaaaagacagtttttcactaaccatcaaaagaagaaaacttagaatga

SEQ ID NO: 385642 - DNA, 122 bp, Homo sapiens
gccctgccgagggacccggagcgggagccgaggctggagctggagccggcgtcgatactgcgcccccggcaactccagtgcccactgaggccgcaggagatgaagcagcctgggccgagccc

SEQ ID NO: 385643 - DNA, 122 bp, Homo sapiens
ctggccccacactcctcaggtgcagggccgaggaagggaggggtccagctgagctctgagcgtcccaggggatacagcacctgaccaccactcagaaagcccccccaaaaatacaaagacag

SEQ ID NO: 385644 - DNA, 122 bp, Homo sapiens
ggggtatggcaggagcggtagtgataattaaccaccatacattcccagtttcgagccacacgcaacgtgctcggcacttcccgtgccccaaccggacctagtttacgacttcctacgcacag

SEQ ID NO: 385645 - DNA, 122 bp, Homo sapiens
cttaccctgtggggctgggcggccttctccatgaggacggccgtgtggggcctgtgctcccgggactcccggcacatcacgcacagcagcttcccgtcgtcctcacagtagtagtgcagctt

SEQ ID NO: 385646 - DNA, 122 bp, Homo sapiens
ttttttcaaataaataggcttaaaagccaggccctcttattaccagtatataattcctatcgacatggaaaggggtaagcagggttttttgttgttttatttttaaatgaatgatagtttgg

SEQ ID NO: 385647 - DNA, 122 bp, Homo sapiens
tcccctgcgacctaatctcttaagtccgggccgcggtcggcgttcttctctggggctccgcgccccaagcctcggcttcctcatctgccctgagatgggatagtccccacaggtacctttct

SEQ ID NO: 385648 - DNA, 122 bp, Homo sapiens
gcaggagtgaccggaagagtcacatcagacagctgcgtgtggatggaaggagacaacacacggagcacatcacattatgtctgtgccgcttcgtacaggagatgcttcaaccctatgagcca

SEQ ID NO: 385649 - DNA, 122 bp, Homo sapiens
tgtgcttcaactatgaaatccgtgtgttctgctgcaactacggccactgccccagcaccccggccaccagctctacggccacgccctcctcaactccggggacgacctggatcctcacaaag

SEQ ID NO: 385650 - DNA, 122 bp, Homo sapiens
aaaacgcagttttgaatagtattgagtacttacatgtcagttgctgcactgagcacctgccgtgtgagctcatttgaagaatgtgggtatgtggaatgaagagaaagggcgttctagacaga

SEQ ID NO: 385651 - DNA, 122 bp, Homo sapiens
acaaaatgacaacacatttagttatagatcaaattggcttctattcatgattcgtgaatccggacagcctccattctacaaaatggagtgagagctcccaccaggcagtggcagagcagggg

SEQ ID NO: 385652 - DNA, 122 bp, Homo sapiens
atcccatgaatctgtttactagcttggtggtgggtccaacagagcttgttgctccctagccgcttgctcgtgcccttggtggttaccggtagttaagcttagggcgcatagggccctcgtgg

SEQ ID NO: 385653 - DNA, 122 bp, Homo sapiens
agtaatgtcggcagtcatgtacagacttcgtgcaagtcatctgggagaaagatgttgctgcgcaacccaatctgacccgagcattccaggtcaaagagtacctgccgcagtcgtcggaagtg

SEQ ID NO: 385654 - DNA, 122 bp, Homo sapiens
tgtcctccagccattgcagggcctggtccatggcagtcctgttgcgttccaccttctcctcgggcacctggaccccaatgaggggccccaacacctgatgggggcagagagtgggtcagtct

SEQ ID NO: 385655 - DNA, 122 bp, Homo sapiens
tggtatcttaaaaaaccactgtactgcgtggaagtgtgaaaggtgggaagtgagggtgtgcgtcgctgcccctgcagcccagactctggaccttgcattctggttcctgtacactgttgccg

SEQ ID NO: 385656 - DNA, 122 bp, Homo sapiens
cctctagaatgccttttcctgataagcaaaaccccccgagtcgttggctcctccactttccggttttggcagaatccttgatctgagccaggcctcttcccaggggctctggccctcttcac

SEQ ID NO: 385657 - DNA, 122 bp, Homo sapiens
ggctccagttgtcaggttgaaaccacaactcctcccctaagagctgcagaggtgagcccacgacgtgccggccctaggtgttctcatcgttgggttgtcagtgcagcatgcttctggaactt

SEQ ID NO: 385658 - DNA, 122 bp, Homo sapiens
gcaacatgcaccttcccctgtctctaaaaacatgaaaacattttgtcaagatacagcctccgtcagccttagtccctcagtgaaactgatgagtagagtctcctgtcaactcagcctggaca

SEQ ID NO: 385659 - DNA, 122 bp, Homo sapiens
agccggccggcctgggcgccgcgctcccgtccccaccagccgcgtgagtcacggttggagcgaggttttatttttaaaacgacttcaaggggggcatgagcagcctccaacttccctccctg

SEQ ID NO: 385660 - DNA, 122 bp, Homo sapiens
aacacgaggggcgtgcgcagcgaaggcagtggtgggaaccgaggcggatacattcagagacgcgtcgaacaaataaataaggcaagtcaggagggggccgagtcgggtgcaggcaggaggag

SEQ ID NO: 385661 - DNA, 122 bp, Homo sapiens
gagatgaagtgaagacagccgggtgctcagggagcatcttataggtctcagtccttgactcgtaggttgaaagcttaaaagtacagctgttttaaggagtcagcctgagtgtcctgttgcaa

SEQ ID NO: 385662 - DNA, 122 bp, Homo sapiens
ggggccccatcccgggtttctggggtgcccgggcggcctgtgctcgtgagctggggtctccgggcaggcaggggcaggcgggctcccagcgccccaccaggaggctgcactgcgggtgcgcc

SEQ ID NO: 385663 - DNA, 122 bp, Homo sapiens
aaattaccctcaccttctaaacattccttcttattgtctagcttctcatgggcttttgcacgtctaaagagagctttcacatatttgggattaagttcaacagcttttgtacagtcttgtgc

SEQ ID NO: 385664 - DNA, 122 bp, Homo sapiens
cttctaaggcgagaccgatcttctgagaggcctctccctgtttcaaaattcggcttggggcgtaatcccacctagaaaaggggagtggaagtattttctgagtgtctggtacctatttagac

SEQ ID NO: 385665 - DNA, 122 bp, Homo sapiens
aaaaatacctggctctgttggtctccagtccagattcttttctgcccagagtgctcagctcgtgcctctacaatgatgtgtgcatctatcaagggtcagggagagagaataggaagcttctc

SEQ ID NO: 385666 - DNA, 122 bp, Homo sapiens
cctggcatatcaatgacatgaagcggaaacacgagcacgcggtccggttacaggtgagcccgcgaggtgtcggtgcccggcagggttgcaggtgtagtgacttactgttttcccaataaaat

SEQ ID NO: 385667 - DNA, 122 bp, Homo sapiens
taccggtgagaatcgtctaaagctccctttctacttgaggaatttgggtcctggttaggccgtgtagagggaaagacctcctcaaggaggtctctagcttcttcttccggtccattggctga

SEQ ID NO: 385668 - DNA, 122 bp, Homo sapiens
ttatcaaatacacatataaaatacacatatctcagaacccctgagaaaatagaaaagcatcgagagggaagagaagggtaaaagtttcatatacaggctgaagaatcaggtgttgaaatttt

SEQ ID NO: 385669 - DNA, 122 bp, Homo sapiens
agcaaagaaatgaataaagcttccccagctctgcctcctcagccaatcgcctctggcctccgaagccccatcctgccatagcccacttccaggtcccttgtgcagatggctgcccaccatat

SEQ ID NO: 385670 - DNA, 122 bp, Homo sapiens
ttccgagtgaaaggcattttccaaggcgctctcaacgggaatgtctgagatagcgaactgcggctgcagagcaccagctgaacgcacacacacaagtgtcttctcacggtatgattagtgtt

SEQ ID NO: 385671 - DNA, 122 bp, Homo sapiens
tgagggtgccggttcggggcggggctttttgggggcgggacatggggcggagcctgggggcggagcatgtggggaggtggctggggaggaactttcgggggcgggacacgagggcggagcct

SEQ ID NO: 385672 - DNA, 122 bp, Homo sapiens
aacgaatttctgcaaaaattacaactaccccgcctttctcctaggtttcaaggcgactgccgggtgcgaaaggaaccgcacacccctcagaggcgaaagaagcgtttcagacccgagaggcg

SEQ ID NO: 385673 - DNA, 122 bp, Homo sapiens
gtaaaggatgttagattatccttccctctccacaattccagatggtactgcttttggcagcggatgtggcaaatcatgtgacatagagctcattccttctttttctgcattagcctttgtaa

SEQ ID NO: 385674 - DNA, 122 bp, Homo sapiens
agcctcgcagacactcgtaggcgcgcacgcgcaccctctcccctccccctcccctcccgccgcctcccggccggacgatggatccctgcagatcccagggctgagagcaccgcgcaccgcgc

SEQ ID NO: 385675 - DNA, 122 bp, Homo sapiens
ggagggtgtttccagggtcctgtgggctaagtgactcatcacccacagagccccagaggccggctgtttgcagctggaactgggtctcctgagatccagagcaatggagggcagtaccctcg

SEQ ID NO: 385676 - DNA, 122 bp, Homo sapiens
gctctgtcttgttaaacaccaggtccccactccccgtgcccagcccctgcccagccctggcggccaccatctgctttctgtgtgtgtggatttggcggccccagccgctggtgtagtggaac

SEQ ID NO: 385677 - DNA, 122 bp, Homo sapiens
cgaagggtggaaggccggctgccggtcaccacccctcccggagcgcccctatacacgcaccgtggtcttgtcagccagaagcttctcaatgacttctatcagctgatccttctggtcagagt

SEQ ID NO: 385678 - DNA, 122 bp, Homo sapiens
tccctccggtctccacattttcccttccagccctccacttctccggatcaatgtgtagtacggttccaactcccagctcgcacaccgctggcggacaccccagtaacaagtgagagcgctcc

SEQ ID NO: 385679 - DNA, 122 bp, Homo sapiens
agggcagagatatcttggagttcagggatttctgcttggaatctcaagccaatgttgatgcgtctttaaatgacaagaagaaaaacaacaatgtggtcttcaatttgatggctcaggccaag

SEQ ID NO: 385680 - DNA, 122 bp, Homo sapiens
tgttctgagctccgggttggtggtgatttgttgtggcagacaggagaacagtgcagcccccgaattgtgctcattagcagccacttcccggtgccaagctctgcaagacctcacatcgcgac

SEQ ID NO: 385681 - DNA, 122 bp, Homo sapiens
aggaagcaaaatacattgaattcaattcaactgcatccagtatctgaaaggagtctcccccgcccccctgtggattccgatgcaggtcatgcaacttgcaggcaagatgggggaaggggtat

SEQ ID NO: 385682 - DNA, 122 bp, Homo sapiens
gaaggcctggaagttgatctcgtgcttggtctgcttgatgatctcccgcagcagggcccgcgaggcccgcaggtagtcgtccttgttggtcagcaggtcctggaacaccatggccaggaact

SEQ ID NO: 385683 - DNA, 122 bp, Homo sapiens
cagaagcacctgccggtggcactcagcacctccttgtgctagagccctccatcaccttcacgctgtcccaccatgggccaggaaccaaaccagcactgggttctactgctgtggggtaaact

SEQ ID NO: 385684 - DNA, 122 bp, Homo sapiens
gcaggttctggtcctctctgctgggacagattaggacccttgcaggccacggccctgatgcgccagcccgggctggcgctggagaccggggcgccctaggcaggacggggaggcgggtcacg

SEQ ID NO: 385685 - DNA, 122 bp, Homo sapiens
ggtcaacgcagcttggcggctgcgagccagcgagcggcgcgtgacgaagagcctgagcgacgggtcactttggccaatgatctgcagccgccagggtattgcagccagtggcgagtcgaggg

SEQ ID NO: 385686 - DNA, 122 bp, Homo sapiens
tgctatacttcagcgtgactgaccatacatcattttccattctgggacagaggaagaagacgggtgggggagttgatctggctagcccagagctggacagtgccattctattcttccctccc

SEQ ID NO: 385687 - DNA, 122 bp, Homo sapiens
agataaattggaaaaccaccccatcgagctcaactgcttcattttataaaccaaagtccccggaggtaaaatgacttccccaaggtcatgcaaatgattcatggtgaaaacaggacaaaacg

SEQ ID NO: 385688 - DNA, 122 bp, Homo sapiens
ggtcctgctccgcattgttattcgaagtctccccgggacagcggggagcaggcggagctgcgtgtcccggcctgcgcgtctgggcccaggcgggcgcgcgtcgcgctcggatttcgggcgga

SEQ ID NO: 385689 - DNA, 122 bp, Homo sapiens
cctaactttttattatgaaaaagttcatacatccacagctgttgaaagaatgaacactctcggctgttcacttatattcaacatttgttaacattttgtttgtgtgtgtgtactgttattga

SEQ ID NO: 385690 - DNA, 122 bp, Homo sapiens
cacgtctctgttgtttgagcccccactttgtggtgcttgcttgcggcagccccgggagaccggtccacctgagccatcttgggggcctggaacggggggcagggtcagcccggctgagctgt

SEQ ID NO: 385691 - DNA, 122 bp, Homo sapiens
gaccccagtcatgcccactgcgccttgctgagtgccctgtgctgttaccagtggggaaaccgaggcatgccacctgtgagagtcttgtccggcacaagcgcgggcacctgaggcacgagtgt

SEQ ID NO: 385692 - DNA, 122 bp, Homo sapiens
tcctccttttaaatcaactggggatctagggagtcagccctcagctttggcccacgaattcgtcttatcctgagctttagggatcttgtatgatcagagtgggcatttctttgagttgaggt

SEQ ID NO: 385693 - DNA, 122 bp, Homo sapiens
agggctgtgagaactgtaaatagggatttgggcagtcccggctgattctgaataaaagtccggaggggcgttactttcgggtctcggcctgtgtgtccccagccctttgttgtcccctccgc

SEQ ID NO: 385694 - DNA, 122 bp, Homo sapiens
ctgtgacttaagtgaggtggggatataaaagtacagtcattttagcctgacacaggacaacgatggacagcattctctgcagagctccttgccagggtggatgaggctttgtggagcctaaa

SEQ ID NO: 385695 - DNA, 122 bp, Homo sapiens
tccaccttctactttcaatcacgcatgaaaatcacttaagttctctaaagtgaattttgacgttgaagacaaaagaccttgaaattacgtagcccatggccatccctgttttgtgcatgtcc

SEQ ID NO: 385696 - DNA, 122 bp, Homo sapiens
cccatccccatgttggggaacaaagcaataaattacaaggcccccgcagccctcttagcccgctcctgctccatcccttctccctcccaagatagtagtgggagggacccaggctcttggtt

SEQ ID NO: 385697 - DNA, 122 bp, Homo sapiens
aatgggttgcccaagagactggtttcagacttgcctcgttcagggcacatacagggaatgcggcatggtttgaatctcaggaagaaggccaaggaaggcagtggtgggcaccatagcacatg

SEQ ID NO: 385698 - DNA, 122 bp, Homo sapiens
aagggaagggaaacaggagagaggaaaggccagaaggaatagaaaaggaaagtggttttgcgtcagagtgtggcagaggcagtccctcaaagaacctctgatgtcccctagcccaggcccag

SEQ ID NO: 385699 - DNA, 122 bp, Homo sapiens
agctgcactcccacggcccatacaagtgggaggcctctggggaagcggccctggacattccgtttgcctctctggaggggaaggggtggcccagagcgaacccccacaccccctctcccatt

SEQ ID NO: 385700 - DNA, 122 bp, Homo sapiens
gactatatgctccctaggatttctgggaattgtagtccttttccgtaaagagtcaccatgcgtcagctgaaagaaccacatttcccaagaatccgttctctctgggatgtgtagctttggaa

SEQ ID NO: 385701 - DNA, 122 bp, Homo sapiens
cctttcctgtgaccactatcaagaactgctcaggattcctgccagcctgttagcctttatcgttcagtcattttagacctcaaaaagaacattccatcaagggatcaggttctatcatctca

SEQ ID NO: 385702 - DNA, 122 bp, Homo sapiens
gcactaggcggccggcgggccctgtaagttctccgagggccacttgcacagcaggaggggcgagggccgtgtacgtggcgctggccgtcgggcgggctagaggggaccctcagagcacccgg

SEQ ID NO: 385703 - DNA, 122 bp, Homo sapiens
catttggtttgcaataaaatgcattctttacagtgacacaatttgatgaattttgacaaacgtatacattcccactaaccatgacacagaacatttccatcacccccaaaagttctcccatt

SEQ ID NO: 385704 - DNA, 122 bp, Homo sapiens
cggctttggtccgagcgcccggcctcggccgccgcgtgggttttcccgctctcgccgaagcgtgccatgcccatgccccattccctggccaggctctaccctgcaccagtccgaaaggaggc

SEQ ID NO: 385705 - DNA, 122 bp, Homo sapiens
gtcaggaaccaggtgtggtctggaacccagatttccatatatttgaggtacacagcttcccggggcctgcttttactttttgacctttcaccccacctagccattgccttttctcaggctac

SEQ ID NO: 385706 - DNA, 122 bp, Homo sapiens
agttacaggctgggtttggagggaatgccttcttctagggtcccatagagatgttcctcccgcttcctagagaatcagagaatggatgcgcgagctcgctgctgacgcactaccggccgcgc

SEQ ID NO: 385707 - DNA, 122 bp, Homo sapiens
tggctccgtgcaatccctgccggcactgccggctgcccgccttcctccaggacgccgggccggccccctctgactcagcagcatgggcggcccctcccacccacagccgacggggcccttgt

SEQ ID NO: 385708 - DNA, 122 bp, Homo sapiens
aagatccggagggcgcaggttctgacgcatccgttagacgttctgtcctataacgtgggtcgggccaaacaatagcacccatttacgattacctactgtgtgtcaggagctagtctctaatc

SEQ ID NO: 385709 - DNA, 122 bp, Homo sapiens
tgctgttaaaattgagtgttaaggaggtctgggtcataagttcagtccccactgatgtcccgttatctttaacaacgtggagataagcttttccatatggcctattgtgagttaggtttatg

SEQ ID NO: 385710 - DNA, 122 bp, Homo sapiens
ctttttcctcttccgatggaaaggccccagggagcgggcgacagaggctcggccaccccacgtggcccctcagtgcccgggccttaataggggcgcccagtggccaacacggaggggagttt

SEQ ID NO: 385711 - DNA, 122 bp, Homo sapiens
gtcgccagcgcagccgaagcaccaagcaggaagctctgccgagttcttggcttcaggtaacgtgtcagacccagggcatgagctccagtccctcttgcctccacaaaggacagcacatttcc

SEQ ID NO: 385712 - DNA, 122 bp, Homo sapiens
tccccgcactttggaggccaaggtggttggatcgcttaagtccagaattaggagaccagccggtgtaacatggtgaaaccccggttctaaaaaaaatacaaaaattagccaggcatggtgcc

SEQ ID NO: 385713 - DNA, 122 bp, Homo sapiens
agagcttcacagacacacccaggcagcctctcgcagacactggcattcagagcctaccatcgtggccacacatcagggcctcccacatggacacccactcccacagccccgtacacgctggt

SEQ ID NO: 385714 - DNA, 122 bp, Homo sapiens
aggaggaaaccacaggctggcagaaggctaagtctgtggcatcagagcaggaagcaattccgtgaaacagcgactctgctctagctacatttatttccctctgttcctggaggagtgagggg

SEQ ID NO: 385715 - DNA, 122 bp, Homo sapiens
aagagacgtgttattgccgccgaggtggaactatggcaacgggcgaccaatcagaaggcgcgttgttgccgcggagccccctgccccggcagggggatgtggcgatgggtgagggtcatggg

SEQ ID NO: 385716 - DNA, 122 bp, Homo sapiens
aaaaaaagtagcaaagaccatgggttgaacatgccagatacgattaccttatttaagcttcgtaccactgctatctcccttttacagatgaaacaaccaaggcttcagatgttgagtagccc

SEQ ID NO: 385717 - DNA, 122 bp, Homo sapiens
tgcgtctgcactgcccagtgccgtcacggctggcgccatgtggctgttgagtgattgaaacgtggccagtcagtgccatcaaggagctgcattttaagtttgattctagttcatttaaattg

SEQ ID NO: 385718 - DNA, 122 bp, Homo sapiens
gcgccgcgccgcgcagccaagcatcgtctgccctgtgggggcgcaggtacgggggcggtgcggggaggaggaagctgcagcagccgtttgaactcggggtggggaacaggtgaatgggggtt

SEQ ID NO: 385719 - DNA, 122 bp, Homo sapiens
gttcttgaacttgcgctcacagatgtggcagtcatagagcagctgccgcttgccctccctcgtcatcaggcagagctcgtccaaggcctctttgaccttcttgtcctgtgggtcatgcgcgt

SEQ ID NO: 385720 - DNA, 122 bp, Homo sapiens
ccagaggggtcgcactgcatacacagtccctgcaaagtcgccccccgataggggtcacaccgcacacaaagtccccgcacagctccccaagacagggtcacatcgcacacagtcctcgcacg

SEQ ID NO: 385721 - DNA, 122 bp, Homo sapiens
aatggctagaggatctatttcaaagctgcacttggaattggcctattaaaaaaagcagcccgatttgtttcagaagctacactggaaatgaatgagggctgttccatctttactggctatta

SEQ ID NO: 385722 - DNA, 122 bp, Homo sapiens
aagtgcgagcctgatggagttcaggacaaatgctggacgtggttgcatagtatttcctaacggaggggtagcacgctttattaccattcctcctagggattcgggtaattttgtttcctctc

SEQ ID NO: 385723 - DNA, 122 bp, Homo sapiens
gggggtcaaggctgcagtgagctgtgatcttgccacggcattccaatcaagatgatagagcgacaccctgtcttaaaaaaagttgatagtttatacatttatttattcatttacagatctgt

SEQ ID NO: 385724 - DNA, 122 bp, Homo sapiens
ccccagaatgccgcgcggctgcacacttccgtcgcccaggccccgccccgttccccgccccgccgcgccatgcccagccgagtagctttacggttctcccaccgcagcgcccgtggcctccg

SEQ ID NO: 385725 - DNA, 122 bp, Homo sapiens
tgcatggctgggcaccttcatggggctgcttctccaaggggtgaggtctgtgggcaaaggcggccagcggtcaggtgcctccacggcgggggcactggcttgtcccttggaagagccggtct

SEQ ID NO: 385726 - DNA, 122 bp, Homo sapiens
ttgaaccaagattaaatccaaagcaaagaggcaggataggcctatttgcttggcaggaggcggggggaagcagccttgtagctccatatgacttggcaagtttaccagagtttaggaattac

SEQ ID NO: 385727 - DNA, 122 bp, Homo sapiens
gggcggtagtcgggctcggggggcgccggcttgctgccccctccgccgccgccccccccgcggaagcccaggtgctcccggagccacttggctactccgccgctgccgccccctcctgggcc

SEQ ID NO: 385728 - DNA, 122 bp, Homo sapiens
agccgcggcctgtgcagcgagtggagtctcagggatcccgcctggagcctgcggtggggtcgggcaggcctggggggtcttcgtggcccagcccgaggtggccggggaggctctccagggat

SEQ ID NO: 385729 - DNA, 122 bp, Homo sapiens
gtaaaacaccaaactgcttagtctctgacattaagaaggactgtttctaacttctctttccggcattgtttcaggatctaaacagcccccactccccacccaccatgaacccatctcacttt

SEQ ID NO: 385730 - DNA, 122 bp, Homo sapiens
agaatcccatgcaaaccgcccagcgctggtgcctgtgccctctgctcgtggccaaagcttcggtttccaagtgctcttgtaggttgtgggaggagactgtggagacccacggcctactttcc

SEQ ID NO: 385731 - DNA, 122 bp, Homo sapiens
tctactaaaaatacaaaaattggccgggtgaggcggtgcgtgcctgtaatcctagctactcgggaggctgaggcgggaggatcgcttgaacccgggaggcagaggttgcagtgagctgagat

SEQ ID NO: 385732 - DNA, 122 bp, Homo sapiens
ttgtgagcaggaagcatcgcattgaatcccagcctttgctccttttactgcacttggcctcggcgtaggaccaaggccctcgactgagtgcctctccctcctgcggcattccagctgcatgt

SEQ ID NO: 385733 - DNA, 122 bp, Homo sapiens
gactagggcatcccgggccatcacactaattttgctacgtctatttaatgcaatcttttacgttattaacaaacatgcattaacaaaatgcatgcattaacaaaactcacataccaaagcca

SEQ ID NO: 385734 - DNA, 122 bp, Homo sapiens
actgttgaccccgacgtgatttgaacacgcaaccttctgatctggagtcagacgcgctaccgttgcgccacgaggtctccgggacacctacgttttatttacctgtcaatctgattcatgaa

SEQ ID NO: 385735 - DNA, 122 bp, Homo sapiens
cccttccctttcgtttctcttcttttgctttaggcaagtggcctggggcctgccaagcagcgccgggtccgggtaggggccgggggccgcggggaactttcctcggctgcaccagagacaat

SEQ ID NO: 385736 - DNA, 122 bp, Homo sapiens
gtagtggcaggaattccaagccaaggcttgcaggaactcagtaatgctttttgcattcaacgtctgtctgagagttccccaggggtgctaaatgctgattctgggagctcatctccaagttc

SEQ ID NO: 385737 - DNA, 122 bp, Homo sapiens
ggaggcctcaatcccagcggctgagcccgcagggtctgcggaggcctcagaggtggcccccggggtgcagcccctgcccttctggtgcagccacatctcccgcctggtacgcagcctgtccc

SEQ ID NO: 385738 - DNA, 122 bp, Homo sapiens
gtatttccataacacagagacgccaaggagcagaacataaaatagctggacccaagcaatcgtgttggcccctgcagctccattattcaaaatttattttcctttgctacttcctttgatcc

SEQ ID NO: 385739 - DNA, 122 bp, Homo sapiens
ggttgcgcgcttggcagctgtggcggcctgggtaccttgtcggagctggggctgggcagccgtccccttcggtccccaccgtggcctcagcgtgctgcttgcacggatacctcagcgggcgc

SEQ ID NO: 385740 - DNA, 122 bp, Homo sapiens
taattcaacaccaagcccgaatgtttacctctcggatctgacaaaccagatgcagagcgacgaatggagaccaccttcccgggaggcggaacccagctgggttccagcctgctctgggagag

SEQ ID NO: 385741 - DNA, 122 bp, Homo sapiens
gttgagtcggggctgtggggagaggctcacctccttggggttgtgttagtttcctcatgccgctgttaacagatcaccacaaacctagtggcttaacacaaatgtgttatcttacagccctg

SEQ ID NO: 385742 - DNA, 122 bp, Homo sapiens
gctcctcggtaagaaccaatgaggatgtggtatgcaaataagcaagtggaggccgccagccgacttcctcgcactgtgcagctgctccagtgagggcgcagactgtactggcctgtgcggag

SEQ ID NO: 385743 - DNA, 122 bp, Homo sapiens
gcaaagtgccggaggctgcagccaggaccccgagggctggaccctgttccattttcagcacggattttggcgtcagtatgcgtctcctcctccatcgcgccgagcccacgtgcggctgcagt

SEQ ID NO: 385744 - DNA, 122 bp, Homo sapiens
acacgttagctagcatcaggttccgagcgcctgtattgcacgttagctagcatcaggctccgagcgcctgtatcgcacattagctagcatcaggctctgagcgccggtatcgcacgttagct

SEQ ID NO: 385745 - DNA, 122 bp, Homo sapiens
gcattttggaatgagtctcctttagtttcagagtgtggattgtataacccatatactcttcgatgtacttgtttggtttggtattaatttgactgtgcatgacagcggcaatcttttctttg

SEQ ID NO: 385746 - DNA, 122 bp, Homo sapiens
ctccggcccgactcgcggcctcggcgccctcccggccgattcagcttcacccggcccagtcggctgctgccttgctgtgagtttccgtgtttggttgcctaaggaggatgtgattttacttt

SEQ ID NO: 385747 - DNA, 122 bp, Homo sapiens
gcatgattgtacatctctctcttggaaggcgggggtaaaccaggcaccaaaccaagacagcgcctacctccggcgtgccacagaaggtggatgttgtgctgttgtgttcaatgttctccttg

SEQ ID NO: 385748 - DNA, 122 bp, Homo sapiens
gtggctggtgcagcgcaccgagcgctgccgctgcccgacgccgcactgtgcagagcactgcgagggggcaccactcagttgctgccccgcagcccctgccctggcccccacccctctggggc

SEQ ID NO: 385749 - DNA, 122 bp, Homo sapiens
atgggcactcagcaactgttcgtgtaccagccgggttaaggtgtccttctctggatggggcgcagggctcgctatggggtgctggggcggctgtgtcctctggtctgggcagcgctttctcc

SEQ ID NO: 385750 - DNA, 122 bp, Homo sapiens
atgaccgaaattagactgtcattctcccgggctccacctgcacacagactgcagtcgcaacgattctccacttgatggctggttgtgtcactgctagtcgacagctgtcccgcatccagaga

SEQ ID NO: 385751 - DNA, 122 bp, Homo sapiens
ggaggtagagagttgggggccttgacctgttacatgcctgctttttactcagccaagtgccgctatgccctgggcatgcaggaccggaccatcccagacagtgacatctctgcttccagctc

SEQ ID NO: 385752 - DNA, 122 bp, Homo sapiens
cacttctcagacggggcggttgccaggcggagggtctcttcacttctcagacggggcggccgggaagagacgctcctcacctcccggacggggtcgcggccgggtagaggcgctcctcacat

SEQ ID NO: 385753 - DNA, 122 bp, Homo sapiens
atgatggggcagggcagccaggggagcagcatgatggggcagcggcccatggcgccctaccggccctcccagcaaggtaacgcccggccgggccaggtcgcgggcacagctgaccgccgcgg

SEQ ID NO: 385754 - DNA, 122 bp, Homo sapiens
tgggaacttcaaggaaccgcaccgccctcctggaccacccgagaaaacaggggaagtgggcgaatgagtagaccaaagtactcatgacagggcaggagcaagtgagagaccctggaggacca

SEQ ID NO: 385755 - DNA, 122 bp, Homo sapiens
cttcccctaccggcgtcagggaccggtctccgggcggagattggccctggtagcacagggcgccgaggggacatgcccggccagcctcgcaggtcgggctccggctgggtcggacagagggt

SEQ ID NO: 385756 - DNA, 122 bp, Homo sapiens
ccggccctcacgaggcaagggaatttcaaagtgaaattccgcttctccgggtcttagcggcggcttggagcagagtaggctccatcgctggggtggtggttgggggtgggggtgggggtggg

SEQ ID NO: 385757 - DNA, 122 bp, Homo sapiens
gctccgcttctccgggttttagcggaagcctgcggggggcggggtaaccgcggaagccggcggccgtgggcgcgcgggttgggggctctcgcgccgctccgggctctccccccccccggctg

SEQ ID NO: 385758 - DNA, 122 bp, Homo sapiens
acatcttttgcaggggattttcctttcccaattgtgtagtagttgttttcgtgccgcccacgccatcctgaaattcacacacagagttgcaagttactgccctccgggaacctccccttctc

SEQ ID NO: 385759 - DNA, 122 bp, Homo sapiens
atcacagcaaagcaggcgcagatggggtggtgtcagaaggggcgtgcatgggacgggccccggtaggagaggcagctggcttcgcagacggtgtcacgcggggctgctgaatactcagctca

SEQ ID NO: 385760 - DNA, 122 bp, Homo sapiens
gaggggcggtcaacttctgggaatggccaagaggggtgctctgaggcccgagccggggtccggtgcccgcggccggcggccggggtctgtttactccggcgacgtgcggagaggacccaagc

SEQ ID NO: 385761 - DNA, 122 bp, Homo sapiens
gaggggtggacggagaaatacggcttcggagcagggagcgatgggccggggctggggcgccgccctgcctcgcgcaaagaagggggacgagacctacctgggaaataagaagatctgatgaa

SEQ ID NO: 385762 - DNA, 122 bp, Homo sapiens
gaacgcttggaaagtaacagttcatctttgcatactttgtaatattattaggaatcctttcggctgtactctacaatgccctcctattttgggtcccaagagatgttgacctcttctaagtc

SEQ ID NO: 385763 - DNA, 122 bp, Homo sapiens
gccatcccaggcagccctgacagccccatgtgactgggacctagaggtggcccctgtttccgccccagtgtttgtccacaggcagtgttgcgtgggctctgaagtttgcctaagatggacct

SEQ ID NO: 385764 - DNA, 122 bp, Homo sapiens
agggagggtccagggagtccgagatcccaggcgaagcgcgcgccggtgccttttaaagagcgctcggtgggcgcggcctgtgtccgccccgccctcctcccagccccgcccgccggattccc

SEQ ID NO: 385765 - DNA, 122 bp, Homo sapiens
gctagaagagctggggggttgcgttttttgccaagagcacccctaacagttaagaaagtgcgaagggagtcattgcgaaggcagccaaagaccgaagcggcgccctgcaagttcttcccaag

SEQ ID NO: 385766 - DNA, 122 bp, Homo sapiens
gactctatttccagctaggacctgggggacacaaccgggaaacccatgcagaaggcagcacgtaaaccaaggcaataagacgggggctggcagtggagattgcagtccaggagtccacccag

SEQ ID NO: 385767 - DNA, 122 bp, Homo sapiens
tgcccaggctggacttgaactcttggcctcaagtgatcctcccacttcagcctcccgaatcgccaggactacaggtgcctgcaattgtacccagctcgggacacaattcttacattttcttt

SEQ ID NO: 385768 - DNA, 122 bp, Homo sapiens
gggcgcgctgacgtcatcgtgcgtcagagtgagcccggatggggcggcgggcttcgggagcgcccgggctgatccgagccgagcgggccgtatctccttgtcggcgccgctgattcccggct

SEQ ID NO: 385769 - DNA, 122 bp, Homo sapiens
cccttggttcccgtccccaggaagccggcgagatggaactggcatctatcgggccctgaccgtgctgggggctgcaccggctcggaaagaaaccgatcagtgcaggcaccagtgcttgacgg

SEQ ID NO: 385770 - DNA, 122 bp, Homo sapiens
aggtctacctcacctttcctggaaatcagcagaccgagagcctgacaagaagctagggaacgctctggtccgctgactaacacaagtaagcaagtgcccagcttcaggcgggaacaatataa

SEQ ID NO: 385771 - DNA, 122 bp, Homo sapiens
aaatccttgtcttcaacaggtctggtcagctctgaagattccctgaaatgtgacatgtagcgtgactgtttgcattctgagtagcccactacactggtataaattcacaaatttggagagtc

SEQ ID NO: 385772 - DNA, 122 bp, Homo sapiens
ccgcggctgcagccgccgccgagccctgacagctcgagccggggcggaagcgcccggcggcgtgcagcgcccgccccccgctgccctcagcgcctcgggctactccgaccacccgggccaac

SEQ ID NO: 385773 - DNA, 122 bp, Homo sapiens
gttgagggtaaggagtgggcaactgagcccagaaaggctgggaggcagcaggagtgggaccgcatgtgagctgaggctccaagcccccctggagcatgttgcattggccttcactaatagag

SEQ ID NO: 385774 - DNA, 122 bp, Homo sapiens
ctggtcgccgctgtaatattccgagtccatggcaggcggactctcagcggggagtgtccgcgccccgcgccgcccccgtcacctccttccaggcggtgtgaccccggatggcgcggctaagt

SEQ ID NO: 385775 - DNA, 122 bp, Homo sapiens
gtgaacccagaaccacaagtaacagataatgtctctcctctttattctcccagtcattgtcgttgctctgtaacacacaatgcccactgtcatgctgacaataatgtcaacagtctttgttt

SEQ ID NO: 385776 - DNA, 122 bp, Homo sapiens
gatgcgcgcgcaaccagggtggtggcggagtgcgcatgcgtggttcccgggcgaagggaacgcgcgctcaccgtgcgcgctcgcggccgggtggtagtggcggaggagaaaggggtcggcgc

SEQ ID NO: 385777 - DNA, 122 bp, Homo sapiens
tgcccagggggcctcaacttgtcctgccatggattctacttcacccagtcactgtgggagcggaagacactcccaaagcaggtcattctgtgaaggctatgcccagagaggcagccacggcc

SEQ ID NO: 385778 - DNA, 122 bp, Homo sapiens
ttttttttaagacaagagtcttgctctaaggcctaggctggggaatgaaagaaatgggggcgtggattttggtcaaaggatacaagttttaagatgaatacattgtggagatcaaatgtgca

SEQ ID NO: 385779 - DNA, 122 bp, Homo sapiens
taagcgcccatgttttcaaagagcatccaatcacccacatgcatttcaggcaggtcacagcgctcaacaatccgatcgaggccatcacatgttggtccccatatgctggatgaataatactt

SEQ ID NO: 385780 - DNA, 122 bp, Homo sapiens
aggaagccaccgccgcgctcttctcggaactggctaaaatagctccgtaaatgggccgagcgcaacacggaggggataccgctcactaccaggtaaactgtcgcctcctcctccgcctcgcc

SEQ ID NO: 385781 - DNA, 122 bp, Homo sapiens
cggcagacgaagcgagccccctggtggaagccagcagaaccaggtgcgtggcggcggaggcggggcggcccgctgggaaaccgaggaggggtcggattagttgaggggtggggtggggatgt

SEQ ID NO: 385782 - DNA, 122 bp, Homo sapiens
tgccccctccaccccactgcggccgccaccgagccccaatagctctagccaagcagaaggcggagaaaccaaaccggaagctgtcactgacacgggtccgctgtctccgagtactgcgcagg

SEQ ID NO: 385783 - DNA, 122 bp, Homo sapiens
caggtggcgcagacgcccggtggacacctacagacctgcttcaaatgcacggagccccgacgtgagcagctcaccgggagacagttggcaatttaacactgatactacgcaacgagggccat

SEQ ID NO: 385784 - DNA, 122 bp, Homo sapiens
ccgggtgagacaataccatttttaaaagacccggcagggcacgggggcggatcaagaggtcgggagttcgagaacagcctggccaatatggtgaaaccccgtccctactaaaaatacaaaaa

SEQ ID NO: 385785 - DNA, 122 bp, Homo sapiens
gacacagtcttcaaaaaggaagccctggccgtttccaggctgaggtaggagcaaggacgacgggagctgagcggctctgtgttttgtcccttcatccaacaggaacctaaggagatgctgac

SEQ ID NO: 385786 - DNA, 122 bp, Homo sapiens
gaggcaaatgcccaggatcacatagccagcaagtgtcaggcctgagattcaggatgatctcgatctcctgacctcgtgatcctcctgccttggcctcccaaagtgctgggattataggcgtg

SEQ ID NO: 385787 - DNA, 122 bp, Homo sapiens
ggcccacagttggttcggcaacgctgtcaccaacgccacgtgggaagagatgtggctgagcgagggcctggccacctatgcccagcgccgtatcaccaccgagacctacggtgcggccaggg

SEQ ID NO: 385788 - DNA, 122 bp, Homo sapiens
ccggaggtgggatgggaaaactttattaggtttggtttccagcttcggccacgcgggctccgcccgccccgagctcgggtcacggggcgcccccgccgccctcctcgtcgtcctccacgtcg

SEQ ID NO: 385789 - DNA, 122 bp, Homo sapiens
cagggcctgccctggctcaagctgaaggagaagtcctccttttctcatccacccccagtgcgaaattcttgacaacaagcgctgctctggcttgaagttcagactccaggcaccagcagatg

SEQ ID NO: 385790 - DNA, 122 bp, Homo sapiens
ggtggagagaagggagctcttcctgcctgcctgctgtttccacagtcctgagctggttatcgcccgggcctggcccagcacactgaggaaggaacggagaggaggggagggggcaaggagga

SEQ ID NO: 385791 - DNA, 122 bp, Homo sapiens
cgagcctgttgaccagggccagccaggcagacggctgggttcgctcaacgaggctcctctcggccctcctggagcttcaggcctctttcggttgcagagaaactttatgggccacttccttc

SEQ ID NO: 385792 - DNA, 122 bp, Homo sapiens
gtgaggccgtgtgggaggccggaagttgcggcttcattactcgccatttcaaaatgctgccgaggccctaggatctgtgactgccacccctccccccacccgggctcggcgggggagcgact

SEQ ID NO: 385793 - DNA, 122 bp, Homo sapiens
attcttggcttcgtctgtgggaaaataatttctttgattgagttgccccagaagaccctgcggagccttctcttctccgcctccgatggcctcctctttcctgcctgccggaaggaggggag

SEQ ID NO: 385794 - DNA, 122 bp, Homo sapiens
ccaggggccttagtgatcaccagtgggtctgtctgtcccccaacactctgtctcagactccggcctttgcatgtttcctgagacctcttgctcccagatcccctgaggaggagacaggttgg

SEQ ID NO: 385795 - DNA, 122 bp, Homo sapiens
aagcctgggtgcgagctgggctcccggttgtcgtccaagcctgggtgcgagctgggcttccggttgtggtccaagcctacaggactaggaaaaggagggagggtgagggagcctggagctgg

SEQ ID NO: 385796 - DNA, 122 bp, Homo sapiens
ttctgcacttggttcacctgaggccaaaagcttggagggtccttcctgttcctcttcgcacgtctgggccacctctgtcccccaggaagatggcaggtttagcgagggcggagaagggaccg

SEQ ID NO: 385797 - DNA, 122 bp, Homo sapiens
cctagaatcttcttcaaggtccccagtcagttgccatctgcagagtgctccaagcctttccggctaacctcaggtcccagggctgcctctgctacctagcccctctccggcacagaggatct

SEQ ID NO: 385798 - DNA, 122 bp, Homo sapiens
gccatgaatttgaagtgaaccagagggaggtggcagaagaagcttaatggggaatagttccggtagagaaatgaggcttaagatgaactaccctggcccttatgtgtcagagagaacggctt

SEQ ID NO: 385799 - DNA, 122 bp, Homo sapiens
tcttccgcagtcctcttattgctttcatcaaaaaaagaacactcaggttaacaggagacacgccctgtagccctagtcgcgtcgcgacccagagcgcatgcgcaaagcgcagtggcggtttc

SEQ ID NO: 385800 - DNA, 122 bp, Homo sapiens
cccagcccgtctcaggcctgctcatgccggactggcagctgttagcttggcatcaggatccggtcattcagagggcagtttgggcacaggagtgcagacatggctgcccttctaagccccca

SEQ ID NO: 385801 - DNA, 122 bp, Homo sapiens
ccctggcggcgctgaccgtggtggtgactcggcctgacctggagaccatctcctggtgggcgagtatctggggaggcctgggtcggtggtaccctcgagtttggagagcacatgtgctcgag

SEQ ID NO: 385802 - DNA, 122 bp, Homo sapiens
tctggacccatcggcttaaagaaactgatccacctcatgacctgaccctggaagccttctcgcccttcacacctatctcaactccagactagtcaagaacaaaggagtgtagtggggcccta

SEQ ID NO: 385803 - DNA, 122 bp, Homo sapiens
ggagaaaggaggtcaggagagctctggagcttttttctgctcggaaaaaatcccggtacgcgggagccctgagcttctgcggctggaatgaaccaagtgtccgcccggccggggagaggcgc

SEQ ID NO: 385804 - DNA, 122 bp, Homo sapiens
aacgattccgagagccgggcctagtaacacaggggcttttcttcagaacggtgtccagaccggagcttgcgccgaatgtaggggctcctattggccacgcgccgtaggggaggagacgactg

SEQ ID NO: 385805 - DNA, 122 bp, Homo sapiens
actcagtgtttttttgagaaaatgtaattcattgccaatatcaaaatacagaagtagagacgagagactaactctgccttgcctttgaaaatgcaagagatctggccgcagatctgagcgtt

SEQ ID NO: 385806 - DNA, 122 bp, Homo sapiens
ccagctgggcgttatttcgagcacggggccctgcaggtgggcctgtgggcggggacccggcgcccgggagggaaggggctggctcagagactatagacgggcggggaccgccccggcccggg

SEQ ID NO: 385807 - DNA, 122 bp, Homo sapiens
cagtgctggatcttcgtctaatcatctgtgtaacctaggcctaagctgagtctcagaacccgcctctagaaaacaaaagtgttggactaaatgatctttcccttttcttttattgaaatatt

SEQ ID NO: 385808 - DNA, 122 bp, Homo sapiens
aaaggaaaatctatatctgggctcctcctatttaatcagtgaaacgaattttcatgtggccgatcagtatttaaaaaaaaaagaatttcagattcttgctttttggaacccattatccactg

SEQ ID NO: 385809 - DNA, 122 bp, Homo sapiens
tcctctccttcccagcgcatggagttaagacgctccatatgaagcctagcctgggatatccgtgggtcttacatttgctctcttctgagctgcttcccccacacttccccgctcgctcgaaa

SEQ ID NO: 385810 - DNA, 122 bp, Homo sapiens
gaaatgatctctatccagtgtctaggaaattgctgaaggcctgcgttctaccaattcctccgcttaggcacatggactacaggttattaaagaaggtgacttgcggtttttatcccgttttt

SEQ ID NO: 385811 - DNA, 122 bp, Homo sapiens
actcgtgtattagtgagtataatctcttctccatccttaggaaaatgttcatcccagctgcggagattaacaaatgggtgattgagctttctcctcgtatttggaccttgaaggttatataa

SEQ ID NO: 385812 - DNA, 122 bp, Homo sapiens
ctggagctggtcggccctgcaggtgctgggcctggggactgaggaagcacagagattccccgcccggttccccgccaacggcgctagccgcgatgccccgcctcactccccgcccccgggat

SEQ ID NO: 385813 - DNA, 122 bp, Homo sapiens
gcgaccggccgccacagtctgacaggggcgcacgggaggccgtgcagggagggccgggggcgggccgagccggccaaggcgggcccgacgggccaagcagcggggctgcggcctgactggcg

SEQ ID NO: 385814 - DNA, 122 bp, Homo sapiens
gcaaaggcctcaggatagcgcctccccctagctgaggcggggaccagattgtgcacctcacgtggttagtcacacaaatacacaccaccctcacaaaccaactaaacacactgttacaactc

SEQ ID NO: 385815 - DNA, 122 bp, Homo sapiens
ttcactcactttaattctcagtcgagctctacacgcggtgctccctccccacccccagcccgggcggagtcatcagatgtcgtttccacgaatagataatggttgccatgatgggacccacc

SEQ ID NO: 385816 - DNA, 122 bp, Homo sapiens
tttcatttgataaaattttcttccactgctttaaaagttacatgttttattcttttttaacggtagttacccttaagacctacattcacaaatatttatccctattgatttattaaagttaa

SEQ ID NO: 385817 - DNA, 122 bp, Homo sapiens
caagattgcaaggctgggaaatggcagtcaggatctgaaccacggtgttgacaatgagaacggtgagtaacgtcaaatgtgagaaatatttaggacttaggctcacaaagactaaggcaaag

SEQ ID NO: 385818 - DNA, 122 bp, Homo sapiens
gtaccccatccccccgcccgacgccaaggagctggaggccatctttggccagcccgtggtcgacagggaagaaggagagcctcacagcatctcctcttggccagggtcccccgggcgcccca

SEQ ID NO: 385819 - DNA, 122 bp, Homo sapiens
ccgcccgcccgtctccaagcctgaggcgcaggcctatgggatgcacgggcttcttttaggcgcccgtttcaggctccagtcccactctccgctcagcctagggcccagcctctggccgtcgg

SEQ ID NO: 385820 - DNA, 122 bp, Homo sapiens
tgaaacgggatacgccgagctgaacttggccacataatgccgctctgtttgggaagggcccggagcactgggggcccgaggtatctttcaaagagtgatggttacggaaattagtggtgcag

SEQ ID NO: 385821 - DNA, 122 bp, Homo sapiens
cctctcggtttctcctttcctcattcgaaatgtgtcagaaaagtcccgaagaaaagcaaccgggttgcgttaataaaccgcgtgatctatacactatccgagccccatgcctccagacttcc

SEQ ID NO: 385822 - DNA, 122 bp, Homo sapiens
gacggtgtgtagacagcacggcccaggcaggtgatggtgtgtagacagcacggcccaggccggtgtcggtgtgtagacagcacggcccaggcaggtgacggtgtgtagacagcacggcccag

SEQ ID NO: 385823 - DNA, 122 bp, Homo sapiens
tagcttgcagagtttaaggaatcatagagagtcaatgcacacgctgggcgtggaggctcacgcctgtaatcccagcactttgggaggctgaggcaggtggaacacctgaggtcaggagttca

SEQ ID NO: 385824 - DNA, 122 bp, Homo sapiens
cccaataagacaggatctgatatcgcagcatcttagaggaagaaaacaaaaccattactgcgtaaacatccccagtgaggagccaacgagactcagaggccctgtctgcagaagcagatagc

SEQ ID NO: 385825 - DNA, 122 bp, Homo sapiens
aggataccccactccccaccccctgcctcgggcgccctcagccacccgagctgggggcctcgcaggtctcagaccaagctccccgcgcggcctgcagcgcacccaaacatggccaccgaacc

SEQ ID NO: 385826 - DNA, 122 bp, Homo sapiens
atagcatgattacggcatcaaagatatgcagatgctattttgactaagcagcactttcatcgtaagccaatttttagagatttgattattgcactagaaaaatcctgaaaagtctgtttcca

SEQ ID NO: 385827 - DNA, 122 bp, Homo sapiens
ggagaacctccatggagccatgtacacgtgaggaggttggggctgagtgctggccctctgcgtcttccttattaaccttgaatcctcattaaaggtttctttacccaccctgaggctgtatt

SEQ ID NO: 385828 - DNA, 122 bp, Homo sapiens
agctggacagctctgcggcgcccgagcgcggggagcgcgggagggaggtgccccggtccccgcccctgagacaggccccgcccccgccccccaccaaaggagctgtacctcctcggcgatcc

SEQ ID NO: 385829 - DNA, 122 bp, Homo sapiens
tgtgttcccagtgaggatccaatggctgatggctgtggtggcgctggtgatgacagtggacgcttaatccgcgtcaggtgctcaagtcctcacaaaaacagacctagggaggcaccgctaag

SEQ ID NO: 385830 - DNA, 122 bp, Homo sapiens
attagtagagcatgaaactgaatggatgggtctttggctcgagctccaggtgcagatttacgttcattttcttttgttccgccacacaattcgaccggttccgccactgtcctcggggcgcg

SEQ ID NO: 385831 - DNA, 122 bp, Homo sapiens
atggtgcagctgcagagctgctggtacgcggagtggagcaggaggatgcgggtgactacacgtgtgacacgggccacacgcagagcatggccagcctctctgtccgtggtgagctgctcacc

SEQ ID NO: 385832 - DNA, 122 bp, Homo sapiens
catgaaatgggtgtgtctggattttaccacaagacccctggtcctcaaagcttcgcaggccgagatacctcgcccctttcttctctgtcacacgcgtgcgaacacaccctcccaacccacgt

SEQ ID NO: 385833 - DNA, 122 bp, Homo sapiens
ctccattcgggatgactgagtattcctgaaacaaatgctatttctggctgctgccattcccgcagagcacttgtgcaagttcataagacttcctaagtgaaaggggaatttgcatagtttgt

SEQ ID NO: 385834 - DNA, 122 bp, Homo sapiens
tgcggctgggcgggagtccgggtcggcttggctgagcgggggcggtgctgggcagggcggcggccgctccctcccggactcccggcctcccggcctccctggtcccgcctgggaagggatgc

SEQ ID NO: 385835 - DNA, 122 bp, Homo sapiens
ccccagtcacagcaggagggaagcgcaaccctagcctttccttactctagagacaggaggcgctatgcagcgacggcggcagagaaagcgtgggagcgacgctcttgctctggacgccgacg

SEQ ID NO: 385836 - DNA, 122 bp, Homo sapiens
ccgcaccgggccttctgcctgtcttttaaacttggggtccccagtccctgggccacggaccggtacctgtctgtggcctcttaggaacccggccacaaagcgggaggtgagagagcagcatt

SEQ ID NO: 385837 - DNA, 122 bp, Homo sapiens
aaaggacagctcctgaagcatcctggccctgcactcacggtggcacgcgggcgccgtccccgagcccaggggccaggcccagggcccttccccgaaatctgccatgaaggtgaactcggtta

SEQ ID NO: 385838 - DNA, 122 bp, Homo sapiens
cccgcggcgcgctagctccggcgctggactccctccaggtcacaccgcctgaggtcacaccgtctgggccccagccgcgcctccgccctcagcgtctcgctgcgcaacccacacacgtgcgt

SEQ ID NO: 385839 - DNA, 122 bp, Homo sapiens
gataactttatacacttcccatttaattctaacagaatttgaacccagacatactggcttcgccgtttattatttagcctaatgaaaagttaatgtctttgtggataaaacagaggtggctg

SEQ ID NO: 385840 - DNA, 122 bp, Homo sapiens
atttctacatctgagtaagtggaaactttaggagtatacttccttacctggtaaatggaccggaaataggtagggaataggaagatcaagagctacaggatttgttttacttctcatctcag

SEQ ID NO: 385841 - DNA, 122 bp, Homo sapiens
cctcaatgccactcacaagccccctcgcctcccattggcctggcgcggccaggggcgaggcgctcattggccaatagggctgagtgacacgagtcggccccgagccgccctccgcgcgccca

SEQ ID NO: 385842 - DNA, 122 bp, Homo sapiens
ccccaccccgactcaccctgtctccagcatggggcagtgggtgatgatgtcactggttaacgtggctcagctggatttcctggggtggggccccccaggctacccacagcagcccagagagt

SEQ ID NO: 385843 - DNA, 122 bp, Homo sapiens
tgtcacaacggtaactctgtgaagactaggatcctatccattttgttcattacaaaattccgcctaagccttgaacaaggctatgagttataagtgcaaagcgatttagaggaaggaggggt

SEQ ID NO: 385844 - DNA, 122 bp, Homo sapiens
ataccctatatgcagcatcaaatctggtatgtatacagcatttatgcagaccggcccagacggtcctgcttattgtcctacatgtgtaagtgtgaacacttcagatagagaaaaaggttaaa

SEQ ID NO: 385845 - DNA, 122 bp, Homo sapiens
ctagtcagcccacacccctagggcctaaagatgctgaggtctgtatggaattttctgaaacgccacaaaaagaaatgcatcttcctgggcacggtccttggaggtgggtgacaacgtgcttg

SEQ ID NO: 385846 - DNA, 122 bp, Homo sapiens
cttccttcctgaggggtctgggctcttggaaatcaaaccctctcaggttgggtggctggacgattctcctcacacttacaatgggacaaggggaaccaggaggcccccaaggggatccctgg

SEQ ID NO: 385847 - DNA, 122 bp, Homo sapiens
ataagatatacaaatggccaaaaagcatgtaaaaagatgcccaacaggtgggcccctgagcgggcgtccgggaccgtggtgtgccaggcgccttccgcccttaacatgcggtggctggccca

SEQ ID NO: 385848 - DNA, 122 bp, Homo sapiens
ccagagcctctcgcatctcttgcccggccccgagtcaccttcccccaggtgcctccatctcgctggaaacataggaagcccgactcaaacgctctatgcctatggtcgtttcatgggaaagc

SEQ ID NO: 385849 - DNA, 122 bp, Homo sapiens
tttggccccgggtctggggtccgcggatagagaggcgactggggctctgcgaagttgggacgaagttaaaaggccacctggccaggggtagtggctcatgcctgtaatcatagcactttggg

SEQ ID NO: 385850 - DNA, 122 bp, Homo sapiens
ggcttaaaacccattctcctgtgaagaggccttccctgagatcctggccagaggaggtcccgtggccaagtggcagcggtgccggacatacacggcagggcagtgggctgctcagcaccagt

SEQ ID NO: 385851 - DNA, 122 bp, Homo sapiens
caccccgtcccctgggcaccgccgggggcggggctccctcggtgcctgcaggacctgcttcggtgggcactgtgcgcgctcctgatctgcatgcagcccccaaacatgctcggctccgcggc

SEQ ID NO: 385852 - DNA, 122 bp, Homo sapiens
gacctggagaatcttaaaatgtagaattctgggtttttgcctcttagattctgaatctgtcgatctgggtggagccggggaagctgcatttttgtctgtgctcaccaggtgattctgatgca

SEQ ID NO: 385853 - DNA, 122 bp, Homo sapiens
cagtgtccttgaagacctgagcattttactgattaccgtagtcaatagtggcttttagggcggagaagaataaacctttgtgatgtgttgtaagttgcagtatccccatgacaactttgaac

SEQ ID NO: 385854 - DNA, 122 bp, Homo sapiens
tgcggctccatggtctgagttgtcagccgttgttttttcgtgctcgctagtcgccgccgccgctccgccatggggaagcgacagcaccaaaaggacaaaatgtaagttgagccgcagtcggg

SEQ ID NO: 385855 - DNA, 122 bp, Homo sapiens
cgtggggtccgcgaacagaagggtcggcactagcagagaccagcaggcagacgcggagcccgctcaaggctaaagcggccgcacctgctgcctcggaaaggggtaccggagcggttgtcaag

SEQ ID NO: 385856 - DNA, 122 bp, Homo sapiens
gacgagtttggagggtaaatggccatcttaatggtatcatctgactgcattttgtgctgccgagattgtgctgagtggaaatttccctggaagtagcaagagtggcttagtttcattacagt

SEQ ID NO: 385857 - DNA, 122 bp, Homo sapiens
tgtccgtggggcttcagcattcactggcgtgggagacctgcagcttaggtgtgtcaccaccgtgtggtggaagggagagtgacaggcatacagagcccagtgggttcccagttcagagattt

SEQ ID NO: 385858 - DNA, 122 bp, Homo sapiens
aggattatgccatgttgtgtgtgtgtgtgtgtgtgtgtgtgtgtgtgtgtgtgtgtgtctcgagcagattctggctgccccagactcactaatgctgcctcctggttgtatgttctccagga

SEQ ID NO: 385859 - DNA, 122 bp, Homo sapiens
tatttctgaacggacctgggcttgtcggaccagtgagcggcggcggctgcgcggcggcagcggcagaaagcgtagctgctttgctgtagtccacgcccccttgccgctccggtgacagtctc

SEQ ID NO: 385860 - DNA, 122 bp, Homo sapiens
gccaggctctaccaaaccaggaagtgacatggagttaactttgccagaatttctcctcttcgtgccgagcggctcgggcttcctggcggcagcagatggtggagttagcaggtgggatgagg

SEQ ID NO: 385861 - DNA, 122 bp, Homo sapiens
aaaaaaagttcctggcatgtaccagttgctcaactcttgagtgtccttctcggtttaaaccgacgggggagagtcaaagcctccggagccagagggcggctaaggcccgcacggtccccggg

SEQ ID NO: 385862 - DNA, 122 bp, Homo sapiens
gacagcaagcttctgggctgattttttaaaacttatttgtcaggttgacattaatcctttcgctacccatcttgtcccaaagcaggattggctctaagctgtggaggaggggaacagagggg

SEQ ID NO: 385863 - DNA, 122 bp, Homo sapiens
ctggctaaggtggggccattgtggcattccaggagcccagaggaggggaaatggagtcaccgagaaggtgttgagagcaggtggttctttgagaagactgtataatgaaaaacctgcatcca

SEQ ID NO: 385864 - DNA, 122 bp, Homo sapiens
cggagggaatcagggaaggctgtgtaggagtcagcacttaagctggaccttgagagagtgcggcagttccagtgttgaaagggacttcagaaaccgtccctccagcaggacacaccatccgt

SEQ ID NO: 385865 - DNA, 122 bp, Homo sapiens
gggcgccatcatggacgaggactactacgggagcgcggccgagtggggcgacgaggctgacggcggccaggtgaggcggggcactgggcgcaccctagagagaatcgttcgtctccgccgcc

SEQ ID NO: 385866 - DNA, 122 bp, Homo sapiens
gcggggggcgcgcgtcaccttgaggatgttgtcgaagatggtgtcgcggaactccagcagcgccttctggtcgaactcgcggccgtggatgatgcgcatctgcttgaggaacgtggacttgc

SEQ ID NO: 385867 - DNA, 122 bp, Homo sapiens
tttaatataactccaactttttaatggtaaacaaagatgtaagtacaaaacatcaaaatacgttatcagtagttctaaacagccatagtagtcacagtgccagaagtgaggtcactcacatt

SEQ ID NO: 385868 - DNA, 122 bp, Homo sapiens
ctctttgatctcttccggggctttttcggctttcctggacctcggaggtgagagtaggtccggctcggacaagggtgggggtcgtctgaggggagcttgacccctacgtcttatttttggaa

SEQ ID NO: 385869 - DNA, 122 bp, Homo sapiens
gggagaagggtccggggcggggcggaagggagcaaagaggcgggatgaagacggccaggccgggagggtctttacctgcagctccgcccgctccacctcccactgggctctctccacctcga

SEQ ID NO: 385870 - DNA, 122 bp, Homo sapiens
ttgagttatgtgtattgcaggtggagaaagtggtgattctgaaggtgtttcaggatatttcgctaagtaatttatgaaagggaaaactatttttcatgagcatcagaggagagatattgtac

SEQ ID NO: 385871 - DNA, 122 bp, Homo sapiens
tttgactttaaacatgaggcgagttaacaaggcaagcagcgataaattcagcccagggcacgacccagcactaaatcctcccttacagtgtccagatttctggccaagttgtcaatgtgatg

SEQ ID NO: 385872 - DNA, 122 bp, Homo sapiens
agcgtcggcaccaagggctgatcaaatgtttctttctccttacaccggcggaccgggaaacgccgccgcagcctcgcctccatccttcctcctacaggttgcaaataaagtacagcagctct

SEQ ID NO: 385873 - DNA, 122 bp, Homo sapiens
tgaagtggcctgaagaaatgtctgtactggagacagtcggggctgtgtgcctctgcctgacgcaacatcatttcagacgtggaggaaggatctgttggcagatcttgggactcaaatgggct

SEQ ID NO: 385874 - DNA, 122 bp, Homo sapiens
aaggtttttcaagcgaggcaaattgttagcctgtaccgcttttgcagatttggaaaagaacggattgttctctggtaattttcagtattgtacgtttctttgtgtacttgctcactttttat

SEQ ID NO: 385875 - DNA, 122 bp, Homo sapiens
ctgtgacagtctaccatattatgttacagataatacaggaaaaacggggttactagtagccgcccatagcctgcaacctttgcactccactgtgcaatgctggccctgcacgctggggctgt

SEQ ID NO: 385876 - DNA, 122 bp, Homo sapiens
gctggtctgacgccgaagaccgcggagccgcggattcaaagaatgaggaagcgctgataccggggagaggcgggcctctccgccagcaaggatttaaaaatcactcaaaaccattaacttcc

SEQ ID NO: 385877 - DNA, 122 bp, Homo sapiens
cagctcaattttgatcaaacacagataatctgccagttggcttgatgtggagctctttttcgaaaccactgtttctctaactatggcatcttaagtatgtgtcacatgagtctccaactggc

SEQ ID NO: 385878 - DNA, 122 bp, Homo sapiens
ggcttcggaaactcgcgggtctcccctgcccctccctgaaggcggcccttcagcgccgcgcgcttccgcccccacactcgggttgaggagcaaggagagaaaagagcgtctttctctcttgc

SEQ ID NO: 385879 - DNA, 122 bp, Homo sapiens
tcactgggagtgattaagacaaatagaaaaaagcaaacagaattctcaagcattctgctccggagatgcagaggccttgtacggcaggcagagcttctcatgtgacccacaggctcaggccc

SEQ ID NO: 385880 - DNA, 122 bp, Homo sapiens
gacaaagtccgaggcaggattccaagtcccttgtccctagacctagaaatatgctcggtccgcatgtcccggcccgcaactccctcggaggaagcacagtcctcactgaaaggggagagcag

SEQ ID NO: 385881 - DNA, 122 bp, Homo sapiens
tgccagccccgatgcctgtcctggagcccctccccctttggcccccgccccccaccgctccgtccctcttgtgttttgcatgccaagaaccctgcatgagctgcactgttgaggccagaagg

SEQ ID NO: 385882 - DNA, 122 bp, Homo sapiens
ttgagctctgagctgtgcttcctcttcctgagctggcctctagtaagtgctcaataaacacgatggggagagggacactgaagcctaatctgcctgggtggaggatgaagcaagtaaaagga

SEQ ID NO: 385883 - DNA, 122 bp, Homo sapiens
tagagaaggcaccacagaaactgaaatttagactgtccagtctccgccctgtcctcaggtcgtggtttctctggcttaagaaagctgaagtgaaattggcattgttaaaagcattaccttca

SEQ ID NO: 385884 - DNA, 122 bp, Homo sapiens
cgggtgggggaggagggatgtaaacaaaagccaacgctctctttagttcacaatggctcgcgaccccaagacttccaagctctttggtgagggccagcaggtctgttctccaggagtgccct

SEQ ID NO: 385885 - DNA, 122 bp, Homo sapiens
gatgaagagcagcaggtgttgctttcacgactggaagaagaggaacaggacattctgcagcgactccgagaaaatgctgctcaccttggggacaagcgccgggacctggcccacttggctgc

SEQ ID NO: 385886 - DNA, 122 bp, Homo sapiens
tgggcccctggggtcacctcccactccggctagaaagagagaaggagacagtgaattcctcggaagccgctcgccctgcacccaagcgggacttgcaccacaagcagccccaggaaaaaact

SEQ ID NO: 385887 - DNA, 122 bp, Homo sapiens
gcgccttgggaatgctgagtcgcgatttcctcatcccctcgtgcagctgcatttctgctgcgtcatgtttgggaggggggactcgcggaaacaaagggaaggcggattttgctagattttgc

SEQ ID NO: 385888 - DNA, 122 bp, Homo sapiens
atcatgtgacacggaagtagctccgaacaggaagaggacgaaaaaaataaccgtccgcgacgccgagacaaaccggacccgcaaccaccatgaacagcaaaggcaaggaccgagggtggcag

SEQ ID NO: 385889 - DNA, 122 bp, Homo sapiens
atttgttaacttttagactttgttattgttcattttgggcttatctttggtcttttcccacgctcttaaaagtgtagaaatcaaaatctgagtatgataatctacttagcatatgactaatt

SEQ ID NO: 385890 - DNA, 122 bp, Homo sapiens
ccctctggctcctctcctgcttctcccttgtgggggccgcctttggtgagtgctggtgcccgaggggtctgtcctgagggagccctgagcctggctgagagggggatctgagtcccctgctc

SEQ ID NO: 385891 - DNA, 122 bp, Homo sapiens
cgggcgcagcccaggacggcgcagcgcaggcccggcgggcgggagcagccgcggaggcggcgggcccgggtttgccaggactccctagagctgctctgttcgcaggtgtcagtgatttgagc

SEQ ID NO: 385892 - DNA, 122 bp, Homo sapiens
aagtgatttgttttaagggtggagccggagataattttaaacaccctcccccttggtgcacgttgcggggtgtgactcaccacggggaaatcagactgatttaaaaccttcagtgcaaactt

SEQ ID NO: 385893 - DNA, 122 bp, Homo sapiens
agtaagttgtctctggaaagagttagtttaatattaacagaatggagccagcagcagaagcgtgtaacaaaacagtcactgattaggggaaagcaaaagagactggtaacggggtgaagaag

SEQ ID NO: 385894 - DNA, 122 bp, Homo sapiens
ctcggagatcggcccggcagccatggcgaaagagatcccgccgtctcccagcagcggttccgccttctgacctcagcacgacttccacttccggggcgaagacggacgtagcggtgggcggg

SEQ ID NO: 385895 - DNA, 122 bp, Homo sapiens
aaaggagccctagccaaatgtacagcggccaacaacttgaagaaagctgtctttctccctcgacgtcctagggtagggaccagtcccacatttagaaacgttatttctgggaccaatagcaa

SEQ ID NO: 385896 - DNA, 122 bp, Homo sapiens
ccatgggaggcgccctgagggcagggcccttctgattccccacctggcctcgagtgaggacgcgctcaacaacatctcgagtaaagcgggggaactcgcttcaacgcgcagacagcacagct

SEQ ID NO: 385897 - DNA, 122 bp, Homo sapiens
taactactgagggcgtcaggaaccagtaaggggatgatggcagcggcgggcggtccgaagcggcctctgccagggcccccgctgcggtggggtgcgggcgcgggccgtgggtcctcgggtgc

SEQ ID NO: 385898 - DNA, 122 bp, Homo sapiens
agtttcttccttctggtgggttcgtggtctcactcactccaggaatgaagccgcagaccccggcggtgaatgttacagctcttaaagatggcgcatcacagttgtttgttcctcccggtggg

SEQ ID NO: 385899 - DNA, 122 bp, Homo sapiens
caggccagagcaagctgagggcaaaggtcatggatcatctgaacagttggcaggtggcaacggcacttcctggtcaccagggatcaatcaatagggtggccagatagtatgggggacaggaa

SEQ ID NO: 385900 - DNA, 122 bp, Homo sapiens
catgtgcctgattggacagtccccgcccctactcctctgattggatagggcatcacgccccgccccctcaggccctgagtgacaggagctgtaatcagacaatgggccgaatgagacagcaa

SEQ ID NO: 385901 - DNA, 122 bp, Homo sapiens
gccccagcacccgtccccgtgtgttcacggcagtcccagcaccgtccccgtgtgtgttcacggcagctccacgcacagcagccccagactggaggcccccaaatgtccgtcaacagtgaatg

SEQ ID NO: 385902 - DNA, 122 bp, Homo sapiens
gcagggtcacccgcacaggctgcagcccccccggctgctttgggcaaagggttggggggacgctgtggctcccgtgtggtacctgaggccggctcctgtggctctgagggggtctgcagcac

SEQ ID NO: 385903 - DNA, 122 bp, Homo sapiens
cccccgggcgcaaagtctccagccctggccgggccccgctcctcagctccgcggtcccggcgcccaccgcccctggcccctggccccagaagccagtacccgcccgccgccgcctcttctgc

SEQ ID NO: 385904 - DNA, 122 bp, Homo sapiens
ctccccggagtaggaactttcaggattatcaaaccccaggggctctttcccactcctgtgcgggcctggcttcaggctcaggtgcacggcagatccctggccccgccggcgccttctccacc

SEQ ID NO: 385905 - DNA, 122 bp, Homo sapiens
gagcagcagagcggcacagcagagaaggagagaaaaaacaaagagctgaacgtggagaggcgaagaggcaactgaatgtcagagactgtggatagacgtggcttaacttcagacaacacgat

SEQ ID NO: 385906 - DNA, 122 bp, Homo sapiens
gacatgcagcccgctatgactgagcctatccccccactccccgtgggctcctgtgccgcccgagcctccccgacgaacgctgctcccggctccacggcgcccagtcccatcgaccacccaag

SEQ ID NO: 385907 - DNA, 122 bp, Homo sapiens
agcgggagcggaggggaacaatggcggcggcacatgggaaagcctgggcgggacctccatcgcggccctcccggcaaggagagaggccacgcgtgaggggacgcgggcttgggagaagagaa

SEQ ID NO: 385908 - DNA, 122 bp, Homo sapiens
cattcgcctttctgattaaatagtaacttacttatcaagcttcttctcaaatttcagtcccgtataagttaagaatttaaccacaaggttgtttatctcctctacatacatgtcactaggat

SEQ ID NO: 385909 - DNA, 122 bp, Homo sapiens
cagatcattccctttaacatgccttgaaacaccaaaaggccaggcagtctcaaaggacaccgtaggctaactcggacagtagtcatggggcctgaagaattctcctagagtgaaccacaaag

SEQ ID NO: 385910 - DNA, 122 bp, Homo sapiens
ggggggctcccggctttccccttttcagctcttggacctgcaacaccgggagggcgaggacgcgggaccagcgcaccctcggaaggctcgatcctccccggcagggcgcctggccaacgagt

SEQ ID NO: 385911 - DNA, 122 bp, Homo sapiens
ctgttggttttatttcagtaagttctatatcaaaaggatctggcagctcctttccccgcccgggcgctataggtgttgtgacccttgggacagaagttcagagcgagggtggggggggggga

SEQ ID NO: 385912 - DNA, 122 bp, Homo sapiens
ccacaggaagctctttgtgttcctggccgtgctcatctgcctggtgacctcctccttcatcgtctttttcctgtttccccggtccgtcattgtgcagcctgcaggcctcaactcctccacag

SEQ ID NO: 385913 - DNA, 122 bp, Homo sapiens
cctttcctagatttgctctaccactcttgttactctcccaaatcagtgattccggcttcccgccgctgctgtttctaaaccctgaaccccaattccgttattattaataaatcaaattaaaa

SEQ ID NO: 385914 - DNA, 122 bp, Homo sapiens
tcgaaaccatagagacgtccgcgggaaccaaaatcacggtttttccaggagaaaccattgcggagcccaatttgccggtatggttgccatagaaactgggacctggagcgtgcccattttcg

SEQ ID NO: 385915 - DNA, 122 bp, Homo sapiens
tacataaagtgaggtgaacacagagtagctacttgtggggatacttaaccttttatctgtcgctgtctgcttaggaacataaggaaagacagctccttgcatgactcagctttcagcttaat

SEQ ID NO: 385916 - DNA, 122 bp, Homo sapiens
agttgttttttcaacaaccagcaacttctgtgtgtttcctgattcagtgccctctaaccacgctgcatgcctggtctgtggcagacttttagtgctaagctctaagcccagcaggatcagat

SEQ ID NO: 385917 - DNA, 122 bp, Homo sapiens
cacacacacacacacacacacacacacacacacacaaaagaagctcttgcccttccctgccgcccccagctgctgtggtgagacagtctctgcacaggcacagggcccagtgcaactggcca

SEQ ID NO: 385918 - DNA, 122 bp, Homo sapiens
gagatgaccgagttgaagtacatctggggcatgggggttggggtcagggagggctccccacgggtcagcaagagggcctgggaagggcagtgaggggccggactcaccgacacatagaccgc

SEQ ID NO: 385919 - DNA, 122 bp, Homo sapiens
ccgccggttgtgtctcctggcggggactcccattgggtcgcagctggacagagatcggatcgtcccccgcgcgactctcactgggccaggcccccaccgaggcccgcccctctctccgctat

SEQ ID NO: 385920 - DNA, 122 bp, Homo sapiens
agacttacacacctacacacttcgtgcgcgcacacacacacacacacacaaactcatttccggcatccagtctttatgatgagagctagttcttcagtaagagtccagcttctggctgcaga

SEQ ID NO: 385921 - DNA, 122 bp, Homo sapiens
gggaatactctgacatcgctggttctgcttaagaatccgtctatttccaactttgttgtccgtagccacacagtcttaccagtggtattcttggggtccccctaacatgcagtgtcgtctct

SEQ ID NO: 385922 - DNA, 122 bp, Homo sapiens
atgaaatgtttctgccggtttctttctgttcttgtgcaaatgtgaaaactattgctttagcgaaagcaaacaccgttacttcctgaatcacagctccctccaaaccactcctctccagataa

SEQ ID NO: 385923 - DNA, 122 bp, Homo sapiens
ggtgcttctagccctgggattccacaggatgagcagcatcttaaaatccctagatgggagcgtggctggccctgccccctgctggccacacggctcacttgctctaactgtacgtggctgaa

SEQ ID NO: 385924 - DNA, 122 bp, Homo sapiens
agagcaaaacctcattttgaaaacacacacatgaggggcgctgggaatagccgctcatgtcggctgacggagcggtgtggggccgcatgcgaagctgcctccgcgccttccccgagcggctg

SEQ ID NO: 385925 - DNA, 122 bp, Homo sapiens
gcaatgtgtcagaagcgctgctcagccacagcctcttgggtggcatgggaacagagcggacgcattacggaaacccagttcttgggcaaaagataaggaagcgaagggcctcactggaaatc

SEQ ID NO: 385926 - DNA, 122 bp, Homo sapiens
tggagatggtggcgcggcgtccgccgcccgcgccggactcggcactccctgaggacccggcgccaccgcacgcctcgctcagcccgtccaggctgcggctgtcctgaagacggctggagaac

SEQ ID NO: 385927 - DNA, 122 bp, Homo sapiens
gcatattcccccagccttcccactttctctattaattatatcatgtttgatttttgtttacgttggccagagttcttgttctgtacaactaaaaacccacacaaatacaaaaagttaaataa

SEQ ID NO: 385928 - DNA, 122 bp, Homo sapiens
gtttgcccagggtgcaggaggacccgggaccgcagtggctggcggacatacctgtggtggcgatgcagtcaaagcccacgaaggcatagaagcaagtcgctgcccccgacaggacaccagag

SEQ ID NO: 385929 - DNA, 122 bp, Homo sapiens
tgcctgtaaacccagaattttgggaggctgaggcgagaggatagcttgagctcaggagttcgagacctgcttgggcaccataatgagaccctcatctctataaaaagtagaaaaaattagtt

SEQ ID NO: 385930 - DNA, 122 bp, Homo sapiens
tcacaaaccttctacaaaagggctgtcccggcagccttgggcaatttcagctcctaggtccggagtcaaggggcagaacttgggtgatggcgctgacttgaagcagcaatagtttaataact

SEQ ID NO: 385931 - DNA, 122 bp, Homo sapiens
taaagagtcctacaggagaaaaagcacagcaggcagctgggtcaatacaattgatctcatcgtttaacattttgcatcagagaaaaagtcagtggcaagagcctcaccttccagcggggtcc

SEQ ID NO: 385932 - DNA, 122 bp, Homo sapiens
gtctccgaacctccttccctaaaccctgtacagcttcctgggccaactctagccccagtacggccacctgacccacagctgatagctccctctagaggcaacgatttttctttactgatagg

SEQ ID NO: 385933 - DNA, 122 bp, Homo sapiens
ccattttctgctcaaggtcttccattgaattggacctactgatgagacctgcttttccttcgggttttgcactatttccttgacaactacacgattgccaaaaatatggtcatgcagctctt

SEQ ID NO: 385934 - DNA, 122 bp, Homo sapiens
aatacaaaccatatttactttcccagttttcggtaatctcatggttactgagccctcttccgcctcctccaggaagtcgtccgggttctccacacccacctcctacgtagccagtcgcctcc

SEQ ID NO: 385935 - DNA, 122 bp, Homo sapiens
gctcggaacatgccctctacatactgggaggcctcctcatcgtctgtgaccttgaagaagcgcttaaactcatgcataaagagtgtgccgctggggcactccatcacaaacttcttgtacca

SEQ ID NO: 385936 - DNA, 122 bp, Homo sapiens
agtgagagtctaaggcattcgaatcactccctgttgtgtcctattacgtcttatgggagccgctgcaggagctctaatccagacacttatggtaatgaagataggagcttccactctcccaa

SEQ ID NO: 385937 - DNA, 122 bp, Homo sapiens
taaccgggaggctgaggcaggagaatcacttgaacacaggaggtagaggttgcagtgagccgagatcaagccactgcattacagcctgggtgacaaaaagcgagactccttctcatagaaaa

SEQ ID NO: 385938 - DNA, 122 bp, Homo sapiens
cagggccggctccttcttaaacttgctctcgaagggccccgagtggccgtgctggtgcagcgccagcagcgtgtcgcgcacggtcttgggcctgttgacccagtcctgctctccagacccgc

SEQ ID NO: 385939 - DNA, 122 bp, Homo sapiens
ggggagctgagggcccttctgtgtgtgaaggagtcgcagggcccagggcagagggtcccccgtcttttgggcagaccagagaaggctccggagaccaggcgacatttagggagaacctgagg

SEQ ID NO: 385940 - DNA, 122 bp, Homo sapiens
taggagaggaagcggagggtgctgcagacaccgaggtgaacgtaaagccggcgagatctccgtgctccgggtacccacagatactgtccgcgccgcccgcgccgacttcctgcctagctaag

SEQ ID NO: 385941 - DNA, 122 bp, Homo sapiens
tataagggcagggctcagatacaatccgagagcaggactaaagcatgagggcggccaaggcggaagggagtagggaaggaagcgccgcgcgtttccaagatacgcaggcgggctcggcgaga

SEQ ID NO: 385942 - DNA, 122 bp, Homo sapiens
gtggtcacctctgcaaagcagggtttctgggccgtgatcgagtcttgctcacgggcatgtcgggaaacgcctgctgcgctccctgcctgaaaatccactcttgaaaatgcactcccttaggt

SEQ ID NO: 385943 - DNA, 122 bp, Homo sapiens
ggagaggtaaagcccacgttgccatggagaagcgccccgggcgggggaggggcggccccacgacaatgaccgcattgaggctgcgcttggcctcgcgcctctcctcgaacagcccagcgtcc

SEQ ID NO: 385944 - DNA, 122 bp, Homo sapiens
tcatggatactacatttgcctgccaggaatgttgtgttgttctggtgttctcgtttctgccgttatcattgtttctgcttaatttttacaacacaactctggccgcacccgtggatgatcat

SEQ ID NO: 385945 - DNA, 122 bp, Homo sapiens
actttccaagaacgcagtaggatgcagtctccacggggacctgcagagcctctcatgtcccggagggtggggcagcctccctagacacttaggaagtgccctgaatccagaacagttgctct

SEQ ID NO: 385946 - DNA, 122 bp, Homo sapiens
gtggtccccaggaaccctcgacagggccagggcgtctctctcgtccagcaagggcagggacgggccacaggccaagggcagcagtcaggcctgctctgtctgtgaacgctcccggcttggcc

SEQ ID NO: 385947 - DNA, 122 bp, Homo sapiens
caattagagagcggctctcggatatggggcggaaccctgaaaaggcgagagctgagatgccgctccgttctgccttaccacgccgccccccagcgtccgccaattaggagagcccggagccg

SEQ ID NO: 385948 - DNA, 122 bp, Homo sapiens
ggggtcatggtaggcactgcttgggtggtctcggcttcatcctttggagctggacagacacgtgtggggacagtgaggaccctgggttctcagttcagcatagaaaggatgtgtcacaaaac

SEQ ID NO: 385949 - DNA, 122 bp, Homo sapiens
cctgcatgggtcccccctttgcaattacgcagaaagctgctggatactccactgtttggtcgtttccatagtaaccctgtccctggcaagatgcccaaatattattacaaccatccagagga

SEQ ID NO: 385950 - DNA, 122 bp, Homo sapiens
tgtccactctatcctagctacatctctctccataggctcagagatccctgtaagcgcacacgcgcgtgcgtgcacacatacacacacacagaaacacgtgggccagccccaagtgtgtaaat

SEQ ID NO: 385951 - DNA, 122 bp, Homo sapiens
ctctgggtccttccacgccaggtcattcagaacctgaaacccccagcggaggtggagagccggggtgagtcctggcgtccgagacgtggaggacccagcccccggagcgcgttccgttagtt

SEQ ID NO: 385952 - DNA, 122 bp, Homo sapiens
ggaggttgtaagccagaacatcctgaaggatgccgtataactgatgacctcatctatccacgaggctgctcagaaatgcccacccctggccaggcgcggtggctcatgcctgtaatctgagt

SEQ ID NO: 385953 - DNA, 122 bp, Homo sapiens
ctttagtttgtaggtagaaacaccagggttccaggaggggagaggtcttgtccaaggtcacgggacacccatggccaccaggcctctaagctcctggctggaggccactcacaaagtcaggg

SEQ ID NO: 385954 - DNA, 122 bp, Homo sapiens
acatcaggaaaaaggaaggctttaatgcaaagtcttacaacagctttggggaattgttaccgattgaggtctcagccttttcctgactcattttccaaaggttttcaacttccccagctgtg

SEQ ID NO: 385955 - DNA, 122 bp, Homo sapiens
caacagggaggctaagtgtggtacagggagttgagactgatgatgtcccatctaaacagtcgtcatccaactcctgaaatccaataaaacaaatatcgtttgagagattactttgtgccagg

SEQ ID NO: 385956 - DNA, 122 bp, Homo sapiens
gagtgtaaacattcaaccatgatctactctgaaggagagagtccagtgtatcagtgggcacgagagggggatttgaccaatggggacaacttccctgaagaagtgatagatgagtagcagtg

SEQ ID NO: 385957 - DNA, 122 bp, Homo sapiens
gcttctcgcttgctgctgcgctgaggggaagccttaatagagaatccgcctctgtgccgccgccccccacccgccagcccatccctattatcaacaccatcaacggcggcaaatgacactct

SEQ ID NO: 385958 - DNA, 122 bp, Homo sapiens
ctcagttttcccaattgtaaaagaataataattattgttagtcctcctatttaaatttcacggcacggtttacaaagccagcataaggatactgggaattagggaagagacttgcccaaatc

SEQ ID NO: 385959 - DNA, 122 bp, Homo sapiens
agggtctgggaggggccagcgctgactaacagtcggtttccctaccctagacggctgcgacgaggagctggtgggtcccctgtatgcacgctccctgggcgcctcctcctactacagtctcc

SEQ ID NO: 385960 - DNA, 122 bp, Homo sapiens
ggttcattacagcagtttaataaacagataggggcgacagtgaaggaaaggagcggtgcacggagtgaagaaaacgcgtggcttctggaaattttatattcttcctatataaccaaaaagag

SEQ ID NO: 385961 - DNA, 122 bp, Homo sapiens
agcggggttaaagccgggcgaaggagggcaagtgctggtggaccacctctcacgacacaccgttcctgtttatctcagtgtccgtcatccgcgggagcagctttagagagcgactgagcgtc

SEQ ID NO: 385962 - DNA, 122 bp, Homo sapiens
gttgacagtgtggtttgcagtggtagggatgccataaatatttctgatggaagtcatgcacgagaagctacttcctaggtactattgtccgtacttgcctgaacctaagaatcacctgtaaa

SEQ ID NO: 385963 - DNA, 122 bp, Homo sapiens
gcctccatggcaccggtgcctgtcagcaaagggccatgcagtggccgcccccgtatcacacggccgcattgcgctttctggtcaacagtccccagcagcctgcgcgctggaacactcggccc

SEQ ID NO: 385964 - DNA, 122 bp, Homo sapiens
tctgctgtgaggctgtgctcgggccgctcccgccgagggaacggccctcccaaggctctgcgccccaattctcgctcgtttgccaagaggtagccgtgtcggggagctagagttctccgggg

SEQ ID NO: 385965 - DNA, 122 bp, Homo sapiens
cttcataaagcagctgctggcacagcggctgagaaacccaggcgtggaccctagcccggccgcctgtccgcgtggcatcctgaagaaatcactgcatcttcctgtgccttggtttgctcatc

SEQ ID NO: 385966 - DNA, 122 bp, Homo sapiens
ttcactgaagacaggatctgattttttcctaactggttccctatgtcctgccttctggtgcgttttctttagatcttggactactacgggccaacattagctaacatttatggagcaccgtt

SEQ ID NO: 385967 - DNA, 122 bp, Homo sapiens
taccacactgaccctgctgatacaacatcttccctctcttctcagagactagtggaaagtcgccgacagcagatcttgagggagtttgaagagcttcataggcggctggatgaagagcagca

SEQ ID NO: 385968 - DNA, 122 bp, Homo sapiens
caggtttgtgcccaaggagctgcggagtttcccggccccgcagggcaccctcctgcccaccgtcctgaccttgcccacccccgatttgcctcagaccagggtctagcagtccctcaactgag

SEQ ID NO: 385969 - DNA, 122 bp, Homo sapiens
gctcattctgcgcctccggaacgtttcatagatttttgctgagtgaaatcgacttgctgccgccaccgccgaaaaactcccggggcacagagctccgcccccaccgggccaggccccacctc

SEQ ID NO: 385970 - DNA, 122 bp, Homo sapiens
actttccggggcaaacaactgagggccttttgggcgtcacagatttggtttagttcggatcgaggtaatcatcttgaacccgcttattagagtcagtggctttttctgtctcacagccgcct

SEQ ID NO: 385971 - DNA, 122 bp, Homo sapiens
agacacaatgctgattaaacaagggctcatatcccattttgagagctccctgataaccagcgccacaatcacattggtaggtcaagcaaaaatctgaagataaaatcaatgtcagttttctg

SEQ ID NO: 385972 - DNA, 122 bp, Homo sapiens
cactggatgaccctaatcaccaaacatctgcttccttctctgtagctgtgaccctgataccgcgtggtgtgctccgaacacatggtgcccagaacgaaggcggcgtccagaagccctaggtc

SEQ ID NO: 385973 - DNA, 122 bp, Homo sapiens
acttcacatcaaaaatgcacgttgcagaggcatttttccttcggggacgccggaagacttcgccacacgcgcgccctctccgcggacaccaacgtgctgacgcatgttcattagcgagctgc

SEQ ID NO: 385974 - DNA, 122 bp, Homo sapiens
agggacggcggggtccagcaggcaggctccggccgtgcagggtgtggactgtcccgggggcgctgggggcttctgagggtgtctctgtccgccctgccctcagccgcactctgttcagaagg

SEQ ID NO: 385975 - DNA, 122 bp, Homo sapiens
ggctgtgtataagtgtgcatggatgtctgagtgtgtgcaaattaaaacggaaatatgtgccggagtatgatacaaagtacaggaaagtactcgggctttggagtctgtctgacttggtcttg

SEQ ID NO: 385976 - DNA, 122 bp, Homo sapiens
cacaaaataagggagttattgtcttctgaacaattctcattaggttgaaaatgaaaaaaccgagggtacaaacctgaaaagggagaatcaaagattgatggaaatatgtgaaagtctggaga

SEQ ID NO: 385977 - DNA, 122 bp, Homo sapiens
gacagcgaggtgttcgcggggctgggctccaaggcgcaaggcggcctgacaccaggtacccggctcccggttcctccgacgttctctggcgttcccgggccctgaccagttcctccatctca

SEQ ID NO: 385978 - DNA, 122 bp, Homo sapiens
caccctctacttactgtattaatcatatcagctctcactcttcgtagatgctgccctgctcgaaagcactggttatttagctgggagtcaggagaacccaaaccctccctgggcatagacaa

SEQ ID NO: 385979 - DNA, 122 bp, Homo sapiens
ccgcaagcagggggtgcctagtcctcgtcccccaaagaccaatcgtaagccagatacaggcgagtgactgtcaagaaggccaattagagcctccgaagggaatctggacctgcctcttctct

SEQ ID NO: 385980 - DNA, 122 bp, Homo sapiens
cgcccgccctggctggggcagagccggccgggctccccagcagtcggggtgacccagccccggggtccctccgccatgccgccccgcccgggtcctcacctgccagctggcccccgcgggca

SEQ ID NO: 385981 - DNA, 122 bp, Homo sapiens
tcaaccaggtcgagatgtggttagggagccagaaagctggaggagtaactaattctactgcggtcctatatggtttgctcacattctgttttcagaacatttgaaacacactccgtttcagc

SEQ ID NO: 385982 - DNA, 122 bp, Homo sapiens
ccctttccgagtcaaagaaaggggtgacggacgcacctggaaaatcgggtcactcccacccgaatattgcgcttttcagaccgacttaaaaaacggcgcaccaccagactatatcccgcacc

SEQ ID NO: 385983 - DNA, 122 bp, Homo sapiens
cttggggcagaacctgtctcaggatcaccacaaccagcagctggcaggtgacagcctcaacgcctgacttcccaggacccgctcatcacccggggaagatccgacagcactagccctcctgc

SEQ ID NO: 385984 - DNA, 122 bp, Homo sapiens
ggacgcgtgcttcgagcctgcctgggcgcagaacggggtccctcggcaggaccctcgccgcgacagcctcagcaggggatcgtcgagcaaaagcccgcaggaatgctcctttctggggcccc

SEQ ID NO: 385985 - DNA, 122 bp, Homo sapiens
agggaactagtaggggcccagggatcttcctgatctcacctcctacccaggcccacgtggcggttagctgccggcttgtgcccagctcctaggcaggtcaaatattctaagctgcgactcag

SEQ ID NO: 385986 - DNA, 122 bp, Homo sapiens
cccgcagctgggcaacccctccaagaccctgtgttacgcttaaattcctctccctcctatcgtacccaccatccatccttacagcagggaggccgagactcacagaattcccttctccacca

SEQ ID NO: 385987 - DNA, 122 bp, Homo sapiens
ctccgggagacagctggcttcctgctctttggttgttggctgagtccagccccttagggtcgcaggaccaaggttcctgttttcttgccggctgccccctgaagctgtccccagcttctgaa

SEQ ID NO: 385988 - DNA, 122 bp, Homo sapiens
cgagcggggcgcggggagctgcaagcgtccctgagctgagctccgctgggaagttcctatcgcttgcgcagtagagtgcatttagacatttcaatgacaactaaatttgtagctggattcaa

SEQ ID NO: 385989 - DNA, 122 bp, Homo sapiens
aatgctgagaatccggcctggagaaacactacgccaacacagtggagattctaaacacaacgcactggaaaatgaggacataaatatattgcaattatattagatttcctgcccactgatta

SEQ ID NO: 385990 - DNA, 122 bp, Homo sapiens
tttctgcgcatgctaacgggcaggtgggcgtggccgggggctggggacccagcctgtgtgcggcctggagaagcatcgcttgctgcttgctgaatgcggggcagcccgaatcgatgccgtcc

SEQ ID NO: 385991 - DNA, 122 bp, Homo sapiens
gctcgggcagcgtttcttcagggacctagacggcctggagaggaagggccccagcccagccgcccgggcctctcacctggctctcggggcgcccggctcgcacttcctcccgccgccccgcc

SEQ ID NO: 385992 - DNA, 122 bp, Homo sapiens
ggcaagagcagcggagacaaagcagcgaggcgaggtagctacaggccacagcggcgaacgcgcacggcgggggagagcgcgggccgccagcgaggcggggaaagctcggaccgcggacaccg

SEQ ID NO: 385993 - DNA, 122 bp, Homo sapiens
cagatagtaagcaagactcaattttctccaaaaaagcccgttacccctttctgcaaggggcgcatgcctaggttcacagggagctctcttgtcagccccagaacaaccctaaactccaaatg

SEQ ID NO: 385994 - DNA, 122 bp, Homo sapiens
agtttttagtggaaatgctaatggcagtgggaaaggttgcctcactttcagagagactctcgctgtctgcacccttttaataattgctcttcctggcaaggctgccacttccctgcctcccc

SEQ ID NO: 385995 - DNA, 122 bp, Homo sapiens
ttctccagaaggaaagcagtgcggctgcctggctgatagcaggaattcggttttggctcccgaagtcagacttgctaagggctgacctgcagccccagtccccctcaggtggccgccaagga

SEQ ID NO: 385996 - DNA, 122 bp, Homo sapiens
gttgcctcggatcggccaggcctggatatcagcgaacagatgcggatttccaccagggggcgctaggacgccacgacctttcactatgtgcaccagggggcgctgccgcccgccttggccat

SEQ ID NO: 385997 - DNA, 122 bp, Homo sapiens
cggcgcgatggcatcttcgctgcctgcctggccgcccttggccgggcgcgatgacgttaacgctcttccttggcgttctcacactgtggacccagggatggctccagctccttagagttttg

SEQ ID NO: 385998 - DNA, 122 bp, Homo sapiens
agtttcctgatgccccctgtgcgtagggacagcctccaagtcctgccacagaagagtccacgacactcactcccatctagaaacataaggatggtgaaacacagttgttgctggggacaaga

SEQ ID NO: 385999 - DNA, 122 bp, Homo sapiens
tcagagtgttggtcactttctgcaattatctccttgagtgcagttgtccgtctgcaccggcgcctcactgccttgttaaccagtgagtcccagggccgggcacggcgcagcctctcagccag

SEQ ID NO: 386000 - DNA, 122 bp, Homo sapiens
ccacggccgccttggccttctcctgctgccggctgtgctggaacaggtcggccaggaactcgtcgttgaaggcggccgggtcgatgtaggcgctgatgtcgatggacgtctcgtgctcgcag

SEQ ID NO: 386001 - DNA, 122 bp, Homo sapiens
tagggcgtggctcaaggcttttaacaacctttctgctgtcatagttgtcccccaacaagccgttgttgagtaaatgagttaatgctctgggtgaaggaggaaagccctcactaggaagagac

SEQ ID NO: 386002 - DNA, 122 bp, Homo sapiens
aggtgggccaggagatgctggtgttcacttagcctgtcctggactctgggtgtagcatttcgatgtccagaaaatacccccggcttcagctcatcacacaaccaaggaaggagctccacact

SEQ ID NO: 386003 - DNA, 122 bp, Homo sapiens
ggaaacgcgtttctctaatgtgtgttttatcctcctactgggaggttggtgtcatcgctccgcagtgctgaccctggagcatgcttagtggggaaacgcaggtccttctgagatttcaagct

SEQ ID NO: 386004 - DNA, 122 bp, Homo sapiens
ggaggcgcgtcctgtgcggtcggtggcggccccaggtgggtgcggtgcgctggcaggaagcggcagcacgacccccgactttgcatctggacttttctagtaacggaccagctccttctgcc

SEQ ID NO: 386005 - DNA, 122 bp, Homo sapiens
cctcactctccaccccactgatatgccagcgttctgccagctggagtagcgggcagaggacggtggccaggggctcacgccacgatgtcacccacatccggggacaaggaccatgggctggg

SEQ ID NO: 386006 - DNA, 122 bp, Homo sapiens
cctgctgacattactaggaaagagctcagatgtgccacgctcactctgagtagcacctttcgacgtgaacgttgggaccctgacctgcagcgtctttgggagatgggccatcacacgggttc

SEQ ID NO: 386007 - DNA, 122 bp, Homo sapiens
tttcaccctccttctgggaattcctttgtctttctcctatcttattttgtttgctgaattcggtgtatttctcttttttggtttactttcatgttttggtagagcccattttctagtggcat

SEQ ID NO: 386008 - DNA, 122 bp, Homo sapiens
gtcttgtccgcccttgcctgtagcggtccgcaccctgtagtgtgttcttttgcccatttccgggaatggtttatcctctttgagaagcggctgcttttggagaaaaagtgcaggcactattt

SEQ ID NO: 386009 - DNA, 122 bp, Homo sapiens
ccctgaagccacggattcctccccgccagaccacagctcctcccgagccacgggtccccccgaagccacagatattctggcagcccgagtcctttcccacaggttcaaaatgtctctagagc

SEQ ID NO: 386010 - DNA, 122 bp, Homo sapiens
ttgaatttttctattttgtatgtttttctcttcacaggacaaaaagggcatacattacctcgccactgtctttgagaaaaaggacaagaatgaggataagaagattgatttttctgagtttc

SEQ ID NO: 386011 - DNA, 122 bp, Homo sapiens
tttctcctgctgctccctagacaaaagcagagagagttcctgctctcaggcccttcatctcgctgtctgccagaagagcccaccctggccaccctaaaacactccttcagaacccctttatc

SEQ ID NO: 386012 - DNA, 122 bp, Homo sapiens
cgtggattggggcctcagggagcggacgtgtaactggggaatccccaagacccctgggcgcgcgtggagttaactgcgagcctgtcctcattctggcgatcagacgccccagggcctcgtga

SEQ ID NO: 386013 - DNA, 122 bp, Homo sapiens
gtggcacctgctgggtgagcccggctcaagcgttctgtgaaggtttgtgtctgcacgatccgtgaccttcctttggcctccatgcgcagcgcacaggcttctaggggtggttttaactttcc

SEQ ID NO: 386014 - DNA, 122 bp, Homo sapiens
ccttaggagtgggctgctcgcgcaacgcctgattgtcctgctcggaggagaacgcttcctcgtttcctgctgaaagttcaaacacttgagcaggttcagcgtctaaatcgttgtttcaggaa

SEQ ID NO: 386015 - DNA, 122 bp, Homo sapiens
ggtcagtcagcagcgtcccgtctgcttcagggggcacttccagcctcaccctctggttgccggcactgacgtaggacaccacaaatcggtccacctcagcctggggacgcagccagccaagc

SEQ ID NO: 386016 - DNA, 122 bp, Homo sapiens
tttagcgatggagcaggaccaacttaccagctcgcggtgctccctagaagctggattcttcgcaggtgcgagcacaccccagatgccagcgtggacccttgagcaactggaagttaaaaacc

SEQ ID NO: 386017 - DNA, 122 bp, Homo sapiens
gctgagtttatctgctgcagtttggcacttcttgccctaagctttttgagacaaagattgcgaaggaaggagatgaggacaagggaatgaggaggcccaggaggtggagccaaagggataag

SEQ ID NO: 386018 - DNA, 122 bp, Homo sapiens
cctgatgcatcaatgaccctttcagacccttccagcctcaggttaaaacattttatctcccgtgtctagagtatccttaagagaaagagtgattctcttagcaaaatccttctcaaagacgt

SEQ ID NO: 386019 - DNA, 122 bp, Homo sapiens
cctggggaatggcgatatccccccaccagggacacaggctgttcctcgaagtgggggtcccggctcccctaacgctgggccagagggcctaggccccacagcgcccctgactccgcatcgag

SEQ ID NO: 386020 - DNA, 122 bp, Homo sapiens
tctctggacacggcggtgctgcttgtttatttttgcagcggggtgctgttgttgctgacacgtctgtgcccatgtaaggctgggcctgctgcttctgctggagctggccctttaagcctccc

SEQ ID NO: 386021 - DNA, 122 bp, Homo sapiens
gtgctttacctgctcccattcacaccttagaacagagaggctcctgtgtataaaggtatccgtaaagcctcatgccctgcatttcacatctagcaatatcataagtagagcatcttcaccaa

SEQ ID NO: 386022 - DNA, 122 bp, Homo sapiens
gagggcgctcggggatcgcccctggctcagccgctcccagggtccggccaaggtcacgcgcgtgtctggggcctaaccaccctggggtgtcgtctccagtggagctcacccagccttccggc

SEQ ID NO: 386023 - DNA, 122 bp, Homo sapiens
ggaacgttagggagattggcgcgcggaccactgggtgagcgcccaggaacgccggacgcgcgccttcacgcccgggtgcctggcggcgttttagaaaagctgtatttgaaaagcaaccgatt

SEQ ID NO: 386024 - DNA, 122 bp, Homo sapiens
ctaggggatagattttggatctgggactactgggggctggagtcaaaccaggctacatttcgggtcggggcacggagccaaggagggagctagggcaggctaaggctgggctcggtggccct

SEQ ID NO: 386025 - DNA, 122 bp, Homo sapiens
gggcacagggcctgtgctttcgttgcaggcgaggaagtggagcgcgcgctgcagattcagcgcggggctagaggaggggacctggatccctgaaccccggggcggaaagggagcctccgggc

SEQ ID NO: 386026 - DNA, 122 bp, Homo sapiens
tcccctcccctctctccagctaaatttactctcagccctgagttattctgggtcagtccccgcctgcctgcctcctgctcctcctcctcccagctggggaggggaccagtgaggggtctctc

SEQ ID NO: 386027 - DNA, 122 bp, Homo sapiens
agcctggccaactgctacgaggtcctgagcgcggccaagcggcagcggctgaacgagctgcgcgacgccgcctactgcttcatgagcgaccactatctggaggtgctgcgcgagcccgccgt

SEQ ID NO: 386028 - DNA, 122 bp, Homo sapiens
aggctgattttgctcacctgaaacagtagatacatcacatgcaggaaaggccacaagatgcgcgggggcatcccaggacccctgggcaaggtctccacagctgttgaaggagccctggccaa

SEQ ID NO: 386029 - DNA, 122 bp, Homo sapiens
tctgccctcagcagaggcctccacctccagaagggcaacaattgggtcatccatggggaccgggaccctggacttggcatcaaggcaggggcaggaagaagaaaaagtggggcccctgtgcc

SEQ ID NO: 386030 - DNA, 122 bp, Homo sapiens
tggaaaaatattttcttacagtctcacccccccgacgttctggtgtatttccagtctttgcggagtaaagctatttcttatggctgccagtcactcaaggaaagcccccagtcaaatgtgtt

SEQ ID NO: 386031 - DNA, 122 bp, Homo sapiens
aggcccaggcagatgctcccaggatcacccaggagaggcagctgcagacagggatgcatccggggagcgagtctcagcgctgggaacgctgagtgtgggcagggcctgaatctcagtgctcg

SEQ ID NO: 386032 - DNA, 122 bp, Homo sapiens
ccgggggcctcccctggacaccaagtttctccttgtgttgtgcgtttgttgtgctgacggcgctattattaattaaagtgtcacatggtggaggggggcggggaggggggttacatcatccg

SEQ ID NO: 386033 - DNA, 122 bp, Homo sapiens
gccccgagaactttgttctttttgtcccgccccctgcgcccaaccgcctgcgccgccttccggcccgagttctggagactcaacatgaagctaccggccagggttttctttactctggggtc

SEQ ID NO: 386034 - DNA, 122 bp, Homo sapiens
ggctgcctttctccggtcccgaggctccagccttgccgcccttcttcctgatcgcgcaagcgagagctggttcgcagcaacgcagtgtcttttgtagactgatattctggtcctttttatta

SEQ ID NO: 386035 - DNA, 122 bp, Homo sapiens
gaaggggctcgagctccagcactctttcaatttgatgtcacactagaatccttctcctcccggtgagaaatacaggcaaatttcttctttctcctccttctaattggaagaagaattcacag

SEQ ID NO: 386036 - DNA, 122 bp, Homo sapiens
aggaggggagacgaacacagaggaaagtagaggcagaatgtttcagtaaaggagaaacagcgtgctttgggaaataggtcagaggtgaagaaataagaccaggcaagtggcaactccgaata

SEQ ID NO: 386037 - DNA, 122 bp, Homo sapiens
caccgacctccactttttcccccgacattttccctcctggcatttaaagctgttcgttttcggggaaacttctgtgagtttcgcgcttgttcgaccaacaccagtgttaggaggaggcgaga

SEQ ID NO: 386038 - DNA, 122 bp, Homo sapiens
tgcttactgagcacttgctgggtcctgcacccagctggctgctagggatagtgaggggcacgaggcactctctgcccttgcagagctcactggaggaataaacctttgtagaggaaggtttg

SEQ ID NO: 386039 - DNA, 122 bp, Homo sapiens
tccgcattcatgggcctcttcctagaactctgggaatctttctccctagagctctgtaggcgtccagggtcagggctggaaaggccttcacaaatgctaatctgtgagcattttatgggttg

SEQ ID NO: 386040 - DNA, 122 bp, Homo sapiens
tggggaggggagaagcaatgcccactgtcttcgctcagtacctcatgtacactggggtgtcgttctctgggacccgtgcccgacctggacgatgtgaaggaggccgtgacctctgggaggat

SEQ ID NO: 386041 - DNA, 122 bp, Homo sapiens
tggggtgggggcaacaggtcgttgcaggtgttggctgggcgcctacgtcaggcagggccccgggacgggactgcagggctccgagccctgggatgaacctgactgccatggatcaggcgctg

SEQ ID NO: 386042 - DNA, 122 bp, Homo sapiens
gaaatcttggtattcgcatttcaagaagggagttcttttttctttcttctttctatggaacgtttcaagtgattggatagaaagaagggctctgaagcaggagttttcacctgctctgaggg

SEQ ID NO: 386043 - DNA, 122 bp, Homo sapiens
cacattctgaaggtattagagagagtcttggagaagtgagctacttgtccccagcaaagacgtttccagggctaatagagaaagaattagagtcaaaccatatagtcaagaaagccaagagg

SEQ ID NO: 386044 - DNA, 122 bp, Homo sapiens
cagggaactggattgctcgggggtgtttcccgactctttcccagtcgtggggctggtgggcggtattttcccaaaaggatgctgtccgaggtagctgatgccctagggccagtgagtcagga

SEQ ID NO: 386045 - DNA, 122 bp, Homo sapiens
ccgtgcccgcctcgcgctgctgtggccaatgcccgcttgtcttgctggttcgaaccccagcggctgttcaatcgcgcgcctccttctagccagaccccgcccccccggcaccgccttcctaa

SEQ ID NO: 386046 - DNA, 122 bp, Homo sapiens
aagggagggtgggctggccttgccctgccctgcccagatgttgacaacgtcacccattcccgccaccagcagtcccctctgggagaaggccaggtgccctgctccatggggcagggtccgag

SEQ ID NO: 386047 - DNA, 122 bp, Homo sapiens
ggtgggctgggcatttgtgcctcaaagtctgagtgggtgggggtttagcctggagcgctccgtttgagggtggtgtttctataaatctcgccagggtggggctgtcccaaataggggccttt

SEQ ID NO: 386048 - DNA, 122 bp, Homo sapiens
aacacgacagtgtcgcaaagattcgccgaagacactcctttccttacgtgacctagttttcgctcgcccagtgaacctgttctcgcctgggtatgcatggtatataagcccggccatttcgt

SEQ ID NO: 386049 - DNA, 122 bp, Homo sapiens
ccgccgccgccatcttggaccgggcccggtcagcttccgcggagccatcggcagacgccgcggcctcccttgagccccgacccccgtcgtcagaacaaccccgggcccactcccccaacccc

SEQ ID NO: 386050 - DNA, 122 bp, Homo sapiens
tgggaacgcagggccaagttgtgctccgattccacgccccccccacccacgtcgggcacacgcagccctgagtgagggtccatgccctgcctttcacgctgaccacagcccctaggcttggc

SEQ ID NO: 386051 - DNA, 122 bp, Homo sapiens
ccaaccttgcaatttgattggcataatcactccagtttgctttctaggtcctcaagtgctcgtgacacataatcattccatccaatgatcgcctttgctttaccactctttccttttatctt

SEQ ID NO: 386052 - DNA, 122 bp, Homo sapiens
ggcggctgccccttcaccaagaagttccccagtgccatccatggccgtgacagtgacaagcggccgtccctggggctggcacctgggagcctggccatggtaggacgcagcgctgggggcag

SEQ ID NO: 386053 - DNA, 122 bp, Homo sapiens
ccacggaggaaccccgcaggggagccaggcggatactcagccgctcgcggtagaagggcgcgcaaagctgcggagccgcgtgtgtggagctccccagtgcactcactgctggctccccctcg

SEQ ID NO: 386054 - DNA, 122 bp, Homo sapiens
ccaaaatttcacaatacttgttgctttagacatcagttcaggtagcttacattttatcagcgttcaacaacaccttaattgttgacactacaaggtggaattgtcaatgagatcatgtaagc

SEQ ID NO: 386055 - DNA, 122 bp, Homo sapiens
tagggaaagcaaggacgcgtgtctccgcggggcttttacacgtccggagcaaagaatattcggggcccattgattgagaaatgagggttgcttcgaggtcgcggcttccggaaattctgttc

SEQ ID NO: 386056 - DNA, 122 bp, Homo sapiens
gctgtgggttcagagctacagcacgattctggccttcgctggcagtccaggctggcaggtcgccatctttgggatcctacaggtcatgaagaattactcaccctctcttttcagtcctcagc

SEQ ID NO: 386057 - DNA, 122 bp, Homo sapiens
aggctgagccccaaggtgggcctgtgggggcggggcgggggagcccctcagcagctggaccgcaggaggccgaccagggtctggaactcctcttcccctccctccgccgccccctctccctt

SEQ ID NO: 386058 - DNA, 122 bp, Homo sapiens
ggcggcctcgcccgacccccgccagcgcgacctcctccgggagccagcacccaggaccgacgacctcggcaacttacccaggacactctccctagctgtccgcggagaagccggcctcgtct

SEQ ID NO: 386059 - DNA, 122 bp, Homo sapiens
ttcccttgcgcggcgtgaatctgagggcatcgtgttgaggagatgggggctgcggtgactcgcgggatcaggaatttcaacctagagaacccagcggaacgggaaatcagcaagatgaagcc

SEQ ID NO: 386060 - DNA, 122 bp, Homo sapiens
atcttgggcacgatgggaggcttcagttttctctgaggaacagcttcccagtccacagagcggaaccaccgatggcgtttcacatcattcgccccgttcttcatatttcctaaccaccttgt

SEQ ID NO: 386061 - DNA, 122 bp, Homo sapiens
ggaggagggttatgacgatgatgatgatgactgggactgggatgaaggagttggaaaactcgccaagggttatgtctggaatggaggaagcaacccacaggtattttataaaggatcctgca

SEQ ID NO: 386062 - DNA, 122 bp, Homo sapiens
tccctttcttttatctttaaaataaactcctttaaaaacaggcagttcaagcctgggcaacgtggcaagaccccatctgtataaaatacaaaaaaattagccaggtgtggtggtacgctcct

SEQ ID NO: 386063 - DNA, 122 bp, Homo sapiens
gatctatgaaaaattggagaggcattagcagtcttgagatgtccaaacctttacagaagacgataaatctatgaaccagaaccgaaggaaatggtgtgacattccccttgcacgctcttctt

SEQ ID NO: 386064 - DNA, 122 bp, Homo sapiens
ttctgtgcgatgtggccctggccaagaagcctcttggtggctcgtgcacagtgccacaggcggcgctccggctcagccacctttccctccaccgcctccttcccaggccgtctgtgcagctt

SEQ ID NO: 386065 - DNA, 122 bp, Homo sapiens
ggcacctaccacagctataggcaagtgaaaagcaatcaataaatggaactattggccaggcgtggtggctcacaactgtaatcccagcactttgggaggccgaggcaggcgaatcatgaggt

SEQ ID NO: 386066 - DNA, 122 bp, Homo sapiens
ggccctttcggaggaccgggagctctccgttggcggccccagatgctcccggaaagaagccgcagttatttcagagccagctgcaaacctgtaggtttttcttggtctccgagttaggaatg

SEQ ID NO: 386067 - DNA, 122 bp, Homo sapiens
aaggagtatgcccacggaactaacgctgccggcaaccccagcacctgatcgtgttcataacgacagtgaccatttatggagcacgtcctctaactctgctagtgcagacacctcggcattat

SEQ ID NO: 386068 - DNA, 122 bp, Homo sapiens
cttcacccgagccatgcttgtccctcccccttccccctcccccaccgccgtggatcacagcgtcccgggacagagtgacagatgggccagaactccgcagactgctcctgcccgccgcggcc

SEQ ID NO: 386069 - DNA, 122 bp, Homo sapiens
cggccaaggcagagagatgtccattcctggctgcctgtggacgggagagccaacagaaatcggggttgcatgtggatttgtatgtgcagaatacgagagaaagagcatgaggaagagaagat

SEQ ID NO: 386070 - DNA, 122 bp, Homo sapiens
agcctcgctctgggcgccgtgacgtcacctctgtgacgtcatcggaggggcgggtctggtcgctgagaggggtggggcgccgccgcggcgtgggctttcccggggagttctgggagttgtag

SEQ ID NO: 386071 - DNA, 122 bp, Homo sapiens
tggctgcgggcggtgggcggctgggcggccccgggagccgccgctctcagtctctctaggcgcagctcccttcgccgcttccggagcccctggcagggtaagtgcagaagcgcgcccgagga

SEQ ID NO: 386072 - DNA, 122 bp, Homo sapiens
cggcggggaaggacgcgggcggggcgggactgctgaggtagctgcggtggggccgggctgcgctgcacctcgttcaggtacccagacggcaggcgcggggccggctccagccctcgggtcgc

SEQ ID NO: 386073 - DNA, 122 bp, Homo sapiens
aggagaaacagaatagatgctcaagacacaaaggcatgtctgtgcaagggtgcttgatgacggttggaggggcacaatgactttcccaagatcacacagcaaatgtgggacaaaatcaaggc

SEQ ID NO: 386074 - DNA, 122 bp, Homo sapiens
cacccccagccttggccccgaggcgctttgtgtttgttactgtttggtgtgttgcacccgcgaggggatcagagagacaagaattacatcttcaaaatgagtcataactcctgaccgtatga

SEQ ID NO: 386075 - DNA, 122 bp, Homo sapiens
tgaccttgtgatccacccacctcgacctcccaaagtgctgggattacaggcgcgggccaccgcgcccagccgaggaactgatttaacatgagaatgcagtttctttatttcttcatgcactc

SEQ ID NO: 386076 - DNA, 122 bp, Homo sapiens
aaaggtgactcctgccgagaatgcacacggggaggctcagggctgggcggggcttggcgtcgggacccagagctgccattggaaaggtctgagcccgtggcccggcgacagttcaactccgt

SEQ ID NO: 386077 - DNA, 122 bp, Homo sapiens
gtgactccagtccaggtgaaaacggagtcacgatacagggcaacagcgccacctcacggccggccccgtagcagcggcctccattggcgcctaaaaatggtcaggattcacattcaggtgga

SEQ ID NO: 386078 - DNA, 122 bp, Homo sapiens
ccggccgacaaaagccacattgtggggctgacggcagctgccagcacctgctccctgcaccgcggctgcctcgaggctctgcgccgcgcctgatgcctttgctaggacacagccaggggcag

SEQ ID NO: 386079 - DNA, 122 bp, Homo sapiens
ccccagctcgccgcgtcgggaaggcttggacgatgccgggaccgagcctcctaccttgtgcggcacagattatgatttttgtgactctgggaaaggttgtgctgtgtgggtttagggtttgg

SEQ ID NO: 386080 - DNA, 122 bp, Homo sapiens
ccacccagaaatgatgacatggctagtgaggctgacagtcttgctgtaattgggagaaaacgagctgcagcacatttggcagattgagtcaccagcagccaatgtcaggggttgtgcaggca

SEQ ID NO: 386081 - DNA, 122 bp, Homo sapiens
gagcactcgtggcctagagaagcatggggtgtgagggctgggcatcttcagggtttccctcggcggcccgggtttcccagcaagccccacctccccagccggagcccagcgcacctggacac

SEQ ID NO: 386082 - DNA, 122 bp, Homo sapiens
gactctgacttccttgacctgacacctgggagttggggaggccgcggccgacgctggcggcggtgactcagggtccagccgacctgccctatccgggcctgggaggcctcctacggaagaaa

SEQ ID NO: 386083 - DNA, 122 bp, Homo sapiens
cgcgcgcgcgtgtgtgtatgtgtgagggtgtgacggaggcgcccacgtgctcggcccgcccgtgttacggccgcctaccggctgcagaggagaagggtaggctgtgggcggcggcggggcgc

SEQ ID NO: 386084 - DNA, 122 bp, Homo sapiens
ggcagagacgctcctcacttcctagatgtgatggcgtcacttcctagatgtgatggcggccgggaagaggtgctcctcacttcctagatgggatggcggcggggcggagacgctcctcactt

SEQ ID NO: 386085 - DNA, 122 bp, Homo sapiens
ttttggttttccgacacgaggtaaaagtgaggttacaaatgttaattttatacactcatccgtttgagtcagtgattctcaaatgtcaaggttgtaaaactcttctgttgtgataccacatc

SEQ ID NO: 386086 - DNA, 122 bp, Homo sapiens
ccgggctgcctgggggttgggggcctgctggtgggtgggccggcactgacaggagagggccgcgtgcccaggcccatcccacagaaaagccctccttggccatggtcgggagatgcagccaa

SEQ ID NO: 386087 - DNA, 122 bp, Homo sapiens
gctcttccagccctgcgagcggacctcactctgctacgcacccagctgggtgtgtgatggcgccaatgactgtggggactacagtgatgagcgcgactgcccaggtgggcgggggcaggtgt

SEQ ID NO: 386088 - DNA, 122 bp, Homo sapiens
cccggccatatttaaaggacggcgggcgcggcgagccaatgggcggcgagcgtgaaggggcggtgcgtggcggtgcgtggcggcgcgaggccccggatgtggctgcggcggcccctcctccc

SEQ ID NO: 386089 - DNA, 122 bp, Homo sapiens
gggggccgcggtgggccgtggggtggcggccgcgggacgggcgtggggatgaatgggcgccgcggccccgccgccgagcgggctccctcctctcgcggggaccccgggcggccgctccttcc

SEQ ID NO: 386090 - DNA, 122 bp, Homo sapiens
agttggggcgcaaactgggggtcaaagcgcaggcgcgacgtagccggctggtaactgaagcgccttgactttttgggcgtggctcccggagggcggggtggtgggggaagggaaggatggag

SEQ ID NO: 386091 - DNA, 122 bp, Homo sapiens
ccctccgccccgcttagcccccacgccccgaacctcgtccgtggaccggggaggccaacgcgaagcccaggcctaatcccttcgccttggccctgctaacttccgggggtgttctcgggcct

SEQ ID NO: 386092 - DNA, 122 bp, Homo sapiens
ttttgttgttgaggattggatgagttaattaaaaaaaaaaagcacaagatcagcaagatacgagtagtagcacccaataaatgtaggctgtttttttgggtttttttgtttgtttgtttgtt

SEQ ID NO: 386093 - DNA, 122 bp, Homo sapiens
aggcgtcgcccttcgtgctgggactgcggcctgctgagccccaggtaggagtccacgcatcgcctctctctccaggtgcacccgcacagctggcgaacttggctaaggtcagcgggagagga

SEQ ID NO: 386094 - DNA, 122 bp, Homo sapiens
gctaagatacgccactacctcagcggcgctaacgctgctagcgtagcaccaccaactgaccggccccctcacgccattagcgtaatcgctttggaatcaatttgtgggctacgcaggcgacg

SEQ ID NO: 386095 - DNA, 122 bp, Homo sapiens
cgccccaaactttgatcttagaggtccccagcctcttgatttaagtctgctccggccattcgccgcctcagcgttgagtggccccaccctctcgcccaatcctcgcgcagacgcgcagctca

SEQ ID NO: 386096 - DNA, 122 bp, Homo sapiens
tgcctgtggggccggtgacccaacaccatgaaggaaacgccactctcaaactgcgaacgccgcttcctactccgtgccatcgaagagaagaaggtatggtttggtgcccgcagaattgcgcg

SEQ ID NO: 386097 - DNA, 122 bp, Homo sapiens
ccccccctcagcccctccggctgcagagtgaaggctgcggtggaaagtttcctgcctgggcggaggcgcctctcccggggctgggctgggctggcccgcctgcggcccgcgtggcctgtctt

SEQ ID NO: 386098 - DNA, 122 bp, Homo sapiens
gtcgttctcagtagaccgccaagctactggcttctccctctatccctccctgccttcccacgcggaaaaggtttgtatataaatagcgcccaaatggacatgaagggtagagtggttcttaa

SEQ ID NO: 386099 - DNA, 122 bp, Homo sapiens
caccaccaccccctccccctttttttcttaaattccctcttctgagaggagagaaaatggcgagaagagatattttcttaatataacaaggtaagaacaagagatagagaagaatgagatga

SEQ ID NO: 386100 - DNA, 122 bp, Homo sapiens
ctgcggacactgagaaacaatggcgggggaacaactcccagctcttcagagggcagaaagcggagcaggctaacagttcccagggcaggggattaagctgctttgctagagattacgcacca

SEQ ID NO: 386101 - DNA, 122 bp, Homo sapiens
gagcccccagctcacgacggtcacggccccaaggcctggtgccctgctgacgggcaccaccgtggccaacctccaggtggcccggctcgtaagtgtcagtttctgtttgttttccaaaagca

SEQ ID NO: 386102 - DNA, 122 bp, Homo sapiens
tcacttgcacgtcttgttaactatttccctctgctgtaagggcgctgggctgggatgtagcggaatctgtgctccctcaagccctggagaagccctgggctgggcccggcttcagaagcttt

SEQ ID NO: 386103 - DNA, 122 bp, Homo sapiens
atgtgacttcagcgtccatcagtaaaatattattggaacacaactatgcccattcattgacgttattgtttgtggcaatgttggcactttacaatggcagagttcagtagttgagagtcgga

SEQ ID NO: 386104 - DNA, 122 bp, Homo sapiens
cgcgtttcaggacctgcactaactccatcttgcctcgctggccccgcctcccgggtgcgccgagcaaaacccaccggatggaagctgccactcagccgcaggaagcccacgcccagaaggtt

SEQ ID NO: 386105 - DNA, 122 bp, Homo sapiens
tcctggtgtggtggagaagagcgtcccctcgggcgtggtgcaatagtcaagaggtagctgcgcggcgtcgctgatggccacggtgtgggtggggaaggcgcggctctggctgggctggtggc

SEQ ID NO: 386106 - DNA, 122 bp, Homo sapiens
tcttaggcagggaaggtgaccatccaggttagatcacttcttctgcggggtcagcttggccgctgttaggttttcaggatgtcatggggctggccaggcctcacccctgatatccctgagca

SEQ ID NO: 386107 - DNA, 122 bp, Homo sapiens
tgtacagttttggtgtcaggtgtcacattgcctctctggagattcttccccttcacccagcggcaatatcacaaagaaggaagcatgtttctgcaaaaacaaaacaaacaaacaaaaaaaaa

SEQ ID NO: 386108 - DNA, 122 bp, Homo sapiens
cttgggtgagcaggcgccgggctcgcagggcgcgctcctaacccgtccccagcggctcgacgctgtggatcccgccgccctccagccccggctccggcgccgactcctgctcaggctcctgc

SEQ ID NO: 386109 - DNA, 122 bp, Homo sapiens
agagccaccagcattatcaatacattatcatccgtgggatttggcaaggcctaaccacgacgatctaaaagcattctctcttccaacaggttcaacccaaagaactcatttgttaacggacc

SEQ ID NO: 386110 - DNA, 122 bp, Homo sapiens
ggtgggagggctggttagggtgcggactggtgggggtgcttactggtcgggcttcattgccgacagcggggtggggatgctatctggggctgcactgcccatggtgggggcttgttgggggc

SEQ ID NO: 386111 - DNA, 122 bp, Homo sapiens
atagagacaattgcagccaagggagtcatggacaggaacaaaactgccggctgagggacacgtgccagcaaggagagacgtgtagcaatgttagtattcatctggaatgtgctggaagagtt

SEQ ID NO: 386112 - DNA, 122 bp, Homo sapiens
ctcccaacgccccggcccgagtggcgtagcttggacactgccgccgccgcctctcctccccgcccccacgccactctcacggacacgccgccgccacctctgccgctgccgccgccgtcgcc

SEQ ID NO: 386113 - DNA, 122 bp, Homo sapiens
agcagtggatataggagcgaagaggccagaagaagtggtagatgtctagtccttggcgagcgcccaaaagccatctaacactgccacatggtgtgcgaagtaggaattgttagaaagccgaa

SEQ ID NO: 386114 - DNA, 122 bp, Homo sapiens
ggaacccagtccactcccgcactcacgtgttcccgccttgccctccagctagttcccccgcgcgcaggatcgcactactccctctgcagtctcgcctgccgacttccttctgcgcgcctcgt

SEQ ID NO: 386115 - DNA, 122 bp, Homo sapiens
gatccatccaattcattcattcagaatgaattgtaaactccctaccttggcttacagggtcgctgctcctacttggatctcatctccagttttctcccttgttcacctctgctccagctgtt

SEQ ID NO: 386116 - DNA, 122 bp, Homo sapiens
tcccacatccctaacctctcggaggactgcaaaagacagcatctgaagcacctcttgcctcgccttgaatcatttgccacttcacaccgccccgccccttccgtccccggaggcggccagcc

SEQ ID NO: 386117 - DNA, 122 bp, Homo sapiens
cagcacggccggccccggtcggcagctcctgtttcaagggcaggttggaggctggctggccgcttgccccaccctgggcagcctgcacccagagtcgaggggtaggcagtctccatccgaag

SEQ ID NO: 386118 - DNA, 122 bp, Homo sapiens
tcagtcttttgcggtcgaagtagatgcagtacccgatgaaaagggccccgaatactccagcggcgatggctccgttccgacccagcctcttccccagaacgctgagtgtggactgcggcggt

SEQ ID NO: 386119 - DNA, 122 bp, Homo sapiens
acagtgacccacggaccccaaaagctgcccagctccgacgcagctgctcttcctggctcccggcctggccctgagagcccttagatggtcactgctctatccctgtgtccggaattggtggg

SEQ ID NO: 386120 - DNA, 122 bp, Homo sapiens
cgcggccctcagcagagctgccttcacagatgtggtgcccaggtcaatgccgagggtgatcggccgcgcagccattatctccctgacccgcgcagctccagtctgcagccagcggccccaca

SEQ ID NO: 386121 - DNA, 122 bp, Homo sapiens
ggcgccgagagggcggggagtggggcgtggcaggtggccgcgcctggggcagcgggtgcacggggcacctgcgggaatcgacagaaatgccgagcacctgaacaggagagaaaggagctgag

SEQ ID NO: 386122 - DNA, 122 bp, Homo sapiens
gccacgcccctgagctgctcaagcaccagcttctaggagacctgcaccaggaggggccgccgctgaagggggcagggggcaaagagaggccggggagcaaggaggaggtggatgaagaccgc

SEQ ID NO: 386123 - DNA, 122 bp, Homo sapiens
gcagaggcaagagggctcattatgtgcatctgaccctcaccccccggtcttcattagcagcgggtcacagcagcagccggggctgtccccgagctgcgggcctgggtcaatggccctgagcc

SEQ ID NO: 386124 - DNA, 122 bp, Homo sapiens
tctgctcgatcccgggtgaactggcctccagtggaaattcagcaaagtgtctgacagccccggtctccggggcaggcttacccagctgagaaactcagctatatctgcagctttagtgtgaa

SEQ ID NO: 386125 - DNA, 122 bp, Homo sapiens
aaattttccgcagggcgttctagggatgagttgagggaagccgcatgacgcgcggctccccggtgccacagctaaggacagatattttcgcaaaacccagaatgaaaaaagagcacgctccc

SEQ ID NO: 386126 - DNA, 122 bp, Homo sapiens
tccgcttccttgatgcccacccggtagcgtccaacggctccacgaagtagagatctttttcgctcccaggccttgccaggcgatgcctctacgccccacttcgagaactccctaagcatctc

SEQ ID NO: 386127 - DNA, 122 bp, Homo sapiens
tgtatcatccccatttgatagatggggaaactagggcccaaatgagattaagtgaaacaccgaaggtcacctagctagtgagtagcagagatggatttgaactccttctcacccttcctaaa

SEQ ID NO: 386128 - DNA, 122 bp, Homo sapiens
cgcccgcggcgtcccagctgtggaaaggacacagcctcctcgcccgggcaggagcgcccgcgggggaccagtcagtccctcaccctagcagtgggacctgagtggatccaaaagccagagac

SEQ ID NO: 386129 - DNA, 122 bp, Homo sapiens
gcgcttacaaattagtgatctagaaagcttttgctgccaaaccacaacctcctatacagtcgtataaatttcaatgtatagataaatttcaactcctggcatatgtactattctatcctttc

SEQ ID NO: 386130 - DNA, 122 bp, Homo sapiens
ctctgtctagttaaatgtctaatcattctcgtggcacaatgcaaacgctcccccgtttgtcgtttgggttgaacacatcagatatttggattctgggtacggctggataatatcaaagcgtt

SEQ ID NO: 386131 - DNA, 122 bp, Homo sapiens
gcgggaagggtccggggaaaaccagagccagagccagagccagagaaacatgaagcaccccggggcctcccacaccaatgcctgagcaggaatggggaggggccatgactcataaggccctg

SEQ ID NO: 386132 - DNA, 122 bp, Homo sapiens
ctctgaggctcaggagacgtggccctctgtggtcccattgtctccacgtctgtggtaacccggtgcctttctagagcaggcaggctcccggcatgggtggaaacagagcagggggccagctt

SEQ ID NO: 386133 - DNA, 122 bp, Homo sapiens
actgggagctgcatttttgtccgagcccggttaaaaaacgggtgcctgagttgcgtgtgtcgcggggttccttaaccacaaacggagcctcggtggtgcaccggaaggctggacgcttagat

SEQ ID NO: 386134 - DNA, 122 bp, Homo sapiens
ttctggaaattctgtatgtctaaagatagggcccaaggatctgcattttaacaaatgtcccggaaagtcttactggcaggcaagtttgagaaacatggttctagggtttcctcggtccccac

SEQ ID NO: 386135 - DNA, 122 bp, Homo sapiens
ttcacattaatgaaaaagcaagacttcaagagggcgggagtttttgtctgctgatcttcccgcatctaaaatagtgcctgacacatattaggtgctttgcaaatattgaatgaaagaatacg

SEQ ID NO: 386136 - DNA, 122 bp, Homo sapiens
cgcctgtctcggggagcccaggtgaggagcgaccgtgcggctctgcggcggggcgaggtgcggccgccggtgcacgggctggcctgcgggccgggcggagggcgcgggcggtggcggggccg

SEQ ID NO: 386137 - DNA, 122 bp, Homo sapiens
aaatatgtgctgaaagcactttacaccaacgtgtggattcctgtggagggaacacacccacggctattcacatgcctaaaattgcacctgttgtcaaccctaaggaatctgggctggaattt

SEQ ID NO: 386138 - DNA, 122 bp, Homo sapiens
ggcacgtgcctgtagtcccagctactcaggaggctgaggcaggaggatcgcttgagcccacgagttcgagatcgcagtaagctatgatcattccactgtactgcagcctgggtaacagagac

SEQ ID NO: 386139 - DNA, 122 bp, Homo sapiens
ggtggaaagccactggagggcatatgcatttccaagggctgccataacagagtaacttagcggcttacaataacagaaattattctctcacagtcctggataattgaaatcagaaccagaag

SEQ ID NO: 386140 - DNA, 122 bp, Homo sapiens
ggaaaaaaaaaaaaacaaaaaacagagggatgtgggtgtgtatgtttcttggaatccaagcgatcagggggaaaaaatccgtcaaaaatgttctcagtacaaaagttggcaaaacagctctc

SEQ ID NO: 386141 - DNA, 122 bp, Homo sapiens
agccttgtgttgtcatccctgtaagggtttgtctctgtagccccaaaccacagtgggaggcgcagctagtgaaccttgcaacagactaacaccatggagacaaagtaaaccatgtttgggtg

SEQ ID NO: 386142 - DNA, 122 bp, Homo sapiens
gtctcctgcacaccacaccagccagccgtgacccactccctcgtccgcgaccacgtaggtcggacacctgactgccccacagtgtttttaaccagaattcatttctggtgccctcttctcag

SEQ ID NO: 386143 - DNA, 122 bp, Homo sapiens
ccgtgcgatcacccatctccctcaccaggaaagtagctccaaaccgccaatcagcggcgacgctggacgtagacgtcctaccccgtgatattaaagcaagatggccgcgccctgcagattgt

SEQ ID NO: 386144 - DNA, 122 bp, Homo sapiens
agctccacgacaccccgcaccctcctctccacggccatgtgcaacggggtggagcccctacggttgctcaggttggggttggcattgttgagcagcagccacttggcgcactcctcttgccc

SEQ ID NO: 386145 - DNA, 122 bp, Homo sapiens
tcgagtttaccccataacaaacctgcacgtgtgcccctgaacttaaataaagggcgcctccgggggtcatctccgtcatcattagacggcacacctgccggaatcgaccgtgcccaaatccc

SEQ ID NO: 386146 - DNA, 122 bp, Homo sapiens
agagcagtcagccagtccctctggtccagaccctaccaagctcacttaaacgaccacatccgtgcttgtccagagctgctgttcagcaagcagcaggaacctaccaggggaatgttggtcct

SEQ ID NO: 386147 - DNA, 122 bp, Homo sapiens
cactgcgctctgcctgcctcagcactggggctggggacagcagcgctggcccaaccgcgccgcaacccccagccaggtgccgccgcggagtagaggccactctgctctacagggccaaggtc

SEQ ID NO: 386148 - DNA, 122 bp, Homo sapiens
gccgtacagccgctccagcttcttcttgtccacagcgttccgcatggactccctgtggagcgagtctgggttttggaagaagctgtccgtggcctcgtctagtctccactcattctgcgtta

SEQ ID NO: 386149 - DNA, 122 bp, Homo sapiens
gcctctggccaccagggggacctgcaaccaagtatgtgttctttcaggcgagcgggaacgcgtctgcataaatctagtccaatccagggccccgtagcaaggcgccaaagctgggggaagcg

SEQ ID NO: 386150 - DNA, 122 bp, Homo sapiens
tctgaaaaatctacctacatggaatccctattccttaatggcaataatagctggagctttcgattacaatctcctttactggtttatttattcatggttttatttatttatttatttattgt

SEQ ID NO: 386151 - DNA, 122 bp, Homo sapiens
ctccagtgttttcatccccctctccccaacgttgcactctcagactccgcaaaccccgcccgatttggttcaattaaagttgaccagtatttgttccgagcttaggaagtacttggccaggc

SEQ ID NO: 386152 - DNA, 122 bp, Homo sapiens
ttccgcaattcttttctaagattgtctgactagagggttcaaagccctctaatccaaggccggcttgtgtctctagggaggttgcagaaaggcgccagaatgtggatggcgcggacaatgtg

SEQ ID NO: 386153 - DNA, 122 bp, Homo sapiens
gccccgccccgcgcagaggaaccgcccccaaatccccgccccctcggaggccccgccctgcggacacctggagcccggagcgcccacttctctcgcggttgctcccctaggatctgggggaa

SEQ ID NO: 386154 - DNA, 122 bp, Homo sapiens
cgggtggcctctgccctccggcgctgggaagtccgggcggcgaggcagcctctcccggggcgttcgggctcctccggctctgccccgatgtcgttattacggccgtttgcagcctccgtgcc

SEQ ID NO: 386155 - DNA, 122 bp, Homo sapiens
aggaagctccgggatggatttcgggtctttggagaccgtggtggccaactctgccttcatcgccgcccgaggcagctttgacggcagcagctcccaaccctcccgggacaagaagtacctgg

SEQ ID NO: 386156 - DNA, 122 bp, Homo sapiens
ggatgtgtgtaagctgtgtgtgagtgactgacaggactcggggctgggggagggctggctcggtgctgcttcctgtgtggtcaggatcacagcgagtgagaagtgaagacaccagaggcttt

SEQ ID NO: 386157 - DNA, 122 bp, Homo sapiens
tacacaggttgtcagtttcaggctccctcataaacacttcatgttcttgtccctcttccccgttggcaacagttttatggtgagaaaattcacgaagagtaacaggaacaactcttatgaaa

SEQ ID NO: 386158 - DNA, 122 bp, Homo sapiens
cgcgcgctgtgggactggcaggcaaacgcgcccagcccgaggctggctggggttgttgagcgcggagttgacatctgaaggtccggtgtcggtccggtagaggctcaggaaagccatttggc

SEQ ID NO: 386159 - DNA, 122 bp, Homo sapiens
ccagctaatgggaaacacaagggcaggatcccacctgacgtcttctctgttagagcccaacgaacagctaggagagacctttgcccccacactaaacaaaggagaggggcgtgtgaagggaa

SEQ ID NO: 386160 - DNA, 122 bp, Homo sapiens
ggatgtgagtgtgcaggatgagctagggcatgttccttcctgggagagccaggggggacccggtgcctgcagttcctgtcaccgtggagcccagagcccagcccctggtcggcagtgcctgt

SEQ ID NO: 386161 - DNA, 122 bp, Homo sapiens
gttctccaaagcccggtccgctgccggtgtagccgccgtgcccaagtttgcagctcctgccgctggccacccggagagaccttgacaaaggaaaccaggtggatttttttccaaattaaaaa

SEQ ID NO: 386162 - DNA, 122 bp, Homo sapiens
cataacgacaaatcctggaagagaaagtaaattgttgtcaaaatttaacaggcaagagtgcgtaggttaattacaggaagtttttagtttaggaaactgccaaactcatcacaagacatgag

SEQ ID NO: 386163 - DNA, 122 bp, Homo sapiens
gaaggcagagactcactcaaggtcacacaagcaagacacttgcagggctgagattcaaaccgggactaaagaccctggctcactgcactaggcaactctgcctcctgtgatagaaaattatg

SEQ ID NO: 386164 - DNA, 122 bp, Homo sapiens
ggccccgatccgcgtcttcccctcgcccctgcggcctcctgaccaagcctcttcccctcgcggcccttcatggcgcgccatgtgcccctcctcggggaactgtgagtgtaacctctcctttc

SEQ ID NO: 386165 - DNA, 122 bp, Homo sapiens
tattcccgcagaaagccacctttccaagcacagaatcttatcagtgcctaggagttcagccgacttagcacgaagagtgcgatggaagggctgcttttggcaaaccgtctcaaccccgggcg

SEQ ID NO: 386166 - DNA, 122 bp, Homo sapiens
cttctaccaggaattcatgcattcacttaaacatttactgagggcccacagtgtgctccgcggttgctgagcaaacacgcagtttcaatgcaggatagtgagtccaaaagttcgtaacaggg

SEQ ID NO: 386167 - DNA, 122 bp, Homo sapiens
ccttccccatcccgtcacagaggcagcagggcccagggcagagaacctgaacccctggggcgtccgggacggcacacggcgcatgcgggagtggcctccactcccacggagacaccgttcca

SEQ ID NO: 386168 - DNA, 122 bp, Homo sapiens
atggagcctggtgggctgcggcggacacgggtgaccgactcctccgtgtctgtgcagctccgggagtgactggctggctcctctgtcctgaccccacagcacctccctgacctttaggagcc

SEQ ID NO: 386169 - DNA, 122 bp, Homo sapiens
tctttcgacttccacgggcggcggatggcaacctgctccagcgatcagagcgttaaggtgcgcgcggcgcttgcgggcggggccgaccccggaaggaaggaaggggagtgggtgggcggcgc

SEQ ID NO: 386170 - DNA, 122 bp, Homo sapiens
tagaggcgcgtgagggagacgaagggacttccgtttccttcacctaggctggggccaagccgcagagcggagttggcatttccagattggggctcgggccgcgcctcctccgggaccctccc

SEQ ID NO: 386171 - DNA, 122 bp, Homo sapiens
atgacctaaaaataagataatgcgatggaaacagaatttactggatatataaacagccctcgctctgagatggtgctttgtctgggtcagatttcttgtgattggcaggaagctgtgacagc

SEQ ID NO: 386172 - DNA, 122 bp, Homo sapiens
cagaaaactatggctgggtgtgtggtaaggggaaaacccgctccttaaggcagcttcctgcgtgcccaccgtgttcgggcccccgtgggacttgtctctgcccacgtataagttttcattca

SEQ ID NO: 386173 - DNA, 122 bp, Homo sapiens
gtggggaggtggcgcctgcgcagtgcgcctcggaggagctgtgtgtatgtgagagtctgacgggttcaaaatggcggcggctgcttcagcggctcctcctgtgtgagggaaacaacacccct

SEQ ID NO: 386174 - DNA, 122 bp, Homo sapiens
gggccgcagcggaaggaaggcccagaccgctgctcacctcggatcaccttcacgttgaaccgcagccttcgcagggcctcctccacattgaagttgcatttcaccaactcgtacagcgcctg

SEQ ID NO: 386175 - DNA, 122 bp, Homo sapiens
tgctcctgcagaatagggggaccccgctggaggccgcgaggcacagcagatgcacagtgccgcccgtcccctcctcccccatttaggactcccaccgcggtccctcacgtggggactgtcag

SEQ ID NO: 386176 - DNA, 122 bp, Homo sapiens
gattagcttccttcaaagagtttttcacaccactgtaagcaactgagttgtttgccatgtcgcccattacaagtataatatatcagaaggaaaatgtttcccaaaagaatttaattttcact

SEQ ID NO: 386177 - DNA, 122 bp, Homo sapiens
gctggtgaggacctgggcggcaggggtttgtggctgtgaggtacgggaggcagcccactccggcaagacccccagtccctatgcctctcttccccagaagtcgacgacttctcctgggagcc

SEQ ID NO: 386178 - DNA, 122 bp, Homo sapiens
caaatgcacggacgtcaaaggctaccttcacccgggtagccttgcgaatggccactgctgcgagtggggctttctggggattgtagtccataggcctccttgcgcaagcgcgtggtaccaga

SEQ ID NO: 386179 - DNA, 122 bp, Homo sapiens
caatacacagtgtactgcctctctgataaagaccggctttattgtgtctgttccacacagcgtgggccaaatcaatcggaatcaaaatactgcagtgtttaaaagaaaaccagtcacagtta

SEQ ID NO: 386180 - DNA, 122 bp, Homo sapiens
gcctcaggtgcagagctgcactgcgtggtagcacaagccctgagttaacaagagaaataccggctttctggccagaggaatgaagaaaaagggcccctgcgggcaggaatgtgtaggggaat

SEQ ID NO: 386181 - DNA, 122 bp, Homo sapiens
ggctggaacgctgatctatctagttgctggggagacgcccccagatgcccgggccccactcggacttcagcacacatcccgaaggatggggaaagaaagaggcccccacgagcgggactcgc

SEQ ID NO: 386182 - DNA, 122 bp, Homo sapiens
gcaggatgcggccgcccgtaattaaatagcatttactcttattattactaataataataacgtaatcatacctctagtcatagcataccatttatcgggctcggcgcaggcccgcggggagc

SEQ ID NO: 386183 - DNA, 122 bp, Homo sapiens
tggagcccgaaggcgccgggcagcctgaaagggagaggtgggtccggaaccacacccaggcgggtagcctggggcatcctcagacggacttcaaaagccgcttcactttcccctggtggcct

SEQ ID NO: 386184 - DNA, 122 bp, Homo sapiens
aggaagaggagaaggagagtcatgactgattcattccgcaaacatggagccagcccgcagcgccgagccccggtgccactaagaggcgtaagagcggccccgggccctccagcctccgcccc

SEQ ID NO: 386185 - DNA, 122 bp, Homo sapiens
taggtttatatcaaatcagcagacaaacttgacttctgggtaaaggctaaaatgaatcaacggagaactgacgagactgtttccccactgacgggtctgtaagagttgggggctgcccgccg

SEQ ID NO: 386186 - DNA, 122 bp, Homo sapiens
gaacttcccatttaatctttttggaccaggattgactatgggtaagtgaaagcaaaaccacggagaagggtagactactacactgtcatacagatgaccagaatttgcatctggcctcacag

SEQ ID NO: 386187 - DNA, 122 bp, Homo sapiens
ccacccggcccccaacctggggccacatctggagcttgttctgaaaggtgccccggcgtgcggccccgctctggacaggcggagagctgcgctgccaccccagccccgacgggatcacggcg

SEQ ID NO: 386188 - DNA, 122 bp, Homo sapiens
agacgaggtggcttttggcacctctttaccctctggccccagtgctgactggggaatagtcgctttgaccgtgcaaagagcattctaggcggggtgggggggttctgctgtgtgtgccagtg

SEQ ID NO: 386189 - DNA, 122 bp, Homo sapiens
tttgatagaacaggaaataatggcgtcaacagtttcctttctgaatactaaggacaaaaacgaaattacattgcctgtaatgcaagggttagtcagacataatttagtccccaaattaatcc

SEQ ID NO: 386190 - DNA, 122 bp, Homo sapiens
gcggacagtcctcctgttgtgtccgaccgagagtcctggtgactttgaacatgctggtgccgctagccaagctgtcctgcctgggtgagaggaaacgggcggtggggataagtggaggagtt

SEQ ID NO: 386191 - DNA, 122 bp, Homo sapiens
tcatgccaccagagagcgccaaagacctcggcctcatgggcgatcccgaaagccggttcccgcccaaggagacaggctttgagcatcgctggactctgctcctaaggcaggattgggtcccc

SEQ ID NO: 386192 - DNA, 122 bp, Homo sapiens
ccccgattttagcgaagggtgctgactgctgtgctgctagaggctagcaagctccctgtgcgcagctgatgagtttcagcaactcgccacctgggcgcttttctttaaattttgggagtaaa

SEQ ID NO: 386193 - DNA, 122 bp, Homo sapiens
ctcttctacatggtctttgcagacttttgatgtttgctgagacactggtcagggtacctgcgagtggggaaaagtactgcaaagaaggctagcaacatgtataccagtattcagaagccaag

SEQ ID NO: 386194 - DNA, 122 bp, Homo sapiens
agtgtgataaaacatctctctgaaagagaaatgttctttcaaatctctatgtgaattactcgaatcagcagctctacccaatgtgtaatctagttactgctgaactatcaggttgggagtag

SEQ ID NO: 386195 - DNA, 122 bp, Homo sapiens
gagaggagcgacgcgaaatgctggtgaggacatggaacaagagggactctcgctcactgccggggagaatgcaaaatgctacaggcacttaggaagacagtttggcagtttcctacaaaact

SEQ ID NO: 386196 - DNA, 122 bp, Homo sapiens
ctcagcccggagtgcgtgggagaatttctaggctgcagtggaggcccgaaggcgactttgcgatcccctagcgctaatgtcttgatggatagtgctgagctccccgcccctttcccgactct

SEQ ID NO: 386197 - DNA, 122 bp, Homo sapiens
tcatcacggtgaagtaggacacgttcatgaggatgtagcacgccgtcaccagggggatcccgatgataatggccaaaggcaggtttctgggaggggcaatgacacggagacccacgttcaga

SEQ ID NO: 386198 - DNA, 122 bp, Homo sapiens
caacacggctgcacacacgggggtgggggtgttgttgtgagtccaaggcacctctgaatgcggccaccttccctccccacctcgctgcccaaagctcagtcctggcatcagggtctctccct

SEQ ID NO: 386199 - DNA, 122 bp, Homo sapiens
ggctgctggagggttgggggcactggggacctcaggctccgggcccagctcctccagtaccgaactctcggaggggtattggtacgtggtctccagggctgtctcgctgaaggagatcttaa

SEQ ID NO: 386200 - DNA, 122 bp, Homo sapiens
tctttttggaggtgtcccttctccccagaagccccggcaggaaagtgttgctggcaggagcgtcgtctcagcgctcggtggccagaatggacggagatgtcatcattggagccctcttctca

SEQ ID NO: 386201 - DNA, 122 bp, Homo sapiens
ttctttgacttctttgaaggaagtgtttgatggagtttgttttcttggtactgaattcagcgtaggggcaaggactgtttttatctttgtggaattcaactatgctgacttagaagctacct

SEQ ID NO: 386202 - DNA, 122 bp, Homo sapiens
gatatttgtatgtgaggactgagagttaaatgtaaacatctggaaactacaaaatgagcacgaaatgatgtttttattcttagaacagaaagtccccacacccgcggccctggtgactgatg

SEQ ID NO: 386203 - DNA, 122 bp, Homo sapiens
ggcggagcccatagccggactcctggctgggcccttcatggggcgggacgcctggaatctcgaggggcgggggcctggcgcaggctcccgcccggggttcccgagctgctccactctgcgcg

SEQ ID NO: 386204 - DNA, 122 bp, Homo sapiens
ccccttcctgacgatcactttgaagaactgcaggagtaggggctaccctgtgtctgaacccgtcccagcgcctgagtctcagcgcaatcgggaggtttcgcagcggggcaggggaagggccc

SEQ ID NO: 386205 - DNA, 122 bp, Homo sapiens
cacgccaaagggctacgggctggaagccccgggtcccgctggttcaccccccttccctaccgtctctggcccgctggcttatcctcaagaggcgacccccccatcacgcccaaaaaggtaaa

SEQ ID NO: 386206 - DNA, 122 bp, Homo sapiens
tttaagttgcatgtaatcatatgattttaaaatttaaggagctgttcgagaaatataaaacggccagttaaggtagttattcagatgattcagatttaaagtagtcttgtaataacttcatt

SEQ ID NO: 386207 - DNA, 122 bp, Homo sapiens
aacctctctcttttttatgaggaacaccggttaattacaggatttaaggcgtaccctctccgggatgggactatctcatccccagatctttaatttgattataactgcaaaaaccctattgg

SEQ ID NO: 386208 - DNA, 122 bp, Homo sapiens
cgtgtgagtgtgagtgtgagtgtgagtgggtgtgggtgcgagccgggccgccgacgatgccgcggggccgccccccgaagcccagggagagcaaggcgcgcggcgactccggtaaggcccgc

SEQ ID NO: 386209 - DNA, 122 bp, Homo sapiens
ttgacctgtttacagatgaataaactagggttcagagaggttgcgtgacttaacccaggtcgcgcagccatcaagaagtggagccagggcttgaagccaccaagtcccactccagatccttc

SEQ ID NO: 386210 - DNA, 122 bp, Homo sapiens
taatgtcccagagtcactgtcaccacctcggggctgccatcttcattcaggtcggagtgccgggtgccctgttggcagcaaactggcacgtttgaaacacgctggggagaaagggtgcaatc

SEQ ID NO: 386211 - DNA, 122 bp, Homo sapiens
gggggtggagggctcctcacctctgcaggaatttggcgaactggcggcggtaggcgaagccggctctgcgcaccctgatgttctccttcaggcccaggtattccacctggtgcttgactctg

SEQ ID NO: 386212 - DNA, 122 bp, Homo sapiens
attaggtcctctctgattttctaacaccgtctgcagagtgagatctgaactcgaagtccccggttttttacttttataatcctgctgatagaaagccttctcgcctacgcattttcctgagg

SEQ ID NO: 386213 - DNA, 122 bp, Homo sapiens
ggaggctgcagatctggtaccgcaggtagcgccgccgccgccgccgccggagcctgtcgccgtcctgtccccagcctgcttgtgtcccgtgaggttgtcaataaacctgccctcgggctgcc

SEQ ID NO: 386214 - DNA, 122 bp, Homo sapiens
ggatgggagctcaagggtggtgcacggtccagggagtcaggtgcaagccagggcattccacgagacagcccgaagcctcctgggcatacaaattgcagcaggagccaggaaggtgggaagac

SEQ ID NO: 386215 - DNA, 122 bp, Homo sapiens
ttgtgggaggaaggcgatgtctggccttttttgcacagctgctgttgcctgcccagagatcgggaactctgccccgtaggactggaagaaacctcagtaatgggaataagactttgtccaat

SEQ ID NO: 386216 - DNA, 122 bp, Homo sapiens
tatttcacaatcactgagcagcaagtattccttgtgtaccagtctctgttccagaaacaacgtcataagagatcatcaagattatctctggacttaaggcatatcttctctctatctctttt

SEQ ID NO: 386217 - DNA, 122 bp, Homo sapiens
agagcagctgctccccggtaacacgccccgtcctttccggggagcctggtgcgagctccgcgggcgccggagctcagcaagcccagaatggtctcttttgctaagagttcacgatctattcc

SEQ ID NO: 386218 - DNA, 122 bp, Homo sapiens
tactggctgagcccctttgtactgtagcaaatgggctatggacttcagtaactagagtcacgtgttaccggcgacacaaccaatgagggcgcgagatctgtgtaagcagggggaggcacgtg

SEQ ID NO: 386219 - DNA, 122 bp, Homo sapiens
cgctttgcagtgtgcagccacagtgagtggaagcatgccggtgcctctgctgctggaacccggctgccggaggatggaaaggacagctctgccacagagacacaacagatcccactagatag

SEQ ID NO: 386220 - DNA, 122 bp, Homo sapiens
gggcccgcgggacgcacggggccgccaggggaggacaacaagcctcaggccctgtccctgcgccccgcccggcctcccccgcggggctgcgcagcccactcggccatcctggcctgaagggg

SEQ ID NO: 386221 - DNA, 122 bp, Homo sapiens
cggcacttgcagcctcggctctaagtgacttccttcgagtcgcagtgggccggcgcctggcgtcaggtggggctcccaggagctgctcctccaggccatctctgccgtctccgaccttcacc

SEQ ID NO: 386222 - DNA, 122 bp, Homo sapiens
cgcgctaggcgtcgggagtggcatggcggactgcaggggccagctgcttggcggtcagggcgtccctgatagacttgcattggtcgtgctcgcttaggtggcagcacccagcccagtgccag

SEQ ID NO: 386223 - DNA, 122 bp, Homo sapiens
ctccgcccggcccggcatggccgtgtcctcagggtctgcgggcaagaggcgcacgggggtcgaccagggctccctagggctagatgtgcggccaagcacccccggggcgtcgtccgcagacc

SEQ ID NO: 386224 - DNA, 122 bp, Homo sapiens
tgcaacagcctggagcgcaaactttctgggatatgaccccagcctggcttcctattctgccgtcgccacccgcagctggacaggacaggggctcttggcagatcggcaggggcgcagtcctg

SEQ ID NO: 386225 - DNA, 122 bp, Homo sapiens
gcaaagtgcggaaagcccgtggcacaggagtgggtgccaggcagcccgcacgcaggtgaccggcggaccccctccccaggcccgggcggcggcggggcggggtggggtgggactgacccctg

SEQ ID NO: 386226 - DNA, 122 bp, Homo sapiens
gagcgctggtgctgttcttcatccgagaggaaaggctagagattccctccctactccacacgagggcgatctcttcaagggcaccagaccactctccgcgtccctagctgaggaaaccaaat

SEQ ID NO: 386227 - DNA, 122 bp, Homo sapiens
gggtgagccacctcctctttcctgtggagcctgcacttgcgtgtgccagcctacagagggcgctcctcctcctccacaagcccaggactccatggggaggcctggctgccccagggaccagg

SEQ ID NO: 386228 - DNA, 122 bp, Homo sapiens
gcggccagagggcgggcgggggggaactcaaggcctgcttgatacgtccgccattttgggcgcttcgctgatggtgtcggtgagcgcgtttcccgcctgagcgcaactagcggcgggtcgtg

SEQ ID NO: 386229 - DNA, 122 bp, Homo sapiens
cccccgctgtgggtcctgtgggtctgctctggggcccgtggtgcacagtggagatgtgggcggtgcgtgtctccccagtggctgctgacccactctgtggcgagtctcagctccaccaggcg

SEQ ID NO: 386230 - DNA, 122 bp, Homo sapiens
aggctgaagctcctccggcctttcagacgcagctgtcagagccgactttccgccacactccgctctcccgagccagaccctattttgaatattttcccagtgcatttcagggtaggcctgac

SEQ ID NO: 386231 - DNA, 122 bp, Homo sapiens
cagtagactggatctggatctctaaatggcaatctattgacatggctgccagcggtaactcgttaactcatttgctagtctaagagaatttatatatgatgggaactgaaatttgccttagt

SEQ ID NO: 386232 - DNA, 122 bp, Homo sapiens
acatagtacttgctggtctcaattgccagcagggaggtatcagtggtgataccactctcacgttcaactttcagcttacccaagacccaggtatgcttgaaggagccctttcccatctcagc

SEQ ID NO: 386233 - DNA, 122 bp, Homo sapiens
ggaggcagaggtgccggtggcagatgagtgtctgatagacaggcagctttagggataaagcgtctgcatcttcatctcatttgtgaaataaaagaacaattagggtcttcagagtgttttct

SEQ ID NO: 386234 - DNA, 122 bp, Homo sapiens
acatctcgggaaggtttgaagcactccctcgtgggaactctcttgccgctgcttttggggcgattccagcctcgggttcgaaagaacaaagtaactgcacattttgtgcgcgtatacttgca

SEQ ID NO: 386235 - DNA, 122 bp, Homo sapiens
ccagggtggagggtgcatgtggggcaggcgaggctccagctggagttgacgctagcccgacgcgggtgcaactggaggcgcgacgggccaggcccaggagcagcgggaggagcgcacctggg

SEQ ID NO: 386236 - DNA, 122 bp, Homo sapiens
tagcactttccaacgcttggaactggacatccacggctccgagtcctttgaggtcttgctcgggactacgtttcccagaaggctaggcgataattgacagctctatcagcctatggacagag

SEQ ID NO: 386237 - DNA, 122 bp, Homo sapiens
agctgggggtgtttgcaggatcagacaggaggcgggcgtgctgggctggggagcagagcccggagtaggaggggaagaggggggtggggcagcatttttctgtgtggcatctttcctcctgg

SEQ ID NO: 386238 - DNA, 122 bp, Homo sapiens
caccgctctgcgctcattgcaactttgaaagcaggaaggaagaaatgcgcaggctccagccgcgtccccgcaggccccactcccgtttcctagcaacgccgggtcacgtgcgccgccgcccg

SEQ ID NO: 386239 - DNA, 122 bp, Homo sapiens
tttcagatttttttttttttaagagatccttcaaggaacacagttcagagagattttcatcgggtgcattctctctgcttcgtgtgtgacaagttatcttggctgctgagaaagagtgccct

SEQ ID NO: 386240 - DNA, 122 bp, Homo sapiens
gtcactgggtaggtggcggctgcgggccaggaacaggcccatgcgcgcagcggcgccagccgcgcctcccaccagcggctctcctgggttaaatcctccaggcctccccgcccccgcgcccg

SEQ ID NO: 386241 - DNA, 122 bp, Homo sapiens
tcccctggggagcgtatacctgggagagtaatttctccgtgccttccttgcagatttacccggacgaaagccattactttaccagctccagcctcaaacagcatctgtaccggtccatcatc

SEQ ID NO: 386242 - DNA, 122 bp, Homo sapiens
aaactataaaagggatcttccacgggccatttcggctcagactgacaagcatgaacggaacggaattattccctcttctaactgcagccacgatttggcgttttaacaccgggctcaaggta

SEQ ID NO: 386243 - DNA, 122 bp, Homo sapiens
tgcgccgcccccgtgacagccgctgagcgccgcggacccgggcgtccgcgggcgaggggacgggactgggccctgaaccaataaagccgtcgggcctcaccgactccgcctgctcctgcgtc

SEQ ID NO: 386244 - DNA, 122 bp, Homo sapiens
tgttaaaagggaaatctgcatcgggaaagcggcggtttacgcagcagcccggctgaacaccgcgagccaaggggctggggggcggggacggtgcccaccccccaggcccccactcttccccc

SEQ ID NO: 386245 - DNA, 122 bp, Homo sapiens
ggtgaaaagtccccaagggttagctaactcatgccttagtttgaggtaccctctagaagccgaccctgagatgaagacttcagggcacatggctttttgttgttgtttttgttttgttgttg

SEQ ID NO: 386246 - DNA, 122 bp, Homo sapiens
ggaggccccgttaaaattcctgcaagggaggccacattacaattcccgcacgggaggccccgttacaattcccgcacgggaggccccgttacaacccctgcacgggaggccccgttacaatt

SEQ ID NO: 386247 - DNA, 122 bp, Homo sapiens
taactgccatctgattggacgatccgtaaacgctgaggcccagtctgtgcggttcacttgcgttcctccacgcgccccccagcacagtgggaagcacacagtaggtgctccgctctgctcct

SEQ ID NO: 386248 - DNA, 122 bp, Homo sapiens
tttgatggaatccaaactgagcaaatgtcacacagtattttcttgttgtgctcgagtgttcgtctccttgtagattgtatctaggctaacatttcatttagttgttaatgctgacgtaattg

SEQ ID NO: 386249 - DNA, 122 bp, Homo sapiens
gccgctgggccccggggctcattgttacgcagttcgaatgaatgggctcccaggcgcctgcgcgctggggctgagccgaggggaaaaacaagcccggagtccgggctgcggtcacatgatgg

SEQ ID NO: 386250 - DNA, 122 bp, Homo sapiens
gtccagcgcgcagtgagtactcagcccgccaggtctttggctcgctcgggtgcggaggggcggctgcttgggaagagtgggtagaaactcaagtctgcctaaggagagactggaacagcagc

SEQ ID NO: 386251 - DNA, 122 bp, Homo sapiens
cttattaataaccatttatctggtgttttgtaaatcgaaagcaaaatatcacatgctttgcgggccacttattagaccggcaccaggcaagcaggaacgccttcccaacttgagggagctgg

SEQ ID NO: 386252 - DNA, 122 bp, Homo sapiens
cctgaaggggcggggccattctctcagatataaggcttggaagccagcagctgcgactcccgagacccccccaccagaaggccatggtctccccacggatgtccgggctcctctcccagact

SEQ ID NO: 386253 - DNA, 122 bp, Homo sapiens
cgtaggagccgccggcaggggtggggcggggccggcgggacggggcagagggccctgcggcggcggacgcggcgggctcggccacaggtaacccgcaggagccgagagcgctgcctggcgcg

SEQ ID NO: 386254 - DNA, 122 bp, Homo sapiens
ggggacctcaggctccgggcccagctcctccagtaccgaactctcggaggggtattggtacgtggtctccagggctgtctcgctgaaggagatcttaagctgaaggagggagaaaaaggggg

SEQ ID NO: 386255 - DNA, 122 bp, Homo sapiens
ggcaggcacccacctccaccctgcagggtgcatccctctgctacaaggccttcccaacagcggttgccagctgtccccgggagccacgctgtccccaacagggcacgctgagcagcgctgaa

SEQ ID NO: 386256 - DNA, 122 bp, Homo sapiens
atggtgagcctaaatatagaggcatttaaagagtctgtacttgtcacttaatgccagcctcgctgttttggtactttcacattatcacacacctgacttaaacacagtgatcttcatttcaa

SEQ ID NO: 386257 - DNA, 122 bp, Homo sapiens
agagagagacatggatgcgcagagctgtgagcggtcggacctctgtcccatgaggaagcccggatgacctctgcgttctggaaactgcttctgctttagtcatttcatcggctgacctgtta

SEQ ID NO: 386258 - DNA, 122 bp, Homo sapiens
ttaaagcagtgtgccctacgcatagttggtgggagctgactctccgtgtagacgttatggcgtaggcttgaggacatagattttcaaaacaaattggcctagcctaggcatggcagcacatg

SEQ ID NO: 386259 - DNA, 122 bp, Homo sapiens
aggaaccttctggatcatgcccagatgtgcctccgtgattgctgctaggccagagagctccggggcagttctcccgccgcagaggcctcgggtgttcttgcctggctctccttttctgtttt

SEQ ID NO: 386260 - DNA, 122 bp, Homo sapiens
cctgaacatctgcagggtggtcgttgccaccacgaggggagactctctgaaaatgaggcccgccggtggcgtagagagctaagagacagctcttgagcccccaaaacagccacatcgcaatc

SEQ ID NO: 386261 - DNA, 122 bp, Homo sapiens
acgcgctctactagagactgtaccgcgaactgcagggatgctgggcaacaggtctaagggcggacggagcggacggcgagcaggccggacccaaaatacagggacccggggccgcaccggac

SEQ ID NO: 386262 - DNA, 122 bp, Homo sapiens
agcgtgggtccccagcacagacaggaggcggacagcttcccgtgaactgcaggggagtcccgggacgctgtcctccagcgaggtggggaccggctatgtccctcagttccccctcggtcctc

SEQ ID NO: 386263 - DNA, 122 bp, Homo sapiens
tgcccgccttccccacgtgtgcttcccacagactctgatgaggctggttacgaggaaggtcgccacattgtggtcattgcacatttgaggccactgagtggggtgggtgctgcgggtatgac

SEQ ID NO: 386264 - DNA, 122 bp, Homo sapiens
cgtgctactccttttcatgatccccattagtattctttgacgatggcatacatctgtcttcgatcgttgtcagctctgggaggcttatgccaagcttcttgagcgtaacccatgactgcctg

SEQ ID NO: 386265 - DNA, 122 bp, Homo sapiens
cctcaggagaaatagcaaataccatgaacaagtgtgcagcaggcgtctgcgagtgggttccgttgttaggtagagacggtgggagctagagcagtgtgtggccgtgggagctgctgatgctg

SEQ ID NO: 386266 - DNA, 122 bp, Homo sapiens
aatccagactgaagggaggggaaagcctagactaagactatggctgtgggattgaaatagcgttgaaggagctgactttgactcccggagatgaaggagaaagaggaaatcagaagggacca

SEQ ID NO: 386267 - DNA, 122 bp, Homo sapiens
ggggcagggctggagtgaccgactgatgggtagaacttactctcccctcagagtgtcacccgggtcctggaacagggtgggagtaggggaggtaggggccacagtgcaacccagctggttgg

SEQ ID NO: 386268 - DNA, 122 bp, Homo sapiens
gtttaatatttattttatgatttgtttcatagggaaattaatgttatgactggataaattcgaggttgtctatctccgttttctgatggaaaagcgtggagttcagaagcattgctcgctcc

SEQ ID NO: 386269 - DNA, 122 bp, Homo sapiens
tctcacccgtctcctctcaggcccctcccatgaacttacgggctgtgtcaatttctgtgccgtaggtctattaaaaccttctgggaggccaggctctcagttcaagccctatactcctctgg

SEQ ID NO: 386270 - DNA, 122 bp, Homo sapiens
gccgaggccgccatggacggggcggtgctggacgaacgcgagctgcgtgtgcggatggcgcgctatggccgccgggacctgcctcgcagcagccaggaagagccacgcggcaggtcctgggg

SEQ ID NO: 386271 - DNA, 122 bp, Homo sapiens
atcagtgagggcagctatcctgtgtcacagggtttgtgtgacctgcagccagcagcccagcggtctggtggtgtcctgcttggtggaagtctcgcagggagattctctgtgactaacgagtg

SEQ ID NO: 386272 - DNA, 122 bp, Homo sapiens
ccgcaaaggtctgcagcttcactcctgaagccagcgagaccaagaacccaccgggaggaacgaacaactctagacgcgccaccttaagagccctaacactcaccgcgaaggtctgcagcttc

SEQ ID NO: 386273 - DNA, 122 bp, Homo sapiens
tcaaaggtatgcaggcaggatgagtgcaaacacctccatggtgactgagtttcttcttctcggcttctcccacctggccgacctccagggcttgctcttctctgtctttctcactatctacc

SEQ ID NO: 386274 - DNA, 122 bp, Homo sapiens
tgcggccggagcctcgctgctcggctacagtctggccgcccgcatgcccgcctgtcgggccgtccgtccgcccaaccgtctgaggctctgtccgcgcgtcctcccccgcccctctcccgccc

SEQ ID NO: 386275 - DNA, 122 bp, Homo sapiens
gagggccgggccggcgtgacaccacctggcggagtctcggggaagagtcttaaaggcgcgcgctcctccgtgccccgcgcactcgaacgggagccgcggagagctcgcctcccgctgccgcc

SEQ ID NO: 386276 - DNA, 122 bp, Homo sapiens
ctcactgtacgggccaagctgaggtggaggctgaggctgacccttcccttggcccggacgcgtactctgcagcgtttcccacggtgtctgctcctcggttgacctgccctcctccgcgccag

SEQ ID NO: 386277 - DNA, 122 bp, Homo sapiens
atagaacaaggggccagtggcttttcagaagaagggtctgttctcggccccacaccagaacgccagccgccaggtcccgctgctcagcaggtctcaagcccgcgctcactcgggctccggct

SEQ ID NO: 386278 - DNA, 122 bp, Homo sapiens
tggtggggtgggcgggtgggtgtggggcgcccaggcaggaccggccggacctgtgggacccggggccctggctgtctagggaggctgtcaccccgaggcgaccggctcttccggggctggga

SEQ ID NO: 386279 - DNA, 122 bp, Homo sapiens
tgaactgtccccaggggcactcctgccctgaggccagcacccccacaggggcactcccaccgagggctgtcgcggtcggtgtccagccctccccaaagccccacatcacagtctgtctcgac

SEQ ID NO: 386280 - DNA, 122 bp, Homo sapiens
ctttcagcctattggaaaatgggttctcaccctagcagtggcgacaggaagatcccaccccgctaacaacatgcttccgtcttcagtttatttacaactggtgtgattgatggtaagtttaa

SEQ ID NO: 386281 - DNA, 122 bp, Homo sapiens
gtctcggggcgttgctgggaaacatctgccgttggttgcggcgggcaccggccgacatggcggcagcggtggcggctgcgctggcgcggcttttggcggcctttctgctcctcgcggcccag

SEQ ID NO: 386282 - DNA, 122 bp, Homo sapiens
ttcttgcttttttcagccttgacaactcccttttttgctgcatcaggctttcctttagctcgatatgcagcaatatccttccaaagcaaagggaggataaaacagtagggaagaaaaaaaca

SEQ ID NO: 386283 - DNA, 122 bp, Homo sapiens
aagccccttctctgagatgtccatcctacctttttaggtcaaaataatgtacagtgtccacgtattgatttatgactttgcttgtaacctctgactcccttcttttaaaaaaactttacttg

SEQ ID NO: 386284 - DNA, 122 bp, Homo sapiens
gagagccagagggggagaaacggcttggtgtggtcagggcaggcatccatgagacctaaacgaagagggggcattccagacaaaaggaacagtgatcacagaggccccgagtcaggaaccag

SEQ ID NO: 386285 - DNA, 122 bp, Homo sapiens
gggagctgccctcttcttccacaacagctggctctggggttctcaagatttattcaggatcgtgttaacggaggcggtgggaggatagggtccctgacgtgccggggacacacacagagaac

SEQ ID NO: 386286 - DNA, 122 bp, Homo sapiens
atttattttatataaatatacctccaataaccattaaaggcacactgaagaaatgaaacacgttctattagagtttttcttagcccacaggagttatgattcttcagggcagatatatctaa

SEQ ID NO: 386287 - DNA, 122 bp, Homo sapiens
atgtcaatgtactcataaatcgatagcaccagaggttattttgatgttctctgggaccttcgtattcaaagagtagctcacattccagcacctgcagcatcaccggcagcttctcagaaatg

SEQ ID NO: 386288 - DNA, 122 bp, Homo sapiens
tgggtgagacacgtaccccacgacctccgcagaccccactcaggggctgctgggaacacacgtccgtccgtggaaggaaccaggctcactttcttggccctgccatttttttgccttccgca

SEQ ID NO: 386289 - DNA, 122 bp, Homo sapiens
taaatatcgtgaggggtgaaaagccacagctgtttcactcactgcgcttcttacatgcaccggttttactcttggacaggggctgccctgcagtatctctcccggattcagcttcatactga

SEQ ID NO: 386290 - DNA, 122 bp, Homo sapiens
cttttccaccttgaagtatccccttcaaaagaattcccaaacagatgatgtttgatgttccggacctcgcagcatgatgcgaaagaaagatcatgggttttgaagtaggttagtgcagacgc

SEQ ID NO: 386291 - DNA, 122 bp, Homo sapiens
aaactaatgataaagcagtgttacaattcctgcttctggagcaccaattaagcttttccgcgctcaggttgccttagaaactttagagcgcgtccgccccagccccgcccccggcctcgccc

SEQ ID NO: 386292 - DNA, 122 bp, Homo sapiens
aagtgaatctttggtggccatagtaaacaattcagaccttggcccatagacagggttacacgtatggtggccctgtcttcatagaggccacctctaatgttaagttggaattgccagaccca

SEQ ID NO: 386293 - DNA, 122 bp, Homo sapiens
cagcaggcatcggtcccgagctggactgactggaccgcaggctcacgacttcttctttcacgatctctgtctcaggacattctggaacaaggctgcctccttaaatccggactcgctgttgt

SEQ ID NO: 386294 - DNA, 122 bp, Homo sapiens
tggagcggcggtttagagagccgagcctgatgggcgccaaggccggctggctgcttggagcgctgcctcgaagggactgcgtgaaggaagctaatccggagaacccaggccagagcctggaa

SEQ ID NO: 386295 - DNA, 122 bp, Homo sapiens
gggtgggcgagactggcggtcaccagacccaaaaaccatgcactcgggggtgggcggggccgcgagggcgcgcattaggaccgcgcggccgcggtccgccctctcttccggagggcgggctt

SEQ ID NO: 386296 - DNA, 122 bp, Homo sapiens
catccatgcggcgctggaacacctgggaagcaagtgggggcaccatcagcctctggctcccggggcaacagccccttgccctgcacagacccctgggcttcccaatgccacccaccagccag

SEQ ID NO: 386297 - DNA, 122 bp, Homo sapiens
gtggtactgtctaggagcgcgccgcggcccctgggcctcgctgtctgtcctaaatcattccggtgaacctctccggctgcgtagctccttgcccccgcgtcgcttggacacgggtggcatcc

SEQ ID NO: 386298 - DNA, 122 bp, Homo sapiens
ggtagttttcttccttcaggttcattcctggctggccagtgcccaagactggcgagactacgattcccagacgcccaagcgagtcgccggtcacgtggccgcaaggacgctgggccggtggg

SEQ ID NO: 386299 - DNA, 122 bp, Homo sapiens
tgttcctctgcagtctggcagtcgaggggagctgggccccaaaggcacccagggtcccaacggcaccagcggtgttcagggtgtccccgggccccccggtcctctgggcctgcagggcgtcc

SEQ ID NO: 386300 - DNA, 122 bp, Homo sapiens
gcgacgtcacggcctggggtgtcccgagaaacctgctctgctgacaatgaggggatgtggcgccgactggccctcaagtgaatcccaacagcacggccccaacacactcacttggggagcag

SEQ ID NO: 386301 - DNA, 122 bp, Homo sapiens
atcccgccgggtccagtaccggccacagccgccaccgccccggcccctccccccggctcgcgaacccaccgccctgctcggtcctcgcgccccgagcctcgcccacacgccggcagcgggcc

SEQ ID NO: 386302 - DNA, 122 bp, Homo sapiens
ccggctgcgtggacactgcctctggggtgtgtgtcgggtggccgtagccggtggaatggtcgcgcgggccctgttacctgcatccccgctccgcgccgcgcggccggtcctcgacctgcatc

SEQ ID NO: 386303 - DNA, 122 bp, Homo sapiens
cacagcaaggtggctgtgggctgcggggcggtgggggcagctgggggtgagcctgggccccgctgagcttgtgcctgcacagatcctatacgcccgggacgtggatcagcgcagcaccacct

SEQ ID NO: 386304 - DNA, 122 bp, Homo sapiens
ctacaccccagttgtgtgatttgtggggccaggccgttcctaatgcccaacccatagatacgatgacggggctttcagtgaaggattcagctcctatttgtctttcccaggttcccctggac

SEQ ID NO: 386305 - DNA, 122 bp, Homo sapiens
gcggcgctggcacaagtcacgtctgctacaggcttcgggaggcggcttagcgagcatgcccggttcgcactttgtgggcgtggacggggttcgggctttcctgcagacctattcccacgagg

SEQ ID NO: 386306 - DNA, 122 bp, Homo sapiens
accttgtgatccgcccgcctcggcctcccaaagtgctgggattacaggcgtgagccacagcgcctggccgagagactccttttatgggaatcttacatgattattcataaggggctgggaag

SEQ ID NO: 386307 - DNA, 122 bp, Homo sapiens
agaagaatgaggggctctgggtgggcttagtcgcacagctgacagtggcgaatgggaacacgggcagagtctttttggcgagattcctggagctaactggagaccagaccggccagtgtgca

SEQ ID NO: 386308 - DNA, 122 bp, Homo sapiens
cctctggcctctctatgcgttcccagaggtcccgaattgacgtccttccctcaaaacctccgggtctacaaaccaggaccctcaagacccttcaggtgcttagagaaggatgagctaggtta

SEQ ID NO: 386309 - DNA, 122 bp, Homo sapiens
gtggatacttcctaaaaacaggcagtgcatgagcactggtgatggacattgtgactgcatcgagcgcttgcaactttgaggtgaatgaagtctgtactgactcctggttgcaacacatagga

SEQ ID NO: 386310 - DNA, 122 bp, Homo sapiens
ctcgatttctcaccgagccttagctgccttcccgcggggcagggctggggacctgcagcccgccatgcctaagcctcccacccactccaagggctcctgtgcggcccgagcctcctcgacga

SEQ ID NO: 386311 - DNA, 122 bp, Homo sapiens
taattgttctccgttcgttgatatcaaagacagttgaaggaaatgaattttgaaacttcacggtgtgccaccctacagtactgccctgacccttacatccagcggtgagtttgaatgtgaca

SEQ ID NO: 386312 - DNA, 122 bp, Homo sapiens
gcttctcttatctctttccatctcctccaggcaggcctctctgtgctgctgaaggcagatcgcttgttccacaccagctaccactcccaggcagtgcatatccgccctgtttgcagagtaag

SEQ ID NO: 386313 - DNA, 122 bp, Homo sapiens
ggcggcttaggagggggatggtggagggggacccgctgagactggctgtccagcctgttccggcccttaccagcccgtgttgaactcgacgtgggcatcaaagaagccgacgactggggcgg

SEQ ID NO: 386314 - DNA, 122 bp, Homo sapiens
gtggtttaagcctgagttctgaacatgtgtcaaacaaagcaatcccatccaggaggcggtcgggatacccaaatctcacttgcatttcccagcaagcattcgtgaaaacagacttgctgacc

SEQ ID NO: 386315 - DNA, 122 bp, Homo sapiens
ctggtcagctctgagtcattcccttatcaggcactgatgaggaggcctgctccttgttagcgggaagggagattggccagatagttgccatgcacacaaagccccaataggcagctctgttt

SEQ ID NO: 386316 - DNA, 122 bp, Homo sapiens
tggggcatcagtccggccctcgctggctcactggagaggtggtgtctgggagtgcacccccgaaaacccggcagcagcccggcgtcactccggctgttacctctgggagcagaaactaaagg

SEQ ID NO: 386317 - DNA, 122 bp, Homo sapiens
actgggagccacctctttgaaatgtaatcatcaagaaagatactgcctctgtctcccagtcgctgtgggagaataggagcctgtgttagtctgttctgtgttgctataagggaatatccaag

SEQ ID NO: 386318 - DNA, 122 bp, Homo sapiens
gggcccgaaatgaacttacctgggaaactcgcctttggggagagtgggttctaggagccccgtctctctttttcctctctgaaggaaacttggagtgcctcttggggtacagtgggtccctg

SEQ ID NO: 386319 - DNA, 122 bp, Homo sapiens
tcgggtcccggagctgcctttggtgcgcacgggcgcgcacgggctggggtgtagacggggcgcggaaggctgtgcttcgcggaggcctgcgtggtggtgcctgcccggagcgtggctctgag

SEQ ID NO: 386320 - DNA, 122 bp, Homo sapiens
gagctgatggtgaagcgcatggacgcactggccaggctggagaacagcagtgagctgcaccgggccggcggcgacctgcactttcccgcagacaggtgaggggacgtggggaggaggcacac

SEQ ID NO: 386321 - DNA, 122 bp, Homo sapiens
accacatctgcaaaggccctatttccaaataaggtcgcattcctgggtcctgggcggacacgaacctggggcccgcgcatcccagcgtcgtcgccgccgccaacctccggcaccgcgccgac

SEQ ID NO: 386322 - DNA, 122 bp, Homo sapiens
gaaaaccaggttcctttgagtaggactcctgctcagatgagagcagactaggaaaggctgcgggatctggtcagaggcactgaatagttagttccctgttactgcatctgttgtacttctag

SEQ ID NO: 386323 - DNA, 122 bp, Homo sapiens
tcacctggggtccaaggcactgctactctcccggccgcccgcaaacaactgaatctgccacgccgcgccctggccaaggacttttcaaatctcccgccccggccccattgggcaagctcgtc

SEQ ID NO: 386324 - DNA, 122 bp, Homo sapiens
cttaaacatcatttcgcgtagggaaacaggcactctcctctcccggaagacaaggctgcgcgtaggtttatctcggcctcctggaggacctgtagtttttgggagagcagctgcgaggggac

SEQ ID NO: 386325 - DNA, 122 bp, Homo sapiens
ccactcggtgaccgaccccgagaagctcaacaactacgagcccttctcccccgaggtgtacggggagacctccttcgacctggtggcccagatgattgatgagatcaagatgaccgacgacg

SEQ ID NO: 386326 - DNA, 122 bp, Homo sapiens
gcgcctcggatgccgccggccacggggctcccggaggggggtccgacaccgcccggtgcccgggatccccaatctggccggtggatgaggccccatcccatgcacccgagtgcgggggacgg

SEQ ID NO: 386327 - DNA, 122 bp, Homo sapiens
tccagagaatttctttctgcaggatgccgcctgctttggagggccccggggtgcgcacggcgtgtgggcgtgcggcctgaacccacagtggcggcggaaggcaggagccggaggcctggcgg

SEQ ID NO: 386328 - DNA, 122 bp, Homo sapiens
cgggcgcggtgctgacgggcgcaggtgcagcagccgaggcgtcgtgcaggaagatgcgctcgctgcggcgccgcgtccacaggtcgtcgtcgctggcctcgggccccgcctcgaagccaggc

SEQ ID NO: 386329 - DNA, 122 bp, Homo sapiens
gccagggcggaactgggcgaatccgatttattctgtttggttcaacaagtgcttaaggggcgctcaccgagtgccaggcattttgaagcgtacagaagtcaaaaatccagagtttagatcca

SEQ ID NO: 386330 - DNA, 122 bp, Homo sapiens
actaagaggttacaaagtcctgacaaagaggaggttacacttcccgtacacaaaggagctcgcagtctagaaggggaagacagggaagacaaagtggacaggaatcaccgctattcaatgcc

SEQ ID NO: 386331 - DNA, 122 bp, Homo sapiens
tcggggggtgagctattcgactacctggtaaagaaggggagactgacgcccaaggaggcccgaaagttcttccgccagattgtgtctgcgctggacttctgccacagctactccatctggtg

SEQ ID NO: 386332 - DNA, 122 bp, Homo sapiens
gccacctccaggatacagcggaccccgatgaagccctggcctgggtgctgggggaggctccgcggcgcggtcccgcaggcgggaggcgatgctgccgacgctattgctgccattactattac

SEQ ID NO: 386333 - DNA, 122 bp, Homo sapiens
acaacgcgacctgctttgagaggcagcgaataaggggcagtcggagccaatacttcaacacgtgagcccggagcaccaacgacctgcccaccctccagggcccacacaagcaacctctaggc

SEQ ID NO: 386334 - DNA, 122 bp, Homo sapiens
acatccggaagatcatcttcatggcgttgcacgggcgccctgtggatgtgtctccgcgtccgtcattcccggaattgttttaatgctagttaataattattgcctggagccacagtgtcacc

SEQ ID NO: 386335 - DNA, 122 bp, Homo sapiens
ggtccccccgccccggggcgtcccgccggcccgggcccagcctgatggcaccccctcccccgggggctccaagaaaggacccagagggaaactccaggctcagcgcgcaacaaccaaaggcc

SEQ ID NO: 386336 - DNA, 122 bp, Homo sapiens
caccgtctggattagagctgaggcgtctgcaagccgagcgtggccacggtcctctggccccgggaccatagcgctgtctaccccgactcaggtactcaggtatgtctcaagtccatgtcctc

SEQ ID NO: 386337 - DNA, 122 bp, Homo sapiens
gaactaggggggagtggggagggggtggggtggtcctgcccgcaggccgcgacctttccacggagcctcacgtgggcgcatgaggaaaaccccagcggctccctaggagtcacggggatcgg

SEQ ID NO: 386338 - DNA, 122 bp, Homo sapiens
ggggccggggaggttttgagggaggtctttggctttttttggcggagctggggcgccctccggaagcgtttccaactttccagaagtttctcgggacgggcaggagggggtggggactgcca

SEQ ID NO: 386339 - DNA, 122 bp, Homo sapiens
cgccccctacaggagcccaaatcgcagccctttcttccgctgtcttccatctcccaagtgcgatttagtatgtagccctcccaccgtccccgcccaagagatattccttggggggtacacgc

SEQ ID NO: 386340 - DNA, 122 bp, Homo sapiens
gagggctgaagatggaccgggctggcggggcgggggcgtcggggagcggcgggagctggccgggggcgggagaaggcggagacaaagtcttgcttcccgaggggagatggcgccctcctctg

SEQ ID NO: 386341 - DNA, 122 bp, Homo sapiens
cggacccacagccacgtgccagagttatcgcgtggaaccctcggacccacagccaagtgccggaattatcacgtggaaccctcggacccacagccacgtgccggagttatcgcgtggaaccc

SEQ ID NO: 386342 - DNA, 122 bp, Homo sapiens
gccgccgcccgcgccccagccccgggagctctgctgatccggccgagctcagcaccgaggcgccccccaacctgcccagcccccagcccaccagcccagcccagtcccggggagccagctgg

SEQ ID NO: 386343 - DNA, 122 bp, Homo sapiens
gaggagcccctctgcctggctgcccagtctggaaagtgaggagtgtctctgcccggccgccgtcccatctaggaagtgagaagcgcctcttcccggccgccatcccatctaggaagtgagga

SEQ ID NO: 386344 - DNA, 122 bp, Homo sapiens
cccgtccttggaggtgaagacgtggcaggtggtcacgcgcacggcacactcacgttttcacgtaggggtccgagtagccgttggcgtccatggcggccaggtgggcgcaccgcacgatgcct

SEQ ID NO: 386345 - DNA, 122 bp, Homo sapiens
ttcattcttgatttcctttttatcccccttcctctttgcacccgactgctataaaaagcacgcctcactcccacttggctcgacaagcagccgccctggaaggagaggcagctgcaaggaga

SEQ ID NO: 386346 - DNA, 122 bp, Homo sapiens
agccgggcacggtgagtgggcgcagctccgtgttcctgcgctgtccttcccttgcctcctcggatgtcaccgggtggcaccttctgctagctttttcaactcaaatttcagaacccatctcc

SEQ ID NO: 386347 - DNA, 122 bp, Homo sapiens
ccccctccccaaggcagggccgcaccccgcacgtcccgcagtgggtacgggaagtccaggcgctccaccgctgacaacgctcccaggtagtcagcggcgctctgggcatcggggaagcagtg

SEQ ID NO: 386348 - DNA, 122 bp, Homo sapiens
tgtctagacggacagctcctgaaggttcaaggtaacaggagattcatggtccacatacaacgtagaatggaatagtacattacccccgcggttactgggaatttctcagccgccccctttct

SEQ ID NO: 386349 - DNA, 122 bp, Homo sapiens
atctgccgaggaagcgtgacttccatggacccctctccccagaagcccaatagtgagcagcgcccccggggaatcgccagggtccctccagccctcccagagtgtccacgtaccgcagaagt

SEQ ID NO: 386350 - DNA, 122 bp, Homo sapiens
accagccaccagaccagatcccttcgaaggtgcccggagtaccagactgacaaaagcgcccgtacagtgctcagtcctgtaaccaaagctgtctagggtgcagacatcgctcaccggaccgg

SEQ ID NO: 386351 - DNA, 122 bp, Homo sapiens
gcaggcagcacgcagcccggctacggacacaccagctgcacggcggcctgggccagcgttcggagcccatcctcggagcccatccttagccccggccccgcaccaggatgcatgctgcgtct

SEQ ID NO: 386352 - DNA, 122 bp, Homo sapiens
atttcctttcaccttctcagggattcccagcgacgcagaagcgcttgtgtgtgccaaagccgagggcagatgattcacatgtggctgacccttgccacgttaagttcatgtcccaggagagc

SEQ ID NO: 386353 - DNA, 122 bp, Homo sapiens
ggggggcgtggcctgggcgcagcatctataaaggcgggcggcggcagaggcgccattttgcgaacggcgagcagcggcggcggcgcggagagacgcagcggaggttttcctggtttcggacc

SEQ ID NO: 386354 - DNA, 122 bp, Homo sapiens
acaggaggaacacttgcagccaggactttgagaccagctaggataatatagtgagacactcgtctctacatttctttttaattagctgggcatggtggcacttgcctgcagtcctagctact

SEQ ID NO: 386355 - DNA, 122 bp, Homo sapiens
accgtatggggggcacaggtagcgttagactggaacatgccaggtgggcaagtgcattctcggtcagtcaaggcagcacaaggtaatttctcaatcattggccatgggcatggctgactaca

SEQ ID NO: 386356 - DNA, 122 bp, Homo sapiens
agaagtggaaaggagtcttaacttacctgcaataaccttcctatgcgaagttgtggctaacgcatgcctaatggctagaattaaatgctgggaatataacgagctcagcacaggttatccgc

SEQ ID NO: 386357 - DNA, 122 bp, Homo sapiens
gcagcggctggtagccacgccctcgccgtttgcgcagcgcccctccgcccgccttcccggcggcgcccctgattggacattgcactcttggacccgccttcgttgcctgagtgacagctagt

SEQ ID NO: 386358 - DNA, 122 bp, Homo sapiens
attggctgaaaacatgcagcaaccactattttcttcctgcccctcgttgatgagagcattcgaagtgacctcagcagggcatccaggtatgtcaagcatggtgacaaagtgttcaggtcaga

SEQ ID NO: 386359 - DNA, 122 bp, Homo sapiens
gcagctgacatcctggggtcagggtgagtcatgccctgtgtgcatgaacatgcaggcatgcgtgcagcaccctcgggctccaggggcttaaatttccaaaagacaaccctgaaaacttgaaa

SEQ ID NO: 386360 - DNA, 122 bp, Homo sapiens
aaccctccaccctgagatctctgtctctatcctatcctgtccctggccttctgaggcaagcggggccaattaaggggaaaacgtacctcctccatttgtgctgaaccaatccctccaacccc

SEQ ID NO: 386361 - DNA, 122 bp, Homo sapiens
taccagggctcccgagcgtactcctccatggcgctggcgtctggccgcgcagtcaggccacgcccccagcgtagacgcacaccggcgtcggagctttccgcctattaccgggcagcgattgg

SEQ ID NO: 386362 - DNA, 122 bp, Homo sapiens
tactattaatatctgaactcctaaactgattcacaagttggagtgagaccttttttcctccgtattttcccttttatgaattccatcttaaaagaaactttccacttttttttttcctatgg

SEQ ID NO: 386363 - DNA, 122 bp, Homo sapiens
gcttcttgactgtgcttctgtgacctcctgcttctgctcacgctccccacagccccttcccgatgagcagccagaggggtctattcaaacatgtcaccttgtgtcacgctgtgctcaggacc

SEQ ID NO: 386364 - DNA, 122 bp, Homo sapiens
agaatttataaacaggaaaacattttcttcgggttatttctggaaatctcttccaaacatcggagttttcttctaacttaagtctcttcccacctccttcccaggggatctgctgaagggtg

SEQ ID NO: 386365 - DNA, 122 bp, Homo sapiens
agcatggttgccccgcctggcccggcgacgcccgctcagcagcctgctgaggagtggggacgaagagcagcctaaacttagggctcgggatatttcgatgccacccaaattgccgtcctacc

SEQ ID NO: 386366 - DNA, 122 bp, Homo sapiens
gtctttatattttttagatagctctttaaaatccatgatggagttctcatcaactgggcacggtaatacaggagaagtgattcacacagggacgttgcaaatacatgaaagtcatcacactg

SEQ ID NO: 386367 - DNA, 122 bp, Homo sapiens
ggcgtaggtggccagggggaagtggatgcgggggtacggcactaggttggtctggaattccgtcaagtccacattcagggccccgtcaaatcgcagggaggccgtgatggaggacacgatct

SEQ ID NO: 386368 - DNA, 122 bp, Homo sapiens
ccagaggggaacagggaaacacatcctgtgttcagatcaccccacgctctcaggagaggccggtgtggacacaccccacggggtgaagagaccgggcgcagtaagcctccagcctcccaaga

SEQ ID NO: 386369 - DNA, 122 bp, Homo sapiens
ttggagagagaaagctcaaaacaatgttaagaaaaaaatagaatacatacatatgaattacgttttacttatctgtttaatgaatgcaaatttgttgatttgagaggtaaagtgacttttaa

SEQ ID NO: 386370 - DNA, 122 bp, Homo sapiens
gggcgcggcgagaatgcacaaccccgtccagagcgcaccacctcgatcctcggggggaaacggatcaccccggctgtcctccgagctcgggatcagccaaagtcccactatatttagcttcg

SEQ ID NO: 386371 - DNA, 122 bp, Homo sapiens
ctcatggcacgtggccacaccgcgtcagcgccgactccacggtggctgcgtcacggctcacgtgcactgtgaggacactggggttgctatagacagtgctggggcaaccctgtgcctacaca

SEQ ID NO: 386372 - DNA, 122 bp, Homo sapiens
tccccacagacgaactggagggtgtccaccagctccccgccgcacagggtctcactggggcggtaagcagcaatgcagcacgaggcgaaggccaagaaggtgagaagcaccagcatcgactt

SEQ ID NO: 386373 - DNA, 122 bp, Homo sapiens
caaacctcagttaaaatgcatttccctccaaacttcacgtcttaactgtggcctgacttacgtcttctcgtcgccaccgctcccagtcagggccttagttctaaccatggccgcttttcccg

SEQ ID NO: 386374 - DNA, 122 bp, Homo sapiens
cgcctagtcctcaagccgctcggtctccgcggggccggaggccgctcccacccccgcgggcgcttcaaggggcctgagccgggcactaagcgtacagccctgcccgtggcagccggggcaga

SEQ ID NO: 386375 - DNA, 122 bp, Homo sapiens
catgtaaactgactgctcaaggccacgcagcgggcaggtgagagcagggtccacaccctgcgtgggtctgggccgcacactagccccgcactcccgtctcccaggagacagatccggaccac

SEQ ID NO: 386376 - DNA, 122 bp, Homo sapiens
cgctccctggaggcgaggcctcgaggctcacgttcagactcactcggcacttttcaaagccgatattgggctcccaggacaccgccttgacctccctggcgctcaattgccgtcctctctag

SEQ ID NO: 386377 - DNA, 122 bp, Homo sapiens
ccgccctcccgactcgctccgtttagaagcggtgcgaggcgtgcggggaacactaggtggcggtgaaggctctccttcccgcgagcccgcggccgggacctgcagtgtcagacctaaactcc

SEQ ID NO: 386378 - DNA, 122 bp, Homo sapiens
cacctttaccacggccagacatgactaagcaacttctaaaaccaacttaagaaacctaaacgccaaggcaaagcaacgcccttatatgccgggaattcggacctaattgaagactgaaagcg

SEQ ID NO: 386379 - DNA, 122 bp, Homo sapiens
ctctcaaagcctctttccgggtccgacttcttgacgtggtgaaggaagcctgctttctctcgaggtggagttttccagagcttgcgaaaatcttctgcctatgaagaaaaaaaaatgtattg

SEQ ID NO: 386380 - DNA, 122 bp, Homo sapiens
aaaatattgaacactcgccactgctagggtagtatgtagtacatgaatggcagacaccggcgagatctcaagtgttacgacggatgaaaattccacctgttaagtctcctttccatccaagc

SEQ ID NO: 386381 - DNA, 122 bp, Homo sapiens
gtcatcctttccttgaactacaattaggaaaagtatatgtctttattccattgaagttctcgagagtgatataaatactttggggggtatctactatgtgcctaactagtcctgttctaggc

SEQ ID NO: 386382 - DNA, 122 bp, Homo sapiens
catcaccaacatcgagatgattgacgacggctggtggcgcggggtgtgcaagggccggtacgggctcttcccagccaactatgtggagctgcggcagtagggcccccagcccccccccggag

SEQ ID NO: 386383 - DNA, 122 bp, Homo sapiens
cacggaaccactgaaacacgacagtgtcgcaaagattcgccgaagacactcctttccttacgtgacctagttttcgctcgcccagtgaacctgttctcgcctgggtatgcatggtatataag

SEQ ID NO: 386384 - DNA, 122 bp, Homo sapiens
ctcactatgagtgagctcaagagctgggaataaggacccctgcccttgaaggtctaatcacgttgctggagacagacagtcgacaaatacagtcagccagtaaactcttcctgcattatgct

SEQ ID NO: 386385 - DNA, 122 bp, Homo sapiens
atttctctcacactaacggacaataaggaggcctcgagctaggcaggccagggccgtacccgagctgctggcagggagcaaacctcaggaaagtcaagccaccaaaaaactgtaagcctcaa

SEQ ID NO: 386386 - DNA, 122 bp, Homo sapiens
tgcgggaggactcgctgcgaagggcgaggggtggcgctgggtgggacgggcgcctggggccgtgcagggtggctcctgggtgctgcccgggctgcctgtcgcccagtactggcgcaggaaga

SEQ ID NO: 386387 - DNA, 122 bp, Homo sapiens
ggcgggggcgccgaccaagtttctctcgctgcaaagatggcgtcagtgctgcccaaacttcgggcccccgggggcggggcagcggggagggcggccgcgtcggtccgcgcgtgtccgtgggt

SEQ ID NO: 386388 - DNA, 122 bp, Homo sapiens
cgcagctggcaggaggcggggtggcctacgcagggggtctgtttaccgtctcaagatggccgtgtgggctttgttctgcgggcccggaggccgcccgcccgccccgggcccagcgcccggag

SEQ ID NO: 386389 - DNA, 122 bp, Homo sapiens
ccgtggggggcatttgcttgttttgttctttgctgccgaccaagggagctgttgaaagcacggggcgggagccgcctcagcgcccgtcagcaccctgcccgcgggctggggtccttacccat

SEQ ID NO: 386390 - DNA, 122 bp, Homo sapiens
aggggacatagttcagcccataacgcctgattttccagaagccacagagcctagacaccccgttcccccaaagaacagggactctggatgtcaggggcactttagcctgagccttcaaaatg

SEQ ID NO: 386391 - DNA, 122 bp, Homo sapiens
gctcaagtcatctgcctgcctcagcctcctaaagtactgggattacaggtgtgagcatttcgcctggcctcagtggttcttgttggcattagctgatgtggttcctgttcccaggtgcagag

SEQ ID NO: 386392 - DNA, 122 bp, Homo sapiens
ccagtttgtccgagagccgcaagtgtttcgggacgacgcaacgcaggggcacctgggagtcgtaggcggatgggcccaaagccttccgggagtcgtagtccttccgcccgctcctcgtttct

SEQ ID NO: 386393 - DNA, 122 bp, Homo sapiens
gagaggggcgtgtttgtggtggtggcggcccatcgggggtccttgtcctctccgaatacccggactgctgaggggaagggccgggggggccccggcggttgccatggtgacgcagggtcggc

SEQ ID NO: 386394 - DNA, 122 bp, Homo sapiens
agagcagctggaggagagcctcagtttctccaccgcacaccctggcctgagggtagcagccgacccagtcgggggagtgggcctcctgcgccctcggaggcacaggaccgcggggccccacc

SEQ ID NO: 386395 - DNA, 122 bp, Homo sapiens
aggacctgcagaggagtttctgcctctctgctcaggccagttctccagcgccctctgtggcggctgagagcaggccctctaaggaagagagctccgggcatagagagctcaggcctgcagca

SEQ ID NO: 386396 - DNA, 122 bp, Homo sapiens
ctgcccccgctagtctagctgccgagcccggaagtggatgcagccgctcggcggagaggacgagggggagggggaagtgcttccggggaaacgggccggggttggtgtttgtaaacttgcct

SEQ ID NO: 386397 - DNA, 122 bp, Homo sapiens
gggtgcaaccaccatgggggaggtggggaaaggaaagggaggctgtagaccgtaccaagccggcccagaactgggggagcacttgacaactctgaccagctccctgcagaaacgctttagaa

SEQ ID NO: 386398 - DNA, 122 bp, Homo sapiens
ccaagctcggctctgttcaccaaagcctgcgtgctctgctcacactaatcctttcctagacgctgcggagcacagacgggcgctgcgagagacggccctgcacaaaagacaaaaaagaccaa

SEQ ID NO: 386399 - DNA, 122 bp, Homo sapiens
cagaaagtcctatattcagaggattgctgccagtgggtggtcattccagaaagatctggccggtgccaataagtccaagcctttccctcctttcctccttcccttgcaaagccctctgtcct

SEQ ID NO: 386400 - DNA, 122 bp, Homo sapiens
tcaccaaggttactcaagatcaaatcgcctgcaaagattctaagccaacacgggagacttcggttgtatcgtgaatgataacaaaccttaccaacagtaccttcaatgtatcgtttttatgc

SEQ ID NO: 386401 - DNA, 122 bp, Homo sapiens
tggattcgaatgatttcttagtttctgagatttttttgtctaagcatcgtagacttcgtgcgttctcaacccaacaggaagcgtcacatctcagtgagcttcggctctcacagcccgaaact

SEQ ID NO: 386402 - DNA, 122 bp, Homo sapiens
cagggggaaagtgaggcacagaaagagtggctgacctatcagaaccacacaactagagagcgagaccacccccaaaaggccccaggtgtgtctggcaccaaggtccatgtgctttccatttc

SEQ ID NO: 386403 - DNA, 122 bp, Homo sapiens
attggttacctttgggcaggtgaggtggctttgctttgcttggtcttgaggttttgtgggcgtctttctaagtctgctcagcaagggcgtcgttgggcagtttttatcttgggcctacttgc

SEQ ID NO: 386404 - DNA, 122 bp, Homo sapiens
cctgactagcagagctgagattcaaaccacatggtctgactccggggctgggtccttcatcgctacatcacattacatcacaaaattagtgcttttgataaaaaaaaaaaaaaaaaaaaaac

SEQ ID NO: 386405 - DNA, 122 bp, Homo sapiens
tatggggagacgccctgctggagaagtggccgggtcccggccgtgcgtgggccggccctgcgccacctgggtgacctcagacacctgggccttggacggcccggctgcccggcggccaacgc

SEQ ID NO: 386406 - DNA, 122 bp, Homo sapiens
ccatgaagtatgccaagtgctatgccaaggcgtatccttctcttgccaagtcctttttaacgaccctgagtggttactcatacagctcagggaccttagaagctactgggccaggactggaa

SEQ ID NO: 386407 - DNA, 122 bp, Homo sapiens
ggtttggccaactacccacgcacaaaaaaatatatttctaagtttaaccaactacccacacgctccaaaaatattccaagcaaaaccaccaacctgttcgcagtggttcaaggagagatttt

SEQ ID NO: 386408 - DNA, 122 bp, Homo sapiens
cgtggggcctgctcccggcgcagtcccgcagtacctgagcggcactcggtcctttgaccacgcttggctgcctcagcttacacttcccagcaggatctggctgggagccccttcctcagata

SEQ ID NO: 386409 - DNA, 122 bp, Homo sapiens
aagggctcctgcgcaggcgtttgtagccacttttaagttttatcagctagttcatgcttgcgttgaaagagtggtcgtttgcgctgggtcatcactgtgtagtattggggatacttaggtga

SEQ ID NO: 386410 - DNA, 122 bp, Homo sapiens
tgtagacagctctcctcacgaattttttgaaagaacccaaggactcccctttctggtagtcgaaacctgtgcattccttggtgacctccggagagagaacatgggccggcagtggggacaga

SEQ ID NO: 386411 - DNA, 122 bp, Homo sapiens
ctcaagtggatacaaaacgagcatccagcagaactggcttttccgtgtgcggcaaagctgcggggaaacatggcatgagaaagtatcggtcacccgcagacaccagcacaagttataccata

SEQ ID NO: 386412 - DNA, 122 bp, Homo sapiens
gttgatggccagcttgaccctcatctccaagttttctggccttatagccttatctttctccgaaatgtctagctgggccagccatggtggctcacatttgtaatcccaatactttgggaggc

SEQ ID NO: 386413 - DNA, 122 bp, Homo sapiens
gcctcaagtgatccacctgccttggactcccaaagtgctgggattacaggcatgagccaccgcaccagccaagcttttaaagaattaaagttagttttattcagaggtcttaccgaggattg

SEQ ID NO: 386414 - DNA, 122 bp, Homo sapiens
acagtattctaaactaagcaggctcttcttggcctctaccttgcatctttcctgtctccccgctactcccacctctgggatcagctttgataagacttagctacttgggtaaacctaggcaa

SEQ ID NO: 386415 - DNA, 122 bp, Homo sapiens
gggctcccggcgcggcgggcgggactgggggccgggcggctgggccgggggcggaggcagcgcgcgggggccgggcgaggggcgggagggggcggccctcggggctcccagacggctggccc

SEQ ID NO: 386416 - DNA, 122 bp, Homo sapiens
gaagggtgtgtcccagtggacgtacagtacccggccaagtccccttggtgcacacttgcacgtggccccatcacaggaacaacctgacgtgcaggcacagagcaaggactcgagagaacgag

SEQ ID NO: 386417 - DNA, 122 bp, Homo sapiens
ctaataccctcttctctttgcaaccctccaagaccctctccctgagactaatgagttgttcgctctggaccaattctgaccacaggagaccagactactcacccccatggaagggcacccac

SEQ ID NO: 386418 - DNA, 122 bp, Homo sapiens
gggccagccgaggggtggggtgattggagtccgatctggaccaatgggcagccggcgggacgggggcggcgacgacaaccgcggccgcaagaatcaacgccgcgccgggccaatccgcagcc

SEQ ID NO: 386419 - DNA, 122 bp, Homo sapiens
gccagcatcccagccaccccgatgctggcttccagcagggccatccggaaggtgcggctgcgactggagctgacatctgccacggacgcaaagctagcagccagaaggccaccgaagtcgcc

SEQ ID NO: 386420 - DNA, 122 bp, Homo sapiens
cgctagagcagcgagcagcctggaacagacccaggcggaggacacctgtgggggagggagcgcctggaggagcttagagaccccagccgggcgtgatctcaccatggtgcgttttggctgct

SEQ ID NO: 386421 - DNA, 122 bp, Homo sapiens
cgcccaccatccaaaatgcaccctccctccagttacccgccactaccattacgcaggccccgcccctccgctgcccccacgctccagaccagggccctccacctgccaggctcctcgccgcc

SEQ ID NO: 386422 - DNA, 122 bp, Homo sapiens
gctgggggtaggtgaccgctggaccgtgaccaaagccatctaggcgctgctgggttgttccgggcagggcattcttgtcctgagtgtgggggacgggagggtgacggagccgggatggggaa

SEQ ID NO: 386423 - DNA, 122 bp, Homo sapiens
agaaaacaagccacttgccttcctggccattgccaaccggaatctggctgtctacacactcgtgttacactcacacaattccacttaacagaaacctcccccatggatggcttgcttcaaaa

SEQ ID NO: 386424 - DNA, 122 bp, Homo sapiens
aaccaagagcccggtggtggtacaggccccctctaaccatgtgggagaagcagaggtgcccgcttgggggcactacttgacccccagccccgtgtcctgaggcttggaggccacggtgttgg

SEQ ID NO: 386425 - DNA, 122 bp, Homo sapiens
cataccatgtgatgtgcacagctgccagctttgacgggtgcagacaacaggaaagaacaccgcagttagcacaggggttggtgccatcagccctaatgcttgagccaaaccaccaggaggac

SEQ ID NO: 386426 - DNA, 122 bp, Homo sapiens
ggcgagtgcgccgggtattggcagctgaggagtggaggctgggcagctccgactccctgacgccagcgcgaccagatcaatccaggctccaggagaaagcaggcgggcgggcggagaaagga

SEQ ID NO: 386427 - DNA, 122 bp, Homo sapiens
ccgcaggagaaggagccccgcccgcgccggccctggagtcgccggtgtcgccgccctgcccgcgggcccgccctcctggcccagcccagggccctgcgagctattttgaaagtgaccctggg

SEQ ID NO: 386428 - DNA, 122 bp, Homo sapiens
ccccggggagacgattaaataccatgccgcagaggcccacgggatttgggggcggggctacggcgagcgcacgcgcatacgttgaccgcatgcgaccccggggagttgtgggtagagagttc

SEQ ID NO: 386429 - DNA, 122 bp, Homo sapiens
gcagagtcagtcacagagaagagaatgcaggacagtaagcccagcgctcaaagccactgtcgccttgaggccactggtggatccaaatgaatgtgctcataaatgcactgcctgtctgatgg

SEQ ID NO: 386430 - DNA, 122 bp, Homo sapiens
aatcactgggaggtggtttcccggtgtgttttcaggtgacgcttgaatgtccccagctgacggaaggccttttgacaggtgggacatttgtagggcttctctccggagtgggtgcgctggtg

SEQ ID NO: 386431 - DNA, 122 bp, Homo sapiens
ggagaggaaagtgtgatccgaggcacggcggtggctgcgccctggcgctgcagggctggacgctgtatccccgggagagcccgtcgcgggagtccaaggagctgggcggcctctggagcttc

SEQ ID NO: 386432 - DNA, 122 bp, Homo sapiens
caaccctcacagggtaaatgagatcatctgtgtaaacatcgctgcacagacgttagcccccgttcgtgtttttgttctgagaaaggtaggccagcttgcctggagaggagaactacagagta

SEQ ID NO: 386433 - DNA, 122 bp, Homo sapiens
agggggcggggcgttcagggggcgtggccgtgcaggggcgggctccgagcgtggggtgggcgcttgcgcactgccgctgcggctgttgctgcggagccaggaggggaagcgatggctgggcc

SEQ ID NO: 386434 - DNA, 122 bp, Homo sapiens
ccagcaacaggtgagagacccttgagactaatactccaggatgttagtttcttagcctaacgaactgaagttaagtccagaggtgtttaggtaccatgacttttaggggtgcagggtgctat

SEQ ID NO: 386435 - DNA, 122 bp, Homo sapiens
cggatagagaagatacagagcaaagatccgccttcttgtacagcgggtgagcagcacccgcgtcaagcccaggcacctgcacagtgccgcggcaattgccgggggagccctagcaaccttcc

SEQ ID NO: 386436 - DNA, 122 bp, Homo sapiens
aggacaggaaacaggagtggcgcagggaatgtaagatgatcccagcttcaagtcactgggcggcccttagacccaggctgcctgctgtctctggcaggaactcaagtcgctggtcatcctca

SEQ ID NO: 386437 - DNA, 122 bp, Homo sapiens
ctcctcatagcttatgggtggcggcggctgggctgaagactgcggacaggacatcccgcccggccgcctgtggtcaccctcccgcgcaggcgcgctcctggaagacccagcacctggagttc

SEQ ID NO: 386438 - DNA, 122 bp, Homo sapiens
tctccccacggcgatgccctccccgcccgagcccctgcttctttaggagcctcctcctttcgtctccgggcccaaacgccgcctcccgctcaccgcagctctggcctccgttcccctcgcgc

SEQ ID NO: 386439 - DNA, 122 bp, Homo sapiens
ggctactttcctttagtcccggagccttcaagccctgggtccctgaggggtagacctgggcggggtggggccgcgaagcagggatccagggcgcctgcgcggaggaggcgggctccgagggg

SEQ ID NO: 386440 - DNA, 122 bp, Homo sapiens
tccagtgcccagtctccctggtccataccttggcatcccctctcccccaatccctatacacgcctttgttgagggtgatggtgatggtggctcttgacctccatctgtgtctttgccctggt

SEQ ID NO: 386441 - DNA, 122 bp, Homo sapiens
gcccctggctgcctggatgcgttccccctgctctcagcatatgtggggcgcctcagtgcccggcccaagctcaaggccttcctggcctcccctgagtacgtgaacctccccatcaatggcaa

SEQ ID NO: 386442 - DNA, 122 bp, Homo sapiens
tggcagggaatgtgcaggatcgtgggccccagccagaggcccgggtaatcctcacgttcccgaggtcagtggggctgggagctccaaattcactctaataatccaattctgagactaagccc

SEQ ID NO: 386443 - DNA, 122 bp, Homo sapiens
ctcctggggcggcaggggcggcagctgggcagaggtgttcctcagttcccagacggtgggcggccgggcagaggcgctcctcacttcccagacggggcggcggccggcttttcccatttttt

SEQ ID NO: 386444 - DNA, 122 bp, Homo sapiens
caaataatagactttattaaaaagaaaatatccaaaattaaagtgttggccgggcacagtcgctcacgactataatcccaacactttcggaggccaagactggaggatcacctgaggtcagg

SEQ ID NO: 386445 - DNA, 122 bp, Homo sapiens
atttctgaaataccctatggttttatattgctgaacagactagctcgagagaactgaggacggcgggtgacctaaaggcatcacttctacacaggtgggtttggctttgcccagaaaataaa

SEQ ID NO: 386446 - DNA, 122 bp, Homo sapiens
gcggcccccagcgagaccctgcagctgcctctagcaccaacacatacgcccggcagctgccgttgcaattcgaaccctcctggctttcaaaaagtcgcgcgctgcgccagcttcggccccga

SEQ ID NO: 386447 - DNA, 122 bp, Homo sapiens
tgcagcgaagatcccagaacagcaagggcagtgggcggacaggtgctctggggagcccagcgtttatttacagctgatcttcctgacgggaggatggagtacagcggcggccactgccatag

SEQ ID NO: 386448 - DNA, 122 bp, Homo sapiens
tggggccttccattggtgttggtgcttcctcggccaaaggccttttctgtgattctgaagcggctccacgccagcctctgcttcgtgtggcggcctccgcggagcacgtcccgtctgacctt

SEQ ID NO: 386449 - DNA, 122 bp, Homo sapiens
ctgtttagctggcataagttatgtgctcatctctgatggattcaggcaggggtagaaacacgggtgggagaggatggttttagacaaagaacaacagccgtccatctggtcaccaaaataac

SEQ ID NO: 386450 - DNA, 122 bp, Homo sapiens
cttctttcttactgtatcgctttggtccatcttccaaacaaaatgaaagggttaatgtggcgtcatcttcaaaaaattcagtggcaaaggcgtcccaccagaggttgtcactatcctgcaaa

SEQ ID NO: 386451 - DNA, 122 bp, Homo sapiens
cctagcaacacctgtgcagggtcctgtggatccgggcatccttggttcgcacgcatggcgcgtgtcgcacacatggggcgcacccccaagtgacaagaaggcctagaagggaagataaggct

SEQ ID NO: 386452 - DNA, 122 bp, Homo sapiens
tatatattatctgagaaaaagtttattgaagcacatttttacacttttaatccactggaacgtcactgagaaaatgttctgagagtcataagaatgttgactaattgggctgtttgtcccac

SEQ ID NO: 386453 - DNA, 122 bp, Homo sapiens
tacaactccgaggtctgactgggaagcaggggccgctgcccgacaattacccttttccaccgcccctattccggtgcccccctctgggaagttccgaatggttcagaccgcaccagctgggg

SEQ ID NO: 386454 - DNA, 122 bp, Homo sapiens
ttttgttaaaagcaaagttttctaccggggactggctttaccctgtctacccaaataattcgtttctgcctcctataacatatccaccattacacatagaatagtttcactgcctaaaaagc

SEQ ID NO: 386455 - DNA, 122 bp, Homo sapiens
tctcgcactctctctcctctccctccctctcatccctctctcttccctctgctcctactccgtgtggggagtgacgtgacgtcagcagagattccaccaaactccactgcacagtggcgcgc

SEQ ID NO: 386456 - DNA, 122 bp, Homo sapiens
ccgggagcgcggccctggctgcttcagggatctggtccggcccccacagcctccgccccgcgccagccgcccccagtcccggtccccagtccacctccacaggcccccacaaccacccgtca

SEQ ID NO: 386457 - DNA, 122 bp, Homo sapiens
ggtgtggaggtgggcattgttctcaaactcttcctctcttttgtccctcccttgctgccccggacagtccctgtgctcaaggataggggatcagaggtgaatcagacctgaccttgcccggt

SEQ ID NO: 386458 - DNA, 122 bp, Homo sapiens
gcagttgctgctactggtggtgcaggccgtggggagggggctgggccgcgccagcccggccgggggccccctggaagatgtggtcatcgagaggtaccacatccccagggcctgtccccggg

SEQ ID NO: 386459 - DNA, 122 bp, Homo sapiens
acctcccagatgggggtggggtatcacttgcagctggaaggcaggttcattttaaggtctcgcgggcttcggaggcccctccctcactgagaaaccggcttttgtcgttcttctgaagccag

SEQ ID NO: 386460 - DNA, 122 bp, Homo sapiens
ccctgttcagaggtaccagggagcaggcacaggccagggtccgaattcgtaacaagcatccgggactccacatgacgcaggtctgagaatcgatcccgggttccagcccagccatcattttc

SEQ ID NO: 386461 - DNA, 122 bp, Homo sapiens
ctgtcaataatagtccctgaagaatttttaaacagaggaagacaggaagaaggaaaatagcgtttctgaatcactcacggggtccacgccttcttctgggcactcagccagggccatctgga

SEQ ID NO: 386462 - DNA, 122 bp, Homo sapiens
ctttacgtatctcgagttgctggcgctgcacacagcccttgtgatgacaatacaatcatccgcattttacaggtgaagaaactaattcattgaaatttcctccccaaggccctagagctgag

SEQ ID NO: 386463 - DNA, 122 bp, Homo sapiens
gttttgaggatccgtgcttggcataccagaaacgctccacaaatgttaggtattactggacgaaggcaaatatgaaaaaaattaagggcagggctaggactgcattccggttctccggatcc

SEQ ID NO: 386464 - DNA, 122 bp, Homo sapiens
ggcctgtgttggtctgaactttggtctcagaaaattgttaaactcctccagacacacagacggcccgagtcagtgacaagggatttcagtaacatcttagctacccctttgctatacagtgg

SEQ ID NO: 386465 - DNA, 122 bp, Homo sapiens
gtatactactttatagattgctttccctttttcaagcgtgagggaggccataaagcttcacgggcaagagtgtgagctttggactcaggccgcctgtactcagaaggcccactgattagctc

SEQ ID NO: 386466 - DNA, 122 bp, Homo sapiens
gcttgttcctggtgttctcagtgatgtgggtggagagatggttccagctgcactgtgtgccgtctaacattctgggcttgttcctggcgttctcggtgatgtggatggagagatggttccag

SEQ ID NO: 386467 - DNA, 122 bp, Homo sapiens
gagccgcgtcctcccccgccccgctcgcaaggtctgcagaagcgggcactgggccgcccacgctgggaaactcacttgtaagaaactcctggggattttggccagatcctctacgtattcct

SEQ ID NO: 386468 - DNA, 122 bp, Homo sapiens
gctcctctcgacatccagctgcctgtgtgctcttctaccagtgtgttcctctcactgtcccgcagctcgtgtgttctttctccggtgcgctcctctcaacgtacgtgcgctcctctcaacgt

SEQ ID NO: 386469 - DNA, 122 bp, Homo sapiens
gccacggaaaagaacaaaatcaatataaagtatcggagaggcaaatgcaagctccgagggcgccggtggtggacaaagaatacagacagaggggaggggagggcggggcggagggcggagga

SEQ ID NO: 386470 - DNA, 122 bp, Homo sapiens
cggctgccgcccgccctcacgtgccccgtcccccaggcacgggcgagagcgggaagagcacgttcatcaagcagatgcgcatcatccacggcgccggctactcggaggaggacaagcgcggc

SEQ ID NO: 386471 - DNA, 122 bp, Homo sapiens
ttataaaaggtggggctgagacgagtgtgtgtcaatttcgaacccccgactccggggctccgctggggaaggggctgggggtcagctttgtaaagggacctaaggctcctccaccctaaggc

SEQ ID NO: 386472 - DNA, 122 bp, Homo sapiens
ggttcaggagccgggtctggaaggctccttccggtggaagaggggcccggagccagccggcgcctggcacaaggcgtctcagaggccgcccactgggagccaaccgttgcagccagttgtcc

SEQ ID NO: 386473 - DNA, 122 bp, Homo sapiens
ccaagatgcccaagaaaccaaagaatgaaaacccagtggactacaccggtaagcctgcggcggttgcctgatggctggggctccaggaagagtcaccatctgcatctcccagccatgccctg

SEQ ID NO: 386474 - DNA, 122 bp, Homo sapiens
tcattcattttctcgaccttccctgaggactgtggccttcaggcgcagtgtaagtgatatcgtatacctaacgcctgggatactccctgggttactgtggcctggaaagcagggctattgtc

SEQ ID NO: 386475 - DNA, 122 bp, Homo sapiens
cccggcagggactacttcgggtgccgccatgacaggctgtggccggaagaagaggctgggcgtcgccatgacagagagggactggaagacctaacggtgcctgcctccgctgccacgccgga

SEQ ID NO: 386476 - DNA, 122 bp, Homo sapiens
cccccctactccccacactccccccccccacttttgcctcatcacgcaggcgctggtaggcggcatcactgggcgggtcagaaaccacgcgcatgcgcagacaccctcaggcgactggcggg

SEQ ID NO: 386477 - DNA, 122 bp, Homo sapiens
taattctaacaaatctactcttaaacaaaactatttcgcagcccagggtttttgcagggacgataatgttttcagccagactctgcccagcaattccagaatcatcagggataagctcgcaa

SEQ ID NO: 386478 - DNA, 122 bp, Homo sapiens
tcaaaactctgccagtttttaggaagtgctgttttgtcaaaagcctgcacacgagacccccgtgggccaggactgacttcctccccacacagggctgggcggggcaagcaggaaggagcctg

SEQ ID NO: 386479 - DNA, 122 bp, Homo sapiens
tagcagcgactctgtgggccccagcgtcaggatgcttcccctccggctgctcgttgccagcgctgttgttctgtgaacctgtgtcactgtcttggccttgttcctctgtaaaatggcagcag

SEQ ID NO: 386480 - DNA, 122 bp, Homo sapiens
aagggccgggcgctgcccggagcagaggctggaggcgagagcgattgctgcttgctgtagcgcggccgctctccagttcctccggcaaggggggcctgggggaggactggccgaaaatactg

SEQ ID NO: 386481 - DNA, 122 bp, Homo sapiens
gggtgtgtgagcgagggacttttcggccacctgtgatgggcactcctcccggcatgaggacgtgagagcatcctctgcaggaaactgcacagaaggggctggggggtctcccagattgatcc

SEQ ID NO: 386482 - DNA, 122 bp, Homo sapiens
caaggcctgccgggtgggtccaggcccggaaggccaggcggggccctgtcggggcctgggcggggctggcggaggggccgggccgccccttccagcgagggcgggctgggcggtcgccttta

SEQ ID NO: 386483 - DNA, 122 bp, Homo sapiens
agcaaaacacagacgcgggtgagccgtcgtaatttcgcaggaatccagtgctggaaacttcgctcgggagaccacccacccaccctttccggggactggaagagagagcgaggaagggaacc

SEQ ID NO: 386484 - DNA, 122 bp, Homo sapiens
ccctgcgctccgctcccgggccctgctgcctccgccgcgccccctataggccgccagcaccgaggaaccgaggccgagaccagccaccccaggcctgtctatttacagcaataagcctacgg

SEQ ID NO: 386485 - DNA, 122 bp, Homo sapiens
atggtggcaagggagaggtttgtgaaaatattctcagactgcacttgtgaattatgaatgcgactgctaacattgctttagcagttcagtgacacctatctttgcaaaatgtactttcactt

SEQ ID NO: 386486 - DNA, 122 bp, Homo sapiens
ctccgcccccagtggcccccagccctatcctgacttgcaattggctgaactttcagggggcggggctcacccggtccggtccagttaaaagggtgggagcgtccgggggcccatctctctcg

SEQ ID NO: 386487 - DNA, 122 bp, Homo sapiens
atgttgaggaggctgggggtgggggcggggcatcgagggagctcctggtactggcggccccgactgtccccccagaagctgaaaatgttggacactcctgagaaggcgcctgcagccagaga

SEQ ID NO: 386488 - DNA, 122 bp, Homo sapiens
gactccccatagacaggaacagacccctgcccaccgcagccagctgcaccacccgccccccgcaggctgggaccccgcacctctggccttgtagtactcgtgttccagctccccctcgtcgt

SEQ ID NO: 386489 - DNA, 122 bp, Homo sapiens
tcaagcacatgacgtagaagggagagtgcggctgacgtcagctaagaccctggatccagccgtgcctgaagctgcctcgttacccattaaaagccgatacttgacttccctcaaccctggga

SEQ ID NO: 386490 - DNA, 122 bp, Homo sapiens
acaacaacaataataataatgacaatgacagtgagcactgattgagcgcctcctaggagccggggccctgcgtgcgtgcctcccggacatcatctaatttaataaacacggtgaaaggtagg

SEQ ID NO: 386491 - DNA, 122 bp, Homo sapiens
cgtggctccacgcggccactagggggcgtcaaagtccatgcccttaaaaagccaggaaaacggggagggaaggggcgaggatacaggaagaggcccttcatttcccaagggaaactggcatc

SEQ ID NO: 386492 - DNA, 122 bp, Homo sapiens
cggccagggtgcccttcccaagcgtcggttcgttcccctgcagcacgggtgagcctgcagcggggctggaatatacccaagaccaggcaccaacccccacctggcattgggcagggcctgca

SEQ ID NO: 386493 - DNA, 122 bp, Homo sapiens
aacggcctcagagaaaaatctctgcttccatctgcagtttaccatactaaggtagatccacgtaagtttcctttaagaaaggacagcttttcaggtctattcctgcctgcagttctctgaat

SEQ ID NO: 386494 - DNA, 122 bp, Homo sapiens
ggcccatgtcacggggcccgtcgaggacaacgctcgctgctacccgccccccagcatgcgcgtgtgtgcccaccgcctggcccccgtggacaacatcaacaagctgctgctcatagactatg

SEQ ID NO: 386495 - DNA, 122 bp, Homo sapiens
tgtgactgttgattaaaaactatgccacattcattacacttgtagggtttctctccaatacgaattgccttttgaattacaaggtatgaattttgaccaaaggtgttgccacactcatcaca

SEQ ID NO: 386496 - DNA, 122 bp, Homo sapiens
gttgactgatgaggacatgaaaaaagctgagatttgcagaacataactggagcataagaacgcctgtctggaaggcaggggctgctgggaaaggatctctctggagctccttgctggctgca

SEQ ID NO: 386497 - DNA, 122 bp, Homo sapiens
tgccaaaactcatcaagctgaatatttatgatggtagattttattcacgaaattatgtcacgataaagttgacagaagctttgggaacatacacaaggatttcaattacagcattactgtca

SEQ ID NO: 386498 - DNA, 122 bp, Homo sapiens
gtttttcagatccttatccttttaaaattagaacagggctatgatgagccaatttactgccgttctgtgtaatttaggttattcactcagtgaaatgtagaggatgagagcacagttaaggc

SEQ ID NO: 386499 - DNA, 122 bp, Homo sapiens
gccgcctttcttgccttggttttcgaagaatgtgacctggagggctggtgggcggtgcggcgcgccgcggcgcatgcgcgttccggtctgttttccctgagttaaagcgcgcgggtgccagc

SEQ ID NO: 386500 - DNA, 122 bp, Homo sapiens
ggtgctcggcacatggcaggcgtcctccgctttcccctcctgggggacctgaaggcgccacgggacactgaaccaaggggagggcgcaatcaaagctggcccagaatcaaaagcatctttcc

SEQ ID NO: 386501 - DNA, 122 bp, Homo sapiens
ccgtgtaaacactgtccatacactggcgattccaatcacaggtgcagctgggactctcctcgtcgccagctcctgtggccagcctccgtcccaccatctccttggaatgtccagggccatct

SEQ ID NO: 386502 - DNA, 122 bp, Homo sapiens
ggggtctggagagggatggatgcacagacacccctgtttcatgccctcagtctcaaactccgtacaagcatgcgaagagagacagaagagaggctgggattccgttcagcagagcatcacca

SEQ ID NO: 386503 - DNA, 122 bp, Homo sapiens
actctgttttatttgcataactgctttacatattgctatcataaaggagattagctttaacgaatatgaatgtaattatagaaaagggccctaggtggagcctcagtactggtggcaacaaa

SEQ ID NO: 386504 - DNA, 122 bp, Homo sapiens
gaggaagcgccgctgagggtccatctttttaagagatctagtgacgacacaagggatgggcgggttccttccagggggaggaactcattggctcctggagagctgtcgttcatcgctggagg

SEQ ID NO: 386505 - DNA, 122 bp, Homo sapiens
tgcggcgggcatccttgctgacccagctgaacatactgccggacacggggctggctgctgcggggcagagcggcggctgagagcggggcgagggtgcggagccgaggcggggccggccgggg

SEQ ID NO: 386506 - DNA, 122 bp, Homo sapiens
catcatcaccacgaatagctgtgctggctccaggagagaccctgaggtgcggccgctcggcgcttccagtagggaagagcctgaactcgcgtgcccatctgggagcccctctcacgcggtta

SEQ ID NO: 386507 - DNA, 122 bp, Homo sapiens
gcctcttcctgcatcctggaggggggagtggcttcacagcccttgggccactgccaggtgcgacagctctttttggaaaataatgatagatgtggcatctatttacttggctacctagtatt

SEQ ID NO: 386508 - DNA, 122 bp, Homo sapiens
agcttgccagctggtgtggttttaccacaagctaacaaacattttccagctctgctcttacggaaacaacaggcacccgaagctatgagataataatgtttttatccagagtactgggagta

SEQ ID NO: 386509 - DNA, 122 bp, Homo sapiens
ttttaagaaagaatgaaagaccaggtctcagggcagtgtgggcttctgagtgggagttgacgatgtctttttctgcagcgaacgctgctggtcctccgcgtgcctgcccggccctggacgcc

SEQ ID NO: 386510 - DNA, 122 bp, Homo sapiens
atcagtaaatatttcagtatatataaaagattgggacttgtttacacacactgatagaggcgagaggcaggcaaatgcctaggcagataggggcaggttcccagtgaaacccaaccttcaag

SEQ ID NO: 386511 - DNA, 122 bp, Homo sapiens
catggtggcaaccaaaaatgcctccacaaattgccaaatatcccctggtagattgggaggcggtactgccctggctgagatgcccgggaatgccactggagtggttagttattggcagtgcc

SEQ ID NO: 386512 - DNA, 122 bp, Homo sapiens
ttaaataacaaaatcaaataagccaaacccagtggatagcaattatcttgagaaagaagccgctgctggcaccggcctggattcgctgcagtcggaagcgggtggctttcggtattgaatta

SEQ ID NO: 386513 - DNA, 122 bp, Homo sapiens
tcctcttagccatacacgatgagcagctggtgggcaggggcgccccttgacacagccatacgggatacgggtaaggctgggtgggggtgtctggggggcacacagagaataaccagcacaca

SEQ ID NO: 386514 - DNA, 122 bp, Homo sapiens
gctccccccacgagccgccgcactccctaaatgaatgaactggctgctccaaaaccgcggcgcaattggcagttattgctggcagtttatcagtattaactgattaggcccgggatgatgga

SEQ ID NO: 386515 - DNA, 122 bp, Homo sapiens
tgacaggggtttctcagggataactgacatggcagaggccaccctgggagtcacaagctccgccttctgtaacacaggcatttctctcggaagagatttacgtgatcccagcctcacgacct

SEQ ID NO: 386516 - DNA, 122 bp, Homo sapiens
tgctccgcacactcaccatttcccagcttttgggggtcccagcgtcctccctataaatctcgcaatacctgcaggccacagggcgatggagcctgcggcagtcacccgggactctccgagag

SEQ ID NO: 386517 - DNA, 122 bp, Homo sapiens
gggagaatagcatttctagtggggagaacagcatttctagtggtgagaacagcagaagcacgggcacagaggcatgaaaatgcatggcatgttgaaggaagccagttttttcttaacctcat

SEQ ID NO: 386518 - DNA, 122 bp, Homo sapiens
ccgggagctctcacctggaaggggtgggagcaagcagggcctgacgtcctcccgccttggcggccgtggacgccccaggtgccacccacagcagcctcccaccacacatgactgaggctcgg

SEQ ID NO: 386519 - DNA, 122 bp, Homo sapiens
tttatcagatctaaaggcaccgttttttcttcattgcccgaggcaagaagccagaggcaccgctgcatgtaattaacatcgcatccaacacagacggacctggacccggcgtgggcaacgct

SEQ ID NO: 386520 - DNA, 122 bp, Homo sapiens
gaatccagtctcccttcctccttccgctgcagttacttctacttcccagcaagaactgagcgtcgaaatcctttaacttcaggactaagcacttcagtcacctctccaggacatccattcag

SEQ ID NO: 386521 - DNA, 122 bp, Homo sapiens
gaaagacaagttgatgagtgagttggtcgccattaaagtgaggctcccggcccggagcagcgcagagaccaggacgcgcagcctcgcctgcagcactcggccctacctctaccccgccgcta

SEQ ID NO: 386522 - DNA, 122 bp, Homo sapiens
ctttaccttcctcctcgtcctggaagctgagcaggctggcccggggcacctctttgttctcgcgaggcctcttgcgcggcttcagcccgttgccgggctccgcgccgccggggaagccgccc

SEQ ID NO: 386523 - DNA, 122 bp, Homo sapiens
tcatttctttctattgctaagtttcctttgtacagatacaccacattttgtttatccattcgccagcccattgacacttgggttgtttccgccttctttgctgctgtgagtaatgctgctag

SEQ ID NO: 386524 - DNA, 122 bp, Homo sapiens
ctgggattacaggcgtgagccaccacgctgagccaaccatgtcttaatgtgtgtcccatgcgagcaccacctgtactgtaccaaacctgacccttgtctttccactgaaagtaaatcaaccc

SEQ ID NO: 386525 - DNA, 122 bp, Homo sapiens
cccggcccaagcgccgctgccccttccagaagggcctggtgccggcctgctgaccccggccgcacactcgactttcctggtgctcaccacgcagaggggcacgggccagcctcgggcgcaga

SEQ ID NO: 386526 - DNA, 122 bp, Homo sapiens
gcgctgcgcccacattgcttctgcgtgtttacagttgggcacgagaaggctcagcacgcacgcacagcaggtgggggcccgccctgcccacagcgtgaaaacaggagccccggccagccacg

SEQ ID NO: 386527 - DNA, 122 bp, Homo sapiens
tgagaatttcttttctgattttcaatccaaaccacatggaaagaaggttaaaatggagcccgtgcactttgaatttattctcagcatttaggctgcagtatcacagcccaatttccaccagt

SEQ ID NO: 386528 - DNA, 122 bp, Homo sapiens
tggtcttgctctaatgcccctaaagccctgcctgaggagctgtgactgtactaaccaggccggcagctcccagtggtcctgaggcctcaaggcaggaaggaggacctggagagcctgttggg

SEQ ID NO: 386529 - DNA, 122 bp, Homo sapiens
ggccgcagcatagataccgggcgagcggacgcatagccacccgtgcgcgatgacggccggcgggcccttgttcacagatgcgctgggaaactcttccccagcagatgcggggctgggcgccc

SEQ ID NO: 386530 - DNA, 122 bp, Homo sapiens
ccttgctgggtttccacgatagacgacgacctcatttcacatcaagtgtgcacggtaattcgcgcagcctcggccctgggtaacacaaatgctcacactccttctcagccctcatggggcga

SEQ ID NO: 386531 - DNA, 122 bp, Homo sapiens
aagtgaaagatctgcccgaggtcataggggaaggggctgtgaaggaccatgcccctcccccgcctgcagcccttcctggtacagacctcggtcgtgcgcgcacgcacacacacacacacaca

SEQ ID NO: 386532 - DNA, 122 bp, Homo sapiens
cgcagtgggagagcaggaggcccctgcttctaggtgccgtgtgagaagcagctgtgaggtcgggttgggtggctcacgcctgtaatcccagcactttgggaggccgaggtgggcgggtcaca

SEQ ID NO: 386533 - DNA, 122 bp, Homo sapiens
aagctgccaagaaaccggctgcggtctccaggaggggccaggaggcaaaatggaaggaagcgctggatctccgcggcggaagtcattcttatgccctgccaaagggtagagggcagcaaccg

SEQ ID NO: 386534 - DNA, 122 bp, Homo sapiens
gatgcccactggataggaattcaccaattctcctctgagttcattttctaaaggatagagcgacaacacaaaataccttaagtaagagaagggaggagggcataaggagggtttgttcccct

SEQ ID NO: 386535 - DNA, 122 bp, Homo sapiens
cgtgggttcccgtcacccccggcttggaacagcagcgccgcaacaaccgctggcgttcatcgagcctctcagcagccctgcgaggcgatcccggggagaatcccacgccacagccgaggaaa

SEQ ID NO: 386536 - DNA, 122 bp, Homo sapiens
ccttccaatttgtcgtttttgccaattaaagggatgtaattgcatctcccgtgactttgacgcaccctccctggccgccggtggtgggagtgtgtctcagccctcccggctgcgtctcccct

SEQ ID NO: 386537 - DNA, 122 bp, Homo sapiens
ccgccaagagggaaggaactgccgggcggccgagggcggagttgggaaggggtggctagacgtcgcaggccccgccccggccggtaccaactcaccccttgccgccggccccgccaggcttc

SEQ ID NO: 386538 - DNA, 122 bp, Homo sapiens
accaaaataaaatcagggcctcaacttggtagtttacttaaagtttctgggcaaatagtccgtaaaagctgtttacctctaaatgctgtatggctggttaaatacagtgaacatccttcttc

SEQ ID NO: 386539 - DNA, 122 bp, Homo sapiens
tagccaggcttggtggcatgtgcctgcagtcctaaatacccgaagctgaggccggaggatcgtttgagcccaggagtttgaagctgcagtgagtcatgatcacaccactgcactccagccca

SEQ ID NO: 386540 - DNA, 122 bp, Homo sapiens
cattgttctgcatgttcaaggccctagcagaggatttatttgcgaccctgggacccacaacggcacagaatcatcacgtgcctgggactggcctcccctggccttgtcctgacttggaaagt

SEQ ID NO: 386541 - DNA, 122 bp, Homo sapiens
tctgctggaacaccactgtgacatggcagacatgagcctcagcttcccttatctacaagtcgtccctgagctgtgcttattgatggaaactacctggcacaggtgccacaggacaatgatca

SEQ ID NO: 386542 - DNA, 122 bp, Homo sapiens
acattaaaatattatttatcctcattactgaggtttctagcactcccttcaattctgtgccggtggtgagtgcctcctcgtgtcaccccaatcctggccctgcacagctgtcaaaacagtcc

SEQ ID NO: 386543 - DNA, 122 bp, Homo sapiens
cttagcatggcacctggcccatagcagggacccagaaaatattggtaattattatgcatccggttgggctgaacttcgtggcgtttattttttgcccagattaaccaatttatctttcccac

SEQ ID NO: 386544 - DNA, 122 bp, Homo sapiens
atctaatataggcaaatgtttgttttgttttgtttttctgtgagaatgtcctctatcctgcgcttaaagcggactatgagtagttagcaccctgtatcacacccagctctatgccctaattc

SEQ ID NO: 386545 - DNA, 122 bp, Homo sapiens
tccaagccccgcggccagtttgcgcgtgcgtgccaagtgccgcgcggaggcccgctcactcgggcccgccccccaatcccggctgcccatggcgctactcgctccgcgtccccgcgccccgc

SEQ ID NO: 386546 - DNA, 122 bp, Homo sapiens
tgtgtgtgacaagtgaaaataaggaaagaaaaaaactcaagtgaagaaaatcagaatctgcgcagcagttcctgggcgtttcagctgcttcccacatcacctgcctcatcaagccccagcat

SEQ ID NO: 386547 - DNA, 122 bp, Homo sapiens
aacgtgaatcagactcgcctgaaacgagtcttaagtggggccacccttcctgacaaactccgagataagcttaagctgatgaaacagcgaaggaagcctcctggtttcctggccctggtgaa

SEQ ID NO: 386548 - DNA, 122 bp, Homo sapiens
agaaagtcatgtaattgagttagaagaggtaatgaccaagaccctggagcagagggaaagcgggttacaaaaggtgggttaaagaaatcacaagagtatgaagagctgggaaattactaaca

SEQ ID NO: 386549 - DNA, 122 bp, Homo sapiens
cactggactgcagcctgggcgacagagcgagagagtgagactctgtctcaaaaagaaaaacggaagcaactaagaaatgtcaagagtgccattttggaatcagagaagtcatgctgactgag

SEQ ID NO: 386550 - DNA, 122 bp, Homo sapiens
aacggcggactcaggacacgcgctggctgcggccacagcgcgctgggggcgtggagggggcgcggcggggtcggagcccggcgaggagcgtggccgggggcctctgggcgggcaagcgggga

SEQ ID NO: 386551 - DNA, 122 bp, Homo sapiens
cccttccccgcccgctgtccgtagcgtgtgtggctgatggtgccccctttgtatgcgagccgcgtggggagggaccgagttaatgggagcctcccggtccccgctgacacgttcctggcagc

SEQ ID NO: 386552 - DNA, 122 bp, Homo sapiens
ggcgcccgcgccccctccccctgcgcccgcccccgcccccctcccgctcccattctctgccgggctttgatctttgcttaacaacagtaacgtcacacggactacaggggagttttgttgaa

SEQ ID NO: 386553 - DNA, 122 bp, Homo sapiens
ggagaaaaagatgtcttctctagtatccatgctgggtttcaaggtgggctggaatcttctcgtgagagtgcagggaagtgagaatggagagaaagggggtgtgcgttgcctcttggcttgtt

SEQ ID NO: 386554 - DNA, 122 bp, Homo sapiens
gggatttctgggcttttttttttttgcttgcttatgcatccccctctcttggttgtagtacggccgtaccatttcagcttgctagtgcagaaagatgtgaattcagttgctgtatgagcctg

SEQ ID NO: 386555 - DNA, 122 bp, Homo sapiens
cttatgcttttaaagaagataacattttgtataactttaaagaagtatttctcatctgcacgttgtagttgtagcaactctaaaagaatcccttcagagcctgttaatattttttggttgtg

SEQ ID NO: 386556 - DNA, 122 bp, Homo sapiens
tcttatcagccactgcaattttccctgacataaaatatatatgttcatagtacaaatgcacgcaaatatttgtggccgaatctcggcaacccgctggaaaggattaaacgtgcggttgccgt

SEQ ID NO: 386557 - DNA, 122 bp, Homo sapiens
tactccgctctgcccccttctctccttccatttcctcccctcggtaattcgcgcctcccgcggctgtttccagggcaacaggagtagttcactccgcgagaggccgtccacgagacccccgc

SEQ ID NO: 386558 - DNA, 122 bp, Homo sapiens
tgcgaggggaccaccgtctccccgggagacagccagggcggcagcctggccaggaggctgcggtccagggcctcgtccggagaaaacacagggttgtcaattcctaggagagagggcagcgg

SEQ ID NO: 386559 - DNA, 122 bp, Homo sapiens
agctgcctattgttgaaactctgggtaagtctgtgttaagagcattcttatgcaatgatgcgtaagtttatgtcaatagtgaatcatctcagagttttacagtttttatcttagagatttgc

SEQ ID NO: 386560 - DNA, 122 bp, Homo sapiens
aaggacgggtatttcaaatgttcccatcttctcagtgatacatttgccaagctttcacagcgagttgagctaatgcttgggcaggcctctgttaaagccttgtcactttgtatcctattatt

SEQ ID NO: 386561 - DNA, 122 bp, Homo sapiens
tctctgtatcagcaccctggaaaaattcaatccttcttcagtagagaattctttcaaacccgttatctgtattactattaatgcgcagagcagaaggcattgcatacaaataggtccaagtg

SEQ ID NO: 386562 - DNA, 122 bp, Homo sapiens
caatgtgccaggcgtggtctcagccctgagggcctccgccgaccagtggcttcttccccacgtttattataagccactgggccattgcccaaaaggtgtcccctgcagggtagagacctgtg

SEQ ID NO: 386563 - DNA, 122 bp, Homo sapiens
tgcccagggaggaggacccgcctgcagcatgaacctgtggctcctggcctgcctggtggccggcttcctgggagcctgggcccccgctgtccacacccaaggtactgtgttcggcaatgcct

SEQ ID NO: 386564 - DNA, 122 bp, Homo sapiens
gaagtgcatctctcggcagttcgtctgtgactcagaccgggactgcttggacggctcagacgaggcctcctgcccggtgctcacctgtggtcccgccagcttccagtgcaacagctccacct

SEQ ID NO: 386565 - DNA, 122 bp, Homo sapiens
cccagcgagatggcctcagcacgccctgcaccctcgtccgcgcgactgccgccgggtgcccgccccagccgctgtgtccctggtgcttcctccgccagggccacgtgccggggaagccaaag

SEQ ID NO: 386566 - DNA, 122 bp, Homo sapiens
gagcaaaacgcactgacgggcaatgtgcgtgggtcgtggggagcatccagctcccatctgcggaataaacccgcccaaaccatagggaaaagcgctgtcgtataaggccaggggattttcag

SEQ ID NO: 386567 - DNA, 122 bp, Homo sapiens
ggtagccatgtgtgtcctagccacagagttcaggcctagagaggcagctgcatgggtgaccgtgggaggggcagtggctctgatggccctgcagtggacccctgcaccctgctgggtagggg

SEQ ID NO: 386568 - DNA, 122 bp, Homo sapiens
gtctcggcggaagctcgcaggggcagagctgcgactcggcgggttgggacacggatccctcgcccaccctttccgctgtccccttgcccgccccccatccccgatctccgtccctggtttcc

SEQ ID NO: 386569 - DNA, 122 bp, Homo sapiens
cgcgagtggagcgctaggattcaggtccagatctgactgggaagcttccgcagggaattccgccccggacccctggagacccacatcgtccggtgtgttttcctttcacaacacttcccaca

SEQ ID NO: 386570 - DNA, 122 bp, Homo sapiens
atcacccccatctcccccctctggatatgaagacacacatcgcatggaggcgggtgcccccgcgattcgcagacaaatagcaccgaccactcccccgctggatatgacgatccacatcgcag

SEQ ID NO: 386571 - DNA, 122 bp, Homo sapiens
ggcaagggctgctgtaggcgccagacaacagggactctccgaaccggaagtgccccgcgtcgccatggctacaggcgctcccagcagaacccgtagcgttccgttcccatggcaacggtatt

SEQ ID NO: 386572 - DNA, 122 bp, Homo sapiens
ctagcgcagcacctttcccaccacatcggaagactttagaagctctttctgttatagtcacgtacacatacacacaaaccatcatcttagtcagacctagactttagacgccaatatattac

SEQ ID NO: 386573 - DNA, 122 bp, Homo sapiens
gaagcgctacccaatctgtttgagggtttctgaaaacatcggtacctgaggggtgattgtcgtggcctgggcttcgcgtctctgagtgctgcaccggaaatgaacgggagggccggggtcag

SEQ ID NO: 386574 - DNA, 122 bp, Homo sapiens
gctcttggagactttgcaggctagctccagtcaaccatttctcccgctgctcaggcctcgcgcttgagcctttaagtgaattaaatggtttaacagtgtccagggcttaaattccttctgtc

SEQ ID NO: 386575 - DNA, 122 bp, Homo sapiens
tttgcacgtatcctgtcgcccctctgtccgcccgggacgcctagccccacccactgttcccgccccttccgtgttttggtgcgcacgggttccgccagacacagctaccattggctgtcagt

SEQ ID NO: 386576 - DNA, 122 bp, Homo sapiens
agtctggacaatagtaagttacaacctgtttcctgtttgcaaacctgtgacagagcctgccgagatgacagactcatgtgagtggacagagaaaaggaagacccagggctggcttcatggat

SEQ ID NO: 386577 - DNA, 122 bp, Homo sapiens
cctccgcgctgcgaggagcgggcgcttggacacagggcgagttgtttgatttggcggaggcggggaggccggcggggagcgagcgagggaggcacgagagctgggcagcgcgggcgccggtc

SEQ ID NO: 386578 - DNA, 122 bp, Homo sapiens
gcactgagaatgcacgctttacataattagttcacaacttgcccccggcagcctccaccacgtaaaattagaagaaagcagcccagcagggcctacaaggaatgtgtgaacggatgcacgta

SEQ ID NO: 386579 - DNA, 122 bp, Homo sapiens
ggcgaaagtgatgagtctaaaaaagtagtccctccggttcctctgtttccccccatgtggcgtcaggaagcgaggcaccgggcgcactgcgccccgaattcctgcgcccgccgcgcgcggcg

SEQ ID NO: 386580 - DNA, 122 bp, Homo sapiens
accccaggtgatcagcccgcctcggcctcccaaagtgctgggattacaggcgtgagccaccgcgcctggccagttgcggatttataaaagcagtcgcttagtaacttgcagcggctacatca

SEQ ID NO: 386581 - DNA, 122 bp, Homo sapiens
gccacgttcctgggttctcgtaatcatcttctacctggtctctgtgattccggccttacgcgcacccacgccctcccagccggcagctgcagggatccttttaaaactgcccgggactccac

SEQ ID NO: 386582 - DNA, 122 bp, Homo sapiens
aatgacttaaataaaaaattatttcttcagttcagaatattttaacagatcctttagtgccgagcattcaaaacagtgataatgcagtgtatggacttttctggattcaaattcaaacaaac

SEQ ID NO: 386583 - DNA, 122 bp, Homo sapiens
ttctgcttctgccacttccagctgtgtggctttaggtgagccttcaccttttggtgccttcgtttcctcatttagcacctacctcctagagctgttttgggagtcaaatgcgctgacgtata

SEQ ID NO: 386584 - DNA, 122 bp, Homo sapiens
acctgctaaccccccaaatctctcccacctcccctcctctacttgctccctgcaattgctcgggcctacccacccacaccgctcaagacccccaggttaagaagccaccagacctctaggct

SEQ ID NO: 386585 - DNA, 122 bp, Homo sapiens
cctgggctcctctggacaccttaggccaggctctcccgccacaggcccggcctagcgccgcgggccattacttgggaccttgaagatctgctaagagtagttgttactattccctttttttt

SEQ ID NO: 386586 - DNA, 122 bp, Homo sapiens
gcccgccccccatccccgatctccgtccctggtttccagccgatgctcccatttcctcgccgtccacattgtctcaccttccgccagtggcgggccctgtgataaccacttggcatgtataa

SEQ ID NO: 386587 - DNA, 122 bp, Homo sapiens
agctctccagccacggctagccccgcgcactgggccctccaggaccgtaccaccgtccgccgtcgcctggaactaccgccgccacattcgaaattttccgcctcgctcctccattggttggc

SEQ ID NO: 386588 - DNA, 122 bp, Homo sapiens
ctatgcttccatctcgtgaattccaagacagtattaaactgatgcatattttcataagtccggaccccagggaacgcatcctccagccctcggcgcggagcgggtgggcgcggcgagccgcc

SEQ ID NO: 386589 - DNA, 122 bp, Homo sapiens
acttagtttccaattctagcaaagcccattatagaaatcactaggatatacaggaactagcgtggtgggtatgaggttgtttgggttttgaggtgcagcatttgttgcagagcctcctgctt

SEQ ID NO: 386590 - DNA, 122 bp, Homo sapiens
tggaagggaagccggaattcatgagcaatcgagggacatgggagtactacaagatctcctcgggagacaggtgtaaaaatggggccccgccgggtaagatggcacacttaaaccaaggacca

SEQ ID NO: 386591 - DNA, 122 bp, Homo sapiens
tgtctggaacaatgagtagggatgtttgaaaggagagtgcagggtgatgcaattgggcatcgttagtgttcaaggccccttgccaggtctagcgtcaccttgcctgtcacaaaggttagaac

SEQ ID NO: 386592 - DNA, 122 bp, Homo sapiens
catttgcacctgacctgggatttttatgctgggctgctgcaggggcttggaggaagaaagcggcgctatccatgtgcggttactaccgaaaccgaggaaactggggattgcgttggaagtcg

SEQ ID NO: 386593 - DNA, 122 bp, Homo sapiens
gcacattaatgggatagttggagggcactgggacgggtgccggcaagacgcgcacattctcgtgggaaggttcctccccatcagctgtgacgggtgggtggggtagactcagggaccttgct

SEQ ID NO: 386594 - DNA, 122 bp, Homo sapiens
acctggagggcccaagttaatgcaaaaaaattcctaagaccctccctaaggtgtgtcccacgcacccacctcatgaacaccttctcccttctaaccctctgcagcccacctggtcagaagcc

SEQ ID NO: 386595 - DNA, 122 bp, Homo sapiens
gcacagactctaatggcttccggttgttactcaaccgttagggtcccttcccccttgcggcgcgcggtcccaaattgaccctgggtctcttgaaaaaatttctgcttgccacctcccacttc

SEQ ID NO: 386596 - DNA, 122 bp, Homo sapiens
ctagttacagtgggctgagatagaaagggcagcaggactgagaaactgttgcatctgatgcggtttaacaggtttaccgtatcactgtggttaagaacctaggctctgtagcctcattgcct

SEQ ID NO: 386597 - DNA, 122 bp, Homo sapiens
ctgacttctatcaccttggattagcgttgcctgttccagaactacatggaaatggaaccacgcagctgtgctcttctgctttttggcctgaatactcactgtcagggctgatgcaagaggag

SEQ ID NO: 386598 - DNA, 122 bp, Homo sapiens
gctggtgcagttggacgacatgcccggggcggcggcggcggcggcgaaagaggggggcggcggagacagcgcacaagccagcggcctcaggcctcccccggaccgatccccacccccgctcc

SEQ ID NO: 386599 - DNA, 122 bp, Homo sapiens
agaggaggagagcgcggcccaccgcaggtaacaaagggccttattttagaagtatcatctcggccagacacggtggctcacacctgtaatcccaacactttgggagacagaggcgggaggat

SEQ ID NO: 386600 - DNA, 122 bp, Homo sapiens
ttgggaaccccaggctgccaggaagaattatgaataataagagtatgtggactctgatgacgaggagatggcagcaatgttcttccaaatgaacaaacaagctggatgcttcagagctgggc

SEQ ID NO: 386601 - DNA, 122 bp, Homo sapiens
agcccagatcgtgccagcctgggcgacagagtgagactccgtctcaaaaaaaaaaagaaacgatggaaccaagttctaataaaggcaagcataagccttgccaaaattagaagaaagtactc

SEQ ID NO: 386602 - DNA, 122 bp, Homo sapiens
acctaaggaaaagggctgctgttacttaataggggcatggagaaatacttttcatacctacgtgaactgcaggttatctcttggtaccctcatgcccaagtttaattataaattgacaagta

SEQ ID NO: 386603 - DNA, 122 bp, Homo sapiens
ggtcccaggccacgctgggcttcggcatgtgctaaagtggatagaaaagggagtggggcccgggcgtggctttgtggtttgggaagatatgaactccttggggtttttttctcttttaattc

SEQ ID NO: 386604 - DNA, 122 bp, Homo sapiens
cttctggtaatgcccgacacagatcgcgccgccatcttcgatgagatccacgggcctgagcgcagccttcagccagcagtgacgcgcccagaccagccaatcggatacaatcccagtggcaa

SEQ ID NO: 386605 - DNA, 122 bp, Homo sapiens
gctgggaatacaggcgtaagccactgtgcccagcctacattttatttttcgattgactcccgtgatcagagtcaacttcccatgttattttatgtgaatatgtatcaatgaactattagaaa

SEQ ID NO: 386606 - DNA, 122 bp, Homo sapiens
ggggatgtggatagcataaagcagccgtttctctcatttttgcggaacaccgaattctgccgcactttgaattcacttgtattcctggagttcctgttttgtgctcatgtctaaccagggaa

SEQ ID NO: 386607 - DNA, 122 bp, Homo sapiens
gccgggctgcagaggaaatgggtcttagaggagttgacatttgagtggagacttaaggtacgaagaacatttgccaagatgaagaagaatacaaagggtacctccgacccccaagagggaat

SEQ ID NO: 386608 - DNA, 122 bp, Homo sapiens
gaggcactgctgggcccattaccccttggcatcaggtcctctggaacacaggggctccaacgggttgtcttgatcctgctgtcccccaccctgagtgccttgcagaggctgaggaaactgga

SEQ ID NO: 386609 - DNA, 122 bp, Homo sapiens
caacaagaccagactcctggttctaggctgcatggcaatctgctctgtgaccattttacgcgatgtgcctctttacaccatcccccagaaagggaagggctaagaggtagggggtctgagtt

SEQ ID NO: 386610 - DNA, 122 bp, Homo sapiens
ctgcagccgatcgccgcgccgcatcctccgagatgctcagactcggctaacagagcccggcgctgccgatcgcgagcccgcccacaggagcgcagccctgcttaactctttccccttagggg

SEQ ID NO: 386611 - DNA, 122 bp, Homo sapiens
ctcggtggacggggccctaagtgcgaccttgctgctggtgcatataaatctgggtctcagcgctgacctcagtctggtgcaagagtgtcctcggtcgacgctcttggaggtccgtgtccaag

SEQ ID NO: 386612 - DNA, 122 bp, Homo sapiens
atttattaatgtaatatgttaaacaaaacctcgacagacacaaactcaaaggaaaccgtgcgctccttaagtcaaaggcatctgttctggaagcagaacccggtttgctgttggtaaccagc

SEQ ID NO: 386613 - DNA, 122 bp, Homo sapiens
cggcagcgattcatccacaggcgcctttttccactgaaatgtgagcgtggccagggtgagcgctgccctcgcggccggccgtggtgcctctggtgtgcgcctgtgtgtgctgctgccgctgt

SEQ ID NO: 386614 - DNA, 122 bp, Homo sapiens
agccagcctcagagcaggcgcgagacgcttactcggccgcctgtgacctttgtggccagccggcctcaggccagcccagtgtcttggaaacatttactggggtcaccctgtctcccacctgt

SEQ ID NO: 386615 - DNA, 122 bp, Homo sapiens
cgcgggacgggtagcggctgggtgcggagctgggcggcggtcgccctaggcaggacggagcgcgcgagggagagggcgagagcgagggcgggctgcgcggccgtggggcggtggcggcggcg

SEQ ID NO: 386616 - DNA, 122 bp, Homo sapiens
taactaacccactcccaaataaagacagtaatccattcacaggggcagacccgtcatgaccgaatcacctaataggccccaactcccaacactattgcaccagggattaagtttctaacaca

SEQ ID NO: 386617 - DNA, 122 bp, Homo sapiens
cgccagggtcggtttaggtgtggcgcctcctctggacgcccctgggattgcctgcgcgcccggcccggagctcctgttccaagcagggagcatccctggaccgtgccctcgttcctttgagg

SEQ ID NO: 386618 - DNA, 122 bp, Homo sapiens
acacatacgcaggagggttgattttttctaattcatctctgtagccgggatagcttctgacgcctaagaaatgtagtcaacactcctacctaaaatgcccagagagaaactctacatagctg

SEQ ID NO: 386619 - DNA, 122 bp, Homo sapiens
aatatctactctccctacttttattaagctgacaagatcaaggacttactgcagagaggtcgctcaagtgtggggctaggggtcaggctggacagaggtaatggtagacgctttccttggat

SEQ ID NO: 386620 - DNA, 122 bp, Homo sapiens
ccagccaggcaggatgtgagggcaccctaggggttctgaaatgtaccgctgcccagtaaccgatgttctgtagtagcattttctgtgtgtttgtgttggggtgcccctccccacatccccac

SEQ ID NO: 386621 - DNA, 122 bp, Homo sapiens
gtccttgtcgccgtagtcctctgccacgaccgcagcgccaacgccagagacggagttggccgggactgcacgcctctcgtcgctccgcgtcccctggcaccttctcttgagtggcaggcaag

SEQ ID NO: 386622 - DNA, 122 bp, Homo sapiens
tatcattcatcgattattccctaatattaattgggcacaactatgactcatttccgaccccgcaatgggctctcttggtctccttctccacctttctttccctcttcctctttttatttttt

SEQ ID NO: 386623 - DNA, 122 bp, Homo sapiens
ctatcactttcacatcaaactgggggtactgtcctttgaacagaagactcatgaggaaagcgcagattccttccaggtgggaagaaagctttgtccctgctccatgtctgctgatctgcagg

SEQ ID NO: 386624 - DNA, 122 bp, Homo sapiens
aagacacacaggttgaatatcaatcctcaatcccacaccccagtatcattgagaggtatccggtatctatattgttccccaattcctaactggccctagtgtgggggaacacaagccaaatc

SEQ ID NO: 386625 - DNA, 122 bp, Homo sapiens
ccaccgcggacacgccgggccctggcctgcgctgagctcgcctgccctggcccaagcagtcgctgtcccctgcctgcggccatgcccgctctggccaggccctgcacctcctccccgcccca

SEQ ID NO: 386626 - DNA, 122 bp, Homo sapiens
agaggtgctcacacgccctcctcacgtctacacaagggccgccagctccaaagggcaaggcgatggccctccccaggggcctccctgcaggcacgaggctccactcccgaggaacacctgcc

SEQ ID NO: 386627 - DNA, 122 bp, Homo sapiens
aactgtggctggggcagggtcacatggcagaaaacatgagtatctgtgtccagggaatcccgccccctgcagctgcttttctcagaaagacaccatgcatgtgtcaggccttcagagtggaa

SEQ ID NO: 386628 - DNA, 122 bp, Homo sapiens
gcttgatacctaatggggtcataaggggaatattgagaatattgacagcaaatatttgagcgtttattgtatgctaggcagcgtggcaagaccttttaacagatcattatgtttagttcttt

SEQ ID NO: 386629 - DNA, 122 bp, Homo sapiens
cagcctccaggtgtaaaaataaccatcacagccaccaatttacgatgcgccaggtgccttcgagtggcacacacgccataccagcacgcttcacaaacccacccagatgggaaaactgaggc

SEQ ID NO: 386630 - DNA, 122 bp, Homo sapiens
ccattgtttgaaacatttttattgtttcagaacatttctttttatttagaccatagtgaacgataagtggatatttctttcaaggtgtgggctctcactgtggagtaggggcattttggggg

SEQ ID NO: 386631 - DNA, 122 bp, Homo sapiens
gtggcctccctggtggatagaaggatcgctctgcgccgggggcgggccagtaatcgtaggcggggcgcgggtccagagctccgattggccagagtcggagtaaacatccggcgggacggggc

SEQ ID NO: 386632 - DNA, 122 bp, Homo sapiens
gaggaagaagatgaaggaactgagttcccttttaagaccctacacccttctctatgatgacgtcacaaagaaaagtcccccaattcagtccctccagatttcttcaaaccccactgtattgt

SEQ ID NO: 386633 - DNA, 122 bp, Homo sapiens
tgacctcatgatccgcccgcctcggcctcccaaagtgctgggattacaggcatgagccaccgtgcccggtacaccagcgatctttgttagtcacaaaatgctaattttttcaatgatcatca

SEQ ID NO: 386634 - DNA, 122 bp, Homo sapiens
gtggggcacgcagcgagcgccttctgcagagtcggggtctccctcccctccctcctgacccgccctggcccaccctgcgagatggacgggtctttatttttgggtcacatttgaggtaatga

SEQ ID NO: 386635 - DNA, 122 bp, Homo sapiens
aggccgctctgtcggagaccacgctgtccaaggcccgcatcaggatgtctggcatgtggtcggtgagcatcttcggacctatgagtattttgctgaattccgcttcgtgtgaccacttggcg

SEQ ID NO: 386636 - DNA, 122 bp, Homo sapiens
tgacaccatgaagagtgcccaccttcgcgcaggccctcggtgaatgggcatgtccttgaacgcaaacttggctccaacggggcaggagaaggatcattcagactcagctacagaaaaacaga

SEQ ID NO: 386637 - DNA, 122 bp, Homo sapiens
gactatgcctgtgggagcaacggctaccggcgcgcggccttctgggagttgtttgttgcgcggagcgcgggcacgtccgccggccaccggaagcaccgccattggccggtgcgtgcaggtga

SEQ ID NO: 386638 - DNA, 122 bp, Homo sapiens
tgtccaagaggtgggagggaccacacctgggggcagggacgagtcaggcacagggaactccgccagcctagaggatcaaattcctccggggtgaactctgagatagaaagttggcccgggaa

SEQ ID NO: 386639 - DNA, 122 bp, Homo sapiens
catctgacgcctgggaaggacagggcttcttattaaggctgggaaatgattccaggcacacgccgcccttcaagtctgaggccttgactccgaccgccgaggtgcaggttctgctcagctct

SEQ ID NO: 386640 - DNA, 122 bp, Homo sapiens
aaaaatgctgacgtggcgggaggaggaggagaaggtgatgggacttcaggaaggccatggcgtcattgatgagccacccagcaataaagaataaagcgcattttgactcttctagtctcgtt

SEQ ID NO: 386641 - DNA, 122 bp, Homo sapiens
gccacctgacctctgcccctcagtttgctcatcagtaaaatggggttaaggaggctgcctcgcccagctccacggagccggaggtgatgaaggtcctggaagagcagaattcagaacccgag

SEQ ID NO: 386642 - DNA, 122 bp, Homo sapiens
actcgatttgcccatcaagttaacttggtcggcctgggacccgaggccagggtgaagggacgacatcccggggccctgtggcttctccctagagcgcccaaacagcggcgtaggtctgggac

SEQ ID NO: 386643 - DNA, 122 bp, Homo sapiens
aatcttgttcgaaagccaaagttcccatgatataatataaatggttgacgtaccttaggacgatccctcagggaatggtgggaccctggtgaactggggagcacaaatcccaactaaacagg

SEQ ID NO: 386644 - DNA, 122 bp, Homo sapiens
ggaaagcgggaggggaggcctcacggcagctgtgcccagaaccagcacgctgtgaacaggcgccaggccctgcgccggcccacggctacacggtgctctggaaacataggctagcgagagtc

SEQ ID NO: 386645 - DNA, 122 bp, Homo sapiens
agctgctctaacagtgggaggagacaccgacgaaaagcattctgacggccgcgcttccagcgctaaggattcccgcgtagtgagcatttcccagaggtctctggggcatggctccattaggg

SEQ ID NO: 386646 - DNA, 122 bp, Homo sapiens
agcggggctctcttccagccccgggtccgcagaggaacttattgcttctgggaagggccccgggtaggtctgtgctgcgcactggatccctttttgcaggccagtctcttcgtggaattctc

SEQ ID NO: 386647 - DNA, 122 bp, Homo sapiens
gtcccccgcggtctcccccgtccgctgcccggtctcctggggccgcccctgcctcctgcccggtccctgtcctgtgcgtcgggcccttcccaagatgcagagtgcgccactgcagacccgag

SEQ ID NO: 386648 - DNA, 122 bp, Homo sapiens
tgtgcctgtagcgtttttaacacacagggaagcgaccgccagactctcacggagatgccccgttcgttctgccttgggccaggtaaatacggattcccaggttggccttaaccctccaacgc

SEQ ID NO: 386649 - DNA, 122 bp, Homo sapiens
ttttaggtgaataagcgtattgcataagcacatgggaagaaaggttaagaactctaagaccgtaaatttccagttgtagaagcctcttgaaggcggaaagcccttttttgaaaattataggc

SEQ ID NO: 386650 - DNA, 122 bp, Homo sapiens
gctggacaaatacgaaggacagtccttgtgattttataattggtccgatgctgccaggaacgatggcgacggctgttttctcgtgttaaaaacagactcttctgatcctggttacagagaac

SEQ ID NO: 386651 - DNA, 122 bp, Homo sapiens
ataacgcagtgttctgtttctgtttttgttcgtgtgtgcacgtgtatgtgtgcgtgcatgcgtctgtgtgcatgcgtgtgggttcagttcagacagcctcctctgctaacaccctgtggaag

SEQ ID NO: 386652 - DNA, 122 bp, Homo sapiens
tcgcagctgcgggtccctcgcctccctgctccagactgaaagtgcctggagggcggggaccgcgtctttctccgcccctggaggcgccgctgctcgggtatctgctttgcgaactgtggtcg

SEQ ID NO: 386653 - DNA, 122 bp, Homo sapiens
aaataaagaatattgagttacttagtttacttcaacggagcaggtttttttgagggaaggcgatgaaagagtaaatgattaagcatgtgaaaaagtattagaaaattgagcatagaaatgaa

SEQ ID NO: 386654 - DNA, 122 bp, Homo sapiens
ataaaattgaataagaaaaagatctataacctaggtaaagcataatctgtcagagaagcgcgtgagaaatttgaaatgaaggcatttgttaatacaagatgcaacgcacagcactctgtctg

SEQ ID NO: 386655 - DNA, 122 bp, Homo sapiens
tgacgctgggcagcgtgttctggctgtgcagttcggccagggcgcgcacgaagccctcggcgaagccctcctgctcatctgtcacgttcttggggcacaggaactgggtgggggtcggcgtg

SEQ ID NO: 386656 - DNA, 122 bp, Homo sapiens
ccgaaatgctgccccatggtgagaaaaggcgcggagaggcgcatggcaccggcgcaggtgcggagagtcgcacaggagacctcaggcccaggctccactccccagctgtgaaagtaccactg

SEQ ID NO: 386657 - DNA, 122 bp, Homo sapiens
atacaattacttttctagcgtccttagggggacatcttgccagtcattctgttctgagaccgtgagaaaaccactggtctggaagcccaggtgttccatgccgtccttggcttgttttgcct

SEQ ID NO: 386658 - DNA, 122 bp, Homo sapiens
ctcccgcctgccagtggcctcctcaggcccatggggctcattcctcacaacggcctttcccggcccagtttttcccgtccggcggcctctccgggcccagaagctcctcaagtcggcctctc

SEQ ID NO: 386659 - DNA, 122 bp, Homo sapiens
ccgtagagcgcggaggcctcggcgtactggccgttgcggaaactctcattgccggcggcgcggagctcctccacagagtctgggaatttgggggccatcccgtggccaggccggcgagttgg

SEQ ID NO: 386660 - DNA, 122 bp, Homo sapiens
aggggccactttgtactgggggctgtgagcacctgtggacagggatgaaaccaccgtactcgtctctggattccagcacctaccttagtggctggtccagcatagccacctgataaccactt

SEQ ID NO: 386661 - DNA, 122 bp, Homo sapiens
acctccactgaatactgaaattgttgcatgcctgtggattccttacgacaatggggaacgcggtgtttcccacctcttgtgggtagaaagcagtctgctttgaggaggcgagaaggcaaagc

SEQ ID NO: 386662 - DNA, 122 bp, Homo sapiens
ccgacagcccctcctggcacctgcacagggcatgacacgcacatcacagccgccttcacccgctcagcctcccgcgtccccacagcccggaccggagcctcagagcaccaggacacacccat

SEQ ID NO: 386663 - DNA, 122 bp, Homo sapiens
agccaaaacggccttgcgtggtcggggccagctggaagaggtgacttcccacccgggtggcggctgagctggggagtccaacagctccctttgctcaggcttccgctgttttcctgggaatc

SEQ ID NO: 386664 - DNA, 122 bp, Homo sapiens
tggacacggctcgggctgggatcccacagcgccgccttctggcgggaggcacccccgcggcgctgtgcattctgggctccctggatctctgaacttgaattggagctgctccaagctctcca

SEQ ID NO: 386665 - DNA, 122 bp, Homo sapiens
gttacgctctaggaaactgaggtttagggaagctgatgattctcccatggtgacacagcccgacagatgtgctgggattctaacacagttgtctagccacaaatctagtacactgtccacac

SEQ ID NO: 386666 - DNA, 122 bp, Homo sapiens
tacagtcttctcaggatgagcagtaaaacctttgaacaaaggtctgtgtggttgtcttcacgggcaatcaggaagggagagagctggggaccatattctgcaatgcagccaaatccgaggaa

SEQ ID NO: 386667 - DNA, 122 bp, Homo sapiens
aattctatattaatagggggcccatgcaagatgttgcccattggcataaacccgtagatccgatcttgtggtgaagtggaccgcacaagctcgcttctatgggtctgtgtcagtgtggtaat

SEQ ID NO: 386668 - DNA, 122 bp, Homo sapiens
gactgaactaatgatctgctgaataatgaaggaggaatagacaccccagtccccaccctacgtgcacccgctctgcaagttcccatgtgatctgtagaccaggggaaattacactgcggtca

SEQ ID NO: 386669 - DNA, 122 bp, Homo sapiens
accagtagagccacagagtaggcacagaccagaggcttctaatccgacttcacagaatagcggcacaggccccattccccatagagatgtttagtttggccttcgcactggtcttttttttt

SEQ ID NO: 386670 - DNA, 122 bp, Homo sapiens
ggagtgcccggcggcgggtcctcagcttcgagccgaggtgcagtgagctggtggggggaccgcgaggcgagcgcgggagcctgggcggcgagccgggtgtgagctgcctgaaaatgcactcg

SEQ ID NO: 386671 - DNA, 122 bp, Homo sapiens
aatatcttacttttccctcctaaaatacagaaatcatccattacaaagtgatgactctgacgaaacctgatggctggtgctgttgtttctagataataccatactgaggaaggagtagatta

SEQ ID NO: 386672 - DNA, 122 bp, Homo sapiens
catcatttccaccgttgagtttaattactctggagatcttcttgcaacaggagacaagggcggcagagttgttatttttcagcgtgaacaagaggtcagtaattttcagtccacaaatcaaa

SEQ ID NO: 386673 - DNA, 122 bp, Homo sapiens
ggagggagaaatttgaggcaccaggggctgagtcttggatgagggtgaaggaaaagagcccgtataccatctttcagcagtagtgatgtcatgaatgaaggatcaacttcaggggcttggag

SEQ ID NO: 386674 - DNA, 122 bp, Homo sapiens
gtatgacaacaaagactaggaaaggggttgctgcctatctggctgtcaagggctcttccacgggtcaagtaacttcaggtatttatgcccattgcaatgcgctaaatatgtgcccactccct

SEQ ID NO: 386675 - DNA, 122 bp, Homo sapiens
tcaaccaactaaaactccaggtttctctgtactaataccgagcatcttttcatctgccaacgaactaataatagtagcttttaaagtctatagagtatttgttatttattttgtagagggca

SEQ ID NO: 386676 - DNA, 122 bp, Homo sapiens
gcacactctggagcaaaccagcccccagatccaaatcaaagctgtgtagggcatgaatgtcgctccacttacccagcatagcggttgttataaaggtggctgtgccccggttgcagaatctt

SEQ ID NO: 386677 - DNA, 122 bp, Homo sapiens
agccatctcttccattgctgccagcctgacttggggatgcctcagggaaggctgccctttcgtgctagccatgtaaagctttaaaattctgaggacacagctaatatcatttatccctcatt

SEQ ID NO: 386678 - DNA, 122 bp, Homo sapiens
ctcaagggcgagttcctctggggggttttggtttggttctgttttgtattggtaagctgtcgttgcagtataacatacataaagaaaagaacacaaatcatgagttgttcaactgataaatt

SEQ ID NO: 386679 - DNA, 122 bp, Homo sapiens
cttctcctgacctctaatgtcatgtctctccaacctcctgatagacagttgacttgacttcgtcctgccagttcctaaaaatcaacatagctgatatcagcctgctcatcttcccttcctaa

SEQ ID NO: 386680 - DNA, 122 bp, Homo sapiens
tgtcctgtgacaacgttaagtccaagagcgccaaaaggggatggcagaggagtcatcccccgaatctgctggtacccaagaggtggggggttggctgttcctccagactcactaaagcttcg

SEQ ID NO: 386681 - DNA, 122 bp, Homo sapiens
acacttttgctggaaacactgcagtggctcctcacaacggctataaggtgttccaggattcggtcacgtacttgacctcatctcctttcttctctgtactcagctccagtctcactggccct

SEQ ID NO: 386682 - DNA, 122 bp, Homo sapiens
gtctagcgttgccccacggaccaatcctggttgacgaggctaagggaagcctagcaaccacgcagaagcccggcaatcttccgcagcgctcccatcctccacaagtccttacaacagcccca

SEQ ID NO: 386683 - DNA, 122 bp, Homo sapiens
atgagcagcaatgactcctcccttatggtgcgtggcccgggcgctgtccgagggctccctcgtgactccccgcccctgacccagagaccgtctgccctgctactctcctgccacccttcgct

SEQ ID NO: 386684 - DNA, 122 bp, Homo sapiens
aatgccaagatgtcgagatatgctgatgccaagatacaccgatgccgagatgtcaagatacgctgatgctgagatacactgatgctgagatacgccgatgctgagataacgccgatgccgag

SEQ ID NO: 386685 - DNA, 122 bp, Homo sapiens
agcatcagcaccagtgcccgcccccgagacgcgcgcattggaccacgctgcgctgacgggcgagcagcgcagccaatgcaagggctcagaagccgccagtccagcggctccacaggcccact

SEQ ID NO: 386686 - DNA, 122 bp, Homo sapiens
ccttggcccacactctacctcccaaaccttggtttcctcagctgtggaataatcattgagcgtaagttattttaagaattgcagttacctttatcagctacttttccaggagctgctctcgt

SEQ ID NO: 386687 - DNA, 122 bp, Homo sapiens
atcattgtattcctcctctgctggatcattcccatcagcatacaaacatgtgcaatggaccggatgcggtgcctcaaatctgtaatcccagcactttgagaggccgaggtggaaggatcact

SEQ ID NO: 386688 - DNA, 122 bp, Homo sapiens
gcccgcttcccttctccagccccggccccccagcctctgggagtgcgccgggaggccggccgcacacccactcacctcggccctgggagctccaggccggaatctccccaccggaagtgcga

SEQ ID NO: 386689 - DNA, 122 bp, Homo sapiens
aaatatgatctcgagtctaagtgtgcagccttataggagcttacatatcctataggcatccgaaagtccagatgccttctcattttgggtggtgtgcttaggtgtattaataccattctctg

SEQ ID NO: 386690 - DNA, 122 bp, Homo sapiens
atccttttcatttatgtatagccatatgatatagtatttacaaatgcatatgaccttatacgcaaggttgaatgcaaataccctttggggtgggcctatctcagctcaaggaggaagccctg

SEQ ID NO: 386691 - DNA, 122 bp, Homo sapiens
ccaggccacgtggggtcaccaggggtcccccttctggccatgagggttttctcagggaaccgacctgaattaccactggggaggcataggttctccaggagggcggctattttgggaatcgg

SEQ ID NO: 386692 - DNA, 122 bp, Homo sapiens
agcagccagggttgtcccttggtggtctcgggcaggttctccgcgatgcgcttgctgggtcgcaggtgagaacctcacggttctccatttccggagatccagctctgagcaggcagagggtc

SEQ ID NO: 386693 - DNA, 122 bp, Homo sapiens
actgtggagcccatatcaagccctcataataggcagcgactgtggcgtgagaaaggcactcggaggtaatttgtgtgccgatgtaaccgcgggctctccaggcaggtctggacttgcatatg

SEQ ID NO: 386694 - DNA, 122 bp, Homo sapiens
ctagcaacggctcagcaacatagagctgggaattagcaaggtaaagaccccagtgatattcggggaataaacacgtccaccccatagcttttctcaacctaattttattcccggagacaggg

SEQ ID NO: 386695 - DNA, 122 bp, Homo sapiens
gtagagatggggtttcaccatgttggccaagctggtctcgaactcctggcctcagcgatccgcccgcctcggcgggattacaggcatgaaccagtgcccagtcaagaacaaaggatttagaa

SEQ ID NO: 386696 - DNA, 122 bp, Homo sapiens
tctaagcaaattagaaagtaaacttccttaacttgctaaagggcatctttaaaaatctaccgctaacttcctaattgttgttgaaatttccctcataaataggaaataaatcaaggattttt

SEQ ID NO: 386697 - DNA, 122 bp, Homo sapiens
gggcttcaccttggtagggcttaatgagcgaatgctcccgcttgagatgttcactgttgccgtcagttatatccgcagtcacagaccccaacaacaaaagaagaaagagaggtgtagtgggg

SEQ ID NO: 386698 - DNA, 122 bp, Homo sapiens
tgaactttttcttgataaaaacaatgactggtgggagaaaaaagaggtgacatcagaaaacggggaaatcactgggtttggaatgagctgtgcatggcactgaagagtcatgtgactagatc

SEQ ID NO: 386699 - DNA, 122 bp, Homo sapiens
tcgctgagtttggagctgaggctactgctttctcccaagggttctcttcgagccccttcccgaacggatcaaaacttttttactcccttctccctcccccttcctctagtggctgattgcag

SEQ ID NO: 386700 - DNA, 122 bp, Homo sapiens
tccttcggagaagacttaggtcgcctggcagaaaaagatgaaagaaatctaagaaaacgacgacactgagagaggagcctagcgaaccagcagagcgaccccaagccgcaattcccccttcc

SEQ ID NO: 386701 - DNA, 122 bp, Homo sapiens
gcggtggaagggaggaagaacgtgtacgccccaggcctccgtaaccatggctgcgaggggcggggactgggagcgcgggtcctgggccggggtgcggctgggaggaatcggtcctccactgt

SEQ ID NO: 386702 - DNA, 122 bp, Homo sapiens
tgaagaaaaaaaccgcagctaggtttttctgggtggggaactggatgccagcctggtccacgcggctctgggctcccagcattggagaagaaaaggaaaaagggaaaccaggttttaatcga

SEQ ID NO: 386703 - DNA, 122 bp, Homo sapiens
gcagcaataggaaggggctgctcctttgagggcccttctcaaacctggagcccctctggccgccagatctttgtctgtgaaacagcagccagtgtgtggaccaggcaggagtggatggggtg

SEQ ID NO: 386704 - DNA, 122 bp, Homo sapiens
gtccggagttggttcctgcaggtgggttcgtggtctccctgacttcaaaaatggagccaccgaccttcacggtgagtgttgctgctcttaaagatggcatggacccaaagagtgagcaacag

SEQ ID NO: 386705 - DNA, 122 bp, Homo sapiens
ccttacaattaaaaacacacctttgtgagctggttgcttagaattaggagtgtcatctgccgtcacggtgcagacggtattcgcgtctttgaagctagttggcccacgggaaacttcatcag

SEQ ID NO: 386706 - DNA, 122 bp, Homo sapiens
ctttgatctcggctgcggtcgggttgctgaagttctggctgcgttcacccccaccgtttacgacctttgcaagtgtgcaaagataacaggctcgcttgggcttgggaaaagcccgggagaac

SEQ ID NO: 386707 - DNA, 122 bp, Homo sapiens
cacagaatgtaataatgatgttccttggactttttctcagcagaatgtgttaaagtcaggcggttgggcaggcaggttctcatggcccgaaccctcgtggaatgtttcactttgaccaaggt

SEQ ID NO: 386708 - DNA, 122 bp, Homo sapiens
aagtatactccttcacccctggccactatgccctcaaaccagccgaataggacatgtcttcggaaacccagcgggcgcaagccaagtgattgaccattaagagcctggctgaaacctgctta

SEQ ID NO: 386709 - DNA, 122 bp, Homo sapiens
aaggaatatttcacagtaaacccagaaagcggagacttacttgtgagtgacagaatagaccgagaacagatatgcgggaagcagcctctgtgtgttctggatttcgatactgtcgctgaaaa

SEQ ID NO: 386710 - DNA, 122 bp, Homo sapiens
cttgctcccctgtgctgacctctgtttccagtgtggtcatctctttcccttcatgctgtccgagcaaaacttctgggagcttttgaagaaacagatgatttttttcggggggtgggggaagt

SEQ ID NO: 386711 - DNA, 122 bp, Homo sapiens
aaagaacttctggttgctaagcaactcatgaacacctcagagttcacagatgccatcccacgtgacatgtgaccagagactaagagtgtagtcaagcgtaatgacagtgatttattagctta

SEQ ID NO: 386712 - DNA, 122 bp, Homo sapiens
gcatctccacgacgttatttggcgtttttgcaacagatctgccagcgctcttcgctccctcgctctctcttgctcgctcgctccctctctctcctgctggctgcctgttctaggaagccagc

SEQ ID NO: 386713 - DNA, 122 bp, Homo sapiens
aagctggtcccataggacctgcaggggtggtgacacagccaggtctaatggaactagggtcgcagaggaggaagcagagactggggattttccagtctctctgccttaggaagaggccggaa

SEQ ID NO: 386714 - DNA, 122 bp, Homo sapiens
attctgaggacaaggccagataaaaggccaaatcagacaatctttgaaagcatagtgtttcgtttggttggggtgtatggtaatccctcacctccccatggacctgccagtaggtccgtgaa

SEQ ID NO: 386715 - DNA, 122 bp, Homo sapiens
ctgggcctgcggaagtggtccagcaagacccgggccagcgaggtgcaagagcccttctcccgctgccacgtgcacaacttcatcatcctgaacgtggacctgacccagaacgtgcagtacaa

SEQ ID NO: 386716 - DNA, 122 bp, Homo sapiens
agctgaacaaatagtttctccaaataaaggctatatttcccagcctcctttgcaacatggcgttgtcatgcagcaaagttctgacaagtgggaagtagttggaagtggtgagcttcttctaa

SEQ ID NO: 386717 - DNA, 122 bp, Homo sapiens
aaaccccggctcccatgcagagcagagactgcccctcacagcccccgccttaacactcaacgtaacggcaccaattctgcaaggtatgcaaacaatcgaagagtaccttgtgccacagcttt

SEQ ID NO: 386718 - DNA, 122 bp, Homo sapiens
ggcgcacctccctacaccagccttcgtgcccctggggctagcgctggaagcagcactggacgcaggaaagcgagaagccggctggggcgtaaagactgctctgggacccacgggagtccctc

SEQ ID NO: 386719 - DNA, 122 bp, Homo sapiens
tatggtgaggctgggaagactgaggccaagggaggaaaacaggtggcatgagtgtgggcccggcaggacttaatttcctgactcctggtcatgatgctgtttcctatttcttggaaaaagaa

SEQ ID NO: 386720 - DNA, 122 bp, Homo sapiens
tatcctaatatttaatgcttcagaggactaggtactgggcataggtgacatttaagtcagcgagaaagaactccaaatagttcattgagagatctaagtggtgatatggatgggaagtcgtt

SEQ ID NO: 386721 - DNA, 122 bp, Homo sapiens
aaacgtgaggcgcgtggtccagatcttccgaatcatgcgcatcctcaggatcctgaaactcgccaggcattcgacaggcctgcagtctctgggtttcacccttaggcggagttacaatgaat

SEQ ID NO: 386722 - DNA, 122 bp, Homo sapiens
agggtactttagatcacctcctaaccgcaagcccagcctcagatccttcccattggtgcacggtcttgccaattactgctacactcggcaggttctccaatcaaacacgccctgtcgggcag

SEQ ID NO: 386723 - DNA, 122 bp, Homo sapiens
tgttaacatgtatgtatgtgtattttattacttgcgttcagttctttggggtatagatctcgtggtggaattgctggatcctatggtatttctatgtttaactttttgaggaacaaccaaag

SEQ ID NO: 386724 - DNA, 122 bp, Homo sapiens
ccacgcgggcccgagccctgggcgggagtgcggccccgggtcccgcggcctcggcgcccgcgcgcctcccccactgcccacccccggcctccgggcccgccccccgcaggggtcggcgcagc

SEQ ID NO: 386725 - DNA, 122 bp, Homo sapiens
ctccgtggtgttgagaagcacatgtttctcctcccacggctgtgtaggtccggagtcctacgggctcagccagtccccctgctccaggtttaaccaggccggaatcaagatgccagggcctg

SEQ ID NO: 386726 - DNA, 122 bp, Homo sapiens
ttccatttgtcactgccttgccactcgtcgaagtttgtcttgggctctaaaagtggtagccgggaacggctgggaaggtctccacagggaccaccacatgggcaaggctggtgtccgcgccg

SEQ ID NO: 386727 - DNA, 122 bp, Homo sapiens
gacattctgcgcctgaatgagcgggggctgctgtgtcgacgcggatttgccatatggttgcgcggagccaggaagaatgggcccctgtgtgtgcgaccgggacgcagcggcgcgggccgtgc

SEQ ID NO: 386728 - DNA, 122 bp, Homo sapiens
gtcccggctagagtgaaggggcgtgggcactcataggctattgggggagaggttaagaaacgtagaatttcgcagccagaatgggtacgtctcagcgatcctgaaagcagccttgacagcca

SEQ ID NO: 386729 - DNA, 122 bp, Homo sapiens
gcctgggtctcagcagccgccaaccccaccgcccctacaggcgcccgtccgcctgccccccggcagcccctgttgcccagcaccaacctgaatcgtgggccacagccgcccccgctcgcggt

SEQ ID NO: 386730 - DNA, 122 bp, Homo sapiens
ttagctaaaacacctaactcattcgggtgagtctcgccagtccctctgggctgactgtcccgccccgcgcttacacccgggagcgtcgggcgggagaactagtgcatgctggctggggatgg

SEQ ID NO: 386731 - DNA, 122 bp, Homo sapiens
acaaaaccatgatcacaacaaatccagcaattattcctaagtatcctctaatactcaaaccgtattcagattttcccagttgctcaaaaaggtctttgcagttgaatgaggagatgaacaag

SEQ ID NO: 386732 - DNA, 122 bp, Homo sapiens
tgtcttggggtaattattaatagcacctctggtaactctcaggtgtcctggtttgggtgacgatgcctgtggtcacccccgtgctacctgaccatctggccccacagccagggcggaagtcc

SEQ ID NO: 386733 - DNA, 122 bp, Homo sapiens
agaaacccgacccctgagaactccagaaggctgggcaggcagggcgccctagtgcaggaacggagcttcaagaagtttggagcccgtcgagcactgaactcaccagttaagaaaacagagca

SEQ ID NO: 386734 - DNA, 122 bp, Homo sapiens
ggcagattcaagatctgagtcaggcatgcctaacctcagagctcagaccccttatactttcgcccgtgaagtggagggaaagtcacctgctgagaaggaagaggcagtagcattttgggcct

SEQ ID NO: 386735 - DNA, 122 bp, Homo sapiens
tagaagtggcaagaacttagaggccctttcctttcaagcttcccaactccagagaagagtcgaccactgaccacctggctaatcagctgggtgaacttcatcagcagacaccgtaaggaaag

SEQ ID NO: 386736 - DNA, 122 bp, Homo sapiens
aaatgggggtaacagcgccgacctggggggcccgccccggggatgaacggccgcccagagcgactcgggacctcacgttaccagcaggctggcacgactagcaggttacggctcgccaggcg

SEQ ID NO: 386737 - DNA, 122 bp, Homo sapiens
cctgcagaaaggaggggttctgccttcagaagaagagggaagggattctaggcaggaaaacgaaataatgacagctattcacagtcattcactgtgcttggcacagggaatataccagtaac

SEQ ID NO: 386738 - DNA, 122 bp, Homo sapiens
actggaccaagaaatggtcaaactggccctcggggactgtccaggagaggctgagggagtcggaggtgatgtctctcactgtcatctgccctaggcgcagctttgcaagaggagcatcaggg

SEQ ID NO: 386739 - DNA, 122 bp, Homo sapiens
gaggaggaatgggactcagtctgcctcgaatctgttgaggctgtgaggcctaccggaggtcgtataggtggggaaagctaactgtgcacatcttttccaattctgtgttcagtgacttcatg

SEQ ID NO: 386740 - DNA, 122 bp, Homo sapiens
gaaaaggggtgtacaaaggaccaggtctcgtgagcgcagccaatcttgtccgctcccaagcgactcaggctcttggcaggacttgctgtagagtcccagacggagttagccactgagtcctt

SEQ ID NO: 386741 - DNA, 122 bp, Homo sapiens
ttgagcgcgatttttcccggaaggctgcggggttggaagtgcatgttggggtttggatctcgtgcagcagcgcaactaacctgctgcaacggcgctgtgacacccctgtcccggggccccca

SEQ ID NO: 386742 - DNA, 122 bp, Homo sapiens
gagtacaaacgggactgggactcaatacgtttacctggtgaagatcatagaaaggaattacgctggggtgtccgagagcagatgctttgtcgagcagaaccccaatccaaacctcagcatat

SEQ ID NO: 386743 - DNA, 122 bp, Homo sapiens
acgcccggtttcccatccatttcatgccttctgcccttctggctccctgctgcagcgcagcgtcctcacccctacatcgcagagcctcagggaaattggtccaggaagagagaattctttca

SEQ ID NO: 386744 - DNA, 122 bp, Homo sapiens
tcgtttcccacccagggaggcctctacctttctcttggtctgaagtttgtctttcttgggcgggacatccttgcccggcttgggggctgtctccatctcgcccacccgaacggcgatccacg

SEQ ID NO: 386745 - DNA, 122 bp, Homo sapiens
gactggggcttcggggcggggcttcggggctgcggtcgtgtggtcttgaccgcgcggctccgactgcgctggctgagttcctcaggccgcccgctctctggcttccagcccgcgctgccgtt

SEQ ID NO: 386746 - DNA, 122 bp, Homo sapiens
ccagagcctctagtctgccatactactggacacaaaagttcaatatgttttcacttcattcgtttataagatattaacctgcattccaaacaccagggccctaactctggtggcctaagctc

SEQ ID NO: 386747 - DNA, 122 bp, Homo sapiens
caggatcatggttttccatcctacctccctcctttggcttagtttccaccccactcatcacgggactctccccaggagctccttcactgccagactccctcgacttgcagtagtgcacacgg

SEQ ID NO: 386748 - DNA, 122 bp, Homo sapiens
ggggcggagaggaggggcggttgggtagcctaaaggtccctctcccagaatacaaggaagcgctaagaaggaggatgtgggggcagtgttccagcaggcatcccaggctcttccggctggag

SEQ ID NO: 386749 - DNA, 122 bp, Homo sapiens
cgagttacaggctgcggtgcaggtggcattcttgccttctcctgagggtggaccagcaggcggcattcttgcttcttcctgaggggtaggccagttgtcttacacatccttctgaagctccc

SEQ ID NO: 386750 - DNA, 122 bp, Homo sapiens
aatgaagaaaggaaggaaggaacaaatgaattaagtagaactggttggagaattccctttcgttatatctgagttactgccatgaaggcagctgttatgggaatggttcattattttcccct

SEQ ID NO: 386751 - DNA, 122 bp, Homo sapiens
tgcccacatgaagggtggtggcccaatgggcccaggaaacccaccttgtcggcagcctcacggacagcactggccgggggctcctgcagcttctccgtgtacttgaggaggagggaattgcc

SEQ ID NO: 386752 - DNA, 122 bp, Homo sapiens
gttggtcctcccgtgttccctttcctgctcctcctgtgttcccttctctagggtgctcctcgggctttacaaggtcactgtctgaacagagccctagtgattgggatatcatttcagaaaga

SEQ ID NO: 386753 - DNA, 122 bp, Homo sapiens
ctgaagtcaggggtcagggtcagaagtgcctgccattgacgtgagggccctccatccctccgcacttgccctcctcattgcctcagagaacagatttcattctcctcacccctctgtgcctc

SEQ ID NO: 386754 - DNA, 122 bp, Homo sapiens
cagaaaagtatctttagtagagaaggcgtctccgaggagggtccctctcatgccgggggccgctgcttgactcaggatttctcattgaagacctgagacaaaaacgcttttgctggcagcta

SEQ ID NO: 386755 - DNA, 122 bp, Homo sapiens
cggtggcggcggcctgggcgcgtgcgcgaggtctccgcgtggctatataaacatggctggcgtggccgcgcggcggggccgtgccaatcgcgcgtagggggctgtgggcactcggggttcgt

SEQ ID NO: 386756 - DNA, 122 bp, Homo sapiens
cagcctggctaaaatggcgaaaccccgcctgtactaaaaacacaaaatttagctgggtgtcgtggcacacacctgtaatctcagctactcaggaggctgagaggcaggagaatcacttgaac

SEQ ID NO: 386757 - DNA, 122 bp, Homo sapiens
gaagggctactgcagaggagggagggtggcgtggttgcagctcaaggacctaggcccttacgagcccttccggggcgagggggaatcttaccgtatatttgttcacctacgttgattatttt

SEQ ID NO: 386758 - DNA, 122 bp, Homo sapiens
gtcacgtggcgcaggatgcacccaacaccaccgtcgcaggcagagtcccgccccgccaggcgacgtcacgtgacgcacattcgctcaagtccacatccgggcatccacctggccctggggcg

SEQ ID NO: 386759 - DNA, 122 bp, Homo sapiens
gggctccgggaaaagaaggggccgggcttactgtgggcagggctggggagggagactgagcgagtactgtccacacaggtcacacgtgttcggctgcagaatctagcgggagaaagaaagga

SEQ ID NO: 386760 - DNA, 122 bp, Homo sapiens
ttgtggcacctagcccgcgcacttcggcagcccagatggagctcatctcagacaaccaagcggaaaagaggggaagccagaaagagatggagacccaacattgtggccaatgaacccgcgaa

SEQ ID NO: 386761 - DNA, 122 bp, Homo sapiens
agtggtcaaaccggagggactgccgggggtgcgggggcggggagggggccggggtacgagcgtgtcggctcctgcctccgttgcggctgttgctgacctgaccagcttgaggcttgcgccac

SEQ ID NO: 386762 - DNA, 122 bp, Homo sapiens
tcacaggccctggcctcgattgctgggatggccagcctcatgtgctctcagcgtgcactccgtatgtcccgtgtccctaagcacccggtgcctctgctgccacactcgctggatgagtgaca

SEQ ID NO: 386763 - DNA, 122 bp, Homo sapiens
tctgcagcccagtgaggagttcacagagtggtgggcgacccagcagccaggggcatcagccgtgggagtgggacgctccgggagtctgagctgcatcctgtgggcgcagcagacgctcaagg

SEQ ID NO: 386764 - DNA, 122 bp, Homo sapiens
gcgccgccgccgccgccgcccacctggcaacaggctcaacccccgccttcccccggcccccgtcagaggccctgaagctccaggcccgccccgttcccagccgggcaggtgctgggtgacat

SEQ ID NO: 386765 - DNA, 122 bp, Homo sapiens
aaagcacacccacatccctttggcagtcaagggctccatgaaacacacatagaaaaccatcgactgagacctattctaagaaggtgaactgacctgccccagatctcacagctacagcctaa

SEQ ID NO: 386766 - DNA, 122 bp, Homo sapiens
ggtgggggagctctgggtaaccagagatgaggactgagtccccccattactcacccgtcacgatgaccacagacagggggcccatgcgttgcccatcatgtagtccatacatgttcatctta

SEQ ID NO: 386767 - DNA, 122 bp, Homo sapiens
acgttcacatgccctatccaaccctctcctgcgagcagcgggtgccatcacaagcccacccgttaccacagcttcacatcgtctacaccgcgggctcacgttcacacgccctatccaaccct

SEQ ID NO: 386768 - DNA, 122 bp, Homo sapiens
cctgagctcactcccaggatgcctgtcgtgtttattataactggttctccacaggcttgtcggtgctccacgccagcagcacaaacaacccgccctctgtgtcccaccgcagggaatctgag

SEQ ID NO: 386769 - DNA, 122 bp, Homo sapiens
ctcttgtgagtgttgccgggatccgtccagggctgggggcggggctgagggctctgggggcgcacggtgcagggctgggttgcggggacggcttggagggtccggagagctgagggtgcttt

SEQ ID NO: 386770 - DNA, 122 bp, Homo sapiens
gtctccttggcaaaagaaataatagcaatcatttaatgggaggggaagaaagccagacggcgacagcacactttccctggtgatcttaggttctcataagcacacgggacaacaccgggtga

SEQ ID NO: 386771 - DNA, 122 bp, Homo sapiens
cgggaggtctggctggagtggagactgagtcatctgggactgcagggtccaacggagtcacgcctgtgagtgatgagcaccttgactgaggccaacgtcacagacgtgtctgggaagtgagt

SEQ ID NO: 386772 - DNA, 122 bp, Homo sapiens
ctttctcccaccctcttcttggagtagctcatttcttctgaggggtctgcacctcgtcatcgtccccaacccaacacccgccctcttcccacttccctccatctcccctgggcctctcacct

SEQ ID NO: 386773 - DNA, 122 bp, Homo sapiens
gtacagcgcgcccgaagttggttgcttggaagccggtggtgccgaaggcctccagcagtgcgcggtaattcacaccgcggttgaagtcgtagccccggacctgggtgctttcgggcggcaac

SEQ ID NO: 386774 - DNA, 122 bp, Homo sapiens
agcacagggaccgtgcgtcctgctctctgctgcatctcccagccagtatacaccacggtacgtcataagccctcaacaaatatttgttgaatggaacagacgtgatcacaatatgtgctcct

SEQ ID NO: 386775 - DNA, 122 bp, Homo sapiens
aagctgcccgcaatacgtcatggcgaccaaacgccttttcggggctacccggacgtgggccggctggggggcctgggagctcctaaaccccgccacttccggaagactcctggcccgggatt

SEQ ID NO: 386776 - DNA, 122 bp, Homo sapiens
aacacatactacactgtgggcacggatcaacagacgagaatactttatacagaagcttctcgacggaagaaggccttggagtgggaaatctaaaggaggggacacactacatgtcccagcac

SEQ ID NO: 386777 - DNA, 122 bp, Homo sapiens
gacgctgcagaggagaacatgtgttcctgtggtcagggcatcagccaccatcgccctgctcggggccccttcacagggaccagagagagcagtggtgataaggtgtggccgagggctgttct

SEQ ID NO: 386778 - DNA, 122 bp, Homo sapiens
tccctgcgccttctcccttctgcagcctcaccgcacctgcaccttgaaagacacccagtgcgtttcccaggaagggcccccctgctggcgagggaaataaaatcagctccggagagcgttat

SEQ ID NO: 386779 - DNA, 122 bp, Homo sapiens
ggtggagcccggaaagcgatgaagacacaacagctctcctgagagttcccgacattcctacgaatgcggtttccccacctgccacctctccacggaccctctgcctgccttcctgaaggcaa

SEQ ID NO: 386780 - DNA, 122 bp, Homo sapiens
gagagagaactggagaaggttaagctttgtgccttattacagctgggcccttccagatcccgtgactaagaactgccatgtcctgactgagaagcagggaggcgtgtgacacacaggaaggg

SEQ ID NO: 386781 - DNA, 122 bp, Homo sapiens
gacctggtttactgactgctggaaccctggagatggcatgctggcaatgagagaatcttacggaactcaacttggtaccaatgccctagtgaaaaagtagtggagtccttatatatcagcat

SEQ ID NO: 386782 - DNA, 122 bp, Homo sapiens
cacttcttcccttcactctcccacttctgtggtcaactccctgcagaactcccaaactgccgttcttttcgatagctcacgatggtgtatgagtgtcaatcatctgacccttcttggagtct

SEQ ID NO: 386783 - DNA, 122 bp, Homo sapiens
actgctccccagaggccaactccccccggcctccagggctactaaccgagggggaggtggcgccccagggactctgcccggcctccctttactggagtccaggagcagggtgcgcccccggc

SEQ ID NO: 386784 - DNA, 122 bp, Homo sapiens
ggcaacatgtattaagaggatagctttttaacctacaatttccattttctggaattatatcgcaaagaaagattctaagttacagaaaaagcttcatgcacaaatatgttaatcacaggtta

SEQ ID NO: 386785 - DNA, 122 bp, Homo sapiens
actatataggccaagaagcagctgacatatgtcataaccaccttgggtaagaattggtcacgggtttcattatccaaagacttctggtttcacctgacaaatacaggacagatgctggggtg

SEQ ID NO: 386786 - DNA, 122 bp, Homo sapiens
aaaatgttagccacagccctagaagctcctcctgctctctcctctccacatcttttctcccgtctccactgtcccagggtaaccattattctggcttgtagcagcataggatctttttgcct

SEQ ID NO: 386787 - DNA, 122 bp, Homo sapiens
caggagcaccggagtccccacattgctatgccattccatatctttttttcttttttgagacggagtctcactctgtcacccaggctagagtacagtggcatgatctcagctccctgcaacat

SEQ ID NO: 386788 - DNA, 122 bp, Homo sapiens
ggtatcgcgagacgggagtgggcggtgctagaacgtcctataaaggctctccccgaagcacgtgactcctctccgccagaccgccgccgcgccgccatcatggacaccagccgtgtgcagcc

SEQ ID NO: 386789 - DNA, 122 bp, Homo sapiens
gctccttgtatgagcctcaaagatggggacaaccatttgggggcagacatgtttgtagcacgagatccaggctcagtcccgaggcagccggaacgtgacgcaaggttgaggcggggctcctc

SEQ ID NO: 386790 - DNA, 122 bp, Homo sapiens
acaaaaataaaataaaattagccaggcttggtggcacgcacctgactgagcccaggagctcgaggctgcagtgagctatgatcgtgcctctgcattccagcttgggcagcagagtgtgagac

SEQ ID NO: 386791 - DNA, 122 bp, Homo sapiens
catgctggccacccccagccttcctgagtcaaaggcccagctcctcccaccccccaccctcgacctaccctcgtgttcaccagctgctgtggctgctcccaccctggtgttgtttgggtttt

SEQ ID NO: 386792 - DNA, 122 bp, Homo sapiens
tggtacacggtaatttgacaattggtacatctctcagaccacaaaactgaacacaaagcacgtgaattaaaaatgattctaccataatgaataataacaacgaaagttttgattagcacaga

SEQ ID NO: 386793 - DNA, 122 bp, Homo sapiens
caagtgaaatatatacataaagcacattcgcttatcacagtcctgtgaggcagacacccccggaatcactgttcccggtttgcagagagggtctatccgtggaccccggtctttgactgctg

SEQ ID NO: 386794 - DNA, 122 bp, Homo sapiens
caaccgactgctcccgacaggaagggtagtattgattttgctggtctgcctgtaggggagcgggccaaagaggaatgctcagaggggctcctctgtctggggtgtgcatttgcacagcagcc

SEQ ID NO: 386795 - DNA, 122 bp, Homo sapiens
ccgtgagtctgctttcacctaggtttaaagcgaatcaaagacggctgtaaaaagggaaaccgggaccaaaaacagatttggagcctcgaaactctccattgaaggtttggaagatacgttgc

SEQ ID NO: 386796 - DNA, 122 bp, Homo sapiens
acgcacaaggggtcgcatcctgccgtcctccctcagaaattaattgagctctcttgccgccgtaaacgaacagtgcatctggaaagatcgtatctgtcaagattgcagattggtttccctca

SEQ ID NO: 386797 - DNA, 122 bp, Homo sapiens
accatgcccctgagcaccgccagcttggaaaggcatcggatggagacgggcgcttttcgacgagatacccgccacttgctctgggatcccggagagggtgggcaagcgtggaccagggaagg

SEQ ID NO: 386798 - DNA, 122 bp, Homo sapiens
attaacgattacaatacagtgcaattaaatgtcatgctagaaaaaaaagatatgccaagtcggtgctgtggagacccagaattagtttcaacccaatagaggagttgaggaaagaagcaaag

SEQ ID NO: 386799 - DNA, 122 bp, Homo sapiens
gagactggagagggtgggggagaaaggagttgaggggctaatttacaggacctctcaggccgggtgtggcagctcacacctgtcatcccagcacactgggcagctgaggcaggaggacccct

SEQ ID NO: 386800 - DNA, 122 bp, Homo sapiens
tgtccaagttaagagacaacattcatcttcacagagtcatggctctacaagctgaaccaccgttttggggtggctccttccccctttccaaattggccaagtttaagaaaaagcactgcata

SEQ ID NO: 386801 - DNA, 122 bp, Homo sapiens
ccactcccagccctgagccttgcaaaaaccttatttaatgccttggagctgagtggatggcgacaccagctacatgacaaccaaggaccaggcatccaggatccgagtgtgtgctgtaatca

SEQ ID NO: 386802 - DNA, 122 bp, Homo sapiens
tgtgcacgtgctggtggtagagcaggtggctgggctgcccaaagcccttctcacataggccgcatttgaagggctcctcggtcttgtgtgtgcgccggtggcgcatcagtgcgtactgctgc

SEQ ID NO: 386803 - DNA, 122 bp, Homo sapiens
accagaggtcgctttccttgacatcttggttttggcaggtttggacccacttctttaccacgtctcattttaccagcaggctcttggtgaacctgcaaaaccagtcctgctgagctcctacc

SEQ ID NO: 386804 - DNA, 122 bp, Homo sapiens
cactccagcctgggcaacaagagcgaaactttccatcacccagcagctggcttgttctcacggccagctgtgaggcagggatgccttgagccttcctcctgtgtttcctgaaactgtgggag

SEQ ID NO: 386805 - DNA, 122 bp, Homo sapiens
ggcagagctaaggctccctcctcgtggcgctggggagttctgatggcggtccagggccctcgccaccatcacctgagcgctcatgttgcccacacagccggcctcgccgccaaagcctttct

SEQ ID NO: 386806 - DNA, 122 bp, Homo sapiens
agccggggatcccggaccctccctcactatctgcttcgggccccacgcgacccctccctgcgtcttggtcggcaagaacgtccccttcagccctgtcacctctgctccgtgctttctggttt

SEQ ID NO: 386807 - DNA, 122 bp, Homo sapiens
tggatgttctccagcttcctaaaaaattaaataatgctcctgctgtactgcacccatctgcgtgaaatttcagtcactttcatattggcttcccctgcactttgggcataggacaaaaataa

SEQ ID NO: 386808 - DNA, 122 bp, Homo sapiens
tggcagcatgttgcctgggcagagctgaagcctgaaagagctccagaaagacgacagggacgaggctgcagatgggaagggagtgctagcggacaccttaggcttgggtccacaatcaggga

SEQ ID NO: 386809 - DNA, 122 bp, Homo sapiens
atgctagttgatgctaattgatttaatgtgttggaatatccgagagttcaaaagtagcttcgaataagctgctttgtggttgtaacccagtttcatcacttaccagatgggaaattttggga

SEQ ID NO: 386810 - DNA, 122 bp, Homo sapiens
cgtgtgaccccctccttccgctttccggggcccctttgttttataaaatgccacagaggtcgaggggacatgagggtcaggggggaggggggttcctggactcggggccacacccagtaggg

SEQ ID NO: 386811 - DNA, 122 bp, Homo sapiens
gagcgtccaagcaactcccagcctaacctcaccggtctgactgtggggctgcttctgccacggctcctggctggcgatggggctgtcagcgtgtcagccaaccatgcattgcagatgcactt

SEQ ID NO: 386812 - DNA, 122 bp, Homo sapiens
caaatgctgaggagggcatggggtggccacgtggtcacagacagcaaatgctgaggagggcgtggggcggccacgtggacatagagggcaaatgctgaggagggcgtgggccggctgcgtgg

SEQ ID NO: 386813 - DNA, 122 bp, Homo sapiens
tgtatgctaatcgaaggacaaacagttctaagaaagctgattcaaaaagcaggtcttggtcggctttgggcaggtctgcgaagccagggatcttctctgcccagccccggatgatctccatg

SEQ ID NO: 386814 - DNA, 122 bp, Homo sapiens
ctgcgaagcgggggttgccgagtggtaaaaaagatgtttgaataaacaggaagtactgtgcggctgaagcacactcgaagagaaaacacactggaacattgccctttgtaggcaacctcagg

SEQ ID NO: 386815 - DNA, 122 bp, Homo sapiens
gactacgtggttctgttagagcaggaaaccaggtcaggcctccccgaggcagtgacaagtcgagatcagattgcaggagaagtcatccaagcaaaggtcagaggaaagaggactccaggcag

SEQ ID NO: 386816 - DNA, 122 bp, Homo sapiens
agcgttgggggacctgtcacacccgagtggggtgaccacgggctcgcgacctgtatgaggcgagactccagcattctaggggatgaccgcaaaaccaggccctcagcagaggccgcctcctt

SEQ ID NO: 386817 - DNA, 122 bp, Homo sapiens
accgaccaaccttgggacagacaggcgccgtggggacagtggttgtttgggaaacagacacgccttctctggcaccacagcactctcggcctcgcgttgacctccccgcccctatggctagt

SEQ ID NO: 386818 - DNA, 122 bp, Homo sapiens
gaagaacattttaagcactgtagcacctgaatacaatgatcagacatagaaaagcaccaacgtaaacagttacttttattttgagtaaaaatacacattcatatcattttcccttatatccc

SEQ ID NO: 386819 - DNA, 122 bp, Homo sapiens
accataactgggcacttttgttttagtatcttccatttgctcatttctggttttgttgaccgagttacgcttctagaatcttcctaagtaaatgttgctaaaaataacattgttcatttcca

SEQ ID NO: 386820 - DNA, 122 bp, Homo sapiens
tctaattaaaagattcagcatcaggtcttccctgtagacccaccagctgctgcagcaggacgtttgctttgggtaaacatcatccttatttctagtggctccgcagacgccaccaagcagaa

SEQ ID NO: 386821 - DNA, 122 bp, Homo sapiens
taacaagaccccccacaacagctccatcaaccacattgagacggtgctgcagcagctggacgaggcgcagtcgcagatggaggagctcttccaggagcgcaagatcaagctggagctcttcc

SEQ ID NO: 386822 - DNA, 122 bp, Homo sapiens
catccacacaggccaggaccagaaatcccttttcaccttctaccctgggctagctcatcccgattctagaactttccaaggaataagaggctatcccagatccctaagtccaggctggtgtc

SEQ ID NO: 386823 - DNA, 122 bp, Homo sapiens
gccgccgggccccgaccggatcctagcgcaatgacgcgaccccaccgcagggcactgacccggccgacccgagccctgcgcgcaggaccccagctcacagattgagccccgacccgacctca

SEQ ID NO: 386824 - DNA, 122 bp, Homo sapiens
atgtagttgaagaaccaatgttcccagctaacagcctgccaaccaccagatggtgagggacgccatctttgaccatccagtccccataaaaacacccaactactaaagaaccaccagatgac

SEQ ID NO: 386825 - DNA, 122 bp, Homo sapiens
tctgggaagaggccgtgtgtgctgcgtgggtgctcagtgagtgaccacagcagggctccccggccctggcaccagcccctccagggcacaagcgcacccgtgacagggacgttggtgtgtgg

SEQ ID NO: 386826 - DNA, 122 bp, Homo sapiens
tcgcaccgcctccggggaccgcaccccgcatgcagcctccagcccctgcctcttgctgctcgagggcacacgacccaggtcagctgcaacccccgggcggaaatcccgacttttaaatgaat

SEQ ID NO: 386827 - DNA, 122 bp, Homo sapiens
agggggctgggcccgcctccgggaaggagccttaaagaaccagctgcccggtggtgtccgcgcccagtcccccagagtggtcgtgcaggtatacgttagaaattttattctctggaggttgg

SEQ ID NO: 386828 - DNA, 122 bp, Homo sapiens
gatgttccgggattacgccgccatgagaaaacatctccacatccacgggcccagagtccacgtatgtgcagaatgtggcaaagcttttcttgagagctcaaagctgagacgacaccagctgg

SEQ ID NO: 386829 - DNA, 122 bp, Homo sapiens
cccagccctacctcagggggttcattaaagcgcgtacccttttagggcagaggatggtctcgcccctccttagaggccatattgagattcctggggaatccctgtttgtaactgaccaccta

SEQ ID NO: 386830 - DNA, 122 bp, Homo sapiens
ctcctccgaggctcggaactcggccttcggtttccagggccgcttgctgcacctgagtgccggccagcgcctgggcgtccatcttcacactgaggccagggcacgccatgcctggcagctta

SEQ ID NO: 386831 - DNA, 122 bp, Homo sapiens
cctttccttgctacatgggcctctcagtatagcagctcacaacatggtggcttgcttcatcgaaccaagcaagagagccagtctgctagtgagatgaaagttacagccttatgcaatgtaat

SEQ ID NO: 386832 - DNA, 122 bp, Homo sapiens
acttgttctggcctggtgttcagtgcgactgcagtcagtgttgagtggtgccatgtgggccgctctattccaaaggaatcatggattagacccaagggctgagctcctctagggcaggacct

SEQ ID NO: 386833 - DNA, 122 bp, Homo sapiens
ctctttatgaaaacacagatgagaggaatcatgttcctattattaaaggactaactatcccggggtatggtgtggtgatgtgtcccaaagccttgctattcaaagtgtgatcctaagaccag

SEQ ID NO: 386834 - DNA, 122 bp, Homo sapiens
agtccgcggcgccgccgtgccaggctgaagttggcctttgcatcccgagggagcgaaccgcgtttctgcatcaggttcacatcgtggcaggtggtttctgggtttctgtctgttgtctctgc

SEQ ID NO: 386835 - DNA, 122 bp, Homo sapiens
tgagcaaagggctcacgcattcagccaggagatgatactggtccttagccccatctgccacgtgtatttaaccttgaagggttcaccaggtcagggagagtttgggaactgcaataacctgg

SEQ ID NO: 386836 - DNA, 122 bp, Homo sapiens
ggttggttttccgccagatgtgccttacctgggagtgcagcaagagacagtgtctggtcccgacatcagaggccctgtgaggagtagcctgtattcgcgccaggggtgtggtggctgttaca

SEQ ID NO: 386837 - DNA, 122 bp, Homo sapiens
ttggaagacgttagtctccatctctaacgctcccgagacacggttcgcaattaattatgacgtcacagccaatcgtcaacgcgaaagcctgacgctctagccggctctatctcgctgccccg

SEQ ID NO: 386838 - DNA, 122 bp, Homo sapiens
taacagtgaaaagaacaatgcttccaaaacggtcacgtcctcgctttttacacaagtgcgcgtgcgcactgggcgctaggcctctgacgtcaccaagtgcatccgcccctacaagttagcaa

SEQ ID NO: 386839 - DNA, 122 bp, Homo sapiens
tggagaaaaaactgaactattcaactcccgtcttactcctgtctttcccatcaaagcaaacgatttaaaacataaaaggtgaagacaaacagagttaagaggaaatcagcagtcagctaaaa

SEQ ID NO: 386840 - DNA, 122 bp, Homo sapiens
gacaggaagatctgaaagcaaggggtctgcttcatgtagcatgataaacactctttggaccggagtctgaacacttatagatatcagggaggttcacattgctccagttcatactcgcgcgt

SEQ ID NO: 386841 - DNA, 122 bp, Homo sapiens
ctccatgctcaccagcctcgccgaggagagcaagttcctgaacatgatgacctagaggcccgagcgcctggtgctgagtgcacccggaggggtcatcgctgcccagagcctggggattccag

SEQ ID NO: 386842 - DNA, 122 bp, Homo sapiens
agaggcagggaggaatgtaacaggagatggtaatctcatggtgggagagaacctgatctccgagcatcttgagtgctttgaaaattagtgttccttgttttatttaaataatactgcataac

SEQ ID NO: 386843 - DNA, 122 bp, Homo sapiens
gatgagaacagcgaggtgtggcggagcctgtgcgcccgcagcctggcagaagaggctctgcgcacggacatcctgtgcaacctgcccagctacaaggccaaggtgagagagccccgggccac

SEQ ID NO: 386844 - DNA, 122 bp, Homo sapiens
ctgcttacaaggaatgtccactcccggccatcacagcctgtcaccttccgtgtcgtagggcgaagaagcagttgatgggggccacacctccacggtgattttgttcctctccagccacagac

SEQ ID NO: 386845 - DNA, 122 bp, Homo sapiens
gttagaggctgtattttgggtaaattagagaaaggggcactctagttatatatggatgcacgtgacatacctgaaggctaaactgcatcaagtgtggcaggttaatatgccagccaatgttt

SEQ ID NO: 386846 - DNA, 122 bp, Homo sapiens
cggaccggcacagggggacggccagacgggatgtcggaagccaagggacgcagaggccggcgggtggcggcgatggagaggacagatccggctcccagaggaggtcgtgagcgcggggcctg

SEQ ID NO: 386847 - DNA, 122 bp, Homo sapiens
tctggggatctgctgggcagatgtcccaagccaggctgcccttcctcatttcccactgtgcggggggcaggggtgggaggtctaatctgtttacagccatttccgtgccatacttttggtta

SEQ ID NO: 386848 - DNA, 122 bp, Homo sapiens
aaaagaaacacttagaaaacaaacccaccttaatggtgacatttaaatcaaatgaacctccgttcattaaattaaacaaacctcagttcttttcatgtacattttaaagtacatttcttctt

SEQ ID NO: 386849 - DNA, 122 bp, Homo sapiens
catcgcacagggtccgtgcctgcaggtcttcttgcggggaggacacggggttggggggggcggccacatcttgtggggaggactcggggtggggggcggccgcgcaggctcccacagcctta

SEQ ID NO: 386850 - DNA, 122 bp, Homo sapiens
gggggcgggggatgggagaggaaaaaatgaaaaaagtgaagaggggaagcgcccttgtttcgctttgtgatcattctgccttgcagccccaggctaatttcagaagcttaaacactgcggta

SEQ ID NO: 386851 - DNA, 122 bp, Homo sapiens
ggtttggccctgtaggtaagagcgagatctgaagagggtggggccgggggcacatgcgctcggttccctgctggcccaagtggtcccggaacagtggctgaaccagcggatctagtgaggga

SEQ ID NO: 386852 - DNA, 122 bp, Homo sapiens
ccctgagccccgagatcttggctgagaaagcaaagcgtgatgaccgtggggaccagagctcggactggtaccggccggaaaggccccgacgaacttaccgtacagggcagcctcccatagtc

SEQ ID NO: 386853 - DNA, 122 bp, Homo sapiens
gctaaagaagtaaattggtcacatctggaagggtctaatcttttggcacgttaagggattcgagatttttctgcaagtaataggacgcaatgggattccagagagacaccatgtgatggtat

SEQ ID NO: 386854 - DNA, 122 bp, Homo sapiens
cgccctcgctgcgcatgctcgggggaggcggattccgggtccggagttggaggctttgggcggccgcggcgtagcgcgcggtgccggggccggcggggaggcgcgcgcttagggcgcggcgc

SEQ ID NO: 386855 - DNA, 122 bp, Homo sapiens
gggccacgtggtagccgatgccaagggctgcctgcagctgtgcctggaggaggtggccaacgggctgcgcaaccccgtggccatggtccatgccagggatggcacccaccgcttcttcgtgg

SEQ ID NO: 386856 - DNA, 122 bp, Homo sapiens
cctacccccaccccaggaataaatcagggctgcagttaaacagatcaacaaaagcaaacacgcacagcctcctgcggtgccacagttctcacggcgactttctcccggtgtagaccgctgtg

SEQ ID NO: 386857 - DNA, 122 bp, Homo sapiens
gttagattattttactattttttaaagttttagtaataaggggctttggcttccttgctacggggatctagaatattgatgttatgtatgaatgtgggtgatatgatgaaaatattaccaat

SEQ ID NO: 386858 - DNA, 122 bp, Homo sapiens
agtgaaagtgatcactctccagacataggagggaagttgaggctggggcacaggaagtctcgatgggaactaaggccacttcctgggcgctctaggaagcttctctcggtggttgtctccga

SEQ ID NO: 386859 - DNA, 122 bp, Homo sapiens
ctctcccatgagagaagtgttattttcttgtctcagataaggaagttgaggcctcccatgcgtggattttccttgtcagtgacagattttttcctggagtaatctatataactttttagtag

SEQ ID NO: 386860 - DNA, 122 bp, Homo sapiens
ggccgtgttacgacgggaagattaggtgttccctgcacctctgtcccagcactttaatgtcgccgcattgtctttgtcttttttcgagcagagttttacaagttcctggcccgaaaaccccc

SEQ ID NO: 386861 - DNA, 122 bp, Homo sapiens
gaggcaagctggaatggggcccctagtgttcactgacacagcaaacgtagggtcagcaaacgacagggtggagcagagaggacagacatgtgtttattttctgtagctaaaggacttgacaa

SEQ ID NO: 386862 - DNA, 122 bp, Homo sapiens
tgtgcgactgtgagtgtgccagtgcgtgcgcaagccccgagacaatgcgtgtctccagttcgcgctgcggacactgatcatgctgcattaaggaaaaaaaaagagagagagagagaaaatta

SEQ ID NO: 386863 - DNA, 122 bp, Homo sapiens
attgctctcgttgctcccactcactttgttctatgctgttctcccaatataccaggcacgcgtctgcctcagagccaccgggcacgcgtccgcctcagaaacaccgggcacgcgcccgcctc

SEQ ID NO: 386864 - DNA, 122 bp, Homo sapiens
ccttattctcaggcatgctcttccttcattgcctggcaagcactctgtaggcagactgaccgcatttaaaccctggatctattacttactggtagtgtgatttgtgaaagtgaacctgtaga

SEQ ID NO: 386865 - DNA, 122 bp, Homo sapiens
cggaagttgagtggggccgcggggcctgctgggaggtgttgtcctcggaaacgtcgctggcgcggagggatggttcggcgctttaggcgtctgtcacagacctatctgcgggtcgccttcac

SEQ ID NO: 386866 - DNA, 122 bp, Homo sapiens
tctgcttgaagttctccaatagctttccactgtgctttcagttctcttctgtgtctccatcgtgaccacacaaaccctttgtgatctggccctgcctgcctttcctcctcactcacagcaca

SEQ ID NO: 386867 - DNA, 122 bp, Homo sapiens
tggacctttgctcttgctagtccttctgccagagttgtctgcctttaacatttgcttggccgccttttcctcatcattcagatctcagccaaggtgtcatcactggagagatgtctttcttg

SEQ ID NO: 386868 - DNA, 122 bp, Homo sapiens
aattgcaaggcagcgaacctgaccgtgacgagccaatcagatcctgaggaaagttgaccgcgatagagtccttcgtcgcccaatcgtcgtctgtgtcccgcctcttcagtgacgcgaggcag

SEQ ID NO: 386869 - DNA, 122 bp, Homo sapiens
caggtccgtagggaccaaagaaggggcgggaggaagactgtcacgtggcgccggagttcacgtgactcgtacacatgacttccagtccccgggcgcctcctggagagcaaggacgcggggga

SEQ ID NO: 386870 - DNA, 122 bp, Homo sapiens
acccgtttcttaaaactagtgatgaactcatgctctgttctgttttctcaaagctgaagtcggctaggtttgcaaagctgtgggctgagcactcaggcaatcacactctcagaaactgcggc

SEQ ID NO: 386871 - DNA, 122 bp, Homo sapiens
tgctgacttccatccctccggatccggcagggtgtccattgtgctcctgatccagcgaggcgcccattgccgctcccgatcgggctaaaggcttgccgttgtgcctgcacggctaagtgccc

SEQ ID NO: 386872 - DNA, 122 bp, Homo sapiens
gtctcgacgtctctaatcgccggcatgcgtttctctgtttgcctctgcagccgtgcagcacgagcgggggcctcggacgtccaccatccgcaagcaagtggccctctacttccgtggacaca

SEQ ID NO: 386873 - DNA, 122 bp, Homo sapiens
aggagggaagaggggcggggcctaggtcctaggggggccggagtgaaacccaggaggtggcgaccgagccaaagcctgagggcggggcccgtggccaggatagaacctgagcctgggaactt

SEQ ID NO: 386874 - DNA, 122 bp, Homo sapiens
agtctttcttcttgaaagcattgttgatccaaatccaagtgtcaaggtgcgccccagaaacgctgcttcccagacagtcgtgtctggtcttgcgggaaaggaggaggcgtcccgccaaggaa

SEQ ID NO: 386875 - DNA, 122 bp, Homo sapiens
gggaccaggaaaaagcctctcagggtcgcgcgccttcagtgaggatcctaatttacaccccgagtgtggccccgtcaaagactagagcgaaggtcactgaaatgacacaagatcagcgaggc

SEQ ID NO: 386876 - DNA, 122 bp, Homo sapiens
tgggtcatagtttactggcccctgatgtagaaagtaagtaatttttttgggtggggggcacggacagggtcttgctctgagatcaggtgtagtaaccagatctcaactcactgcaacctctg

SEQ ID NO: 386877 - DNA, 122 bp, Homo sapiens
ggtcaacttcctttgtcgtggttgattggtttgtctttatggggggggggtaggggaaagcgaagcagaagtaacatggagtgggtgcagcctccctgtagaacctggttacgagagcttgg

SEQ ID NO: 386878 - DNA, 122 bp, Homo sapiens
ttctctatttagggaagaggtttaagaatgttacaaaagcaacagacgcctgaaacagaacgttacaccccagcatgaagaaagcacccacagagtgtgcttcccccaggggttaagcatag

SEQ ID NO: 386879 - DNA, 122 bp, Homo sapiens
tgtttgtgttagccttaccctgtccctgccccaccttggttccccttgtctatggagccccgccttgtgagccaggaagcagcgtctcatcaggacagaaggtaggatgaagacatggggta

SEQ ID NO: 386880 - DNA, 122 bp, Homo sapiens
aatcaaaaaacatttcttgagagctagcttacacaaaatcctgatttcatcacatcacaccgcatggccctacagtgatggagcgtgccaccgtgcagccaatcctcatgctgtcaaatctc

SEQ ID NO: 386881 - DNA, 122 bp, Homo sapiens
cgactccggaaaaatctctaacgttgaccgtcgagtgtccatctggcgctagagtgaaatcgatgtgcatggaaaatggaaaaatgacctctccggggacagtccctggcgtttgtagccct

SEQ ID NO: 386882 - DNA, 122 bp, Homo sapiens
agagctgggggcccagagtccgctcccgtgccgcgcggcgagtcgcttacatgcccaggtcgctgtaggtgttgaagaactccatctgattgcacgcctgaatccagcccaccacccaggtc

SEQ ID NO: 386883 - DNA, 122 bp, Homo sapiens
acctggcgtggcaacgggactcttcaacgctgcgatctagaaacgctgctagtcctgggtcgtagtccctctcccctgtctcgcttaaagagaggggttcctgggttgcaatacgttggaga

SEQ ID NO: 386884 - DNA, 122 bp, Homo sapiens
gaaaagcaagagagagtgggaccgatcgatagcgcagcggtcggcttggcgccctttcagcgtgcgcagtgaacgtgcgctcggagcggtagattgggcaggattcgcgcctccatttttcc

SEQ ID NO: 386885 - DNA, 122 bp, Homo sapiens
tggagcccgggacattgaaatgaaggcgtcttgcattgcagctccgttgcagcgcagaggcgcaggaaggcagactaccacgagcctcgggctgcggcctcgccctcctggtcgagcctcct

SEQ ID NO: 386886 - DNA, 122 bp, Homo sapiens
ggattacaagcatgcaccacggtgcctgccttgcagatcaattttatggtgcgagggagccgcactggccacccagagcacagtgagcccggaggctgggccggttccagggcgaggagagg

SEQ ID NO: 386887 - DNA, 122 bp, Homo sapiens
agtcatcagaactgaaacagatcccacctggcttgctctcttgggatatttcccttagaccgtagctgccatgttgagaggaagcccaagccacagagaggccatgtgcagatattctggcc

SEQ ID NO: 386888 - DNA, 122 bp, Homo sapiens
aaaactaattctgacaaattctgttcatttttctttcagtgatgtcttttttctttgagacggagtctcgctctgtcgcccaggctggagtgcagtggtgcaatctccactcactccaactt

SEQ ID NO: 386889 - DNA, 122 bp, Homo sapiens
tgcgctcttcctagagcagccgctgcagcagcatcgcttctacgctgtgccctgcgagcgcgcctggcttggtcgctgctgaagtggctgaatcttaggagcagaggactccccacgcagtc

SEQ ID NO: 386890 - DNA, 122 bp, Homo sapiens
ggacacccctgggctaaaggaacttcagtgacagtgctgggttgtcatgtgacgtttgtacgatgccaacagcagagatggtagaagggtgaacgggcgtgagccatcctctccggcacggc

SEQ ID NO: 386891 - DNA, 122 bp, Homo sapiens
agactgccgaagagggcctgccgcaggtcctcttgccgcctccccactccgcctagagagcggcaccacgcggactcgacggccgcgctctgctacagcgccccctatctctgtggaggaca

SEQ ID NO: 386892 - DNA, 122 bp, Homo sapiens
ggaagctctacgaaactctgggaaatagatgggtactatggctgcaaaagaaaatgtagacgaacgaaactctgggaaatagatgggtactatggctgcaaaagaaaatgtagacgaatttg

SEQ ID NO: 386893 - DNA, 122 bp, Homo sapiens
agtctcctggaggactcttctcacccaagacatctgaagctgtcatgaaacaggcagagccgagcagtggggctgcggcaatgagtcatggcaagctcccggaggggatgtgcccggttact

SEQ ID NO: 386894 - DNA, 122 bp, Homo sapiens
cgttcacctcgcacttctcgaagagcatgaagttgggctcgaacccaccaccaggccggacgtacttgagggaattcagaatctcttcgttcttggcgttctcctacaggagagaagggcag

SEQ ID NO: 386895 - DNA, 122 bp, Homo sapiens
tcatcttctaccaaatgttcaataagcatttccgggtctacccactgaagacagaagcatcgaggtgaggattccactcaacagagcattagtcatattgcacatagtagaagatgaagaga

SEQ ID NO: 386896 - DNA, 122 bp, Homo sapiens
tctcaggcccagcagggggcgcgcgagcctcaggagacgccagcggtggttgcggagctgcggtgctggaggccagctgtcactccaacccagctggagattcctgtcgggaatgcttggca

SEQ ID NO: 386897 - DNA, 122 bp, Homo sapiens
agaaaagatcaaattacatttatgtcgtaagcatttattaagtgtttgctgtgtgccggccgctgcgctaagtgctctgaatccagaagcactgaagtcctgagcattggccccgaaggcct

SEQ ID NO: 386898 - DNA, 122 bp, Homo sapiens
tctgcctcagcctcccgagtagctggaactacagaaaatctgcattttttaagcaagcgccgcggaccggttggaaaccacagccgggatttacacgcccctcgtttacgccagcttcacac

SEQ ID NO: 386899 - DNA, 122 bp, Homo sapiens
gagatagtttaaccataaccggttgagactgtctgtctctttccatcccaacttctcttccgtctgagggactcttagttggatgatgtttgggtggctgagggcacttgggggatccagtt

SEQ ID NO: 386900 - DNA, 122 bp, Homo sapiens
gtgggcagagggagaagtcgagttgggatgtgagcccagcgacagccttagtggaccccacgaggagtcgtggagctggaacagccctgcacagttatcccatgctcagccaagatggccag

SEQ ID NO: 386901 - DNA, 122 bp, Homo sapiens
gggccggggaggagggggccactacagagatcagagtccgggggcggcagctgggcaggccgcctagcaggagacctccatggacttgggcccggcgctgttcccagcagcacccgagttgg

SEQ ID NO: 386902 - DNA, 122 bp, Homo sapiens
ctcagcttcactgttttttaatgactgcataatattcccttgtatggatataccacattgcgtttatgtatagaacagctgatgaacattttggttgtgttgactttttaacttttatgcat

SEQ ID NO: 386903 - DNA, 122 bp, Homo sapiens
ctaggggtgtgggggccgagactgaggtgcgggcgcggttgccagaggtgtgtacaaaaccgagacaactcgcaggtcgccattttaattgcggctaccaacacgcccgaggcccacttgct

SEQ ID NO: 386904 - DNA, 122 bp, Homo sapiens
gaaacacaaagagggccagagaaggccaacaaattgcccggaggtggctcagcagttgagcggcagagctaggaccagaggccaactctcttgacccctaatagggttcttggcacagctcc

SEQ ID NO: 386905 - DNA, 122 bp, Homo sapiens
ccctggatcttgtggctgcaatcggttccaaacagcagttaggtcagcagtccgctcagccgaggcagctctgttcatggcgttctcgaagctcttggagcaagccggaggcgtgggcctct

SEQ ID NO: 386906 - DNA, 122 bp, Homo sapiens
atcgtctagctggtgttaggaatgtttgcttaatttccagacttttttttaaaaacacatcgtgggttttttgaggctccaacctgattagtgcatggtcagccctcaatgaaggctgaggc

SEQ ID NO: 386907 - DNA, 122 bp, Homo sapiens
caatccagcacgcagaacacgaaatacaacatcactctttatattaaaaagtgcagaacacgaaatacaacatcactctttatattaaaaagtaaggaggtcctggggttaagtacacaaag

SEQ ID NO: 386908 - DNA, 122 bp, Homo sapiens
gtggcgcctgcctggaggacgaggccagcgccctgcgcctggatgaggacagcgagcacccgcccatgattcttcggactgactgaacttgacctgtgacctctgacccggggagcagagaa

SEQ ID NO: 386909 - DNA, 122 bp, Homo sapiens
gatcacctcctagcctcgtctctgagccttggcagcagagtggggcaatcctcttgccttcgcacgctgggtaacagtcgtgcaagtgtctgtcatggcatcttgtcaccctgtcctgtcac

SEQ ID NO: 386910 - DNA, 122 bp, Homo sapiens
aaaaaaaaaaaaaaaaaaacctgagttttaacttggtgactgttgactccctcctgacagcgaggcggtggtgaaccgagtgtttgacaagctgtccccgctgcacgagcgcatctactgtg

SEQ ID NO: 386911 - DNA, 122 bp, Homo sapiens
gagccgccaggcggccccacccccgcccaagccccccgtcttgtctgaaaccccctcccgcggcccacttcatgctccaaaccctccccaggtggggtgatgcttcaagaggctacaagaaa

SEQ ID NO: 386912 - DNA, 122 bp, Homo sapiens
agaccggggactacacttgggagcatctttccccaactctcgtcaccgcagagaccgcgccgagcccacctgccaaatgttaatacactggaatgccaggggaggggaaaagaaggttgcac

SEQ ID NO: 386913 - DNA, 122 bp, Homo sapiens
tctcagtgattacgagtgagtggggacttcgtgttcctgctagggcgcgggcctgtttcccgcgcgtcagggtagtgggcgtggcctgcgcaggccgttgccacagtgatcgggcagacggg

SEQ ID NO: 386914 - DNA, 122 bp, Homo sapiens
actccattcttagtagtaagctgacacgggaaggctgtgtgctttgtttccatcaggattcgctgcccacctaattctacattcattaaggcttccaggaaaccccatccctagtcactgtc

SEQ ID NO: 386915 - DNA, 122 bp, Homo sapiens
gcactggacattcatgtagtcaccgagagcaagcagcccctgaaacaaagcacaggttcacgtccagggtgggagagagaaacatccacgttttccaaaaagaaagactgtttctcctccga

SEQ ID NO: 386916 - DNA, 122 bp, Homo sapiens
atggtggctacttacaggtgccagcacagcatacggcaacctcaaatgactggtctcaagcgatcctactgcctcagcctctcaagtagctgaaactagagatatctttattcttaatgtaa

SEQ ID NO: 386917 - DNA, 122 bp, Homo sapiens
acaacaacagtgaccaaacagataaacaaatcaagaacttaactctttttacaatagctgcggggaaaaaaaacaacaacaaaacaaaaacaaaaaaaaaaacaacacttaggaatatacct

SEQ ID NO: 386918 - DNA, 122 bp, Homo sapiens
agggatgccctttaaacaatctttctgcttgtgctcacctttaacttcccctcaagggttcgagaacgcttgaagcctgagttcttggtctcagccttgatggcactgatggctcctgactt

SEQ ID NO: 386919 - DNA, 122 bp, Homo sapiens
caggggccgacgggagtggcggccgcgcggaggaggccaagatggcggcagctgcggcttcgcttcgcggggtagtgttgggcccgcggggcgcggggctcccgggcgcgcgtgcccggggt

SEQ ID NO: 386920 - DNA, 122 bp, Homo sapiens
cactgacatgcctcatgacctgggtaaatacaaggcaagtctctgtctaatgattcctttcgtcagagattttataagaaaagaaagctggttttattaaattgtcctcatgtactttatac

SEQ ID NO: 386921 - DNA, 122 bp, Homo sapiens
ggagcagccggcccgccagccccgggcagtgaggggtttagtacctgggccagcagctgccgtgctccatttctcgccgggccttagctgcctccccgcggggcagggctcgggacctgcag

SEQ ID NO: 386922 - DNA, 122 bp, Homo sapiens
cacagtcatggagaggaattgcatgggaacttcaaggtctgtgcgactttgaagtaattgcgctcctctgaaccctggtgttatgggttgcattgccccttccccccaaattcatatgttga

SEQ ID NO: 386923 - DNA, 122 bp, Homo sapiens
gtggtccccacaactaattgaccatggtccctggaagacacagcctaagtcctcacccatcggatcatctggaaattccatccagagaccgactggaaattctctcagtcaagctccaaacc

SEQ ID NO: 386924 - DNA, 122 bp, Homo sapiens
tttcccatataccagaccctggctagacacttaggataaaaacaaatactaggccgggcacggtggctcatgcctgtaatcccagcactttgggaggccgaggcgggcagatcacgaggtta

SEQ ID NO: 386925 - DNA, 122 bp, Homo sapiens
atgaacctacttggctgcgggaggttggccaactgaccgggactgttctacactatgcctcggtggcaaagacctgatgatgtggtcgagctaaaaatgactacaacaggaaatacgtcgct

SEQ ID NO: 386926 - DNA, 122 bp, Homo sapiens
aggaaggaaggcggagcgagggcgggggatgagcccgacttctgtgtctggggacgcggccggggctcagcagcacaaggatgagaaacgaccaccgggcccctctttatgtttacgagcgt

SEQ ID NO: 386927 - DNA, 122 bp, Homo sapiens
gggagtcagcctccttcagccccaagaggctggcgtgctagccctgaggcattgtgggttcggggtgaggaatgctggcctcccacggcaggccagggcaggtcgccccgggcctcagctcc

SEQ ID NO: 386928 - DNA, 122 bp, Homo sapiens
gggtcctgggtctccagctgccccagttgaacagggggctgtcccctgcggctctcaaggcgttccggggctgtgagtcatcgggaatgtctgttctgactgcggcttccctctcctgacgt

SEQ ID NO: 386929 - DNA, 122 bp, Homo sapiens
tacctgtccaggggtccaggccctgcctgtgccctgagttagaacccagggccggccaggcgcggtggctcacgcctgtaatcccagcactttgggaggccgaggcgggcagatcacaaggt

SEQ ID NO: 386930 - DNA, 122 bp, Homo sapiens
attgagttattaaaagatttggtttccttgggcctataaatcaataaacagtaggattaacgcaatagtttgccttttaagtcaagggagacgtttaaggcaagcccctttgagctttgttt

SEQ ID NO: 386931 - DNA, 122 bp, Homo sapiens
ccacacggacgaagctgagcacggaagcgccgcctcaccgcgccaggcagaaagctagcccggcacagcccaaaccctcgcgtgtgtaggactcccccaaggctctgtgaaaggcaggctct

SEQ ID NO: 386932 - DNA, 122 bp, Homo sapiens
ctgaggaaggtgcctggagagaccatttaggagcccatccttttcacatgatgagactttcggagagcaagctactctatcaggattaaacaactaggtagaaacacatctgtgcccagaac

SEQ ID NO: 386933 - DNA, 122 bp, Homo sapiens
aagcgcggctcctccacccgcttccgtggaatggaatggtttttctctgcaggtttacaccggggtcactcgagagctgctgcggcctccttatgggcaggacccccgtatggggagaacga

SEQ ID NO: 386934 - DNA, 122 bp, Homo sapiens
tggataaatggggagtcagccgtgacagctgccgcttgcaagtgtcttcattgtgccagtcgctcctcacacatcctttcatttaatcctcacattatgaggtgtaatgtctttaataagct

SEQ ID NO: 386935 - DNA, 122 bp, Homo sapiens
gctcggaaacgccccagggcgcttgcgcgtgggaggcgcgcgccctccccatagactccccggtaggagttcttttaacagcgcatgcgtgcagtgttgcctcgcccaaagaagactacaat

SEQ ID NO: 386936 - DNA, 122 bp, Homo sapiens
tgcttgacacagggttgccataaaccttcaatttgcaaaactggcaatatctaacaagtgcgagaaagtgaagcacaataaaacaaggtgtgcctatagaggtgtccttttggctattgggt

SEQ ID NO: 386937 - DNA, 122 bp, Homo sapiens
tataatcatcttgataactgtatcgtgaattctccaactgtgttcttcgccggaagtccacggaacaccaaccacgaccttcggaatttccctccggaagatgaaggcactgtagttatgcg

SEQ ID NO: 386938 - DNA, 122 bp, Homo sapiens
ggcgggtcccttgccccgctagggagactgagaggaccgcgaagaggtggggtcgtagcgcggagggacccctgctccaggagctgccaactttatcgtgcatcgcagtcgcctgaaaggct

SEQ ID NO: 386939 - DNA, 122 bp, Homo sapiens
tagcaatcagcgagactccgtgggcgtaggtcccctcgagccaggtgcgggatataatctcgtggtgcgccgttttttaagcccgtcggaaaagtgcagtattcgggtgggagtgacccgat

SEQ ID NO: 386940 - DNA, 122 bp, Homo sapiens
gaaaatctatcagcttgtcactacttgtcctcattctaccatctcaagatgctttgagctcgaatctagaaatttttttgactggctgtcttccggactcaaaaactgagtttatggattgc

SEQ ID NO: 386941 - DNA, 122 bp, Homo sapiens
gctttccagagaagaagcaaccctttggggtctgagagctccctgctgggggcttcgggacggtgggtagtatatattctctgcacacatgtgcccggaagacagacgaggccatcagaatg

SEQ ID NO: 386942 - DNA, 122 bp, Homo sapiens
ctggcttccccgggcagcttttatggagcaactcaacgccaaacacttgatgtcatcgtgcggggagggggtgggggaggagaacgccctgcccaccggagggctggcgccccagatcctag

SEQ ID NO: 386943 - DNA, 122 bp, Homo sapiens
agagaccagcaactaagtgagaatatgattcttctatgcacatctggctgacatgattgtcgtgctcacacatgaacagggcctaggaatgaggtactaaatctcacacataaaaagcagtc

SEQ ID NO: 386944 - DNA, 122 bp, Homo sapiens
gtcaggtaaggtctggatttctctctgacagctctggccgtgacgcagtggccacgataccgggttgctgctcaacggggttcggaagtgtgacgcattctttgcggccatgtgtgtgtgtg

SEQ ID NO: 386945 - DNA, 122 bp, Homo sapiens
taggtcttcaacaaatgtttactttttgatgcatctctagagtgtgatgttggtaacacccggattccagtatatggcttacttgatgggtatggaaaaggatagcagacttattacagaca

SEQ ID NO: 386946 - DNA, 122 bp, Homo sapiens
gaaaaaacgaaaacagctcagggggaccgtcaccatcttcctcttttgactgccattacccggagtgtcgccgtccccccaccctgcgggcggttcgcagatgtttcccgcactggacggtc

SEQ ID NO: 386947 - DNA, 122 bp, Homo sapiens
gggggcggggctcttggctgagtcctgggctcctgctctcaggctccagtacagcagagacgtccggaaattgctcctgagcatcaacgtgacgaacacccggacctcggagcgctccgggg

SEQ ID NO: 386948 - DNA, 122 bp, Homo sapiens
gaaacactacgccatccaaaacaccgtcctgtatttgccaggatctgaaattccactatccgtgttttattcctttcacttaaaccatggattctggtttaaatgcaaatacccctgagaga

SEQ ID NO: 386949 - DNA, 122 bp, Homo sapiens
ccagacttctcgcctccactgtgttgattgcggttgccagggcagcggcgcattgctccccgcctcgtcctggtgacgtcacagagcaatgtccaatgggaaagcagctcggtgtcacgcac

SEQ ID NO: 386950 - DNA, 122 bp, Homo sapiens
gatcgaggagagagacaagcggcagcagaggcagcagcggcagaggcagcaccagggctgcggagctgctgggagtgggagtgactcccccacctcgggcccccaccctgtccctgtcctct

SEQ ID NO: 386951 - DNA, 122 bp, Homo sapiens
aagccgaggccgggcatccacactcccgtgattctacggtggcatggctggggcgagtcccgcgctggacattggattccctcgacgccatcgtgccttgcattactgctgcatttaggatg

SEQ ID NO: 386952 - DNA, 122 bp, Homo sapiens
gatttgggatccagggagccctcttcggtgcctgtctgtagcaggcgtagaatgcgtttccggtgccctgtggcgctgatgcccaactgcttcaactcctcgtggcccaggccccgggctgc

SEQ ID NO: 386953 - DNA, 122 bp, Homo sapiens
cagaaataaatcagtgtcttttttcacattgatctgtatgttgacagttggagaagggtacgagaagatctgagggattcacgagaagaccctttactcaggggacaggatgcaaaccatgc

SEQ ID NO: 386954 - DNA, 122 bp, Homo sapiens
ccaccaacccctaaggaacagtggggtgtggggtctccctgagatggagccgaaatctcccgtgtggcttacatccattgccctgaatcttagggctgcagaaacaaaacagcatatgagga

SEQ ID NO: 386955 - DNA, 122 bp, Homo sapiens
aatgtggccccctcctccatgctccatgaggaagaagtggctgccctgcccaacacgggccgtgtggaggaaggaagtgcacccaggttggcagtgtgtcccagtttcctgctgactgtggc

SEQ ID NO: 386956 - DNA, 122 bp, Homo sapiens
caggctctgggctaatcactcccattcctcagcgatggctgctgggtagagtgaggtggacgcaacactgggcaacactggtctgtgctgaggggcctgcctggggctgtggtttcatgtgt

SEQ ID NO: 386957 - DNA, 122 bp, Homo sapiens
aaattggcataaatgaccccaaatcacacctgaaacacactctgtggccactgatggcttcgggcgctctgcgttcgggaggcctggaaagtcccagctgcgaacatctccgcggccccgtg

SEQ ID NO: 386958 - DNA, 122 bp, Homo sapiens
cccctgcatcctgggaatcgtagtcccaatcctgctctggaactagcagtgcggcctgctcgggccagctccgcctctatctggcgccagcctaaaggtcccgcttctaatcccatcatctc

SEQ ID NO: 386959 - DNA, 122 bp, Homo sapiens
ccacttctgggcatgaaccctaaggaaactctcacacacgccagaagacgtgcacagagacgttcccggcagcactgtttactgtaacaaaaaactggaaatacccgaagtccaccatcacg

SEQ ID NO: 386960 - DNA, 122 bp, Homo sapiens
gtgcgcgcggctccggccccgagcgcgctgtccaggctggatccccaccaggcggcgctgcgcccctccgagcccgcccggccgcgctctgcaaaccgatgctgtttaattaacgtgcaaat

SEQ ID NO: 386961 - DNA, 122 bp, Homo sapiens
ccagcaggccggtgtctgcgagtgattcccggggagagggtcccaggcgggcaggggcgtcgcagggctgacggtgctgctctcccaccagacctgagcgaggagccggtgggaagctccct

SEQ ID NO: 386962 - DNA, 122 bp, Homo sapiens
gttgtccagtgactactctccctcaacaatttagctcatacacgggttgggctcaacacacgcaaacagcttttcaccgagctttgacggaaatgaggctgcgctgaggcggcgctgcggct

SEQ ID NO: 386963 - DNA, 122 bp, Homo sapiens
acctcagcccccggggggacgtgcctgccccgccgtgcacagacctcagcccccaggagacgtgcctgccccgccgtgcacacaccttgtcactgtcatacatgtgcagcaggagccacgtc

SEQ ID NO: 386964 - DNA, 122 bp, Homo sapiens
ctcagatatgcgttcctggggtatcaggggaccacagttctctggggttagctgctcccccgtggggcatgtgggctgcggcctggaacgccccgtttcagtgtctgtttccgccttcgttt

SEQ ID NO: 386965 - DNA, 122 bp, Homo sapiens
agacaccccaacctcccagggtgggagctgggccgggctgggatgtcatctcctgccgggcgggggagggctctgcccctggaagagtcccctgtggggaccaaaataagttccctaacatc

SEQ ID NO: 386966 - DNA, 122 bp, Homo sapiens
gcgcgcaggaggctggggattggccagtgccgaggttgctggggcgacgggtgggtccggcgggtccccgggcggggcggggccggggcgaggggtgccgggtggtttccgcccggcagccc

SEQ ID NO: 386967 - DNA, 122 bp, Homo sapiens
cccaaccggccacggaaggcaggacaccgcgggtgagagcctgcgctgaggctgagtggccggggtctgaacgtcgcccctcggctaagccactcacgtgacttcatctgagtcactctctg

SEQ ID NO: 386968 - DNA, 122 bp, Homo sapiens
gtctccgaaccctctcccactggactagagtgggcagtcgcagctccaagcctggacctgcgtcaccatcaagctataagtctccagtcagcagggaatccaatttttagctttgtaaagtc

SEQ ID NO: 386969 - DNA, 122 bp, Homo sapiens
gagattatctaagtgaggtcttcacatttaatgacattctcaaaacagcagtttgtgaagcgaatcatctagaatgtttatgctttgggaagttcaggaggtcaacagagtaactaagagga

SEQ ID NO: 386970 - DNA, 122 bp, Homo sapiens
cacaggttagcccaaaacatagtgtcaatgaccaaaattgacttcctaaaacagacctaacgaggtagtaacagtggggtgtgtgaggatgcatcagcacacatgatgggaaaacagtgctt

SEQ ID NO: 386971 - DNA, 122 bp, Homo sapiens
ggacaaaagctctgacacctcggtgttttaattagagtaagcaaaggacagacgcgcgtacgtcccaccgcgtcagccctgtgaacatccagaggttccagccagagtacgtccggccggag

SEQ ID NO: 386972 - DNA, 122 bp, Homo sapiens
aaaaaaaagaagaagaagaaaagaaaaagaaagtagagttagggatgggaagggagatgacgaagtcttttgcgaaggaaacataaagccgaggcaaggggctttgttgcagggaggggtct

SEQ ID NO: 386973 - DNA, 122 bp, Homo sapiens
tgtgtgagagtatgaagaggcagatcgtgtcccgggccttctacggctgtgagtgtggggcgcgccgggctgtggcgggctgggggcgggcggccctgggtcccagcctcctgctgcccacc

SEQ ID NO: 386974 - DNA, 122 bp, Homo sapiens
aatttttttatttaattttttaaaatttttttatttaacattttgttgcccgggctggtccggaattcctggcctcgaagctatccaccctcggcctcccaaagcactgggattactggtgt

SEQ ID NO: 386975 - DNA, 122 bp, Homo sapiens
caacaaaagcacagtcatcagacagtcatccgcgatggcagcttgtcagctgatctaacacggagatccgggggaagactcagttttgaaatagatgtgttcagaggagaaatgatgttaac

SEQ ID NO: 386976 - DNA, 122 bp, Homo sapiens
ctgttcccaaaccagtcgcttcgctttcctggacagggaagaaggatgccatcagctttgcggcttcgggttcctagcaagaaagtgcaaaaaccgtcccctgcctcctggtggaagaagag

SEQ ID NO: 386977 - DNA, 122 bp, Homo sapiens
acaaaggtggcgcgatctgatcaaagaacacaagcctcagcgaccagtaagttgtcccaacgccccttgagtacaaaacactaatttcactaactaaaagcatagagtggaggcaacccttg

SEQ ID NO: 386978 - DNA, 122 bp, Homo sapiens
agagggaacggggctggttggaaccggtgggaagcggctgtggcgggacccaggcctccccgcagtcagcttcacaatctgcgcccagagttcttgcccagctcggcctcagtccccttcag

SEQ ID NO: 386979 - DNA, 122 bp, Homo sapiens
gaacttcatagtaatccaccatgttttacgagattgttggaatgggtccgaggacagaagcggccggtggcgggacgcaggggaggcagggtgacggcccgaatctcctcacagctccagga

SEQ ID NO: 386980 - DNA, 122 bp, Homo sapiens
acagcagcaagctcgactttgctaaaattcaaatggtatcatccactgacagaggccacgcgttcgagtagggtgtacgccgggatgtgagtcagaccgagagacgacatgctagtgatgag

SEQ ID NO: 386981 - DNA, 122 bp, Homo sapiens
ttatgcagatcaatcggcctctggttggctggagtagcgctggcaggggcggggccggggcgcggccacagagcgcgcggggcgggggccgaggggagtcgcccagtcccgccgcttcccca

SEQ ID NO: 386982 - DNA, 122 bp, Homo sapiens
ctagcggtttccaagctttttgtttttgtttttaaaaaaactctcaactgtctgcctcagcgttgtcagaactctgtgagatgagggaaatattctacatctgcgttattaaggcagccact

SEQ ID NO: 386983 - DNA, 122 bp, Homo sapiens
tgcatgttggtgaagtgaattactcttcttgccatagagaaaatgggctggctaaagggacgtgtaaagcagagagaagacaagatcagggaaagggcacatttgggatcaaagtgatttga

SEQ ID NO: 386984 - DNA, 122 bp, Homo sapiens
agtagtagaaatacggtgaggccctgagactggcctggtgagcgaggaaaggccgctgggcgcttccactctgcaggccggggctgaaataacccgagttccgttctcacagaaaggtgcgg

SEQ ID NO: 386985 - DNA, 122 bp, Homo sapiens
ggctactcagatcgcggctcccgcccacttccctctcgcccccgcccctctgctcccggccggacctggagttccgcggcagccccacctgccaggccactgagcatgcccagaacggctcc

SEQ ID NO: 386986 - DNA, 122 bp, Homo sapiens
tggtacttccttgtgaatcggggtgggaacccttcagaaccgcgagctcccactttctgtcgatcgctctgctcatgcggccctgagtctcatggttactgtggtctcagtcacagcaagtg

SEQ ID NO: 386987 - DNA, 122 bp, Homo sapiens
gccccctgcgtcccagagactccctcacccaggcaggctccgtcgcggagtcgctgagtccgtgcccttttagttagttctgcagtctagtatggtccccatttgcccttccactccacccc

SEQ ID NO: 386988 - DNA, 122 bp, Homo sapiens
caaagtggagggggcggaggtgtccctggaaccccagtgcctggcctgcctctgcggccccgggggatgagctgtgggtccatccccacagcaggtcctgacgtctgacttcctccctgctc

SEQ ID NO: 386989 - DNA, 122 bp, Homo sapiens
taggccaccacaatgtgaaagaaaccaaaattaactcattatcaaaataatgtaggaggacggaaggaacaggaagagaaggaaaacagtacatttaggaagaaatgcttttaaaatataag

SEQ ID NO: 386990 - DNA, 122 bp, Homo sapiens
tccctctttctcttgtgtacagattgcagggaacttaaagaactcgcagggacagtgtttcgaatgacttaagaaagagaacaggaacaatacttcgttctctttttctcagatgagtacct

SEQ ID NO: 386991 - DNA, 122 bp, Homo sapiens
aaaaacccgaccctgtgctaacaacctccccaggcgctgggaggtgtggggctggtagagcgagtaactgcagctgatgatcacctgctttgaggttctggactagagtgtgggggggtgct

SEQ ID NO: 386992 - DNA, 122 bp, Homo sapiens
cgtcgcctgctgcagggcctggagccgctgctgggagaggaagtgcgttcagttaccaatcgggttattttcataacggctgtctcaggctgcagggaggagggtgacaagggggagggggc

SEQ ID NO: 386993 - DNA, 122 bp, Homo sapiens
accgggtgtggaggtgtgggcggggtggggggtgcggtgtcttccggagccctaagctggcgtcctcagccgctcctttccgttcctaccccccacccccagctcaccacttcgttttcacg

SEQ ID NO: 386994 - DNA, 122 bp, Homo sapiens
ggggtgggggatttcacttccgggacggtgttccggcccattccggcccatttccacccccggaggtaggtgctgctccttgactggactcgggccccacaccccagtgccacttccctgca

SEQ ID NO: 386995 - DNA, 122 bp, Homo sapiens
agcagccaggacactaggcctttctccatctcaactccaaccttgattcttagatcctctcgagaccacttcagccctacccgaaagccccacagccctcccctaaaactccctcttcacaa

SEQ ID NO: 386996 - DNA, 122 bp, Homo sapiens
cgcaaggtctcaatggcagctacaacaggacctcaggctctttgctcaagcactctgagccgccgctcccctatccgtaaaatgggtcacacggcagcgtacatacacccgcgcgaggatca

SEQ ID NO: 386997 - DNA, 122 bp, Homo sapiens
ctctctgcacttgcggtggtggtctggcgagccccaggtggggactggcctctgctccctcgcctggggaggagacaaagtgggagtggtccccaagttttgcgtgaagtggggtggggtgg

SEQ ID NO: 386998 - DNA, 122 bp, Homo sapiens
ttcatcgcgctccactcagcacagtgagatcgcctcttctgttactcggtctccagggggcgggacctggagccgtatccaatcagggccatggggtggggtcgtgagaactgtggatcagg

SEQ ID NO: 386999 - DNA, 122 bp, Homo sapiens
cgttgagctcatcaaacacccaatgagaagtcttacaacatcagaagctgtctgccaatgcgcctgcgacagcttatagaaactgctgccgcctcgaatcaacctctctccccaggcattgc

SEQ ID NO: 387000 - DNA, 122 bp, Homo sapiens
ggcaggcgacaggtgacaggtgatcacgccccctcaacgccgccggggcccacaaggccccgctccctatgagttcagtcctgccccagtgatgaccccggcctcacggtcccgcgcccccc

SEQ ID NO: 387001 - DNA, 122 bp, Homo sapiens
ttgacatcagagctgccatgtgtggctcctgggtgcctggaatgtgcttggtctgaaccgcgatatgctagaaaggtaaaacacagagttattttcaaaaatttagttgcaaatatttatat

SEQ ID NO: 387002 - DNA, 122 bp, Homo sapiens
gcggggcttctgaggggcggggggactccagcccgcgggcacagagatgtggaaacctcacgaagcctagaagggccggagggacaggctgggagttagctgggagttgctgacgcagttcc

SEQ ID NO: 387003 - DNA, 122 bp, Homo sapiens
cgaggcaggtggatcacgagattaagagatcgagaccatcccggccaacatggtgaaacccgtctctactaaaaatacaaaaattagctgggcatggtggcgcacacctgtaatcccagcta

SEQ ID NO: 387004 - DNA, 122 bp, Homo sapiens
tctcaccccaccacgtgaagggtccgagctctcacccaccatgcggctgtgatgtgggcccggatcacctggctgagcgggaggtgtcaggtttttccacggacaggttattctttccccct

SEQ ID NO: 387005 - DNA, 122 bp, Homo sapiens
cttctcgctgtgccatgatctcgactgggtcagtgccaggagttcgggacaatagttttccgcctctagccagccctcagcttttcccaggaaaggtggaactggctccaggcacaccaatg

SEQ ID NO: 387006 - DNA, 122 bp, Homo sapiens
ttgtgtcccctggggttttaaaaggaaaggctcccattgaaagaaattgcagggccgtctcgcatagatgggtaatagaaggttgactgattgcgaatcagatgtattcggttgcaaatatg

SEQ ID NO: 387007 - DNA, 122 bp, Homo sapiens
cgtagtgctgctcatggcatccttgcccccagagcagtacttgtatgtgatactgccccccgtgggccctcccgccgcactcctgcacagagcgaacagtcacctgctggaggtccccgctg

SEQ ID NO: 387008 - DNA, 122 bp, Homo sapiens
ggaaagataaaacagctccttattcctgaagcaaagcagagctgtgggctaaacccagcccgaacatctaggaagaggcaggaatgccagtgaaggccgcaccctcaagctcagcttcccag

SEQ ID NO: 387009 - DNA, 122 bp, Homo sapiens
gcaaaatcaagtccatcgaagccaaaagatgcacagtggccacgtctctcctgcctgccacggattttacatgcctggtgaccccggagcagcagaggctataaatttttttacacgtggcc

SEQ ID NO: 387010 - DNA, 122 bp, Homo sapiens
aagtggcaagagcatgatccagccccatcatacatattcataagaggcaacctgagcttccgtgtaaaaccacagtgtgactgtatttcctgcacacactttgcatcccacacagcccggac

SEQ ID NO: 387011 - DNA, 122 bp, Homo sapiens
ataaacaaaagcctttcaaaaacttgttgattgcacagattgaaaagagattctcttcatcgtggactccatgatgctgagtaatgactcaccataaactaaagcttttactacacttactg

SEQ ID NO: 387012 - DNA, 122 bp, Homo sapiens
ataagcgcttcaaatgcgctacaaactggcgcttcagatgcgctacaagcacgcttcacgcgggcgacaaactgatgggagctacaactggcgcttcattgcgctataaactgatgggcgct

SEQ ID NO: 387013 - DNA, 122 bp, Homo sapiens
ctttttatgattgttgaagtggctctgaaaagagcctttgtttttatgcgcttttcaactcggtctttacttagtcttgtggtggctctcagttttctttggcagcagcacggcctggatgt

SEQ ID NO: 387014 - DNA, 122 bp, Homo sapiens
agccttatgagatagagctacacaaataagagccaggagagttttcaggcccagaatggccgtatttacaatggtgaaaacccagtatattacaaataatgtaaaaagacatacaccatgca

SEQ ID NO: 387015 - DNA, 122 bp, Homo sapiens
ctccccagctctcacctccccagacccggcagggttgccgggacgacggctcaggccttccggaggttgccacagagccaggagcccagggctgccccagcccacgcccggctgctcgtccc

SEQ ID NO: 387016 - DNA, 122 bp, Homo sapiens
ttcaaatgaccagaaaggtacgcttgaccaaatgtcaaagctctcagccctatgaggtcacgattttggagtgtgataaagtgcaatgacctgggtggcacgttgctggaggctgcacatgt

SEQ ID NO: 387017 - DNA, 122 bp, Homo sapiens
ccttaggtgatctgcccactttgtcctcccaaagtcctgggatcacatgcgtgagccaaccgcacccggcccaaagtcccttttgccatgtaaggcaacacagtctggggattaggccatag

SEQ ID NO: 387018 - DNA, 122 bp, Homo sapiens
cgggagtaaaaccctgtctaaaaaaaagaaaaatatactgcagataattttgatgaggagcgggagagtgtatatttcatgtgagttactcacactaatgtagtttcatgttcttttgtttc

SEQ ID NO: 387019 - DNA, 122 bp, Homo sapiens
cttttcctcctcctcccccgcctcccctcctcctcccctgcacctgctgctcctcctccacgcgcccctcatccaaagaaagactcagtccctgcgcccccaggagcgtggggaaggggagg

SEQ ID NO: 387020 - DNA, 122 bp, Homo sapiens
tatctactgttactgaagttatctcagttactacaacctagtaaaaactagaaccggtagcgaaaaatcttctcatcaaacatgtggccctactgagaaattcttccaaacgttctggccag

SEQ ID NO: 387021 - DNA, 122 bp, Homo sapiens
atcctcagtattttttaatccaacagctactaagaaatactaatactaatggtgctatgccgcctacggctgctctccaggtcaaagcagctccactgaggccagaatcaaaattggcaaag

SEQ ID NO: 387022 - DNA, 122 bp, Homo sapiens
acactctaaagcgtgtattcacatctcaggctcatgtggctggagaagcacattcagtggcgtggtgtaactgcacgtatttcacagacacaccacttatttgttatgtgaactgcagaggg

SEQ ID NO: 387023 - DNA, 122 bp, Homo sapiens
tccttagagcgtttcccaaagtgtattctgcggaactagcacctactgtgttctcaacaccgtgccacctatagaaggtaggatttgaaaaagcttttgacttacaggaaggggtgggcttg

SEQ ID NO: 387024 - DNA, 122 bp, Homo sapiens
gcctctcatcccgccccaagcaggttgacgccacggtacctgcaagccctgccatggcgccgccgccactgtcgccgtctgccgcagcctgcctccacctcagctcgccaccgacgccgcag

SEQ ID NO: 387025 - DNA, 122 bp, Homo sapiens
attgttttggcactggttctgaagcaggcataattggcaaattattataatactgctgcccgaaaatccccatttgcctcaagatagtggcatttattggcagaagcctctgaaatgtccag

SEQ ID NO: 387026 - DNA, 122 bp, Homo sapiens
aagtggtggagccaacggccagccagacctgtggcagtcccagccccagggtgctctccgcggtcggccatttatcggtgaagcaacagccccttgacgtcaagcttgacgcattggagata

SEQ ID NO: 387027 - DNA, 122 bp, Homo sapiens
ggggctgcccctttgcacacagatctcctccttgcaggaggaggtgtggctggcccagggcggtgtggggacacagacctgaagaacgtgaagtgcatgacaagctcaggcagtcctgggga

SEQ ID NO: 387028 - DNA, 122 bp, Homo sapiens
ctccttcttctggggccgactgctctgggagggagggggtcgagtaggctctgttctatgcgaatataaaagagcagggatgatatgtgagtatgggaagtagagacatcactcaccgaaat

SEQ ID NO: 387029 - DNA, 122 bp, Homo sapiens
gagatatatttctgttctattttacatttctgaatttactgaggcttttgcagccagattcgcctcccacagaggaagcaattttccctccatgaaaaattcacagctttacaccacgggca

SEQ ID NO: 387030 - DNA, 122 bp, Homo sapiens
tggggacgcgaagttaaaacccagaaggaagtcctgctgcccagtttcttcctgttaaaccgggaagcgcctcctcctgtaagttctggtacttaggcagatgcccgccttgcccctaccac

SEQ ID NO: 387031 - DNA, 122 bp, Homo sapiens
aggaaataggttagtttcagacaagcctgcttgccggagctcagcagacaccaggccttccgggcaggcctggcccaccgtgggcctcagagctgctgctggggcattcaggtaagcggctg

SEQ ID NO: 387032 - DNA, 122 bp, Homo sapiens
aagccactcactgcagggtgactgtgtgggttcccggcattggtcgctcaatctccaggtcgcgccggctgcaggaaacaaatgcatcattagcatgaggacccctcccctggagaaatctc

SEQ ID NO: 387033 - DNA, 122 bp, Homo sapiens
tgagagaatcaagaggaaggtgtttttcactaggactcgcggtgggccccacctgcctaccgtggccggccgggagctattacagcagggtctgcccgtccgacgacggcggctccaatctg

SEQ ID NO: 387034 - DNA, 122 bp, Homo sapiens
ccacgtctgggtccggcacctgagcacaggctgagagggccttccacgggtgacaccttccggaaaccctttgatgacaggaaacagccagtgtctttagaatgaatgagtcagcttctaag

SEQ ID NO: 387035 - DNA, 122 bp, Homo sapiens
ggtcttccaggcttgggctcagcacgcgagcacagggagcgggggtgccggcggcggaggcgcgtacggcccgagcagcccccagcccccagcgcgcacacttgggccaggggcgcgaggag

SEQ ID NO: 387036 - DNA, 122 bp, Homo sapiens
tcccagccatcctatcatttcacctatatagatgatttttgattcggtggttacttaagccgagaggactgcaggcttccttgtggtcatttcacattggggcagaatctggtacctctctc

SEQ ID NO: 387037 - DNA, 122 bp, Homo sapiens
acttgccctgccctcctgagtcccgggaggaaagtgctcgcccattcctgacctgtgacacgctcactgcgaaggcaggttattagaagagtcccatgaaagtaaacagggtattaaaacgg

SEQ ID NO: 387038 - DNA, 122 bp, Homo sapiens
gcagagaagagtctcagggcggcaacgtccgcgcagcaaagcaggacgaggatgaggatgcggctgacacttgtctggcccgtgaggctgagcatcactggggtcggcctggctcttccccg

SEQ ID NO: 387039 - DNA, 122 bp, Homo sapiens
gtttggcattaccaagtgtccgggcaaggccgcagcctgcagctcaccagccgtgctgctcggcctgtgcacgtcaccggctcttccctagggtagcttttgcttgctttctcccacgtcca

SEQ ID NO: 387040 - DNA, 122 bp, Homo sapiens
acgctctggagagacgctctaggccggcggaggaccacgtctctatggtgtgccgggggccgcgcgggccgggagttgggtgggctgggggacaggcgcgcccgcgccgcccgctccagctg

SEQ ID NO: 387041 - DNA, 122 bp, Homo sapiens
aggtgagagcaggcagtggggagaccaactttgtgccattcctctgagtctcaagcagaccggagctaacttccttagcttgttctacactcctcagaggaaaggcatgcctgcaatgtgag

SEQ ID NO: 387042 - DNA, 122 bp, Homo sapiens
gcgtccagaggagggcggtgggctggagagcgtgggcctggggtgacggaatgctctgtgcggggatcgcaggcccccgagctgcagggggcagcaaagcgcgcccacctgcccgcctgccc

SEQ ID NO: 387043 - DNA, 122 bp, Homo sapiens
cggcagcgacgttcatgtagctctgagcgccgggcggcatcattgggctgtactgcaggccggccatgtcgtagcggtgcatcggcggcagcgcgggcggcggcggcgggctgctcatgctc

SEQ ID NO: 387044 - DNA, 122 bp, Homo sapiens
gcaggagagagggagggcaggagacagtcacttggccttaaatgcgcctcaagaaaaagtcggtccctgcaaaaccgcggcgacttttactcgaaaccagaggcggctgagctttctcacct

SEQ ID NO: 387045 - DNA, 122 bp, Homo sapiens
cttccttccctccttttgcagacacggacgttttaaacgttctaacagcgtcacggccgccgtccaagctgacctggagctggaggggttcccaggccacatcaccacggaggacaaaggcc

SEQ ID NO: 387046 - DNA, 122 bp, Homo sapiens
ggagggcttggcccggagtccggaaggctgggctctcccatttgcaggaggcgggaaagccgcgtgtgcgcggcctgctaacggccggccttactgcgcccgcagctcgtgctcgggcctgg

SEQ ID NO: 387047 - DNA, 122 bp, Homo sapiens
tggccgtcccctggtcagtttggcaggctggccacgctgaggccatctcctgggctcctgcgccctctgccggccaggaggggacccgcacgcgggacagctcgcggccggaagggcgcgcc

SEQ ID NO: 387048 - DNA, 122 bp, Homo sapiens
cttgctgtttgtctcatctgaccacagttaatggtacatggtttcttccgatatttctgacggtgagcttggcattcaaggatattttatctgtggggatcctacaggatcttggatgaggg

SEQ ID NO: 387049 - DNA, 122 bp, Homo sapiens
aaagaaaagtgaatatctccaaaccaatgagagacctagaagcttatgcgcctgactcaccgcggaggcaggagaggggatggaggtgccatggggagaatgaatgatttggggaaagatga

SEQ ID NO: 387050 - DNA, 122 bp, Homo sapiens
ttgccagatcccagttcttcttttggaggaaatgaagcaaaacctcacacgtccgtaactcgttttccataatgctagcagggtcatttggcaaagcgcaccgaagcaagactctctgcagg

SEQ ID NO: 387051 - DNA, 122 bp, Homo sapiens
acccaccctcctaaacaaaacccaaaaaccaccttagagtgagaagacgcccagccagggcgcagagagagcgctgggcgaagaggggtcgatggcccgcgggaacagggctggggttcctg

SEQ ID NO: 387052 - DNA, 122 bp, Homo sapiens
gcgggccgcggctccggcatggccgggatcattaagaagcagatcctgaaacacctgtcccggtgagagcgccagcgccggcccccggcggtcctgggcccttcctaaccctctccgacctc

SEQ ID NO: 387053 - DNA, 122 bp, Homo sapiens
cacagaaagcccagctcctccttcaatcccttctgagctaggtccagtagcctgaggaagcgagggtcgtcgtactcgaagcggcacccgcaggtgagggaggcgatcacgttgctcgccgc

SEQ ID NO: 387054 - DNA, 122 bp, Homo sapiens
acccaaaagaaagacatttaagcagatattacatttgatactctttaggagaaaagagaacggctgatcaatttctagtctatacagttagaaaagacgcaaataaagcatatttaagtagg

SEQ ID NO: 387055 - DNA, 122 bp, Homo sapiens
ccggcctctcactgacaagccatcccccgcacaccacactcagcgaacgtgctggcagtgcgacttacaaatttgagcatgttccagtcgaacacgtagtcataggagaagccctggcgatg

SEQ ID NO: 387056 - DNA, 122 bp, Homo sapiens
agccattaatatcaggcgcaggagaaaacccagtaaaatcacttaccagtcttccacctccggtgctgatctagcaagagcctgacccgctggccagactcaagctctgcaccaggtattac

SEQ ID NO: 387057 - DNA, 122 bp, Homo sapiens
ggcggggccgacggcggcgctgagtggccgggcggattcgctgggtcagggctgcagagacgcctggcgcacccgcgggagcggagccgtggcgcgctcgccccggacgccggccgcccctc

SEQ ID NO: 387058 - DNA, 122 bp, Homo sapiens
ttccgccggcgccccgcgcttcgtggaagtcacgtggtggctctgaaaccccggagggaacgcgaagcccacccacgcgaggcgacgcccgggggggtggggaccaggggggcgccatgcag

SEQ ID NO: 387059 - DNA, 122 bp, Homo sapiens
caccactgtgctccagcctgggggacagagcgagactccatctcaaaaaaaaaaaggaatcggacgaagaaccacaggatgttgaagacaactgtctgaagtatttgtgagggacagcgatg

SEQ ID NO: 387060 - DNA, 122 bp, Homo sapiens
accaccatgcctggccttctgtattttttaagattcctatctggagagcccccagctctgcggcggcttcacccgcgagtcccaaggcaagcgagcggctgggtcgcccccaccggccccat

SEQ ID NO: 387061 - DNA, 122 bp, Homo sapiens
cggggcggatgaggggacagctgctaagggccgaggctgctgggaagcctcagtagcggccgtgaatacagtggagctccggcgctgcttatttcggcctaactcttggtttcctcatctga

SEQ ID NO: 387062 - DNA, 122 bp, Homo sapiens
ctttgtatacattattgtgatggcaaaaagaagcccttttctgtgagcgggtttggtgtccggctcgacctgggttcctgcaccaccgctgtgtgctcctcctcgagtgaatgtatggctca

SEQ ID NO: 387063 - DNA, 122 bp, Homo sapiens
attttgtatatttactctaaaagaaagtgaatttttttagttcaagacttttagattcatcgttctactttcattgtggctagctcatggccatccacgtagtgaattaataaagctttgtt

SEQ ID NO: 387064 - DNA, 122 bp, Homo sapiens
aagagtctttggttagtgttatagctctgtagtgttagaagctatttattgttacagcctcggtgttacagctcttgcagcctcgagatcagacatttttgctgtctctctccttgtggtat

SEQ ID NO: 387065 - DNA, 122 bp, Homo sapiens
aagccatcgcctgcggagggtgggaccccacagcttgtccacctgcccaggctgagacctcgtgtcctagtcctggatgccccacgggtttctcgtcccgggcagcggcgcacgggaggaga

SEQ ID NO: 387066 - DNA, 122 bp, Homo sapiens
tacatcgagttgtccacctccagcttatagggcttctggaacagagtgggtcttgctcttcgtgattccatgggagaaaatggaattggaggaactagtagaattcagggtaatatccagtc

SEQ ID NO: 387067 - DNA, 122 bp, Homo sapiens
tcagtctatgtgtctcttttaaaaaaattttgtggatacatagtaggtgtttatggggtacgtgaaatgttttgataaaggtatctattagcgtctcttgtgaggaccaaatggaaacacag

SEQ ID NO: 387068 - DNA, 122 bp, Homo sapiens
ctctgtgctgaataaacagaaagcttctgccaaacaagcatccgtgtgtgtgcgcgcgcacgcagtttgctagagcagctaatgcaaatgaatagtttgactctgagaatggagatcacaga

SEQ ID NO: 387069 - DNA, 122 bp, Homo sapiens
gggcctgtgcacgctcgtgctgtgacctgccaggctcaccttcttcctggtaacgggtaacgggggcagcgcccaggatcacccagagctgggccttccaccatttcctccgcgcctgagga

SEQ ID NO: 387070 - DNA, 122 bp, Homo sapiens
cgagacctccggaagcccggaggcctccggatacagctgtgtttgccgggtgacttgcttcgttctcctgcccttcctctgtgcttccagccggttaagcatctccctgcccaaagaatggg

SEQ ID NO: 387071 - DNA, 122 bp, Homo sapiens
tgaggaaagtccaagatgggcatgagcaaagtctcagtgaatgaattaataagacagagacgtgttgtagagacaaccagcaggacctgaatagagctgataggatgtagaatgagtcagat

SEQ ID NO: 387072 - DNA, 122 bp, Homo sapiens
gtgggaggggcaggcgcctcctagcagcctcaagaaatgtgggccaggcaggtctggctacgggcaggagtgtgtctgggactctgaactgccagaagcacttggcggcaagccacatgctg

SEQ ID NO: 387073 - DNA, 122 bp, Homo sapiens
ccggcacgccaggtatttctgaggggcctccgggagcctcctgccctgcccggggctggtcggctccctcgggcctggggcagggctggcgtcttgcaggcttcgtggtccgtgtcacaaag

SEQ ID NO: 387074 - DNA, 122 bp, Homo sapiens
catgcaagtataatagcagtaacaccattcacaggtttgcagagtgggagaagagaaatacgtgagtaaatgaatgctgacttaaactcaggtattctgaagggttcctcctgaaattaaga

SEQ ID NO: 387075 - DNA, 122 bp, Homo sapiens
tccgtgcaatgtcctctagcagcagcaatgtgctcagggtgtcacatcttactcatgtcccgcattcccaaggggtgagcgcagagtagatccaggtagggacctggtgcccaagtgcacca

SEQ ID NO: 387076 - DNA, 122 bp, Homo sapiens
cagtaattagctattttgagtggaaatattttcatttctcttcaaacaaaagcaaaggtacgatgctgttttctatcattttggaataactgcaccctgccttttgtgtttttgtaaactcc

SEQ ID NO: 387077 - DNA, 122 bp, Homo sapiens
ctgagggtcccgccagcgcgtgagttggaagctgaattaccgcgagaagtacagtcttgccgaggagacctctgggaagcgtagtcagagacgtatcaaggccggacaagatggttcccgat

SEQ ID NO: 387078 - DNA, 122 bp, Homo sapiens
ccatcccacgctactgagcctccttcctcagccattgtccagcttcgtgtcaagtcctggcgtggggctcaccgcctgccccttgaccgtggagttcggacgcgtctcacagtgagtgcccc

SEQ ID NO: 387079 - DNA, 122 bp, Homo sapiens
aagcccagcagccccggggcggatggctccggccgcctggctccgcagcgcggccgcgcgcgccctcctgcccccgatgctgctgctgctgctccagccgccgccgctgctggcccgggctc

SEQ ID NO: 387080 - DNA, 122 bp, Homo sapiens
ggagcttcttcagggagtaggggatggaacgtttgtctcctcagtagttatcttagacctcgctgggcagatagtagaaagcattgtgagtatttcaccccatactaaatctgttttcaagc

SEQ ID NO: 387081 - DNA, 122 bp, Homo sapiens
aggaaaccttggacacagttctgggtacttctgcaaaacccttccccggatctaggcggtcgtcaccgacaggaagcgatgtgtgcatcaatataaataagccggtggggcaactagattgc

SEQ ID NO: 387082 - DNA, 122 bp, Homo sapiens
gaacagccacaaacatgagtcccaagcatgaggctcccaaggctggagggcagacacagccgccacccagaaggaaaccacaggcgcggtctccctgaggacctggagggagaggtgggggt

SEQ ID NO: 387083 - DNA, 122 bp, Homo sapiens
gcgtggacctcaggagccttgtcaggcctgaatcaggctctgatttccgagccaggagagcggcgcagcgctgagaggcgacgccagggcgcagcattgtctgcaagatcgcgctgccggag

SEQ ID NO: 387084 - DNA, 122 bp, Homo sapiens
cggctggaacccgagtccaggccacaggcgcccggcgtgggcatcattaattatcaggcacgaaatgttgcaaagaaagcgcaagctattctgctggcagctgatacatatatatatatatc

SEQ ID NO: 387085 - DNA, 122 bp, Homo sapiens
cagctcataaaagcagcgtggacccaaagagtgagcagtagcaagatttatcgcaaagagcgaaagaacaaagcctccacagtgtggaagcccacgcccacccggaactccagctggcccgc

SEQ ID NO: 387086 - DNA, 122 bp, Homo sapiens
cactaggagaaggtccgagaatgttaaggtttgaagagacctaagagcctaaccttccagcggaagcctctgtccctccaggctggggcaaagagggctgaccccaggtggcagcacgcggg

SEQ ID NO: 387087 - DNA, 122 bp, Homo sapiens
gggaactagtcaaaagccggggactgatgggacgctaggatctgcgcgtcccgcccatttcggcctctgactggtgaatgtcttcggcttatggcagaggagcccgcctcattggctctcag

SEQ ID NO: 387088 - DNA, 122 bp, Homo sapiens
aacatgagtttcagccactagggtcccgctcagggtcgggtctgatcacagggaagggtacggggagccaaacaggtaatatcacgggtagcagccaagttcccacccttgtgcctaaaccc

SEQ ID NO: 387089 - DNA, 122 bp, Homo sapiens
taaatttgaaggcaattcctacaagtgttttgttggaattgggattggaggaggcacaaacgtgttttaaatggtttttgtgtgtccttgaggtttcttggctttggcaaagaaaagcctgt

SEQ ID NO: 387090 - DNA, 122 bp, Homo sapiens
ggggctccggttccccgagactgcggccctccctcgttcctccaggttccgctttgcgggcggcttctgatctcttgcggacagctcagattagtggctcgaggccgccgcccccgcagcgc

SEQ ID NO: 387091 - DNA, 122 bp, Homo sapiens
tgctgggtagagccccactgccccgtcacccccacctcagcagtcagactgctcagaagacggctatccggatgttgaccccaggaggactctgaaaggcttcactcagattttgtgtggct

SEQ ID NO: 387092 - DNA, 122 bp, Homo sapiens
tccctgaaacacatgtgcactgagctttaaaaaatgaaagggctaaaagaaccctgttctcgggtattctgcagtttgtggaggaaatgtgtttattttccactagaacctttttgaagtac

SEQ ID NO: 387093 - DNA, 122 bp, Homo sapiens
atagggaagcctgtgtctcctgcccccagggcgcaccctcagtgcaggcacctctgttcccgctttgcccctggaggagccactattccagaaggctccaccctgccgtcctgcgggagcct

SEQ ID NO: 387094 - DNA, 122 bp, Homo sapiens
ggtctccagtcactttccttcctttttttctagacaaatagaacgttgcaggcagaaggacggagtgcgcagagagacagggtctcgaaactgaaacggcaacgtgagcagtatgtctcctg

SEQ ID NO: 387095 - DNA, 122 bp, Homo sapiens
gtggcgggggcgcagggtgggggacccctaagaagtgcacagtgcgcggggccctctttccggcccttggagggaacggggtaccggggatgcagggggtagggctctccctcgggagcgca

SEQ ID NO: 387096 - DNA, 122 bp, Homo sapiens
gaactccccgtttcaagaactccccattccaagaactgctgcaggcagccaagatgggcacggcccctcccatctggagccactcctttggttccactcctctctctccttcccatctgaac

SEQ ID NO: 387097 - DNA, 122 bp, Homo sapiens
atccaggacacctggagatggcgactcctgggacccctggcccttccctcctctggccttcggtccgtgagggtgaattaagtgtgccacccaccaggggcagagacacatggagacagaga

SEQ ID NO: 387098 - DNA, 122 bp, Homo sapiens
ccacagcccctggcattatccctggggcaccacctcctgaccagtctctggacatgaagacggaggccctgttggaagtgggaaggctcccttcctcctccagcccttactgtctgctcagg

SEQ ID NO: 387099 - DNA, 122 bp, Homo sapiens
ttgcaatttggccactggaggtgcctagatgagctctttctccccaaagctgctgagagtcgtgaggcagtttccccatcccactgcagctggaaaatatgtagtaaaccttgacactgcta

SEQ ID NO: 387100 - DNA, 122 bp, Homo sapiens
gattcttagacttgtttctgagaaccctcaattttcaaaaacacccaccattaccaagctcgatatttggggggataattctccaccccaaacactagaaatgaaaataagtagaaaagaac

SEQ ID NO: 387101 - DNA, 122 bp, Homo sapiens
caaacactgccaaaatcttgacaccctaagtggaccagacttcctgctcaccaagaactccgtcaaaaccagggtgtaaaagttaacttgagatgatattcttagtgaatccttgttagtgc

SEQ ID NO: 387102 - DNA, 122 bp, Homo sapiens
ctgtttgaagttgaactttgaggtttttctttaagaatgagcttcgtccttgcctctactcggtcattctccccatttccatccattaccccttagccattgagactaaaggaaatagggaa

SEQ ID NO: 387103 - DNA, 122 bp, Homo sapiens
tggaccgcgaggagcagccccagctcaggttaaccctcacagcgctggatggtgggtcaccgcccagaactgggacttcccaggttctcatagtgattgtagatatcaatgacaacgtccct

SEQ ID NO: 387104 - DNA, 122 bp, Homo sapiens
ggctgagggctggatgcccatccagcctgggagggccacacagggccctggggacacaggcgtcaccccaaggggagaccaatggagggcacagagagggctctgggtctaggctgcagctc

SEQ ID NO: 387105 - DNA, 122 bp, Homo sapiens
aatacagggcttggcctccggggtcttcagatatcagaggcatccaggagcacttggtcacggtctctgaatctctggaacagggaggttatttcagaaggttccagaagaccctgtccaca

SEQ ID NO: 387106 - DNA, 122 bp, Homo sapiens
gagccatatatacattatctcattccagtataaaagaagtgcccccagcaacttcttggacgccaaggaggtttccaaattatttattttacaaactcttactttattcccttttttttcct

SEQ ID NO: 387107 - DNA, 122 bp, Homo sapiens
gaagagcagagatggcttcttaggaaacaatagatctaatacatcctctagttgtcaaaccgatgatgtttctttgcagatctagagtttgtcctggatggtctagccagatctagaaaagc

SEQ ID NO: 387108 - DNA, 122 bp, Homo sapiens
tagagtgacgaggagagcagtggaggcggcagcgggagacaagcctggctctgaagacagcgagccctccagggaagatgcggtcaggggaggttctgaaagatgacacactgcagagcaca

SEQ ID NO: 387109 - DNA, 122 bp, Homo sapiens
ctccgctgtctcctcggaagaagcgggggaactgggaacccgccgggcgccagaggtctgcgaagctgggcttggatgaagtggatctgcggagttgatagttgtatttacacgcgtccgga

SEQ ID NO: 387110 - DNA, 122 bp, Homo sapiens
cgccggacaaaggccaagggaggcgcaggagggcccaggccaggtcaggaggtgggggcccgctcggctgggggccactcgggtgcggcgcggagggcgggggtgtcggaaccgctggtgcc

SEQ ID NO: 387111 - DNA, 122 bp, Homo sapiens
acttcccaatgaatcaggagtcgcggggagagggagtaaaaattaggaggatttccagatcgattcccagacttctgcttcacagaaatgtcaatccgcaggaatcccaaccggagatctca

SEQ ID NO: 387112 - DNA, 122 bp, Homo sapiens
ggaggggcggccccacgacaatgaccgcattgaggctgcgcttggcctcgcgcctctcctcgaacagcccagcgtcctctggaccgtttaaaagaaaacataaagaggactctaccattaag

SEQ ID NO: 387113 - DNA, 122 bp, Homo sapiens
cagaagccttcccatcctggcttttgttcaacctcggtgggcggcaaggtgggggcgggacggagtctgcggggcctgcggggcccgggcctgcgtcaccgtcactggcccgcctcccgccc

SEQ ID NO: 387114 - DNA, 122 bp, Homo sapiens
acactttatgtcatggagcagagtggagcttccttttataccattagctgggcatggtggcgcatgcctgtaatcccagctactctggaggctgaggcaggaaaatcgcttgaacccagcag

SEQ ID NO: 387115 - DNA, 122 bp, Homo sapiens
tgttcttcagcttcgcctttctaacagcaaggacttggctgtctctagacaggagacagacgctgtccaacttattctaaaattctctttcactcttacgctcagacgccctcatgccacag

SEQ ID NO: 387116 - DNA, 122 bp, Homo sapiens
cgcctgtcgtcacttcctcggggggggacgtacataacgtcacttccgggtacaggcaggcggaagagcgtccctctccaattttttttttttttttttttttttttgagccagagtctcgc

SEQ ID NO: 387117 - DNA, 122 bp, Homo sapiens
gtttcgctgcagacatcttcccaaccctgacttttctctttaactgtagtgtgacaactccgtacaatgcagactttgacggggatgagatgaacttgcacctgccacagtctctggagacg

SEQ ID NO: 387118 - DNA, 122 bp, Homo sapiens
aagttagacacatctgggtttgaattataactccagtcacttactggctgaatgacactgcgcatattccttaataactctgcctcagcttcatctttaagatggggataagagcaacttcc

SEQ ID NO: 387119 - DNA, 122 bp, Homo sapiens
ctcaggtgtgggaccccatccttcctgtcttcgcagaggagtcctcgcgtggtgagtatgcggtgaggacgttttttttttaaagatcacgttcattccccgtgcttatcgggagctgcggg

SEQ ID NO: 387120 - DNA, 122 bp, Homo sapiens
catcatcgtcctcctcgtcggccttgtccgcggcagcagtggcggcggcagagggcacggcgccctcgggagctgcggcggcagtcggaccttcgtccttatgctctttcttccacttcatg

SEQ ID NO: 387121 - DNA, 122 bp, Homo sapiens
tgggacgttttgtcattttttatgaacttgcccatatcccactctttggtaccagcaattcggcacccaggttttcccaagagacacgaaaacagatgccctcaaaatctcttgtgagaaga

SEQ ID NO: 387122 - DNA, 122 bp, Homo sapiens
tgcgtttgacagagatgatgcaaacttctacacagaaggggtccccactcacagggttctcgttcagtgcaaacgtggctgcccccttgatgcgggcccccgaaggcactggctcgaggttc

SEQ ID NO: 387123 - DNA, 122 bp, Homo sapiens
ccaggcaagtagacacataaaaaataatcatggcagcacctggccatgaaatgataaaaccgagcttcaaatctagctctgtctgactccaaaacccatatcctttctaccactgtagtgac

SEQ ID NO: 387124 - DNA, 122 bp, Homo sapiens
ccgcagatctcgcgagagtggctgactggctgtgggggttgcggcggcagcaggcggagccggggagggaaagcagcggcggctgaggcgactgaggcggcgggcggagcggcaggcggcgg

SEQ ID NO: 387125 - DNA, 122 bp, Homo sapiens
tcgtctctcagtcccttgacgtacctgtctggtcttcccttcaggtgcactattgacaaccgggtcacccgggtggcctggctaaaccgcagcaccatcctctatgctgggaatgacaagtg

SEQ ID NO: 387126 - DNA, 122 bp, Homo sapiens
gcgcacccctgccggctggaaggctccatcccctctttgctgagacccctcgtcctggctcgctgactttcaggctgtcaggctctgcggggcacttgccggtgaccactgccttgagcaca

SEQ ID NO: 387127 - DNA, 122 bp, Homo sapiens
aaatgcctggcatgtattgtttccacatattctggagcagctcatgggcctagcatttcacggaccatattttgggcagtgctgctacagcagaaaggaaatgggtgacctcttccttgctg

SEQ ID NO: 387128 - DNA, 122 bp, Homo sapiens
actgatgccagcgggaaggccaggcagggcttctgggtggagttcaaggtgcatcctgaccgctgtcaccttcagactctgtcccctggggctggggcaagtgcccgatgggagcgcagggt

SEQ ID NO: 387129 - DNA, 122 bp, Homo sapiens
caaggtcttctgggcaacccaacgaaacataaaaccgtcttcccagcctcgatcagagagcgagcaggagaaagagaagccagaggagagactgggactgtccaggaaataggagacgacca

SEQ ID NO: 387130 - DNA, 122 bp, Homo sapiens
caggcccagcatccttttggcgcctcttcccgacgtttggttgctacgtccgggcctcggcgcccacacaagatttccccggagagaaatgtgtcctgtaccttgttgactcgcacgtccaa

SEQ ID NO: 387131 - DNA, 122 bp, Homo sapiens
gtgcgtgtgaccgcggggagggggcgggcgcgtgtgcggggagcgcgccgcgccaggggccgagtgtgtggggccgatccagaagtgcgcagccccctcacctggcccccgtgtcatccccg

SEQ ID NO: 387132 - DNA, 122 bp, Homo sapiens
ggagagaaagttcagagggtgagggcctgccaaagctgaccagcagcacacaggccaaatcgttctttcgtcattgtcctggtcacttccccacccctgttcgccacccccaaacacctttt

SEQ ID NO: 387133 - DNA, 122 bp, Homo sapiens
aggtggccagttgtgtttacccagccacgccccatgtttcctaccattaaatcctttgttcgtggtgggcaaaccgtctcccatcccccactaccaccttctattcatagccaaggcgtcta

SEQ ID NO: 387134 - DNA, 122 bp, Homo sapiens
ctacatactaggtcctgttaaaaggacttgggaagccaccttgaaaaggcacctttcactcgtgtccgtgtgaagagaccaccaaacatgctttgtgtgagcaacaaggctgtttatttcac

SEQ ID NO: 387135 - DNA, 122 bp, Homo sapiens
tcccatctaggaagtgaggagcgcctcttcccggcctcccatcgtctgagatgtggggagcgcctctgccccgctgccccgtctgggatgtgaggagcgcctctacccggccgcgaccccgt

SEQ ID NO: 387136 - DNA, 122 bp, Homo sapiens
gtgatcagacaaataacagataagcttgagcaagagcatccggatagggatgttacacagcgggatctttaattccagtggtatcagcaccctgctctccacagctatgaagagggcttggc

SEQ ID NO: 387137 - DNA, 122 bp, Homo sapiens
tgagaaggacagctacggagagggtgcacataagcgtggtgctggaggacagctttagatcggggtgagaggtagcattctagggagaggaaacggtagaagtaaaggcttgggcaagaatg

SEQ ID NO: 387138 - DNA, 122 bp, Homo sapiens
acctacaggaagaaacggggtatcccgagacccaagcggctagcagagggcggccctggccgctgctgcctgccttcagccccctactcccacgccgtggctccacgtgccaccgaatcgct

SEQ ID NO: 387139 - DNA, 122 bp, Homo sapiens
agagttggggagtggaactgccggaagtgtctgcgcgccgtgagagaaactttcctgctccggccgcggcccggagcctcgccgcccccgcgttccgaacgacgatgcgtccagatgacaac

SEQ ID NO: 387140 - DNA, 122 bp, Homo sapiens
aaatcccacagcgaagaatcaaaagtcagactggatgaggcacacccaggcccgcagacccgccgctctccttcccttcccacatccacccggactctccttccatctcgcgtcctcagcgt

SEQ ID NO: 387141 - DNA, 122 bp, Homo sapiens
aaagagtgctcctgttgatgtaggtttgtgggaattcagaggttcctgtattgaggataacgatggtatgaacgaagctcccatctggggagtttgcttctctgaagtcagaaaactctcat

SEQ ID NO: 387142 - DNA, 122 bp, Homo sapiens
gaaagtccctactttgtaggatcattggggatgtggagtgagattggggtacctaggacgcgatagaggctgtgcccttcttaggtactcattgaatggggcccctggtgtcatctgctcca

SEQ ID NO: 387143 - DNA, 122 bp, Homo sapiens
tttcatccaaaaatctttcttttgacaccccggagccaatagcagaggaagagctggtgccggcctactcagctgtctgctaaagaaattccccaggctctggttgagtgttttggcccata

SEQ ID NO: 387144 - DNA, 122 bp, Homo sapiens
ctcttagccaagccctgagaatacatcaagaacaggtgagggcatgtggacgcaggtgtgcggggggcctcccagcagctgtcccctcttcctgctaatgctgctctgattttcacctttgc

SEQ ID NO: 387145 - DNA, 122 bp, Homo sapiens
gttctgagcccacaggccagctgacagggttttcagaggcgctcccgatcaggctggaagcgagggcctgctcggcggggtgggcccactcgacaggctcctcagtgatgacggtgctgacc

SEQ ID NO: 387146 - DNA, 122 bp, Homo sapiens
cgtccctgttggcgctccaggttcccctccgcaccaactcaccagccgcggcggggagaccgcagctccggggacttctgcttcagcgctgaggtccgctccgtctctcccaacctcgctac

SEQ ID NO: 387147 - DNA, 122 bp, Homo sapiens
ggtggcttacacctctaatcccagcaccgggtggccgaggcgggtggatcagctggggtccggagttcgagaccagcctgaccaacatggagaaaccccgtctctactaaaaatacaaaaaa

SEQ ID NO: 387148 - DNA, 122 bp, Homo sapiens
gccaagggaaccacatggaagttgtgacagctcccagcggcgcgcccctttcgtgtgtgccggtacctcggcttaggagttgcccgctgacaccttgaatgaaggaggtccccttgccagcc

SEQ ID NO: 387149 - DNA, 122 bp, Homo sapiens
aaaagcattactgaagccagatgtggtactgtgtgcctacagtccccactacttgctactcggaaggctgaggtgggaggatcacttgagcccaggggttcaagtccagcctgggcaaaaag

SEQ ID NO: 387150 - DNA, 122 bp, Homo sapiens
ccttcccattctctctcttaaaacaaatgcttgggaagacagatgtgagctgtaagattccgcggctgtgttagaggaggcgccggggcctgggtgcagaacgagtctccaagtgccgcgtg

SEQ ID NO: 387151 - DNA, 122 bp, Homo sapiens
gctccactctcttccttcttccgccgctggggcctcaccacctcttcctcctcaatcacccggtctgcttgaatcaggtcagcttcctctgcgatctctatcagcgaactctcctcctcccc

SEQ ID NO: 387152 - DNA, 122 bp, Homo sapiens
ggtccgggcctggagttcagtgggtgcagcctgcttgcgagctgaggccagacaggggggcgcctacggacgggtaagagtcgtggccttgccattggaggtcaccctgtgtcagcgactgg

SEQ ID NO: 387153 - DNA, 122 bp, Homo sapiens
ccaggattcacggcacccaactgcttcagggtacttcgtagactctgcctcactacatgtcgaaagagttatttgagttctcttctgtttttttttaatttgttgttgttgttactgttttg

SEQ ID NO: 387154 - DNA, 122 bp, Homo sapiens
aatccctactttggggctggatttgggctggtgggtgtgggcacagccctggccctggcccggaagggtgtccaactgggcctggtggcattccggcgccattacatgatcacactggaagt

SEQ ID NO: 387155 - DNA, 122 bp, Homo sapiens
tcccccgtgtgtgacgtcaaaggcaatcccagcccagacacgtgggttggagcagcgtcgcgtttctgggcaattgctcctgagacccaacaggcagcaacggtcccaagggtgagggagtg

SEQ ID NO: 387156 - DNA, 122 bp, Homo sapiens
gtgtcagccagcgcggcagcaagaacgagcacacggggacagaagctcatctgaacctgccggcccgtgtcggtgtccagcgcggaggcgctgtgtccgcagggcacctgcatcctcataag

SEQ ID NO: 387157 - DNA, 122 bp, Homo sapiens
tgtcgggaggggagggagggaggggcagtgtctatgatcagcatgccctctgctggtggccggggtgctcctcgatagcgccagactgcggcagatggtccagtcccccagtgatacatttt

SEQ ID NO: 387158 - DNA, 122 bp, Homo sapiens
ggtgggagggagcccagggcaatgcagcgtgcagcggctcggccctcctggaccccgcagcgcagcgggaaactggggcaagtcagcctggcgcctccagccccgccccttcctcctgcgcc

SEQ ID NO: 387159 - DNA, 122 bp, Homo sapiens
gggaggcaccgggcgccgttagcgccgtggcatcgctgttttgttgttgggtcacgagtgcgcctctgcacgcaggcgccgccgccgcccgggagttgtgtgcagagctgacttttggaggg

SEQ ID NO: 387160 - DNA, 122 bp, Homo sapiens
tttcccctttgcctcctttcagctgccccttcccgaagccgaatatcacctgattttaggcgctggggataaaggagctgtgattgggacctcctggtgtgccaatcaaacacagaaatgaa

SEQ ID NO: 387161 - DNA, 122 bp, Homo sapiens
ctcctctcctccagggacggctgggaaaacagtcctgcgggatgaagacttcaccgcctccgatttgaatttgaaagtaactccttccgtggcatatttcgctgggcagatagaacaaacca

SEQ ID NO: 387162 - DNA, 122 bp, Homo sapiens
aacatgttacttaaacaagactgcagtaaacgtttctttccaagtgagaaaggtctttttcgttctcagacggtttgaaggtgtttgtgccaacgtgacccccggggagatttggaggaagc

SEQ ID NO: 387163 - DNA, 122 bp, Homo sapiens
aatttggcagtttagcatttatgtcactgtgggaggatatcgaacccaagaaactgttgacgcacactagactaggaagaaactatttgctataagcatttggcagatgcactgtaaaccac

SEQ ID NO: 387164 - DNA, 122 bp, Homo sapiens
ggcagcctgaggctcaaggtgtggattcggtgagttcatgtctgtgaagctcccaggacacgctgcacgcagccgtgaggaatgtcagcctgaccgaatccacgggactctcggctcctgga

SEQ ID NO: 387165 - DNA, 122 bp, Homo sapiens
tccgagccgccgccgcgcgcgcgccgcgcactgcagccccaggccccggccccccacccacgtctgcgttgctgccccgcctgggccaggccccaaaggcaaggacaaagcagctgtcaggg

SEQ ID NO: 387166 - DNA, 122 bp, Homo sapiens
cctgcgccccgatagccgctgtcctctttcctagcctggcgttctccgtaaccacagttgcgtttggggtagtctgtctcctgctgttcactgtctgcctctcattagagaagaagatgcac

SEQ ID NO: 387167 - DNA, 122 bp, Homo sapiens
ctccctcctctccacgatggcctcagtcactgggcagtgtctcggagaccaggcgactggcggtgtacacatatgagcctgcagcgtgaccccaggccaggcagcggcagagagcggcggtc

SEQ ID NO: 387168 - DNA, 122 bp, Homo sapiens
agattctcagactcagcccttacccacgagtcggaaacgctgaggctggctctggaaacccgtgttctcctggggtctccaccctgactctgatgcacctgaaatctaagagctgctgctcg

SEQ ID NO: 387169 - DNA, 122 bp, Homo sapiens
aggtgatccccccaccttagccacccaagtagctgagactacaggtgtgctccaccctgccgggctaattttttgttgttgttgttgagtcagggtctcactgtgttgcccggcatattctc

SEQ ID NO: 387170 - DNA, 122 bp, Homo sapiens
cggcgcccggggtctgcgggtaggcaggcggcctggccgcggaggcttccccgagtcctgcgccttcctagagagggaggggctcatatcggctggcacagccaccacgggtaccgaaactt

SEQ ID NO: 387171 - DNA, 122 bp, Homo sapiens
ccgggagtgcagcgggcgcgccccgggccactaggctgtgtccagtggagctcagcctgccgcctgccaccttcttcgccgcgccggcaaagcctcagccgaattccctaggactggactcg

SEQ ID NO: 387172 - DNA, 122 bp, Homo sapiens
ggctccccgtaccccggcatccctgtggaggagctcttcaagctgctgaaggagggccaccgcatggacaagcccgccaactgcacacacgacctgtgagtggcatccctggccctccactg

SEQ ID NO: 387173 - DNA, 122 bp, Homo sapiens
atgctagcggtgctgtcccgcccaaagaaactgagaagccgcagcccaggaacgcaggttcgctaggagacccagagcaactgcaggaccacagagcccgccccgcacctcgtcaccccatc

SEQ ID NO: 387174 - DNA, 122 bp, Homo sapiens
tcaaggccacagagtggatggaatcaaggttcacccccaaagctcacctcctttgcaacccggatccccactcctcaccacctacggcccctcttcccttccatccccgcccagtcacccaa

SEQ ID NO: 387175 - DNA, 122 bp, Homo sapiens
ccatcttgagtgagggcacgctctccttagaggggcggaacagtttttggcaccttatcgcgagcggcagcttatgcaagagtgatttaaaaaagaaaggcaggtccggagccaggggctaa

SEQ ID NO: 387176 - DNA, 122 bp, Homo sapiens
tgatgcaccgcccctgggatgaggccgctgcagaaccagagcagctgtgcttggaggaaccggggcctcaccaccagggctgcagcgtgcccagggccgccactgctggcctcacgagcacc

SEQ ID NO: 387177 - DNA, 122 bp, Homo sapiens
ggtgacactagtccgagtggggcgtggagaccgaccagcacgaagggcggagttccggcccgcacccctccgccgcctgccgcttggtacgtcccgcttccccgccctgcggctcgcggagc

SEQ ID NO: 387178 - DNA, 122 bp, Homo sapiens
gctgtcacttctctgagcatctcgcaaatgttcaacattcaagtggcttccaaagcttcacgattataaattattcattcttttttgttttgtttggttgtttgtttgtttgtttgtttgtt

SEQ ID NO: 387179 - DNA, 122 bp, Homo sapiens
agactgaaaggctttgtaatgtcttctcaacccactattatgtttccctcattaaagaaccggaacattccatttaaattacttaaaacatcctcaggaccatgtgtcattcctatttcatt

SEQ ID NO: 387180 - DNA, 122 bp, Homo sapiens
tctgagctctctaattcattttattggtctttctatctattcctgaagtcaataaacttccgtattgattagtatagcttcatattaactggtagagcaaatccttctactgccacctcttc

SEQ ID NO: 387181 - DNA, 122 bp, Homo sapiens
atgtaaaataaaatatttcctgattttgatttatcgttatatcccaaggaccaagaatggcgccgggtacggagaacactcagcatccttccatttgtggaaggaataaatatttgtgtatc

SEQ ID NO: 387182 - DNA, 122 bp, Homo sapiens
cccttgtgtaatgaatatgcacctgaaactcctaggtctcagagagcctgaaagtgaacacgaccctaaaatatccgagctactgaaaacaatctggtaaaatgtgccactggacacagaag

SEQ ID NO: 387183 - DNA, 122 bp, Homo sapiens
ggtgatagaccaagactgtgactcaaaaaacaaaaacaaacacccttctgaataagcatacgaggcttaagatctttttttttttttttttttgagacaaagtctcgcactgtcacctgggc

SEQ ID NO: 387184 - DNA, 122 bp, Homo sapiens
gcctcacctagagagggctttctgggtcaccctgccttcatcatcagcccaaagcctctccggccctggggagggtctgcatacgatggtcagagccaacttcgccatgccctgtctcttgc

SEQ ID NO: 387185 - DNA, 122 bp, Homo sapiens
ccatggccgcgatcagacgagccgggctctctcagggagcgatgtgcgcccgcgatcagacgaatcgggctttctcaggagtgatgtgcaccagcccacacggactaggcctcacagggctt

SEQ ID NO: 387186 - DNA, 122 bp, Homo sapiens
atacaacgttaaatacaaatgtccctcaggcagggccaggcccccaacacaaggagaaatcgctgcctgaacatgctgcaggcaaaaacctgtcactctttcctcattcagcccagtgtctc

SEQ ID NO: 387187 - DNA, 122 bp, Homo sapiens
ggctgcggactcacaccttttccctccatctggattgcctttcatgttctcttgagttcacgtggaaagtaataatccagagggaagtgcgcatgctggactacagaagagtctgggacaac

SEQ ID NO: 387188 - DNA, 122 bp, Homo sapiens
ggcagcagctgggtctaagagagctgcagcccagggtcacagacctgtgggccccatggccgggaaggcggcagaggagagagggctgccgaaaggggccactccccaggatacctcggtga

SEQ ID NO: 387189 - DNA, 122 bp, Homo sapiens
cggcccacgggctgcagatgctgcggaccattggcgtggggaagtatgagttcaccgacccggggcaccccagaggtaagtcctgctgccacgtgcctccccacgggcctgcgtctgcacct

SEQ ID NO: 387190 - DNA, 122 bp, Homo sapiens
tggcagaggtggagccttaggcaggcctagagactttcccgggtcctccaggccggggaacgccccgctcggaggccgggcttgggcggagactgcgccggggctgctgaaaactagccgag

SEQ ID NO: 387191 - DNA, 122 bp, Homo sapiens
tggcggcctcgcctcctggaaaggccatggtcgctgaggcgacgagcgagggcggggcagcgccgacggggacactcatcccgggagccagagccagcaccgagaggggacggtctacgcgg

SEQ ID NO: 387192 - DNA, 122 bp, Homo sapiens
cttctggtgatcattagtggagaggcctgtgagaggctctggtgtcaatgtccctgaaatcgagggctccaaattggtcatggctctccagatggcccaaacagttccagttcacaaacatt

SEQ ID NO: 387193 - DNA, 122 bp, Homo sapiens
aggggtggccgcatggagtgagtactgtctctggccaccgagcagagccagtgacagcagcgtcctggtaggcaggcaggcgtatcaggtttcagaggatgcggctgggaacgggagtagag

SEQ ID NO: 387194 - DNA, 122 bp, Homo sapiens
gtgctgccccccaccatcaccgaccagatccggctctgggagctggaaagggacagactccggttcactgagggtgagtagcttctggtggccaagtcttggtcattggccagagaaagggc

SEQ ID NO: 387195 - DNA, 122 bp, Homo sapiens
ttcagtactagtacagaaaactcttgtatttcttaaaaacctaagcatgattgttaacctcgatgatatttccctgagggagcccacgtgcttagccagggccagcaaataaagccaaagag

SEQ ID NO: 387196 - DNA, 122 bp, Homo sapiens
cgaagagcggcgtgtgggaaactgcgggaaaatgttgacttaaccccaggagccgcccggcgctggctgctcggctggaggcggcggcggccgagcaggaggacgcgccgagctgcggcgcc

SEQ ID NO: 387197 - DNA, 122 bp, Homo sapiens
gtttttcaccattagcactttgggtaatctctcatttctttttttaatgcaacacacacacgcacacacacgcgcgcacacacacacacacacacacacacacacacacacacacgggttaa

SEQ ID NO: 387198 - DNA, 122 bp, Homo sapiens
acggatgagaagtcctcgggctgctggcagagaatttaccccaggtgcgtggcccagtggcggaggcttgtgggaaattcctggtacccagctgcccaacatctgggacgctgcaacgccca

SEQ ID NO: 387199 - DNA, 122 bp, Homo sapiens
gcctcccaggttcaagaaattctcttgcctcagccttctaagtagccaggcctacaggcgcgtgccaccacacccaactaatttttgtacttgtagtagagacagggtttcaccatgttggc

SEQ ID NO: 387200 - DNA, 122 bp, Homo sapiens
acccagcaagcagcctgatggagaaggtggcaccagacgcagacccctaccgtccaggaccgcaagccctcgccggctctgcgtgcttttaggttttgtctccacctctgcacacccacact

SEQ ID NO: 387201 - DNA, 122 bp, Homo sapiens
acttgcgcaaagacgacgaggaggctgcgaaaagttaagggccggaccgcaggctgtgctcgcttccggaagtggcttctgcgacaacatgcttgcggacctcggcttaatcggaaccatag

SEQ ID NO: 387202 - DNA, 122 bp, Homo sapiens
gggggctgtcccaccactcccatgcccacgctcctccctgcagacaccacatatatcttgcgctagggaatacatggaaatgatagaagcagtaataatcaccaggcaaatacccacaatcc

SEQ ID NO: 387203 - DNA, 122 bp, Homo sapiens
atcctagttttttcttcccagaaaacgtgccacaaagtttgcaagaaagagcttttggggcggagccctggctgcttaggtcctttccattggttctacttggtgaccacgcccacggcccc

SEQ ID NO: 387204 - DNA, 122 bp, Homo sapiens
tgaggtgccgggattgcagacggagtctgggaagtgaggagcgcctcttccaggccatgccgtctaggaagtgaggagcgtctctgcccggccgcccatcgtctgagatgtggagagcgcct

SEQ ID NO: 387205 - DNA, 122 bp, Homo sapiens
acccccggggctcaagctattctcctgcctcaccctcctgagtagataggactacaggcacgtgcggctatgcctagctaattttttaaatcttaagtagagacattgtctcactgtgttgc

SEQ ID NO: 387206 - DNA, 122 bp, Homo sapiens
ccaaagacggaaagctgctggctgcaaccttgctgctggcactgctgtcttgctgcctcacggtggtgtctttctaccaggtggccgccctgcaaggggacctggccagcctccgggcagag

SEQ ID NO: 387207 - DNA, 122 bp, Homo sapiens
acaggtcaatttcatacatggaacacctcgaaagtgggtgacctgatctccaagcccaaccggcttgtgccgcttgccgaattgtaaatctcagcaaaacccaaacacaccggaactccagc

SEQ ID NO: 387208 - DNA, 122 bp, Homo sapiens
tgtgttccttactattataaggagcaaaggatcagtttgaggacaggtaaaataaaaatgcgcttgctgcctagagggagaagtccctgctgaagatagctttgcttgaatgagctcaattg

SEQ ID NO: 387209 - DNA, 122 bp, Homo sapiens
attgaaaatatgacaaaccggctactcaaaattccagcaatggaaaatatgtgctcatagcgctaaaaaagaaaaaaaaaaaaaaggtgtgtctgaagcttctccctgcctatttagaaagc

SEQ ID NO: 387210 - DNA, 122 bp, Homo sapiens
ctctctgggacgcctggccaaatgcggggcggtctctcgcgggccattggcttgggccaccgttccgagtcagctcctaggatttccccaggctttgcggcccctttgtgggtctaggccag

SEQ ID NO: 387211 - DNA, 122 bp, Homo sapiens
gggccctggaagaggccaggcgcaagcagggcctcgctgcagagggcctcctcgatgctgcgtcgcaggttgattggggagggcgggcggaagtccacggtgtaatcgctgcagggagagga

SEQ ID NO: 387212 - DNA, 122 bp, Homo sapiens
gcccctgaggtcgccaactaggatcagcaatggcctgcgccttccgcggagggccatccacgcgtccaaccccataggatgtgcctgtacgaacagcagcaacatgaccccataggctcaga

SEQ ID NO: 387213 - DNA, 122 bp, Homo sapiens
gaacggagccacgagggaagggagcgccgccggcagctgccgggacaccaggataccacgcggccagcaccgaaacgctaggctcgcgctcacaaccgcaatctacactgagtagccgcgcg

SEQ ID NO: 387214 - DNA, 122 bp, Homo sapiens
atcgcaccactgcactccagccaaaataaataaatacataaatgtccaatgctagggcaccgcatttgagcctagctcggacggggcctctgcgacggagtatcctgggcgaccccgtcccc

SEQ ID NO: 387215 - DNA, 122 bp, Homo sapiens
taactaaactaaccatcacaaaatagaaagcagctttgatggattcccggaaagaacacccgactgaagggcgtaaacgtgacgcgagcccatgcgcaccacaggagtgtccgtgggcgcat

SEQ ID NO: 387216 - DNA, 122 bp, Homo sapiens
ggagacaaaatttcaatactgagccaacaaatcacaacagctaaatgcaaagggactccacgacagtttaactcaaagacttactctgaacaaggcaagagtgaacacaaagtaaaaggacc

SEQ ID NO: 387217 - DNA, 122 bp, Homo sapiens
gacttataaatatttgcgtattcaaatgaggcctggctcccgttgctatggcgcccaggccgcaaccccgcggcggccggaagaacagcctggagtaggagacagcgcctggaggtggaggg

SEQ ID NO: 387218 - DNA, 122 bp, Homo sapiens
agaaactagaacccttttcccccaaaaccaggcataacacctaaaaatattgctccaggccgggcgcggtggctcacgcctgtaatcccagcactttaggaggccgaggcgaacggatgacg

SEQ ID NO: 387219 - DNA, 122 bp, Homo sapiens
ctaatatccagaaagtaagagaatgacattactcccaacagcgtaggaaacgtatccccgcgctgtggtatatttcccagtatccaggtggggacaggatcatattacttccaatgtcgcag

SEQ ID NO: 387220 - DNA, 122 bp, Homo sapiens
ttcgtagaatacctgcgcacggcggagacatctgttcacgtgtgtacacatgcacggttacgtgtgtgggggtgtgcatgcgtgtggctgtgtgtagctgcatgtagctgtgtgtgtgtgtg

SEQ ID NO: 387221 - DNA, 122 bp, Homo sapiens
caatttaaccagggacctgcggcagagacaaggcggagacactcccttgcccaggaaagccgccagagtccggcttgtacctggggaagaatccttaagacggtctggcccaacactccttt

SEQ ID NO: 387222 - DNA, 122 bp, Homo sapiens
aagacctgttccctagtcttgattctgctgttggcttactgtgtcaccttgggcaggtctcgtcatctttgatgtctcacagttgcttcatctgttaaacagggagctcagtgtctgtttgt

SEQ ID NO: 387223 - DNA, 122 bp, Homo sapiens
ctggctggttcaggaacacccaggtgtacacgacaaccacccagccccgtcctcacacatcgaatgtgacggtattgagataaatgctaacaattagggacccccccggtgaagagtacaca

SEQ ID NO: 387224 - DNA, 122 bp, Homo sapiens
tgctgagaggcgctgctgggcgtctgggcggaggactcctggttctgggtgctgggagagcgatggggctctcagcggtgggaaggacccgagctgagtctgggacagcagagcgggcagca

SEQ ID NO: 387225 - DNA, 122 bp, Homo sapiens
tccgacatcctgccggttaatgtggctggaccagccaggagggggccggactacaacaaccgttacgcccctcgccaccgcggggcacaccgggaaatggagtctgggctgggcagcttttt

SEQ ID NO: 387226 - DNA, 122 bp, Homo sapiens
ggattacgcctcgcttatctcagccttaaggtttgtttgctgtctgtctcccctagtcaacggtcacaggagggactaggggctgctttgggatggaggaggaaagccgcaggaagcacctt

SEQ ID NO: 387227 - DNA, 122 bp, Homo sapiens
tccgactggccatcagccccaacatgccgagtacagggatcagatcctgtcttgcgtggccggtctcccctaggtcctgaacccagggaagtgcatgtggatctcaatttatctagatggtg

SEQ ID NO: 387228 - DNA, 122 bp, Homo sapiens
ttggatagaaaggaaaataaaagcacaaagataaagccatttgctcacaaaatggcaacccgcatatagcaaagtatatcatccactgtcctgggcagcaaattctgctagttcctgaacag

SEQ ID NO: 387229 - DNA, 122 bp, Homo sapiens
ctgagaaatggggacaattcgtaggggggaccacgccgcactgaggatgaacaagccaggcgtagcaatggagaagttaatgtgaataagacgaaacgcacaacaggaagttgttcccagtt

SEQ ID NO: 387230 - DNA, 122 bp, Homo sapiens
ggagacccaacagcagatcccaggcattgtaaacctctgtgaggggtaggaaaaagccggcgtcctgctgcaggactcccaggctggaatcttgaccctggggtagagaagaggggctagca

SEQ ID NO: 387231 - DNA, 122 bp, Homo sapiens
cttttgtcttatttcaagcagaagttgccgccctaacttccaaatttggggactgaacatcgttcaccgaatacactttgtgatggtgaggatactttggagtccacacacattttaaaagc

SEQ ID NO: 387232 - DNA, 122 bp, Homo sapiens
caaggcaacaaaggatggcagtaatgcgataatgccagagtgcaacgggtgttaagaacccgttgcatttatgtattgtatttagtaaataatcaggctcatccaaattgtgatctcaccac

SEQ ID NO: 387233 - DNA, 122 bp, Homo sapiens
ggcctcaggtccaccctttcctctccctggtcttcatctcaccacccctccctccacacacgcataccctgactcatccctgccacctcacaggccattgttaagctgcaagggaactctga

SEQ ID NO: 387234 - DNA, 122 bp, Homo sapiens
tgcaagcagtcccttctaaggccagcagtctcaggcccgctgtgtcaactcttttctatacgtgcacatacacacagtgacacttccatgagcacaagggatgtccttcactctctagcacc

SEQ ID NO: 387235 - DNA, 122 bp, Homo sapiens
gccgagggaggctgcgtatgcccgcccctctggctgtcggagccgcacctcttcctcttccggcccccgtagcaattaggtttctttgcaggaggtgagattttggtacctctgtcctggcg

SEQ ID NO: 387236 - DNA, 122 bp, Homo sapiens
cccccacgccgcccccacccgttgccaagacgcccagcgtaatggaagccttgagccagccgagcaagcctgccccgcctgggatctcacagatcaggcccccacctctgcccccacagccg

SEQ ID NO: 387237 - DNA, 122 bp, Homo sapiens
tgccccgtctttgctctgcagctccacactccctcagccccgccgagagctcctggctcccgtctccaggttaccccaggtcaccacagccacctctctgcaccagcggcccgctcacgtac

SEQ ID NO: 387238 - DNA, 122 bp, Homo sapiens
atatcaggcgtgttacaccttcacacgcactagggatccaggtaagcccagcggcccgaacgtcattactgactggtgacactgcagtaagtaaaccttttttgccgaacacttcataagca

SEQ ID NO: 387239 - DNA, 122 bp, Homo sapiens
ggaagtggggggacaggagccgacccactgccagttgtgttctgtgcaatcctttgcccacgattaacccttcccacgcccttcatccctcccagtttgtccccctggtgtctccacagtcc

SEQ ID NO: 387240 - DNA, 122 bp, Homo sapiens
agtttgagaccatggctgttacagggatcatgtaaacttgctgtttttgttttttcctgccgggtgttgtatgtgtggtgacttgcggatttatgtttcagtgtactggaaactttccattt

SEQ ID NO: 387241 - DNA, 122 bp, Homo sapiens
gcatgattcccaagagcaatctgaaaactctacgccaagaagagggtcgccccgaaatgacgtcacgagtgcgccttgcaccttttccttgtggctacgctggtcacgtgttagcagaagtc

SEQ ID NO: 387242 - DNA, 122 bp, Homo sapiens
gtggcccgaggccgtcacacagcacctgtgctgagagtgagctgacgtggacggcggcaccgtggccgtggcagaggcaccatccctccaccctcactcatgtagggatgtggggcacacgg

SEQ ID NO: 387243 - DNA, 122 bp, Homo sapiens
tccaaaggagcagggggctgggggcacagtgcccccaaccccaggtgcactccacagagccgcgcatacggccgcaattcagccgacggaagaggtgccagagggtcacatgactcgcgttc

SEQ ID NO: 387244 - DNA, 122 bp, Homo sapiens
agggcggagggcggggcctgatcttcgcgacagccgggagggggcgcctctcccagccctcggccgtgtcccggtctgactcgcccccgtctgctcagcgctatcagcctgcagctggcaca

SEQ ID NO: 387245 - DNA, 122 bp, Homo sapiens
ggcagctggactggctacccaaggacatgagtgccctcttatctccgtcctccttggagccgtggtgtctctgccgtgggccggggtcaatgtgcctccaatgtaaaagtccagatcatgta

SEQ ID NO: 387246 - DNA, 122 bp, Homo sapiens
acacagcagcctgagctgagcaaattcaggtctctgagcctgccctgcaaccatatcctgcgttctaatcgaagacaagtctgagaatttccccagacttcctggtcaaacttcaagcttcc

SEQ ID NO: 387247 - DNA, 122 bp, Homo sapiens
ccaggaaaggttacgctggagcaacatccaccaccaggtggtgccagagtgcagccaggacggggccaacttggctcctggatcaagaactgcaggcgggagcttcaaggctcacccagggc

SEQ ID NO: 387248 - DNA, 122 bp, Homo sapiens
gactctgacgtagtaggtgctcagcgagtatctgttcaatgcataaacacttgaactgaacgtcaggtccttcaatgaccagttatgtgagagaaaaaacagagtaactcagtttaaacagt

SEQ ID NO: 387249 - DNA, 122 bp, Homo sapiens
aatatttgaaggtttatctgttatagcagctggacttacattatccaacacagtcacccacgaccaaagctaggctcccagccaagtaagtgaccccagctgtctgtagcttgctcccctct

SEQ ID NO: 387250 - DNA, 122 bp, Homo sapiens
gaggcaggatcccaggggacccgtcctgcgtgctgacactttaccacgaggcagctgggccgcgtgcggctcttccgacttttcatcatgcttcctgagccagagccatttaaaaaaaaatg

SEQ ID NO: 387251 - DNA, 122 bp, Homo sapiens
tgctatgctgtttagacagaaaactggagagtagttttccctgaagctgctccaaggctccggcttctattcccagttgaatttgcattccaccggcttgattcctcctaaaaggcaccttc

SEQ ID NO: 387252 - DNA, 122 bp, Homo sapiens
ccctcttcctgctccccttcttttgcacagggcatgtttcacatatacaagatgttcttacgtgtcatcccactttagagatgaggaaattgagtctcagggaaggcaaacatcaactttgt

SEQ ID NO: 387253 - DNA, 122 bp, Homo sapiens
tcgctgtttagttagcgagcagctagggtggagtcggcctcaaaggttccgctctcatgtcggcaagtgtgatttgaattttaaaacactgagctttgccggtggaagagttcccaagttta

SEQ ID NO: 387254 - DNA, 122 bp, Homo sapiens
ccacgttcgttcttctgaggggacggtagatttgggggttttcctctaggattctcgcgccgtttcctctggtaggaacgtcttctgtgttctgattgtttttctaagctgggttcagatgc

SEQ ID NO: 387255 - DNA, 122 bp, Homo sapiens
agtttgaaatgatccctatataaatagaacggatcagcataactttgggataaaattagccgacagtttgtggactctccagcatgcgcctgtttgctcggtgctgttctctcgataaatca

SEQ ID NO: 387256 - DNA, 122 bp, Homo sapiens
agtgctggctgtggccgtcgtgaacctccaccacgtcgttgagggccgtgtgaaagaaggcgaactggccaaacaccactgtggaggagacacagtgtggggactgggcaggcacgctgggg

SEQ ID NO: 387257 - DNA, 122 bp, Homo sapiens
tagaagaattatccacaacatccttcctctgtgaagcatctcagctatggaaggtttcatcgttcgtggttgattacaaaactgcaacagaaataaaaatgcagatttttagcttttagtca

SEQ ID NO: 387258 - DNA, 122 bp, Homo sapiens
ccaccctcattcaacagatgaggaaagctagtttcaagcaagttcactgaggatcagagacgttaaatgatttgcctaaagttagagaactaataagtgagaaagctagtcctgctgcgttt

SEQ ID NO: 387259 - DNA, 122 bp, Homo sapiens
cccccaaattgatgtacagactcaatacaatctctgtcaaaattccatctgccctttttgcggaaattgacaagttgatactaaaattcatacggaggcctggcgcagtggctcatgcttgt

SEQ ID NO: 387260 - DNA, 122 bp, Homo sapiens
cacgaatgagaaaatgagtcagctggggcgagatcatcccctagcgttggtgtgcaattgcgtggggatccattgcttccgacgctactcctgccgggtcaccacaggcgcacgtgttccgg

SEQ ID NO: 387261 - DNA, 122 bp, Homo sapiens
ggtcctggttgatggcgtccagaggccgggtctcaaagagccagcgggcagacctcaccgcgttgctttggatctcctcccggcatgcggccttgacctcatggatggcgccctctgcatcc

SEQ ID NO: 387262 - DNA, 122 bp, Homo sapiens
ctctggagtcctcaagactggccatttaaagatcgcattctgccactgcaattttaagcacgcaatacccatgacaggccagatgatgtggtggctcacgccagtaatgccagcactgtggg

SEQ ID NO: 387263 - DNA, 122 bp, Homo sapiens
caccgagcgagtgaaggtatgtgtggcgggcgcggctggagctgccgccgccgccgccgccgcgccagcaggtcctaatgcctgtcacttcccaggacgctggcagcagcagcagcccggag

SEQ ID NO: 387264 - DNA, 122 bp, Homo sapiens
cagttttctgtggcagaacacacattgaaaggcccccttatatttactgatcagaagttccggatctcaccccctcagtaactcagaatccagcttgctgtccctttcatttttttcttctg

SEQ ID NO: 387265 - DNA, 122 bp, Homo sapiens
gacacgcgccacttacctcccactccgcagacacgcgccacctcccactccacagacacgcgccacctacctcccactccgcagacacgtgcgctacctcccaggagggagacggtgcgaca

SEQ ID NO: 387266 - DNA, 122 bp, Homo sapiens
ttccacacacatacatgggggtggggaataacggtcccttgtcccttcttctaagaaatgcgtgcctgtatcagagccaaatgaaacacactaaagttatacctaaaaaagttgagacttac

SEQ ID NO: 387267 - DNA, 122 bp, Homo sapiens
gggagggagacaagccagatgagatttcggcccccaacttgtggggtgagccagcgtggccgggcagagctgtaggtagagagttttccagggatctgagctcccctctcctccagtgcatc

SEQ ID NO: 387268 - DNA, 122 bp, Homo sapiens
atcatcctctccacctttggatgttagggacagtatcacaggggaggtctctgccccctgcgatattgggagtcataccatccgctcccaccccacgatattaggaacaagatgaccgaagg

SEQ ID NO: 387269 - DNA, 122 bp, Homo sapiens
gtgggagaattgcttgaacttgggaggcagatgctgcagtgagaactgagatcgcgccaccgcactccagcctgagcaacagagcaagaccccgtatcaaaaaaaagaagaaaaaaagagaa

SEQ ID NO: 387270 - DNA, 122 bp, Homo sapiens
acgcgtgcgattcttgtgatggcggatgcatctcccaccaccaaagtccagcacctgccacgcgcttcccattagtgcctccctcccccaaaggtgttggctcacaccctccgtccactcct

SEQ ID NO: 387271 - DNA, 122 bp, Homo sapiens
gccgtgctctgattggcggagctgcacgcccccgctgcagtctgattggcggatccgcctcgctttagaaggtcggcgcccagttccggcactcgtgcgcctaccagacagtggcggaggac

SEQ ID NO: 387272 - DNA, 122 bp, Homo sapiens
gatcatggagagtaatccctttcactgtgaccaagtgttcttggtatcctcagacagaatcgttccaatgtgccgccttccctgcctttcaggtatgctttaatacctagcatacaggtgac

SEQ ID NO: 387273 - DNA, 122 bp, Homo sapiens
cctcatccagctctggcttccagaggtcagctgctgcagtctcctatcctcctattcttccgggtctaggctttcatgaaacatcccgctgcaatctgagaggaccttcggtagacagtatt

SEQ ID NO: 387274 - DNA, 122 bp, Homo sapiens
aggctgccccccgtttcccttcgtctataccaccctccacctcggaagcgaggtcgcagtcgcccactggacagtttgaaggagaccgcagatttgcacccgtttcccatgggcccagacac

SEQ ID NO: 387275 - DNA, 122 bp, Homo sapiens
acgcacccttctagagggagcgggctgcaagcgctggggcctgtcccttctcccctacttcgacttaccttaccagaccgactagcgctggccgctggcgccgaagcccctatgctaaaagg

SEQ ID NO: 387276 - DNA, 122 bp, Homo sapiens
cttccgcccgggtgagcgcggggctgctgggtgacccggctcctgcttgccccgcagccccggccccctgcccaccatgaacgccagcggttctggctacccgcttgcctcgctttacgtgg

SEQ ID NO: 387277 - DNA, 122 bp, Homo sapiens
gcagctcccattcctccggcaggaatcggggtcctgctcccagccgatagggcctgggcccgctatcccacagggcgccaacctgcagcgagggacagcagcgcaaacacacccgcccagca

SEQ ID NO: 387278 - DNA, 122 bp, Homo sapiens
ggaatccgggtttgacctggggcttggcgttctctagagaagtcgttgccaagggcgaggcgggcaggtgaggcactgacgctgggatctgaggcatctggggtatggtggaagccagctgc

SEQ ID NO: 387279 - DNA, 122 bp, Homo sapiens
tgcaatcctacatgccaattgcaatgtatcttctgtggaaagtgcagtcctttactcccacgtgcacccaaaatgctaagtgtagtcttctctctttgctatgctaggcctttaagaattct

SEQ ID NO: 387280 - DNA, 122 bp, Homo sapiens
tacaccaagtggtaaaaagaatccttaaagcttacatattatatgactctatttacataacgttcttgaatgacaaaattacagaaatggagaacagattggtggttgccagaggttaaggg

SEQ ID NO: 387281 - DNA, 122 bp, Homo sapiens
aaggtgagtggaccagggcttggcaaatgtattttacacacacacacacacacacacacacgtaaaggtatgtttcttaaatgactgaaagtaagcataatagcagactactgaattagtgt

SEQ ID NO: 387282 - DNA, 122 bp, Homo sapiens
agtgcttaccccgccatgttttcaagcccgaggccagctggctgcaggtgcagggctatgcgtcaggggtcagggtgcacacatccctgcaggtctcggggctcctgggttgcttctggaag

SEQ ID NO: 387283 - DNA, 122 bp, Homo sapiens
ctccccgactttgcccacatgaagctttctgatcgcgttcagaagcgccgccttgggtaccggctgggtgacatcgggtctcttcttcaagtgcagcatgtttaaaatgtgcttcttgacgg

SEQ ID NO: 387284 - DNA, 122 bp, Homo sapiens
ctagaagcttgtttctcccacctgaaaagactggatttgggacatgatcctgtagaacttcggaggtaagcctggtgaatcagatcatagggggtctggagggtgaaaaaaaagagtttggt

SEQ ID NO: 387285 - DNA, 122 bp, Homo sapiens
tttattttacctgtcctgaacaacagaaggcagccaattagaatccaaattctcaagagccgaaagcaagccttcaagtaggaagattagaaatttgcagggatgaaggataggaaaacatg

SEQ ID NO: 387286 - DNA, 122 bp, Homo sapiens
tgtagtaacttttcaaatccacacattgacggttcatagcctgccatctgctctcgtatccgaagaaattcgatagcgtataccctgccagaacatgacttcagtttatatgtcctgctgct

SEQ ID NO: 387287 - DNA, 122 bp, Homo sapiens
ggctcccgcggccggaagtgctgggggcgcgcgggggtctcggaggcggggacaaagacccggagcggcggcgactccgccccgcagcaggaagaggtgtgagcccgggtcccgccgtggga

SEQ ID NO: 387288 - DNA, 122 bp, Homo sapiens
ggaacccaccacattcccacgtgctcttctttggagcgcccgtccccaggtcccctcggccgaagcagaccctgtggccccactgccacgcagccgccccggcctccaccgtcctcacgtgc

SEQ ID NO: 387289 - DNA, 122 bp, Homo sapiens
gcgactttccctgaaggggcacgagcgactttccctggaggggcgggcccttgctggtcgcggggccggacgctgaggcggggcggggcggtcccggttccccgcgggcgggacgtcgggcc

SEQ ID NO: 387290 - DNA, 122 bp, Homo sapiens
agcgaggacctacacacaaaagtgctcccggccttaccaaacaacgcagacccggggtcacgcctcgtcctgtttcaacaacaacacccaagggcttccctggagcccagggcgtgggaggg

SEQ ID NO: 387291 - DNA, 122 bp, Homo sapiens
gcgggcctccttcttggccgggcccctgacaaacgttctccacccgcagccaaactcaaacggctgtttcacggcctccaaaacccaacgacgcgtcttcaaacccgcccccggctcgtgcc

SEQ ID NO: 387292 - DNA, 122 bp, Homo sapiens
gcagcgcatgggcgtcaatgttttgatgacaacctggccaacctgctcctagccttcctgcggcgccagccacagccctggtgcctggtggcacacaatggtgaccgctacgacttccccct

SEQ ID NO: 387293 - DNA, 122 bp, Homo sapiens
cgcagctgctggcctgggtgctaagcccctcactgcccagggccagcagggccagtcggccgctcagagtgctgagcccgccaagcccacgcccacctggaaatctagctggcctgcaaacg

SEQ ID NO: 387294 - DNA, 122 bp, Homo sapiens
agcccggcgggaccatgttcaccagcaccggctccagtgggctctgtgagtaccggcctccgccatcctggctgccccctacacgccaccctaggcacctctttgaggaggctggggcagcg

SEQ ID NO: 387295 - DNA, 122 bp, Homo sapiens
gcccgggcctctcaccggccaatcaacactgtgactcgtacgccctgccccctgatgccacgcccatcactcgcccctctggattccctccggctgcgtggaaatcccggagcactggattt

SEQ ID NO: 387296 - DNA, 122 bp, Homo sapiens
cccagcagggctgggagccctgcaggcactttgcttttgctttctgtaatcaccttcccccgagttcagccaatcctggaaccagggccaggctggctgtgtttgagtgagctcatctctcc

SEQ ID NO: 387297 - DNA, 122 bp, Homo sapiens
cagggagcccgcgaacgacagaaagtcgccccccgcattccaccggagcactcgggaacacggcttccaggtgtcccagcggccgcgcctccccgcccccggccctcccccgtcgcgggcag

SEQ ID NO: 387298 - DNA, 122 bp, Homo sapiens
gccaagtaggctgagcccagcataaccacactgggtttctttttgttgaaagtggaggctcgtttgcctgttgcacacccagtaaccaatcccaccaacgtcttcaggctcactctgagccc

SEQ ID NO: 387299 - DNA, 122 bp, Homo sapiens
tctaatgcataaaagacagtggtatcctgtctcatgtacaaagagcaatgctgcctgggacgcctcccgcatgtgcggcggcaccactctgatgatgctcttccatctctccactcggtccc

SEQ ID NO: 387300 - DNA, 122 bp, Homo sapiens
tcaaggacacgcaggaggtgcgccgtctcagatctgggaaccttggcggatgtcctgccgcgtgggggaagatcctgaaccttcagcggccagcctgcacctcaggacctcctaggccctgc

SEQ ID NO: 387301 - DNA, 122 bp, Homo sapiens
tgccggcacccagtgactgctggcggcctgggctgctggggccgacgcctgggtggctgccgccgccgcacctgctgcgagatagtgatcttcgtcgcggaagggtgagggcgcccactgca

SEQ ID NO: 387302 - DNA, 122 bp, Homo sapiens
cttgggaaactacggtgcaggaacttctttcagaactcaccgcttccggaaattgggctccgggagactttgacagtctccacagtacacgtggtcggcctctgacacgctccctgatggcg

SEQ ID NO: 387303 - DNA, 122 bp, Homo sapiens
gctgggattacaggcgtgagccaccgcgcacggctaaagcttcagttcttaaccatcaggcgacagtgcgtagtctggtagcaactggaaaagtcctgctgagatttagcctcccatacaca

SEQ ID NO: 387304 - DNA, 122 bp, Homo sapiens
gggacagggttgcaaaagaaataattcaagatctcatccctcccccttccactgcagtcccggctgcagccttagctcactgacttgttcacaatttgaacttaagtcaggcttcccgaggc

SEQ ID NO: 387305 - DNA, 122 bp, Homo sapiens
gcggtacccaggtttcccacacttcacccagctggcccccctttcttgaaaagaaccatgcgcgacctgcagagctgtagagccaagcattctgggagctgaagtctcttttgctctgaccc

SEQ ID NO: 387306 - DNA, 122 bp, Homo sapiens
gagaagttgatgttgcagcttgagtccaaaagcagtctggaggcagaatcccctcttcctcggggcacgtcagtctttttctcttaaggttttcagcttactggatgagtcccacccacact

SEQ ID NO: 387307 - DNA, 122 bp, Homo sapiens
tcggtctccttcttgatggaaaaccgcaggctggtgtcgggcgtgcagcctgcgctgctccggcagctctgcacgtgctctgcggccctctccagggaggaaatcctgcggatctgcacctg

SEQ ID NO: 387308 - DNA, 122 bp, Homo sapiens
cctatttctttgtctctggtttctttcacctttgatttccttcctctctttttctgtggccgtcactttctctcccttcctctgtctgtcttcggttttttgtgtctgtcttcggtttctca

SEQ ID NO: 387309 - DNA, 122 bp, Homo sapiens
gcgtgtgttgggggatagcctcggtgtcagccatctttcaattgtgttcgcagccgccgccgcgccgccgtcgctctccaacgccagcgccgcctctcgctcgccgagctccagccgaagga

SEQ ID NO: 387310 - DNA, 122 bp, Homo sapiens
ctcttgcatgcagggtccctagatacgaagttcgaatcgatggaaacgtagctcaaaaggcgacgccaacaccccggagaaaacactgagctactccaaccacagtggcgcgccaagtagga

SEQ ID NO: 387311 - DNA, 122 bp, Homo sapiens
gtgagaggggagctggtggacgagtcggggggctcccctctggagtggatagggttaatccgggcagccagaaactcccaggaacagactctggaagctattgcagacttacccggaggaca

SEQ ID NO: 387312 - DNA, 122 bp, Homo sapiens
tgactaattggcctggggtcagagagctgacttgtagggactggagcagcggtttgggcccggcctgtcttgctgcagcatcagtgctctaaccactcactcagcaggagagtacatccagc

SEQ ID NO: 387313 - DNA, 122 bp, Homo sapiens
ccccgctctcacccagggggaagaagacgaccagggaaaggaagggaggaagaaggggggcgcccgattccccgtggggccctcccacgtctgcacttcgggcgctcagggcccgagtgttc

SEQ ID NO: 387314 - DNA, 122 bp, Homo sapiens
ggaaggacctgcgccgtgctctggccgccttgaattgtgggagatgtagtctcttttgcgcgcctctttgccgtatcccagttaagagcgaggttttcaaactactattcccaggaagacgg

SEQ ID NO: 387315 - DNA, 122 bp, Homo sapiens
tgccccagcggcgattggtccacccggacgtcactctcccctggagagtggctagtggatcgtgcacccaccctcggaggcccggagtggatcccgcgcgaccgagcagccactcagcaccg

SEQ ID NO: 387316 - DNA, 122 bp, Homo sapiens
ctgtgcaggaaaagccacaaatttagatggggatacagtaaacttcatgaagtagtctcgcgtcttatctgctccctagaccctggagggcgtccactgctccccagcagaggtctgcaggc

SEQ ID NO: 387317 - DNA, 122 bp, Homo sapiens
gaataatgcaagctccacgcatcagctgatgagtggacaaacacaatgcgcccggccacacgtggaaaatgattctgccatcaagaggaatgaaggactgacacatgcgaccacgtgcatga

SEQ ID NO: 387318 - DNA, 122 bp, Homo sapiens
tgtgtcctgtcttatcttgcctctgcctgtttcctgcctagggggctgttgggccagccacgggcttgtggggcagtccgcggccttgctggtccatgtcacctctgaccctgagcatgcat

SEQ ID NO: 387319 - DNA, 122 bp, Homo sapiens
ggacgagggctgagcctgcccatggccccgccgggcagagcctctggggagccccgcccgcgagcacctggggatgttgatgaagatgaggccttcaatactgggcagctccacctcctgcc

SEQ ID NO: 387320 - DNA, 122 bp, Homo sapiens
agaaggaaaaaacaaccaagtgcctggcattaagtaagtactcacccgcccgccctcccccgcccgccataaaaagaaaaaccgaaaagacaaaaaacagtggccatgggaactcctagaca

SEQ ID NO: 387321 - DNA, 122 bp, Homo sapiens
ttttcctttccctggtgctaacctcagtgacaatgtgcgtgctgctgcagggcccgtcagcgcccaggaaggccgcgcggtcccagcatctattgattttcctcaaaggcttttaaattgct

SEQ ID NO: 387322 - DNA, 122 bp, Homo sapiens
tctttatgcaggcctctctctccttcagcagcttaccaaggcctcctaatttgccttttacgtctgcttcatgactccctaatgccttcccaacctcgtggtgctgtgtccttaccacctaa

SEQ ID NO: 387323 - DNA, 122 bp, Homo sapiens
gggtctccgcagctctgggtggctttgtggccgcttcggcagaacagacacaggtttcatcggggccctgcctggagccccagctctttctcgtggtttgcaggtgacacagcccaggctct

SEQ ID NO: 387324 - DNA, 122 bp, Homo sapiens
ccagggcggcgtcgccaaggcttagacgctttcgtgcaggagggacgacgactcccctcacgccttcgtggccccaactcggcgctctgctatctctgatccggtgaacacacctcagagaa

SEQ ID NO: 387325 - DNA, 122 bp, Homo sapiens
agccgacccgacgctgctgctcctggtccccgttcctgacgaggatgcacagggtctcagcggtcccgcacttgaagctggctgacctcgctgcctacttcctccgcagagactgctccatc

SEQ ID NO: 387326 - DNA, 122 bp, Homo sapiens
ccttgagggtcctcactgtccagctccgggcccatgacgggcatcttgggaggtgctcggcgtctggctctgttcccgccatacccagcagaacgctgtggtccctcagggctgctgaatga

SEQ ID NO: 387327 - DNA, 122 bp, Homo sapiens
cgcaacgctcctcttcagccctaaccggctcagctgacgtgcccagaagacgaagatggccgccacgctcactgcgtgtcacgcagtttttcaccccggcccggacggctgggcgtcgagga

SEQ ID NO: 387328 - DNA, 122 bp, Homo sapiens
cacgaaagggtttagttcagtttatttcaagacacttcatttagtagctctttggcgtgtcgtatatttgctacccagcgcctactccgtggggtctgccagggtcttgctgtgagagggca

SEQ ID NO: 387329 - DNA, 122 bp, Homo sapiens
gtgcgggggctggacgggggcgtggtcatgtgcgaggaggctgaacagggggcgtgaccacgtgtggaagggggctgatcggaggtgtggccacatgtaagggggctgggcagggggtgtgg

SEQ ID NO: 387330 - DNA, 122 bp, Homo sapiens
ggaggggatgaggaggaagagtggctctatggcggtacgaaacttcctgtctctgtctctcgggttctctcaggcctcccctcttggccctcaaacggccggcgtccctggcctctcgcgcc

SEQ ID NO: 387331 - DNA, 122 bp, Homo sapiens
catatccagatgacgtaaggaaattatgatgggggtgtgagttgcataattagcaagtgtcgggagaatgtgcgttaagagtgcgtcagagatttaggtttaaattacccacatcccacctc

SEQ ID NO: 387332 - DNA, 122 bp, Homo sapiens
ctcaggtaggcccgaccgccgcctccggccgccaccagcaacggttccagctcgccagcgcgcacctgtggggccagcggcgtgttccaggaagcgccctccagctgtccaggggcactgcc

SEQ ID NO: 387333 - DNA, 122 bp, Homo sapiens
ccttccaggaagtagagggaggcctgaagacccgggaatcctccactggctctgccctgtcgccctgtttcaatcctctgcctggtgtttacatcccttgtttctgtttttgtttcctgtat

SEQ ID NO: 387334 - DNA, 122 bp, Homo sapiens
tctttaaaaataaataaataaacaccaatgaaatttcccagccaggtagcaaggtttattcgtttccagaaaaaatgcaagcataaagatatttcttaactcagtcactcaaatgctgtaaa

SEQ ID NO: 387335 - DNA, 122 bp, Homo sapiens
ttcaagctgcccacacttcacaggctgcttcgaagccctccctacccaccccgtgagaaacgcccctggggagaggcagagatgggtcttttagtcttgcagcccttgtttgtttaaaatgt

SEQ ID NO: 387336 - DNA, 122 bp, Homo sapiens
ggggtgtctcggtggccacaggcggcccagatgaaggtgctgctggggaaaatgtcaccacgctggtcttgggaggctccatgagagggaggtgggacttgagaggggcttagagcctgggt

SEQ ID NO: 387337 - DNA, 122 bp, Homo sapiens
ggctgtgcagaaagaggtggccctggccccaaccttcccagcagcctcccagcagccaggcgccaatcacccagattcagaataccacgtctgggcaattttaacttaaaatatcccattgc

SEQ ID NO: 387338 - DNA, 122 bp, Homo sapiens
gtccctccgccctccccgcacgctgggtaagttgaaggaggacggcagcttttccggagacgctccctggaaaggagtgctgatgaggccgctcttgtgtgtgaaggcctggcctgcagcgc

SEQ ID NO: 387339 - DNA, 122 bp, Homo sapiens
gagacctttggctcaaccagaggcgagaggctgtgctcagagcacctgctcctctacccccgctcgctgggctgcagttcttgtctggcagcccctcatgcagagccagctgctgccccact

SEQ ID NO: 387340 - DNA, 122 bp, Homo sapiens
tgatgcaaacagcctgttccttccggggttttgggctggaactgcagcgcttagagagctcggtggaagctgctaaaggcggaggcggggctctggcgagttctccttccaccttcccccac

SEQ ID NO: 387341 - DNA, 122 bp, Homo sapiens
aagagtaagtaatccattctaagaaaaacaggcaagcattgacgtgtacagattagctgtcgtattactcaaatctgtctgcagttcagcccataaattcataccttagtttaagggagaaa

SEQ ID NO: 387342 - DNA, 122 bp, Homo sapiens
atgttccccttccatccaccctcctttgcatctttctgtgcctggggtccccataggaagcggtcacatccagactcaccaggcctgagatgctggaggatggagaagcgcttgccacggga

SEQ ID NO: 387343 - DNA, 122 bp, Homo sapiens
tgaccccggaaatcccgctcctgccgcgaggcgccctccgcttcgcgctccctcgtgtcacgagggagccagggtgggcggtctcctattgtacttggcttttgaattttcgcttttgcagc

SEQ ID NO: 387344 - DNA, 122 bp, Homo sapiens
ctagggatgcgactgaacatcctgcaatgtagagtgcagtgtcccctacagagaattatccgacccaagatgttgataatgccaaggttgagaaaccctgttcaggatgacaaactgattga

SEQ ID NO: 387345 - DNA, 122 bp, Homo sapiens
ggtttccttctaaaggttttggatgtcacaaacctcgcataggttgttccttttagagaacgaaagtaaaatgagcacatactcattagctgttcaacgttggtgctgatctgtgctatcag

SEQ ID NO: 387346 - DNA, 122 bp, Homo sapiens
tctagactctgaatttcagaagcttccggaactaaaatgatgtggaagttgagtgagtctcggtgggatattgctgctgcacctggtcaaggccgttccttcagtgttttcagacgccctgg

SEQ ID NO: 387347 - DNA, 122 bp, Homo sapiens
ccttccagagatgccttaactgggctaacagctcgccgcgccggggcaggcagaggggtgcggggcgcgctccttccaggacttgccagtccccaagaaccaggccaaccggttccctccac

SEQ ID NO: 387348 - DNA, 122 bp, Homo sapiens
ggaggagctgcgcgccatcgcccaggcgcccccgccgcctgccaccgccgctgccggctacgtgagtacccctctgcccgcccgctcccggtgccgccactggcctcgtggggccccgcccc

SEQ ID NO: 387349 - DNA, 122 bp, Homo sapiens
ttatccgtggatgacgacagatgccagttttgcccaatcaaaataggtatcctgcataatcgagtcctattggtctaaataaaaataaaacgtaagccaatcgcacagcttccttttcgcgc

SEQ ID NO: 387350 - DNA, 122 bp, Homo sapiens
caaaacattagaacccaggataggtctacgcctccactgatacggaaaaatatatgaaagcgtggattagggtttttgccacagatgagaacaaaatccaacggagacttgacatttcttta

SEQ ID NO: 387351 - DNA, 122 bp, Homo sapiens
ccacttcctctaaaacatcttcaacatctacagctacaatatagccacagatgacaataacgtcccacttcatggaccaggaaaatgctaaatcactaagaaagttttatgtagtgaaactc

SEQ ID NO: 387352 - DNA, 122 bp, Homo sapiens
ccacgggcatgcagcgaggcggtggcgacggccccaactcaggtcgcccgagttcctgtccgctgccccttccgggctccgcctctggaggcagagacgtaaagcacctggaattctgcacg

SEQ ID NO: 387353 - DNA, 122 bp, Homo sapiens
cttgttgctcttcggctgtcaggaaatttcttctccctcacctgtgtctggatgttgggtcgttagtaagggcttccctagtaaattattttgtctttgtgtcataggaagcacctgcaggg

SEQ ID NO: 387354 - DNA, 122 bp, Homo sapiens
tagaaaaaaaatggttttttagtccacgattatgtgttgcatttagttgccttgtctctacgttccttcaatcttgaacagttctgtaatcttccttttttatatgtgaccttcacattttt

SEQ ID NO: 387355 - DNA, 122 bp, Homo sapiens
cgaactcctgacctcaagtgatccgcctgccttggcctcccaaagtgccgggattacaggcgtgagccactgaacccaattcttgaattcaatcttggtggctctgttgcagttagcaagaa

SEQ ID NO: 387356 - DNA, 122 bp, Homo sapiens
gaggcagaagtcagtttctgcatcgcctcaactcaggatctggttctatgcccaggactacgtggagttgcctcccaccactaagacagttggcaactccctgctaggatcctcttcaccag

SEQ ID NO: 387357 - DNA, 122 bp, Homo sapiens
aagcgcagtgaaccgtccgcaaagcacgaggccggttgcgagctgcagaaagcccacgctcgccagcgggacccaaggaacgctagaactatacgtcccagaacacttagctttgtttttaa

SEQ ID NO: 387358 - DNA, 122 bp, Homo sapiens
agtagagatgaggtttcaccatgttgggcagcctggtctccaactcctgacttcatgatccgcctgcctgggcctcccaaagtgttgggattacaggcgtgagccactgtccaggcctaggt

SEQ ID NO: 387359 - DNA, 122 bp, Homo sapiens
gcaggacaggaacagggcaagggccaggctgggtggctccgttcttttcagaacaatagccggaaaggcggtggggaagaggctcagagtgaccgggctggggaccctggcaggagggcaga

SEQ ID NO: 387360 - DNA, 122 bp, Homo sapiens
taaccggtggaaggcagcacggggcaaaactgcctcaccttctcagtcctccacatcatgcggctatattctagctcaatacaatcctcagtctcagtatctgctgagtgaccagcagtcta

SEQ ID NO: 387361 - DNA, 122 bp, Homo sapiens
gcctgacctggctgctcacaagtacctgccataatgcttggcctcctggaagctctaaagcggtgcaattgtcctgcagaacatcgcagtgtcagggtatcctgcatgcaggtgaggggtgg

SEQ ID NO: 387362 - DNA, 122 bp, Homo sapiens
aattataactggcttatgacatgcccgttactattctagttgctttatatgtacttgctacgtaggaggcagtgttctggacattggagatggagtagtgactgacacatacccaaacagtt

SEQ ID NO: 387363 - DNA, 122 bp, Homo sapiens
tgagaaaattgcatttgggcaaaatggtcctgcaaaaaatatgtagggaatcagagaagacgaaactcaaaacaaggccaaccatctgagtgctgtagaatcaacactaggagagctgagga

SEQ ID NO: 387364 - DNA, 122 bp, Homo sapiens
actggaacacaccggtctggtaggaagaagagggattcccagacctacagggtgcgtcggcgataacccgacccaccaaagcccgaggtgctgccagtgcttccggccctgcgctgggtcag

SEQ ID NO: 387365 - DNA, 122 bp, Homo sapiens
caagaaaacaggttgctgataggagagcgtgaatttctgacaggacgctagtgtccaccacgtagcaaaggggttattcctgacaggacgtcttccacaggaatgagggtttctgttaggaa

SEQ ID NO: 387366 - DNA, 122 bp, Homo sapiens
ttcgctttaatttagtaactagaacttagaaaagttcctcctgtttcctgattgccaagtcgggatgagaaatagatttcataattatgatacaacttgatatcttgagataaatgtttaac

SEQ ID NO: 387367 - DNA, 122 bp, Homo sapiens
atgtcaatggactattttattcaactcgggtatttatgagtgtctcctctgtgccagccacgtgtgaaagaagaactccaagttactggacaccaggacaaaccaggtagatcactgcatcc

SEQ ID NO: 387368 - DNA, 122 bp, Homo sapiens
gtacgcactttcccaccctccaactctttgggtgtccgaagcgtcgaggtgtgggcggggcgccgctgccgtgaagtgaaaggtgacggaggctccgcgagtcgcggatacacctgcctggg

SEQ ID NO: 387369 - DNA, 122 bp, Homo sapiens
cgtgtatgagagtgtgtacacgcgcctacacacacacacgttgtgttaccggcgctcggccgccgggggaagacccaggccaatgccgccccccaccgcccccagcagtgggacctcagcgc

SEQ ID NO: 387370 - DNA, 122 bp, Homo sapiens
tttaatttatgaatgcaaacaagaccaaataggcccgcaggccctaaactaccagacctgcgttaaacatttcggttggggcgacctcggagtataacctaacctccgagcaacatatgctg

SEQ ID NO: 387371 - DNA, 122 bp, Homo sapiens
gtaataatagctgagatgcatggagaaccacctctccttcaggcgctgctcctcggcttccgtggacgggcatggctatttctcggaaccctctgaggttagagctgtcatggtctttcttc

SEQ ID NO: 387372 - DNA, 122 bp, Homo sapiens
gggtcgcgaacttcccgggccccaaggtccctgccacctcttccaaatgctggaggactacgcacttctacaagtgaggtgacttttgaggaattcaagaatgctgatcacagcggttcccc

SEQ ID NO: 387373 - DNA, 122 bp, Homo sapiens
gaaaagccgaagttgacccagaaaaggatgattgaaggtagttgtattaagtggtggcaccgaaatgattccaccctgaactttctgaaagggtgattagtgatcagcagcagacgttataa

SEQ ID NO: 387374 - DNA, 122 bp, Homo sapiens
ccgggcgcccttcccggagcctcggcaccacagtaggtgcgcggagccgcagggctcgaccgcttcgcggaaactctcgccaccctccgagctgccgccccgaccccagctcccagccccct

SEQ ID NO: 387375 - DNA, 122 bp, Homo sapiens
gagagagaggaacggggtggagggagggaagcgtgtgcaggggccaggagcgccagggttcgggcttctcggcccgccctcctgctgctggcgctgtcacctccctgtggtcctgccttctg

SEQ ID NO: 387376 - DNA, 122 bp, Homo sapiens
tttatattctgactctgataagcccaatattcagaggctttatgagtctgattctgttctcgtttctgctggtacacattcatggttttgcttccttgtgtgttttgtcatttgaaggctgt

SEQ ID NO: 387377 - DNA, 122 bp, Homo sapiens
ctctgagggaacagagcccagaagatctgctttgatgagaagaaagaaggtcttaaaatacgcagagcctggatcatggggacacaggcatttgtttattctatttagtcatcactgccttc

SEQ ID NO: 387378 - DNA, 122 bp, Homo sapiens
ccacggtttgccgattcctgggtcagaacaatgcttctcagctttagcctcaatcccgatcgttgatgggcttccgtcaccaggactgctggtctgcactggcagagtgtctgattcacggg

SEQ ID NO: 387379 - DNA, 122 bp, Homo sapiens
ccgctgcgctgtgggaaccgctctctggggttggcccaggctgaagccagctcctttgctcgcagggagtgtggagggagagccgcgggcgggagccggggctgcgcgcggcgctcgtggcc

SEQ ID NO: 387380 - DNA, 122 bp, Homo sapiens
aaaccatgtggttgaataagaaagccagagaatgtgagtcaaatgggaaaaccagtgagacgggaatgggatcccaagaaaattcagagttggagaggaatgtaaaaccactgaaagagatc

SEQ ID NO: 387381 - DNA, 122 bp, Homo sapiens
tccgaggagggtgagatgctcgccggccagcattcccttcttaggatgggtcaccgccatcggtgaagctggaaggaaacactgctctccggagaacagtgcagggaagtcttgttttgatc

SEQ ID NO: 387382 - DNA, 122 bp, Homo sapiens
gttttctcggcgcaccacggcgcctgcagttagtaggcaatccatccccccgagctgcagcgagttaagctgcaggccttttgtaacggcctcaggtgtgagctgccgcaagccccccccac

SEQ ID NO: 387383 - DNA, 122 bp, Homo sapiens
attctatatcaaagaggcaggctgtccagctctaatcgctgggacctccagggcatggtgcggggggagttggcactcacagcctgggacacctggacaccaacgccccaggctggaaaagg

SEQ ID NO: 387384 - DNA, 122 bp, Homo sapiens
cctttccatttacccattatttaattgggttccttttcttcttgatttgtagcagttcctcgcgtattttagtagttttatttgtggcaaagatctcctcccccgggtggcctctgccctcc

SEQ ID NO: 387385 - DNA, 122 bp, Homo sapiens
acccaagcaagtacccacttaggacaaacaccagcctagccctggcggcgatttctaggtcgtaggaagtcgatgtttcgccacagaaaggctgagtgaccctgtgactcatttcccagcaa

SEQ ID NO: 387386 - DNA, 122 bp, Homo sapiens
ccaccacgcccggcctgcggaaatggcctcaacgcttcaaccggaagcagaaattgaccgcggcaggcgccatctaacggccgctggagcaaagctcctcctggaaattcgcaacaccggaa

SEQ ID NO: 387387 - DNA, 122 bp, Homo sapiens
tctggctactccagtcccaagctgcagaatccatcccctgcctgcttacctcagatgccacgtcgtccttaatgacaatgttgctgatcttgcccagaagctgcgccagggaggtaagggtg

SEQ ID NO: 387388 - DNA, 122 bp, Homo sapiens
accggaccaatcagcggccgcagagtgtgggaactgtcgccatggcagccaggaggcgggcgcgcgcggcgggaggaggggcagagcggagcggtgggccgggggctggaggacaggtttgt

SEQ ID NO: 387389 - DNA, 122 bp, Homo sapiens
ctgcgcattactctctccgcctcgccgaagagtggatggaggctccgcgggtaaaattgccgagaatgaggtgggtcatccgagaggggattggaatccatccaggcttttccgactctaag

SEQ ID NO: 387390 - DNA, 122 bp, Homo sapiens
caacagtgtgtcgagtctttgcaaagaaacctttagatgtggttcatagatatatgaatacgtatctgtgtaaaacagtgagtgtgcagtgtgtaaatactttaaattattatgctagaaaa

SEQ ID NO: 387391 - DNA, 122 bp, Homo sapiens
acttctcagaaacagaagagccttcctaggaatcaaacagcctggccacattttatcttgcgaaactatttggcctaggttctccatctccctcacctcctacatctaattgattctctcct

SEQ ID NO: 387392 - DNA, 122 bp, Homo sapiens
ggcagtgcctggggaggtgcgacgcgcccacccggggcttgagcggctggggttcctgtgcgtgggtccttaatgtttaaaagatacacatgaacagcaacaaaacccaaaccactcgtggc

SEQ ID NO: 387393 - DNA, 122 bp, Homo sapiens
aagaaatacttaaatgagacttttaaaattcgaggctctccactgagacttgttccctggcgccagctccgggagttccgcagagcctcgccccctgccagggcgcccggggcgaaggaccg

SEQ ID NO: 387394 - DNA, 122 bp, Homo sapiens
cttccttcttctttatggctgaataatattccactgtgtatatgccagactttctttatccgttcatctgttgagggacgcccaggttgtttctaccttttggctattgtgaataatggtac

SEQ ID NO: 387395 - DNA, 122 bp, Homo sapiens
cacactggatgatgcatctctctttcctggagacagacgcccagaaaatccttctaattgcgcatcagagtttcttcagaagttctacatggtcgtaatttgcacctctcacatctagattt

SEQ ID NO: 387396 - DNA, 122 bp, Homo sapiens
acctgagggcccctccccttccagaggaagccagacacaaggctctgtgaggtcacactgcgggctccgctcttattggccaggggacggtagctgcaggactctgctctcctgcggccatg

SEQ ID NO: 387397 - DNA, 122 bp, Homo sapiens
aagcggaaaaactgacttcagcttgcccagatggcgcagagaatgggtttcccgtaaccccgcctgtgtctttccttcagcctcgtcccaaatgccgtgggagggaaggcactctctgtcaa

SEQ ID NO: 387398 - DNA, 122 bp, Homo sapiens
cgcaactcgtcgcagggctcggtggacttgagcatgggcctgtccagcttcatctcgcggcgccacctgcagctcagcttccaggagccgcacttctacctgcgctgcctcggcaagaacgg

SEQ ID NO: 387399 - DNA, 122 bp, Homo sapiens
ggacagcggaggtttccgttcccagtggggcggcagcaaggacaaaaacatctggagaggcgctctgcaggcccgcctggcaagctggtggatcaggttacttcatgacggcaactgggttc

SEQ ID NO: 387400 - DNA, 122 bp, Homo sapiens
ccaggaatctcgaacttgaccacgaaaataatgactcaatgactcactgtgccaaattaacgagtgtgtacattgttcagtatgccaggttacatttctgctgagcttggcttctgtatgct

SEQ ID NO: 387401 - DNA, 122 bp, Homo sapiens
ggagaatttcaaattcgaacggctttggcgggccgaggaaggacctggtgttttgatgaccgctgtcctgtctagcagatacttgcacggtttacagaaattcggtccctgggtcgtgtcag

SEQ ID NO: 387402 - DNA, 122 bp, Homo sapiens
ctttccgcccgctccatggcggtggatgcctgactggaagcccgagtgggatgcggctgacgcggaagcggctctgctcgtttcttatcgccctgtactgcctattctccctctacgctgcc

SEQ ID NO: 387403 - DNA, 122 bp, Homo sapiens
ccaaaaggctgcccggtgagtccaccacagatgggtcccgaggaatcccatcccacctcccgacagaaggcctggtgggcttaaaccacggcccagctccggctgctttatagcctagaggg

SEQ ID NO: 387404 - DNA, 122 bp, Homo sapiens
taacccaggcctgcctgctctgagctgacctttcctggcacctgcaaaattaggatgacacgttaggaacttcctggggttcttaagggaattagaagagggacctgagtgcaaagggcttt

SEQ ID NO: 387405 - DNA, 122 bp, Homo sapiens
agccaggcccaacccctgccgcgctgagtggcttgaggacctaagactcacagcctgccccgggcctctgactgcacaggtgcctggccccagggccacatggcaccaacatccggggatcg

SEQ ID NO: 387406 - DNA, 122 bp, Homo sapiens
ctccagaaaaaaagatgtgaagagcgctcttcagggatcccaccatcccaaaatataagacgtaaaggcatcactacagggtactctctaagatatggctgggctagatctcccagaagttc

SEQ ID NO: 387407 - DNA, 122 bp, Homo sapiens
tgcccctccgaggacatttagcaaagcctgaagacagttttggatggcacccgtggaaggcgctgctggcatccagtgggtagaggccagggaagcagccaaccttatgcagtgcacaggac

SEQ ID NO: 387408 - DNA, 122 bp, Homo sapiens
gtatctgagagaggcgtacttggccactaggaaagcacctccccctttccaaaaatgctccggaagtgccttcgccctccgtaaagatggccggggcagtcggcacgagggaggcggggatg

SEQ ID NO: 387409 - DNA, 122 bp, Homo sapiens
gccagtgtgtaggtctcctgggtcccctggagggatggggacttggaggggtcccgccggcgattcacacgattgaacacaagccttggccctgcactcgacaggggccagggtcccagcgg

SEQ ID NO: 387410 - DNA, 122 bp, Homo sapiens
atcaaaatgaatccacataatataagtagtttatctccacatggttttcatgatatccttcgatgtattcatgaagaatttagcatctatcaatttcattttagatgggagattatctctta

SEQ ID NO: 387411 - DNA, 122 bp, Homo sapiens
attcatgtagacacatttactaggaaacattcccagttgccctttccagtctgacaaattcgccccagaacctctctcaaaacgtttccttcatagagttggattgtctttacttgttttcc

SEQ ID NO: 387412 - DNA, 122 bp, Homo sapiens
gcgtggcggctcagcttgcagtggaagttgtcctcccagaactcggcaaaccagatgttgcgccggttgttgtccagcgtgcggctggagaagtagcggtcgaagcctggcagggaaccagg

SEQ ID NO: 387413 - DNA, 122 bp, Homo sapiens
gcgtaggaccctccgagccacgtgtgggatataacctcgtagtgtgccgttttttaagcccgtcggaaaagtgcagtatgcaggtgggagcgaacggattttccaggtgccgtccgtcaccc

SEQ ID NO: 387414 - DNA, 122 bp, Homo sapiens
agcgatctgtgacaacggaggtgagaagcatcccctccccctacattgctgtctccctgacggcgcccagcccgaggagtgggcactcggctccggacactgtaactcttgctctctacctt

SEQ ID NO: 387415 - DNA, 122 bp, Homo sapiens
tgatttgcatttctctgatggccagtgatgatgagtattttttcatatgtctgttggctgcgtaaatgtcttcttttaagaattgtctgttcatggactaaggttcatgaacagatatgaac

SEQ ID NO: 387416 - DNA, 122 bp, Homo sapiens
tcacggggaggcggggctgtgggaaccgcagtgcagcgcagaggggcggggcctgcggcgcgagacctggtgcgggaggcccgggcagggagaagtgtgcggggccgggacaagccggctcc

SEQ ID NO: 387417 - DNA, 122 bp, Homo sapiens
ctgtcacagatcttggttttccccaggagttctggaggcccagagcctgggtgcggcacccggttcattggggaggggcatgggtcctgtgccctcctcctggccgggctccaccagggcta

SEQ ID NO: 387418 - DNA, 122 bp, Homo sapiens
aagggcaaggtggagagctggcggttgccatggcagtcggagggcagttgctggggcaaccgaccttactgttaccttagtagacaggaaaacaggtaagaaaaattgactcagtggagtgg

SEQ ID NO: 387419 - DNA, 122 bp, Homo sapiens
ctcgtgcccgccgcctcggctgcagggccctccacctgcagcgctttcgtccctacctggcgttcaccgttctcacccatcacatcagcacaacgtgaccttgtggggagccacctcctctg

SEQ ID NO: 387420 - DNA, 122 bp, Homo sapiens
atcattagttttgcattatgggagagagtcatggcacagcatctttggatatttaatgtccgatgctctttgatgtaacagactcctctagaaataaaactacgttggaaatgtatactatt

SEQ ID NO: 387421 - DNA, 122 bp, Homo sapiens
gaccgaagactacttcccttgttgcagtgaaaggcctcagctctgacggcctgaccactgcggcaagaggaccccagctggggtgcttacctccagtatgaagtgaattgcaaatcctgctt

SEQ ID NO: 387422 - DNA, 122 bp, Homo sapiens
ggcctccacaggtgctgatggccacatgggaggtgctggcctggccctgcaggtgaccagcgtagaggcagtggggccgggccgccctctgccaggccaggccctcccgtgtccagtactcc

SEQ ID NO: 387423 - DNA, 122 bp, Homo sapiens
gccagggacagggtgggtccataggccagaggtccacatgacactctgagcatgagaggtcgagtctagcctggaagacaggagagctggtggtctggggtcctgggaaccactctggggtt

SEQ ID NO: 387424 - DNA, 122 bp, Homo sapiens
gagctgacaaatagaaaggcctgctgtcttaggaatacgtcatcagcataacatgcagagcggtggattacagagtggaggggagtggaatgatggtggcctgggagacggcgatgttccca

SEQ ID NO: 387425 - DNA, 122 bp, Homo sapiens
tcgacctcccgatgcctccggactcggctggccgcgctcccggcgccgagcgcgcaccctcgccgggacacacagacgcacactcactcgacacactctcgctcctgctcgccctcggcgga

SEQ ID NO: 387426 - DNA, 122 bp, Homo sapiens
gttcacttgtctccctggtaacatcaacatccttgcacgatgagccactaggcagtgacacgccctcgccccatctcatctccaggactcgcctccctcctggctgctggtctgcacctgct

SEQ ID NO: 387427 - DNA, 122 bp, Homo sapiens
tagtcaaaactttgcctagaaatgtctgggaaagtttcgccagagacttcttccccaccacgacaatattcctgctcatttctgtcatcaaacaaaggtgattttgtgagagttttgatggg

SEQ ID NO: 387428 - DNA, 122 bp, Homo sapiens
ggcgtcggcggtgcagacaggggatgccggcagagattggagcccggcttggctgtttcccgggctgttggcattgaccggggctctgcccttcctctaatgcccttatctctataggaagt

SEQ ID NO: 387429 - DNA, 122 bp, Homo sapiens
gcgccgcacaggccgacagagcacgcgcgcgccgccgccgaacccgcgcccgtgtgcgcgcgcgccagcctctcaggcctgcatcccagcagcccccgccccgccctgcgccgccctcgggc

SEQ ID NO: 387430 - DNA, 122 bp, Homo sapiens
ttctcctccaactagcatcccttccagggtgcactaggatgcctctcagaggttctcccccgcctcccgaaggaaaggggaaaaccccgtgggcgtccggagagcctttgcgcctcgccagg

SEQ ID NO: 387431 - DNA, 122 bp, Homo sapiens
gacggggagttcctcgtcgtccgttcccactcagatgctccctgaggttccggaacaccccgccccccatcccaggatctgaccaaccctcaagccacggccggccccggttccgcgagacg

SEQ ID NO: 387432 - DNA, 122 bp, Homo sapiens
cccagcctctcccgcccagcccgccgccctcctcccccatggccaccaaggtcaggctctcgcagggaaaacgtcttcaggggctaaacatcggttttaaacgaaatggaaaacctccaaca

SEQ ID NO: 387433 - DNA, 122 bp, Homo sapiens
tcggccccggggagcgggaacgccttcgggaaacacaggccattaacagcagcctgtccacgctggggctggttatcatggccctgagcaacaaggtgggaatgggagtggggtgagatacg

SEQ ID NO: 387434 - DNA, 122 bp, Homo sapiens
cttgccacctcaccccagtctcctagagagcaggatgtggggtctgattcttctgggttccgcaggccctgaagtggggtgggggtcgtactcagtctgagtttctggagatgaatgcatgc

SEQ ID NO: 387435 - DNA, 122 bp, Homo sapiens
gacatcgcccgacgacttctcaggcgctgatctcttgcgcttggcgaagaaatctgcgggcgacagcgcgcgcggccggtcagggcggggccggcccggagacccgagagggggccgggaga

SEQ ID NO: 387436 - DNA, 122 bp, Homo sapiens
tccaagccggttctgtcgggttccctcaagaccccgagagcacgcgctccggagggaccccggcacttcggaccctagcagagccagccctgccccaggaccgccccggggtcggtgcccgg

SEQ ID NO: 387437 - DNA, 122 bp, Homo sapiens
gccggggctggctgcacctatcgcttgggccacagggccgacctgtgtgatgtggccctgcggccccagcaggagcctggcctcatctctgggatccacgccgaactgcatgccgagccccg

SEQ ID NO: 387438 - DNA, 122 bp, Homo sapiens
aagcttcctctctcttgtcttccttcctccgggcgcgctgtccgtgaggcctcccaccaacgcgtccggtgattggcctaacatgatgatgtcagatccccggccttattttcttcgcctat

SEQ ID NO: 387439 - DNA, 122 bp, Homo sapiens
gaggggttttctgtccttttgtgtatatgtggttgtagagaaaaaaataaccagtgaacacgccctgcctgcttggttttgcccaacggccagtggactcctgccctctatagagtggaaaa

SEQ ID NO: 387440 - DNA, 122 bp, Homo sapiens
cctggattccactcagtttactcattatcccccttaaaatgtggagcccaaatctgaacccggaaccccaggtgcaatcccactaggacacaacacaatgggttcctgagccctttgatcct

SEQ ID NO: 387441 - DNA, 122 bp, Homo sapiens
aaagaccctacaatgttcctttatttttatgtggtcagatacttctcacttgtgcatttccgcttttcttgtctctattgatacttcctctgtttggtgattttctctgttgatatttacta

SEQ ID NO: 387442 - DNA, 122 bp, Homo sapiens
tatcccaggaccgtgggcccagggccctgagggctgggagcacaaactgtcctgagcaggcgcgatgtggtggaagcttgggagctcaggagcctggggaaggcctggagcgtcggaagaat

SEQ ID NO: 387443 - DNA, 122 bp, Homo sapiens
accgcagattgcgggagctgtcctctcaatcagcccggcagcggcggcccacaatttacgcgtgtgcaaccctaaccccggcccaagcttgacctacaatttgcgcaggcgcagatcctaac

SEQ ID NO: 387444 - DNA, 122 bp, Homo sapiens
aaatcattctacgtcactgtagtaaacatgcatgtctctgctaaaaattctttgataacgcgccattgtcaatcaaataaagccccatttcctagcatgaaattcaaagctttcctgacttc

SEQ ID NO: 387445 - DNA, 122 bp, Homo sapiens
gtaataagtagatgagacaatgcctgtaagatgctcagacagtacctggcataaagttggcgattatttttctgatttcattcaactccttgatgttggctctgttgctgtctccctggggc

SEQ ID NO: 387446 - DNA, 122 bp, Homo sapiens
gcccccaacaggaaaaggcaacaactgttttctatagaagtttattcccaaaacagagcgcggcttcacggaacaatttacacagacaggaaagagggccgctgggctggaggaggggaacc

SEQ ID NO: 387447 - DNA, 122 bp, Homo sapiens
gctggaagctccgccttctgtccccgtaagtcccacccccgtcccccgcttcggccaccgcgcttcggccacggcgacttggccaacaacagcggcagcagggtctccccattgagggaagc

SEQ ID NO: 387448 - DNA, 122 bp, Homo sapiens
gcagcaaagcgtcagctttcctgtcagcgtgagtctcactgaagcctgacctaactctttcggatcggaactagaaagtttattatcaaggaggtatttaaccacgactatacttacctact

SEQ ID NO: 387449 - DNA, 122 bp, Homo sapiens
tattgaatgtttcaaagataaattgaacttcaaaaggcaactccccgaacagcctggagacgggtttgaaggggagactaggggaggatgtcagcctcctgggtgacttttgccgtggaggg

SEQ ID NO: 387450 - DNA, 122 bp, Homo sapiens
ccaccagccgaagaaggagatgctctggttccagctcagatccaccacgcacggcctggacgaagcaaagccaaccccccagtgcatgctgcgcggctggctccgggcgcccctcccagggc

SEQ ID NO: 387451 - DNA, 122 bp, Homo sapiens
atagggctggttgcccggtgcgctgtgagtggtcctccccggagatgctgggagaaggggcggagccatcagaaaggatgagccttccttgggccttcggatctggtggggctgccactttg

SEQ ID NO: 387452 - DNA, 122 bp, Homo sapiens
ctctcagggcccgtacctgattagggttgcagtccccgcgccctccaatggctctggtcgcgacttcccgtccctagtatgagctcgggtactagaacctcgcgccccgcctacaacttcgg

SEQ ID NO: 387453 - DNA, 122 bp, Homo sapiens
ctgtgtgaggactagaggcggccgaggcccgggccggttcccccgaggcggcgacggagacggctcccggcacttccccgcgccatcttaactgagcccaagcgctgagggcgcctcctcga

SEQ ID NO: 387454 - DNA, 122 bp, Homo sapiens
cgccgctgcgcagccccccgccccagcctgggcgtacgaaccccgagccgccgccgccgccgccagcagcagctgcagcagtggcagctgcagtagcggcagcagccccagcctcaaggcca

SEQ ID NO: 387455 - DNA, 122 bp, Homo sapiens
ggtgctcagcaggtggcagctgttgctattttaatatgcagaacggaggtggtgctcggtcgggtttttttgtttgtttgtttttttgagatggagtttcactcttgttgcccaggctggag

SEQ ID NO: 387456 - DNA, 122 bp, Homo sapiens
cacctggaaaatcgggtcactcccacccgaatactgtgcttttccgacgggcttaaaaaacggcgcaccgcgagattatatcccgcacctggctcggagggtcctaccccacggaatctcgc

SEQ ID NO: 387457 - DNA, 122 bp, Homo sapiens
acagaaagaatcttttgaatagtggcagtaggcagaaatggaacagatggactgcttaaacgcagagggtttccgtgaagagaatcattcaggtaaagactagggcagcagtggagggggag

SEQ ID NO: 387458 - DNA, 122 bp, Homo sapiens
ctccttcagcggtctcaggtggaacacgccaggtgggcgcttggctgtgttctggggtcccgagttggaaagggatgcccccaggcagaaggcggccggcagccctggggcagaggaggacg

SEQ ID NO: 387459 - DNA, 122 bp, Homo sapiens
gttaactgtaactccctgctggtctgcctcctgctaggagggactgaacatcaaatcactcgcatcgaattactcagcaggtgagttctggggatgataaccacacaattctctctgcacga

SEQ ID NO: 387460 - DNA, 122 bp, Homo sapiens
tgctcttcccatcgtcatcaactcagcctccacgtgatggggaggtcactccctcccatccggtcccagccccactcacctgggaacccgtgccgctggccccaccttggcctagcatccgt

SEQ ID NO: 387461 - DNA, 122 bp, Homo sapiens
ggcagtctccagaactgaaaactacaagtctctgctgtggacttaccattatattcagagcggaatccaaaaatcaaagaattttagaactggaaggaatatgggggcacatttacacccac

SEQ ID NO: 387462 - DNA, 122 bp, Homo sapiens
gcctgaagtcgggaggctgcggcaggaaaacagccaagggtccagggccatgtgtctgagcgagagcgtgactcccaggtgcactcgctgcgctagccctgcagcctctgcaaggaaggcac

SEQ ID NO: 387463 - DNA, 122 bp, Homo sapiens
ccacgaagagcttgatggcgtcgtggtccttcatgggtacggcgggaccggggtttagcccgctcatgccgacgccgctgtccgcggtgctgaaacccaggcgcgggccggggccagcgggc

SEQ ID NO: 387464 - DNA, 122 bp, Homo sapiens
ttctggctggagaacagcagtgggaagaggacaatgctcacgagagggacaatgctgtctcggtttctgcctgacttttggttgctactgtgttctgtggaacaaatattttatatcatgtt

SEQ ID NO: 387465 - DNA, 122 bp, Homo sapiens
tgcggccaactggacctggaaccttgcagggaaggaattctgggaagcatgggacccgcacggctcagctgacacagtataaactcaccagagcttgtccttgcttgtaaggcagtgaaaag

SEQ ID NO: 387466 - DNA, 122 bp, Homo sapiens
gattctggctccaaaatccatacatttaagctgatactatacccgccacctcactggcaacggattataaaccctttttcagatcctactacgtgtcagcctacttccggctgggggaagat

SEQ ID NO: 387467 - DNA, 122 bp, Homo sapiens
tttatcctgacaaagtactgtattcactccaaaagaaatttaccaaaataaatgaacacacgaatatataaataaatagttttactttaaatgcattatttttttctcttagggaaataact

SEQ ID NO: 387468 - DNA, 122 bp, Homo sapiens
cataggtccgcagggccggggcggttggggaccgggaggctggggtggggctgaagacctcgcgctaagagcgccttactttaaggttagtttctcggatcgctgaacccggggctgaagga

SEQ ID NO: 387469 - DNA, 122 bp, Homo sapiens
acgaccttccgggaccggaagtgccggtcgaagtcgccctgcaaggcgtgtgtgtgatcgcgcacctgccggggtagggagtgcgacgctgcagcccgtttcgccacttcttctctggttct

SEQ ID NO: 387470 - DNA, 122 bp, Homo sapiens
gccaggccagggactcagctggatggcatccgggccagtgactcccactggctctttgcccgggccccactgctccagctgccccatgcgtgacctggtcccaaaaccttgtccagcctggt

SEQ ID NO: 387471 - DNA, 122 bp, Homo sapiens
tgtacccaggcgctctgggctgtgtccaccacagaagccctttgtgagaagacaatggaccgttctgtaaaaaccttcatttcctagagaggggcccacctgtgaccccaggaggggataca

SEQ ID NO: 387472 - DNA, 122 bp, Homo sapiens
actacaagcccctgaatgcaatgggcagcgaaacgcggccgaagagcaacttcggatgtacggtttcggcaacactgatcaacgtgtcttaaagtcagtggctgttgttactactgttatta

SEQ ID NO: 387473 - DNA, 122 bp, Homo sapiens
gagcaggcctggctgggaatgccgtgctaattaggccgccacattctcagggggccttgtcggagccacccccagctcccctaccctctgcccatcgggtctccggtctccttgctgtgaag

SEQ ID NO: 387474 - DNA, 122 bp, Homo sapiens
ctacggaggagcagcagagaaagggagagggtttgagagggagcaaaagaaaatggtaggcgcgcgtagttaattcatgcggctctcttactctgtttacatcctagagctagagtgctcgg

SEQ ID NO: 387475 - DNA, 122 bp, Homo sapiens
aggtcaaacgctgccggctaccagctgcagctgggagtgaaagactagaatacagaaaggcgcaggcagtcacgtaggactaggccgggtttaacacccgaacagtggtgctagaaggtcag

SEQ ID NO: 387476 - DNA, 122 bp, Homo sapiens
aggatcaaaaacactggcttgactgtttttttggttccatgttacttggtcacatacatacggcccatgccctcagaaatgtatatgtatatccctgcccaaagttattttgcggtttggga

SEQ ID NO: 387477 - DNA, 122 bp, Homo sapiens
ggggcacagaggaagttttcccttggccctgttacaccaagtaatgggctcactgcttgacgcgctacatctttccacattagtatatactgcttttttctcataaaaacaaacaaacaaaa

SEQ ID NO: 387478 - DNA, 122 bp, Homo sapiens
ccctttcggagtcaaagaaaggggtgacggatgcacctggaaaatcgggtcactcccacccgaatatggcgcttttcagactggcttaaaaaacggcgcaccacgcgacaatatcccacacc

SEQ ID NO: 387479 - DNA, 122 bp, Homo sapiens
ggccaggctcgggagggaaaatctgggagcggcctctggaactcaccctgactccttcaccgtccgctcctctttttggcttccggggccaaaggttggggactcgaggcgcggctggagcc

SEQ ID NO: 387480 - DNA, 122 bp, Homo sapiens
ctgaagtaaggaggtagcggcccaatgggctgtgggaacggtcctcggcgggttgaggggcggggatatgcaaatatggtttgaaaagccggcgggaaatccgagtttcgcgggaggacctt

SEQ ID NO: 387481 - DNA, 122 bp, Homo sapiens
aagggagaaggtggggcggccagtccagatctaaagacggtgcggggggatttggcaacacgtgtgtgcaagacagacagacgggaggccccgcggcgcgttttcctaggaatgaaagggac

SEQ ID NO: 387482 - DNA, 122 bp, Homo sapiens
ccaggagcctgacacatctcggcggcccctgaaagtcgaccccgaagccgggcctggggtcgtgggaaccccttcggcctcagccatctccccgcggcagccacaacatccggggccgtggc

SEQ ID NO: 387483 - DNA, 122 bp, Homo sapiens
ctctagtgctcacataatgggtgaagccatggaaagagtctatggtggatgtttatgctacggtccgccaatagaaaatggattctattatgacatgtacctcgaagaagggtaagccatca

SEQ ID NO: 387484 - DNA, 122 bp, Homo sapiens
tgggccagcagctgcggagggtgcaccgggtcccccagcagttctggctggccagcgctgcgctcgaattctcgtggggcctcagctgcctccctgcggggcagggctgaggacctgcagcc

SEQ ID NO: 387485 - DNA, 122 bp, Homo sapiens
aaagaaacaagcagggtgtgctctatttcaaaaattcaatcctcagggctgaagctctcacgattaattaaaattaaatctccagtgcagctggaaaaagaaaggctgctgctcggcgccct

SEQ ID NO: 387486 - DNA, 122 bp, Homo sapiens
agacggtgatggcgcggtcgtagctcatgccggcgggcggcggccgggctccttccgccgcgactctcaaaagcgcacactcacggcccgcgcgcacccgcgactcccggcgccactacgcc

SEQ ID NO: 387487 - DNA, 122 bp, Homo sapiens
ggtcagcctgcagctcctgctccagggggagcagggccttgtccagcaggtagggcaggacggcatgcagtgtcaccagcacgccacggcgcagcgaggagggcacatgtatccgcgatggg

SEQ ID NO: 387488 - DNA, 122 bp, Homo sapiens
gagatcatggcagtgaatttccccctttggtgctgttctggtaatagagttctcatgggacgtggttaagtgggtggcacctccccactccctcttggacctgctcctgccatataagacgt

SEQ ID NO: 387489 - DNA, 122 bp, Homo sapiens
gttcctcgccgccctccctgcccccatttcacggctgctcccctgcagccgctccagccccgactttatacacacaggcccagccacctacgggcaggcgaggcctcctggaggcccggcgg

SEQ ID NO: 387490 - DNA, 122 bp, Homo sapiens
ggatttggagaatgctgacgggtgtccggtcaaggttaggccccaggtaggtccgctttccggacgtgggcagggtagccccgagactaacctatggagtgaacctggccaggggaccctac

SEQ ID NO: 387491 - DNA, 122 bp, Homo sapiens
gcgtgagaagggctcctttacactcagaggtgccgtaatggagccaagggacggcatcctcggggctcccgagccccgagtggagaagcttggggcagagggacggcgggggcggcccctgg

SEQ ID NO: 387492 - DNA, 122 bp, Homo sapiens
ctcccgcctcgccgtgtgtttacgtggagacgaagatggcggcggcggcggcggtgacggcgcttcccgtgcggctgaggacgatccgccagtgagcgcggagactgcttccacttcgggcg

SEQ ID NO: 387493 - DNA, 122 bp, Homo sapiens
gaatctggacaatatcttgactctgactaattccagcttaacaagaagggtgttgtctctcgaatgaatgtaacaggaaagcagaaaagcataaagacaggggtgagcaggaaacttgccct

SEQ ID NO: 387494 - DNA, 122 bp, Homo sapiens
tggtaaagagttcgtcagtcttccttgctgataatgctgctgttcttggagtaatacctccgagactgaaactttcgctaaattcttaatatgttacttaaaaatgaacggacatgatggca

SEQ ID NO: 387495 - DNA, 122 bp, Homo sapiens
gagaaggcgtccgaggctcatgggggctgtaggatttggcctaggctgaatctgggcccccgggtagctgggtgatgccagggctctgtgagggatggtgctgggagtggagggcagggcag

SEQ ID NO: 387496 - DNA, 122 bp, Homo sapiens
gacgaccagacagggcggggtgcgggcccggcctcaccacccacctctcatccgccatcacgatggcatcgaatatgtcctgactgccagccatagcggcaagcagcccgcccttggccccc

SEQ ID NO: 387497 - DNA, 122 bp, Homo sapiens
aggtgccatctcaggcagcacaccctgcctgcatgcccttggctgggctatgaaggcgcacgtgtgtgtgtttgctcacatcatgggtgtatgtgtgtctgtgtgtgtgttcaggggtgtgt

SEQ ID NO: 387498 - DNA, 122 bp, Homo sapiens
tcaaccagaaggcaggcctatcacgtctcagaccaagtcgaggacgccatgttcacccgccgtctgtgtttgaacctgctctgcgcttcctggttggctgcttcaggcgcgcgcgtacgctc

SEQ ID NO: 387499 - DNA, 122 bp, Homo sapiens
tgagcatgggaatccaacccccacggtgggagagtggggcacttggctgggcttggggcacgtaccctttcacttgagaatgaggcacaagctctatgtcatgttgtaacttccaaattcca

SEQ ID NO: 387500 - DNA, 122 bp, Homo sapiens
cgcacaggcgttcctagcccaggcggggcgctggcaaccctgcccgccctctgcctgtgtcgccaccacagcccacagggctcagatgtggtttcacagacccagatgggctgagcaggcgg

SEQ ID NO: 387501 - DNA, 122 bp, Homo sapiens
atctataattagacccggaaagctgcttgcacatcagaaagagagagagaaagacacgaccgtggcttcacgagagccagatatgcatcaggatttcaaaaaacaaacaaaaacctcaccgc

SEQ ID NO: 387502 - DNA, 122 bp, Homo sapiens
ggcctcctcacccaggctggagcaagtccgctgcacccgtcaagcggggaagagctcgggcgggctttctccatagcaatactttgctatggggtcccggtaggtgttctcatgctgcacgc

SEQ ID NO: 387503 - DNA, 122 bp, Homo sapiens
ggtcatgatccatcccaaatcccaagagccatcagcactctcatagctagagtatgctggcgcgccacaccaagagagcagggagttctacagaaggctacgttcagcctcaaggctgggaa

SEQ ID NO: 387504 - DNA, 122 bp, Homo sapiens
gatctgccgccgcttctcctggtccgtcaggggcttcgccatggctggggcggcgggctgcgcggcgggctgcgcagagagctggaagtgcggccggaggcgctgggctgccgggcaggggt

SEQ ID NO: 387505 - DNA, 122 bp, Homo sapiens
gaacatttttatctttctggtccctactctctcctaggctttcagatcttgagggtacaacgtggttatttctcagctttgcttctccccagctgtcaaaagtgctcaataaatatttgacc

SEQ ID NO: 387506 - DNA, 122 bp, Homo sapiens
agcatctggcacacactagttgttatcatcatcaagttgagtaagttgctcatggtttcacggggagacagacgagcacatagctgcccatcactcagtgtgtgcaggtttcttagcaaaag

SEQ ID NO: 387507 - DNA, 122 bp, Homo sapiens
agggtagggaaaagaggacactgagaagggaaccaaggcaggcctggtcatatgggacaccgagttgcagagagatttctagaggaggtaatgacaaaactagatgcgttagaattaaactg

SEQ ID NO: 387508 - DNA, 122 bp, Homo sapiens
cctggcactccagagggcgcggcgggtggggaggcagcaggcaccagtccaggagagcttcgtggacgtggctcctgcgcgcacacccccaggagcacagccacgggctgcaggtgtggctg

SEQ ID NO: 387509 - DNA, 122 bp, Homo sapiens
tcccacgtgcttgagtctgcacgtgactaggttctggcgtaggggtgtctggtctctggccggggtcaaggctcagcctgtggctactctgggtctgggtttctttgaggagcaacttggtt

SEQ ID NO: 387510 - DNA, 122 bp, Homo sapiens
tagcaaccaatagtgtctatattatggagagggggcagcaggggcgcctgtgtctccagccggccttcacactcaattacattaagtggaggctccgagctgcggtcggtgggcagttgctg

SEQ ID NO: 387511 - DNA, 122 bp, Homo sapiens
cattcggaagtgcttcatgccctgcttctgtacagcagatgctgtgcattaattggcctgcgtagaagtgacccagggttccttgcagcgggcccaattttaggcagagggtttaaatagct

SEQ ID NO: 387512 - DNA, 122 bp, Homo sapiens
cagggttttcagggtttaaccttaattccacaggccctgtgaaactattaatggtgctgccgcagctgctaagctaagctgagccaaaagcaggacacttagagaaaaatcagattctcagc

SEQ ID NO: 387513 - DNA, 122 bp, Homo sapiens
acgtcgcccacctaagcgtgaacagctgcgtcgcggacgccgccttccggcagggacccgcgccccaggtaagcgttagtcccgccttcaggagtgcggagcctcccattggacgaggtctg

SEQ ID NO: 387514 - DNA, 122 bp, Homo sapiens
atgtaagaacttctctcacactgtgttggcagcgacagacatgtgcggagaaaaagtaaccggaggcctaatactggctcagctccagcaataaatccatcattacaccatggaactggcac

SEQ ID NO: 387515 - DNA, 122 bp, Homo sapiens
cggcgcgcaggggtgagggagagggtggggagagtcctaattattatgaatttctaaaggcgcagtaattattcacggggagcaggacaaaccatggctaggcagggaaatcgatatatttg

SEQ ID NO: 387516 - DNA, 122 bp, Homo sapiens
tttcaacaatgaagtgcggtcaccaaactttgattccccctcccccgcccctaatataatcgtacttttactctgaaaatgctggggtctgtaatctgatcgcaaggcttctggggttgcag

SEQ ID NO: 387517 - DNA, 122 bp, Homo sapiens
gggaaagcaatttttcagttcataggatttagtcggactggttactatatgtcactgcagcgtggagggaatatcagaggactccactgcattaggcgggctgggcacttgcttgccgttga

SEQ ID NO: 387518 - DNA, 122 bp, Homo sapiens
ttgtgaaatagggagactcccttctcttagggtttttagggttaaatgaaaatttacaaccgtccctaaaccttgcaagcactcagtaaatggcagctactgatgtggtttatgttggtttt

SEQ ID NO: 387519 - DNA, 122 bp, Homo sapiens
gcggagaggcaattgagttgtagccattttcttattgttgtctttgaagcccctggaagccgcgccgagccgtttgcggtccccgcgccgcgactcctcgagggggggtggcgagcgatgaa

SEQ ID NO: 387520 - DNA, 122 bp, Homo sapiens
ccatttcccacaagcctgcagggtggtgacaggccctcattcccatgtgccccaagatttcggattccaaaaatacatcccctggctccccggagaagtgtgtcacggtgtctccgtttcac

SEQ ID NO: 387521 - DNA, 122 bp, Homo sapiens
gtgatggcaagagtggtgtcaatgaagcggtctacacagctggagagacaattttcagtgcgagagtctaggcgattccctggcttctccacacatttatcccaacataactccatgaagtg

SEQ ID NO: 387522 - DNA, 122 bp, Homo sapiens
gctgtgggcttttgttttgggcagcattgactgtgccggaatcctgaaactcagaaactccgacattgaacttcggaaaggagagacggacatcgggaggaagaacacacgggtacggctgg

SEQ ID NO: 387523 - DNA, 122 bp, Homo sapiens
aggcccggggccaactatacgggaggcggggggaatggcgcgggccgagatctttccctacgtccccccgaccccatcggttggtgccagaggaccgaacggctgggctctgagggcgaagg

SEQ ID NO: 387524 - DNA, 122 bp, Homo sapiens
ctctcctcaagctactcaagctgaggctttgtgtgcatgcctgccacataccagccattccgtgagtgttagtggaacaggtgagtcaatgagtcagggagtaaaatttgtgctttaaaagt

SEQ ID NO: 387525 - DNA, 122 bp, Homo sapiens
tagagagccctttcctggaaagcctcacacccgtgtcttaaatctggcagccatgcttgtcgcttttaagtggcccacagttgcccagtgttttcctccagttgttagcgagaagatagaac

SEQ ID NO: 387526 - DNA, 122 bp, Homo sapiens
ccggcccccacttccccctttcttataaccactgcatgattttgcataaaacttttagggcgtgtccaagaaaaaagtttgaaaactactggttaactcactctttccagaaacttggctgt

SEQ ID NO: 387527 - DNA, 122 bp, Homo sapiens
ctccacacctccgggcaagctgagtgagccggctccggcttcaaccagcccagagaggggcgcccaaagcgcagtggcgggctgaagggctccccgagcatagccagagcggacgccgaggc

SEQ ID NO: 387528 - DNA, 122 bp, Homo sapiens
ttttttctatccggtaactgagatgactaagtcactaactaagtgactaagggataggaacgtctacaacgtggagatgctggacgaaaggatgattcatgtcccaggtaggacagagcgaa

SEQ ID NO: 387529 - DNA, 122 bp, Homo sapiens
aaaaggtttaaggaaccaggatgatttcttctaaagaagggaagtctgagcaatctgtatcgggggctgcttttgattcagtagaaagaaataattctacagtttactgagcacttacataa

SEQ ID NO: 387530 - DNA, 122 bp, Homo sapiens
ttgggatcctcaaggagaaaaacagtgttacaagcgctcaattattttataatgagcctgcggtgtgcagggagagccacagacattttcgaagctgaagtgtgcgcctgcatgtgtgtgtg

SEQ ID NO: 387531 - DNA, 122 bp, Homo sapiens
gctaacgagcgggctctaggccctctgggattggctgtgcctgagcacatcttccctcagcgtttctgattggtcgctggacgcgcgggatgcgagtccccattggctaggccagggcgcct

SEQ ID NO: 387532 - DNA, 122 bp, Homo sapiens
cttgtaatcccactctccaggattgttccgggttctgtacccatagccaccaatgagaaccggaatgactggcctttttatgaaattttgacacctgtcaagaaacctggccctcgcagccc

SEQ ID NO: 387533 - DNA, 122 bp, Homo sapiens
taggagaggagtgccgccgaggcggggcggggcggggcgtggagctgggctggcagtgggcgtggcggtgctgcccaggtgagccaccgctgcttctgcccagacacggtcgcctccacatc

SEQ ID NO: 387534 - DNA, 122 bp, Homo sapiens
gcccgtgtcagagagcggcccaggtactggtgcaggagctggagcagtggcagttgttgccgaaggggttggactgggagggcaacgagcacaacaggagctacgaggaattggtcttgtcc

SEQ ID NO: 387535 - DNA, 122 bp, Homo sapiens
gaagagctagagagtaaggaaccggggcagccttcagtgcttaactgggcccagctacctcgagatttatgcagatgacagaaccttttccaaggtttaggacctagaaagaagaaaagctg

SEQ ID NO: 387536 - DNA, 122 bp, Homo sapiens
gtaagtgtccccttgcgttttttagggtgcctttctttacccttcttaaaggttacagggcgtgaacggcaatcaggctcgattctccaccctctgcactcagacgtgttaaaacgctgcta

SEQ ID NO: 387537 - DNA, 122 bp, Homo sapiens
ctgttccttctgacgttcggatgtgttcggagtttcttcctcctggtgggtttgtggtctcgctggatcaggagtgaagctgcagaccttcgcggtgagtgttacagctcttaaggcggcgc

SEQ ID NO: 387538 - DNA, 122 bp, Homo sapiens
gtgccagcacagctcaggcccggctggagctgccgttgctaccaaagccgtggcgcatctcggtttgtgggactttcttcaacccaggatgtgggcacacagctgcttggctggcctggtga

SEQ ID NO: 387539 - DNA, 122 bp, Homo sapiens
ttgaaacctgcctgagggtcagggcggcctgtgccctccacctgatccagctccagcagccgccggtactgggcctccagggtactgtcgttggccgggccgggccagctcaagtcctggcc

SEQ ID NO: 387540 - DNA, 122 bp, Homo sapiens
agacacgaggtagccaaagttcaacaaggcgacataacttgcctggggccagagtgctgccgaacttcgaaaaagacagaaatccagatccaactcccactcttaggtttttttctcctcac

SEQ ID NO: 387541 - DNA, 122 bp, Homo sapiens
ccctccgcccgcccgcctacccacccaatcccaaacgggtgctggatcaggtgctgaatccggctgcctcctcgggtaccagtcactgtgcattgctgtgtgtctgccaccgctgcctggca

SEQ ID NO: 387542 - DNA, 122 bp, Homo sapiens
gggaaaacatactcccagcatgctgtaaatcctctcattcttagctaaccatgtgactcccgttctgggccagaaagatggtcacaaatacttaggactctggcctttcccgccgcatggct

SEQ ID NO: 387543 - DNA, 122 bp, Homo sapiens
ggtctcgcgagagttggcacatgccacgcgagggccactgccctattggcttctgagtcacggactgccccggaagcttctgggccacggactgccccggaagcttctgggccacggactgc

SEQ ID NO: 387544 - DNA, 122 bp, Homo sapiens
tcaaccttcagacaaacgggccgatacgtacgaatgggctaccataagccccgccccttccgggaggtctccggaagttgggacccttttagctatgaaatattttggattgcgtagggtct

SEQ ID NO: 387545 - DNA, 122 bp, Homo sapiens
aagtgatcctcctgcctcggcctcccaaagtgctaggattacaggcatgagccactgcgccgggccggctttctccacatcgaatctttcctgccaggaaagtgacattcttgactgacctc

SEQ ID NO: 387546 - DNA, 122 bp, Homo sapiens
gccctcggcgcgctcggcccgggcctccgcacgcatgtcctccagctcggcctccatgtccgtgtggcctctcagcctcctcagagctgcggaaagcagaaccacccgctcagagggccgtc

SEQ ID NO: 387547 - DNA, 122 bp, Homo sapiens
gcaaagtagagcaaacctgttttaatgtattatttcgggagaataacttattccttcttccgtctcccagcagtcttatagctggatcagctaccaagagaagttgtaaaccaagaagagaa

SEQ ID NO: 387548 - DNA, 122 bp, Homo sapiens
actggccattcattcatttattcattcactcattcacagcgtcttactgggtgcttcggacgtgtaaggttttgtgggtagtgaatgcgacagaccccagacagcaatcggagggccacgtg

SEQ ID NO: 387549 - DNA, 122 bp, Homo sapiens
acgtgcacaagttctcccacacttagctggcagcaggagacccctaggaagaaagtgagacggtgagagatggtagtggtaacctacaatgttgtcagatcatgtcagcctggccagctgct

SEQ ID NO: 387550 - DNA, 122 bp, Homo sapiens
tcccgactggctttcgaggcgcgtgcgcagatggctgccccggcgagtggtaaacagagacgtcaggagggggctgctgcttggagcaaaacaaaagggaaacccggggggcggggggtggg

SEQ ID NO: 387551 - DNA, 122 bp, Homo sapiens
tcctcacttctcagacggggcggctgggcagaggcactcctcagttcccagacgtggtcacggccgggcagaggtgctccccacttcccagacggggtggcggccgggcagaggcgctcctc

SEQ ID NO: 387552 - DNA, 122 bp, Homo sapiens
aaaaggccaggactccacgctgctgaccctccagcgtcccatgtccggcaggcacgtggccgaatagcccaagactgaggactcacacttcccactttgcacctggaggccacctgcagacc

SEQ ID NO: 387553 - DNA, 122 bp, Homo sapiens
taaaatttaaaacctgcaagcgcgggagctcagggacctggccaggaaggcctgagcttccgggtcatcttagcacgccccctcccggtggcccttggccggagccctccggcgcgggagta

SEQ ID NO: 387554 - DNA, 122 bp, Homo sapiens
gaggatcacttggggccaggagttcaaaaccagcttgggtgacacgacatagcgagacctcgtctctacaaaaaaatttaaaaagttaacgggcgtggtggcctgcgcctatcgtcccccag

SEQ ID NO: 387555 - DNA, 122 bp, Homo sapiens
tgtgctgtcactcacctttgctgcactttggtcacatttgtgaaataaggtggtccttttcgtgcagctcaagggctgccctcagttttgaggtcctttttatgttaagtgaggctttccca

SEQ ID NO: 387556 - DNA, 122 bp, Homo sapiens
gaccgcggccgcaggaatcagcagcgtagcccaaagccagaaacgagaagcccactcagccgccatgatgcgagcgcatgcaccacccaccgccgtcccggcatgcaccgcgccgcgggctc

SEQ ID NO: 387557 - DNA, 122 bp, Homo sapiens
ctttgggctgttgctttcttgtcaccatctgagttctcagacgctggaaagccatgttctcggctctgtgaatgacaatgctgactggagtgctgcccctctgtaaagggctgggtgtggat

SEQ ID NO: 387558 - DNA, 122 bp, Homo sapiens
atttgtaatgatttcccaggtgatgtcttctgcagaccacaatgcaagagtttctcaaatcggttgtttactgaaatttagggtgctcataaaattcagattccaaggcactaccctagccc

SEQ ID NO: 387559 - DNA, 122 bp, Homo sapiens
gaaagaaaagaaaggaaggaaggaaagaaaagaaagaaagagaaagaaagaacgaacgaacgaacaatgggaaaaattgactgacagacctctttagggtctgcgagtttctcatagtggtt

SEQ ID NO: 387560 - DNA, 122 bp, Homo sapiens
tcagatacgcggcgcagcaggggtctcagggccacagccaggggggcggcgggagacatgcggaatcgcagcggaaggcgggaggcagctgtgaactgtggctcggcctgcgtccgccctgc

SEQ ID NO: 387561 - DNA, 122 bp, Homo sapiens
cggcggacgaggacgacgacagagatgtggctctgcagatccacttcaccctgatccaggcgttttgctgcgagaacgacatcaacatcctgcgcgtcagcaacccgggccggctggcggag

SEQ ID NO: 387562 - DNA, 122 bp, Homo sapiens
tcgccctcactcttcactcattcccgccccaagggcttcaccttggtagggcttaatgagcgaatgctcccgcttgagatgttcactgttgccgtcagttatatccgcagtcacagacccca

SEQ ID NO: 387563 - DNA, 122 bp, Homo sapiens
gtgaggcgagtaggaaatgctggatctggttaatgattcgccttgttccgggagtgcgagcgtggcaagaggaagctggtgaagtgggggaggatgcgtgctccggagggccgccaccccag

SEQ ID NO: 387564 - DNA, 122 bp, Homo sapiens
cccccagctctctccctttttcctcaggaacccaggggtccaggcccaagaccctcctcccgttttcttccaggaagcctccatctcaaaggcaaactcatttttgggggagaaagcaagtg

SEQ ID NO: 387565 - DNA, 122 bp, Homo sapiens
actgggtggctggaagctggagctgggtagggcacaaagatgattaagaaaaatccctatcgtcaaggagcctgtttataaactcgtaagggcaataaacacacacagggccaactttactg

SEQ ID NO: 387566 - DNA, 122 bp, Homo sapiens
gatttggaaaaaatgggtgggggttctttaaggggtcggtccagcggcgtcgagtggcaacgttgctttaaaagggggcggagcgtccgttgggccccgcccccgaatcgcagtgcttgggc

SEQ ID NO: 387567 - DNA, 122 bp, Homo sapiens
atccaccaatgctgacgtcagtatgggagccagtgaggttcagaagacttcttatctgctcgcctcctctcagtgtcgactgctctaatttttccaggcccagagccacacccccacgggca

SEQ ID NO: 387568 - DNA, 122 bp, Homo sapiens
catctgtcaccccattaccactgactacacagcagctgctcagtgtgggctcaacaaatccgtttatgtctgaatgactaacacgtctgccagcctcctgtccgagagcatctacagcgcac

SEQ ID NO: 387569 - DNA, 122 bp, Homo sapiens
tcatactccttcagggcctcgatggcactctcggcgttgcgttcctgcagaatagaaggccggcaggcagtctgtccctgctgccccccgcagaccacccccttggagtgactcctctgggg

SEQ ID NO: 387570 - DNA, 122 bp, Homo sapiens
tctaagccaatgggattcccaaggaaacctggaaaactagttaactagttcacactatgccgacgggggtcggggcgggggcagcggtggtggcgggcggggggggggggatctgacatgcc

SEQ ID NO: 387571 - DNA, 122 bp, Homo sapiens
tttcaccctagttcggttgggtgctccatcttacggagccccaaacttattttgagaggccgccaccgtgttatgggcgtgcgcaactgcctctacggcaataatatgtcaggacaacgcga

SEQ ID NO: 387572 - DNA, 122 bp, Homo sapiens
tcataatgaattcccagaacctttccaagccaaccagcaggcacaggctctctccctacccgcagcactttccagctttgtgacttagcggaaagaaagaggccgagcctggatcctgggag

SEQ ID NO: 387573 - DNA, 122 bp, Homo sapiens
ccggcggcggcggccggaagtgttgaagcccggcctggcggcggcggtggcggtagctgccgtggcggcctctgcgcatgctccgtcgcctgcccgccctggccgctcgccgcccgcccgcc

SEQ ID NO: 387574 - DNA, 122 bp, Homo sapiens
cgccctaaactcccgaggtcccgcccccgaccgtgggctaaggtccggcccccgtatttccgggcgagaagtgaccacgtggttgtcgcctataacaatccggccctgctcccatccactgg

SEQ ID NO: 387575 - DNA, 122 bp, Homo sapiens
aaaaggttccggaatgaaaaaataatggcgccccggggcgtagcttctggagcggggctccgccccctgccctagcatcgccctcgccacttttgtgtaaacttggcatcaataatttctac

SEQ ID NO: 387576 - DNA, 122 bp, Homo sapiens
gggcgctggccgcggtgctgaagcgcctccaacccgcgcgccccagtttaccctctcccccgctgctatatagctagcccacctcaaaagttttgacccaaggaatagataaagggattaac

SEQ ID NO: 387577 - DNA, 122 bp, Homo sapiens
caagagcagggtctctgccctcagcagcccccagtctgggggagggtgggaagaggacaccgataatccccgttttgatatttttttgtgccacatgatcggcaggaaaggtgagacagaca

SEQ ID NO: 387578 - DNA, 122 bp, Homo sapiens
tcctttgttccggagcgagtaggacgcgctacctcctggaggaaagaagcgactgcgtttcgcagtgctgacttttttttacagtgtgagctaacgtgtatgctctgaaaaacaccccgttt

SEQ ID NO: 387579 - DNA, 122 bp, Homo sapiens
ttgaaggacacagggcgggcggggaggccagagtgggggccgagcaggacctcccacatccgcctgcggaagccccagtgcccggaacccctgcacccgggcctgcggctgtatttggagac

SEQ ID NO: 387580 - DNA, 122 bp, Homo sapiens
cgggaacccacgcccgcctgaccttactatcacctcggccggaagtgtctccggccttttcggaagtcactttcacctaaccttacagactaccgctccgccggaagtgacgcagggcagcg

SEQ ID NO: 387581 - DNA, 122 bp, Homo sapiens
ggctcccagctcggtcctcttcgaggggcctcggctcctcgggcctcttctcccgggccccggaggcaccctgggcatcggccttggggagtcctccctgcccagccttctgggctggagcc

SEQ ID NO: 387582 - DNA, 122 bp, Homo sapiens
ctaactcagtttttttccaatccatcctccatattttgccagagtaatctttctaaaatgcgtatccagttttatcaatctcctgctgaaatcaaccagctcttcatgtcctttagaaaaaa

SEQ ID NO: 387583 - DNA, 122 bp, Homo sapiens
gtttgattggcagcgtctgcccggccctgccctcacgccctgaccctcagtgtcccttcacgcccaggtgtgcctctggcagggaggacgtgctcatctctggtacctgaaaagaagttgcc

SEQ ID NO: 387584 - DNA, 122 bp, Homo sapiens
tgccccaccttgtctgccggtggagactgagcagtcagcccgctgtaatagcgaggccgacgcgggaggtgatgccgcctggccggtcaggtgctgaggcgccgaggagaggacatggctca

SEQ ID NO: 387585 - DNA, 122 bp, Homo sapiens
gcacgcaaacacttccctagctggaggcccgcgggcgcccaggctttacctgcaaggtggcgccaggtcccgccccgtcagatccggggggtccgggaccttttgttccttcctcttccgat

SEQ ID NO: 387586 - DNA, 122 bp, Homo sapiens
tacccgcccaagtgccctgtgaggttcactcacttctgtgttagaaaggacctacacctccggagtcctagaaggaaacatttattcatggaaagagcccaagcttttgaattctatagggt

SEQ ID NO: 387587 - DNA, 122 bp, Homo sapiens
ttgccttcttgctacataacttaggattcgccttttctcttctctgaacctcagccacatcgtccagtatactagcgcctcccgaaccgttgaacttcaagatctcttccagcatcaaagag

SEQ ID NO: 387588 - DNA, 122 bp, Homo sapiens
ccatggggaacatgcctcctacttttctattacctcagaactggtttgggaaattcacaacgtggggcagggagattatgggtaaaatacagcattctcttcgtctcctagcaagtccacat

SEQ ID NO: 387589 - DNA, 122 bp, Homo sapiens
gcacgcggcccctgacgtcagagggccgtgacgtcaaagatgtcccagagggggcacttccggcgggggcgtgggggcggggcgggacctgggaggccccgcccccccggtcctgagaggac

SEQ ID NO: 387590 - DNA, 122 bp, Homo sapiens
tttccgcccctccgcctgctttccaagcctggactcttaggagtggctgaagctgcggagcgcttttggagcctgtgaatgaaccctcctcctctccctcctccttcttctcgctgagtctc

SEQ ID NO: 387591 - DNA, 122 bp, Homo sapiens
cacagcctgcagcacaaggccgccagctccatctacatcaactcacgcagcgtcttcctgcgcaccgaccagcccgagggccgctatgtcatcatccccacaaccttcgagccaggccacac

SEQ ID NO: 387592 - DNA, 122 bp, Homo sapiens
ttttttgtcatagctccctaatttggaatttgtcatgatttgggtcttttctctagaattcggtgaatcagtggttagcatgttgtgtgctacttgcagggaagatcctagagtcgtttaaa

SEQ ID NO: 387593 - DNA, 122 bp, Homo sapiens
ctagggtgtggcagtgagaagaaatctcacagatgccttcctgtgcccggcaggggcctgcggtttcctggcctaccgtctggtgtggtacctacctcctccgtgccggcaacaaccgctcc

SEQ ID NO: 387594 - DNA, 122 bp, Homo sapiens
catggaaccctccacgtttcctaaagtggctactccatgaacacaaggggaaagaatacgcgaactcactctgcaaagtacacatctgcccgtgctgatggaagaagaaggatgctagtgca

SEQ ID NO: 387595 - DNA, 122 bp, Homo sapiens
gccttagagagattcatccatggtgaccgatttgagattcactgcagggttccatggttccgaagtccacacactgaactgttacatatgatgtctctgttcaccatgtgggatttctcaaa

SEQ ID NO: 387596 - DNA, 122 bp, Homo sapiens
ccctgacctgcaaaatcatggggaggttcaaaagagggacagtctctcccgcctggcaggcgagactgcttctccaggaggtacaggtgtttctagaaacacctacagggctacccccagtg

SEQ ID NO: 387597 - DNA, 122 bp, Homo sapiens
tgggcgccagctccctcccaggactggttcattggtagattccacttggggggtgcattccgccaaataaagctaacgtgaggcccggcgcggtggctcacgcctgtaatcccagcactttg

SEQ ID NO: 387598 - DNA, 122 bp, Homo sapiens
aagggcctttctgtttcacagggctaaagatggggcgcggttcctccacggggcggctgccgggtgaacggaacggggatggaggcgctgccagaagagcccgagctcgagcccgccctgcc

SEQ ID NO: 387599 - DNA, 122 bp, Homo sapiens
tgtacctcaactggcaagacacggcagttcttgctcagtgctctgaatgcaagaagacaacgcggcagagaaacctcaacactgacatttgtttgaagaacatggctttcattgccagaaaa

SEQ ID NO: 387600 - DNA, 122 bp, Homo sapiens
tcagatgcagacatgaaggaccagaaggctgaagcaacctgcccaaagccactatgctggcgggtggccgagtttgggtttaatccaggcccgaacctcagttccctcaagataaagttggg

SEQ ID NO: 387601 - DNA, 122 bp, Homo sapiens
cctggctgctcaccgctccggttcttccctgggcttccacagcagcccctgcctgcctggcgggaccccacgtccctcccgggcccctgtgagcatcttaccggacagtgctggatttccca

SEQ ID NO: 387602 - DNA, 122 bp, Homo sapiens
tggcggaggcctgcatgtgaccctgggccagctaagctggtccttagacgcgtgcctctgcgtctctcacttcctctctttgttggagggggagggacggagaagaggagtggaaagtggaa

SEQ ID NO: 387603 - DNA, 122 bp, Homo sapiens
cgggccggcggagacaagccagcggttccctggcgaggcggggacggtttgaggtgcagccgtgggtttcgtggccctgggtcacggtattcggtgcaaccttccgtttctggtgcaaaaat

SEQ ID NO: 387604 - DNA, 122 bp, Homo sapiens
gcgctgtgtgcccggacccacgtccttcccgagcccgcaaacaggagagccgccagcgctcgtgagcacagtgtacactttatttcagactacaggtttctgaacataataaaatctttggc

SEQ ID NO: 387605 - DNA, 122 bp, Homo sapiens
catgatggccaaggtcgtccctgatggcgtccagttggtcctgaaggaggcggatgcgctcgtccaggttgcgctgctgggccaggacggcggccttgcccgccagcagggcgcaatagacg

SEQ ID NO: 387606 - DNA, 122 bp, Homo sapiens
tttgaggccctgcttgtggaggagcagcttgcctggaggagcaggaagccaagtgggtctcgtaggaaggagttcaggcctcgcagtggttttggacagaatctgcgacttttcccaaaagc

SEQ ID NO: 387607 - DNA, 122 bp, Homo sapiens
tgcagggcgggggtctctgggtcggggttttctttggaaagctggaccggccgtgccctgcgtgtgggagctggctcgtggggcttggaggtgtgtgtgggagggacggtggcagggcgggg

SEQ ID NO: 387608 - DNA, 122 bp, Homo sapiens
gaggtcaagccactgtggccttgtgtcctgcaggtatccgcagatttatggctaaaagaccgggaccccctggaagccgagaaatggtgagtgctgggtctgtcatcgtgagagaggggtgg

SEQ ID NO: 387609 - DNA, 122 bp, Homo sapiens
gcggcggaccttctcatagcacttgtccaggtccttcagggtctcctccaggaaagtctccgtgccgcaagcccggctaactcacgcctccccagccatgtgcggccgcaccctccggtctg

SEQ ID NO: 387610 - DNA, 122 bp, Homo sapiens
taaaagccaaagccatccccatggccacagcccaacagtggcagggctgctcctaggggccggcaaggcgggtccatctgggccacttcaccccacaggaggccacttctgggagcccccag

SEQ ID NO: 387611 - DNA, 122 bp, Homo sapiens
cacagctggccatgtgagcacaggtccccagcaccggggcagcctcacagccacccaccccgaccctgctaggctccacggggaaaggagcccactgcagctgggggccttcagggaccccc

SEQ ID NO: 387612 - DNA, 122 bp, Homo sapiens
ccctgctcccagccccagccttcagctgtgggacgtcagcgcctagttaagtctgttgaacgagaattctaaaaccttgacatgtgagctaacgagccccgcagctccgaggcccgagtgct

SEQ ID NO: 387613 - DNA, 122 bp, Homo sapiens
ggaatcaagtggcttcctgcttcacaggtcttcgtctttaccactggcatttcctcctctcggaaaaccctgaggagtccctttctgggcagtcttgattctacagcctccgccttccgaag

SEQ ID NO: 387614 - DNA, 122 bp, Homo sapiens
ggttcacaggtgtgtcctagcgccgtcctggggctgtggagcagctgcctctccagtgcccggggtttgccataaatgccgaatctcagccccaccctaaggcactgactcagaacccacat

SEQ ID NO: 387615 - DNA, 122 bp, Homo sapiens
gagtaatgctaagaaaacatcccccgtctttcaggagggtgaactgctttcccctgaaatcgccacatcctcagtttctcaaaataagggaaaggagtccgcttgagctactgacaagatga

SEQ ID NO: 387616 - DNA, 122 bp, Homo sapiens
tctgagtcgcctggccctggctttcagccccttggtgctccctgagtgtgctggcagccgcgccccagcccttcacttaactgccctcgtgagatgttttcagagcgcactgttgagaattg

SEQ ID NO: 387617 - DNA, 122 bp, Homo sapiens
cttgcggagggagctggggtctgtgtagcgcttggagcagccagggatctgacaggcgtacggcttctgtaacatggggggcacgggtggggtgagtgaggcccatccctacgggacacgcg

SEQ ID NO: 387618 - DNA, 122 bp, Homo sapiens
cctcaagcgatccacctgcctcggcctttcaaaatgctgggattacatgcgtgagcaccacgcccagccggcacttccatcaatttttgagtctgaagcccacccacacgcaaccccaacat

SEQ ID NO: 387619 - DNA, 122 bp, Homo sapiens
ttacactcctaggatcaagcaatcctgctgtccggcttcccaaagtgctgggattacaggcgtaagccaccgcgtccagctagaacaaatgatttcttaaaagcaactcagatatttaaata

SEQ ID NO: 387620 - DNA, 122 bp, Homo sapiens
ggatctggtaagaggatgaatttggctctaaacaaatgcccatggccccggaagacctgtcggggccaccaagttagtttctctggcaaaatttgattccttccatctcaccactatagtaa

SEQ ID NO: 387621 - DNA, 122 bp, Homo sapiens
ctgaggaggaggagttgcagttgcagttgaagtcagctggcggaggccagacctcagcagcgcgagctggagcacagccgagcccaaggcgctttccccggtgggtggggacaagtgggcga

SEQ ID NO: 387622 - DNA, 122 bp, Homo sapiens
aagtccaatcaccagaagagactgtgctgatgggtctagctttcaactcaggcctcaagccggttgaccaagctccaaagccagctgctgttcttggctctataatgatcaggctgggcctc

SEQ ID NO: 387623 - DNA, 122 bp, Homo sapiens
tgacgctgggtagcctttggctggggttggttatgaactccgacacagcggtggtgcatacggaagggtggtagccgggacggttccggtccctgcgagcgtgtcccgggcgtctccgcgga

SEQ ID NO: 387624 - DNA, 122 bp, Homo sapiens
tctccaggatagaaaagtggtggtcactttatccctagtagacatgctgctgggctttatcgccccagcattcccatcccctccagagccccttgtcactccagaccagcgagtgtgggcct

SEQ ID NO: 387625 - DNA, 122 bp, Homo sapiens
ggaaacttgagcataaacaccccttccatcctggtgcgactctcaggaagtgagaaaagccgagcctcaccgtgtggttagcgccacaggccacgtctcgtacaaccacgtttggtacaggc

SEQ ID NO: 387626 - DNA, 122 bp, Homo sapiens
aattattcattcctttattcaataaatatctaagcccagactttgcagaagcgtggtgcacgcagctcctccaagcccgcagaccaccgcgcgctggcatcccgacgccgggaagccggggg

SEQ ID NO: 387627 - DNA, 122 bp, Homo sapiens
tctagggggtccccaaaccacagggggtaccggtaccggtccttggcctgttaggaaccacgcaggacagcaggaggtgagctgcaagcaagctagcactagcctgagctccgcctctgtca

SEQ ID NO: 387628 - DNA, 122 bp, Homo sapiens
cctctggtgatgcactagggtatggcaacttgggggctgggggtcggatttggtggggggcgtcttgcctggggcccccaaccaccaaggatgggtcttgtttctcaaggctagggaccctc

SEQ ID NO: 387629 - DNA, 122 bp, Homo sapiens
agcagcctccttagcccatctctgcccagatgtggccttcagggctccccgagatggggccgggcctcatgagtcactcacagcgacccggggcgccgagtccgttcctgcggccgagcaag

SEQ ID NO: 387630 - DNA, 122 bp, Homo sapiens
cagcacctcaacgatctctagagggcagtgttgcttaattccaaatgccgaactgatcatcgtgggtctctgaatgcaaaacactggtgcaataattaaaatacaatttctcagaagtttcc

SEQ ID NO: 387631 - DNA, 122 bp, Homo sapiens
gcttgcaggggcgagtgatgggctcgctccattgtgctcgtatttgcatggatgtgatcgcggccttgattggccggcgctgagaccgccccgccccctgcctcgtgccccccgccttggag

SEQ ID NO: 387632 - DNA, 122 bp, Homo sapiens
aaaggatgtgggcatgcgcaaaagtcgcactaattgtttctaaaaacatatttgtagccacgttttaatgtatcagtataatgctctagaacggtagttctcaactctgacggcacatagaa

SEQ ID NO: 387633 - DNA, 122 bp, Homo sapiens
gttgccgccggggcgccactggcctagggctcttcattcattcaagccacgaataactggcgccgtcgtgcaggccttgtgggtagaggaaaaaaaattgaagaatgtaaagggagagcgcc

SEQ ID NO: 387634 - DNA, 122 bp, Homo sapiens
ccgggtgacggtccggggcgggccctggcgggcgtgcctatgcaaaccaggaggtggtgccggcggtgggcgggcccgtagtaaaatatcgggggcggggcggcgggaggtgcggctgcctg

SEQ ID NO: 387635 - DNA, 122 bp, Homo sapiens
attcggccccccttccctctgcccttctggtagaaaattaaaagaccatttgttaaggggcgaaagtcctcaggtgcatcccgaggctggacaatttgtctctgtgaaaaggacgctattat

SEQ ID NO: 387636 - DNA, 122 bp, Homo sapiens
aggtaaaacacatggacacaggtaactatgctgtaaagcaaaatccccaagtcctacaatcgtgtcccagtggtgtccctgggccaccactttccagaagcaaagttattttctcaccccgt

SEQ ID NO: 387637 - DNA, 122 bp, Homo sapiens
gctgtggccacagcatggcccctttagtcctcccgcccccgccaaggggcaccaaggccacgtttccgtgccacctcctgtctactcattgttgcatgagccctgtctgccagcccacccca

SEQ ID NO: 387638 - DNA, 122 bp, Homo sapiens
gccaggatacagcagaattatcagtttcccagttctctgtggtttatagaaccctggatccggttgcctaattttagtcccagccttaaagtgctgattcacacttagcttgaggccctatg

SEQ ID NO: 387639 - DNA, 122 bp, Homo sapiens
ttggaaatgtgctttaaccatcaagcttaatcaggcagcatgttctccccgaaactattacggtaaaaatggaaaaaaaatgcttcctaacagtttgagttattgagatgacctcattgttt

SEQ ID NO: 387640 - DNA, 122 bp, Homo sapiens
gagtgtcacctggagagactgggtctgtgtgtggtgtgatggtctaggtgtggccatctccggcagtgactgtggtgtgtgtctgggcctctatgaggggctgactgcagcccagggtgtgg

SEQ ID NO: 387641 - DNA, 122 bp, Homo sapiens
ccctcggaagtcggcgagatcgctgaggcaaagcgactccagggcgcagagacccacacgcgacgctctaaaggaagtgacctttaggggctgttactctcagaccaggcccagcagcaccc

SEQ ID NO: 387642 - DNA, 122 bp, Homo sapiens
ccgcccggccctggagcttctggagctctctcttggtgctgtcctggaggcgttgggccacgtcctgctgcagctcggccgccatctggtccagcagatcattgtcctgcaggccccagcgt

SEQ ID NO: 387643 - DNA, 122 bp, Homo sapiens
ctgggctctaccaatcagcaggatgtgggtggagccaggtaagagaataaaagcaggctgcgcgagccagcagtggcaacccgctcaggtccccttccacactatggaagctttgatctttc

SEQ ID NO: 387644 - DNA, 122 bp, Homo sapiens
cagtctctcatggtgttgcaatcaatactagggctgcagtaataaaggcttgcctagagccggaggatctctgccaggaactgctcactcatatggctgttggcaggaggccttaagttcct

SEQ ID NO: 387645 - DNA, 122 bp, Homo sapiens
tcacctcatgagtgatgctcatcctgagctctgcagagccccagggcactctgggcaccccgccaacagccacctgctgaagagggagtggaatgtgggaaggttctgggtccctgtgacaa

SEQ ID NO: 387646 - DNA, 122 bp, Homo sapiens
tagctgccttcccacggggcaggccttgggactgcagcccgccatgcctgagccttcccccgcctccgtgggttcctgtgcagcccgagcctccccgacaaatgccgccccatgctccacgg

SEQ ID NO: 387647 - DNA, 122 bp, Homo sapiens
ataggattgactgcttaatggttatggggttttctttgcgggtaatgaagatgtttagcacgtagacagaggtggtgtttgcacaatgtgcatgtctaaatgccattaaatcacacatttta

SEQ ID NO: 387648 - DNA, 122 bp, Homo sapiens
caaggagggagagtggcgctcccgccgagggtgcactagccagatattccctgcggggcccgagagtcttccctatcagaccccgggatagggatgaggcccacagtcacccaccagactct

SEQ ID NO: 387649 - DNA, 122 bp, Homo sapiens
cgtcacagcctctgtggcaccagcagccagtcaagcagtggctgtcggggtggccgctgacgccaaagtgcaggcccaggcttcccatttgggtccggtccagagcctggtgctgtccacca

SEQ ID NO: 387650 - DNA, 122 bp, Homo sapiens
gagctaccagaggagttcgcggtccaggtgcccaaggagcacagattgcagcgcaaggtgcggccagcggtggggagagagggctgggggtggctgggcaggggctcctgagaggctcagcc

SEQ ID NO: 387651 - DNA, 122 bp, Homo sapiens
caagaggcacaacctcaggctgacactgtttccatgtccgtgagaaatgatgtgtataaacgatggccagtaagatgctcatctgttgggaagacaacagagggcagggctgagagcatggc

SEQ ID NO: 387652 - DNA, 122 bp, Homo sapiens
atgtaattaaaagtttttattgagcccccgagctttggcttgcgcgtatttttccggtcgcggacatcccaccgcgcagagcctcgcctccccgctgccctcagcctccgatgacttccccg

SEQ ID NO: 387653 - DNA, 122 bp, Homo sapiens
ctcttttcagaggtactttaggaggggcctggctctcgattaatctgggccatttcataccggctgtgctcacccaggcacaaacactgaaagcaacagctggcaaagccatcgcttggtag

SEQ ID NO: 387654 - DNA, 122 bp, Homo sapiens
ggagaccatccccctgacggccgagaagctgtgcatctacaccgacaactccatccggcccgaggagctgctggtaaccactggaccccgccgccccccgccccccgcgagccgcacgcagg

SEQ ID NO: 387655 - DNA, 122 bp, Homo sapiens
tgtttggagacaggcctctgaggaggtggtgagggtgggtcctggatggcctggcgcacacgggcacgcaggcaggtttccaccttctatgcaaacagttctcaggttccaggtttgcccag

SEQ ID NO: 387656 - DNA, 122 bp, Homo sapiens
cagagaaagaggttggaattgcaggggccgacagagaaactactcagggataggctgcagcgccagacctgctcgccagccactgcctgtgcagcccccagcctgcaggttgtataggagca

SEQ ID NO: 387657 - DNA, 122 bp, Homo sapiens
accaagaagatcaaacatgcttgaaacatttaagtgacaagcctaaaagtgcattcaactcgttttcttccatgtattcatggaacacaaaaccagtcttataaaaggtcaaaacagcttgc

SEQ ID NO: 387658 - DNA, 122 bp, Homo sapiens
cggggcggcgccagcgcccgtgcggaagagcccgtgagcagacgggagtgggtcggggggcggcgggggatcccacgtggaagcagcgtcctggagctgggtggggctgcggcgcggactac

SEQ ID NO: 387659 - DNA, 122 bp, Homo sapiens
acacaattatgtaattacatgattaagttttccacgaggtaaataataaggaaataatgacgtggtggcaatgggccttcagcagggtataaaggtggctatggacccagaagacttccaaa

SEQ ID NO: 387660 - DNA, 122 bp, Homo sapiens
gggcctgtgtggacgcggcccccagcagtgttcctgtgtccgtggtttggaggctctgttcgctgagcctcagcacgacctcaacctgatctgggagtctgagtgcgctgggcttggagggc

SEQ ID NO: 387661 - DNA, 122 bp, Homo sapiens
gaggcggcggagctggggaggcggtaatctcgcgagatggaagccagcctccgctaggcccggaagcctcgtctgagggggcgggggacggaggagggagcgggagtcgagcgagagcctgt

SEQ ID NO: 387662 - DNA, 122 bp, Homo sapiens
tttcaaccttgagggtgatttgctgcccactccccaaagaataaacgcctttatcgaacccggtgcggaaagaaatgagggccgggggcgggggctgtgggaagaaaagcagttcctttatt

SEQ ID NO: 387663 - DNA, 122 bp, Homo sapiens
cttctatttactctctcagcaagcctaatgccccctcctgcattcttcagcctccccctgcgcccagggctgacgtctatcaagggtgaaatgatggaaactatattcatgggcatgatttc

SEQ ID NO: 387664 - DNA, 122 bp, Homo sapiens
ggcgattgctgttgacaggattatttaagccactcagtggtggtaataatagcctttgtgcgtcactatttaaggttgggggtaagcctttatttactgaggacactgaaattcatcttaaa

SEQ ID NO: 387665 - DNA, 122 bp, Homo sapiens
tgtgcctctccgcgagctgcctggagagctgagcccagcgctctgcctttaaggagcgggcggggagccgaggggaggagggcgcccggcggagcgttgaatggggcgcagcaaggctcggc

SEQ ID NO: 387666 - DNA, 122 bp, Homo sapiens
gcagccctggtcccattcatgatgagttcagcctccatgactgggaccagaccagcttttcgagacatctaaatagaaaggatggtggaagcccagagggcagctgagccctctatactagg

SEQ ID NO: 387667 - DNA, 122 bp, Homo sapiens
ctggaggattccacaccctcgcaccgcaggggcgaggaagtgggcggagtccggttttggcgccagccgctgaggctgccaagcagaaaagccaccgctgaggagactccggtcactgtcct

SEQ ID NO: 387668 - DNA, 122 bp, Homo sapiens
tctccagctcctacacgcccgggaagcagttttactttacagcaagttcaagagtcgcaccgcagatgctgtaaaaacgaaagaagcccacagttgggacgaggattccagttttgcgtcac

SEQ ID NO: 387669 - DNA, 122 bp, Homo sapiens
atatataacatttttaattatctggctgactgataagactttcagccgacaactaaataacgagaaacagctacacgtctccagggcctttcttctggaaaaacttttctggtcccctcttc

SEQ ID NO: 387670 - DNA, 122 bp, Homo sapiens
gccagagaggagggggcggcggcggcgagagcgggcgggggacacggggaccgggagacgcgatccggagagcggtgggaagtattcgcctccgttcctcaaacacaggatgcgagcgccct

SEQ ID NO: 387671 - DNA, 122 bp, Homo sapiens
gggcggggagtcccgtctggtgggggccgggcccgcgcagaccctacgattacgcggggccggatagttcctacgattacgcggggccggatggttcctacaataacccggggccgcggaga

SEQ ID NO: 387672 - DNA, 122 bp, Homo sapiens
tgtcgccgaagcggccactctccgagacgctccacaccgtcaggttggtctgcgggtccacgtactcgatgtttaccacggccgagaaccactcgagagcccggccccgggccccgggcacg

SEQ ID NO: 387673 - DNA, 122 bp, Homo sapiens
tctagtctagtaatgatttgaggtttatttgccccattccctgctcagtcttccatgtggcgaaaggcccatcctgatgcctggctgggatacaacgagggtgggctggatggagcagagcc

SEQ ID NO: 387674 - DNA, 122 bp, Homo sapiens
gggttaaactagatgaagggctgagcaggaacgatattctaggcaggaggaatgcatgcgcgtaaaggtgctgagactggagggaacatgatacaatcacggaactgaaagacaaagggggc

SEQ ID NO: 387675 - DNA, 122 bp, Homo sapiens
agtcaaccatcttctgctacccttgctcctgctgacaaccactgatatgatttttttactcgatatttttttactcttgtagaggttatataattggaatgatacattatgtagccttttat

SEQ ID NO: 387676 - DNA, 122 bp, Homo sapiens
cagtgctcatctgactgatgaaaaagaggaaagaataatcatttctagatactgaggctgcgaactagttctgtggcagtggactagcataagtggatgtctaagaaatttttcagttcact

SEQ ID NO: 387677 - DNA, 122 bp, Homo sapiens
cttctgttctctaactcacaccggggaaccaagatctagctgagagcgtcggtgtgggcccgaaatcccccgaatcccgtggaccctgcgaggccggggctccaggcgtcgggcacctctgg

SEQ ID NO: 387678 - DNA, 122 bp, Homo sapiens
tggtgcaggggctctgagcaagcctgatgagctccagcaggttaactgggagcggagccacgttccggcttctctgaatctttgctttcctcctcccctcgctggccccaccctttatttac

SEQ ID NO: 387679 - DNA, 122 bp, Homo sapiens
cctgagcttgcgagtctgtgaggttagacactcccgccaagtttcactgctgttgttaggcgggcgttaaatgtcccttccgtcttctgcatgtgcctgctggtatgatgctcagccccata

SEQ ID NO: 387680 - DNA, 122 bp, Homo sapiens
caagacccctcggtcctccctgcccccagtacttgggagacagatatggggtgggggtaccggaagccctgcccccagccccctttctgcctttgaccctcatggtggctttgagcaggcat

SEQ ID NO: 387681 - DNA, 122 bp, Homo sapiens
aaatcactattaactaagaatcagggaactgataaaccaaatgccctcatcccacaaaaccgtccacactgacaatcccattctactgctacagatttcaaacggctcacagataaagacag

SEQ ID NO: 387682 - DNA, 122 bp, Homo sapiens
gaaccagctgcagtatgccagggtccagagggaccggctgaaggaaatcaactgtttcaccgccacgtttgagatctgggtggagggccccttgggcgtcatcaataacttcaggttgggcc

SEQ ID NO: 387683 - DNA, 122 bp, Homo sapiens
tggatgaatgattaagcctttttatttaaagctagttatgttcccacctgagaggctattcgcaggggaaaaacatttgattcaatcctctttaagaaagcagtttggccgggtgcaatggc

SEQ ID NO: 387684 - DNA, 122 bp, Homo sapiens
gcggggcggccgaggtgggcggggcggccgaggtgggcggggctcgcaggtgccacctgtcgggtgccgcgcgcctcggggcgctggtcgccgcggtgccagggaagccgcgcaggcacgtg

SEQ ID NO: 387685 - DNA, 122 bp, Homo sapiens
gagctaatgctaccagaaaagaaaaaaaaaaactgtacaagtaaaacacacttactgttccgatccagtccagtgttactgaaatgcctgcctccatttctggcttgattcaacgtgctgtt

SEQ ID NO: 387686 - DNA, 122 bp, Homo sapiens
tgggcagctgcactgtgccctgcctggcgctatgctgagagctcaactttattccagggccggtggatgctgtagaagggatataaaggagggataggcccctccgcccccaacccatccga

SEQ ID NO: 387687 - DNA, 122 bp, Homo sapiens
ttcttaatctccctgcagaatcctcagggccaggtacctgctgtcagtcagagaggtgcccgatgctcagtggtcattctgctgcgctgaagattaagtaggagttgtttgcccttggccaa

SEQ ID NO: 387688 - DNA, 122 bp, Homo sapiens
gttccgctccaacagcttcctgggtggcttggggtccgggagtctggcggcagggatggccggggtctggcaggaatgggaggcatccagaactaaaaggagaccatgcaaagcctgagcga

SEQ ID NO: 387689 - DNA, 122 bp, Homo sapiens
tcaaggaatgcctgaggctgccagaaggtagaagaaaggcctgcgacagattctccctcacggcctagaaggaagcaaccctgctgacacctggactttggacttctagaatccagaactgt

SEQ ID NO: 387690 - DNA, 122 bp, Homo sapiens
atttaagaaaatgaaaatatgactacagggttgcatggtaaacacagaaaccaaaaaacacgtagtgatggtctatagtggcttagtcgcctttctcctgtacaactgaataatctactttt

SEQ ID NO: 387691 - DNA, 122 bp, Homo sapiens
ccggccgggccacgggccgagcggctcctgggcgcctgcgggaggagcccccggcccggccgctgccccagctcgcgttccagttgctttttctacagttgcagcggaggaaggtcctgggc

SEQ ID NO: 387692 - DNA, 122 bp, Homo sapiens
tctcggttggggaatttgcagattgctttggagacgctgagagaacctttgcgagagcgccggttgacgtgcggagtgcggggctccgggggactgagcagcacgagaccccatcctcccct

SEQ ID NO: 387693 - DNA, 122 bp, Homo sapiens
agcagctcccgccacctactatgtccgggttactgcgggatccacagaatggaagttgcccgccaacaggaagaatgtctcctccctctgcagggcttcctttcccccatcgagggcccctg

SEQ ID NO: 387694 - DNA, 122 bp, Homo sapiens
taaaaacacagcttacgggccaaacaaaatacacttgaactctggactagaccagacccccggaactccttccagcacttaagtttaatgactgtaaaagacaataagcctatatctactca

SEQ ID NO: 387695 - DNA, 122 bp, Homo sapiens
tcacgaagccacctccgccggggaccgccttctctcggagtggcctcccctccggcgttccgctttagtaagacgacactcaggccaaacagccgcccccggccagcccgactcggctctgg

SEQ ID NO: 387696 - DNA, 122 bp, Homo sapiens
cccgcccttcagtgccgcaggcatcccgcgactggaaggggaccgggctggggcgggcgccgctcttagggggactgagcaggccctttgcgacccagacctgctcttagaggggcgtggga

SEQ ID NO: 387697 - DNA, 122 bp, Homo sapiens
tttgcccacatgtataatgtgagtgccgtccacgtgcacactctgatgccagcagaaacgcgtgtgcgcgaattctgtcccactcctcagccactaagcctttggggcctcctcacaacagc

SEQ ID NO: 387698 - DNA, 122 bp, Homo sapiens
tattgtgtgtgctatcattggtagattcctcgtctaggcactcttggccagtgttgagtccgaatgctgttattatgtgaaacaggagaactctagggcacattagtatggaattttatctt

SEQ ID NO: 387699 - DNA, 122 bp, Homo sapiens
cgcatttggttgcccatcatggtagccaaactcaggagggcgcagttattgtacatctaccgtgtgccaatccctgcaggagacacattcaccatctctaatcctcacagcaagcagctcct

SEQ ID NO: 387700 - DNA, 122 bp, Homo sapiens
ttatcagagaaatgtttcctctttctttgccaaggaattatatattcccaacagacatggcgcttgaatgctatatttcctttggaatcaagaaaggggaggtgggggaatcaaaaattaaa

SEQ ID NO: 387701 - DNA, 122 bp, Homo sapiens
accaccagtcctgttggattagggttccgcacttctgacctcgtttaaccttagttccctcggtaaagaccctgtttccaaatacagtcaaattgggagtggcttcaacttatgaatttggg

SEQ ID NO: 387702 - DNA, 122 bp, Homo sapiens
agaagcccgctagagcccagcgaggactggctcctgcacgtgagagtccaatctcaagagcgggaatcggaagtctcccggtgtgacgtctctgggaagtacagttccgtgatgccggtggc

SEQ ID NO: 387703 - DNA, 122 bp, Homo sapiens
gaatgtggccagcagggggcttctcgtgcggacgctcaaagccggaagagccagcaggcacggaagccctcgtgggagccgggagttccatggcgaggccccccgctgctgccccaagaaac

SEQ ID NO: 387704 - DNA, 122 bp, Homo sapiens
gcagcctgggaggggcgtgtggggaggaaggaaaggtggggagcgccgccgggagggacacggtgaaaccactgtcctcttaagtgcctgcgtgcttgtttctgtacaggccgcatcgggaa

SEQ ID NO: 387705 - DNA, 122 bp, Homo sapiens
tttttcagcctgctgctactactttgggaaaaggccttttctcctggcgcctgttcaaaccgccacacttcaggccaatccttcggcctgaccattcccggatcttgttatgccagcacagc

SEQ ID NO: 387706 - DNA, 122 bp, Homo sapiens
catcttttcccacagcacacctccttggtggagggtgttagactgggttggcaagaggaccggttctgttgctgcatgctcagcaggcagctcccaggtcccggttccggtttcccagtgct

SEQ ID NO: 387707 - DNA, 122 bp, Homo sapiens
ttttcaacctcatattcattgttgtcatcatccacctacatgtattaggcacttactgtacgtagaatgctgtgtttatcacagaagcgttgtatataaactcatacaaggtatccatagga

SEQ ID NO: 387708 - DNA, 122 bp, Homo sapiens
cgggaaatggcggctctgccttacctcccccttcccctcggcgtccccggcccccttctccgtttctgactccacgcctgacgcgctgtgggcccttccgcggtagactcctgtccccgggg

SEQ ID NO: 387709 - DNA, 122 bp, Homo sapiens
cctcgcacacacccaatgaaagacagacagcaggacgtccttaccgggtggcccagccctcgactctggacagaaccaggctgacctcgcccccccgcctcggcctcccctgccccttggtt

SEQ ID NO: 387710 - DNA, 122 bp, Homo sapiens
gaggtgacccgatgagtggcctcggcaagcggcgcgggggacagagtggaccgggaagcgcgcctcctcccgcctcctcccgcctcctcctcctcccctcaccaaccaatcccacccccacc

SEQ ID NO: 387711 - DNA, 122 bp, Homo sapiens
aggcgggagctgcacagaccccaggcggctcagcgtgacgtcccagggctcctgagtcaccggccccagcccagcagcgcctgagcctttgtgctccgtgagcgtctgagcatgtgtgggtt

SEQ ID NO: 387712 - DNA, 122 bp, Homo sapiens
cgcgaccgtcccccgccaatcccgccccagcgcctcaaggccccgccccgcgcaaggggacggaatgcaccccaacagcctccaagacgcccaggccaggaggacgctgggaacccgctgcc

SEQ ID NO: 387713 - DNA, 122 bp, Homo sapiens
tttcttctctgtgaccatgatggcaaagaaaccttcagttaattctcggtacatgactcacgccacatggccttttaaaaaaagaaattccacatccaggcaaaaaccacattttaactaaa

SEQ ID NO: 387714 - DNA, 122 bp, Homo sapiens
tgaaaaatgacctacccagtatttatgagccccctagcacccaaactgtggtctctaatacgattttccactgaaaagaaccaatgcttcttgaagaagtgatcgattctagatctgtgata

SEQ ID NO: 387715 - DNA, 122 bp, Homo sapiens
tggacgctgctcccgagcgccgcaaatactaattggctcttctctaccctacagtcggcccgacagtggtggggtttcatcctcaagccctaagaaagtgctaaaaagaccagtctggatgt

SEQ ID NO: 387716 - DNA, 122 bp, Homo sapiens
ccttcattcagcctgcgttcctcggagctttaacagtcagattcttgattgccgctggggcggcccagggaggagggtgagtggagcgtgctgagagccgggcccgtgcggcgctggtagct

SEQ ID NO: 387717 - DNA, 122 bp, Homo sapiens
tccccgaaaagttctagctgagtggcagaagtgagaatttgtaaacttatgtacaatgtacgtgtaaataaatggattgaatttcagtttgtcatcaggccgcgctcccgttttgtttttaa

SEQ ID NO: 387718 - DNA, 122 bp, Homo sapiens
gcaacaactcaacgggaacgatgtggaaggtgtcagctctgctcttcgttttgggaagcgcgtcgctctgggtcctggcagaaggaggtaagacccagcgcaagtggcttcctgccgtcgct

SEQ ID NO: 387719 - DNA, 122 bp, Homo sapiens
ctgaccatacgtttaggatcagcccctcctcctctcccacctctctggccccaagcccgccggcaatctctgaaaccagctcttgtacccttggacctccgccattggcttctccccgcccc

SEQ ID NO: 387720 - DNA, 122 bp, Homo sapiens
catttttttggaggggagtgcagtaagagaaatgaataacttccagagtagttgcgttaacgctgggaacaacaacaaaaaaccaagaagtgattatttattaagtgtctggacaaagcttt

SEQ ID NO: 387721 - DNA, 122 bp, Homo sapiens
gatgaagaatgaactcagtaggattctcccaaatgctctactgtgtccagagaatacaaacgaagccaacacatttagctttaaaccttggagctttaatctttcaagaacacatttccttc

SEQ ID NO: 387722 - DNA, 122 bp, Homo sapiens
tggagcgctcctaacggactttgcaaggcccagtacacgggggctgccgcgagcggggagcgcgactgggccccaggacaccatctgtgcgagcacggggactctgggccttgacctgcgcg

SEQ ID NO: 387723 - DNA, 122 bp, Homo sapiens
ccccgatgctgcgggacgaggcatcggtgaagagcttgctgtgcagcagcatgactcgggcgatcaggtacaggcgcaggaacatggggatagacaggatgatgtccacatcggcctccgcc

SEQ ID NO: 387724 - DNA, 122 bp, Homo sapiens
gagcaaaccccaaatactcagcaacacaaaaatatgcctccgtgtgtgtgtgtgagtgtgcgtgtgcctgcgcgtctatctccatccggtgccttcgcatttcaaattaaagaaaaaaaatt

SEQ ID NO: 387725 - DNA, 122 bp, Homo sapiens
cacacagctaagtggtatcgctgggacttgaacccatgtcttccgaggccatggcagctgcgaactcttccatcctgtgctgaggaggtgtgtcagttataaacgcattgcctctcagagct

SEQ ID NO: 387726 - DNA, 122 bp, Homo sapiens
tgcccgtcccctccccaccctcatcagcttcctccatcagcagccatgtaaggggtaggccgtgcacaggcccgccactgctctcctggaggggaatttcagaggcaaacccgtgactgcgt

SEQ ID NO: 387727 - DNA, 122 bp, Homo sapiens
gggaggggggctcccgagatagtggctgggcggggaactccttcctcagcctctcgtcagcgccgcttctcctggtttctcttgcagatgctgctgctaggggtggtgggagcagccgtggg

SEQ ID NO: 387728 - DNA, 122 bp, Homo sapiens
gtgtgtaagagggaggagaagaggagacagaaacggtgggaggggtggattccgcgtgcccgtgtgcttatgtgtgaaggaaagtcctgactatatttgggatttgttgctctgtgtgtata

SEQ ID NO: 387729 - DNA, 122 bp, Homo sapiens
aaaaagagctaaactctgtctcaaaaaaaaaaaaaaaaaaaaaaaaaaagttaaaaatggcggcgcttccccaaacccaaattcattttagtgatataaagatgcatttgacagaaaaagaa

SEQ ID NO: 387730 - DNA, 122 bp, Homo sapiens
gcaggacggcagcaagggtgtacagctgggcctggtcactctgccaagcccctagcccggcggctgcctccccgcagtggcctgttttctccgcggccatgccaggagacgtgccgggggct

SEQ ID NO: 387731 - DNA, 122 bp, Homo sapiens
gggaggagctgcaggactgaggtacagaagccgcggaaggggcccaacgaggggcagagccggcacttgactccgtgggatcccacgagacagacaccctttcctcaccgcccgagtgagcg

SEQ ID NO: 387732 - DNA, 122 bp, Homo sapiens
gggtgttggtgtaaagccgggaatgtagtgtggcggtgatgccctagatccctggggccgcgccctgccgcccgtcccccaacatcaccctactgtggagcgacgtggctgctaagaggtaa

SEQ ID NO: 387733 - DNA, 122 bp, Homo sapiens
ggcggctggaggcaaggtctgggaatggaggtcaaactagatctggaagccggggtcaggcgggggtgggggcactcaccctttcctttctgccaggcattcaaccggggcaagcgggaggg

SEQ ID NO: 387734 - DNA, 122 bp, Homo sapiens
tttttttttctttcccccctcccactcgcccccaagccctatgactccctcccctcccaacgtgtttttcaaatccaccaatgggcacacagcttaggctcgaaccagccaatcggaatgcg

SEQ ID NO: 387735 - DNA, 122 bp, Homo sapiens
aaagcttccccggaggtgccgaaggccccagtctgaataggactcctccgtgtcagggctcgtgtcgctctgagccaggccacccccaaggctgagccacaaaaccaagaagccactggcca

SEQ ID NO: 387736 - DNA, 122 bp, Homo sapiens
atccccgcctgggaaggcgccggaagagccctctgcgcttgcgcaggtagccggcaggagcggccccaccgcccggcgcatccgctctggccagagggcgacaccttaaggccggcgggagc

SEQ ID NO: 387737 - DNA, 122 bp, Homo sapiens
tccagtcagcccctgccaaggcacagggagctgaggtggatgcacctctggcccagcccccgacgcctgagccaccaggcagctgcagtcactgccaggtagaagaagacccccccaggacc

SEQ ID NO: 387738 - DNA, 122 bp, Homo sapiens
cagcggagacccgaccgcacagggtgtcttcaaactcatcagcagtctatagcgaggcctcgccgagagacaactcccttaaaaccagcagagacccgatcacacagggtgtcttttagaac

SEQ ID NO: 387739 - DNA, 122 bp, Homo sapiens
agttctaagtgtactgttcagtagcactaggtacattcacagttttataaccatcaccaccgtttatctccagaactgtttcttctcaaactgaattctgttcccattaaacagtccccatt

SEQ ID NO: 387740 - DNA, 122 bp, Homo sapiens
gccctgacaaagttaaggtcaagttagtgtcttatcttgggtgactcaaaatcaccgcatcgcgtcctggcgctgtgcggaaagctctttctcgcggagcggctggctgcgccccgaaggcc

SEQ ID NO: 387741 - DNA, 122 bp, Homo sapiens
ctggtgtgcaggaactgggagcaggagggcgtcttcaagatgtgctacaactacaggatccgggtcctctgctgcagtgacgaccactgcaggggacgtgccacaaccccgccaccgaccac

SEQ ID NO: 387742 - DNA, 122 bp, Homo sapiens
gtgaggaggcctgagtgggaagcctggcggctgaccctctgcacgtctctccctgtcctccgcagatcccctgacccccacgccgcccccacccgttgccaagacgcccagcgtaatggaag

SEQ ID NO: 387743 - DNA, 122 bp, Homo sapiens
gggcaccccattccaaagctgccgagaccccgggattctagagctacttctgttcaggaacgccattgttctccctcccccggcatccctgggaattgatgctaatttcagcctctgatccc

SEQ ID NO: 387744 - DNA, 122 bp, Homo sapiens
ggtggtggtggagcacatctgtctctctccgtgttggtggctgtgatttggcagctctgccgaagatttgtgagatggagaagaaagtgcagggttggggtacggggaaaggggtaagaaag

SEQ ID NO: 387745 - DNA, 122 bp, Homo sapiens
ggctgcgcactccactctggccagaacacaaacggcattggcactgtaagctctcagttacgtggccctcttttctctcctctatttctccaaacatatgtgcacacccagaggaactgagt

SEQ ID NO: 387746 - DNA, 122 bp, Homo sapiens
tagagccagcttcagggaggctgtagagcacttcagggaggcacttgaggggatgattctcgaagtgtgtatcaccatctctactcccatggcctcctttccttggtgttcctgctgagtaa

SEQ ID NO: 387747 - DNA, 122 bp, Homo sapiens
cactggggagccccaccccagctcagaaggggcagggctcctgcttgtccctggctctcgcgggctccatggagagggcagccctggccgcgcctccctgatgcagccagtgtgatggcagc

SEQ ID NO: 387748 - DNA, 122 bp, Homo sapiens
gaaagtcaacaactaggctggagtttccccctcgcgcatattcagtagggaaagcgagggcggaggactaggctggcttctacggccccagttctcgccacccccaccgtgttggtcctttg

SEQ ID NO: 387749 - DNA, 122 bp, Homo sapiens
cacaggggccctgcagcctccaaaggcagggctcagtggacctgggtggggtggggcagccggggtggggctgctccctggaacatcctagcccaagcctggaatctgccccttggcccagg

SEQ ID NO: 387750 - DNA, 122 bp, Homo sapiens
gctgctttcagttcttgctgacatcagtgggaatcctaaatccctccagagcatttcagccgattcctttcacagcaggatcactactgtttcacctcacttttgaaattctgcagtcttca

SEQ ID NO: 387751 - DNA, 122 bp, Homo sapiens
aaagcttcgggaggaagagcagagggagtcaggcgccccgcccctgccttcagcctcactcgggcttcgtcccgtgagctgtccgccaccaagctggccacgcatcctgcctgacacccccg

SEQ ID NO: 387752 - DNA, 122 bp, Homo sapiens
tagcagggccctgcacaacggctgcgcagcggccaggaaagcggcccgagaggtgggatgcggccaaagctgctggggcggtggcggagagggctgctttcaggtccccgcgcaccctaccc

SEQ ID NO: 387753 - DNA, 122 bp, Homo sapiens
gagttaatccctcccacgcgcggtgccgggtgtccgccccctctgggtccgagaagcttccgcccaaccctttccaggtgccgctcccctgcgcattccagagcagtactctccaaggtggg

SEQ ID NO: 387754 - DNA, 122 bp, Homo sapiens
cagatgtttttataggcctgattgacgcttcagccattgtgattttgctctaggttccaacgaaattctataaacctgtcagattaagtttcttaactctgaaagaatattgcatgttcccg

SEQ ID NO: 387755 - DNA, 122 bp, Homo sapiens
tgagaattgctaatggggctttaaatcccaagcactgcgaacatcttcttcacataggcacggcacaattccacaggcagaaaaaaaagttttctggcagagaaatgcaggcaggaggaagc

SEQ ID NO: 387756 - DNA, 122 bp, Homo sapiens
tgaatttctctaaattaacatgaaaactctggtttaatccaaatattagtactccattctcgtagagtaagttttgtttattggtttgtttgatgttacataaactccctttaacgagttta

SEQ ID NO: 387757 - DNA, 122 bp, Homo sapiens
ccagcaggcgcggggcctcggagggctcagccgacaggcacagctgcacgaagttcttgtcgaagtgcaggaaggtaaaggggcctgagccgctgcacagctccaaccccgctgccgcctct

SEQ ID NO: 387758 - DNA, 122 bp, Homo sapiens
acaatgccaatttagttaattttattatcactgtcatctccatgtaggaggagggactggcgagaggcctcatctgtctacaacagtcattctccactacgggcagtggggatagggtgtcc

SEQ ID NO: 387759 - DNA, 122 bp, Homo sapiens
atagtacaggcatgcctcacagggaaaatattgaacttggcctgccagcaccacgagagtcgtcccaactgtgattttattgcttgagtcactccctgaatcagatactggctgcacggagg

SEQ ID NO: 387760 - DNA, 122 bp, Homo sapiens
gggcggtgtcagcaaagctaggtaaggagacagggaggacggtgcctgcccctttaagatcgactccaccccgcctctggaggaaaatgacgccgccgtctacccgttgtggaacgtaactc

SEQ ID NO: 387761 - DNA, 122 bp, Homo sapiens
ttctaagctgacctaagagttgcagcagaatttctctacttaataaagattaaaaaaagacggcattcaataaatgtgtctatgccataggaagataaagcaaaagtgtccctggagattcc

SEQ ID NO: 387762 - DNA, 122 bp, Homo sapiens
gcacaaaaacgtctttccatctgggctcgagaggacagcgtggcttctctcaaatgcacccgagaaataaaaaccattaaatacagatcatggcacgaggccgcctctccatccctccaagc

SEQ ID NO: 387763 - DNA, 122 bp, Homo sapiens
tctgtctcccgcccaccgagcacactctccatggcggcaggatgcccggggcgagcccctcgtagggaaccaggctggcactcggtggtccttgctacatgctgagctggggttgggagcct

SEQ ID NO: 387764 - DNA, 122 bp, Homo sapiens
caaaacttggtgagcacccatatctgagacacagcattccataaagccagaggcagtcaccgaggctgtctgacataccataatatgcccgtatggcttcaggctttccaccctgatctggc

SEQ ID NO: 387765 - DNA, 122 bp, Homo sapiens
cgggcgctgcgcgtgcgcagaggtgcggccggggaggcgcgcggaggctggagctggaggcgcggcgccggtgagctgaggtgaggcgaggccgggccgtgccaggccaggcgggcgtttgc

SEQ ID NO: 387766 - DNA, 122 bp, Homo sapiens
tctgcactggctgtgcaagacagaaattcacctttcaaaacttctgttccccagtctatgcggtaagaagtttagattagctgatttctagggagattttgggcaggcatgattcagttcca

SEQ ID NO: 387767 - DNA, 122 bp, Homo sapiens
tctcgttcccaaacccccattcatcccagttcacttttggaagtccatttctgttgcattcgcgaaaaacccattccaattcttgttggttccactgggaggtgtttagtggatcctgggtc

SEQ ID NO: 387768 - DNA, 122 bp, Homo sapiens
tgtgtggtcttagagataataatgcttcctactacctagggattttgtaaagattaaatacgtttagagacataaagcacttgaaagagtccttggcacatagtatatgatctgtcagcaat

SEQ ID NO: 387769 - DNA, 122 bp, Homo sapiens
tttgatgttcacccaaccccactaaccctgccatggaatgcaccaaaataaactccaccacgaaaccctaacaaggcgtgattgggcttggagaccagaacactgggccaagaatctacaga

SEQ ID NO: 387770 - DNA, 122 bp, Homo sapiens
agtctaatttttggacctgctgatggttaagtcatagtgagtcagtgttaacgcgcaaagcgtttgacgagtccaatgtgcttccatactaagcagcaccaggtttcttttgctaaaattga

SEQ ID NO: 387771 - DNA, 122 bp, Homo sapiens
gtgaactaccacctaccaagtagatgactacataggaatggatgtgtgggcaagtggagccgtctgtgtgtgtgtgtgtgtgtgtgtgtgtgtgtgtgtgtgtgtgtattgaagacaagggc

SEQ ID NO: 387772 - DNA, 122 bp, Homo sapiens
ctgtgccatgctcttactcccaaatgattgtgcatttgttctcactgtaatgtcctcaggcgcaatccgttgcagaaatggttacattaaataagagacacagtatgataaagctttcaaga

SEQ ID NO: 387773 - DNA, 122 bp, Homo sapiens
caaactcctatacatccttcaaggaccagatgatctcttccctcctaggtgaagcctttccgagactccccttttatacatgctttcatcctagtccctctcatactggatcctattcccat

SEQ ID NO: 387774 - DNA, 122 bp, Homo sapiens
atcggcagcagacttgggagcaatgcggtggaggcgtgtcattgttccccaggtgtgatgcgatgaggggcagcaggctcggggatgcggtggaggcatgtcggtgttacccaggtgtgatg

SEQ ID NO: 387775 - DNA, 122 bp, Homo sapiens
gggcctcgaacggtgattggctgaaggggaagccttccggaggagcaaagcgacccctcccggactccatagttcatttcaggtcggaacttgcgcattcgggccggacctcaagccatggg

SEQ ID NO: 387776 - DNA, 122 bp, Homo sapiens
cccaaagagaacatgaaaacgtgggaactcgggaggacagagatctccctgtaatcgcctcgctattcggatcctgggtctcttagtctttctttatttcccaaataccgcccccagcacgg

SEQ ID NO: 387777 - DNA, 122 bp, Homo sapiens
tgcctctcacccaccaagctctgttgaacttgtgcctttgccggtctgtggtcctgcggccgtctcatgagctgcagagtaggtctgtgtgtgtctctcctcaagctactcaagctgaggct

SEQ ID NO: 387778 - DNA, 122 bp, Homo sapiens
atggctgtgtaaagatgtatttttcctccggctccatttcgtaccagctcctgaggcccccggcacacagtctgtgtgtagcctcctgcccacccgtcgggtctccacgctgctagacaaag

SEQ ID NO: 387779 - DNA, 122 bp, Homo sapiens
atcagcgtaagatagtgtccaaagcagtcttaagaagaggtcccattaccccactctttccgccctaatggaggtctccagtttaggtaaataaaaggattgttgggaggtggagggaaaga

SEQ ID NO: 387780 - DNA, 122 bp, Homo sapiens
caggggccgctatctttagatcctggggacgcccccagcagctgcctctccttatatggtcgggagagcagttgagaggaagagagaacatgacctggcagccaagggatctgcactctgga

SEQ ID NO: 387781 - DNA, 122 bp, Homo sapiens
gttacccacagagctggtagaagatgtgcaacagctcgtgggccatgatgctgccagcagcgccaaagttcacggctctagggagacaagggcttatttgacccccagaatctctcagcatt

SEQ ID NO: 387782 - DNA, 122 bp, Homo sapiens
ggcctgctcccaccccgcagatacagcctgcaagatggtccgctggctgtctgccaagctcggccccacagtggcctctcgccacgtggcccggaacctgctccgcctgctgacgtcttgtt

SEQ ID NO: 387783 - DNA, 122 bp, Homo sapiens
gcgcgggcgccggttggctgggcgggcgcgtgacgcggcattacataatgggcgctgaggcggcggcggcgggcggggacacgtgaggccgctcggctccctgacccacattccccggggcc

SEQ ID NO: 387784 - DNA, 122 bp, Homo sapiens
ccctgccccgcggggaggcagctgaggcccggcgagaattcgagcgtgtccccagtgggccggcgctgctggggggcctggcgcaccctccgcagctgctggcctgggtgctaagcccctca

SEQ ID NO: 387785 - DNA, 122 bp, Homo sapiens
ctctgtccccaggtactgaattgctctctttgttaattttaggttgattctttcagggagcggatcacaagtgaggtgagtgaaataaatagaaaaatggttgttggttgagaatttcccaa

SEQ ID NO: 387786 - DNA, 122 bp, Homo sapiens
gcgtaacaaaggagtgagcctcagttttctcacattgaagtggatgtaataaccccagtgcgacctgccttggggagttgtgtggcttagatgtcctagctactgtggaaagacctcgggat

SEQ ID NO: 387787 - DNA, 122 bp, Homo sapiens
ggtgctcatcttgtcctgcagtattaacactgtgctgtcagtcacggtccctccccagagcgtgccaggcacgcacaggcagccacacaggtgggttgcagggcctgtcccagctcagggaa

SEQ ID NO: 387788 - DNA, 122 bp, Homo sapiens
tgcgtccgggtaactaatggcaaccgggcggggtgagcccgctctgcaggaactcctcgacggcgaaaaactacgactcccagggtgccccagggcttagcccagctttcccgcccgcccac

SEQ ID NO: 387789 - DNA, 122 bp, Homo sapiens
tggtctggactagtgtgaagtgtggcccaccctttggttcacaggcatcattgctaccttcgtatccagacacacttcagtaccacgaccagtgggtgggacaatttgaagtagatcaggaa

SEQ ID NO: 387790 - DNA, 122 bp, Homo sapiens
cggcgcaaaacacccgccgtgtacgtttcgcgggacaaaaaccacgcgcccgccgggccgcgctcaggccttcgccctcagggacttcggaaccgccccgtcctcaagatcgaaaagcccag

SEQ ID NO: 387791 - DNA, 122 bp, Homo sapiens
tatttgaatgaggttcaagagatacctttatccaaatatggtgacaaatttcaaaagaaccggaaaaactatgatggatttacatgaggtccatctttacaaaattgtattgaaaaataaag

SEQ ID NO: 387792 - DNA, 122 bp, Homo sapiens
gtgggtgactgaggaagctctttctgcccatcttagtgcccactgggcagctgagcttgccgggtccaaactcaagcctcagtatcaagcctctgtcttgggtttggggttagaatattcca

SEQ ID NO: 387793 - DNA, 122 bp, Homo sapiens
tcgtaggtgcgggtctggttcgacttgagcttcatcatcctccgggcccgggtgggggtgcggtgcgggtcgcaggagtcgaggggtggggagcccgctctggacggccgcgtgcgcgcgcg

SEQ ID NO: 387794 - DNA, 122 bp, Homo sapiens
atgtttcatacttttcccacagaggtaaagccccagcccctgccattgtcccaactgccacgctgaattcccaagagcactactgactgtcatggagagacaaatgtaaccatggtcagggt

SEQ ID NO: 387795 - DNA, 122 bp, Homo sapiens
acctgcagacaccatgtggaacagccatcccagctcacttgaggcccaaaactggattgccgagtgtctataacgctgacagggacctcacataactctggtggccaatcactctccatcct

SEQ ID NO: 387796 - DNA, 122 bp, Homo sapiens
tgtcctgagcactcacgctattcctcagcctgccctacacctgtcacccgccgacaaggccgaccttatcccaggcttactttggatcgtcacctgagattctgcttctctgatctgcatgt

SEQ ID NO: 387797 - DNA, 122 bp, Homo sapiens
gatgggcacatgggcctgctgccacacattgcccttattgccactgagagaccaggcgtgcgtgtccagagcccctttgttccgggaccgcaccaggaggttgagggagcctgcggtgggtg

SEQ ID NO: 387798 - DNA, 122 bp, Homo sapiens
tccaactgtttaggtatctattattttgcaaagcagattggagctgaagatttatctgatcgatcaaagaaatatttatatcagcactttgccgaggtgagcttacatgaagaaatactaga

SEQ ID NO: 387799 - DNA, 122 bp, Homo sapiens
ggaaccggggctgcgtgcagtgcttgcgggccagcgcgaattccgggtgggcgtgggctccgcgggccccgcactgggagtggccggccagccccgccggccccaggcagtgaggggcttag

SEQ ID NO: 387800 - DNA, 122 bp, Homo sapiens
ttccgtcaggaggacgcggagactcggaggaagagtgtttcggtggcgctgggacgggggcgtttcccagcgctggttttctgctggcgtcccgaggtgtggtctctccgaggtccagcaca

SEQ ID NO: 387801 - DNA, 122 bp, Homo sapiens
ttgtcttcctgaggagttcctcataggattcatccttctttcgagacttgagctccacagcggtaatggcttcataatagccctcttctgttctgcgcttgaatttactgcgcagctcttcc

SEQ ID NO: 387802 - DNA, 122 bp, Homo sapiens
aacctccccaggctcaggggatcctcccacctcagcctcctgagtagctggaactacaggcgtgtgcaaccacgcccaggctggttttgaactcctgggctttaagcaatccccctgcgtca

SEQ ID NO: 387803 - DNA, 122 bp, Homo sapiens
actccttctcagtttcctttggtggctcttccttcttttatcgacctctcagcattagagcgtcccaaggcatgatctctgcatatttcctcttccttttctaccctcaggttcaagtgctg

SEQ ID NO: 387804 - DNA, 122 bp, Homo sapiens
cctcccgctggagccggcccggcccgcgctcctttaaggcagcgaacgggccaagagaagcgtgtttcgccccctccgacgccaccgaggtagcggcttcacctttaaggcggcgcgggggc

SEQ ID NO: 387805 - DNA, 122 bp, Homo sapiens
cctgccggagcacagcctcagctgctgggtgcaaatgggctgcgaggtgggctggggaggcgagagccgacgaagcgcgtgggggaaacttttcaccttgtaaagttccaacctccgcgcag

SEQ ID NO: 387806 - DNA, 122 bp, Homo sapiens
gggggttgaggggaggaccgacggatacaggatctgtaaaagtcattctgaaattcaaggcgagggtaaagggaagataaaaacagagccgggggaggcatgaagaggcactgaagaagagg

SEQ ID NO: 387807 - DNA, 122 bp, Homo sapiens
catgttccacccaccttggcctcccaaagtgctgggattacaggcatgagccaccatgcccggctactgttcaccgtttaaatcctggccactgctctgcatttctgctctgtttgtgacag

SEQ ID NO: 387808 - DNA, 122 bp, Homo sapiens
ttactcgggaaccaatggactccaaggggtggagacggcgtagaacgaccgaaggaatgacgttacacagcaatgtggcaccacaggccaatagcagggggaagcgatttcaagtatccaat

SEQ ID NO: 387809 - DNA, 122 bp, Homo sapiens
gagccactgtgcccagctagttgcttacttcttaagtgacctaatggtgacttcagtgctcgagggcacttcctaggctatttggtggccctcagtaataaagagattgtataatcttgtat

SEQ ID NO: 387810 - DNA, 122 bp, Homo sapiens
ggtggtgaaccttatcctgaagtgtgcaaggtgacagtcagaagcttagaactccagccacgggccctgcatgtggcctcctagctgtagtctgtccaccgagatcgtgaggatgctggtgg

SEQ ID NO: 387811 - DNA, 122 bp, Homo sapiens
tgtcatggatactctaccactgaatggtaaccatggcaatagttacagcattgccagcggcgaatacctgagcaactgtgtgcaaatcatagaccgtggctataaccataacgagaccgccc

SEQ ID NO: 387812 - DNA, 122 bp, Homo sapiens
catttaaaaacaggctatagattgtatcatgcagttttatctactaatcggctaatatcccgccaaaaacaaaaaaccccaaagggatgaaagtttcatccatcaaaggaaacaacagtcac

SEQ ID NO: 387813 - DNA, 122 bp, Homo sapiens
cactcctctcccttcccaaggcttcctgtctccatggaaacattcgcttaattaacccaacgcagggagagggcatcgctggcccaaatgaaagccgccagagcagctgcagcaagagctgg

SEQ ID NO: 387814 - DNA, 122 bp, Homo sapiens
gttgccacatcagcactttgcgcctggacggtcccccagttgtcctggctgcaggcagtccgaacagtccgcttcctggaatattagccaggcaggatacgccctgggcgacagaaactcca

SEQ ID NO: 387815 - DNA, 122 bp, Homo sapiens
ctcgcgtacctgttgctcgctccggctgggtctcggctccggccccaccaagaagccccgcgttcctacaagttccgcctgccgagcagccaggccgccagcgccgccacctgcgcggccgc

SEQ ID NO: 387816 - DNA, 122 bp, Homo sapiens
tcattggtttttagtacattcatagagttttgcacccgtcaccactacctggttccagcacgtttatgtcctccctaaaacaaatcccgtatacttatcagtcagttcccacccacccccag

SEQ ID NO: 387817 - DNA, 122 bp, Homo sapiens
gcggcggcggcggcgggagggggagggaggagagagggcggcggcggggagaggaggaggcggagactctacatgggaatcggatatcggctacaaattcatcaccagaaaacaccgctcgg

SEQ ID NO: 387818 - DNA, 122 bp, Homo sapiens
ctttccgtcccgccggcaggcggcgccctccggcccttgtttcgttgggcccggacgggacgtgcgcgctcaaaggttgcccgtctctgacgcccgcatttcctggtctggagccggctgag

SEQ ID NO: 387819 - DNA, 122 bp, Homo sapiens
tgggtctacaccacatctgcacatactatgagcccttccgttggagataattttcacttgcggagctgcttcacttctacctgtaggagcctcatctccacctctctacagtggagaggatt

SEQ ID NO: 387820 - DNA, 122 bp, Homo sapiens
tgagtggccagctccactttgcgacacggagactgtttgtgtgacacctcctccagctcccgtcccccttccgccgcgtgggtgccatggcaacggagagagacggcaacctgggttccgga

SEQ ID NO: 387821 - DNA, 122 bp, Homo sapiens
agactgggctccgggaaatgtgggtaatgggactggacctgcgcctggggtccgcccacccgtcatctcccgggagccccccgacgtgtgccattaagcataaggcgcgttaagcgctgcca

SEQ ID NO: 387822 - DNA, 122 bp, Homo sapiens
gagggacggacatgcgtgtttgacctgccatccctcctcagagctatggagagcacctcgcgctgaagctgacattcaaacgcctgaacggtcataactgagacccattccaaacgctgact

SEQ ID NO: 387823 - DNA, 122 bp, Homo sapiens
cccttttcaccttggctgctgggaagcctggagtgatacgtgtggcccattcacagcaagcgtacattatagtccgtttttgtacaaatcccagtactgattccattcattttatagccctg

SEQ ID NO: 387824 - DNA, 122 bp, Homo sapiens
ggaggctgaggcaggagaatggcacgaagccaggaggtggagcttgccgtgagccgagatcgcgccactgcactccagcctgggcgactcagtgagactccgtctcaaaaaaaaaaaaaaaa

SEQ ID NO: 387825 - DNA, 122 bp, Homo sapiens
aatgaccatatcagcctatttataagcaggcagttaactcattcatcactctgtagctgacgcctgtgcccccagctgcactcacatggcgtggtgagctttcacctgagtgcggcagttac

SEQ ID NO: 387826 - DNA, 122 bp, Homo sapiens
cgagtgatgcttgctcggcaggctgtggatgtggattcctatgtggattgcgaggccgggcgcaacagggatgtcgcttcctagggacaaagaggggtgaggggagagacggccaggaacca

SEQ ID NO: 387827 - DNA, 122 bp, Homo sapiens
cagagacataaagatggagataacagacactggggactccaataggggaaagagtgtgagcggcagtaagcgttgaaaaattacctgttgggtacagtgtttaatatttggatgatgggtac

SEQ ID NO: 387828 - DNA, 122 bp, Homo sapiens
ccagaccttctataaaaatgacacataatccctaaacaagaatgtgaaaattctgaactgcgattgactgccacttgtatgagaagtcttcttagaggaatttacccttctgtgctggtggc

SEQ ID NO: 387829 - DNA, 122 bp, Homo sapiens
atcagtctctcaggacgtcctcaactctggtcagtgggatgatgcagtaggcaggaggcccgctggaagatccccaggatccagcctcgtgggccccggtcacgccggggggagtgcaggcg

SEQ ID NO: 387830 - DNA, 122 bp, Homo sapiens
gatccgcctgcctcggcggcctcccaaagtgctgggattacaggcgtgagccactgcgcccggcccacagcttggttttatacattagggagacatgatacatcagtcagtatatgtaagaa

SEQ ID NO: 387831 - DNA, 122 bp, Homo sapiens
tgggtgtcatgtatgagccaggccgtctaggtgagtatggcaggcagctccctgtgcccccgtcacacagagggtgtgtgtgtgagctgaacctgaagacagtgtgtggggtggtgacatgg

SEQ ID NO: 387832 - DNA, 122 bp, Homo sapiens
atctttaaattctccagccactcagaggtaggggcgtaacaatgggcgtgtctttctttgcgtctctactccaggagcttgggctgtaccaattgcctgctagaggaaggaggtttatggtg

SEQ ID NO: 387833 - DNA, 122 bp, Homo sapiens
gaggtggagaggaaatatcattccccggcctaaccatatgaggactgcagtgacggcccccgccagcacctgcccctcctgcgggcttggctccccggcaggcgctccccagatgcggcttg

SEQ ID NO: 387834 - DNA, 122 bp, Homo sapiens
gcataaaggctgcctcgtggtgcagctatcagtctcatggtgagaaaatgcgtcttggcgcgcggctctcttcctggcacacagaccattactaatgaaaatgtcctttatagatgtcaatt

SEQ ID NO: 387835 - DNA, 122 bp, Homo sapiens
cctggagttggatggctctgtgcaggcttgctttagactatactctagtgagactttgaacgtatatgtcatcatcttttgcctcgctaatgaagatttgatagataatactgcttgagata

SEQ ID NO: 387836 - DNA, 122 bp, Homo sapiens
gatgaatcatattctggagctccatctaagaatccccatgcccagattagggactgcgagcgaccacccagcgccagcgcgaccaggaccaaggacctccgcggctgagcggcgagtccggg

SEQ ID NO: 387837 - DNA, 122 bp, Homo sapiens
cgaaagtgagtggggccaagcggggcacgtgtgcaggagggacaggcctccgaaccggggcgggagggctgctcggggcccctgctactgccagtatcataatggctgctaagagcacctaa

SEQ ID NO: 387838 - DNA, 122 bp, Homo sapiens
tggggagggtgggggtagatgagagtggggacttggatctgcctgccaggccgtcctgggcgctgcaggaagcaacatgacttaggtaactgcccagaggtaagtcccagtccctaattctg

SEQ ID NO: 387839 - DNA, 122 bp, Homo sapiens
cagtttcctcacctgtgccccggctggtgtgtggatggggtgagttcatgtcttgaggaccgagcatagggcctgtgggaaggtgaccgcgcgtcgggcgctgggaaggtgactgtgcgttg

SEQ ID NO: 387840 - DNA, 122 bp, Homo sapiens
tgacctcatgatctgcccgccttggcctcccaaagtgctgggattacaggcgtgagccaccgagcccagccagtattgttttttttaatagcagatctgtgaccagtttcctcttctagcat

SEQ ID NO: 387841 - DNA, 122 bp, Homo sapiens
ctctgcgcctttccgccccgtcaccgcatcaatggggtggaggccaaactcaaacacttgcggggcacagacgtcccagaagcaaacatgcaagtcacgggagtttatttatttaatttttt

SEQ ID NO: 387842 - DNA, 122 bp, Homo sapiens
tcagcctctggagaaaactccagagaaccgctcctgggaaccccctcaccagtgtagcaccgcaccgcctcagtcagattctgttcaggaaaagtggtttttattcccatttcccagtgaaa

SEQ ID NO: 387843 - DNA, 122 bp, Homo sapiens
tttcccaggtggttgcatcatgtgcattcccacctgcagggtatgagggctccaggtactcgagagtgtttccaacacttggtgtcaaggtcagtaatgttaacttttgttacaggccgaaa

SEQ ID NO: 387844 - DNA, 122 bp, Homo sapiens
tgcggcaaaggctcacaagcacttggtacatctcaggtccccgtgtggcacccccgtgcgcgaggtgccccttcagagaggagctcccgatccacactggggcacaggtgccaagtctccaa

SEQ ID NO: 387845 - DNA, 122 bp, Homo sapiens
ccagtcacagccctctgccgcttctaggaattaatgtctccctgggtcatggcactgctccggctgctgccagcagagctgcccatcccaggcccattgagtgctacggaaggacctcagaa

SEQ ID NO: 387846 - DNA, 122 bp, Homo sapiens
tctgctgcgagcagactgaggagcctttcttgtccttctgagaaggccgctgcccggccccgcctcacccagcgtcctgtggtcctgcgggtccccctctaccctggacttcggccccttgt

SEQ ID NO: 387847 - DNA, 122 bp, Homo sapiens
ccagccagagttcacagagcaaagagttcaggctttcttccaagcacttctgttgccctccgagttcctcctgtctcttccacttccgtctcatgaccactttgcctgtccccaccccaggt

SEQ ID NO: 387848 - DNA, 122 bp, Homo sapiens
gctccgaggaaggcctgtgggagtctcggagacgtgtctgtctgtgaggcgctgggtgcacgtccccagggctctgggctaggaaggcagcggcgaggtgcctccccacgtacccctcgcgg

SEQ ID NO: 387849 - DNA, 122 bp, Homo sapiens
cggaaccccgccccgcgcctccagccaatgagaccggagcgcgcccccggagccccgccccgcgcccctagccaatgagtccgaagcgcctgctctcggagccccgcccccacgtctcagcc

SEQ ID NO: 387850 - DNA, 122 bp, Homo sapiens
catgccctaatcatgccctttgcagccttcttactccttcacagcccacatgctcaaggtcgtctgtcttttctgtccctccccacctgttccagttagatttctactaaagtaatagttag

SEQ ID NO: 387851 - DNA, 122 bp, Homo sapiens
ctttaaggcgacagcagtgagagcgcatcatttagtttcggcgaacccatctttaaagcacgaaactactacgtcccttatgttgagttttgtgaaaccgtctccagggatcaaattcagag

SEQ ID NO: 387852 - DNA, 122 bp, Homo sapiens
cgaggccaggctccccgccaggtccagtcactaggcagagccttggcgaggacgggggagcgcacactctggagtcggctaagaccaggctctgccgcggtccggaaagccgctgagtttat

SEQ ID NO: 387853 - DNA, 122 bp, Homo sapiens
tgggaatttcctcttcctaataagcctgggagcgctatgggagactggagtctatctcaccgctgcaatctcgaccataagagacaggtacgccccagaggggccagttcagagacctaccc

SEQ ID NO: 387854 - DNA, 122 bp, Homo sapiens
tattaccaccactaaatcaacctacctacctggatggatggtctacattcccacttaagtcgagcctcttcctccacggagcactcacctacttcaaggctttgtttcggcaattgcctctg

SEQ ID NO: 387855 - DNA, 122 bp, Homo sapiens
ggcaatttctgagcaaatcacacacaattttttttcattcccattgatctattacatagacgaatatttggttgtgaaaaagtgagagaaagaactcggctattttattatagtagagcaac

SEQ ID NO: 387856 - DNA, 122 bp, Homo sapiens
gacactgaatcccataccaagcagggagtggaaatgcactggtgagtggtccagggcagccgtggggcaggagagctcctgatgaggacaggaggaggaggggatgtgctaggcagggacaa

SEQ ID NO: 387857 - DNA, 122 bp, Homo sapiens
tattaaaagccaaatgccttcactggaccttcgaggactcacttgtaatcctccctcaaacgggcctcagaccctagcccctggccagctgtgctgtttagcaaacatgctgtgtgtgttca

SEQ ID NO: 387858 - DNA, 122 bp, Homo sapiens
ttatcgaaacagagtcttgctctctcctctaggctggagtgcagtggcgtgatcttggttcgctgcaaactccatttcccaggttcaagcaattctcttgtctcagcctcccaagtagttgg

SEQ ID NO: 387859 - DNA, 122 bp, Homo sapiens
tggcgaaggcgagagccaacccaggatcttggaggcccgtgagcaagcgcgcaagggcagcgccggcaatcagcctagacctgcgctctcccgtttcttccgccttggggaaagtgcgccct

SEQ ID NO: 387860 - DNA, 122 bp, Homo sapiens
aggcgccgcgcgaacgtgtagttggccgggtggagcggcggcgacctgggcaccgtggagcgccgttggttccgtcatagcagctgtcggagtgggggttcctccccagcgtccaggcggcc

SEQ ID NO: 387861 - DNA, 122 bp, Homo sapiens
ccgccccccgccagccccgcacttactgtactgtactctatttaccaccccagctgggctcgcgccccgcccaccccgcggggattggctgcgaacgcggaagaaccaagcccacgccccgc

SEQ ID NO: 387862 - DNA, 122 bp, Homo sapiens
gtttttgcccttctgtcataaactgaaaatacttctgagacttccccttcctcttagaggcgtggtgacaacttcttcccctgcactaaaaatcctaatttgtaactgtgttaattttttgt

SEQ ID NO: 387863 - DNA, 122 bp, Homo sapiens
gacactgaagaggcctggcctgggatggccccacaatcctttaatggggtgtattgccttcgccccaggaatgagcaagtttcttctgtcagggtcagacccacaggtgaggtgggtagaga

SEQ ID NO: 387864 - DNA, 122 bp, Homo sapiens
gcgaagcacgtcaagactcaccagaataagaagctcaaagtcgctgaggccggggttaagcgggaggacgcgcgggacctgtgagccctcccggaggtggacccccttcccagcacctctgc

SEQ ID NO: 387865 - DNA, 122 bp, Homo sapiens
aggggcggtgcaggggcgggtctcctccgagcagggcggccctcagcaccccttcccggacgtgcgcccggcacgcccacactctcgcacggaaaagccccacttctcctcagcgtctgggt

SEQ ID NO: 387866 - DNA, 122 bp, Homo sapiens
tgcccagcctctcccaacggtccctcgtgccccgctgccttctcagggtccccaagaagacgctggctctgttgccatgtctctgtcctagccacaaggcctctggcttctcctgtgtgtgg

SEQ ID NO: 387867 - DNA, 122 bp, Homo sapiens
ggtgcctgctccatggctgcagttcggcgcggcgaacccagtgcgcctgcgccgccgccgcgcccgcggccaaccagtctctcagctagcgacgcccgcccctccgctagccatcgcctcgc

SEQ ID NO: 387868 - DNA, 122 bp, Homo sapiens
ttgtcagccccctgcacgccgccccaaatacacactcgccctgaataaataagggatgctcgctgtacagacgcagctccgtgacagttctcagcggcctccactatcggactgccgccttg

SEQ ID NO: 387869 - DNA, 122 bp, Homo sapiens
tttgggggacgctttgttccagtatcatccatagcactccgggcttctgagatggagacacggagaggaaacggctgagctgtttctggaagactgggtgacctcgacgggcaggattgaga

SEQ ID NO: 387870 - DNA, 122 bp, Homo sapiens
aataacaacaaactcatattccaactgaactagtcaattatctcaggggaaaacaacaaacgattgctttatggtttagagcacacctgtgcgtggctctcccgcactcaccacaaccaccc

SEQ ID NO: 387871 - DNA, 122 bp, Homo sapiens
attttgagcatttcccaaagccctagagtaaattggagtctccctggagtattgcaaagccgggtttggaaatctcagatgaagagaatgttgggcaatggatgatggagaaaaaggagaaa

SEQ ID NO: 387872 - DNA, 122 bp, Homo sapiens
tgacctcgtgatctgccctcctcggcctcccaaagtgctgggattacaggcatgatccaccgcacccggcctaattttgtatttttatagggatggggtttcaccctgttggccaggctggt

SEQ ID NO: 387873 - DNA, 122 bp, Homo sapiens
agacctgatcgccgggtccaccctgcaggaactcgccccggcgcgttgagcacagtgccccggactcagagcctggaaagccgccacgcccccggcccgcccccagcccggaccccagtccc

SEQ ID NO: 387874 - DNA, 122 bp, Homo sapiens
tattttgccttcattacacaaatgctgctgctctgaaaggagcttcactctggggcttgacggcgctggggacacgggagaaggagccacagcttcactctggggcttgacggcgctgggga

SEQ ID NO: 387875 - DNA, 122 bp, Homo sapiens
ttagagtctcattttctacttttccactgtacaaacgggcctccaggcgactgcagcacccgccactgcccgtaatagggtgacaagagggatgaccctttcctctttctcccttctggttg

SEQ ID NO: 387876 - DNA, 122 bp, Homo sapiens
aaagctggcggcgccacctcttcccggtctcggcgaggcccgagcacctacgggcggcggcgtgctctcctggccatgtcggagcctctgcccgcgttcttcgactgcttgttggggctctg

SEQ ID NO: 387877 - DNA, 122 bp, Homo sapiens
gctctctgggatcgccatttgaggtgggcgtggctattaggacgctcagagagcccagcgcggtgaggaaagcgacgaacttaggagccctggtctgggtccagccaccccttactacctat

SEQ ID NO: 387878 - DNA, 122 bp, Homo sapiens
ccgcctcgcgagaaagggactctggtagcggctgtacccgaaacgtcacttcctgcgacacgcaggaaacaaaggctcccagttcacgcgataataagaccaactcgatactcactaggatt

SEQ ID NO: 387879 - DNA, 122 bp, Homo sapiens
agcacgaccagtgaacccatattgctttgacagttgcactcatctagaaataatgcaaaacgctatttagatgtatatatcacgaccctgggctctgggaagaaaacaatctaatgaggggc

SEQ ID NO: 387880 - DNA, 122 bp, Homo sapiens
tgctgggattataggcatcagccactgtgcctggccagattggactttttaaaaagccagcgatatactgctttacaagagagacacctaaaacaaaatgacacagaaaagttgaaaataaa

SEQ ID NO: 387881 - DNA, 122 bp, Homo sapiens
gctcccggcgcggagctccgcctacggcccgtccccggcgcggaaccccgcccacgagcccgtttccagcgtggaacaccgcccatagcccgtccccagcgcggagccccgccccgcaggct

SEQ ID NO: 387882 - DNA, 122 bp, Homo sapiens
gcagaggccacacgggttcggctgggacgataggcagaagccacatgggttcggctgggacgataggcagaggccacgtgggtatggctgggacgatgggcagaagccacgcaggtaggcca

SEQ ID NO: 387883 - DNA, 122 bp, Homo sapiens
tcagaggttgcagtgagccgagatcgtgccactgcttcaattgaaagcaatggcaaaaaccgcaattacttttgccccaacctaatagtagcgctagctggcaactattccctagaaaagta

SEQ ID NO: 387884 - DNA, 122 bp, Homo sapiens
tatatatttcatttttatccttacaacaaacttcagaaatattatcatccccaggccaggcgtggtggctcacgcctgtaatcccggctctttgggaggccaaggcaggtggatcacctgaa

SEQ ID NO: 387885 - DNA, 122 bp, Homo sapiens
taaagaaagggaagcttggggtacagattcagctgcctcacgaagactgagctggacgggcgtggagaaggtgcttgtctgtcaaggacgtccccgtaaggagcggtggctgcagcagctgc

SEQ ID NO: 387886 - DNA, 122 bp, Homo sapiens
ttatgctgaagagagatgccctatgtaagtcaagtgtcttttccagaggaagtttgcatccgatggggattataaagttctgctcactctccttcattctgaaagtccaaccaaactttaga

SEQ ID NO: 387887 - DNA, 122 bp, Homo sapiens
aagaacgcaaaaagcagtgacgtacattattctctgcatatatttacttgggaaattgtgcgtctccctattctgagtcttggaggaattggactggtccaaccttataaagagagcagtag

SEQ ID NO: 387888 - DNA, 122 bp, Homo sapiens
gttgaacctgcactttcaggcccagtcagagacaccttttaagactgtgctggccgggcgcgttggctcacacctgtaatctcagcactttgggaggctgaagcaggcagatcatgaggtca

SEQ ID NO: 387889 - DNA, 122 bp, Homo sapiens
gagcagctgaacagaggccatgccggggcactccgaggcctgagacgaccacgcctgtgccgctgaggaccttcatcagggctccgtccacttggcccgcttggctgtccaatcacactcca

SEQ ID NO: 387890 - DNA, 122 bp, Homo sapiens
gagggctgccagccacactcaccaaagcggcagacacatgcactgtctaccctcagataacgttcctttggcacgttctggggaacagtggcttgactctcactgtacttcttactccattt

SEQ ID NO: 387891 - DNA, 122 bp, Homo sapiens
ttgatacaaactcattggtttatgaaacacagttggatccaaattatatttctgacaaaacgggacctattcacatggctgtttgcccagattggtaatctaatgaaggcgtaccaaaattg

SEQ ID NO: 387892 - DNA, 122 bp, Homo sapiens
agagagtgagagtgcgagctcacaggtgcctggacgcgtgggtacatgcaggtggacatgcgagagcgtgtgtgtgcgtgcacacactctggggggccgggcgggggctggagggcacccaa

SEQ ID NO: 387893 - DNA, 122 bp, Homo sapiens
accgtgatggtggggaggtggtcttggggggacccctgccgtggggaatgcaggaatggacgcggcaaaaggagggaagagaacttcaggtgcggagtgaaaacgggagttaacggttttgg

SEQ ID NO: 387894 - DNA, 122 bp, Homo sapiens
agcgctggggctgagtgtggatctttctgtttctcttcaatggcctctcccctgggatctcgtggtcttaatggaggctgcattagctaatctagtgattcaattagttctaaatgctcctg

SEQ ID NO: 387895 - DNA, 122 bp, Homo sapiens
tggcccgtaagaactgcagctttcaacacaaacaattttgtctgtgctcccaccctccaacggatttgaaaacactgtagcatggtgtattagcctgttctcaccttgctgataaagacata

SEQ ID NO: 387896 - DNA, 122 bp, Homo sapiens
gcgatggggatcgggtgggaggtcagctccagatccagtggccctgagctcagagagcagcgaagtcagggtgccccgggaggagatcaaagcctcggcccccactgccctccgctctgcct

SEQ ID NO: 387897 - DNA, 122 bp, Homo sapiens
atgaatatgcttatggaaggaaacatgtgactaaatatgtgggaaatagtgactgagtggcggctgagtaaacagggtagcatccttttagctggttgtgctttgactaactgatctgttct

SEQ ID NO: 387898 - DNA, 122 bp, Homo sapiens
catcacgtgtgcagagacggcctatagtgtctgaaggatgccacctagtcgcaggcccggcggcgccaccaacagcgaccgcggtagtccagctcgcgccgcgtcccggccccagcccggcc

SEQ ID NO: 387899 - DNA, 122 bp, Homo sapiens
attagcaggttggtttccctccgcggtattacatttaagggaataaacaactcacatgaacggccaagggctgaagacagaagtggtgctctccatcttcgtcaggtgctcacggagggccc

SEQ ID NO: 387900 - DNA, 122 bp, Homo sapiens
cgggcggagcgtggcatcacgcacacccccgctcggccaatcaggaaggagagggatgtgcgctccgtgcgtacgaccattgcccccgcggcaaggcttccccgcccccaccctcacacctc

SEQ ID NO: 387901 - DNA, 122 bp, Homo sapiens
ctttcagtgacaccgtgggcttcaggggagagggtcagtctgagtctgtcaccacgggctcgagacacacacccccgccccccgccatggctatggtggaattgtgggtgaacctgggcgtc

SEQ ID NO: 387902 - DNA, 122 bp, Homo sapiens
agttgacagctggttgggcccccagtggggctgtggggtgcatgtttgcctcttttcttccgggcagacagcggccagcaagatgagcattggccggcaaatagagcacgaccagccatggc

SEQ ID NO: 387903 - DNA, 122 bp, Homo sapiens
accttccctaggaggccagcccgttctgttgtttggcatccctgtctctgacctggttctcgggtgcagccacccccagaggagagaagcccagcccaacctgagctggcgtctttgagact

SEQ ID NO: 387904 - DNA, 122 bp, Homo sapiens
ccctcccagcctccactgagacctctttaaaaccacccaggggccgccgggggatgaggccggggaacgggctggactgagggcgggggctcgggggcagcggacgggaaacgcctcgaaag

SEQ ID NO: 387905 - DNA, 122 bp, Homo sapiens
ttcttagcacttaggttactctgaccatgtagatacttttcgttgttgagccctggagtacgctatgactttcttttcctttcctgcacaacttttccttccggttaattatcttgcatatt

SEQ ID NO: 387906 - DNA, 122 bp, Homo sapiens
gggctgggccgccgagagcaggagaatataccgtgtcacacacctccattctctcacacacgttgcagacacaaatcactgacggtttccacgtgctgcgctcgtgagcggaggtgttcaaa

SEQ ID NO: 387907 - DNA, 122 bp, Homo sapiens
tcgtgatctgcccgccctggcctcccaaagtgctggcattacaggcgtgagccaccgcgccgggcccagaaggctaattcttactgtctctaacacaggtccggtacataacacttattttg

SEQ ID NO: 387908 - DNA, 122 bp, Homo sapiens
tcagctccgcctgacctgccaccttccctaggcagcggggggcgggggtggggggtggtgcggggagtcacatgcgtcccctccgaagctgggctggagttcatttacagctcgcttttcta

SEQ ID NO: 387909 - DNA, 122 bp, Homo sapiens
tttaaaagttgctttacggtgagtgtgatgaggacatgcaagatatgatttatgtgattgcgttgttttcaacagacttaatagtgaaggggaggtatctgttagattttctattttattct

SEQ ID NO: 387910 - DNA, 122 bp, Homo sapiens
ctcctgctggcccggatgtggttctttcttgaccaaggtgtgcactggacagaacacacacgctcggaagaacctgccggaggtatgaacattcgggcttgtggtgcctgcagcccctgtca

SEQ ID NO: 387911 - DNA, 122 bp, Homo sapiens
taaagttgcaaacccagcttttagctggtaagcggaattcctgtgaccttcctaagatggcgtccactcaaccgcttccgcctttacgtgggccggcagggggcgggcttcccaggggcgca

SEQ ID NO: 387912 - DNA, 122 bp, Homo sapiens
atacatgcccttctaaactgtgctttcaggagactgggcattgtgctcctttcctcctcacggtccaggatggtaacaaagtgacctcggaagccacatattgagatggcataacccctgtc

SEQ ID NO: 387913 - DNA, 122 bp, Homo sapiens
caatgtaactattgcacataaaacagagttaagtgctgagagctttcaacttaatttctccgtcatgaattccattcatatagatggggcatttattatctccctgtattgagccatttata

SEQ ID NO: 387914 - DNA, 122 bp, Homo sapiens
ctccagaaagccctcgctgaagggaaacaggtgagcggggcgtgggtgcggccacctgggcgcagggctcccccacccgctccggggccaagccacgagaccccttgccttgtccccagaga

SEQ ID NO: 387915 - DNA, 122 bp, Homo sapiens
cgcaaacgacacacctttcaacccgacttctctggcctacttctcctgttccccagatcccgcagggcacactggtgacatcacaagctcctcgggtccaaaccctctcacgccctcattca

SEQ ID NO: 387916 - DNA, 122 bp, Homo sapiens
ccagactcaagctccattcttgaccaatccattcctccattagcaacactcagaaggatccgcactctactttcagatgtccaaactcagacactgcacagacttctattttaaaactctac

SEQ ID NO: 387917 - DNA, 122 bp, Homo sapiens
cccgccccctgccctgactccgccccagaccccgcccacctcgtcctggtcccgaagaaccgggactgcctgcaccctgacttgcccaacccaggttcaacctccacctcaggccccgatag

SEQ ID NO: 387918 - DNA, 122 bp, Homo sapiens
aaaggaagggaggggaaaagaaatgagcacttgaaatctcaagggaaacattcaaactaccgtctccagagattcttgcaaaaggagctaatggactgcccaactttaactctgcctaagct

SEQ ID NO: 387919 - DNA, 122 bp, Homo sapiens
accatgccggccagtgacaaacacctccctcccgccgccccaggagccgccggcactgcgcgagtgggagggctgggcttctcgtgtactcctcaaactctcgcgaggcttcgggcggcttt

SEQ ID NO: 387920 - DNA, 122 bp, Homo sapiens
tttctctgcctgatgtcataaagaccaccatttttgtcctgacttttttcctgtgatgatcgtattggtgcttttcataaaatgtgaaatattacatttttctttctccaacttctgtgtgt

SEQ ID NO: 387921 - DNA, 122 bp, Homo sapiens
tctttctttaatgctttagtgtgcttacaatgataatagtggatgcagaacctgtggatacggacagccaactgcgagacttgagcatccgcagattctgttatcctatggggtcctggaat

SEQ ID NO: 387922 - DNA, 122 bp, Homo sapiens
gatgagtgggtctgatgtgcgacaagataagagagggactggatgaatgggtctgatatgcgacaagataagagagggattggatgaatgggtctgatgtgaagaggataagaaagtcacag

SEQ ID NO: 387923 - DNA, 122 bp, Homo sapiens
tgtacgtagttagaacctggcaagagagcactctcgaggagcccgcaggcggggctcggccggggaccagcagggcttgtcggcgcccaggctctgccccctacccgaccctgcctgccgct

SEQ ID NO: 387924 - DNA, 122 bp, Homo sapiens
gatattattgccaatatcgcaggagctgtacactccccctcttatattgttccttataaccgggggggacgggatgatattagtcccaatgtcgcagagggtgtacaccgcctctgtaatat

SEQ ID NO: 387925 - DNA, 122 bp, Homo sapiens
gtaaacatgaaaagatcattttcaggcactttcttgttccaggcaaggaacattcttgtacggattgagatgtctgaaaatcaaaacactgagtaatttaccaaaggttatatttcaagtag

SEQ ID NO: 387926 - DNA, 122 bp, Homo sapiens
gaaagcagagagagcatcgcccagatgggctagattcttctcacaggctcactgctagaacgaacattcttgagactttagatctaagccagcctgatttctgaaagccttggaccgtttcc

SEQ ID NO: 387927 - DNA, 122 bp, Homo sapiens
ttgaaaatatgaacaatactctgttcatgagcataagtatgaagtgctggggttagcatccggctgatcaaaagcatcttgcaaagcgaagaggaagtgctcattattcaatgacttccagg

SEQ ID NO: 387928 - DNA, 122 bp, Homo sapiens
agcctctgagcctccctctagccgctcctcccctcctgctcccagacgctttgtagcccccggctgagccactgcacaacctgctacctggtttccagctgtattgtggactggcctgggag

SEQ ID NO: 387929 - DNA, 122 bp, Homo sapiens
gacaaaatggatacataaagactaagtagcccataaggggtcaaaatttgctgccaaatgcgtatgccaccaacttacaaaaacacttcgttcgcagagcttttcagattgtggaatgttgg

SEQ ID NO: 387930 - DNA, 122 bp, Homo sapiens
ctagccagcaccaggaagtccccctttatccccttccccaggagtcggggctggcggagacggagagctgcgggcagactcacacctggccccgggctctggctgtattgatggggctgtgg

SEQ ID NO: 387931 - DNA, 122 bp, Homo sapiens
aacttattttcttatttttagaatcaactttgttctaagaagctctccctttgcctcctgcggtgaccttccatgtcttgctctagaggccactggcaaagcaaccgggcctagtgctagga

SEQ ID NO: 387932 - DNA, 122 bp, Homo sapiens
gccccgccgcgaagttagctcatttgtgatcaggccaagtccctttagatttcacgcagacgcgggtgcagcctgctctgggacttgaagtccgctggagcctgggcctctgcattatccgg

SEQ ID NO: 387933 - DNA, 122 bp, Homo sapiens
cctggcaggtcctttctcgaggcagggggcacggtagcacagggagcttctctttgtgggcgggcgcgaggcccgctagggggttatactggggaacgtgcctgcgcgtgcttgggtaagag

SEQ ID NO: 387934 - DNA, 122 bp, Homo sapiens
acgttgcgggcgggagggggccttagtggaggccgtcggtgggcccaggaggccagggtccggcgtcgggctgggggccggttttcgtcccccgttacgtgcaaggcgggaaatgacccctc

SEQ ID NO: 387935 - DNA, 122 bp, Homo sapiens
cttggacgctcgagcgctcctgggccccttgacgttcactccccacccccatcccagtcgcggaccctttgtgcagagctccgctgagccacagtaatcctaaaagcacagcagagctccgc

SEQ ID NO: 387936 - DNA, 122 bp, Homo sapiens
ctaaatacacttgtctgcaagtgttggtggggatgttgtaacgtgagggcatccatcatccgtcaccttaaaggtgaagggagaggattttgtgatttgtgttcaagaggcactgctgttgg

SEQ ID NO: 387937 - DNA, 122 bp, Homo sapiens
ccagagcagaaagcagaagcccagtgctcagggtgaggccttgggggaaacaacggtctgcgcgggagatcagcgatggctgaagaatccctgaggatggttgtatttaaatggcttcatcc

SEQ ID NO: 387938 - DNA, 122 bp, Homo sapiens
aaaaaatttcaggctttatcagtatttttccatgattcatcttaacatttctctttgcaccggaattccaagttctcttttaacttggaactttaaactttaacatcagattgcttgaatgc

SEQ ID NO: 387939 - DNA, 122 bp, Homo sapiens
cacagcaaagtggggtgccaggcagaggccaggggctttcaaagaccggggctcgagttccgtcacagccacccctgtgacatcggccgtctttctgaccctccgtgtccccgggaatgacc

SEQ ID NO: 387940 - DNA, 122 bp, Homo sapiens
tgcagctctgcaggtcaccatcccacagtgatgagctcagcaagcagagactcatcagaacgtcagcctaagctagggtagcgaacttgccagggagaaccaagaaaactagatgtacaggg

SEQ ID NO: 387941 - DNA, 122 bp, Homo sapiens
tggcctgaggggctgggggccccacgacctgcagcgtcgagtccgggagagagcccggagcggcgtgccatctcggctcggccttgctgagagcctccgccctggctttctccctgtctgga

SEQ ID NO: 387942 - DNA, 122 bp, Homo sapiens
caaagtctatctagctcctgtgtgaacaatgacggtgtcttctcagcatgcggtgtttaacggctcccaaataattggactgcactgagggggaaagtcgtcagcaaaccgcaggcttcact

SEQ ID NO: 387943 - DNA, 122 bp, Homo sapiens
gaggccaagtgtgtatgtgctctaggggaacagtcggaggctctgacaggcagagcaaggcgatcatgactatgttttcacaaagtgtatgctagcagttgtttggaaaaagactgaccagc

SEQ ID NO: 387944 - DNA, 122 bp, Homo sapiens
tgaccttgacgggcaactcggcgctggtgctgctggcggtgcgcgacccgcgcctgcacacgcccatgtactacttcctctgccacctggccttggtagacgcgggcttcactactagcgtg

SEQ ID NO: 387945 - DNA, 122 bp, Homo sapiens
agcaggaaggagacaacacttggagactgcccagcactcccacaacaaagaaggcgatgacggcaagagaaagctttgggtccccctcactgaaagcggggagaagaccaactcataccctc

SEQ ID NO: 387946 - DNA, 122 bp, Homo sapiens
ttcacctaaatactccccttttctgataaactgccaagtggtttccattctaattattaccggtgatgcccaacctcatacactaaacacgttaatttctccttaaagccaggctgaatgtc

SEQ ID NO: 387947 - DNA, 122 bp, Homo sapiens
tccgccacccctagagcacaggggccaggtctgtagggatggcgctttcctgacggcgaccggggtcctcgtactgaccgcccagactagctaaactggcttttctgtggttggtgctcaac

SEQ ID NO: 387948 - DNA, 122 bp, Homo sapiens
gggtactgggccagcatggactcctctgtaacagggggacctgggacctaggggaggctacgtggggtgtgcctgtgcatatacccacaactaagacacaattagcctggggaatgggacaa

SEQ ID NO: 387949 - DNA, 122 bp, Homo sapiens
gtaagatggttaaaccgtgtgaaatgagagacagttgaggggttctagggaagatgatcccggaaaaggactgcaggcccatggaaacgcagtgtgcttctccaatatttggagggctgatc

SEQ ID NO: 387950 - DNA, 122 bp, Homo sapiens
cagcaacaggaggaagcacagcattctgtgctcagactagtgtggcaggcctgcagaatgcgtgtgggcccttgttcctgtgcttggctgagggcttcctgagagcagttgctccatctctg

SEQ ID NO: 387951 - DNA, 122 bp, Homo sapiens
agaagtagggctggggaggagatgcagggataatgagacggaggggatctttggggaaggcgtttctgatcaagctgctaaatccaatttagctcaagtgttaattgagtacctactatgtg

SEQ ID NO: 387952 - DNA, 122 bp, Homo sapiens
gacgatcactttttgcctcttaaacagctttcttactatatattctgctttcccggtattcgtcgctagacggcagcagaggattttgattggattccaaactggttggttaaagcagcctg

SEQ ID NO: 387953 - DNA, 122 bp, Homo sapiens
ccataacatctggggaaaagtaaaccagattccaagcagtgacattgaaagaatccatcacgtgaaagaagtgcactgcgtctatttgatactcattaaaatgagtttcccaccctccaaca

SEQ ID NO: 387954 - DNA, 122 bp, Homo sapiens
gcggagtgtcattaatctctctccagaagctttccttttcctcctggggagtgaggactccggcctttgcctccacccaacacggtcgcccggctaggccccaccatccccactgtcgaccc

SEQ ID NO: 387955 - DNA, 122 bp, Homo sapiens
gggcaaaacatggaggtggtactcagagatccagctatgggtcaaaagcacctgagaaaccggtgtgtatgtgtgcaggcttgtgtgtgcacgtgcagtggcatgtgtacatacctcaaggc

SEQ ID NO: 387956 - DNA, 122 bp, Homo sapiens
ccatcctaataggtggaagggcatcaagcctactgtcacgattctctcgagaggaatttccgaccctgcaggcggctggcgaccaggacaaggctgccaaggaaagggagtctgccgaacag

SEQ ID NO: 387957 - DNA, 122 bp, Homo sapiens
ctacatggaaatgatttctctgaccccactgtctgtaggatggtggtggtttttgcgcagcgtgaagccaactggtctatgtggggcaaacttgtggttatggcctctttagccccctgctg

SEQ ID NO: 387958 - DNA, 122 bp, Homo sapiens
gcctcacatgaaatttttacgccaaagccagcatgtaaaactgagccacccgaatctgcacggagctgctcagtggaaccgagggaaggtttccactagccatcttgcttgagtttctcaaa

SEQ ID NO: 387959 - DNA, 122 bp, Homo sapiens
tattgcgaggattgtctggggcccctttaagccggaacaggcagggcggaagtgcgtcaccggcggcacgcccctgcacatggacctcccccgtccccgccatccctgccgatcctgttgct

SEQ ID NO: 387960 - DNA, 122 bp, Homo sapiens
tgtatgtttctgaagactctgggtctctcaggcagctgaagtcaagatgttggctgggcacggtggttcatgcctgtagtcctaatgctttgggaagctgaggcgggtggttgcttgagtct

SEQ ID NO: 387961 - DNA, 122 bp, Homo sapiens
cacagccactgtctcagttcctgcccctgaccggggtacagggtgggtgctctgtgaacacgtgttctactcatggcccagcttccccaccttcagctattttaggctctgacactggaaat

SEQ ID NO: 387962 - DNA, 122 bp, Homo sapiens
gctatctgtgcacaggttcctgcgccacgtgcctgtcgtgtatgtggattacccgggccccgcctccctcacacagatctacggcaccttcaaccgcgccatgctgaggctcattccatccc

SEQ ID NO: 387963 - DNA, 122 bp, Homo sapiens
ggaactgcagaggggcgctctgaggccctccatggctctctttccagagtctgaggtgaccggaaggagaatgcggccctgggaccgtcaaccttggaccagctgcagccgacgcctggcag

SEQ ID NO: 387964 - DNA, 122 bp, Homo sapiens
gtcaaagaaaggggtgacggacggcacctggaaaatcgggtcgctcccacccgaatactgcgcttttctgacgggcttgaaaaatggcgaaccacgagattatatcccgcacctggctcgga

SEQ ID NO: 387965 - DNA, 122 bp, Homo sapiens
gatttgacccagtgttgctgactttgagcctggaggaaggggccacgagccagggaatgccggtggcctctaggaggtggaaacagccaagaatggattctcccctagagccccagaaagaa

SEQ ID NO: 387966 - DNA, 122 bp, Homo sapiens
acgcacaccctcctccacccgcgttcacgcccgggttttgtttttttttttcttttgctgcgccagctgggaccccataagacaagaatggctgatctgcgactcctccctcttctctctta

SEQ ID NO: 387967 - DNA, 122 bp, Homo sapiens
cgcctgtttcccgcctgctctcaggagcgaccgccagggggcgcccgagatggcagggggcgtgggaagcccacatctgcccagcaggtgcgcccaccccgagcaaacagggggccggggcc

SEQ ID NO: 387968 - DNA, 122 bp, Homo sapiens
gctgactcaggatgcgggtcttccgtgcgttcaaacgttttaaaaggcgtctaaacccaccgagcaggtgctgacacaggatgcgggtcttccaaagcaacaagggaagacggggaggcacg

SEQ ID NO: 387969 - DNA, 122 bp, Homo sapiens
ccaagcgcgcgctgctttcagttggaattgatcacagatgcgacagtgatgaggccatcccggacgctgacagccacggcgtaaacacttccttattcccacccagcgctgtcagaggacgg

SEQ ID NO: 387970 - DNA, 122 bp, Homo sapiens
atcgtcttcactttccgagtgacacaaactgatctggtagagcacatagacttcaatgaccgcccatgttcaccctctgatgaaccaaggcactgcactgaagttttatatttacatactta

SEQ ID NO: 387971 - DNA, 122 bp, Homo sapiens
cagtcatttattatgcagctgctacaacgtcggtgtggtaaccactctgactatctgatacgtcagtcgaacaaaacctatacctcggagcaaacacatgagccagagcagcgtttgcattt

SEQ ID NO: 387972 - DNA, 122 bp, Homo sapiens
cacacctacaccacaggccctgctcagttgttcagggttcactcgtccacggtgagtcgccggagggtcagggaggactcacagagaacagggtgagtgccctacacccttcagcttgccag

SEQ ID NO: 387973 - DNA, 122 bp, Homo sapiens
ctagctttgtccccctgtcacctttttatataactataaaggggtatttaaggtcatttacgtcattttaacattctacatatgatacctacatgatatttacatggtcttcccccgttcct

SEQ ID NO: 387974 - DNA, 122 bp, Homo sapiens
ggccgtgtggtgtggtggcgcgcaggccacatgggatggaatgatgaggtacgaccccagcgccgcccgcccagctccgccgcaccttcgtcctgccttctgggactgacccccagctctgg

SEQ ID NO: 387975 - DNA, 122 bp, Homo sapiens
tttattcacttatatatctgatgttttcctaccagaattaagcaccataaaaggaggaaacgtctgacttgttctatgcccaacacatagagtagtgcctgatacatagtggaccctcaaaa

SEQ ID NO: 387976 - DNA, 122 bp, Homo sapiens
ttacagtgacccctgaagaatgcatgctggtaacctaggtgatgggagtggggaacatttcgggcacatgaattggcatttttatgcattatgactaaagctgagagactgcagggggcagt

SEQ ID NO: 387977 - DNA, 122 bp, Homo sapiens
tcaagccaaatggccggcgcaatagggacgcgccaatggccgggacccagggtccggcggcggcctcgagcaacaaatgcacctccaggctgcgcgccctgtcccaagcccggtcccggtcc

SEQ ID NO: 387978 - DNA, 122 bp, Homo sapiens
tggctccctccaggccgggagccaggaaggtggtccttcaccgaggtgcgcaccaagcggcggtccacccaggcaatggggtgcaccaatttgcctccaaaaatttgctgcgcacacaacct

SEQ ID NO: 387979 - DNA, 122 bp, Homo sapiens
ctccccgccacatgccaccgtctgatcgccacacgccatcgtctccccgccacacgccaccgtctccccgccacacgccaccgtctgatcgccacacattagggcttggtattctcagtccc

SEQ ID NO: 387980 - DNA, 122 bp, Homo sapiens
ccgcgctgggagagggccctgagccggggggctcacctcctggtcctcgttggcactcatcgcgccggtcgcggggcgcctcctgagcggacggcgttcgcaacaacgaagagaaagcgaag

SEQ ID NO: 387981 - DNA, 122 bp, Homo sapiens
agccctccctgtctctgatttgtgtcacacgctggtcctgggtctagtctttccctcaagcgccccctgaggcagccctgggcccctgctctgagggtgggtgttgactgccgacctctgcc

SEQ ID NO: 387982 - DNA, 122 bp, Homo sapiens
gagacagtgacagatcatcaggcgttagattctcataaggagcgcacagcctagatccctcgaatgcgcagttcacaaaagggttcaggatcctgtgagaatgtaatgccgctgctgatctg

SEQ ID NO: 387983 - DNA, 122 bp, Homo sapiens
gagctccaggtaggtctcctcctgctccatggaccgtaatcccactgttgggggtgggggcgggtaagagggtaagcgcggagcgagcagcctcggaacccgctccggccagggcgcagagg

SEQ ID NO: 387984 - DNA, 122 bp, Homo sapiens
tagatgtgggtcctcgaggtggcgtcgtagaagactacctctccgccctagtaatccaagcggacgcccactttgttcggacagatcgggagatcctcccgggaaccgctctcgatgagcgc

SEQ ID NO: 387985 - DNA, 122 bp, Homo sapiens
acagatctgggaatcaactgcatggaggaggtagttataggtgatgagatggatcagggacgaactttgttagaaggagaaaagatactaggctggtacaaaaataattgctatttttgcca

SEQ ID NO: 387986 - DNA, 122 bp, Homo sapiens
ctggtctacaagtgtttgctgatatagaaacggaataacggcgctgtgggctggggaggacggagttgccttcaggcttctggtctccagccgcggggcactcacagctgccgctatgaaaa

SEQ ID NO: 387987 - DNA, 122 bp, Homo sapiens
taatgccacacatatctaaaccgctccaggtctgcaagcagcgacacagcacacgcagtgcgccctggctagaccaagccctagccaaacacagctcattcacgcagacaaatacacaccaa

SEQ ID NO: 387988 - DNA, 122 bp, Homo sapiens
acaatattggtcaagggaggcctagtgcctaataataaattccatgttttcttaatcactcgtagtggctctgtttctctggttgaatcctgactgatacaggcagcagctgctagctacat

SEQ ID NO: 387989 - DNA, 122 bp, Homo sapiens
cagaagtgagggaaacttccccgtcagccctgcaaggctggctgaggtgtgactgtggcccgcctgctgggcgagggtgggggacaagcgggccactggctgtgagcctccccagggtgggg

SEQ ID NO: 387990 - DNA, 122 bp, Homo sapiens
caacaacaggaagtacaggtgcagtgtggggacctgggccaggcaggcactccgcaaaggcgagttccagagcccacaggtgcccgagctgcccttgcagtggctggttccacagtcacctt

SEQ ID NO: 387991 - DNA, 122 bp, Homo sapiens
acacccctctctcccctggtcgggagcgctgggatgcgggcttctctcccagaccgagagcggcgtttccgggcttccaccccgcccctgctcccaggccctgtcgcctcccctcagcgtcc

SEQ ID NO: 387992 - DNA, 122 bp, Homo sapiens
cacagaacttcaaagcgaaaggaagcacaagcagtagggggaggaggtgtaaatttcccccgcggtcccttggaactgtgaacatttgcagattccccaagccctcccgctagctccctgcc

SEQ ID NO: 387993 - DNA, 122 bp, Homo sapiens
acgtcagtcctcgcctcaagatgagcatattgctcgccgtggattcctctctcctgttgacgtcctctctcttctcctgtctcggtttatcaactactttttcccttccaatggcctttccc

SEQ ID NO: 387994 - DNA, 122 bp, Homo sapiens
taacaaatgatcatgcttggcttattaaatttgaaagtatgcttcagacgatcacaagttcgtaaattaattttcaaaatatttgcggggctgtcttgttactaatggtgttacaagttcct

SEQ ID NO: 387995 - DNA, 122 bp, Homo sapiens
catctcttatgacattgctgtcatccatttcacccatccatgtgctataaccatccagtacgttgaatttctgacctatatcatcttctttctccctgaagaacttctttacttcttcttct

SEQ ID NO: 387996 - DNA, 122 bp, Homo sapiens
gggttcgcgactggaggccctggaggtccgcagctgggctggtccgggtcctagggcgcccgcttcccagctgagcgcgcaggaggggccccaggcgccggggcggggtcgccgcctcactc

SEQ ID NO: 387997 - DNA, 122 bp, Homo sapiens
caagacagcaaatgggcaggtggccgtcagactgggcccccaggaccccgaacagccagacggatgccgccggcccaggactccatggctgcgtgaacctgccaccaacagcgacaggctcc

SEQ ID NO: 387998 - DNA, 122 bp, Homo sapiens
gaataacctgggaggcagtttctgggctgcagctctcggtcaggagcaagtttccaaagccgctgcgccgcggggccggttccctcttggtgatcagtgcccgagcccctaaggagcccgga

SEQ ID NO: 387999 - DNA, 122 bp, Homo sapiens
ctccctggcacaagtgatcctcccacctcagactccagagtagctaggactacaggtgcacgccacaatgcccagctaatttttagaaaaacgtttgtaggccaggcgtggtggctcacgcc

SEQ ID NO: 388000 - DNA, 122 bp, Homo sapiens
agtgagccaccacttcacgcacggtctccttttgaagtagaattagacaatgttttacaccgtgccagtgaaagcaaactgtactctctacggcgctagtagcaaaagcaaagaattattaa

SEQ ID NO: 388001 - DNA, 122 bp, Homo sapiens
cgagccggccgggtggggagggcggcggtggcatcgctgcgcggggcgcattgtgggccgcgctcgcctccgcgggggaccatctgctcgctgtcaatgcatcacctgctcgtctgggccgt

SEQ ID NO: 388002 - DNA, 122 bp, Homo sapiens
agctttctatgtttcagtcactctgctaagcctacactatttcattgaatctctttatctcgggtatatgtgagagcccaggctctttggtatcaagcagcatgtctttctgctctcccttc

SEQ ID NO: 388003 - DNA, 122 bp, Homo sapiens
tgacaagatgaatgggtggatagaaggatggatggatggatggatggatggatggatggacggacggacatatgtatagatagatgggtgggtaaatggatgaatgagtgggtgaatggatg

SEQ ID NO: 388004 - DNA, 122 bp, Homo sapiens
atttctttatagtcactgaaccagaataaccacagatcaagccggaagcacatgataacccgctgaactccgcacagccctggctgggcttctctgagtgaacaaacgctgccctggtctcc

SEQ ID NO: 388005 - DNA, 122 bp, Homo sapiens
gagcactccggtctttgtaataacgtactcctaagagctgttccagtggactcacgcaggcgcaggagactacacttcccaggaactccgggccgcgttgttcgctggtacctccttctgac

SEQ ID NO: 388006 - DNA, 122 bp, Homo sapiens
gatctgcctgtctcggcctctcaaagtgctgggattacaggcatgagccacaagcccagccgctagtgttatttttactgacctcaggtgataaaagtgtgactggctctatggtggccgtg

SEQ ID NO: 388007 - DNA, 122 bp, Homo sapiens
gcctgcgcgttcaggccgacgcgctcctcctcgtgcgccacgcgtagagcctctagctcgcgctccagctctgccacctggctactcagccaggcccgggcgcatttctctgcctcgacggc

SEQ ID NO: 388008 - DNA, 122 bp, Homo sapiens
ggcccctcactctccgacagggaggtgtcctcctcgacggcagccttgcgctcccgcttccgcccccccatggatgggaccttaatgggagacaagtgcagagactacagagacgaggccgg

SEQ ID NO: 388009 - DNA, 122 bp, Homo sapiens
aacttttgttttgttttttgagatagggtctagctctgtcaccactaggtgccaacacagcgacctcccaggctcaagcgatcccatccgcctgcctcagccagcctcccgagtagctggga

SEQ ID NO: 388010 - DNA, 122 bp, Homo sapiens
gatttccgacgcccacgagccattaagaggacacaccagccggctgcccctgccctgccccgaaactccaggacccctgaggaagctggccctatccctaaagaagaaggcgctgagctcca

SEQ ID NO: 388011 - DNA, 122 bp, Homo sapiens
gagagaacgagacaagttgcgagaagaacgagcacaacggctacatgactgacagggcaacgtcacaagaacagccgcagccacggcaacaacgacaatgtcacttaaatcaaaacaaaaat

SEQ ID NO: 388012 - DNA, 122 bp, Homo sapiens
agagagaccctcaaactccacttctctagtggtttctccagtggaattgctcactccagccgagtcacactggctccagagctggcccctcctttggcctgccccaaccttaccccacctgc

SEQ ID NO: 388013 - DNA, 122 bp, Homo sapiens
tgcttgtcgtcataggacctgcttctttcgacagggtgtgagtgaagaggatgctggcggcgtcccggcagaagctctgaatgtggttatgtggtttggctctgattctctttacttcttac

SEQ ID NO: 388014 - DNA, 122 bp, Homo sapiens
gtgagccaggatttcttaccttcagcattctcagggaaggctctggtccaagctctgattcggattccaagcgaagccacacgcccagctcttccttctccaccggcccgggacatccttac

SEQ ID NO: 388015 - DNA, 122 bp, Homo sapiens
ccctggccttaacctgtgaacatccagctgtccctgggctgtgattcagtgtctgtctcccgggtgacctcagcatgggctttgaggaaggggagagagtagtttcttctgagactggatag

SEQ ID NO: 388016 - DNA, 122 bp, Homo sapiens
atattggttttgatattaataaattatattttaaacagctcttgaaggctagcataaccccgatacaaaaaagaccgagaaatacccacataccagaatgaaaagactacaaacaagtgtca

SEQ ID NO: 388017 - DNA, 122 bp, Homo sapiens
ggtcaacacatccttcttcagagccaacagaacacacgtggcgccctgggccagctgctgcgctcatcctcacacctgggggccgcagtcgtctgctagcagaggccacagggactgggccc

SEQ ID NO: 388018 - DNA, 122 bp, Homo sapiens
agaaacccactgctgtttaaaggtaggtgtgtgtgtgcgtgtgtgtatgtttcaatgtatcgatagctacatctgctgaaatagcctacaggcaggaaaatcccagtagcaagttgctcacc

SEQ ID NO: 388019 - DNA, 122 bp, Homo sapiens
tcctaaccgctttcgctgcgggcagcgctggccacgcggcccccgccgccggcggttctccgtggccaagcatccttggccttggagcccaggggctgcgttccccttggggccggggcggg

SEQ ID NO: 388020 - DNA, 122 bp, Homo sapiens
atgacttattccaaaataggagatgaaccgccaaaggtttttcaggcctcaactcaaactcgtcgagctccaggaggagtaagttttctataagcattcctaaagttttataaagttagggg

SEQ ID NO: 388021 - DNA, 122 bp, Homo sapiens
acgtcagccgcagaatgtcctgcagggggcgcccgggagtcgcgtgcccaacggggaaagcgagtcaggtccctcgcgctccccgccccacgcgcgtgaccagagcgcgctggcccggccca

SEQ ID NO: 388022 - DNA, 122 bp, Homo sapiens
cagatttagctaccttcccccgaaagcctcaaagttctgcaaactcacagccaagcaaaacgcagctgcagtcgagccagcctcgaaaggtcttacaactttctgcagtggccagcttgttc

SEQ ID NO: 388023 - DNA, 122 bp, Homo sapiens
caccagcagagtgaagatgaaggcactgattttatcaactcataggcaatagcgtgaagccgtcccaatcctcattgattctgaagactcagctaaagtttgtttactcaggattctttaaa

SEQ ID NO: 388024 - DNA, 122 bp, Homo sapiens
gcttctccagcgctcccgcaggctcccctcgtcccgccccgcctccagccccagcatccccgaggccctacctgcttcatcaccctcccaggagcccacctggcgcccaggcccggggctcc

SEQ ID NO: 388025 - DNA, 122 bp, Homo sapiens
ctgtgtgtttcataggtgatacctgcacggggttctcaattctctctatttcataggtgacgcctgtacggggttctcaatattctctgcgtgtttcataggtgatgcctgcacggggttct

SEQ ID NO: 388026 - DNA, 122 bp, Homo sapiens
gggagatagcacagccctgccacttctcgggtcaaacctggggccccaggaaccagcacacggccaaccgcgcacaaagactaaactatttaaaacgttgacggttcctccatagacggacg

SEQ ID NO: 388027 - DNA, 122 bp, Homo sapiens
ggccctggtgacgcacacgacacccaacttctggccgggtgtgggttgcctccctgtgctcgagggcttccacttgaccacctatggcaaccggaagcagatgcagagacatgtgcgcgagg

SEQ ID NO: 388028 - DNA, 122 bp, Homo sapiens
acccatttttcaaggtccagcacaatcattgcttattcttcaaaactcttcttggcctggcgtggtggctcacacctgtaatcctagcactttgggaggctgaggtgggcggatcaccagag

SEQ ID NO: 388029 - DNA, 122 bp, Homo sapiens
caaagagggatggctcatggaatcctctctggaatgaaggtgtgtggccagcaagggcctcggaggtgagtcatggttttacaaagggaacaggccccagggaggggtatgggctgcctggt

SEQ ID NO: 388030 - DNA, 122 bp, Homo sapiens
tcccccagcggcccgggcggccgggggtggctgagtcagaaggttcaaccccggcccgggcggcggctcatctgcatttccaaaggcccgccccgcccgcaccctccccgggaagggccgga

SEQ ID NO: 388031 - DNA, 122 bp, Homo sapiens
gagtgaagctacagacttccgcggtatcacagctcataaaagaaccgtggacccaaacagcgaaagaacaaagcttgcacagcacagaaagcaactcgcaaccggttgcaactgctagctcg

SEQ ID NO: 388032 - DNA, 122 bp, Homo sapiens
aaaaaccagggcgatgtcttagccagaaatagttaagaagggaggagaaagggctacccccgcagccatgtgaaataggattagtggaaaccctgaagactcaggcccacaggagccatact

SEQ ID NO: 388033 - DNA, 122 bp, Homo sapiens
aaggcctcgagtcactgggtccaacctgagccaacactttccttttctatagaaaaaacccgtcgtgctgcctccccggctccagccaggtttacagcaccaggatctgggccggcagcgtc

SEQ ID NO: 388034 - DNA, 122 bp, Homo sapiens
gcgtttgccggccagtgcgagttccgggtaggcgtgggctcggcaggccccgctggcggccggccagcccacaagcccagggcagtgaggagcttagcacctgggccagcagctgctgtgct

SEQ ID NO: 388035 - DNA, 122 bp, Homo sapiens
tgtttataccctagttgggacactgagcaacaaggaaaacaacggtattaatcctactaccgtgaaacctacttaggtaaaattattccagccaggcttgaagggcaaaggttcagaggaca

SEQ ID NO: 388036 - DNA, 122 bp, Homo sapiens
actcctcaccagccaagcacacgcaaccacagggagaaccagttggcacccagaagatcccggcccaaagcttacctggctctatggacgggccaagtggaggcaacgacggggtgagaggt

SEQ ID NO: 388037 - DNA, 122 bp, Homo sapiens
gaatgacctgtcactgctggagctggagtggcccatccagtgcccaggtgcggggctccccgtgtgcacccctgagaaagacttcgctgagcacctcctcatcccacgcaccaggggcctcc

SEQ ID NO: 388038 - DNA, 122 bp, Homo sapiens
gtatgacaggatgtcgccattggccgagaccaactacctatcgtgtctgggagggcggagcgctgagaaaatgcgaggttggggtggctaagacagactgtctgtcagcaactccgcccgga

SEQ ID NO: 388039 - DNA, 122 bp, Homo sapiens
tctgctccacgttgcacacaggataggattgatcttttaaccctcactgttgccccaggacgtaggcactcttattcctacaggataactgcaggaatgtcacaggtaggaaactgagtctc

SEQ ID NO: 388040 - DNA, 122 bp, Homo sapiens
cagactctccggttttgttccttgatttttcctctcactgattctcagcccctgcttgctcgctctctgttcacccgtttcactgctcaggaatattgtcgcgagtagcttgactgttttct

SEQ ID NO: 388041 - DNA, 122 bp, Homo sapiens
gcgtaggaccctccgagccaggtgcgcgatataatctcgtggtgtgctgttttttaagcccgtcggaaaagcacagtattcgggtggcagtgacccgattttccaggtgccgtctgtcaccc

SEQ ID NO: 388042 - DNA, 122 bp, Homo sapiens
aacggggtacggctccgtgtcctgtgggcattgtcatgcggccccagacccgggtgggggcgtgaagaaggacagaggagcgcattgcacttggggccccggacgggtctgaaagtcaagtt

SEQ ID NO: 388043 - DNA, 122 bp, Homo sapiens
ggtcagaacaccccctctcagacaaagttttcaagagcctctttcttgtgtatttgtggacgtgtgagcacgcgtgtgtccctgtctgctttggaacattgtgcgaataagttcagctgtgt

SEQ ID NO: 388044 - DNA, 122 bp, Homo sapiens
tctggaatgaattgagaaggtggcgtgctggcctgagctgatggaccacttggtgttttgcgttttggcccatgtttgctgcctctatctggtctgccttgcccgtttgcctgttcctattc

SEQ ID NO: 388045 - DNA, 122 bp, Homo sapiens
ctggctgcgaaacgtggactgggtgatgcctcaggagaaaccaccctagtagttccgctccgagggcggaagtgcgcgtctcttgtttgtgcggctgaccagttggcgacatggtggcaccc

SEQ ID NO: 388046 - DNA, 122 bp, Homo sapiens
ccggatttgcagtttccagaaatgttcctcagcgtcgcctgtgacgggaacaaaatgaaccgcacatctcggttcatctcggtccaagtgactcagtgcttttcccgccctccctcatcttc

SEQ ID NO: 388047 - DNA, 122 bp, Homo sapiens
tttggggtttctatacaggctaaatgcaggaatgcatatgggaagcacctggcaaagtgccggtacctgctaaactctcacaaaaatggttccttggcatttgctctgcttccttgctgtgt

SEQ ID NO: 388048 - DNA, 122 bp, Homo sapiens
tgaacgctcctcacctttgacctgaaccgccaacttcccatcctccacttttggagagcgcgcctgatagctgctgcccacctgggcactgacatcctccttccgaccgggtgcggagaaag

SEQ ID NO: 388049 - DNA, 122 bp, Homo sapiens
tcttgtgaggggccgagggccggggctgggagcggccctgtgcccgggagtccgcagaggcggggatttgtcagatgcagacattttgcaaggctgccgggtagttcaagaccaaagttttc

SEQ ID NO: 388050 - DNA, 122 bp, Homo sapiens
aaatccggccggtgttaaatttcaccgctcactgacttgcaatgacatcaccaaacactgcgcacacctccccctctgcccccgcaaccttccccgacccagcgtccggcccaggcgccccc

SEQ ID NO: 388051 - DNA, 122 bp, Homo sapiens
tgtggctcacgatcctgtgtgcagaatgctattgtggaaagcagggagaaaatcaagctgcggtatactgggagagaaagaacaaaggaaagctcttaaggcgacaacaaggacaatgtctc

SEQ ID NO: 388052 - DNA, 122 bp, Homo sapiens
cgtcctgagcctgggctcatggcctcagtttccctggctgtgaaaggagccgggaaagcgcgggcatcaggagcacgaggggcctcaggacagcgcgggtgaccctgggccaaccgagcctc

SEQ ID NO: 388053 - DNA, 122 bp, Homo sapiens
agctcatgcaatgatttctggtccggtgctgatcagccttcaaaggatgttatttggttacgctccataaaacttgagccagcccactgttccttgtcacaacctgaaatatgttgggaaaa

SEQ ID NO: 388054 - DNA, 122 bp, Homo sapiens
acagaccataggagtatattaactgcaggatgccttgaaaaagaaagaaaaaagactgagcgactgatcttgtggaaatgatttaaggtgacacttgcagtacttttttttaagggatcaag

SEQ ID NO: 388055 - DNA, 122 bp, Homo sapiens
gagcttgcaggatggagagaaaagggacttgttcttcttggtctggcttgctattactgtcgggatctctctagcatcaggggtttaaagctggcaagtccttggttccaggagtagtagct

SEQ ID NO: 388056 - DNA, 122 bp, Homo sapiens
atggacctatcagaaatgcagacacatatgtaccaaagccagacactagagtggtcacagcggcactttctgtaacagacaaatgctgcaaactgcccaaatgtccactaacaatgcgtgac

SEQ ID NO: 388057 - DNA, 122 bp, Homo sapiens
gcgtgctagggtctggatttcttcctccaccttctctctgagcaacggctgctgccctggcgtggggagggagtagggctgggctgggctgggctggcggggccgggctcgctcccctgcgc

SEQ ID NO: 388058 - DNA, 122 bp, Homo sapiens
cacaggtgaggcagcagaccgggtggggtcggtgtcgcgcctgcgcccgcccggacgcctcgggcccgcccgctccgcaccctggaaacccctgcactcagccccccggcgtccccacgctc

SEQ ID NO: 388059 - DNA, 122 bp, Homo sapiens
tgaagacgtcgccatgctgctggaaggccaggggacattgccagaaggcgttgagggcggcggcaggtgggcatgtgcgggaacctcatgcactttcttaagggaccgtgtacttcagtggc

SEQ ID NO: 388060 - DNA, 122 bp, Homo sapiens
agtgaccccacccccgtgactccgcgcccgcccccgccccccaccccccgcggggctccccgcacccacccccacccccggcagggccctccagcccggccgcccgccgccggccccgcccc

SEQ ID NO: 388061 - DNA, 122 bp, Homo sapiens
aaggtcctttcttttttctctctttcggatatacctggatttggtccagaccaggttgcccgcgggagggccccgcgagcggcagcgcgcgagggagggagagagagggagggcgagaagga

SEQ ID NO: 388062 - DNA, 122 bp, Homo sapiens
agttctgaaggctagaagttcgagatgaaggtgttggcagcgccggttccttctgagagccgtgaggttgaatctgttcctccctgtctcacttctggtggtgtgctggcaatctttgacac

SEQ ID NO: 388063 - DNA, 122 bp, Homo sapiens
cacttggctccggggctggtcggtgttgggcgtcccagcactgcgggcggcacggacgcccggggctgctccctactgggtgtagcgcaccccgccccccaccccgcccggcctcctctggg

SEQ ID NO: 388064 - DNA, 122 bp, Homo sapiens
tttgcaggtattgctggagccagagcgaagcccggccactgtcaccatgggctccagcctcgcctctctgggcctggtggtgagcggcttcagcaacaggtttccggtccccgcagagggtc

SEQ ID NO: 388065 - DNA, 122 bp, Homo sapiens
gtgaactgagctccgagtccagaaaggaggggatggggtggggcgaactctatgacggagcgacggcgagctctctcattggctgcggtggtggactcaatcaatctcgcctgcgttgtagt

SEQ ID NO: 388066 - DNA, 122 bp, Homo sapiens
ggtgacacgcgtgagctcacggccgggtcccctccagcgtccaccccccaagaagtcccccgctgtctgggccaccagtttcattcagcaaatactattctataaacagctgacccagattc

SEQ ID NO: 388067 - DNA, 122 bp, Homo sapiens
agaaaagtataatgtagcatttagcaggtcaacaaaatgcactcccttattctttgtctccgcctcattctccaacactttagtgcactaagttgtagtgactgaaatcattcttggtgaat

SEQ ID NO: 388068 - DNA, 122 bp, Homo sapiens
accgtgcgcttcccgggatccgcggcccctcctgccccaggcgccagtcaaaagcgggtgcgcagcccaccccggcggccgcgctgctcacctcccgcagcagcaacagtgcccggggtccc

SEQ ID NO: 388069 - DNA, 122 bp, Homo sapiens
ggcggggaatctagggggcacccagctcgctctccccacccaggccgggggaatccaaagcgttttaaatcgctcccagctcgcaagtcgcctgcattcgctcagcacggccgtcttgacgc

SEQ ID NO: 388070 - DNA, 122 bp, Homo sapiens
acctcctccccccgcaagttccgcccggctgtcccccggtacttccccccgccccagccccggcccccagcgcgccgcccgccccgcaatccccgcacagcccagcaggtgtgcgcccgtgt

SEQ ID NO: 388071 - DNA, 122 bp, Homo sapiens
ataactaaaataagcttagacttccaagtcagtcaaatgcccaaactgcatgttttctgccgttccccaaatccttttacatgttttaaatagcctttagaatatgatcgatcacatggctg

SEQ ID NO: 388072 - DNA, 122 bp, Homo sapiens
gatttctggttaggaattgggcggtcggagcgttctggagttcaatggaaccaccccaagcgcagactgcgtgcaggcgccgtagtcggcccgcaccggagggattcaaaggtgaagcgggc

SEQ ID NO: 388073 - DNA, 122 bp, Homo sapiens
ccttgcctttcatgggctgtctctgaccctggcttctctgccttgtggagaccctgccagcgaggggtctggcggcttagctgccccttgcgcaccccacccggttagacccagggctcagt

SEQ ID NO: 388074 - DNA, 122 bp, Homo sapiens
cgggatctcaagcaggcaaatccgaagctaccgactaaaactgtctctgtgcccacgacacgctttctttgaaagagggtacaggtcagaaggctttatcacgacgtttgaatccttaccga

SEQ ID NO: 388075 - DNA, 122 bp, Homo sapiens
tacatttgtaggaatttagaggttaggggagatcgtcatggtctgtgttttttgatgatacggcacttgagcagattggaattgcccagattatcatacgtggaggaggaaggggagattat

SEQ ID NO: 388076 - DNA, 122 bp, Homo sapiens
caaaacggtaaacacagagttaccatagagtccagcgattcctctgcaccgtaagagacgcgaagacgcagagacatgcacatgagtgttcacagcacattcttcgtgacagctgagaacgg

SEQ ID NO: 388077 - DNA, 122 bp, Homo sapiens
ccccccacaggcatcgactgggcccccgagagtaaccgtattgtgacctgcggcacagaccgcaacgcctacgtgtggacgctgaagggccgcacatggaagcccacgctggtcatcctgcg

SEQ ID NO: 388078 - DNA, 122 bp, Homo sapiens
gacacgggcgggcttgggcacgcagccccacaggcacaccacgcattcatgctttgtccacgggaggaagggattgtaagcctcaacctgaagtggtaaataattgccatgtgagtgtgaat

SEQ ID NO: 388079 - DNA, 122 bp, Homo sapiens
ggaggttgggggacaaaaacaaagagaggcagtttctgccctttaggagtagtttcctatcgattaggggaaacagtctggtataagacatggttgggaatcaggggactaggttctaattc

SEQ ID NO: 388080 - DNA, 122 bp, Homo sapiens
tgtcactgaaaacctattaacctgtcacagtttgggaaatggtacattacttaccttcctcgagatcaaactttttatacccattgttcctgcttattggaatgtccttctcctattttatc

SEQ ID NO: 388081 - DNA, 122 bp, Homo sapiens
tgtggattttgatgtatgggaggatcctgcaagcaatcccctgcggataccaaggaacaacgatatatttcttaatttaaagaaatggaaacgctgacattcgattctattttaaaaatttc

SEQ ID NO: 388082 - DNA, 122 bp, Homo sapiens
caggtgcctcgacctcccctttcaagccttccagccgcatagggatggcctccgtgggaccgaggcactccgtagccatgaaacagggatgcccagggtccactgggtcccacgcatgcaca

SEQ ID NO: 388083 - DNA, 122 bp, Homo sapiens
gtggaacgtgcagtaggagttacacgaagtgcgggtctgcacttggggtggtcagcacggcggatgcccagcaaaggcactgcctggtccacatcccggagtggtctctacgccccagtcgg

SEQ ID NO: 388084 - DNA, 122 bp, Homo sapiens
agtcctgaggttaaagagattcacgctaatcacactatagcacggagtgttaaagagaggcggataccgggccgtgaggacctcaggaagccctcagccctccccggattatccacgtgctt

SEQ ID NO: 388085 - DNA, 122 bp, Homo sapiens
cggtgagctgtgcggtgcctgtgacggtgagctgtgcggtgtctgtgacggtgagctgtgcggtgtctgtgactgagctgtgcactgtctgtgacggtgagctgtgcggtgtctgtgacggt

SEQ ID NO: 388086 - DNA, 122 bp, Homo sapiens
ataccttaaaagttttacatttacaaatgtctatttcacactctcattctaaagtagaatcgatgatgaccttttctccccgttcagccccataaaaactcattttcccctcttttcttttc

SEQ ID NO: 388087 - DNA, 122 bp, Homo sapiens
tttaattttgatggaaaaacatctgctttgaaggattggagactgcttgattgaataaatcgcaaatcaagtctgcaagtgtagatgttaccatgtaatgaattaagagaccattggccatc

SEQ ID NO: 388088 - DNA, 122 bp, Homo sapiens
taagaaggcatccttgacagccaccacctaggaaatatgtcggaggctcctctttgttcccgcagacccccggcattgcctggtttgttcttgccgatttccatgcctgatcccccaactac

SEQ ID NO: 388089 - DNA, 122 bp, Homo sapiens
ggagtatgatccactcaaagcgggcagcattgatggcaccgatgaagacccacacgaccgcgcggtctggagggcaatgctggcacgatatgtccccaacaaaggtgtcataggagatcccc

SEQ ID NO: 388090 - DNA, 122 bp, Homo sapiens
aaaaagaatcctcgaagactctcaagtgaccatatagtgtcttttcttataatgtcacttcgacaggcacaaaatgtaaaaccaggcataaactactagtgcttgcagttcttacgcaggca

SEQ ID NO: 388091 - DNA, 122 bp, Homo sapiens
ccgtggctgagaggcggctgctgaggggccgggcgggctaggggccggctagccgccgttcgcccctgctttgcatattcatgaagtctagcgaggccggtcgcccaggctagccgtggacg

SEQ ID NO: 388092 - DNA, 122 bp, Homo sapiens
tccctcagcgatatcgtcagtgagagagaggattacagctctccatagagtcgcagaatacgtacctgggagttaagtgcgctccgaagggtggcttctgaaaggtccaagaaaatggaaaa

SEQ ID NO: 388093 - DNA, 122 bp, Homo sapiens
aattgcgagttcagaggccctcgagaccacccttaggttcgacgatttgctggaaagactcggaactcgctggaagctgtgatagtcccagctatggtttatcacagggaaaagacaccgat

SEQ ID NO: 388094 - DNA, 122 bp, Homo sapiens
cgaactcctgacctcagatgatccacccacctcggtctcccaaagtgctgggattacaggcgtgaaccaccgcgcctggccatataatgttattattgaaggcacaaatgatcagggaagac

SEQ ID NO: 388095 - DNA, 122 bp, Homo sapiens
caccgacagctgatgggaggaccacagttgctcagcatccagcttcctttctggagagcacgggggtgggaggctcccaacacctctgggcccctcctcccagccttcagaacccaggccca

SEQ ID NO: 388096 - DNA, 122 bp, Homo sapiens
ggcctccaggcccaagtcatgccagcggctgcatccaactctatagagattttgcagcagcggctctggaattgacatgggttcactgcccagtggtcaggtcagttacacaaagagcctgg

SEQ ID NO: 388097 - DNA, 122 bp, Homo sapiens
tctgcacaaagggaaaggcgctcagtgcagagctactcctctccacaccacaccccctgccgggtaggtgctcagtgaacatttccacaagcttgtgcctccctctggccaggcttcctgtt

SEQ ID NO: 388098 - DNA, 122 bp, Homo sapiens
agacggcgaggagaagaatgtatttgatggaaactccatccaatgcaaagatgataaggccgagggtgccacagcctactaaaattgtgactcccaaaggcttcctcccagctagaatgggg

SEQ ID NO: 388099 - DNA, 122 bp, Homo sapiens
gcgcaaatgcctgaccacaggatcttggccaaggcctggggaccgtgtctgaactgtgagcgcctactgtgtgtggatgcccgggccgtgaccagggttgggggagtccacgtcgccctcgt

SEQ ID NO: 388100 - DNA, 122 bp, Homo sapiens
gagagaaacctcccgggcaggggtctccctcaatgaggaagccctccacttccccccactcgtcccactgttcgtgattttaatctgcttttgtggcgcaggaagaaagaaaattaattttc

SEQ ID NO: 388101 - DNA, 122 bp, Homo sapiens
cagaaaggggacggttttcccctggagtcgggctgctctccaaccaccccagtcaaactccgtgttgttctgccagttggtggcctgcctgcatgctcccctggacatcctcttgacgtcca

SEQ ID NO: 388102 - DNA, 122 bp, Homo sapiens
taagccatttccctcctaagagggctctggttctgtcttgggacaagaggggcccatgtccgtttgtggggccagtgggactcctggcaggaggggcctctgctgtgggttgaatgtttata

SEQ ID NO: 388103 - DNA, 122 bp, Homo sapiens
cctggctcgtgggtgggtaatccagcacattctccccaccccggcaaccaactttgtggccgaacaagccctccccggcttgttccgctggtcccaggcgcctgcgcatccggacacgatga

SEQ ID NO: 388104 - DNA, 122 bp, Homo sapiens
ctacatgacctcttcactacagctacaatgatttacttacagcttcccaaatgtaacatgcggcttcacagtctctatgctttatacctcttgtcctctttgcttgcaatactttttctccc

SEQ ID NO: 388105 - DNA, 122 bp, Homo sapiens
ctgggctttaacgcaggactactagatgggtggtgctctggtctttaaggtgtactgcatcgaagtgcaaatggctgcaacacggaggcgaggagtgtacccatgaggaaactgaggtgcag

SEQ ID NO: 388106 - DNA, 122 bp, Homo sapiens
ggcgccgggcgtgtgtcactcgctctctccctctgtgtatagaggatgtgctgaatggtgcgctttgaggcggcggcggcggaggagcagaatccgccgcgactggcagcctcggctgaccg

SEQ ID NO: 388107 - DNA, 122 bp, Homo sapiens
gagtgggttggaatattacataaccaatacagggtttcagaaggagagagattttgtgtgcgtgcatcctgaaatagttggggaggactcatgcaggagctggaacttggagataggaagaa

SEQ ID NO: 388108 - DNA, 122 bp, Homo sapiens
gccaagagaatggcttttgagtcaggggtggtgaaagtgtggtattgagagaattcttcgcgcttagtgttctctagtttgatggtgcccttgaaatgcatgcctgccttataccttcatgc

SEQ ID NO: 388109 - DNA, 122 bp, Homo sapiens
gccataatgatatcataatccccagcagctcaaggttgttggataaaacaggaatcagatcgatccagtgtgaaacaatgccaaggataaggcattcaaatccaaacatacgaaataaatct

SEQ ID NO: 388110 - DNA, 122 bp, Homo sapiens
gggactttagtgtctcacagctgtttctgacccggcagctctaatcagcaacgtttttttcgggagctcctgggcgtctctctgggtctctgtgcttgaaagaaaggggggcggcttcctac

SEQ ID NO: 388111 - DNA, 122 bp, Homo sapiens
gtcaaagaaaggggtgacagagggcacctggaaaatcgggtcactcccacccgaatactgcgcttttccgacgggcttaaaaaacagcgcaccacgagagtatatcccgcacctggctcgga

SEQ ID NO: 388112 - DNA, 122 bp, Homo sapiens
taacatcatctaaacatactttggaagaaaactgtgcagaaatgtcatggagaattgtttcgtcagaacatgtcatattgcaactttcctgacagttccaaatatggggggtgataggaggg

SEQ ID NO: 388113 - DNA, 122 bp, Homo sapiens
cgctgcgttccggagaagcagggcgggctgcttctcccggatctggcgggcctctggccacggctggttggaggtgggggtgggcgaggaggggcgctcaagtcacgtgcccgcgctggggc

SEQ ID NO: 388114 - DNA, 122 bp, Homo sapiens
gtaatcccccacgggcgggaggaagccggttggggcagtggccgtccagcagagaagcagcgggcccccaggtgaacccagtttacctgaggacaaagctggcggccgctcgcagcacgtcc

SEQ ID NO: 388115 - DNA, 122 bp, Homo sapiens
tgaccccagcagagaggggcctggtgtatcactggaggaaatagcctgccaaggaatacacgtcttcagaagaaattctgtgtggcttcaagagactgatcaaattgtgagaggaaaacagc

SEQ ID NO: 388116 - DNA, 122 bp, Homo sapiens
ctagtgcgttgtgattgctcatattttaaaccaggggaatgttaaacaactccttgaaagcgagctctcgacacctagaagccaggggcattcatattcccgtggccgagctcagcgcccag

SEQ ID NO: 388117 - DNA, 122 bp, Homo sapiens
ttccaggactctttccaggagggccagggaggctctgtatatacgtagaggtcacccaggcgtgtgtgtgtgcgcgcccccacgcccctgcccacaggcctgcattgaaggcgcttccgctc

SEQ ID NO: 388118 - DNA, 122 bp, Homo sapiens
cacaccaggactcacattcttccctcatgtgatcctaaaatggtttgtggactgaaacgtcgaggggttgctgttgtctggtcagaacaccagaaaaaatgactaagttcatacctgcacag

SEQ ID NO: 388119 - DNA, 122 bp, Homo sapiens
cacaggcccactctgaatatggcagggagacagtgtggtccagcagaaaccccccaggagcgagctctctgctcagctaggctgctgccaagccctgggcaagtttctcaactgctatgact

SEQ ID NO: 388120 - DNA, 122 bp, Homo sapiens
atgccggggcgggaagccgagtggctttgtccggagatgccaggggatgtgggcaggggacgaagaggtttcccaactggccaaaccctggcttgaggaaagactgaggtggtcattgaccc

SEQ ID NO: 388121 - DNA, 122 bp, Homo sapiens
aaattctcatagtcctctcagcaaagccctactgattgatacaatagaccactgctaaagcggctttaacaatagtggaccattttggatattatctgtgtatagaaagacacagagtttga

SEQ ID NO: 388122 - DNA, 122 bp, Homo sapiens
cccagttctatcacttcctaacggagggaccttaagcaaataaaatgtaacccttcaagccgagtttcttcatctgtaaaatgaagatgataacactatgtatctcataagtttgtcctgaa

SEQ ID NO: 388123 - DNA, 122 bp, Homo sapiens
agatctagagttgggtggagagggggctaaacaaatggaggaagggaaaggggtaaacagcgttgcccaaggggagacctcagaggctctgacttgctgaagaacctacccagtagtggaga

SEQ ID NO: 388124 - DNA, 122 bp, Homo sapiens
caagctggtagaagctccaccccactgggtgtaagggaagtgagccgtgtggaggcggcgcgaacaagggagcattcaaagtcccttaacactggcgttcaaaagcctttgggtgcttatat

SEQ ID NO: 388125 - DNA, 122 bp, Homo sapiens
ttaaaggtagaaagtctgtaggtccaaatgttaatggaatgcatgcagaattttttttaacgacttcattttaagtgttgtaaaacagtcttgagctatggaaggtaaacttacattagaga

SEQ ID NO: 388126 - DNA, 122 bp, Homo sapiens
cccggctcgcagcacatcgtggcggccctgccgggaggagcgaggaaacgagtggaaacccgaaagtgtgctcatggaatgcaggaggtaatgaatcctggtcaggtgagactacttagtca

SEQ ID NO: 388127 - DNA, 122 bp, Homo sapiens
ctcccgcccgctttgttcctctccctcttgcagcagatgggatcagagcggatggagatgcggaagcggcagatgcccgccgcccaggacacaccaggcgccgccccaggccagcccggagc

SEQ ID NO: 388128 - DNA, 122 bp, Homo sapiens
tggcggccctactgggccctgtctcctccccgggcacggcctgatcactgagatgagacccgggagcagccgggccccagcccatccgtgtgcctacgcccagtctccccaggccctgcact

SEQ ID NO: 388129 - DNA, 122 bp, Homo sapiens
ggttgagtaccgggagggctgcaagaccgtgattgatggggaggactgcgcagaccctggcgagggtgagcccctccccggaggcgcctgtggaatgtccagggctctggtccgctcctcgg

SEQ ID NO: 388130 - DNA, 122 bp, Homo sapiens
ggcgcagagtgtgagggcatcggcgcggctcggctctaaagcaaacaggggtccgggaaccgccccttcatttgggaccggggaagccgcagccctcttcacacggatgattcaaagttgcg

SEQ ID NO: 388131 - DNA, 122 bp, Homo sapiens
cgcccacggccaggcggggcgactgcgagctttgccgttgaaaggcggagcgtgtcttgtcgccttctagctgcaccttttgtggactgcagcatggaaccgtccaaggtgtttgtccaccc

SEQ ID NO: 388132 - DNA, 122 bp, Homo sapiens
caagttcagacaactgattgtatgattctgggaattctttgctttcctttccttctccctcggcaccacctcctctccccaggcctccctgtcgggcatggggaggaggttggagctcagca

SEQ ID NO: 388133 - DNA, 122 bp, Homo sapiens
gcccgcccctccgggattggcgccctgctagtggccattgcctgtgacgtcacaggatcgcgcccgcttttctctcgggtgatccggccgagtggccctgggttagcagctgctgcatttcc

SEQ ID NO: 388134 - DNA, 122 bp, Homo sapiens
gtggagggacagtggcagccgtggaggggccgtgcacagtgagtggtgagcgagttgggacgcgaaggctgctctgtgctgctgggattgctggtgtcagcgcccactgcagagtcctgtgc

SEQ ID NO: 388135 - DNA, 122 bp, Homo sapiens
gccgcagcgctgggagctttggaagccgtgaggctccggagctgctctgagtccgggctgcgcgtcatttgcagtctggggaatgttgatcacctcactaattacacctctctctcccccct

SEQ ID NO: 388136 - DNA, 122 bp, Homo sapiens
tgtcggggttgaggtcggtcttgtgctcatcgctgggcttgtagccgccgtgccggtcctcgatgatggggtcgaagagatccttgaacacttcgtaggactcctcgtcgcccgccacgcag

SEQ ID NO: 388137 - DNA, 122 bp, Homo sapiens
gaggttcacagcagcccgaaactcccactccatcttccagactcaggctgggcccatacacgtgagcagaccagcagagaaagggcccaggtaggcaaatgtgtaggagctgcccccgcctg

SEQ ID NO: 388138 - DNA, 122 bp, Homo sapiens
gattaccacagattaccttgtactgtgagaggattttaccttggcatgtgtaatggcagacgagttacaaagtagggggtggctgagtacagtttactggaagtagtattgactgttgctat

SEQ ID NO: 388139 - DNA, 122 bp, Homo sapiens
ggacgcggtgcagagaaagaccgcagcacccgccagccagccagcagcgtcctccagccgcgaatccccgcaccccagccttccaacggggatggatggcactcactcccacaccccaaccc

SEQ ID NO: 388140 - DNA, 122 bp, Homo sapiens
cacacctacacacacacacacacacacacacacgccccaccctcccctccacagggacctcgcaggaaatcacgtggggctcccttacaccagggattgcagtcctggggagggtggtgtgc

SEQ ID NO: 388141 - DNA, 122 bp, Homo sapiens
caaacccggtctagggagcccaggagccgttgcagcctcagctcttctccctccctctctcgatgacccgggcaatgccaacctcctttcgggattgaaagctctaaatccaaggtgctaag

SEQ ID NO: 388142 - DNA, 122 bp, Homo sapiens
tgagaagcaaggagagttggccctgcagttgccagtgctggtttgagttccagccctggccgcataccagactagctgggtgactgagggaggtcactcaggtacccagtgcctaattttct

SEQ ID NO: 388143 - DNA, 122 bp, Homo sapiens
aggatccatacaaagtgtgttcctgctgctggcttctcatctgctctgcttcctaagggacgtatctgttgctgcgtctgaacccacggtgagtgtttctataggaatccagagggggacgc

SEQ ID NO: 388144 - DNA, 122 bp, Homo sapiens
gcacgtcaccgcctatagctagcctcctagctctcctcactcaatctctcatcgcccactcgtggcatgggtccttcctagcctggctctgggcctgccccactgtagccccatgaccctct

SEQ ID NO: 388145 - DNA, 122 bp, Homo sapiens
ttatcgccgcggtgcacagccgctgataaagcaccataaataaacgagcgggcgggagtgcgcggctgtctggaggctgccggagcgcacgccctgcctcggccctgcagctcccgggggaa

SEQ ID NO: 388146 - DNA, 122 bp, Homo sapiens
cgcgaaaaagctgccagggcccttaacccacccggacaaagaggccccgttttgcaaccccgttcccacgcccgcgacttgaagcaagtgcgcctcccgcgtcctgaagcccttctcggccc

SEQ ID NO: 388147 - DNA, 122 bp, Homo sapiens
tgtggttcaaccaggcaagatcatccggtgaaagaaccagtccctgggccccaaggatgccggggaaacaggaccttctcctttcctggagctggtttagctggatatgggagggggtttgg

SEQ ID NO: 388148 - DNA, 122 bp, Homo sapiens
ccatggcagggcttctagctcagtgcctggcaagctgggctctggtctccctgaagtctccgctctgatgcctgaggaagggagggagaggcagagacagggaaggagggcactggagaaga

SEQ ID NO: 388149 - DNA, 122 bp, Homo sapiens
tggaacacaaaactcaacaatgctatctgctcttcgtagatgttgacgaatgcctgaggccggacgtctgtggggaggggcactgtgtcaatactgtgggggccttccggtgtgaatactgt

SEQ ID NO: 388150 - DNA, 122 bp, Homo sapiens
acccctctaagtcctcagagccgagcacccatgtgtctcctctggctgcagtcatccgatcgcaggggtgtcttcatctaaggtttgggaagtgctttatcttatagagcttcataaaatca

SEQ ID NO: 388151 - DNA, 122 bp, Homo sapiens
caggccccttcagggattcccatgaggacagaagggactaggcattcaggcctttaataccgtataggtttttaaagggtagtgggtccactatatcatctcaaaatgattctccaactatg

SEQ ID NO: 388152 - DNA, 122 bp, Homo sapiens
gttcacaccgatttaaaaagtcctgcagtaaacacggcaaaattctcaaatataattcctcgcaacactgggaagagtctgcctaaagcattaaataactcaaatgcaattgctacttacat

SEQ ID NO: 388153 - DNA, 122 bp, Homo sapiens
ccttgtcaccaggggcaccagcagggccaggaggaccaatggggccagtcagaccacggacgccatctttgccaggagagccatcagcacctttgggaccagcatcaccctaaagacatgga

SEQ ID NO: 388154 - DNA, 122 bp, Homo sapiens
gagaccagtgcctctgggtccagggactaaagaagataaggttgcagatgatggtatcctcgacaattcaaagggatataggaatttctgaactggggggaagaatagagttcgctttccca

SEQ ID NO: 388155 - DNA, 122 bp, Homo sapiens
caatgcaaggggtcacaggaatcatcagcttctgagaagtacctctctgtacacagccaccgtgggttctctaaaaagagaacttcgtggctcctctgtcatgtggaaacctgcagacagat

SEQ ID NO: 388156 - DNA, 122 bp, Homo sapiens
tcaagaagctggaagaaaggaaaacagaccccctaagcctggagggatacgtcagctcagcgccactgacaaagccccccgaaaagggcaaaggtgggtatgtgcagggaccgggcctcaca

SEQ ID NO: 388157 - DNA, 122 bp, Homo sapiens
gcatcttgacctacccgctgctcttcctcctccttatggcttcttggttcctctatttctcgcgtcccggctccactagttggctcctgaaatactgccagggcgcacgacttctctccatc

SEQ ID NO: 388158 - DNA, 122 bp, Homo sapiens
taaacaatgttagcagtcttcagttcaaatacttttgtgtccttctggcagtatgtgcaccgcccttgaagaaggactgcaataaggcacagtgaccttaagctaaagacacctgtgcctta

SEQ ID NO: 388159 - DNA, 122 bp, Homo sapiens
catcttctctcatcccaacatttgttcactcttttatgctgtctccagtgcgaaagacctcggggaaataaaaagatccttcaaataatatacccttctcagtcttccaggttatgtaatac

SEQ ID NO: 388160 - DNA, 122 bp, Homo sapiens
ttttccaccccgacagctccagggagcacgctggagagacagacttcaccagcgggaaggcgcggcaccctacgcgcaaggaacctcaagtcccagaatcctatgaggactccaaatcccag

SEQ ID NO: 388161 - DNA, 122 bp, Homo sapiens
caggcagtacctcggcgtgacgcggtgacgcagccgcaggcaggcagtacctcggcgtgacgccatgacgcagccggagagagcttcacgcacaccatctcttcgttcttcctgaactctgt

SEQ ID NO: 388162 - DNA, 122 bp, Homo sapiens
acattttgctgcggtctagcgcgggaggcggggttttgggttcgctggtccaggtgcgcgcggtgtcccaggtcttcgcgccaggttggcgcgggagaaggccgaggtgccccagagttcga

SEQ ID NO: 388163 - DNA, 122 bp, Homo sapiens
aagactgttccttgaatttcccaattcaaaagcctcggtagagctgagggatgcttgatacgtcaacacagaccacaaaaggcagggcttttctaaagagattataattatatctacctttt

SEQ ID NO: 388164 - DNA, 122 bp, Homo sapiens
gggcatctgcggagcccgtcgggaacgccctcttggcttccggtgccgggcagcggcgggcgcggcgcccacagcgcccctagccccgggacatggctccagcccgcccccaggcgagcggc

SEQ ID NO: 388165 - DNA, 122 bp, Homo sapiens
cgccaccacgcccagctaattttttgtacttttagtagagacgtggtttcaccgtggtctcgatctcctgaccttgtgatccacccgcctcggcctcccaaaatgctgggattacaggcgtg

SEQ ID NO: 388166 - DNA, 122 bp, Homo sapiens
cccctgatccagatctggcctgatgcctgctccaaagcccctgagggctctgggctggggcgggaacaggaagggcagccacctggtagtgtggtcaggaggaaggggttccttgtgcaaag

SEQ ID NO: 388167 - DNA, 122 bp, Homo sapiens
ccttgacctggtaatttacaaacccaaaagtgcccgacaaggagccacagcctcttgaagcgctcagaggttaacacggtgacacccaccctatctggggcactttctggacaagcccccgg

SEQ ID NO: 388168 - DNA, 122 bp, Homo sapiens
ggaaacacgcatctctgcaccccgggctgtgccacagacggaggcgtcagggttatggggcgctgcggccgggactctgccacagacggagggtcgaggttacagggcgccacggggcccct

SEQ ID NO: 388169 - DNA, 122 bp, Homo sapiens
aatgaggcacagcgccatgaccgcggccctcggctgcgccgccggcagcagcgcgggcgccgcattagcatctccgaagccttcctgtgtgttcttttgtgctcattttccagcccgaatgc

SEQ ID NO: 388170 - DNA, 122 bp, Homo sapiens
tgaaagtaaaggggctctattaataattactctgagataacagcaataaaccgggactgtcgaagcaagttgagcatagggtcacccttgttactgtgccaagagtcaccatctagctgtca

SEQ ID NO: 388171 - DNA, 122 bp, Homo sapiens
gggagtgggtcctgcctgcctgtgtgagcgtgggtgtgacacaattatctgcctcagggacgcggggcacaagggttccagcgccgccactgctgcttccgctcctgctaccaccgcctgca

SEQ ID NO: 388172 - DNA, 122 bp, Homo sapiens
ccaaatacgaagcacctcgcatttgggtcagcagctgtttcccctgcctggtgacaaggccggtgtgcagagggcagaggagggagcttcttccgccacacggtggcgcgcgcgagcctccc

SEQ ID NO: 388173 - DNA, 122 bp, Homo sapiens
cagcaacattgccttttataacaaaaccaacaatgcacagaatggccatttgctggaggacgattattacagcccccatgggatgctggctaacgggtctcgtggagacctcttggagcgag

SEQ ID NO: 388174 - DNA, 122 bp, Homo sapiens
aacggcattcagtacccatctacagccggtggaccttcagaatgagtctctggagaaaaccgggctccatgactcggttgcaaatcccaactttgcggtagaatcggtcatccttgcttggc

SEQ ID NO: 388175 - DNA, 122 bp, Homo sapiens
ggagtcttccagttcatctaactcttatttctccgttggcccaaccagtcccagcgctgtcgtgctcctctactcggtaggcgcccagggaaaagaggcccagagcggagccgcgcgaaata

SEQ ID NO: 388176 - DNA, 122 bp, Homo sapiens
cactgggttgggggatccgcctcagagtttctgggcagcgtacagtgacgcggtggaggtcggtaacggctggaaaattgagccttgagcagcgcgtgcttgttgtcatagttacaccacta

SEQ ID NO: 388177 - DNA, 122 bp, Homo sapiens
cgtcgttccatttgcttttcatggactcaccgctgcggggcagccacctggaggaggccgcgggggagacggctggagtccctcttgcttctcgggacataaagagaggagcaggctgtgtt

SEQ ID NO: 388178 - DNA, 122 bp, Homo sapiens
actcagtatgtacattttatagcaattataataatgttatcatgaccataatttaccacacgtatcaccagtcttgttttctctttctcgaaaacacatgcttttctgacttcacacataat

SEQ ID NO: 388179 - DNA, 122 bp, Homo sapiens
taaaatggatgctcccgtgcgggtggtgcatgtctattacaacccggtgggggatgctctcgtgcgggtggtgcatgcctattacaacctggtgggggatgctctcgtgcgggcggtgcatg

SEQ ID NO: 388180 - DNA, 122 bp, Homo sapiens
ggctgctggggtttgtgggcccctcccccggacttcgtcttcctttccttccccagcccccgacccgttttgctctcgtccaaaacagagcgactcccccgctgccgaggaaaagccagttc

SEQ ID NO: 388181 - DNA, 122 bp, Homo sapiens
gaagtggagctgtggtttccagaagctgacgtgggaggttgcagcctctgtgctgcagtgcgtaagagccatgtgcctgatagatgggtcttgctaaggagctgatcttcagctcacaacag

SEQ ID NO: 388182 - DNA, 122 bp, Homo sapiens
catcaccagcatgatcggaaaggtatctcccctcagcttcatttgcagagaggcctgagtcgctctcagcctcccccatttctgcgctgcagcttctggggagcccctgacaccacagaccc

SEQ ID NO: 388183 - DNA, 122 bp, Homo sapiens
gtgctcaggccagcggaagcctgactccaggattcggtggtgccacagacagttactgaacgccaattttgtgcctgctttaagcgaacaggacagttcctgaccctcagttctttccaggc

SEQ ID NO: 388184 - DNA, 122 bp, Homo sapiens
ctattcgttgatccaaccaaaattcggcggggctggggggtatcgttattgaggatgactcgctctaggggagaacgcggacgcattttcccatcagagttccctccataaatcaaaacctc

SEQ ID NO: 388185 - DNA, 122 bp, Homo sapiens
cgccctcccggagttgctaaaatagataatcctccccggagccagcggtggcattggtggcggcaaggcccttcctccaaagcagccgggcctggggagtgcagtgccggatgttctagcct

SEQ ID NO: 388186 - DNA, 122 bp, Homo sapiens
ctaacgaaggaattcagattcatttgtccactcccagggggtccactcccacaagcttaccgaaactgctagcattgagctcccccaatgacctttttatttgccaagtcctgcggcttctt

SEQ ID NO: 388187 - DNA, 122 bp, Homo sapiens
cagcaccctggagaagcatggggcgtagccagctcggaacttgccaggccccaaaggccacgactgcctgttggggacaggagatgcatggacagtgtgctcaagctgtgggcatgtgcttg

SEQ ID NO: 388188 - DNA, 122 bp, Homo sapiens
tgcacttctcccaacaatcctcacagggtcacgatcatcgtcatccccacgtgaaagacccggaaactgaaacatgagagggtaaatcactcgcccaaggccacacagacagcaggtggagg

SEQ ID NO: 388189 - DNA, 122 bp, Homo sapiens
gtgcaggggaacggagtcttgaattccagggatgcggcaagacacacagccggagcgaaacgctacaaatatctgagaaggcttttccgctttcggcaaatggactttgaatttgctgcctg

SEQ ID NO: 388190 - DNA, 122 bp, Homo sapiens
ccttacgtagcccccagctaccagagtccaggaccaatggctcatgactcccaggacggacggttgtgtgcaacaacagagggagggttgaaagccgtggcccaggatcttcgataccactg

SEQ ID NO: 388191 - DNA, 122 bp, Homo sapiens
aagggggttgtttccaggctcataagacaaacgagttgccttttcaatgaaatccccccgcgatccttgaaaacggagtttaaatgtcacctccgcctttctaatgggcacagggctggagg

SEQ ID NO: 388192 - DNA, 122 bp, Homo sapiens
gaagacacacattccactggtttcttagtacagcactgaccacgtggcagccactggcgccgtgaaacccacaggatgtggctcaggacaggagctacatccaggcccacgggccgaaaggg

SEQ ID NO: 388193 - DNA, 122 bp, Homo sapiens
gcagcagcaggggtgagcagagggcggggcgggggcggccgggcggggcttactgtgcagcgcgtgccaacccctgggccagacccgctcctgccccctgcccggagtgaactctgccctga

SEQ ID NO: 388194 - DNA, 122 bp, Homo sapiens
cctctggcggccgcgggttccaatccctgccggcctcgcaggcgtggggcaggacagccgcgctctcgccagggcccagagccccactttgccaaggagctgtcgctggagcggtgactttg

SEQ ID NO: 388195 - DNA, 122 bp, Homo sapiens
tctggagttttcccgcgagccgccttgagagcagggtaagttctgcaggcccagccctggcgtcacgctgtgtctggcactcactggagattctgtacataaatcatggccccgtcattttt

SEQ ID NO: 388196 - DNA, 122 bp, Homo sapiens
ggttctcgcccacgacggcgaggcccaatcagacccgcggagctggtggagttccgccctcgcggaggaggtggtgttccgccctcctagtcgcagcaagcgcggaactggggttgcggcgt

SEQ ID NO: 388197 - DNA, 122 bp, Homo sapiens
aatttttttcgggtatccagcacaattctaggaattcgcctcccacccattttgagtagacgcgccactagcgcgttcccacgcacaaaccttttccctgcggccaacctgcgattctcaac

SEQ ID NO: 388198 - DNA, 122 bp, Homo sapiens
gcgtgtttggctacgacagcccagagtccagagccacggcacttccggttgctgtccacgcggcttctgctggtactcagccaccacgcccaccagagccaccgcacttccggttgctgtcc

SEQ ID NO: 388199 - DNA, 122 bp, Homo sapiens
cgccctgaattctttcttgcaggaggtccaagaacccactctttgggtctggatctggaccgctttcccataagaaaaagaaggaaggtaactaactttgactgaacacctgatacgtgcta

SEQ ID NO: 388200 - DNA, 122 bp, Homo sapiens
aataaatggcgacttgtctttatgtcttcacacagtagcaatcgggttgactcactgcagcgtgtctgccagaacctgtatgtggctctttaagctttgctagaacagctgcctgaaaaagc

SEQ ID NO: 388201 - DNA, 122 bp, Homo sapiens
tatcctatgtctggggggaatctatgctggggagccctgtggaggaggacctatggccggcggccccctcttccttcccctgaccctgcactcctggctccctcccacttctgacccttcca

SEQ ID NO: 388202 - DNA, 122 bp, Homo sapiens
atacctgccttgcttacctatattgtctatagctgcttacaggctacagtggcagaattgcgtagctataacagagactgtatggtctacaaagtctaaactatttactatctggcccttta

SEQ ID NO: 388203 - DNA, 122 bp, Homo sapiens
aaaaaaacctctgggccgcgtcagcaaaccagcccctaccctggctggactgcccggttccggcaaggcagagaaactacaaatctctgcatgcaacactccaagaagtgctaagggtacca

SEQ ID NO: 388204 - DNA, 122 bp, Homo sapiens
ggaagaaagcgggaggtctcgaagctggctttgtagccgcgccgcgacgggcagcccccgcgtggctcccagactgccctatcattacctagggcagggcaccgccccctctgtcgctcgcc

SEQ ID NO: 388205 - DNA, 122 bp, Homo sapiens
ttttcttgtggattcttgttttctccgtgtctctgtaacctcgcggtgttgcttaggagccgtgctgctggctatgcaggctgatggttcttacgtagttttgatgacttgcaccttttgcc

SEQ ID NO: 388206 - DNA, 122 bp, Homo sapiens
atatataaattatctgtgtgtgatcttcctttacagaaataatggagcctttcttttcctcgtgtggttgttgctctaagaatgcatttcttatcaagagaataatctgcttttcattctgc

SEQ ID NO: 388207 - DNA, 122 bp, Homo sapiens
aggtatctgaggaatattaaatgtctcccctaacttactgtgtgcaagtaaatttacatacgtaggaaattctttaaatatttagaaaaccccatttctatacagatagacaaaagttctga

SEQ ID NO: 388208 - DNA, 122 bp, Homo sapiens
cacacgcaggcaccacgagagaagaaagtcccgggcaggcctgagatccacaccgacgtgcgtggctatgcgtgtgtgtgtcacaggcaagctgcattcatggaaatgaatccaacagtgta

SEQ ID NO: 388209 - DNA, 122 bp, Homo sapiens
ccccggcccggaggccacgtggctttgtttatgggctcggcttgttttccgaggcgcctgcggctcacgctcccctcccggttgcacaaccgcgccggtggaaacttgaagcggtgctgccg

SEQ ID NO: 388210 - DNA, 122 bp, Homo sapiens
tctctggcgccccctggtggtgaagggggatctgagtggttgcccggccccaacctgacccgttagatgaactggaccggagcttcacgagtcagatgttgtcatcacagccaccccctcac

SEQ ID NO: 388211 - DNA, 122 bp, Homo sapiens
ttcatttacatcagagttagaaatgttaagactggctttcttgaatacttaaatatagctcgaatcactggttagatatggacatattttcccaactgtacatcagggaggagtgctttcat

SEQ ID NO: 388212 - DNA, 122 bp, Homo sapiens
gtccagtggcaaagaaaagaacccagggcaagagacagaattgaagggtaataaaaggaacgaatacgcttttacacagttcactggcaccaaggaaattctagcaactcactcttctggtg

SEQ ID NO: 388213 - DNA, 122 bp, Homo sapiens
actttttccagtgtagaaatcatgagacatggggaagccttctatgccatcattttgaaacgcaacacgtgaggttatctaaaaaataaataaataaataaaaataaaatcatggaattttg

SEQ ID NO: 388214 - DNA, 122 bp, Homo sapiens
acctcaggtgatccacctgcctcagcctcccaaagtgctgggattacaggcttgagccaccgcgcccggcctgctctgcatatttttatgtctgtattctgtgcatattcttctcagcagat

SEQ ID NO: 388215 - DNA, 122 bp, Homo sapiens
aagggacccaaaataaccgacacacagagtgcccgaaatcagacaggaagccaaataatccggggcgttgagtcgctttgccctgactgcgagagccgggtgtagggcggggagccaaggat

SEQ ID NO: 388216 - DNA, 122 bp, Homo sapiens
ttggggctgtcgccgggggggtgggtggctagggcgggaggggaggagatgctgccggcccgaggctgagccaccctccccgcggagttcccgcccggccctctgcaatccggagcccaagc

SEQ ID NO: 388217 - DNA, 122 bp, Homo sapiens
acattcctgccatccccctgcctcacctaattcagagaatctggagaaatgaccacacaccgtgctatgtccttgcaccattcataggtgacttacgtactggtgagtatatctttgagggg

SEQ ID NO: 388218 - DNA, 122 bp, Homo sapiens
tgcccatgtctccgtcctcctcagggaaggacgaccgggatcttacggtcactccctaggcgcgtgtctccctaggtcgcccaccccaagacctccctgcgcctcggagactagtcctggga

SEQ ID NO: 388219 - DNA, 122 bp, Homo sapiens
ccgcagccaatcagcacgagggaagctcggggtgtgagccgcgcatcgggggcctcgaatcggaagggagacgtcgctcgctgattggtcccgcctccccagtctagcgtgaggcgaggcgg

SEQ ID NO: 388220 - DNA, 122 bp, Homo sapiens
acaatggaaaatcaatgccagtgacctgggtgatctcccaacagagggaaattaaatcagcgttttggtcaaagtggacctaatatgaactaatattaagcactaagatcacaaatgcaggc

SEQ ID NO: 388221 - DNA, 122 bp, Homo sapiens
gtctggcaaaacggagctaccagaagacttggaatcaggcgaggatgcttctgatatgcacgttatccacaccccacgggacagagctctcttgccaatggttggcggaacacaggaaaggc

SEQ ID NO: 388222 - DNA, 122 bp, Homo sapiens
gacggtcctattccctcttgcatcgctgtctcctccctcaagtctcagcctcctcctccccgcccctcgccacatacccctgagggagctcagtcctggctttgggggcgcgagagcacccc

SEQ ID NO: 388223 - DNA, 122 bp, Homo sapiens
tcgttaggaacagtgtctgtttgtacaacaggtatgctctggaacaggatttctttacagcgtaggcacgtgtttccacctttgctctgcgggcttcgcctcctccgggcctggggctcctg

SEQ ID NO: 388224 - DNA, 122 bp, Homo sapiens
agcagtccccatgaggagcatgtgagcacttgggcctgggccctcatgattgctgtgaagcgatggccccatgacctgactcccaggccagaaaaggaagccagggccccaagcttccaggc

SEQ ID NO: 388225 - DNA, 122 bp, Homo sapiens
tccttggggtgctgagctgggggctgtcaagcctggttggctgagctcttaacgagtgggcgactcagggaaccccatggctgatggggtgggattggtgctagaccctcttgtgcagctgc

SEQ ID NO: 388226 - DNA, 122 bp, Homo sapiens
catcccttcttcttgcttcccctcagatcgaggaaattgccgctctggctgcttctccttcgccgccacgctcagacagaggtcgcttctgactagctgtaagacccggctgcatttacatc

SEQ ID NO: 388227 - DNA, 122 bp, Homo sapiens
ctcacacggtcaggcgggcctgcgcgaacgcccccgcttcccctctaccacccccttttgcgccttctacgatggtggcacgcggggctaccctgacccctaggacccctggacgcccgctc

SEQ ID NO: 388228 - DNA, 122 bp, Homo sapiens
acaccacttctctccccagccagactcccaacaaatgtgaaaaacccaaacccaactcagcgtctggcactttaagagcaaggcaagacctgctctcacctgagctttctgacccaattacc

SEQ ID NO: 388229 - DNA, 122 bp, Homo sapiens
aaaaaggagcttttcagcagaacaacaaaaagcatttcttacccagagctttcatgtaatcgtcaaagttctcactagagacaagtttccaggtgcccaggaatttgttgctcatcgtgatg

SEQ ID NO: 388230 - DNA, 122 bp, Homo sapiens
cttccatagggaaccctgaagcttcacatagagatggaggagtctgaaatgctgagacctcgtatggacatcaagccaccctagaaagtctactgaccccctagaggactctgtgggtgaaa

SEQ ID NO: 388231 - DNA, 122 bp, Homo sapiens
aagacggccccgaaacccccaggcgcacgcaccaccccgcgcctccccagcgagggcccgcggggccatgcccttcagtgggcacacttctgggagcccgtcctgagctcggtcactgacgt

SEQ ID NO: 388232 - DNA, 122 bp, Homo sapiens
cccgcagcccgctgcaggggcgcagggtgagtctccagcccaagaccgtctgaggcttcccggggcaggagggctcccggggctgagtgggcgcacggatgcgcgagaatccgcgtgcgggg

SEQ ID NO: 388233 - DNA, 122 bp, Homo sapiens
cgtgactatctcgccatgccctccctagcactgagcgtgatctctagtatcattttccatcgttgctaatttgaacatgagcagatggagtcctattatttggggtcattaatttcgtagca

SEQ ID NO: 388234 - DNA, 122 bp, Homo sapiens
gagccaggagcggccggcggaggagcccgcgccgaccccgttgcccagctccgcgccgcgcggacccaacgagctcgcgctcagacgccccagctccgcccagaggccgctcgcgccgggtc

SEQ ID NO: 388235 - DNA, 122 bp, Homo sapiens
cattttatttgtgcttctctttttaatggagattgaaaagggagaataatgtgaatatcacggcttatattattaaatgttgattgatggcttgtaatgtactgcacacaatatatgttaac

SEQ ID NO: 388236 - DNA, 122 bp, Homo sapiens
gtggagacgtgttcgaggtggtatcggcgaggatctctcgggcgccgctcactccttggtcgccttgcttgccagcagttgctcccttagtccttggctcgctcgcacaccccctcccgcta

SEQ ID NO: 388237 - DNA, 122 bp, Homo sapiens
ggatgaggaccctagatggggacacccctgcgcattcttacgtgatgtcaacgacccctgcgacacaaaccctattgtctccactcaccccgggttgaccggtgggcccttaaggccgtggg

SEQ ID NO: 388238 - DNA, 122 bp, Homo sapiens
ctcccggggcctggcgcggcggcgaaactgaccccggggcgcttgggaaacgcggggaagcgaatgcgcgcaggctgctcccgaggtctgcttagcagatatccgccttgcctcgcctcgcc

SEQ ID NO: 388239 - DNA, 122 bp, Homo sapiens
taagacctttgccacagggtgtccacgcggcctccggggtccccaggcgcccgggccagccgcactgccatacctgcatggagtcagcgctgacgatctcaccgccgagccgctggcctagc

SEQ ID NO: 388240 - DNA, 122 bp, Homo sapiens
cccgcctcccccaccttctcccagaggaggtgacagacgggcctgtaatttggttccattcgctcgactggagcaacacctgcccccctcccctgggacgcgagggtctcatcccaaaccag

SEQ ID NO: 388241 - DNA, 122 bp, Homo sapiens
tgtggtcaagggcagtgtacctcgtggcccccaggccaaagtggtgctagggtgggtgtccggcccggagcccaggggcagagcacagacctcactgaccctctggcgaaacagctctatgc

SEQ ID NO: 388242 - DNA, 122 bp, Homo sapiens
tactttctgtgtgcagtgcactgtgtgatgatctacagagattaaataagccgaggtctccgcttccagtcacttgggagagacgcacaaggtaaattacccaaatagaaggcaaactgccc

SEQ ID NO: 388243 - DNA, 122 bp, Homo sapiens
ctgccatgactcctaaccgggtggacaggggggccgggcagccgcggcgcacacgctgggcgtcgtccctagcagcagaggagaccagaaggtgagagtccccatgccgcagccggagggcc

SEQ ID NO: 388244 - DNA, 122 bp, Homo sapiens
cttgatccagggaaagtgcaggaaaacaggatccctctcttgcgacaactacgctgtttgcgtttcttcagtttttaaattcatattctagtgaatttgctattcactagcaaatcgttatt

SEQ ID NO: 388245 - DNA, 122 bp, Homo sapiens
gcgcgcaccggagagcgagcgagcgggcgggcgagcgcgagaagtacaagtacgggagaccgaggcagtgggaaaagaggccgggccactttctcccctttcgggctgcggagaatggactg

SEQ ID NO: 388246 - DNA, 122 bp, Homo sapiens
ggtaccaataaatgttggtaaatgaatgaatgactgagtcaatcaatcagttgctacatccgagccaaaactgttttctccagcaacacataatggccaagttctgtaatgggaaacttgat

SEQ ID NO: 388247 - DNA, 122 bp, Homo sapiens
gactcctcaccaacagcagccagagccacggtttcttaggcaagagccgcgagcgcggaccgtactggcaccttcccgaggatttcatcagcagccccaccaggaggcacggctgtcccacg

SEQ ID NO: 388248 - DNA, 122 bp, Homo sapiens
acggcggatccctcccgcttgtcaggaggcggccagcgggtaagctgactggcggaaatgcgagagaggagaagggaaaggtggaaggctaaagggggcaaactgaggggaggcgggtcccg

SEQ ID NO: 388249 - DNA, 122 bp, Homo sapiens
gtagtggggggctggaaaggccctttcaggacctcaggcccatcctcttcccaaaggcagcgcacgaggaagtcacagtgcccgtgacgcccgccccctccctcagcttcccggaaccctaa

SEQ ID NO: 388250 - DNA, 122 bp, Homo sapiens
gctcataggcagtgagtcatttccttaggcattgtggtgacccgggatcatgtgcctccccgaagcctgcacatgcactctaatgatgcaagctaccaccaggcggtcagctttgccagctg

SEQ ID NO: 388251 - DNA, 122 bp, Homo sapiens
agcttcactcctgaagccagtgagaccatgaacccaccgggagaaatgaacaactccagacgtgcagccttaagagctgtaacactctccatgaaggtctgcagcttcactcctgagccagt

SEQ ID NO: 388252 - DNA, 122 bp, Homo sapiens
taagggattcacgctgtaactgggaccgcagcagggaactacaatttccatagtgctccgcgccctcccagctggctctactgccggcgacggcgtggtacacgctgggatttgtagtctta

SEQ ID NO: 388253 - DNA, 122 bp, Homo sapiens
gcgccgccatgcgggaccctgccgcggacctcagaccacggcgcgcggtcctgagctgagcgccgtgccttccgggttccgccctcctgggtccgcccacaacagcaggaatgcccaatccg

SEQ ID NO: 388254 - DNA, 122 bp, Homo sapiens
ttgaggtatgaatgatcccatcacccaggtactgatcatagtactcaacagtttatttttcgttgttgttgtttttgagacagagtttcgctcttgttgcccagactgaaatgcaatggtac

SEQ ID NO: 388255 - DNA, 122 bp, Homo sapiens
cagcctctctcccagcctgcttttataaggcgcacttcactcaatgctgtagccaaaaaacgaggggccccagggagaggggacccagatggccacacacggaacgcgcctccacagccccg

SEQ ID NO: 388256 - DNA, 122 bp, Homo sapiens
cagagtggcagagtgtggaggggaagcagggagagggaggagagggagacgggaagaaagcgagagcaggagatgggggacacgccactgcatatctgacggatgtactgttttcttcagac

SEQ ID NO: 388257 - DNA, 122 bp, Homo sapiens
aactgtgcctgagcatgtttcctatagaaatgggtcaggacaggtggaatcgttggtagccgtgtctgacctaacactatactaagaccagcctccagccccagcccctcaccaacgctaag

SEQ ID NO: 388258 - DNA, 122 bp, Homo sapiens
gcccgacaacagcgcttcattgcgctgcgaggcacatgaactgcagaggtacatgagctgcggaacaattcacacctaagatgcactacaaagtggtaagagctgcagaggtacaggagctg

SEQ ID NO: 388259 - DNA, 122 bp, Homo sapiens
ccacacttctgaggcgggtcccaggccagagagatcacagatgggaaagtgctttgagctcggtgggagaaaggagctctataaacccaggggtttattagatgatccaggatcaaggaggg

SEQ ID NO: 388260 - DNA, 122 bp, Homo sapiens
atatttgtctttttgcttctggctcttctttcttagcataacatttttgagattcatccacgctgtggcatttaccagaatcaaattcctttttatagctaaataaaattgtattatatgga

SEQ ID NO: 388261 - DNA, 122 bp, Homo sapiens
agataatgtaggcacagaagacagaaacagctactgaactgatagatgtaaacctgacttcgatggcctgactataaaacttcctctcttcctggacccgcctgcctcctgccatagaaact

SEQ ID NO: 388262 - DNA, 122 bp, Homo sapiens
tttgagttggtctggtgtgctactccgacctccctgtaatcagttgcagaaataaactcccgtctttcccagtctgtctgtctgcatctcattaccggaccacaagaacaagcagcaggacc

SEQ ID NO: 388263 - DNA, 122 bp, Homo sapiens
aatgctggaatgaatttatgcttaagagcttgtctcgggaatgcagctgggtttaagagtcgccaagccaagacaccctttttgggaaaagggaaaagaaaaggaaaggaagataaaaaccc

SEQ ID NO: 388264 - DNA, 122 bp, Homo sapiens
cggccggaccatccagcgccacctggccttcgacatcctgcggcacaacacaggctactgcgtgtacatactgggtgtgatgtggtccgtcctgggcttcccactgccacaagtcttcctgg

SEQ ID NO: 388265 - DNA, 122 bp, Homo sapiens
ccccgccgccctccccttcgggtccccgccgcctcctcactcccccaccccaccgcccgtcgcattagcggacactctataatagtggcatttattaagagacctgttctcctttcgctgcc

SEQ ID NO: 388266 - DNA, 122 bp, Homo sapiens
tggggagggagggggccacataaacaacacagatacaaataaagcctcactgtggtaagacgggaccagacaagtctcctccagggagaatgaaacccggacatttaggacagcggaacgcg

SEQ ID NO: 388267 - DNA, 122 bp, Homo sapiens
tagggtcaagcgatcctcccaccttggcctcctaagatgattacaggccataagccactgcgcccggcccaagcagttctgaataatgatgaaatgggctcagttgagagaagctgaagatt

SEQ ID NO: 388268 - DNA, 122 bp, Homo sapiens
gggtggagggcagcctggcccggcccgtctccaaggcagggacactcatagcagcattgccgcctgcagccatctcggggtactcccgggcttgaacccccagaagctgagttctaacaagg

SEQ ID NO: 388269 - DNA, 122 bp, Homo sapiens
ggcccttttggtttccctctcctcaccttcattccatcagcctcaggtgagcaatggcatcgcagaagatacgcagtaggagaaggaaactcaactacctaccagcagccccatcactctct

SEQ ID NO: 388270 - DNA, 122 bp, Homo sapiens
gacggcggtgacggctgtggatggctaattaagacagatcacgttagcccgttatatctgcgcggctaggcgcgatggctgtcgcctataatcccagagctttggaaggccgaggcaggagg

SEQ ID NO: 388271 - DNA, 122 bp, Homo sapiens
gggtgtttaccacacagcagtggatttcataaattccagggtcagacaagattccagtagcgacacacttgactaatatgagaaaatgcaggattaggcaatcaacaatgaggaagtcagcc

SEQ ID NO: 388272 - DNA, 122 bp, Homo sapiens
ataattggttacagcagctctaggaaactaatacagctgctaaaatgatccctgtctcctcgtgtttacattctgtgtgtgtcccctcccacaatgtaccaaagttgtctttgtgaccaata

SEQ ID NO: 388273 - DNA, 122 bp, Homo sapiens
ggcgtcgcgggtgttaaagggcgagtctacgcggatgtcacggtcgccgcgggcaaggaccgcgaggttgcggccctgctccgaatcccggctgcgctggccacgctcctccacgcgcgggg

SEQ ID NO: 388274 - DNA, 122 bp, Homo sapiens
tcgtgcccgagaggaggccgccgggccaggcagggcgccggctctcccgggagctgcgcccggaactcgaaggcctggcagcgaacccttctcaagggcaaaaggagccggcctgaggctct

SEQ ID NO: 388275 - DNA, 122 bp, Homo sapiens
tgcaggacatccaggcgccggaaaggcagctgatcccatggggatggtggagggggactgcgacggggagggaaggcacttcaaaaactcagcactggcagccctggtagctctgcttctca

SEQ ID NO: 388276 - DNA, 122 bp, Homo sapiens
ctttgggcctttcctgacccttccattgtggatcagtcttcgttttatgagctcctttaacgctttgtgttgatccctcaatctcaatggcagctaaaaggatgtagcctagggcacgtgcc

SEQ ID NO: 388277 - DNA, 122 bp, Homo sapiens
ctcggtgggtctggacgcgagatgggaacccccttagtacccgccccagcctccagctggcggcgaccaggacgccccttcttgggttgcgggctcttctgaatttcccaaattctggacgt

SEQ ID NO: 388278 - DNA, 122 bp, Homo sapiens
acgcggggggctcagcttggacctcagctcggtgaacatggggcccgcgggtgccaggcccgcgcacacgcccctcgccgagtgcagggcggccggtgtggccggcggggaacgcgcgccgc

SEQ ID NO: 388279 - DNA, 122 bp, Homo sapiens
ttggtataggtgggaattaagccggggagggaggagtaggtcggaacagtttgcagctggcggctcgctgattgggtgttattttacagctgggcagaaatgaccgcggtagcactcctggg

SEQ ID NO: 388280 - DNA, 122 bp, Homo sapiens
ttatacatgagacctccctttgcttctgactccttggtctctggttctgtgaggtgctgtcgggttccagaggcagcagcacagtggaggcagggtacagaggatggggacaagcacggtgg

SEQ ID NO: 388281 - DNA, 122 bp, Homo sapiens
taaatacttaatcacacacttttcaaacaacctctcaaatgttttcagtctgtaagtggccgttggcatttatgtaaatgattcctgaagaacctacatcattttttattcactcattcccc

SEQ ID NO: 388282 - DNA, 122 bp, Homo sapiens
cggcaagttcgcacagcaacgcaacctcatcagccacatgaagatgcacgccgtggggggcgcggccggcgcggccggggcgctggcgggcttgggggggctccccggcgtccccggccccg

SEQ ID NO: 388283 - DNA, 122 bp, Homo sapiens
ttgttgtgaactgaactttgtgatagagcgagttaggggtggactttcggtaaaagggtccgcaaaccaattagagaaaaggtgctcctctgcaagagtttcataggataaactcatagaag

SEQ ID NO: 388284 - DNA, 122 bp, Homo sapiens
gagaattgttcgatactcaactcttcccagtcagtctgtcttctgcatgcccacagttaccgggcagcgtgggcaacaagtgagcactgattgttccgcaatcaggctgtgacttactccat

SEQ ID NO: 388285 - DNA, 122 bp, Homo sapiens
agatgatcgtggctgcagcacatcccagcccatcttcagccagagctttcccgacctcggcgctctcagtgaccccaggctcatcagccagaagatggggacacagatttcgcgtgagtggt

SEQ ID NO: 388286 - DNA, 122 bp, Homo sapiens
caagaggcagtctccattggatgtccccactccccgcagaatggcgtttccagagttaggcggtgtggttgccgtgctcaagcccatgctgatttgtacactacatgtctaacctacctcaa

SEQ ID NO: 388287 - DNA, 122 bp, Homo sapiens
gccttcggcggcccggaggtctgagccgacttgcaaaggggataggcgggcggcaccgggcgccctcccccagcccgccccgcccgcccagcccggagacccccaaggcagagggaggccgg

SEQ ID NO: 388288 - DNA, 122 bp, Homo sapiens
ggtcccaagccctgccccctggggaggcggctgagctgaggcctggcgagaattaaagcacggcactggcaggtcggcagtgctgggggacccagtgcaccctccgcagctcttggcccggg

SEQ ID NO: 388289 - DNA, 122 bp, Homo sapiens
caggcacggccctccccttcccctgccgcaggccggagccaccagcccacctggtgtgctcggcagatgaggtccaagtcgtgcttgtggaggaacttggccaccacctcggctccaaaggt

SEQ ID NO: 388290 - DNA, 122 bp, Homo sapiens
acggcagtggtgagatgggccccgtgtgctggaacatgagccagcagcgatggaaagtggcgaggggaggggaatccccgtgctcgctcgggccagtgggaagtttccatccgcgcagggac

SEQ ID NO: 388291 - DNA, 122 bp, Homo sapiens
ctttacatgcctcactgtgtagcatagcagtgccttctgaagaatgttgaatgtcattgccgtatacagaggtggaaactcaccatgaaaacaaaccattagcaaggatctgtttttaaaaa

SEQ ID NO: 388292 - DNA, 122 bp, Homo sapiens
gtcgtgcaggacctgaagcaggccgtggcgcagctggaggaccaggcctagcactggggccgccttccccaccccgcttctgggaagcccgtggcagggcacagggttgtccctccagttcc

SEQ ID NO: 388293 - DNA, 122 bp, Homo sapiens
ggagcagcctgagaccagacctccaggtctctttcatccaacccacctgcctggcatcctcggggttgggggtctgctatagtcttcaggaagaaagacctgccactgacatactgtgggac

SEQ ID NO: 388294 - DNA, 122 bp, Homo sapiens
taggcagtgacagtgcccagggctctaatgtgtctctcacggcttgtaaatgtgacaccccggggggcctgatgtgtgtgggttgttgaggggaacaggggacatagctgtgctatgaggtt

SEQ ID NO: 388295 - DNA, 122 bp, Homo sapiens
cgagaagaggagaggggggcgggggagctgccgccgccgccccccagaggcgccggagcccggaatcccgctcggagccagccagccgtcccgagctaccagcaggtaaggtctgcggccgc

SEQ ID NO: 388296 - DNA, 122 bp, Homo sapiens
cacacatttattaaatcagcaataaattacatttcattgtgaattcatattgactttatacgtctgtagtagactttaaacagtcctgctatcaaaggcattagcccttgccgttatttaaa

SEQ ID NO: 388297 - DNA, 122 bp, Homo sapiens
ctgctgggcgcgcaacagctgtcccgggaggcaagggttcgcacggcagtgcttctgtgtcgacagaggctgtgctgcagctccctgccaggcccgtgtccttcctagctgtgagaacacta

SEQ ID NO: 388298 - DNA, 122 bp, Homo sapiens
tgagctccccctccagcccgtggctcagcccgggcccacatactcacgccgagatgagcccggtggctctcccccgcaagtctcggtactcccgccaggactccatgttggctctctggggc

SEQ ID NO: 388299 - DNA, 122 bp, Homo sapiens
gagggagggtcagtgccaagtctcaggaggagggcgcatgtgtgtatcaccctcagctggcggaacctggctgcgaactgtgcagttacgttgcatccacaggattccagttgcgtgtctgt

SEQ ID NO: 388300 - DNA, 122 bp, Homo sapiens
cgtgccccgagcctcggtctttctctggctttgcccgagcggcggctgccggagaccgagcggctgcccttctcgcagccgccgctgggggactggcacctctgggtcctaaagggatcgga

SEQ ID NO: 388301 - DNA, 122 bp, Homo sapiens
cagttcagcccgctccgcgccccagcctgcaagcagaagggagggagggagtagagcacccgctctggggactggcctttaatctctaaactgctaaaaacagagctaggcaggcggggcca

SEQ ID NO: 388302 - DNA, 122 bp, Homo sapiens
acttggcgcacctggctctacaggccacgccctcaagtcttccaagaggccagcggtaagcgcggtccacctccctctcccactaggcgtcggcttcacgccgcgcccacgtctcgaggaca

SEQ ID NO: 388303 - DNA, 122 bp, Homo sapiens
ccctgcccccaggtgaaccagtgtgttattggtactgctcaggccaacaggaagtgaagacggatccagatctgtgtgtgtgtgtgtgtgtgtgtgtgtgtgtgtgtgtgtgtgtgtgtgtc

SEQ ID NO: 388304 - DNA, 122 bp, Homo sapiens
cgcagacaccgacgggctaggaggctctgcctgcctgcagccgcagccctgctggggcagcgccgattggcccgccccgcccctccccgccgggtcggcagctagctgggccgaccaggtgc

SEQ ID NO: 388305 - DNA, 122 bp, Homo sapiens
aggggagggaagccttttaatgactcattgattgagccggtttaaaattagttgtgtgcgcgagtgtgagtgtgttttccgccccccggagccgccgggagccgggaaggagggagcagggc

SEQ ID NO: 388306 - DNA, 122 bp, Homo sapiens
gggagggccgagcctccggccacgccttgtcagccccggagcctccaccaatcccgggcccggaaagaccaggcccactgccggccccgcccagcacctgcgcaggtagcgcgcgcaggcga

SEQ ID NO: 388307 - DNA, 122 bp, Homo sapiens
tatgttttctctttcaagcttttttctctttcatcatagccaagttgtacaacgacaatgcgtgaccttgcatatcacaatcttaatgtttttatgtccactgctttctctgttcccctcta

SEQ ID NO: 388308 - DNA, 122 bp, Homo sapiens
agggtggaagggagaggactcaccgcgatgagctggacgcagtggtcggcggaggtgccccggacgcagaggagggagggctggatgcccgcttcccggaaggcctcgctcatgttgccgca

SEQ ID NO: 388309 - DNA, 122 bp, Homo sapiens
aggcgtgtgaactgctgcatattgttcattacactgctcagtaaagtctgccacacgacccgtacgatctactgggcactctttggaccagtgaccttctttcttacactgatagcagccac

SEQ ID NO: 388310 - DNA, 122 bp, Homo sapiens
gaacacacaaagtgtgcagccctgtgcccacatgtgtggggagtgtccagggtaaaatcacgcccagctgcctgccacgggcctgtcctgactatccattcttactcttaaactccaaagaa

SEQ ID NO: 388311 - DNA, 122 bp, Homo sapiens
gggcgctcagggggccgggggctccttggccccatacagctcggccagggtgcggaagagcggaccccagtcgtccagcggctccgcggggccgggggcgccgccggcttcgctgccggagc

SEQ ID NO: 388312 - DNA, 122 bp, Homo sapiens
tagcatttaccacaagccagatgctgtgctaagtcagctacatgaattatctcatttaatcgttataacatccccttggaggaagtgctggaatgattatttctgtcctacagatataggga

SEQ ID NO: 388313 - DNA, 122 bp, Homo sapiens
aaaacctttgatacattaaaataataagttgtgtttaacgtgtcgatagagccactgctgcgacttctagccgtatttgaaagatccacggtggcctgggcctggaagcctcatttttctct

SEQ ID NO: 388314 - DNA, 122 bp, Homo sapiens
cggcaggcgccatgtccggccgcgaaggtaagtgttccggaaccgtgaggactgcggggacggcggggtggggaccgggcggcaggggcaggccgaacgtgctcgtgtcgcccacaggtggc

SEQ ID NO: 388315 - DNA, 122 bp, Homo sapiens
ggtgggagcatctgaggtgcaggtcacacgggcaggaggtgtttgcaagaggtattgcagcgcggacggagtgtcctgcagatgacgctgtctgtcctgtagatgacgctcgtcaaggaggt

SEQ ID NO: 388316 - DNA, 122 bp, Homo sapiens
cctgtggggctggaaggtgatttgtgggatgacgaggacctgcctgctgagatcctggtgcgcagctccattataaggtgtgtgaaaaccagagaccacgcagctctcaggaacacaaatgc

SEQ ID NO: 388317 - DNA, 122 bp, Homo sapiens
gaaggagccaggagtaaagaactggcttacttggccgccactgggaaattctgggtaattcgagacgccctggaatttggacccactccgctgataggtggtggccagggttctagggaaca

SEQ ID NO: 388318 - DNA, 122 bp, Homo sapiens
ctgactgcccagcgcccctcacttgcccctcgacccccacatcatctcactgctgggctgcgcccgcacccccatcttggtggcgacaccgtcctgggccctggaggaagagccgatccggg

SEQ ID NO: 388319 - DNA, 122 bp, Homo sapiens
ggaatctgcctgccttggcttcccaaagtgttgggattacaagcatgagccactgtgccccgcctgtggtctcattttggagggcaagagggatagagatagccataacctggagaatattg

SEQ ID NO: 388320 - DNA, 122 bp, Homo sapiens
cttctcctcataaaaatacatgcacacttcaggagtgcaaatgcactcttccggaagattcgtaacccactacattcataaaccattagataagaactaaaacacaaggagtcactgaaggg

SEQ ID NO: 388321 - DNA, 122 bp, Homo sapiens
agccttggtggctgccaaactccccgggaggcaggcccgaggcaggatttgggaaggtggcgcaggggcccagtgtccttcttgataaggccagcaagggcacagctgccctgggccagcat

SEQ ID NO: 388322 - DNA, 122 bp, Homo sapiens
aatatggtatatccattcaaaagattactcagcattaaaaaagaatgaagtgctgatatacgctacagcatggataaaccttgaaaacactgtgccacgtgaaataagtcaatcacaaaaga

SEQ ID NO: 388323 - DNA, 122 bp, Homo sapiens
atttggatatgaacttgagctgtaccccatggtgtcttttcttgcagtcctagcctccagcgcctttagaatttgcattctgtttggtgggatgaggacggtggcagtggagacagggtgag

SEQ ID NO: 388324 - DNA, 122 bp, Homo sapiens
accatgtctcctgaatggcgtgtggcactggggctttgttgtggtgggtgttaggtgaagcggggacattgtcttctgaaaggccgctatgaggaagggaaaagcctgtgtccaggcagcct

SEQ ID NO: 388325 - DNA, 122 bp, Homo sapiens
accttcgcagtgagtgttacagttcataaaggtggcgcatcccgagtcgttggttcttcccgtccagagttgttcatccctcccagtggatttgtggtctcgctggcttcagaagtgaaact

SEQ ID NO: 388326 - DNA, 122 bp, Homo sapiens
ggcccaggtctgtattatcctactgccacataggaagtaaaatgagtactcacagccttgcgcctaatcactgaacacagcttttagtaatgttttacacaagaacaggatattggcaactc

SEQ ID NO: 388327 - DNA, 122 bp, Homo sapiens
cccccacttcctcccgcccctcgctgggcggctattaaaagctgctgacgtcaaaacggacggccatctttgatgagggcagagctcacgttgcattgaagacgaaacctcggggaggtcag

SEQ ID NO: 388328 - DNA, 122 bp, Homo sapiens
gccacctacccttaccgagtgtgctctgtgaatcctccttcagccatagaaatgcagttgcgaagagtattacatgatattagaaactcactgcagaatctttcacaggtatgagaaaaagt

SEQ ID NO: 388329 - DNA, 122 bp, Homo sapiens
cccttttgcataccacccatctttgccaaaaataactgaggacccaaccccagaatggcccgttgcatttcctggcactgaacatgaatcagttgtgcagtccttttgggctgatcacacag

SEQ ID NO: 388330 - DNA, 122 bp, Homo sapiens
tggttggatttaagcaggactagcagtctgtcctggtgtgtaatgattggctagaccaggcggctgaggccagggcagactccctccttcacatctgtcaatatacctggctgcaagcaagt

SEQ ID NO: 388331 - DNA, 122 bp, Homo sapiens
gggcgggtggggggcactccgggagagagcgctccaaagtgcctggcgccgcgccctgcgcgcagctagcaccccagcaaggggctggttatgacttggctggaccagttccatccctgtcg

SEQ ID NO: 388332 - DNA, 122 bp, Homo sapiens
aacagggaagggcagggtgagccctggggcgtctgaggctgctgtgctgagtgagggctgcggtgcaggcctgaggatggtcagcgtggagggccgagccatgtccttccagagtatcatcc

SEQ ID NO: 388333 - DNA, 122 bp, Homo sapiens
tctggctgggaggagctcctctttctggccagagtcttgcttgagccttcttagccatctcgtcacctgttataggcagccctgccatctctggtgaccctttttaaacattaccctggtga

SEQ ID NO: 388334 - DNA, 122 bp, Homo sapiens
ctaaagatgattcagcatcagcatgaggtactttgagttttttggcattttctaagctaccggggagggggacaaaaaggtggaaatgaatcacttcatgtaaataaaacttcaatagtact

SEQ ID NO: 388335 - DNA, 122 bp, Homo sapiens
tgtgcgtgtgtttgtttggacgaatgtgccttgtgcgccaaagaagctatttttgcatgtcgtctggtctttgttgagcctctttctgggtctctgcctgggtcatgtggccggctgtctat

SEQ ID NO: 388336 - DNA, 122 bp, Homo sapiens
ccaccagcagcgtcgccttcccaactgagaaagttaagccccgactggtgtcctgggtcccgaggcaaagagggaaagctagagaactcagggccacagttctgagagtgaccagtatgagt

SEQ ID NO: 388337 - DNA, 122 bp, Homo sapiens
tctgctcgcctctgcaggcgccttagagcagctccgaggtcccccgtgcggagctaggcgcgcacccaggacacccctcgggctcctcggaggaggccctggttgtcccctttctgccgccg

SEQ ID NO: 388338 - DNA, 122 bp, Homo sapiens
gccttctccccagaagcagcccctttgacgacatcggtactttcggtccattccctgggtcgatgtttccagaaccccgcgcccaggagcacgtccaggttatgcgtggggccgccctgtgc

SEQ ID NO: 388339 - DNA, 122 bp, Homo sapiens
aagcgtgagcactgcccaggaggccgctttcatttctgtggggacatcgggaccacccaccggacacccccaggaaggccacgttctgaggttagaaagggaaaaaatcagatctcactgaa

SEQ ID NO: 388340 - DNA, 122 bp, Homo sapiens
cccactagattgtagagtgagtacaatctagtgagttcactcccacccccaccgcagccgcgccaatgctcctgcagctctccctctcttcctctctcttttccctgccagtccagcttctc

SEQ ID NO: 388341 - DNA, 122 bp, Homo sapiens
gctccgtcagttcccacagggccttgtgcgacatgggctgcgccgagggcaaggcagtggcggcggccgccccaacggagctgcagacgaaaggcaagaacggcgatggccgccgtaggtca

SEQ ID NO: 388342 - DNA, 122 bp, Homo sapiens
tttaatatttaaaaattcgttactgttgctgttacttgttttctatgtattggatgtcttcgtgaagaaccctcaaaagtgcaacgaactcctccctgccagagggcggccgcgcgctctga

SEQ ID NO: 388343 - DNA, 122 bp, Homo sapiens
tcctggttgtgtgggccaaccctgggcgtgtgctcctccctaggccaacaacaacgctgccgtgtgtctgctctacctgggcaagctcaaggactccctgcggcagctggaggccatggtcc

SEQ ID NO: 388344 - DNA, 122 bp, Homo sapiens
tgcaggggctgctgggaaggcactttcgtcctttgggggacccaggaacccctcgtctaacgcgccatttttttccttccaaaggtgcgtctactttcccttttgagccttgtcttccattc

SEQ ID NO: 388345 - DNA, 122 bp, Homo sapiens
gggcagccggaggagaggcgtccccaagggttgcgggcgcttcccaggggtgactttgaacggctggctccaagccctaccgaccccagccaaggaacaggctcagcagcctgaaagcctcg

SEQ ID NO: 388346 - DNA, 122 bp, Homo sapiens
gcgcgcgctgccatcactcgggagacggagccctcatgtcatcagcctcctatctggcggcgtcctcggcagaggcggtgaaggcgcggttccccctggcggctcccaggagccacaagtgg

SEQ ID NO: 388347 - DNA, 122 bp, Homo sapiens
agattttaatgctgaattatttagagatcaaactggcagaatgtcagtgggaatctgtcgcgtgtttggttttctgaagcacagaaagcttatgaatgggcaagatgctgaattccgctgtg

SEQ ID NO: 388348 - DNA, 122 bp, Homo sapiens
gaccggagaggtggggccgggcctgggacccggaggtgtcaagggggacctcttggccatcggcctccaggggccggtcccgcgccaagccgaggtccacagcacagcccggctcacactcg

SEQ ID NO: 388349 - DNA, 122 bp, Homo sapiens
gtcgggcccggggcggggagaagcgtttatatgtcggcgaggggcgtgggagctgccacccgcttgcctgcgggacaccggagtcaagaggctgcccacgccgctgcctgtccgttccacgg

SEQ ID NO: 388350 - DNA, 122 bp, Homo sapiens
aaggttggaagggtggttagaccacacagagaggggaggaaagaagaggaattcctagcacgggtaagcagatgggcaaaagtgcaagtgtctgaaataatgatataggatgcactctttca

SEQ ID NO: 388351 - DNA, 122 bp, Homo sapiens
cccgggaatcactcactcgagtgccttcgacgggaaagtcgggcgagagctggacccaggcgggggccgagggaaacggggaaactggagactcgggtgaaggccgcaggggacaaagagat

SEQ ID NO: 388352 - DNA, 122 bp, Homo sapiens
acttaaagagaaatttttatttcaaacaatccttggaactactctgatatatggggtagacgtggactaagtgagagaaggtttgcaattctgtctccaactcacatttgtcaaatagcttt

SEQ ID NO: 388353 - DNA, 122 bp, Homo sapiens
tcccaatccaccaacttccgcccaagccaggatctgtcacaactcgagaggtggaaattccggtttccctggcctagagctcccagtgctggctttggcatgatgggcacctggagggccgc

SEQ ID NO: 388354 - DNA, 122 bp, Homo sapiens
ctcgccccgcccccaggagtcgctcttgcgtcaccgccccgccctcaggacgcacctctgcgcctcgccccgcccccagggccaagcctcccatcaccgcgccgccccagaacacgctccgc

SEQ ID NO: 388355 - DNA, 122 bp, Homo sapiens
cgcagctgctggcccagatactaagcccctcactgcccgtggccagcggcactggccagccgcttccagtgcagggccgactgagcctgcccccacccggaactcatgctggctctcaaggg

SEQ ID NO: 388356 - DNA, 122 bp, Homo sapiens
gatgctccaataaaaatagtttctctgggagtcccgctcatttttggagtgagctgttagcgggctggtcggtcctttagtgcttgttcagtcttaggtggtgagccaaggtccaggggcct

SEQ ID NO: 388357 - DNA, 122 bp, Homo sapiens
cactgacagccagtatatccccttgcctctcaccggttagccctcttctcgtttttcctgcgcaggtcattcacattgacaatcagccggtattggttgtcactgatcagctcccgaacttt

SEQ ID NO: 388358 - DNA, 122 bp, Homo sapiens
ctcctgggatacagctggaatctcgacagcctggggaggaaggagcctttgatcctacagcggcaagagttcttgacacttgccggctgccaagcctgtttcctcccggtctaacgttctgt

SEQ ID NO: 388359 - DNA, 122 bp, Homo sapiens
cgcaccccggggggctggaaaggcgaagtcgctgctttgtgggctcctgcaagtgccaggcgctgaccactcctcctgggagcctaactgaggggggtagaggcagcagaggttaacagaaa

SEQ ID NO: 388360 - DNA, 122 bp, Homo sapiens
gatgaaggcacccactgtcactgtcccggccctcgctgagtgttcccggacccgtgggcccgcgtctgtgccaggccttggggagctccagcctcggagcctcttcccgttctcagacctca

SEQ ID NO: 388361 - DNA, 122 bp, Homo sapiens
gatgaaggccagggagaagcgggtgctctgcagtggccggataggtccagacgctgaggccgaggcgcttcctgttacgtgcgggcgttccgctctgtctctgccaggcactctctgactag

SEQ ID NO: 388362 - DNA, 122 bp, Homo sapiens
ggaccgtccttcagtccatccaggcgcacgcctcaggggacgcgccgcttcctcttctcccgcaacggcaccagcagccgcgctgcggcccctcccgagtccccgcccctccagctccagcc

SEQ ID NO: 388363 - DNA, 122 bp, Homo sapiens
gaaccagaaacccaccaatcctagtgttgccctggatgggaggcagagaaggcagcagcacgtgaggtcaaggacattaccaagtctgaccttggcatttgttgcctgctctcatccccaac

SEQ ID NO: 388364 - DNA, 122 bp, Homo sapiens
gaagcgggatgcgcctgaagacaggtgggaagcgcgggctaggaacgcgtctctctgtggcgcgtccatccttgctaaagtggatggaattccagacctgggaatgctacagtagagacact

SEQ ID NO: 388365 - DNA, 122 bp, Homo sapiens
aggggcatggctggtctgtgggctgcaagacaggcaaccaaggctgcacgcaggaccccccgggggaaaggtgaagagcagaagcttccaggaggcctctgtgctcagtgaccacagccccc

SEQ ID NO: 388366 - DNA, 122 bp, Homo sapiens
tgctccactgcctgcttgaatttcttttctgaaaaatcttcctttctctgtcacatggctcggctgcaaagttttcaaatgtttatgctttgcttcctgtttaaatataagttccaactgta

SEQ ID NO: 388367 - DNA, 122 bp, Homo sapiens
cttctctctgcttctactccccttgaaaactatagctcttgcctggactcccccccgccccgcccccgtttctccagcagctgcagcgattggccttgtccgcctgaactccgcagaggcgc

SEQ ID NO: 388368 - DNA, 122 bp, Homo sapiens
aggtgtcttggtaggcgcaatgggcgcctgcgcagtggcagcctattttgcgggttgacccgctttaacctgcggcttccttgcagtccttccttgcgcggagccccagacctacacttgcc

SEQ ID NO: 388369 - DNA, 122 bp, Homo sapiens
caggcaaccctggagtctggctcagcgcacaaatctgtccagggcagatggccgggcccccgtgggcttggccttcgcctccttatgatgctgctgctgaaggctctgccggaccttgtcct

SEQ ID NO: 388370 - DNA, 122 bp, Homo sapiens
gggttcactaaacggcagcatgttttaacagaagttatttactcctagaggacccagaaacgtttgcggcctgccggaacaggacaacatagggctctgggaagagtccccctttcagaggt

SEQ ID NO: 388371 - DNA, 122 bp, Homo sapiens
gcggggcacggagcggctggacagcggccggggcccggctcctcgggcggactcggagtgcgaggagccgggtcccagccacacaaaccccggccccgccacgccccctcccgcccctcgcc

SEQ ID NO: 388372 - DNA, 122 bp, Homo sapiens
taaggaatgcgataaataatgtcagagctagttcttagtgaacgctgctcgaaagcctcacgatgtaatgactcactacatcttcacgaaaactcggaaaccgaggcaactgtcattcagtt

SEQ ID NO: 388373 - DNA, 122 bp, Homo sapiens
gccgtaatcccatatgactggtgtccttgtaagaggagacacagacatacacacagagtgcgggccacacatcgacagaggcagagactggagcaatgcagctgtaacccaagggatgccca

SEQ ID NO: 388374 - DNA, 122 bp, Homo sapiens
agtgtattttcccaatgtgcccgtgagttggaaatgaataatacctggttgaagggggcccggggcccatcacctagcagaggcgttttctgttgctggaatggtattggcccttgagatgg

SEQ ID NO: 388375 - DNA, 122 bp, Homo sapiens
attcccagaatgcgcttcatgtgattaactcggggggtgctcttgggaaacgtagtccatcgtagggcaagatttacaagtgcgggtgactgttgaagttagaatttaactaacacctgggc

SEQ ID NO: 388376 - DNA, 122 bp, Homo sapiens
taactgtttacttcacaaggccctgaaaagaaaacagaacttttgttctcaggcaggccccgagaagggtcgtctaatcagtcataatagagtgtgcctctaaaacggtgccttcctgcagg

SEQ ID NO: 388377 - DNA, 122 bp, Homo sapiens
gtccgcctccataggtcaagcttaaagggcccgtacctctcccttaatctgggatgcctccggctccaggaagatggctattgaaaggcagggggtggggaggagggacgagggtgtggaga

SEQ ID NO: 388378 - DNA, 122 bp, Homo sapiens
tgacagattcctaaacggattccacctaatgaaatgcacaatgaacaatcatgatgagaacgtgcacgggggtacctatagcacccagatccgaacagctggcttcagttcactgctcctga

SEQ ID NO: 388379 - DNA, 122 bp, Homo sapiens
caggtggagacaattggcgatgcctacatggtggtgtcagggctccctgtgcggaacgggcggctacacgcctgcgaggtagcccgcatggccctggcactgctggatgctgtgcgctcctt

SEQ ID NO: 388380 - DNA, 122 bp, Homo sapiens
ctccgcaagccgaactgctttgtaccgggcaggcgtcggggatcgtttttgctttggtatcggtgatgtaaattcatgaattaaaattaaggattttgaaaagaacggggaagaacgcactt

SEQ ID NO: 388381 - DNA, 122 bp, Homo sapiens
acccagccctcgtgcggtccccgtggtccggctcgccctccccggttaggggagcggtggcgaggcgccgtcgctgccctgccgcctgacctccctgagcctgggccctcaccgggaccgcg

SEQ ID NO: 388382 - DNA, 122 bp, Homo sapiens
ctgacgccaggccacgaacccagtactgctcctgcacagcagaagcactagcactgaggccgggcggcgaacccggcactgcgcctgcgcagcaaaaggacacgcactgaggccaggccgcg

SEQ ID NO: 388383 - DNA, 122 bp, Homo sapiens
cggctgcatcatcagtggcgggggctccgtctgcggaggtggttcctctggaggcggcggcggcggctcctccgtgggtggctccgggagtggcaagggcgtcccgatctgccaccagaccc

SEQ ID NO: 388384 - DNA, 122 bp, Homo sapiens
gatcctgttggaaagcaactgcagcatgtaagtcccttccttttgctgatgagcaagcctcgctccatcccccagccttctctttctcccattcctgtctcaccatgccctggtcttaagag

SEQ ID NO: 388385 - DNA, 122 bp, Homo sapiens
gaggctctaaaaaacttgtcactgcagacggttgaaatgatgcacagccaatctgcctcccgaaagacagatgatcaaggcagagcccagcagccagcaaggcgaactcagttccagctgga

SEQ ID NO: 388386 - DNA, 122 bp, Homo sapiens
cttctgcaggcgccgcagcatgatgcccgggatggccacgttgatggccgactcgatgtgcgacgactcgtatagctcctgcggccggcagtccatcagcagcagccgctcgttgcccagct

SEQ ID NO: 388387 - DNA, 122 bp, Homo sapiens
ggttcagttttcttatagtggaaagagcagaaaagagatcacggtgtgcccctttgtcatcgttctgtcaggaagcatgtaatttgtctttagaaaccagaagcctgagacaaagaaaagaa

SEQ ID NO: 388388 - DNA, 122 bp, Homo sapiens
cgtagcagccggcgggagtgggtcggactgggctccgcgtaggcgggcagggcagctctacggttagacaagaccatagagctgggtaaagacgaatttagaacacagcggaggtaggaggg

SEQ ID NO: 388389 - DNA, 122 bp, Homo sapiens
atgggcctgcaggagagcagtagaggagagagatcctcactggcagccccatctccatggcgagtctggaatccagaatgattcctatttgagacattaaagagttaggagatgcaacttct

SEQ ID NO: 388390 - DNA, 122 bp, Homo sapiens
ctagttctcttaaaggctgttgaaataatgttcccgtgcactcagcctccccacttagtgcgggtggcggccaagaggaagtgctggaatcctcggtggcctaaccccggccctcaggacag

SEQ ID NO: 388391 - DNA, 122 bp, Homo sapiens
ctgagaggcttaccgtttccccagggcagccccggctgtggccctcggccctgctccaggcggccatgtcagtgtcctccctcggcgctcccaacaccctacctggctctgcgatggccacc

SEQ ID NO: 388392 - DNA, 122 bp, Homo sapiens
tgctcagcctcatgcagttcctcagctgggtcatagctgtacatggggagcaggtgatggcgcagccggtccaccctggggagcaggggaggggactcagctaggaggtccccccaaccctc

SEQ ID NO: 388393 - DNA, 122 bp, Homo sapiens
cggaaagaggaaatcagctacctggctgcggaccatctccctcaattgtgacagctccggcgctcaatactttcagttctgcattcggccgagcaggtggcaggaagaactgtgaccctgga

SEQ ID NO: 388394 - DNA, 122 bp, Homo sapiens
cttggaagagagaaaggaaagttctaattcaatacatcccaaacccatctctggatgtgccgcttcatatctagacctcctctggggtcccctaactcagagaaaaggctctgtcacccacc

SEQ ID NO: 388395 - DNA, 122 bp, Homo sapiens
cagacagccttggtttctatctcagctcaccagtgacttgctatgtcacctctggcaaatcgcttaatctctctgtgcctcattctcttctcctctttaatatgacaataaagataatatgt

SEQ ID NO: 388396 - DNA, 122 bp, Homo sapiens
ttattatagtatttttgcatttaaaactttaatccaactgtagttcattattgtggatgacgctcatacaaccatgaggtaaatatttggctttcttttacccagtaacagcaaacaactgc

SEQ ID NO: 388397 - DNA, 122 bp, Homo sapiens
tgcaggaacccgccgggctcagccggacgctagccccctgccgcccccggccccgccagccgcgcccactagcaacgtgctcgcgacctccagtgcccgctcagtgaagcttctgcatgccg

SEQ ID NO: 388398 - DNA, 122 bp, Homo sapiens
gtcactcggcaacatgctgcggagaagaagactcggcctcggaacagccatgcccgggttcgatcccagtcctagcttgtggcagccgggtgactgggcatgattcctgggcttcagtccta

SEQ ID NO: 388399 - DNA, 122 bp, Homo sapiens
gcaaactatctacacctatgatagaatcttatcattttacatgaagtctctcttgggggtcgattctccagacagatggcagagtgatgttttttaatttaaatccttaaatctcattatgt

SEQ ID NO: 388400 - DNA, 122 bp, Homo sapiens
gctgagcacagaggaccaccagggaggaggcccggacgttgagcacccagggttagcagccggcagactgacacaggaatcccagccctgtcatgtgctggccgtgtgacgctggctgtcac

SEQ ID NO: 388401 - DNA, 122 bp, Homo sapiens
acgctggcccgacaccagggccaggccagaaatcagcctgggagaagctgggtccggctccgaggctggtgggcacggccccacccggctttgttcttcgcggcgctgaggcggttagttta

SEQ ID NO: 388402 - DNA, 122 bp, Homo sapiens
aaaagaagataaatatttctaatctcttccttcaggctactaactcaattagtccactaacgttaaattacagaagaataaggatagtagttaagatatcttatctagcttgtcatcaactc

SEQ ID NO: 388403 - DNA, 122 bp, Homo sapiens
taacaagcaaccccttccgcagagagtggcaggagaggcctttcctgcatccggcacaggcgcggcggtctccccccatccggcacaggcgcggcggtctcccccttctccggcacaggcgc

SEQ ID NO: 388404 - DNA, 122 bp, Homo sapiens
aaccgcataggccattgacattatgctgtttccccatgtgctgaaggccctggcataatccgagcatgctctaatgtcttctgtgaacctccttctcagctcagcagcagatgcggccagca

SEQ ID NO: 388405 - DNA, 122 bp, Homo sapiens
gcacgctctccactcctactgggagggttcattctgcacaaaaggctacattacagagcccgccccaataagggaaagagaggaaaaaaaagccttccattgttgagagggcaggtcagttg

SEQ ID NO: 388406 - DNA, 122 bp, Homo sapiens
gagcctagacccgacccgatgtccgcggattcccgccgcccacgcagaggcccgctgcagcgaccaacaggactcacgtgttttgtcggaaaagaagaacgagacctactgggaagcagctt

SEQ ID NO: 388407 - DNA, 122 bp, Homo sapiens
cagaaggtggcacaggcggggtccctggcactggagcactgacagcgccttggcagggagcggcgccggcgtcttggcgggtttcccaggccgtaaggagctgtctgtctgtgggcgggcag

SEQ ID NO: 388408 - DNA, 122 bp, Homo sapiens
ttattatttttctcatttctgtcacttcagtgggatttggtaaagagagagggtaaaaaacgtaagctcagcagccactacgaacaagaaaggtgatttttagaataactagttatttactt

SEQ ID NO: 388409 - DNA, 122 bp, Homo sapiens
taagatgtgtagcagcatccctggattctgcacactagatgccagtagcacccccacaatcgtgatgaccaataatgtctccagacattaccaaatgtctcctgggtgatgaaatcacgctt

SEQ ID NO: 388410 - DNA, 122 bp, Homo sapiens
gctcgctccgccgcctctcttctggggctgggggccgggtcaggtcgggcccgaggggctcgcttggcggtgaagcgccggacaaaggcggcgccggagcgggcgcaggtggtggcgtcggg

SEQ ID NO: 388411 - DNA, 122 bp, Homo sapiens
tgcactgtgatccctgcccctgctcgactgtgtgaggcagaagggccaggagcagggacccgaggccacctgctctgaaccccagccttacaaaagccccgctggcgacagatctgtttcga

SEQ ID NO: 388412 - DNA, 122 bp, Homo sapiens
tcgggcagagggatgcagggtgggtctgcgagatgccgcccctgggacacagggtactgacgtgttcaggacgtaaagcacagtgtgaatgatgtacgggatcaggtggatgttgctctccc

SEQ ID NO: 388413 - DNA, 122 bp, Homo sapiens
agcccggcgtctggaagcagcgtggggtaggggccgctccagtaccccctcctccagtgtcgaaggtgggcaggccctcggccgggtggatgagccgcgactggagggggcggggcctgggc

SEQ ID NO: 388414 - DNA, 122 bp, Homo sapiens
ctgcgagcccccgggctcgccagacaaccccacctgcctgcgtcggaaaccttccctcgtcgccctgctgaccagagagaacaggtagcgagcttcttccccggccgtctctcgaggcggcc

SEQ ID NO: 388415 - DNA, 122 bp, Homo sapiens
ggtcatgcctgctgcctgctgccgccaccgccgccgcgccgctctgcgactgctgctgcccggcccaagatctacccgcgctctgccctgcaggagggcagctcctgcgtcggaacacgtgg

SEQ ID NO: 388416 - DNA, 122 bp, Homo sapiens
gggaaagtcacagaacctctctaatccttatgttcctcaacctctaagcttctgtatttccgacattgttcagggaagccaactgcttaaagattaatctcagatcctggacccatccccca

SEQ ID NO: 388417 - DNA, 122 bp, Homo sapiens
ggaagccattttcatcaggaagaggatagcaaattaggatttctgaaaggccacccaggccgcatggcttggaaagcactcaggagtgggtgtaggcagaccagttaggaggtggttgcagc

SEQ ID NO: 388418 - DNA, 122 bp, Homo sapiens
agggcagataactgaaaccacataaggctttggaatcctgagaaacaagaaatccaccaacggagaaggatttatcatctgtttcctttaaggagggtgcaaagttgttctaacagtttccg

SEQ ID NO: 388419 - DNA, 122 bp, Homo sapiens
gtgctatgggtttctgaaatccaggcttcatttgttgatttggggtttagagcccagagacgagactcttgcaatgtcttcatcttacctctgctctctgaaggctgagctgagggctgacc

SEQ ID NO: 388420 - DNA, 122 bp, Homo sapiens
aatgctagtaccattgagtggatgtttaaatggtaccaagaaaatgatgcatgaaggacccgcttggatcagtctaaagctaaaagcattcttggctacaaagagctcctctgtgttgaggc

SEQ ID NO: 388421 - DNA, 122 bp, Homo sapiens
agtctgtatcagtttaaagatgtgaataatacaagtatattcttgtacttataacaggaacgaagagtggagaagaaagctaacaaattagcatttaaactggagaaaagaaggcaagaaaa

SEQ ID NO: 388422 - DNA, 122 bp, Homo sapiens
gaggcagcgccctgctagtccgcgcctgccgggcgagctctcgcgaggaagacgggcaggcggcccaactaggccaggggccagaaccgaccactcgaagagggagaaggagggcctcggat

SEQ ID NO: 388423 - DNA, 122 bp, Homo sapiens
ttgaaaccgcatacagcacaactcaagtttgcatcagactgggaagcgaacttaagccagcggtgcgtggcccaggagtgggaaaggaaatggatgcctgaagtggaagaggtggtgcagag

SEQ ID NO: 388424 - DNA, 122 bp, Homo sapiens
ggcgccgccggatttaagcttaatctgcctggtgctcagcacagcatcctggctgtggcgcgtgctgactgagctagtcttggggtcctggagaagggggctggaggcatgcccacagcctc

SEQ ID NO: 388425 - DNA, 122 bp, Homo sapiens
cggcccagggttgggggtgtccggcttgcccccagggggccagcggggcctctgttatctcgctccagaaccgacatcgccagccaagaccttcctcgtggagccctcggtctggccaagga

SEQ ID NO: 388426 - DNA, 122 bp, Homo sapiens
cttacttaaaggttcatgggaagcactcaatgaatggtagtgttaatactctgttaggaacggggcagggaaggtgcaggcacctcacttcacagagaggtgcagaccaaagagaaacaggc

SEQ ID NO: 388427 - DNA, 122 bp, Homo sapiens
gtggctaaacagaatattgagtttattcagcagattttttatcctctgcaccctcattctcgtgctaccatctggggactcagggctcagctccctgacagagtagtgtccttccccactct

SEQ ID NO: 388428 - DNA, 122 bp, Homo sapiens
ttcccttgccctcgctgctctctccttagaggcgactctttggggaagggccagcaatcccgccttccccggccccagtagtcacccactctcccaccccacctctgttccttttcgcggcc

SEQ ID NO: 388429 - DNA, 122 bp, Homo sapiens
gcccctaggggccaactccagcggctattttggggctggacatcccgcagcttttcaaggcgtgcctttggtttttttaagaagtgctatctaaaggaaaagctggactatgactctgggga

SEQ ID NO: 388430 - DNA, 122 bp, Homo sapiens
gcccgggcgcctccgctgggggcagcagaaagcgcccggcatgggcgggggtcttcgcagcgcctcctcccggcaggccgcggcgcgaagcacctgtccccaatcttccatccccgacgccc

SEQ ID NO: 388431 - DNA, 122 bp, Homo sapiens
tgggcaagttatcctggccgcaccacgtggaacggagtagatagagctcgggaagctgagcgcagggcggacaacgggaaggccagagccgtgggcaagcacgcggagggcagcgaggggca

SEQ ID NO: 388432 - DNA, 122 bp, Homo sapiens
agccagtggtcctcaaacctagccacttcacagaaccacctggagagtttttaatatccacggtcccaggtcacagccaaaaccaattgaatcagtaaggctaggttggacctaagcttcaa

SEQ ID NO: 388433 - DNA, 122 bp, Homo sapiens
tgcctctctgcagagggaggcttggttcctggggagagggggcagtggcggtgtgtgtcccgcagcaccccaacacgttactgctgctcctccagggaccttccaggtcaccccccggcccc

SEQ ID NO: 388434 - DNA, 122 bp, Homo sapiens
ctgccttggttggggcatggtgagggtgggtggcagcctggggcagggctgcgagggcggcgcagggcgggacgggtggggcctgaccccgccccttggcgcagctgtaaataggtaaatag

SEQ ID NO: 388435 - DNA, 122 bp, Homo sapiens
tttaatcattgcagggacgcctctctgattatacactcacgtttcaagggtgtcagaccacgcagggacgcctgccttggtccttcagccttagcgacaagtcccgctttcctggggcaggg

SEQ ID NO: 388436 - DNA, 122 bp, Homo sapiens
tctgtttctctcgtgaaattctaagctgcttgaggacagaatctggttttttacttctatcgtgcttaatatagtgccaagggcatagtagctgctcaagaaatatttattattttatttaa

SEQ ID NO: 388437 - DNA, 122 bp, Homo sapiens
atagagcaataattgagcctacagagacaacttatcagaaaattcattcaatataccttacgagatcatccaatagataagagacaactctagaacagcattcagaacatagtggcactcaa

SEQ ID NO: 388438 - DNA, 122 bp, Homo sapiens
tgttgacccaacagctgggcattggcatcctgtcaatctgccgagagcctagaaatagtgcgggggcagtctgctggtctcattgtgtcagaggaagcaaccatgcaggtgctaaccaagcg

SEQ ID NO: 388439 - DNA, 122 bp, Homo sapiens
tctctacaaccttaatacatcctggcaatcactatactgaatgattctgtgtcctaacctcgaacaaattctcatcttggccacgttttgcaaaaattttcaagtacacatgaagctaatga

SEQ ID NO: 388440 - DNA, 122 bp, Homo sapiens
ctctgcacgcatcgcacggcgccctctgcccgcgcccactggcgtgcccgtcggcatgcccgggccccttcgaagactgcttgcttctggagtgccagcggcctcctggcccagtgccccat

SEQ ID NO: 388441 - DNA, 122 bp, Homo sapiens
cagccgcttcctatctgggtctggcaagaggatggcaaccggactagagttaaatacacacgcactaagtggcaggcactgaaaaggacgccaggaggtgacacctggccaggggctgaaag

SEQ ID NO: 388442 - DNA, 122 bp, Homo sapiens
actgatcgctccagcctttatctcagctgtaacttcccagtcgaacagggctcgcttcggcgggccagggctctcgcctttgctgaagaattctggctcaggaaagatggagaggctggggg

SEQ ID NO: 388443 - DNA, 122 bp, Homo sapiens
ctgccgcggcccacgcgtcttgggactaagctgagttgctgaaagcccaccgccctgcaccgcgattgggctccgccatttcccctttgcctgccctttcacctcccactcctacaggccag

SEQ ID NO: 388444 - DNA, 122 bp, Homo sapiens
agggcacaaggctaagctcagcaccttcctccaccctcctcactgtactcaactcctaggcgggcactaagagcagctgccttcctggacccaccttaacctcttgtgactcaactcccctt

SEQ ID NO: 388445 - DNA, 122 bp, Homo sapiens
ctcctgaaatgcagctggtgccgctcagcaatgcatcgccttgtcagggtcctgcagcaacggtgcttacctgttacagtcgtgatggaagcttttgtttccacaaaccagtaaattctcca

SEQ ID NO: 388446 - DNA, 122 bp, Homo sapiens
gagggaggcaaatgagcattgagaaattctgggacaggagctcggcgagaaaagaaggggcggaagttcaaatagctgccacttggagggtttctcttagactatggacgctgtctcctctc

SEQ ID NO: 388447 - DNA, 122 bp, Homo sapiens
ctggtggctggagggggcagaggtcagacgcctcgaaggagggcgccgtgagggcagagccgcggccacctctaccgcagcagcccgtcgggccggacaccagccgcagccgccagcccggc

SEQ ID NO: 388448 - DNA, 122 bp, Homo sapiens
ttgcggcctctcctcccttctcacccatcctgtggcctcagctctgcacctccctggcagcgctcatcttggaagcctcctgaatgtcatcaaaacactggcttctcctttcccaagggagg

SEQ ID NO: 388449 - DNA, 122 bp, Homo sapiens
gccgcgccgcaggcacacgcctccttcccgctcgccgcgggcgccgagtctggggctcctcgcgtcacacgggagcctcaacaaagggctttgtggggccctccccacccgccagggagggg

SEQ ID NO: 388450 - DNA, 122 bp, Homo sapiens
ggcgagaaccttcttctctttgacccggcggttctgaaaccagatggtaatctggcgctccgagaggctggtggctgccgagatcttgcgcctcttgtccttggtgatgaacttgttagccg

SEQ ID NO: 388451 - DNA, 122 bp, Homo sapiens
tcaccctcctcctctggcccaggggggagcagtgcggtggctgccggagagccaacaccacggatcggccccacgccttccaggtcattctctccgaccggccctgcctggagctaagtgcc

SEQ ID NO: 388452 - DNA, 122 bp, Homo sapiens
ctcccatggtccacagcttgctagacaccacatggctaaatttctgtggctcacagagtccgtgtcgtgtaaattggccaatgtttgtgctgtcttgagttctttggcagttgcgctatccc

SEQ ID NO: 388453 - DNA, 122 bp, Homo sapiens
aaataagattacagaaagccacagaaggcagtattcaggaatttaaaagataaacatgcacggggtaattgaatagcattctgctgaaaaatgagctctcagagctcataatcgaggctatg

SEQ ID NO: 388454 - DNA, 122 bp, Homo sapiens
tgagcccaggtggtccaggctgcactgagctatgactgcaccactgcactccagcctgggcgacagaacctgtctcaaaagaaaaagaaatgttaattaagcgtttgtgctgttaagggagg

SEQ ID NO: 388455 - DNA, 122 bp, Homo sapiens
ggctggggaagacaccagccaagttcagagccccaagtcggcctcacttccacaactcagcgtcagggacaccgtgggcgtttctgtttcaaaacgcttttctccagcaaagaacgtaacct

SEQ ID NO: 388456 - DNA, 122 bp, Homo sapiens
tacacctgggggaccccagcacggtggagggacagcctggggtccacccgagtagtaggccgcccctcttccttgccccttctcccttctccctgccgggtgctccccgcagggcatagagt

SEQ ID NO: 388457 - DNA, 122 bp, Homo sapiens
tgggtagcttgtgtatgtgcctgtggttcatgaggccaagacagctgaggcgtgcctggccgtgtggctgtttctcatgatgccgcagccgttcttcagcagataccttatgctcagtaacc

SEQ ID NO: 388458 - DNA, 122 bp, Homo sapiens
acatgacccatgcctgggacagccatggccagtacccagccacttagcacccagaggtgccgcaactccagcccacacctctaagcagggcccccagcagaagttgtgcagactgcaaccct

SEQ ID NO: 388459 - DNA, 122 bp, Homo sapiens
tctttctcctagtgggtaagagagaactcgttttctattagtgaagttctggttttagctcggatttcacactcccaagggacacagggccctaaaagttgtgcaccacgttttcgagatac

SEQ ID NO: 388460 - DNA, 122 bp, Homo sapiens
cctgctgttttgcacacccagtttgaaatcatttgttacagcagtccttggaagctaatacggaggcaagttgtggcatgggggccagaggctgggaggggttcagtcaggcagggcttcct

SEQ ID NO: 388461 - DNA, 122 bp, Homo sapiens
ggccgcccgcagggctcgcctgcttctccccattgtgttctcagagctgtgggacccagccgcgcgcgcagccgcacccgcgccaacgctggaaccgaaggctcatggaagcggggctggca

SEQ ID NO: 388462 - DNA, 122 bp, Homo sapiens
gtgggtctggataacagtttggagcaaatcaattagggcttgtggctcttcggtatagggcggtgtattgtttttccagttgagaaggtggacggaggtgaagggctggtacccaaaaacac

SEQ ID NO: 388463 - DNA, 122 bp, Homo sapiens
tgcggctgcgcggcagggcgcgcgcctccgttgccaggataccgcctcctccacccccggcgcccagggcccttttgtttccaagatggcctccgaatcctgttttagtgcgccaggaacaa

SEQ ID NO: 388464 - DNA, 122 bp, Homo sapiens
cctcggcctcctccccgcgcggcagctggtgcctccccggccctacggggctcacgcgcacgacacagccacaagatgtccgctctgacggaactactgccagctgccacgctccgcccctc

SEQ ID NO: 388465 - DNA, 122 bp, Homo sapiens
aatgttagtgatgggtgccatatctacacattcatcgagattcctgtttgcgagccctggcgtccattttttgctcataaacgtggaagtcaagatgatcagagcatcctgagtatctgttc

SEQ ID NO: 388466 - DNA, 122 bp, Homo sapiens
tggctatttccgtggcccaagtaatagtcaggccgaaatctcgcgatacaacttagcttccgggaagaaggcgagcggtgggaggagacgcgacgtgggggcgccatttttctcgccgcgca

SEQ ID NO: 388467 - DNA, 122 bp, Homo sapiens
gaccaaaactgttagaaggaaaatgtagtgcctctataacatcttttacttgactaccaacgctaaagggaccagccctggatttgtctggtttcctattttgtctttggtgcctggcacat

SEQ ID NO: 388468 - DNA, 122 bp, Homo sapiens
aaccccaaagaagacgtgaagctggaaacccatatcagagtgccctcttccaccgctggccgggtgattggcaaagggggcaagaccgtgaatgaactgcagaatttaatcagtgcagaagt

SEQ ID NO: 388469 - DNA, 122 bp, Homo sapiens
gggatcttccctagagtctgggtcacgcccctcttcctggagggcttcaggcacacctggcgcccaggaactgccgccgaccgggctgcgccctctctcaagcctgggtgtcccctccgctc

SEQ ID NO: 388470 - DNA, 122 bp, Homo sapiens
gggacgcgtctggatcccccgactatggcctgagagcgggatgtgagtggcctgggccctcgcgagaccccgaccccgcccgcggcaggtggccgggcacagccgagaagtaagccctgcca

SEQ ID NO: 388471 - DNA, 122 bp, Homo sapiens
gacaggcccacgttattgacttcttttcgacgacgccagcgaccggaagcagaatagaggcgccagaagatgcgccatcaggatacacattggccaatcagcttcagcaatggagcgtgcaa

SEQ ID NO: 388472 - DNA, 122 bp, Homo sapiens
cttattaaaaaaaacaaaacagaacattcatggatgggcaaagaaaggaaacaatgcagacgcctttggacttcaagagaaagcccatcaggaatctctgagagtgtcagctgagagagttc

SEQ ID NO: 388473 - DNA, 122 bp, Homo sapiens
tgaatgcgtgcttccacagtggagtgccagaaagaccggcagcatttctgagaaggtaaacgggaggaagtaggcttgcttagtccacttggagaagcaggtctgggattgttgtgagagtc

SEQ ID NO: 388474 - DNA, 122 bp, Homo sapiens
agtgatgaatgtctcatgtaatctgttaaatactgtacaggaagtgaaaaccagaatggtcgtatgagtgctcaaagtacagtttctactgaatgcatgttgcttttgcataatcataaaat

SEQ ID NO: 388475 - DNA, 122 bp, Homo sapiens
cctgtggcaggtgggggagcctcgggattaaaaaccaacctgccaggcagagagcgcccacggcacgagcgcgcgcgcacgcgcgcacacacacacacacacacacacacacacacacacac

SEQ ID NO: 388476 - DNA, 122 bp, Homo sapiens
aggctgaacctcattgctactcccagaaacctggatctctgtgtttgcctcatataattccgttgcctgtgttacccctgtgcacagcctctcactgtgatggggtgaaagactggaccaga

SEQ ID NO: 388477 - DNA, 122 bp, Homo sapiens
acgaggacacggggctgggaaaacagcatacctcatctggaatggaaatctatcgtctctcgcccttgcacgggtcacgattatacaccttcgtgacctttagcgggcttacatatgtatct

SEQ ID NO: 388478 - DNA, 122 bp, Homo sapiens
gtctagactctggatctctatttttaggtcgaagtgctttattcttgactcccgaattcccggaaactattaccaaagcagcttagttttctctccaccctgcctgggtcacaaatatgacg

SEQ ID NO: 388479 - DNA, 122 bp, Homo sapiens
ccgccgtctctgctctgagccatgtttgcaactgcggcctccgcggccctctgccctccacgcccctgccgcagcagtggcggtagcggtagccctcagagtccacttcactcgcctcagtt

SEQ ID NO: 388480 - DNA, 122 bp, Homo sapiens
tcctgggcatcggcttcttcactctctgcttcctgatgacgtctctgggaggccagttctcggcccggcgcctgggggactcgccattcaccatccgcacagaaggtaccttggtggggcaa

SEQ ID NO: 388481 - DNA, 122 bp, Homo sapiens
gtccagacgctgctcctggctggggtggcgctgcagggagaaccgcgagctctcaggggtcggcgggtgacttctttccggaagaaagcgaggaacgcgctctgcggggtgagccggactcc

SEQ ID NO: 388482 - DNA, 122 bp, Homo sapiens
cgggggtctcttcctggctctggagactggagctgcccagcttcagcaaaacagggttcccggagcctcagcttccagaactggggatagagcgccggaagcttccccatcaaccccaagca

SEQ ID NO: 388483 - DNA, 122 bp, Homo sapiens
gctgcccgcctcaagagcgtctgcgtgcttccagcgttaagtggaattccaagcagcctccggggcacagttagtctggtcactgcggccagactgccgcctcaggacccagagaacgcagc

SEQ ID NO: 388484 - DNA, 122 bp, Homo sapiens
acctcgtgatccacccgccctggcctcccaaagtgctgggattacaggcgtgagccaccgcgcccagccaaagagctccgtgttattgcgttaattcaattcatgcattaattcatgtgtta

SEQ ID NO: 388485 - DNA, 122 bp, Homo sapiens
cagcacataagggatagtttattccaggaaaaaccgagcttcacttctgctgtgaagctgcggcctgagagtcaactgccatttcactcttttgttccctaaggagatggcaggagatgcac

SEQ ID NO: 388486 - DNA, 122 bp, Homo sapiens
agctgggattacaggtgcacgccaccatgcctggctaattttcatatttttagtagagaccggggtttcaccatgttcgtcaggctggtctcaaactcctgacctcgtgatcttccctcctc

SEQ ID NO: 388487 - DNA, 122 bp, Homo sapiens
ggggcggcgggaggctcagtggccggccccgggttgaagttggtaactgagcggcaactccggcgggcgcggagttacagctcgtgacggcctccgagacgccagctgccccttctcggatg

SEQ ID NO: 388488 - DNA, 122 bp, Homo sapiens
gcgtgcatgtgtatttgtgaggttctgccaggcgcacacctatgccggcggcctccaagacgtggagatcactgcggcgctttctcgccccgccccggcccctgcaggccccgcccttggtc

SEQ ID NO: 388489 - DNA, 122 bp, Homo sapiens
gtgcggagttatgaaaatttggtaaatataaaagtcccggacgcgaccgcccgtagcctgcggcccctggcggttgaggagccgcggcgatccttggtcttcaccgcagcagccaagcccgg

SEQ ID NO: 388490 - DNA, 122 bp, Homo sapiens
gccccgcccctcccagccaggccccgccccaccccgcgcccccggcccgcctgtcgcgtccgcagaattaactttggactcccgccagggagcgacctctggatccccgcaccgaggctcct

SEQ ID NO: 388491 - DNA, 122 bp, Homo sapiens
tggtctttgccacggtggggggcaggatgctgggctggatgggcagttgctgtgttacagcgtgccacatcctctgcttctccaaacacactggaaaatgacctaagaccacctgcaacact

SEQ ID NO: 388492 - DNA, 122 bp, Homo sapiens
gggaggcgcccgagggctccggtcccgcgacggcctgtcgggagcagaacctaggggctgcgggcctacccagagggacaggatgaccaagccagtgccgaggtcagggtgacacaagtggg

SEQ ID NO: 388493 - DNA, 122 bp, Homo sapiens
ccgggctccgctcagtcaccaccaccgtcgccgccctcttcctcaggctcctcggcgacccgcccacttaaccgcaaccaatgagagcagagggagacagaaattgccgtacggaggcccgc

SEQ ID NO: 388494 - DNA, 122 bp, Homo sapiens
ctgtggggaaggcgtcagtgtcgggtgagggaacaccagcttcacctcggctcatctgggcgtggcagacgactgcttcctcacctggagagtgttcaaggacagcaagaaaaatgagggac

SEQ ID NO: 388495 - DNA, 122 bp, Homo sapiens
ccggtgtgaaactggagagcctcacgtggggctgggagccgtggggctgggagccgagtccggagtccatcagcttgccagcttgcctgctgaggcctctttttgctctggggcccctggct

SEQ ID NO: 388496 - DNA, 122 bp, Homo sapiens
atctgctggggtgtgtgcaggggcgggttaaaacagatgctccgttagagacccccacctcgccgcgctcatccgcccagcctgggccaccccagcccgcaagcacccttttgacctgcagc

SEQ ID NO: 388497 - DNA, 122 bp, Homo sapiens
tcacgctgaccagcgcctcacacagccccgggctgtgcttccacctgcgccaggccctgacggagccccttcacgtcaccgggtgaatcctcggagtccaggggctgccatcacccccttct

SEQ ID NO: 388498 - DNA, 122 bp, Homo sapiens
gatgcctcccggggctgagggtggctttgatgtgagcagtgatcgcagccatctccagggcgctcaggcccggcccccaccggaacagctgaaggttttccggcctgttgaggatccggaga

SEQ ID NO: 388499 - DNA, 122 bp, Homo sapiens
gcttagtgaatgaggatgaactttatcttcgaagacactggaaggcctgacgcaggggaacgcgaccagattcaggtttgaaaaggctccctctggctgccatgcggagaacacaccctggg

SEQ ID NO: 388500 - DNA, 122 bp, Homo sapiens
cttgaggaaaaggaaaaatggtctaagggcctaatatggaactagctgtcagctcaactccgccccctactcctctgctggggcgttgcccagggagtccaccccggtacgctgcagcggct

SEQ ID NO: 388501 - DNA, 122 bp, Homo sapiens
gggctcgggacctgcagcccgctatgcctgagactcccacccactccatgggctcctgtgcggctgagcctccccgacgagcgccgccccctgctccagggcgcccagtcccatcgaccacc

SEQ ID NO: 388502 - DNA, 122 bp, Homo sapiens
cgtgggctccagtttcagccacgtaggaccgggtagaacacagaaattctagtttcctctcgggtgggtgcagaaagggcctggggttggctcagggagggggatgcagaactaggtccaga

SEQ ID NO: 388503 - DNA, 122 bp, Homo sapiens
cggcgcactctccaggccagcagcacaaaagattgctttgctcaatcttgagcttgggtgcgcccggcacgagctccgtgacgaccattctcagctgctcctcgtccccagtaattagcctg

SEQ ID NO: 388504 - DNA, 122 bp, Homo sapiens
cgacaatggtgatgggacctgctccgtctcttaccttcccacaaaacccggggagtacttcgtcaacatcctctttgaagaagtccacatacctgggtctcccttcaaagctgacattgaaa

SEQ ID NO: 388505 - DNA, 122 bp, Homo sapiens
ccaggtcgcccgggttcaggcagcggatgcggttgcggctgagctccagcaggcgggtctcggccgggatgccgtcgggcacggcggtcaggcggcggcgcgtgcaggccaccgcgcgggtc

SEQ ID NO: 388506 - DNA, 122 bp, Homo sapiens
gcacccgggggcgctcacctgtgaaggtgaggctgggtcttccgggccttgcgggaggcgcgccccacggagctggggagctgggtcgtcggtttgagtctgaaccccacttcctctgtcct

SEQ ID NO: 388507 - DNA, 122 bp, Homo sapiens
gttcagtgatgaacacagttttctgttacacagttttgagggttagtgagtaaagacttccgttggatagaagcacaagttatgatgaaaatttgtctccaacattttcaaccaaagattgt

SEQ ID NO: 388508 - DNA, 122 bp, Homo sapiens
cctatgtggctggcattgtgtttctattggtctgaggagaagggtcctaggtagagacaacggcaaaggtacagttcctggggcagaaactgaaggatgctgaggcagagtcggccggggaa

SEQ ID NO: 388509 - DNA, 122 bp, Homo sapiens
ccaggacgctgaggcagcgcaggccccacccggccccgccctgccccgccctgtcccggccggctttccagtactagtcctctggcgccggctcccagcccctctcgtacccttcaaatcgc

SEQ ID NO: 388510 - DNA, 122 bp, Homo sapiens
gtcctcctacagttgtcagtatgacagcataattccccctgatttcggctatgtaaacaccgaggcacagtcatttcccccttacaaggccagagatgttgtcagcctggggtttttgtgca

SEQ ID NO: 388511 - DNA, 122 bp, Homo sapiens
gttcagatgagatcatctcaggaaccaagagcagcggctttcatgtgaagtgaatggtgccgcctggggatgtatctttggtaagcaagattgcaacacagcagggagtttacccagggcag

SEQ ID NO: 388512 - DNA, 122 bp, Homo sapiens
gccataactgaagtcataatgaatgctggtaggtcctgcccttcaagagtcacagctcttcgcagattcagaaagaaggtagtgggcaggactaaggagaaaggcagagctgtttagcctcg

SEQ ID NO: 388513 - DNA, 122 bp, Homo sapiens
tagaggtgatgctgatgctgtatgttggagacgcttctgagtgtcctcggaacgttcccacgtgctctccaggccatgctgggcagctggctttcctcccgtctagctgggattctctctct

SEQ ID NO: 388514 - DNA, 122 bp, Homo sapiens
accggaagagaggggccaggaggggctcctccagagcgacttcggctccagtagggaaaccgccgaggctcccccagctccagggagcgccggggacgcaggcgggaagcctccatcgggca

SEQ ID NO: 388515 - DNA, 122 bp, Homo sapiens
ccattcggtgagccagttggcgtttgccgtgcacttactcttctgtggtcccaatgaggtcgatagtttttattgtgaccttcctagggtaatcaaacttgcctgtacagatacctacaggc

SEQ ID NO: 388516 - DNA, 122 bp, Homo sapiens
gtcattaggcagccctgtgatgaagggagcaaatttatcccacagaaattcctggcatcacgtttcagtcaaagatgtactcaggacaatgactgagagcccactaatgttctggggtagtt

SEQ ID NO: 388517 - DNA, 122 bp, Homo sapiens
agtcagaggagaaagaaaggcccaaccggaggccccaaatccacccagagcccagaagcccgggtttcccaccgaccggctgcggtctttgtcagctctctggcgctatctgctgtccttct

SEQ ID NO: 388518 - DNA, 122 bp, Homo sapiens
acgggctgtacacctgagggggaaggacgggggcggcggcgcgaggaggaagggcttcgccgccaatctgtccctaaccagtctgcctctcaacccctgcctgaggcggaggcggtgcccgg

SEQ ID NO: 388519 - DNA, 122 bp, Homo sapiens
gatcatagctcactgcagcactgaacttctgggctcaagttatcctcctgtctcagcctccgaagtagctaggaccacagacacgtgccactacacctggctaattttaaaaagtatttttt

SEQ ID NO: 388520 - DNA, 122 bp, Homo sapiens
aagtcactgagaagagtggcaaggcgggcacgacaggatccagaactcgcttttacggaacgcctactgtgtaccagacctatgcttgacatttaacttacatcgctaattctcaggaaaac

SEQ ID NO: 388521 - DNA, 122 bp, Homo sapiens
tggcctggtggaggtggcgccagctgctgctggacctcctcagtctcctggtcgatggcgcgagtgaaggcagctatctgcaggtaggtgtcctggcggaaagcctgaagtcgctggcgcac

SEQ ID NO: 388522 - DNA, 122 bp, Homo sapiens
aaactgatgcctggagtctgtgacctgcctaggaccacagaactcggtagtaggaaaaatcgtatttttaaatccagtcctgagtgggaagatttgaggaaatagctaatattgaggagggg

SEQ ID NO: 388523 - DNA, 122 bp, Homo sapiens
aggctgatgggctgggcagcgggtctccctcctcccaggtgcgggaagcccccaagacgccgagaagactctgcagtctcaggacgcggccagccagcccaggtcaggcagcggcccaggcc

SEQ ID NO: 388524 - DNA, 122 bp, Homo sapiens
tccagctacggagtgatcgctgccggaggggtgcgccgcacacctcagtttctccctccacgcccacctccttagccagggaccaggggcttgtttggaatggtttttaacactcggaagtt

SEQ ID NO: 388525 - DNA, 122 bp, Homo sapiens
ctccctttcttcgcaagcgttaacctgcgttttactcgtaaaaatttgctttctaggcttcgtataattgttctggtcttgcactttatgtgtgcattagccttgagtttgcttgttgtttt

SEQ ID NO: 388526 - DNA, 122 bp, Homo sapiens
cctggttcgcccgcagtttcggcctatcaggttgagtcgggtaaaccaggacgggccaagcggcactctcattggatatcactggtgggggcgggaagaaggcggagcacgtgcccgggcgg

SEQ ID NO: 388527 - DNA, 122 bp, Homo sapiens
agagctctggaaaattgccaagagcgcctcctctctccaaggggaatgaccaattttcaccgccactggaagggtgtgagctgtcccaaactgccctctgggattatgcttactcggttcca

SEQ ID NO: 388528 - DNA, 122 bp, Homo sapiens
gcccccacccacgtcctccccgcctcccctccactcccccactgcccctaggttccttcccggctctgagcgggttcttcagggtttcgcggcccccgctgtatctttacttttacccttta

SEQ ID NO: 388529 - DNA, 122 bp, Homo sapiens
ccggaccccctcagcgcgctacgcccccagccgcgctcgccctgcctgtgtccgccattacgcgattccccgccctgggcggcagccacaccccgccaatggccctgattggctcactgccc

SEQ ID NO: 388530 - DNA, 122 bp, Homo sapiens
gggcccgcggcggctggtggataccttcgtgctgcacctggcggcagctgacctgggcttcgtgctcacgctgccgctgtgggccgcggcggcggcgctaggcggccgctggccgttcggcg

SEQ ID NO: 388531 - DNA, 122 bp, Homo sapiens
tacgaacccaccagaaggaagaaaccgcgaacacatccgaacatcagaaggaacaaactccggacacaccgcctttaagaactgtaatgctcaccgcgagggtcagcggcttgattcttgaa

SEQ ID NO: 388532 - DNA, 122 bp, Homo sapiens
taggaagtagtgaatgaagcacaaaaccaaacatctatactttttttcagattttcaatacgtagcatttattgtacaacactgagaagtagtgtgttcttgacatttgtcttggcagaatt

SEQ ID NO: 388533 - DNA, 122 bp, Homo sapiens
aggcttggctcctgagccccctccagaaaggcctgggcgggaattcctgtgagccttgcccgccgggtccccagccggcgggcgcccagggccctctccaggtaggggtgtcggccttggag

SEQ ID NO: 388534 - DNA, 122 bp, Homo sapiens
cgccaccattggcaagactatctactatgcgtaggcatgggaaccagttaaagaaagtgtcgattcactagagcgaagctgagaactcagtggcctttgtctgtggtgaatgtatccggaaa

SEQ ID NO: 388535 - DNA, 122 bp, Homo sapiens
gaaaaaggcattagccagtcatcctgcccagcagcccaatattgagcctgtgtgagttgccgtttgtgtagtgaagcaatagaggccatggtctggaatcagaaaccctgggttcagatact

SEQ ID NO: 388536 - DNA, 122 bp, Homo sapiens
ggctagtccttgccgactgagctccttctctgggcactatggaagttagccaggtacgctcggagtcttagagactgccatttctcccttccacccgacttctctggaaggagaggcaggcc

SEQ ID NO: 388537 - DNA, 122 bp, Homo sapiens
tcggcgaggggaaccgccgccccccctctccgccgccccctcccgctcccgctccgctggcggccggggaagttcccaccaaaggagtcaggccgctttgtgtgtgctttcggggccaccgg

SEQ ID NO: 388538 - DNA, 122 bp, Homo sapiens
ccgcctcccaggttcaagcgattctcctgcctcagcctccctagtagctgggattacaggcgccggccaccatgcccagctaatttttgtattttaagtagagacagtgtttcaccatgttg

SEQ ID NO: 388539 - DNA, 122 bp, Homo sapiens
atggagtcttgctctgtcactcagtctggagtgcattggctaactgcaacctctgcctgccgggttcaagcgattctcctgcctcagcttctggagtagctgcgattacgggcatccaccac

SEQ ID NO: 388540 - DNA, 122 bp, Homo sapiens
agcggtcgttgagcagctccatgttgctctgctcctcttccagctcctcctccagctgtgcgatccgagcttccagacgccgcttctcatccagcagcgcggacctggcggggagaggagga

SEQ ID NO: 388541 - DNA, 122 bp, Homo sapiens
cgagacccgaacggaataccccctgataaatggactaacaacatttccagttaccagccccggccgtggccaagccttacttctgagttaaacctgaagaataatttccattgacagttcct

SEQ ID NO: 388542 - DNA, 122 bp, Homo sapiens
ccactagggggcgtcaaagtccatgcccttaaaaagccaggaaaacggggagggaaggggcgaggatacaggaagaggcccttcatttcccaagggaaactggcatcaggaaaagcctcctt

SEQ ID NO: 388543 - DNA, 122 bp, Homo sapiens
agagcgatgtggagctctggaggcagatcccggctctgccactccctggcctcaggaccccgggcaactcagggcagctttctcacctgtaaaggaggaactcatggccccctcccagggtg

SEQ ID NO: 388544 - DNA, 122 bp, Homo sapiens
cagaggaactcctgcaatctttccgggggggacacagttcaacccgtaccactgagcagtcgctgactgggtcaccgatgaaggcgtgaaaagtcacgcacgggcctgcccgtgggcccgcc

SEQ ID NO: 388545 - DNA, 122 bp, Homo sapiens
ttaagtgacagacagtcaccacattttttatcttcgttttgctgatgtgggagccctctccgtgtgtcctatgaatagttcagcatcctcaggagtgagtctcatttctgtaatgcttcata

SEQ ID NO: 388546 - DNA, 122 bp, Homo sapiens
cactgcgcctgcgcactctccgtagccggatccaccttcagcgtctgcgccacgtgactccgatccaccctcgaggttccagtggaataacccccttctgaaaaatggtttcacccgctcct

SEQ ID NO: 388547 - DNA, 122 bp, Homo sapiens
cgttcgtgcgtggagcagtcggggctggaggcgaggccgccgggcgggcaggggttgtggcgcggcaagcggcgggccagcgacggcgcgaatggcggactctcagctgttctgtgtggcgg

SEQ ID NO: 388548 - DNA, 122 bp, Homo sapiens
tccgcgagcaagacaggctgcgattcgccgagcgcggcgcaagtcaactgcgcttcgcgccgcagtcagcaaccaatcacaagcctccgaagaaacgccgcgccatatgcaaatattcctcc

SEQ ID NO: 388549 - DNA, 122 bp, Homo sapiens
gcagaggaaatgggcgcggccgccccctttctgccgcggcagtcagcgcagcgcccgctccgcccccgtcccgccccggcctcgcgttccgccgccagtcccagctatccaggtctccgtcg

SEQ ID NO: 388550 - DNA, 122 bp, Homo sapiens
gtctgagaggggatgcaggtgcccgcggtggaaataaagatggctattctggccggcaagcggcgcctcccgagctggcactgtgcgagcgtcccgcaacatcctctcgcctaatcttcata

SEQ ID NO: 388551 - DNA, 122 bp, Homo sapiens
tcgccacgccagcccatcgggctacggaccgcccaggggggcggggcttgggagttggggcggggcccgggtgaggggcggggcctcggggcgtcgcggacgtcctggcggcctactgcgtg

SEQ ID NO: 388552 - DNA, 122 bp, Homo sapiens
ccaaacatacagcaaccaccattctcaagcacaacgggagggtcacctctgaaaggccagcgccagggagaagtcacaaagggtgggagcccctgccagcccttcccagcccctctcccatg

SEQ ID NO: 388553 - DNA, 122 bp, Homo sapiens
tccgcgcctccattgcgctctcctcttcacttaggtaggtcctgccgcgttgaccactggcgtctcgctggtggtcttcgagaccggcgttggttgaaaatcgcccccggctttggccgtgg

SEQ ID NO: 388554 - DNA, 122 bp, Homo sapiens
ccaggaagggcttcagtcacatagtgaccctccagtgaaaactgggtggtagataaggcccgttcctgagtgatttttttttctctttgagaaggagtctctctctgtcacccaggctggag

SEQ ID NO: 388555 - DNA, 122 bp, Homo sapiens
gaggttactgcaataactagagaagagacgatagtagtttggagcagataatagcggtgacgatgagagaagtggccagattctgcatatatagtagagcaaaaaagatatgctaatgtatt

SEQ ID NO: 388556 - DNA, 122 bp, Homo sapiens
tgacagttctcagacttgcgtgacaaagccctcgctggccacaccttcacagggtgattgcgcctaaggttgaactcaccggctttccctatctcatcaccgaactagaagtttttccttcg

SEQ ID NO: 388557 - DNA, 122 bp, Homo sapiens
agtgaaatactgcacaggatcccccaaggcacgaagctggctggagggagctggagggagcgccccacctgccgcgggaaactcacgaggaaagtgcagaccttcggtggcgctggcacccg

SEQ ID NO: 388558 - DNA, 122 bp, Homo sapiens
ggagacggggactctaggggactgaggactgaaaaagcggcccagctgagggcagggacacgtccttgcttggtccagtgaccgtttactctggactctgggtaagtgggctcagcctgctt

SEQ ID NO: 388559 - DNA, 122 bp, Homo sapiens
agatgcggacacgcgtcttggaggggccccaccgagcctcagcagccgcagctgcccgcccgacccaggtcagagggaaacggagctctagagaggaagggacacaactaaggcgacactga

SEQ ID NO: 388560 - DNA, 122 bp, Homo sapiens
aaagatgatcatatcattttacccagtaatcctactcctggttattaaagggaaataattcggtgtgtattaatgaaattgaccttacagttctgatctttataataagttataagaaaatg

SEQ ID NO: 388561 - DNA, 122 bp, Homo sapiens
gcagtagaaagcaggctcgacactgagacgcggttccagccctagaaggattgcattttacgattcaggcaaacttcgagtctcctcatgtgacatgtgtgcactcctggaccgttttaatt

SEQ ID NO: 388562 - DNA, 122 bp, Homo sapiens
tcttggtctctgggcccacacaccgggcatcctcccaggatggttagatgccattaggctcggtctatgcagtaagagccacagccaggacccaggtcctgctgagccaagtgaggagctgt

SEQ ID NO: 388563 - DNA, 122 bp, Homo sapiens
ccctgtaacacacgcccactggggcttcaggagctgtaaacgttcacccctagacactgccgtggagtcaagagccccacagcctgcccatctgtatgctcccctagaagtttgagcagcgg

SEQ ID NO: 388564 - DNA, 122 bp, Homo sapiens
ccttcgccgtccgcaccctgcccggcgccccccagacgcggccccctgcccttcccttcccggaaattagggggctgtcctcacctcctggccgagtcgctgacccctccccaggctcgcat

SEQ ID NO: 388565 - DNA, 122 bp, Homo sapiens
gagaaagagagaggctcgttaggagaggatgggatgtcggaggaagaccagaaccgcaggcgtttagagagagctgggtgggtcgttggagacttgtctttgtccttgtttttgcttttcaa

SEQ ID NO: 388566 - DNA, 122 bp, Homo sapiens
attaaccttttttgatggtttataagcaaatgtaccacgtttccgaggacccttctccttcgtaaaattcccgtccaaccaaaggctgggagcctgcaaaggccccctaagagttacagcga

SEQ ID NO: 388567 - DNA, 122 bp, Homo sapiens
aagaaggaaactcagtaacaggacccagaggaccattatatattgctctatattctaggtcgcccactttacacttccttctcatgcacttggtcaataccacgcccgctgaccacactggc

SEQ ID NO: 388568 - DNA, 122 bp, Homo sapiens
ctcaatggcgtgaccgggaagtgattgtgacgaggcggggagcaagccaatcagcggcagcggggagccggccagggagcagcgcaggaggcgtcctgcccgactccaggcttcaggccagc

SEQ ID NO: 388569 - DNA, 122 bp, Homo sapiens
gagaagagtgggcgcgagggcttctggggtttgtggttcttctgcgcccttttgccgctgcgtgctcggatctaggactatacatcccagaaggctgcgcgcaaggagggcggggaagaggg

SEQ ID NO: 388570 - DNA, 122 bp, Homo sapiens
ggccgggctagtggcaggagaaggtcagctgcgggcgcaggcaggagcggatccaggagccgcgtcggggcgcagagccggacgttccgaggagcctgcgcgccgcgctacccggcggaagc

SEQ ID NO: 388571 - DNA, 122 bp, Homo sapiens
acaacaacagcctgacctagaaacttcctgatgatttttaacctcaagagccagctgaaccgagactcatctgtccatggccctgctgcaggtaccaccacctccagcccttgtctttgctc

SEQ ID NO: 388572 - DNA, 122 bp, Homo sapiens
tgcaggggccagggaaggaccctgaaaatgtgcacggacaagttaaaaatcagcgggctacgtgcgcacgccggtgggggcgccacgtgggcgagggcgaggcccacagctccggggcgcat

SEQ ID NO: 388573 - DNA, 122 bp, Homo sapiens
atgcacacgcacacacacagcatccctgggagaagccgcagcccaatgcacacatgcacacgcacacacacccacacacacacagcatccctgggagaagccgaagcccagtgcacacgtgc

SEQ ID NO: 388574 - DNA, 122 bp, Homo sapiens
accctaatttcattgaagtagccccatttgtaagcactctgactaggtaagcacccagcccggtatagcattccacctgtatgtgtgtctcccccagtcgatgtgcctgaggacactgagac

SEQ ID NO: 388575 - DNA, 122 bp, Homo sapiens
cgcttctggctcagtcctcctgagagttcatgtcacttaacggagcctgtgagagtggaccgggatggccaaaacactcagtccacacaaacaatggccgcagcccggctggaccgaaacgg

SEQ ID NO: 388576 - DNA, 122 bp, Homo sapiens
catgatcttgttgctttatgcctttgtaaaataaaaacaatagtaatagtacccatcacacggtgttgagagacttaatgtacataaatacaatttgtaaatcaaaacattctatgtaagtg

SEQ ID NO: 388577 - DNA, 122 bp, Homo sapiens
ggtgatctgcccaccttggcctcccaaagtgctgggattacaggcatgagccaccatgcccggtcccagtgttctttattaatatctctaggaaaggagggactagaagcacagagtcatca

SEQ ID NO: 388578 - DNA, 122 bp, Homo sapiens
ccgcctcctcagcccaaggccaggttcacggttttaatcatcagtgtctccgcacagccccgcatggaggggcacggcgggagcagtttgcacattacacattcacagaggcgcagccgttc

SEQ ID NO: 388579 - DNA, 122 bp, Homo sapiens
ggggggcggggtgaagctgtgatggacattttcctcctccgctccattttgggaaaatagcgtctctccagctacggcaaagggttccgccattttgggcgtggctaggaagctgccatgtt

SEQ ID NO: 388580 - DNA, 122 bp, Homo sapiens
aagggagaggcatgggtggaaaccgggctgtgtgagacacttgggggttagctggagttccgggtgggcatgggcttggcggccccgcaatcggagcgggacttagcaccctgggcagcagc

SEQ ID NO: 388581 - DNA, 122 bp, Homo sapiens
aaactctggtgtctacaggagctcatataacaggctggaggtgactgtagacgagcgccccggctcctggagcggttgggaggcgcctggatggctggcatctgtgcttgccgcggaggcgt

SEQ ID NO: 388582 - DNA, 122 bp, Homo sapiens
tacttaatttgattcactaagttaggcccagtgaagggattgggtggcataggtagaagccgaaaaataaagtatcttgtattgctggagtagcctctgtttctgaggtcacatccaaactt

SEQ ID NO: 388583 - DNA, 122 bp, Homo sapiens
catgctctgaaggcagcgcccaaaacacagggagagcgcaggctcatcaggacccaggcgcgtgttttagagcatggccttgccgtgccacacataacgcccactgttaatggcattaacag

SEQ ID NO: 388584 - DNA, 122 bp, Homo sapiens
cctgtgcgtccccatcaatcatcccacttcctgagatgtgccaagtggaggggcgtgccgcgcttgcttgccggctgttctgcacacgggcgctaagggttctgctttctctgagtcactga

SEQ ID NO: 388585 - DNA, 122 bp, Homo sapiens
tagatagggttgtgtccctctatggaatggagagtgatgtgggcaagggtgtcattttctcgcacaatacaactcactgaggatgcttctgtagaagtgagaaacacgatgagtacattcag

SEQ ID NO: 388586 - DNA, 122 bp, Homo sapiens
gacctcctgcgggacattttgtggccaggggggttcctgcccagggacctctaatagggtcggtggaagctaatttgaatcttcccagttccttccctgtttatttctcaacccagcagttc

SEQ ID NO: 388587 - DNA, 122 bp, Homo sapiens
gaccgaaatcccggccgggttttccgaagggccctcgattcccgccccctcggcagggggcggggcaggaagcagccacatccggttccagattcggctctcagaggcttccggcgccgaga

SEQ ID NO: 388588 - DNA, 122 bp, Homo sapiens
agaggctgcatgcctgatggagcagatgaaacacatggctgtaattagctcccaccccttcgatacgttctcaactccaccaaagcctcagcctgtatgagggtggaaagtggggagggaga

SEQ ID NO: 388589 - DNA, 122 bp, Homo sapiens
aagcccaaatgcacctagatctactaatctgggggtcctaggtaaggtgacgttccctgccgaagggcccagagtgccccacatagcaacagagctgtcacctgcaccctccgcgctcatcc

SEQ ID NO: 388590 - DNA, 122 bp, Homo sapiens
ggcaatcttgagcaaacaaaatatgctgaggctagcagcaagccacatgctgaaatggttcgttacagcccaggcattagaagcaacaattcttacttctaaaccatataaagcagaattaa

SEQ ID NO: 388591 - DNA, 122 bp, Homo sapiens
cgtccgctctccgcgcctgaccgcacctcagaactccggtaggacgggggggtggccccccgctcaagctctgttccctggggaagaaacctggaaagtgcgaaccgcgcgtcgggacccaa

SEQ ID NO: 388592 - DNA, 122 bp, Homo sapiens
ctgggcatctcactgctctctggaaccagcctggagtccccattatcattttttctgaatcgcctgactcctccctcttccctttcccaccggcacatctgattaaccaccaagtcctaccc

SEQ ID NO: 388593 - DNA, 122 bp, Homo sapiens
cacatcagatttgtggcttttctgttaaaattcttcacaaactggctgtgccctgacaggcggggcccagggctgagcaggggccttgtggagagtgagtccgggctcctaccagttcggat

SEQ ID NO: 388594 - DNA, 122 bp, Homo sapiens
gtgaattggtggcggcaggtgtaagtaattgctgagatttgggtttggggagtgggctcacgagtgtttatgacattattataaatgaatatatgagtgcataaattagcaaaataaaaggg

SEQ ID NO: 388595 - DNA, 122 bp, Homo sapiens
ggaccaataagaggcctttttgaacagtgacgccaggcgccctggcgctgcccccaagctcgtgcctcatttacagcctgcgggcgggagtctccttgtttaccaaagcagagggcgtgtgg

SEQ ID NO: 388596 - DNA, 122 bp, Homo sapiens
ccgccccagcctcccaaagtgttgggattacaggcgtgagccaccgtgcctggcctaacacgtgatcttaagattatgttagtgaagttgatccatatcactgtatctacctttattacttc

SEQ ID NO: 388597 - DNA, 122 bp, Homo sapiens
cttagtgcagtcagctctgagaatccaatgcgacaatgtatgtgaaagggttttgtaaaccgagtatggcaagaagcctcgttggcattgttatagcccaggcttagccccaaagtggctgg

SEQ ID NO: 388598 - DNA, 122 bp, Homo sapiens
agccatggcgggagccttaatcgggtcggagccaggccccgcggaagaacttgccaaactcgagtacctgtctttggtgtcaaaggtttgcactgagctggacaatcacttggggatcaacg

SEQ ID NO: 388599 - DNA, 122 bp, Homo sapiens
tggtgactcctgctggcagcagcagtggtgcgcgtggggacacgcgtgcggggagtcaggcgcccccgggtgctcgcggcaggaaggagtgaagcctgcgggcgggtgtgggggcaagaact

SEQ ID NO: 388600 - DNA, 122 bp, Homo sapiens
gtccctagatccagggccgccaacgtggaacctaaagatccagttctggggattgagttccgactccaaaccaagcggccagctcacagccgccgccgccgccagctggggagctcgccggc

SEQ ID NO: 388601 - DNA, 122 bp, Homo sapiens
gttttcagggacgtgcaagctgctcacgttacacgcgttccctcctttccatgtgctgcccggaatcctggtgttgggtgacctcctgaccggcccacgtagtgaactctgtgtttggtttc

SEQ ID NO: 388602 - DNA, 122 bp, Homo sapiens
ggtgccccgcagtttataaagtgccctcactctgaagccatgtgaatgcatccttttggacggccagatccaggaatccgcctgggcagatgaggcatctcctgggcttggatctaagccag

SEQ ID NO: 388603 - DNA, 122 bp, Homo sapiens
agcctggagcctgcgtcttttgtctgccttgctcctgcgaaggagcgggagacggctgcgcgccccaagcgggccaatcaggagacagccggcgccggccggtaaggcggcgattggtcaga

SEQ ID NO: 388604 - DNA, 122 bp, Homo sapiens
agggcacaagacccaaaacagacctctcatcctccacgtcttaggctgggaagatgttcacggttgctttgatatggtgagctctgaggtcagtttgggcttggggctgctgttctggaaat

SEQ ID NO: 388605 - DNA, 122 bp, Homo sapiens
agcagtctaggtggaaagcactgttgattgacagtggtggcaccaaatcacacattatttcgtattcttcaaattgtgcttcagctgaatataactcagccttggagagtaacagggaggga

SEQ ID NO: 388606 - DNA, 122 bp, Homo sapiens
ggagcttagcccagaaaagagaatcctcagagaggcaagaggggaggcaagacaggagcgcgtacctcagatatctcaagtactgagcatggtggctcacgcctgtaatcccagcactttgg

SEQ ID NO: 388607 - DNA, 122 bp, Homo sapiens
ggtggtaagtacttattgaatgttattgaacactgtcaccactctttcttaaaaattgtccgtggctcaactctaaacacaaaatgaaatccaaattcttcagccagtcactcagggccctt

SEQ ID NO: 388608 - DNA, 122 bp, Homo sapiens
ggcacgaagggcttggcgttgacgttgagttgccggctgaaggccgcgctgaggttctcccgctgggcctcggccgccgccgccagggagccgccgccgccgcaagggcccggcccgggggc

SEQ ID NO: 388609 - DNA, 122 bp, Homo sapiens
acagctcgcgcgccgcctggggtcccctcgccggccccgccgcgtgcaggcctcggccgccggccaggcagccccacttacccagctcttgcccgggctccgggctccgggctcggctgtcc

SEQ ID NO: 388610 - DNA, 122 bp, Homo sapiens
gcgttccgcacaacctgtagtgcttgggtctgacttcggcagccctcgggtacagtctgccgggctagattcccgttgcttctccgcgtctctccgcgggccgctctagcgccgggaagggg

SEQ ID NO: 388611 - DNA, 122 bp, Homo sapiens
gggctcggccccggctctggcccgcgcccccgccccccggcgctaaaaaaggagtgcctccgacccctcgtccccagcgctccgcacgcggcacagtgagacccccacccgctcctccccgc

SEQ ID NO: 388612 - DNA, 122 bp, Homo sapiens
agtgccagcctgatctcccttctcccctccaataaaagggctgtgtacggtctacagagccgctggtgaaagacttggggtggaaatacagcacctgggctccggctgactctccaccactc

SEQ ID NO: 388613 - DNA, 122 bp, Homo sapiens
tataggggaaaaaaagccacaaaattgttcacccccaagcaaccaccgaaataatgagatcggatgcagtggagatggcgttgggggtgggagagaaaaatggatttatctttaaaattttt

SEQ ID NO: 388614 - DNA, 122 bp, Homo sapiens
ccttcggaaaagcgggcagttcagagatggttcccagggcggcagctgcaagcccccccgcgcccccctcaaaggttcagactacactcaaaggctccgaaagaagcaaaaccaccagctct

SEQ ID NO: 388615 - DNA, 122 bp, Homo sapiens
gctggttaggacatctgtgatcccagggatcagggcctagagaaggaccctgcaggctaacgggggcaaggataccagagagtagggggctatttgctcttctgaccctgcggcggcactaa

SEQ ID NO: 388616 - DNA, 122 bp, Homo sapiens
cgtgtccctcccctccgcgcctccaggagacagcaccgccggccctgccccagcgccctccgtccccgccccagcgccctccgtccccggagtactcaccgaagcccccggtcccctcctcc

SEQ ID NO: 388617 - DNA, 122 bp, Homo sapiens
ccccgccggccttgggcagtgaggggcttagcccccaggccagtagatgtggagggtgcacggggtcccccagcagtgccggcccaccgaggctgcgctcgatttctcgccaggccttagct

SEQ ID NO: 388618 - DNA, 122 bp, Homo sapiens
tatcaacttttccagaaaaccgtggctacacaataatgcattgcctctatcatgttagaacgtgcattagactcaaatacaaaaaccatgaaacaaatcaccatccttcaacaatttgagca

SEQ ID NO: 388619 - DNA, 122 bp, Homo sapiens
caacttcttcctctcggagtcctgcccactacggatctgcctggactggttcagatgcgtcgtttaaaggggggggctggcactccagagaggagggggcgctgcaggttaattgatagcca

SEQ ID NO: 388620 - DNA, 122 bp, Homo sapiens
ctgtgcacacaaaaatgccaccaatggtgctcaatgaaactgtgatgtcaccctaactcacgagtgtctctggagctcctcacgaatgccttccttttggcatagcagggtcatttgatgtc

SEQ ID NO: 388621 - DNA, 122 bp, Homo sapiens
cgctccggagcatcgcgcggccaagcgttcagtggccgtgctgggagtagtcagcccagccgcggggagacaagcactaaagactgagcgtcctgtaataggtgtttaagtcatgattgcgc

SEQ ID NO: 388622 - DNA, 122 bp, Homo sapiens
agagttgctgtgattaggctattggtcgtaacagaaggggtacaaaggacagagtgggtgcggatgggaatcatggagaatttcctctctgatataggaatggctcacaccattcttattcc

SEQ ID NO: 388623 - DNA, 122 bp, Homo sapiens
gccctcacacaatttccccatggcttcttgaggccctggctttgtcctaatcagctattccggtgctagcttcactcctctgcccctcctgctccgctgggcggtgagttcccgtgaagcag

SEQ ID NO: 388624 - DNA, 122 bp, Homo sapiens
tctcctgtatgacttcatttttcccttatggttccttttttaaagtagttgcataaacagcggccagataagcatgtttgaagtagaaattcaggggaaaacaaagcctacactgaatgggc

SEQ ID NO: 388625 - DNA, 122 bp, Homo sapiens
cgcacgtgaagttgtactgcacctccgcagtgtgcttcttcatgtgccagttgagcgacgcgcgctgccggcactggtagccacagatctcgcacctgccgggagcccgtggcgggacgggg

SEQ ID NO: 388626 - DNA, 122 bp, Homo sapiens
atgataaacacacaggaaatgcattttccttttatcagctgaagtcatttcactaacatccgctagataagcagatcaagttttattttagggtaggtgatctaaacaatgccacaatatga

SEQ ID NO: 388627 - DNA, 122 bp, Homo sapiens
tcttgcacgggccgctgctgtccagtggcttcgaaaggagtttggtagttgaggtgagaccgcaggtgcgctgctccagtggcttcgaaaggagtttggtagttgaggtgagatcgcaggtg

SEQ ID NO: 388628 - DNA, 122 bp, Homo sapiens
tgtggctttgcccagctgtgtgtgtgagggtggcatgcccacctccagtccagcccagggcggtagcagcaaagcgtggcatcgcctcggtttcttacaaaaattcataataatattaataa

SEQ ID NO: 388629 - DNA, 122 bp, Homo sapiens
ttctcagacgcgctgggaccttcgcagtccgagattaactgttggggtttccgctgctttcgccgagacattcccgggtagagagttgggagagggaggggcaacgctcacttggtcttaac

SEQ ID NO: 388630 - DNA, 122 bp, Homo sapiens
cgtcctagatttcaggtgttgatgaatacagccctctgggaactgcaagccggctctctgcgagcgggaaaccgcctttgtcttggcctttccggagtccttcccagccttaccgtcagcca

SEQ ID NO: 388631 - DNA, 122 bp, Homo sapiens
tcgagcattcatgtcaacccccgaccatgaagacgagactcctggcctgtgtgtgcttgtcgcatgatgcatgtgctgtgctcaacctcccttctggttccacccagctcaaggccttggag

SEQ ID NO: 388632 - DNA, 122 bp, Homo sapiens
aagtttccaaggccactgagaggctgtagtaggacgatgccggaggcgagcagactccaccgcagacacgccaacacacgcagctggctcccgggtcaccgcaggctgcacattcccggccc

SEQ ID NO: 388633 - DNA, 122 bp, Homo sapiens
aggtacggccgtgtgcgcccccaggtcaacctgctgcctttctcatctctggcaggactccggggaacctgtgcttatttctgggctggtgagggtcaccaacaccaccctgatcccaggcc

SEQ ID NO: 388634 - DNA, 122 bp, Homo sapiens
gtatgacccctcccccaccgaggtgtagcagctcacggaccacagtcacccacttccttccggaggtttccacatcctgccactgcctcggggaccgctgccccagagcacgggaggcgcct

SEQ ID NO: 388635 - DNA, 122 bp, Homo sapiens
ttctaacccaaagcaaccacctagaaaacaagattatcagactagctcaacaaaggaacacgaagagagtatagatttatttttctccagtggcatcttctgcagtgaagaacatccttaaa

SEQ ID NO: 388636 - DNA, 122 bp, Homo sapiens
ttgtgctgtgtggcgttttttccttcaccccacctgggccgcaggtcctcgctagatagccgagggagggtcctttaagtgagctcacctcggagcccccagataaccaagcctgagcctcc

SEQ ID NO: 388637 - DNA, 122 bp, Homo sapiens
gatagaagggacagggatcgagaaagagagaaagaaaatgagagaggtagaagacgagatcgtgactatgataaggaaagaggaaatgaacgagaaaaagagagagagcgatcaagagaaag

SEQ ID NO: 388638 - DNA, 122 bp, Homo sapiens
tcgtgctttagccgccccggtagcctcagctcctccccacagccagtgcccgcagcccctcgcagtccccatggcccatagcatatggtgaccgtaggagatagcagagctagcgacagatt

SEQ ID NO: 388639 - DNA, 122 bp, Homo sapiens
cctgatggctacccagggccgcctgagggcagggggctcgagctgagcgaactgcgcaggcgtgacagggaagaggcggggagaggggagattgctggcaagcgggtggggcttagctcctc

SEQ ID NO: 388640 - DNA, 122 bp, Homo sapiens
cagagatcacccctcagacaccctggggcctaatgagacctgatcgccctctctcttctccgaatatgaaaactctgtacctccttggaggccaccacgcacaagctgccacttccttaccc

SEQ ID NO: 388641 - DNA, 122 bp, Homo sapiens
agcatccagagaccacatccgagccttcccgcaccctgctgccctggggagcccctgccccgtgcctaggtcgccctgcgcgagcccagcccagccctggactcatacaaaggctccagagc

SEQ ID NO: 388642 - DNA, 122 bp, Homo sapiens
agtagtatgtgggcggggcgccgcttaagggcttgtactgcgcatgcgccaggcttctgccgcacttaccttgaagaaagtgaatggttaaaaagcgtagagccagttgaatattaagaaaa

SEQ ID NO: 388643 - DNA, 122 bp, Homo sapiens
aggaccagccctggcctaaggaaacaggaaagagtttgagacttccttctaaaggagccacgtttgagaaatgggatgcaggcctaagttaagaatgctacagaaaaatatcgatccctaag

SEQ ID NO: 388644 - DNA, 122 bp, Homo sapiens
gttactgaccctaataatttgattccacgttaccaatacacattacttgcttaacataatcgcctcttcagactctctccagttcaggcaacttaaaccttcaactgcctgcacaaaggctg

SEQ ID NO: 388645 - DNA, 122 bp, Homo sapiens
ggtcactccaggagtcgtcgggcgctgaaaagcgattttaaagatctggagtagaccgggcgcggtggcttacgcctgtaatcccaacactttaagaggccgaggtaggagtgatcgcttca

SEQ ID NO: 388646 - DNA, 122 bp, Homo sapiens
taagacagactgttctgttacctattttggcaggtcgagttcccaccagatctctgttcccgggttacttttgtaaacttcacagttacccgtagcagtttacaaagccagtgtctaaatga

SEQ ID NO: 388647 - DNA, 122 bp, Homo sapiens
ggcaagggtggcactcagatgcccagggctcacaccaacaccaggccagggagtgtgcagcgatactgcttggactcacctggtggtcgttgggaagctgctgacaccctggttcccatggc

SEQ ID NO: 388648 - DNA, 122 bp, Homo sapiens
tccctgatattctaaaattatttttttccctaaacccaatctctcctcttcctcctctgtcgcctcctccccctccttcctactccctctgcaatgggagaagttaataggcaggaacttct

SEQ ID NO: 388649 - DNA, 122 bp, Homo sapiens
aggtattttacagcatagcctgaatcagaagggactgtaatctttttgttccctttttcccgaggagaatgagtccgaaagatcaccaattgaagtctctttctggtagttgttaagttttg

SEQ ID NO: 388650 - DNA, 122 bp, Homo sapiens
tggccgtgggggtgatctgcagccgggcgtggtcttcactctccttgacctttttagttccggggagaagcgactctggagcggctcaggagtgaggatgtcccttgtttcttctgcggctc

SEQ ID NO: 388651 - DNA, 122 bp, Homo sapiens
tggtgggaccagctctagaacccaagcctaaggctgtcttcatactccatcccagcaggccgagctgcaatgactcaccaccactcatttgcatgaggatttgcatagcgtctctgacctta

SEQ ID NO: 388652 - DNA, 122 bp, Homo sapiens
ccgcaaacaggcgaaattcccgccaccgcgcgcccgcgctccggaaaggcggggccacggcgcagccctcccccggctaccaatcgcctcgcgatatctgcgcggaaacagtcggagcccca

SEQ ID NO: 388653 - DNA, 122 bp, Homo sapiens
acgggcgggggtgggggccgactgctgtccccagactctggacacagtctggcccgcccgcggagctcagtcacagccagccgagtccctgggcccagcagcccttgcaacgccggccgcgt

SEQ ID NO: 388654 - DNA, 122 bp, Homo sapiens
ccggcggcagccatgttccgggcgattgcgcttgcgcggctgccgggacaaggatgtgcgcgtgcgcggagtccccgagcttcccccgcccaacgctggggcggccgcgggtaccgggttat

SEQ ID NO: 388655 - DNA, 122 bp, Homo sapiens
gagccggctgcgcagggcgccagcgaaaatcgcatttctgcttagaagccacccagttcacggtgttgtgttatggcggcctgaacggactgaagcacatagtgactatgtctgtgctcgct

SEQ ID NO: 388656 - DNA, 122 bp, Homo sapiens
cggctgcgaggggggctgctgctggaccaggtgctgctgcttctgccgcgtggatttgaccgccaggatggcctgacgattcttgtactgcaccatctgcagcgtgatctcggcgttccagc

SEQ ID NO: 388657 - DNA, 122 bp, Homo sapiens
tggccataccacccccgcgatagaggagcaacacagctgtctctgtgcgctccggatcagcgcttcctagatttctagccggatcgtttggagaagggctctgcatcttatttccggtggcg

SEQ ID NO: 388658 - DNA, 122 bp, Homo sapiens
ttgtctgctgcagcatgctgagagaataaaggtgaggctcggaagtgcctggatctacagcggaatatgagctcctccttggctttcgcagattcagtgctgccagggtcatgcctcaccac

SEQ ID NO: 388659 - DNA, 122 bp, Homo sapiens
gggcgtggagagggccgccccggcccgcagttcccgccctgacactgggataacttcccccgcggctgcccagcgccgccctgaccagaccctctgtaccccgacttctgtccggccagaag

SEQ ID NO: 388660 - DNA, 122 bp, Homo sapiens
ggcccagcgttcctccctgcggaaccctcggaaaccaaatgagctctccctatccacaggcgtggcatcctgaaaacaccttgctttccatccatggttggtcgaatcctgagttcgggagc

SEQ ID NO: 388661 - DNA, 122 bp, Homo sapiens
cccccaggctaactctatcggccaatcagagcccgcggcggctccggatccgaggggccgcgccattggctgcggcctgagaaagaggtagaattctgttaggcgattgcgtcgccctgagg

SEQ ID NO: 388662 - DNA, 122 bp, Homo sapiens
ctacatttcccagagtgctgcaagaactgggtgtgactcggaatccctcccaaccacttccggcgcaagtggcttctgataatcatggcgcccctcggaacaactgtattgctgtggagcct

SEQ ID NO: 388663 - DNA, 122 bp, Homo sapiens
acacttgctgagctataaccttatgaaaaaaagaaagaaaaaaagtgtttatacttcacacgatacaatgtggtgggtacgccaataactaagtgaacggttacatataatggtctatacaa

SEQ ID NO: 388664 - DNA, 122 bp, Homo sapiens
cactggtaattctagattttcctaagcattttgagtgccttatttccatacgcctttcatcgtaactataaaaggtagaatctgtattattattctcattttatagaagatggtctaaaaag

SEQ ID NO: 388665 - DNA, 122 bp, Homo sapiens
cggcgcggcgcccccggaaggaggccatgtgctcagtgccggcgccaactacgcacgcggcgccctccggcccgctagatccgaagcccatccccactgcggccagcggcccggcggggcgc

SEQ ID NO: 388666 - DNA, 122 bp, Homo sapiens
agtctaacctatccgctggggccctggaaagcgattctcgcctggagtggctttaggcagcggtggtggggaacgtcctctctcaggtgcctgggctccaacctccgagccccgggttgctc

SEQ ID NO: 388667 - DNA, 122 bp, Homo sapiens
agctggcccctacggatgctagaggcaatgtgcacttggcagagagggaggcggggaggacggtgaatatccacaagaggcttccctgtgtccagcaccaatgcatgtttcaatccccctcc

SEQ ID NO: 388668 - DNA, 122 bp, Homo sapiens
catctcttaacccacattttcaacctgaaacattttagacttagtagccacatgagcacacgcggtgaaatgagtggaaattgagagatgcttggaagccccgtggggacttactgtacctg

SEQ ID NO: 388669 - DNA, 122 bp, Homo sapiens
gaagcgcgtgccgctctcccgggtttcgggaggcagcctgttttgtagcctctgaggctccggggaaaggtttggctgcgtctaagagagacgtttggagccatccgtcttattttgtttga

SEQ ID NO: 388670 - DNA, 122 bp, Homo sapiens
cctacgggactgccttagacgtgctgggctttggcctcagtgattcggatgggcgctgtccgcggtgctgaagcgcctggggagcggggaaagggggcgcctgcagggctccgcacctaagc

SEQ ID NO: 388671 - DNA, 122 bp, Homo sapiens
gcccgccgccaacttttgactttaggagtcgctgaggtctcgctgcgagggtcccgtctgcgctcggctgagcaacgccgccgcctgccgagagctgagccgctcgggccgcaggaggagcc

SEQ ID NO: 388672 - DNA, 122 bp, Homo sapiens
ttgaagcgattctcctgcctcagcctccggagtattacagtattactggtattagaggcacgagcgaccatgcccggctaatttttgtatttttgatagaggcgggctttcaccatgttggc

SEQ ID NO: 388673 - DNA, 122 bp, Homo sapiens
ctagaaacaaagatatcagaccatactttgctagtgctcagctcctgtggggcagcagggcgatgggtttctgctaaaggctgcctcacctgagggtgaattcaggttcacccttccctcaa

SEQ ID NO: 388674 - DNA, 122 bp, Homo sapiens
gcgggccggggagccgatcgcgcttcagctcagcgcctttcctggtacttgaagggagatcgaccgtgttatattcgctttattgacttcgaataatacatggttgatcttttctcagtatc

SEQ ID NO: 388675 - DNA, 122 bp, Homo sapiens
ttcattggtcctcaggatcacgcgacaggaagtattgcgtaaccggttgactgccacatgcgcattggcttccagggccggaagtcccacctttttgtgccagttcacttttgggagctgac

SEQ ID NO: 388676 - DNA, 122 bp, Homo sapiens
gcctcacccggctgtcatcaccacattgtagatgaccaggtacgccgtggccaggggccccgggcccttcttcttccgcgtgccgctggcgtccccggccccggccctgccaccgccgcccc

SEQ ID NO: 388677 - DNA, 122 bp, Homo sapiens
gcaactaaacccagaaaacgtttattgagtgaatgatgaaacgacaggtgaatagatgaacgcaaggtgtcgagttaactattcttctacacaagtcctagcagctcccattgcttccagcc

SEQ ID NO: 388678 - DNA, 122 bp, Homo sapiens
ctctggcggatctcacaggacacacgtgctctggcggatcacaggacacacgtgctctggcggatcacacaggacacacgtgctctggcagatctcacaggcacagcctcagaatggaaact

SEQ ID NO: 388679 - DNA, 122 bp, Homo sapiens
gcccactgaggcgggcacccctacaagttgaatgacttgtctcaggtcccacagctggggcgtcagatttgggaatcaaacccagattcccctcttcctggctctttaccccaccccacgga

SEQ ID NO: 388680 - DNA, 122 bp, Homo sapiens
acagataacatgtgaaaccacagctttgaatcatttccaactgtgtctttttgttggctccggcttactttagctacttacgctggactgtcacagtgtcttagggatgaggagacgcctcc

SEQ ID NO: 388681 - DNA, 122 bp, Homo sapiens
aactagttaccagatgtgtcagcctctttctaaatctatgggacaaggcagaataaaggtcgggcaaccaattgacttggacgccgtcccaactccacaagttaacggtcgcagctcttggg

SEQ ID NO: 388682 - DNA, 122 bp, Homo sapiens
gctcttcctggtgtgccttcaccaagcccccacctcggttcttcctctgtgaggcagcctcgtggcaagagaaagcacttacactgatgttctagaatgttctttggtcccagattcttact

SEQ ID NO: 388683 - DNA, 122 bp, Homo sapiens
gctataagcagtctcccacttaatgtcttgacgcccacccacctccaaccagctacctatcgaccaagccttcacttggacaggcaacaataagctgaaattcccgggaaaacgattacgta

SEQ ID NO: 388684 - DNA, 122 bp, Homo sapiens
gaagtgtggggggatgacgtttactctgtcgtctccatggatataatgcatagacgtcaacgtcgccagtgtttggtgtgtaacgttcttccgtctccatgggaacgtcaggcggccaaaca

SEQ ID NO: 388685 - DNA, 122 bp, Homo sapiens
cttctcctttctgcacactgacacttaaaaatacatatttttgtcgggcgcggtggctcacgcctgtaatctcagcactttgggaggccgaggcgggcggatcacctgaggtcgcgagttcg

SEQ ID NO: 388686 - DNA, 122 bp, Homo sapiens
cacacctcacatacccagggaacaaacggacacacactaaccacacgccggagatacagacgtccataattgccaggggcacggagagcccacccacacccactcagaggctagcacacctt

SEQ ID NO: 388687 - DNA, 122 bp, Homo sapiens
tcaagaaggaaatctaggtggcattcttgaatgtcttttctctcatattcaggcctccagcgattgctgttgtactccagatgtttttttccatctgtcacctatctttccacccaccctct

SEQ ID NO: 388688 - DNA, 122 bp, Homo sapiens
gcccagctcacccatgcccggccctgctcacatggccctgctcatccagtcttgcacacacggccctatacacccggcccttcacacatggccctgcacacacagccctgctcacccagatc

SEQ ID NO: 388689 - DNA, 122 bp, Homo sapiens
gcagctcccggtgagagccccgaagggtggggacgtccttcagggaagccccacgctgagcgtgccccctcccctacagccgcgtcatgacgtaccgggagcacacagcctgggtggtgaag

SEQ ID NO: 388690 - DNA, 122 bp, Homo sapiens
acaagagattaaccccttctctgccaacatggccaccaacccgcagacaggctgccttcccgcctggggtaaactgaagagcaaactcaaacaggtcacttgggccaacgaaagcacttggg

SEQ ID NO: 388691 - DNA, 122 bp, Homo sapiens
atacctatccatggcaaaaattgctaatcagtgtttttcttgctgaacatagatgtggcccgaaactcattctcaacaaagtgttccagataggccttgttatttggaattcatacttgagt

SEQ ID NO: 388692 - DNA, 122 bp, Homo sapiens
aatcctctgaagtctatttttaaagctaataccaatcacaaggttggccagtttgacctgcggtttgacctggtagcctgttgtgaaaatcccttcctcatcccacgccttcctccacccca

SEQ ID NO: 388693 - DNA, 122 bp, Homo sapiens
gactacctcaaacattagcatcccaggggagcacatgcagagaggctcatgggggtgctgcggtgagcaccctcttaccctgtgagaaggcagtaggccaggccacagccagaggacagtgg

SEQ ID NO: 388694 - DNA, 122 bp, Homo sapiens
ttcgtggtggagcataatcaaaatggcttccagctggtcctcggtgggaacgatgaggctcgaggctttagacgtaagccataggccagggaaggcagacttactagaggaggaaggggatt

SEQ ID NO: 388695 - DNA, 122 bp, Homo sapiens
tttaatatttacgaatggctgtgcacccaggaattaacacacttgaactttttcctgttacgtctatagcagacatgtacccagattaaggctttgcccagccatctgttaggggaaataaa

SEQ ID NO: 388696 - DNA, 122 bp, Homo sapiens
tgaggattcattcatatcctccatcactgaggaagcgcacccacctgggagacaaattaccgttagctttattccctgcagcctggcagaagtcagcatggggaacactctggcaaccaggt

SEQ ID NO: 388697 - DNA, 122 bp, Homo sapiens
tgagaagatgaaggacgaaacctgccccgctgagtgcgggagttcgtcgcatgcgcatgtcgtggaacctactctccacgagtttttattgttgttgcttttgtaccccctcgggatcccta

SEQ ID NO: 388698 - DNA, 122 bp, Homo sapiens
tagggacggggacagggccggagcctgggccagggcaggggctggggctggagccgaggccggagtcggagccgagtccagagccgaatccggggccggagctgggaccccagccgagtccc

SEQ ID NO: 388699 - DNA, 122 bp, Homo sapiens
ccggagccactgcccgtctcgacaggttggggagcaggaagtagcctgcagggactcggccggtagcaagtccccttgaccgcagggaaaaggagaggcagccagctccaatctcctcctga

SEQ ID NO: 388700 - DNA, 122 bp, Homo sapiens
gggtttagattgactctaggaaggtgaatttccgtgtctatggagaaggctccggggcctcggccacgctgtaaacttgtccctgggctgggccaacgcggcgcctcccggcacctgcaagc

SEQ ID NO: 388701 - DNA, 122 bp, Homo sapiens
aggttggagagctgtgggtctcgcacgcttcaccagccaaattcctaagtccctttttatcgttttaaccctaagagtcacaggtcgtgttacagatcagggggacagacaagcacagaacc

SEQ ID NO: 388702 - DNA, 122 bp, Homo sapiens
gcgtgttaacgcctgtcctagactccatggtgctcatcaccgacaagttctggggtacatcgggtgtggagagtgtcatcggcagcgtgcacacgtggctggcggaggccatcaacgccctc

SEQ ID NO: 388703 - DNA, 122 bp, Homo sapiens
ggcagggattgattggaaaggtatctaggaactcatgtaattgacaaggagctggggaaccgggctccaacagaacccaattagacatgggctagacaagaccccctctcaggagccacctg

SEQ ID NO: 388704 - DNA, 122 bp, Homo sapiens
ccccgccccagccgtcctcctggggtggaccctagtttaataaagattcaccaagtttcacgcatctgctggcctccccctgtgatttcctctaagccccagcctcagtttctctttctgcc

SEQ ID NO: 388705 - DNA, 122 bp, Homo sapiens
agctctcaagtctctcaaaattttcctcattctgtccctattccttccagctccaacctacgccaagattttaccttgttaccatggtaaatgtaaacccccaatccagctccccacctctg

SEQ ID NO: 388706 - DNA, 122 bp, Homo sapiens
cagaggcgccgcgcgccgccgtctgccgcggggggcgaacgcacagcctagttcccgcggcgccttaggtctttacgataaaaatacaaactgaattaggggcagatgctactttgagtaaa

SEQ ID NO: 388707 - DNA, 122 bp, Homo sapiens
tctgaggacatgcttcttcctcttctcccactgcgccaggccctgccgccgccccaacagcgtggatgtccagggctgtgggcggacaatggccctgatgtccaaggacagacaacagaggg

SEQ ID NO: 388708 - DNA, 122 bp, Homo sapiens
aacaagcacagaagaactgtgagcacagttccaaagcaatgagacagattttcacaaatgcgtattctttctgcagtgaggactacagcaaatctcagaggtcacaatgttgggagagctct

SEQ ID NO: 388709 - DNA, 122 bp, Homo sapiens
tccaggaaaggaaggagcctcgctttctccagggcaggggcagcgtggggcggggcaggccgggtgtgtctgtggggagtgggcgcgtgctcacactctttaagctgcgactgcttccttta

SEQ ID NO: 388710 - DNA, 122 bp, Homo sapiens
ggaataaggtccccatgggcaggtggcgctgcaagcctgggtcttcctgccatttgtcctcgccaagccagccgcagccacacgtgtggacttgaccactgcaccccatccccagcgagttg

SEQ ID NO: 388711 - DNA, 122 bp, Homo sapiens
gatgaagggggcgggccgcgagggcgggcttgatgcagatgagggggcggggcccacgggcgcgggagagcagcggctccgccggcagctgctgggaactggaaggcgcccggtcctttctt

SEQ ID NO: 388712 - DNA, 122 bp, Homo sapiens
gccgggcgcctgagctgcgcctccctgcactctctccttgccccggcgcccgaggttgcgcgcctggcctccgctgggctgctgcgcccactcttccgactgcagaggctcaagggttgttc

SEQ ID NO: 388713 - DNA, 122 bp, Homo sapiens
gcctacagtgtaccaaaccgctatgcacagtaaccaactgtgatcatctgttacctaatgcgctaaggaactcagttttctttttaaaatagctaaagcaaaagatagcccctgtaggctga

SEQ ID NO: 388714 - DNA, 122 bp, Homo sapiens
tttgtcaaagtgcacactgtactttcttcttaaaaacgtgattaaagagatcactttgtccggatgaagcagctgttggcattatccgctgaggcttgaacaccacgtgctgattctctcat

SEQ ID NO: 388715 - DNA, 122 bp, Homo sapiens
gcgaggaatcacacagggcacccctttcttcttaaattgctctttcttaaatttcattgccgccagggtgtttttatcctccctatatatatacacacctggctctgatttattctatcgtt

SEQ ID NO: 388716 - DNA, 122 bp, Homo sapiens
aactttctaagcatgaggagaatgcccaaaaggcatacaaaaataaggctgtaattagatcggcagagtatgttttaaggcatatctagctttctgtgaataccagaaacctctcttttcat

SEQ ID NO: 388717 - DNA, 122 bp, Homo sapiens
tgatgcagcccatggcgaagagggctgcctgtgctgcttaaatgggttcagaatgaaggccgccctctctcccatgtggggctcattcaccacgaatcaaatgattaagacaagctcagctg

SEQ ID NO: 388718 - DNA, 122 bp, Homo sapiens
gctgccccgtcacatcacagccccatcaaggacagagcagtcttcaggcccctggtgaggcggtgggcagtggggcagacagacgggtcccaagggcctgaggatcccctcctgccccttgc

SEQ ID NO: 388719 - DNA, 122 bp, Homo sapiens
caagccctgctggagaacaggaacaaaatgaaatataatgttagattgcgagcaaaacctcgaatcagtgtttctgctcatgagtttatgtaaggagaggaaatgagattgtgtcacctaac

SEQ ID NO: 388720 - DNA, 122 bp, Homo sapiens
gaggaaaaataagcccaagatgaactacgagaagctgagccggggcttacgctactattacgacaagaacatcatccacaagacgtcggggaagcgctacgtgtaccgcttcgtgtgcgacc

SEQ ID NO: 388721 - DNA, 122 bp, Homo sapiens
acttgaagccatgaaagaacacacaaaagagaaagctcttgaatataagcaatgtccacacgtttttagccagcccacatgctttcaacaacatgtaagaatgtaccctggatcaaaacact

SEQ ID NO: 388722 - DNA, 122 bp, Homo sapiens
tcggatttttggttttactaagccgtgtgtggggaggtgtccggcgtcctcctcctgggacgggattcgaacccgctatccgacgggcccgcccacagggtctccccgggtccccgcttcgg

SEQ ID NO: 388723 - DNA, 122 bp, Homo sapiens
attgcctcgacccaccgccgcgggggcgtcctgaggaggggggccctgcatctgcccccccggctagtgcacagaccaccttggcctccaggaatgcagcggaggggacttgggcgggccgc

SEQ ID NO: 388724 - DNA, 122 bp, Homo sapiens
aagctccgcatatacttcttttggtgtttcaggaaaagttttaaaaaggaaacagaagggcgttttaagtcagacaaggaagggaacgtaatgaggcaccacagactcgagaaatcagatcc

SEQ ID NO: 388725 - DNA, 122 bp, Homo sapiens
tgaatggattttcttcagcactgatgaaataaccacacgctataggaatacaatgtccaacgggggattgcaaagatctgtcatcctgtcagcacttattctgctacgagctgttactggat

SEQ ID NO: 388726 - DNA, 122 bp, Homo sapiens
cagagatcccccgcccgtgggcaccagggaggtgtcctgggacccccgcgatgggatagacggtgggggccgcgatgcacctgccccgcccgacccgcacgcctcgggtgccgcagcgcagc

SEQ ID NO: 388727 - DNA, 122 bp, Homo sapiens
tccgcctctttaaatggggcggggcaaggtggagaccgcgtgtgtggttccggggggtcccgggtccccgctcccgggaccttccccgggtggcaccacatcctcgcgggacactgggcacc

SEQ ID NO: 388728 - DNA, 122 bp, Homo sapiens
gcttcggcacaaggctgtgacttgtcattgatgttttgggtcacggaccttttccactcacggaattccacttctgttctccaagcagctctctgtctaaccagtaactgcgactctcctcc

SEQ ID NO: 388729 - DNA, 122 bp, Homo sapiens
agcccggatccccccaccggccctcagcgaatcccggcgcgtcagccggagccccgcctccgagctcaggccttgctcagtcgaactgacgcccagtagacaagaaagacggaagctccgcc

SEQ ID NO: 388730 - DNA, 122 bp, Homo sapiens
cggccccgcctccagccaggcctggccccgcccccgcctcgtaccggccccgcccacctgcgtgagcagcatgaaggcgttgtcggctcgcaggttcttcttcaggaactccacgcaatggg

SEQ ID NO: 388731 - DNA, 122 bp, Homo sapiens
gggggtcccgctgggcccgggggtgtcctcgggggccgcttgcgcccagccatggtagggcgtcccccggtgaaatggggtccgaggcgggccccgaccccgcgtcggcgctgcggaccgtc

SEQ ID NO: 388732 - DNA, 122 bp, Homo sapiens
cgccagctggtacaagctagggagggttcgagggggctccgggtccccgtctgataagcccgggctccgaaagctcagctccccgtcttcgtcccccggattcgaggcactaacccgacccg

SEQ ID NO: 388733 - DNA, 122 bp, Homo sapiens
tgcctcaccaggctgcatgagccacaagctgccacttgtggagctcggtggccctgccctcgacagccttgctggtggtcgtgaaggctctaaacacctgcatggcaatgaggccaaccttc

SEQ ID NO: 388734 - DNA, 122 bp, Homo sapiens
aacacactaaatattatggaatacatgattagccaagcttgactctcatacccacccagacgtcaaggaaaggagtcagcccctgtctaaactacatgaatttaatgtggaatagagggttg

SEQ ID NO: 388735 - DNA, 122 bp, Homo sapiens
gccatgcgatgccctgcttaaaaaaatacatacatgtgcacaattgccttcatgctccagcgagtagagcaaacaacatgcattagcacatccgtgttgagattgttagaacagctgcctgc

SEQ ID NO: 388736 - DNA, 122 bp, Homo sapiens
gggcggggtgcaggggccggtgaggtatgggcacggagcaggccagccaggatgcggcggcggtgaccagggagtagcatgcccatgtccatcaggcgggtgtcgctgaggccttggcactc

SEQ ID NO: 388737 - DNA, 122 bp, Homo sapiens
ctacagaggtcaaggaaggtttccccaggagcagttttggtttcagacggcgccgtctcccgcgaaagtcctgagaggagcccagccttttccgcctgccgcccccggatgggatggttgag

SEQ ID NO: 388738 - DNA, 122 bp, Homo sapiens
cgccacccaccccacctccagccttgggtcttaaccccctccccaggctgggcagccatgcggctgacctcggagcctggccctgccccgcacccttgccctgccctgccctgccctgccca

SEQ ID NO: 388739 - DNA, 122 bp, Homo sapiens
cctgtgcttgttgaggtctgtgtgggggatggtagggaagcccctcggaagcggaggacccggggctggcagaagtaatgacagagggaatagattgcacctcaccagcctgcccgcacccg

SEQ ID NO: 388740 - DNA, 122 bp, Homo sapiens
agcagctacggcagatccagctcacccagcagatccgcgcccaggcgcactggtgggcctcgcacgccctccactagccggacggggccccgcaaccctgaagaccttgggcggccacgtgt

SEQ ID NO: 388741 - DNA, 122 bp, Homo sapiens
gcgtcttccccactccccacaagggggcgccagaggccgggcgcccggttttgaggggggcgcctcgtcccgcccctccctcctgtcctccctcccgtcctccccgctccgggccccacccg

SEQ ID NO: 388742 - DNA, 122 bp, Homo sapiens
gagaacaggtctccaaaaatatgtgaatccgtacttcccactggaggggagagagagctgcgctgagggattatgagagaccctacaacttctcaggcgccccctgccccgggggccaggaa

SEQ ID NO: 388743 - DNA, 122 bp, Homo sapiens
cagccgatggcaggacagtagccgcctgtcagaggtcgtgaacggctgaggcagacgcagcggctcccgggcctcaagagagtgggtgtctccggaggccatgggctacccggaggtggagc

SEQ ID NO: 388744 - DNA, 122 bp, Homo sapiens
ctccgcgtccctcctccagcccggcgttcccgttcccaggacgctggctccctcctctcccgctcccttgacttccccggctggggctccggccaccgccccttccggccccctccggcgct

SEQ ID NO: 388745 - DNA, 122 bp, Homo sapiens
cttttctctatatactgctttgccacctcaccaacttcggtgctggccttgatgttctcccgcaagaagtggccgctggagagatgctggagaccaaagttctgggcgatcctctggcacac

SEQ ID NO: 388746 - DNA, 122 bp, Homo sapiens
gcctttgtagcccgcggctctgactaccgaagtatctgatctggtgtccgtgaggggacacgtatgacctcagaaacacagctggacacagagcttggtggaagaagtcgcctttgatcttc

SEQ ID NO: 388747 - DNA, 122 bp, Homo sapiens
gtccagtggtctgtgtgccacaggtctttaaagatgatccagagttttgagagctatcagcgctcggagctctcattttaacccacacagacagagaggaattccaagtccacccccgtaac

SEQ ID NO: 388748 - DNA, 122 bp, Homo sapiens
ccaccatcagggacgtgaggtggggctgagccctccagggtaagtggaaagatggtgggccgcagaacatgtgctgagttcgtgccatatgtctgctgaccatcacctttagaagccccctt

SEQ ID NO: 388749 - DNA, 122 bp, Homo sapiens
gcccccaactcttcacctgccacccccacaagggtgctcaccccagaggtgctcacctcccgggctgggagaccgcatctgaccggtcccaaaccccgcctgcagctggcagcgccggggtg

SEQ ID NO: 388750 - DNA, 122 bp, Homo sapiens
ttagagacacttgccaacagcctcttctctaagccttcctactggaaggttgggatcctccgttttctcgctctgagacagcacgtcaaatgctaatagcagcacatgagtaaagcgcaaca

SEQ ID NO: 388751 - DNA, 122 bp, Homo sapiens
ggcggcgcaggagggggcgggttcagcgagggcgcggcctctgagggggggcgcaggacacgcatcccccgcgatcgcccgggccactcgggagcctcgcggcagcccggcgccccacttgg

SEQ ID NO: 388752 - DNA, 122 bp, Homo sapiens
accccgccatatggggagtaataggaccccccctccctccctggctactacgagccacatcgctggggtgtgaggcaccctcctgccatatggggattaatagcgtccccctttcccccccg

SEQ ID NO: 388753 - DNA, 122 bp, Homo sapiens
tccggcataacaccgcacacacacatttgcacaccggggagagagggagggcgcggcggccgcccccgctgtcagtcagcgccatgctgtccaatccgggccttgtcgccacagcctctcgg

SEQ ID NO: 388754 - DNA, 122 bp, Homo sapiens
ccgtgcggatagtgtggcaacctccggaggagcccaacggcatcatcctgggtaagggagcggcggtggccgggcgtggtggctcaggcctgtcatcccagcaccttgggagaccgaggcag

SEQ ID NO: 388755 - DNA, 122 bp, Homo sapiens
ggtacaaccctggcgggggtggtgcccgtggggcggggcaagaaaaggggaagagcccaacggtattaacccctcggcagccgcggcgctgctatgctgcagtctcccgcagagcccttggg

SEQ ID NO: 388756 - DNA, 122 bp, Homo sapiens
acgtggctgatgctccaggctgctcaagtcccgtgtgggttcctcactctgaaatcctcccgcacccaagcatgggggcgtctccctagtagtgacctggtccctttctcccaccctcttct

SEQ ID NO: 388757 - DNA, 122 bp, Homo sapiens
gcgggccgacgtcggcggcgaggaaggacggaggagcgccggagccgctttgctgccctccgcgtggtcccgtgcctccccgacaccatggccctggctgaggtagtagtttgtgctgttgg

SEQ ID NO: 388758 - DNA, 122 bp, Homo sapiens
tctccccccgcgtctcccgggagcgtcgccgccacctgcacgcgtccggcacacaaacgtcggtctcaccccttagtttctggaagagaaaaaggaaaagccaccgagaggcctgaccctga

SEQ ID NO: 388759 - DNA, 122 bp, Homo sapiens
ggctggcactttcagttcaaaggcgctgaggctctgaagttggcaaggaagaggataacccggagaagggaggactaagagaatttcacttgatgacccttgcctctttgtgtctgggatga

SEQ ID NO: 388760 - DNA, 122 bp, Homo sapiens
cgtgatccacctgcctcggcctcccaaagtgctggggttacaggtgtgagccaccgcgcccggctgcaaacacttcactgggcagctattccgcacccacccccactgcccagcgtcgagct

SEQ ID NO: 388761 - DNA, 122 bp, Homo sapiens
tattgttgaggctcatgatggacatgatgatgatgtgattgatattgaggatgaccttgacgatgtcattgaagaggtagaagactcaaaaccagataccactgctcctccttcatctccca

SEQ ID NO: 388762 - DNA, 122 bp, Homo sapiens
agagggcagagctttgtgatgttttgaaattaaaaattgctcaaccagcccaggagtcatcgcagccaccaccaggagtcatcacaagaaagacggtgactgtatcccctaggccaacgtcc

SEQ ID NO: 388763 - DNA, 122 bp, Homo sapiens
actcggcggggcaaccgggcgtttccacgctcaccacgtcggaaagaacatggtagcctgcgggcatggggcgccaatacgtgacaaaccgtccgtattgcgccctccccacggccagggcg

SEQ ID NO: 388764 - DNA, 122 bp, Homo sapiens
cggtctgcagcgggaggagcgcgggttccatcgcgccagatggcgctgtctggcttttctcgggcctcgggcgccagtctccagaggtctccggcgcagctgcctctctagccggccgacgc

SEQ ID NO: 388765 - DNA, 122 bp, Homo sapiens
gaggccgagagcccgctcggtggagactgggggtggaggtgcccggagcgtacccagcgccgggagtacctcccgctcacacctcgggctgcagttccctgggtggccgccgagacgctggc

SEQ ID NO: 388766 - DNA, 122 bp, Homo sapiens
gtatggacaaggagggctgatttcaatcgcgatgcaagccagctgtccggatgccgccgacgccagcagcgcggtacctgcgcgggcagcaggtgggagccgcgaccggggtggggcgcgga

SEQ ID NO: 388767 - DNA, 122 bp, Homo sapiens
cgccggctgctggcccacgccgcgccctcccgctacgcacgtgcgttggggtctccctggcggagaccccgtccccacaaccaagtgcgcccaacttactcaactcttagggcgggccggcg

SEQ ID NO: 388768 - DNA, 122 bp, Homo sapiens
gcacgtcggcctcctctgggccctcggggctcgcgggtgttttattccagaggggccgagcgagtcgtggagaggacacggggagagcgccggggtcctcccagccactgcagagccctcag

SEQ ID NO: 388769 - DNA, 122 bp, Homo sapiens
atcgtgggtgacaacctgggcctcttgtcccgagaggtgggcctgcgggtggctggcgtgcgttgcaactccattccggccgagtacatcagtgctgagaggtgagtgcggctctgtgggtg

SEQ ID NO: 388770 - DNA, 122 bp, Homo sapiens
tgtgcgtgtgtatatgtcagaagaagctgctgttggtttgtctaagagcccagatgcactcgtgtggaaattataaaggcagggccaggcaggcgggcggccaatcgccactgggctcgtca

SEQ ID NO: 388771 - DNA, 122 bp, Homo sapiens
ccagccctgtaggagcccaggctcagacacccaggatccatcgtggagcggttgtcccctcgccccaccctcctgcccccctgctcagcccatctgcagttcctgaagggtggcagcaggtg

SEQ ID NO: 388772 - DNA, 122 bp, Homo sapiens
gacctttgagactgtaacactttagttaagacctgaaggatgacagccagtcactagaatcgtgaatgaaaagaaagctccagacagaaggaaagaagagcaaaaaggtgccaaattaagca

SEQ ID NO: 388773 - DNA, 122 bp, Homo sapiens
gagggggacaaacggcagcgaagggggccgttcacttaccggggtcggggctggaggcgacgagctggctgccaaggctggtggctggcagtccgcacttactgcgcggagctgtctctcta

SEQ ID NO: 388774 - DNA, 122 bp, Homo sapiens
aggttgcagggactacggcggaaggcagtgcctgtggctctggcagagacactggccctgcgggcaagcagggctcgcaccaggttcatgttctggttcacaacagcgatgtgcagtgcagt

SEQ ID NO: 388775 - DNA, 122 bp, Homo sapiens
aagaattgtttttttatgattcacaagatgaatcttttagtaaacttaaatgccttccaacgtatccaattaatcgattcaacctttcccaagtaccggtttttctaaagggatcgtcattt

SEQ ID NO: 388776 - DNA, 122 bp, Homo sapiens
cgctggctaattacctcgctcgcaccaccgcgggtgaatgagagaatccggcattgtgcgcggcgaatggagaaaataagacagccattgtcctcgcacgccaaacgagggtttgatgtcgc

SEQ ID NO: 388777 - DNA, 122 bp, Homo sapiens
actctgtagccagtttaggaatgtcactttccaagtgactagtcagtgggctggggggctcgtcagggactgtaacttgcacgggcactcctaccacacactcccgtccctccgtaagtatc

SEQ ID NO: 388778 - DNA, 122 bp, Homo sapiens
ccacgggggttcgagccatgagaaacagcctgcctcttaacatattctgctgggacaaagcgccaggaacaccacattctgccggaaccacctcatcctgggaacacgttaacatcttcccg

SEQ ID NO: 388779 - DNA, 122 bp, Homo sapiens
gtctgagggctatgagggtagatggagggtggagggcagagggagaacgagggtaggagccgaggttcctgcaggagatgaaaggctttgttcatcacagttcgtagaggagagagaaggga

SEQ ID NO: 388780 - DNA, 122 bp, Homo sapiens
ccgccccggcccgccagcttctcgtatttctccttgtacaggtcccgctctttggccaggcgccccacctccagcttcagctgctccacctggctctggagttggcacttctcgctctccag

SEQ ID NO: 388781 - DNA, 122 bp, Homo sapiens
agcgtgcctgattagagtgagccctaaatccaatgactcccgtccttaagagacacagagcgcactcccacgtaacgagtgcctgacggccgggacagagactgcagagaagcagcaacggg

SEQ ID NO: 388782 - DNA, 122 bp, Homo sapiens
gcgcggcccgggggcggggcctgtcagcgctcggcttttctgcccccctttgcctttttgcgagtcttctcatcccgggacgcaaacctcgaaacagctgccggctggtcccggccgaggcc

SEQ ID NO: 388783 - DNA, 122 bp, Homo sapiens
caccttgctgctcccactggagagtcccgcagaagttggggcctgcagagagccccagaacgggggcagggacgttgggtctcggtcaggtcttcccggtgctctggtcccgcaggagagat

SEQ ID NO: 388784 - DNA, 122 bp, Homo sapiens
cagtcccatcgcactggcctggagctgggtggggtgagtgtgggagccgcaggtctgcagcggtcccccagccacactctctgcctgtctccgccacccattgcttgggacacttcccagca

SEQ ID NO: 388785 - DNA, 122 bp, Homo sapiens
cattgagaccacagcacccagctctctgggttcccagaaccctgtgggagggctgggtcgcgcctgcccccttttaaacacgaggcttccatggaagcttcttgccggaggctggacactga

SEQ ID NO: 388786 - DNA, 122 bp, Homo sapiens
aggtgcacaggagatacgggtgaaggctccttaaaactccctaccatggcacgaagacaccggaaaggcatgcagcaccgctgtgggcttcccaccctgaccccatccaggggctccggcac

SEQ ID NO: 388787 - DNA, 122 bp, Homo sapiens
gctgccagggacagatggcgttggcccgggtgtcaacacagcaggagcccccggaccagccgggcagaatccactgctgtccagagcctctgccaagcacagtggcaggccctgaactcagg

SEQ ID NO: 388788 - DNA, 122 bp, Homo sapiens
tactcaaactggcttatcaataagacagtttattatctcgtgtgataggaagttgaggaacggggcagcctccaggagaaggagagaggctcctgttctatcgcgtgccttctcttgattct

SEQ ID NO: 388789 - DNA, 122 bp, Homo sapiens
ggggataaaagggggacttctctgcctgggccttctcgcgaggaaagcccttcttaggcccggcggcctttcccgcagggcttgctgtgcacagcgaggcggcatgtgtaggagggcgaatg

SEQ ID NO: 388790 - DNA, 122 bp, Homo sapiens
ggaatccagctgccactaccttcaacaatcaaagaggaggaggaggaagcacaacagtgacgtgcaagaaacgccgagcgagcaggacagtagtaaaggctacagaaaggcaccggaagggc

SEQ ID NO: 388791 - DNA, 122 bp, Homo sapiens
agccaccacatgggtcggggccgcggtgtctcaagcccttcgtaggcttccaccgtcaggcggcgctcggcctagaggcccagcctagtcccccacgcctggatgtggaaagcgccctccac

SEQ ID NO: 388792 - DNA, 122 bp, Homo sapiens
ggctcccttctgcttatggaatgaacctgttctggcactcaaggtcctggtgatctaacccggacaaccccagctttatctccaccccctcaaccctgctcacacattccagcctccaggca

SEQ ID NO: 388793 - DNA, 122 bp, Homo sapiens
cgaccggacttcaggaacacagacgctcacgctgacagggtcggtagctgacccgagacgcggtaagcgcgaaggcagcctcctcgacccaagcctgaagcctgactaacccacaccgccct

SEQ ID NO: 388794 - DNA, 122 bp, Homo sapiens
gtaggcacggttgttggcctggaccttccaggtgaatgctgcagcgagagagccgggcgtcgctggagctcgaggcccaggacaaacacccctaatgaccgcccggaggagggctcatgggg

SEQ ID NO: 388795 - DNA, 122 bp, Homo sapiens
tgtgaaatacccaggcgaaagagacccgtgacaacttgactttctcctcttcgagaggcccgtgtgagctcgagagcccacagcccgtgtttccagtgtgactctgtttactaattatggaa

SEQ ID NO: 388796 - DNA, 122 bp, Homo sapiens
agagggccaagctggtgaatcctacttagagaagaaataataggaatccagccactcagacgatggacgaggaggggcacttccctgctcgatgtatgggccagcattgccttgatagcaaa

SEQ ID NO: 388797 - DNA, 122 bp, Homo sapiens
gccttctcccacttcttcttcctctgcctgctgctcagctcccccgcggctcgaaggttccgccaggacttcggatgcctcctgttcccgggactcctcgggatggccctggggctggacct

SEQ ID NO: 388798 - DNA, 122 bp, Homo sapiens
gccagggtcggggaccttgttcttaaactttccagattgtccccaggctcgcgtcgctcccgggaacggccaatggacgcttgtgttcttccagcgccccctacagccttgcaatggcatta

SEQ ID NO: 388799 - DNA, 122 bp, Homo sapiens
gggaaaatatgaatttttgctttgcaccttctagagtctgagacctgggattccaatccccgctccgtcattagcggcagggacatgttgggcacgtaacttaatctccctgtaaatctgtt

SEQ ID NO: 388800 - DNA, 122 bp, Homo sapiens
tctgtctcaggtgagactctcgctgctgggcacaggggctcggaagtcttgttgaatgcacggatgaatcatcgtggccctggcgtattttgaaaggaagaatctgggtagagtgaagataa

SEQ ID NO: 388801 - DNA, 122 bp, Homo sapiens
ggagggagggaagaaagagaaaggaaaaaaagaaacagaaagaaaaagaagtggagagagcgaaagaaacagaaagagaaagaaacagagaaagagaaacagagaaagagaaaaaagtaata

SEQ ID NO: 388802 - DNA, 122 bp, Homo sapiens
attttcagttcgccaactcatggtgcaaggtggctgttgtagctccagccattacgcccacgttccagttagcagaccttagtcacatgatcacatcaggctgcaaggaaggctagaaaata

SEQ ID NO: 388803 - DNA, 122 bp, Homo sapiens
tttggatccattctctttgatcaccctgaggcaaggagctgaccctctcctgtacccccacgctctgggccccatggcccatctggcagaaggaaagggctagaagggacttgttccttggt

SEQ ID NO: 388804 - DNA, 122 bp, Homo sapiens
ctgaagagaattgcataccactgctcaaaaattaaacacacacacttgcatgcatgcaaacgtgcgcgcgcgcacacacacacacacacacacaccaaggatagacatctcaatctcaagaa

SEQ ID NO: 388805 - DNA, 122 bp, Homo sapiens
cggaagtcgcggccgctgttttgaaatcgggccgcggggggtctctcaagctggttccaacgctgaggccccacagcctcccaattccgggcagacccctgacacctgctgtctggcccctt

SEQ ID NO: 388806 - DNA, 122 bp, Homo sapiens
ttagaatcactggctgaaaaagtgacctgggcttaagagtctgttgcccatctttgaagccggatatcatacttcactgcaaggtattatttctgacatgaaaagacttagctcattaaatt

SEQ ID NO: 388807 - DNA, 122 bp, Homo sapiens
gcaggtccccgtttcctcacgcggctcttcgaaggctctggggaggcccgagggggcggccgctctagggaagggaccatggagctccgaactacccctcagctgaaagtggtggggcaggg

SEQ ID NO: 388808 - DNA, 122 bp, Homo sapiens
gcagtggcatgctctcagctcactgcagccctgactgcctaggctccagcaatcttcttacgtcagcctccagagtagctgggaccgcaggcacttgccaccacgccccactaaaaattttt

SEQ ID NO: 388809 - DNA, 122 bp, Homo sapiens
ggaggcccaagttgggacagctccggagctaccccggtgcccctcagctgggggagggcgcgcggcagccgcctgccagccccacaggctgctctccaaaggagctgggctttttcagcgtt

SEQ ID NO: 388810 - DNA, 122 bp, Homo sapiens
aggcagcctgagggtgaggcgccactaataatgatgtgttttcagggggcgcctagtcctcgccatgatgctgtgggggagagacagaccacgtattattaactcaatttgacagatgagga

SEQ ID NO: 388811 - DNA, 122 bp, Homo sapiens
gccatggcggccccagcccggcccccactcgcagctgggctccagcccccatcaccccgccggggactgtccccctcggggcttcccatcatggccgtctccccgagctatccgcgctcccc

SEQ ID NO: 388812 - DNA, 122 bp, Homo sapiens
ggcggcggcgggattggctggggcgggcgggtgcgcagtccgctgggcagaggcttgggccgccgagctggacccggaccggttttgggtactgtactgggggcagggcagagaggtgggcg

SEQ ID NO: 388813 - DNA, 122 bp, Homo sapiens
tgttctagaattttactcatcctcttcctcatttgacagatttggaacctgggcctcagacggctatgacctgcccaagacctcacaagtagtgaggtgggcagggcagccggaactcaggt

SEQ ID NO: 388814 - DNA, 122 bp, Homo sapiens
ggtcttgtttaaatggtgactcctaaagaacaaatattcagaacctgctaggtacttgcccgccatactctttgtttcccaaaactcaccttttcatgatgataccaaaggtctaattccct

SEQ ID NO: 388815 - DNA, 122 bp, Homo sapiens
cttgctttgcacaggactctgttgacttctgtagtcttgcctgtggaagacaatgagtgacggcagaaagttactagcattcttttatggaagggaagtgggtaattaccatatccagacca

SEQ ID NO: 388816 - DNA, 122 bp, Homo sapiens
gagcagatggttgagtccttttagggacttagggggtgtctgtcccagagcccttgtggacgtttttcataactgcattttgagacatgcaggaaaggcctcatggctcactcagaaattgg

SEQ ID NO: 388817 - DNA, 122 bp, Homo sapiens
atcccgagtaaagggttcttgtggggtgagggcaagagtggaggatgttctgaagtccatcgccataccactggacagcaccaaatttagtttgagctgcagttctactcataagaatgtat

SEQ ID NO: 388818 - DNA, 122 bp, Homo sapiens
cggcctcaccctcgtgaaatcccgggagccggtgtctcactgtcaccagaccgacccagccgcggctcacacatccgttctcagccctgctgttcccactcctgggccctgctgccctgctg

SEQ ID NO: 388819 - DNA, 122 bp, Homo sapiens
ggcgggccggggcggggcccgaccaggaagtccgagggccgatctccccctctccagccccggcccgcccccagcctcgcccccggcccagtcccgggcttgccacgttcccctcccagtcc

SEQ ID NO: 388820 - DNA, 122 bp, Homo sapiens
cgtgatctgccctcctcagcctcccaaagtgctgagattacaggcgtgagccatcgcacccggcccatctagcacttttgtgattagcgtagcaccaaggctaacgtcttggtgttcataac

SEQ ID NO: 388821 - DNA, 122 bp, Homo sapiens
tgggtgcaggccaagtggtggcgaaggtgcgcgcagttgacgccgactcaggctacaacgcgtggctttcgtatgagctgcagcccccggcaagcagcgctcgcttcccgtttcgcgtgggg

SEQ ID NO: 388822 - DNA, 122 bp, Homo sapiens
tgcccggcgtgtcgcctgggcctcctcggaggtgctttaacaggctcttgcgcttttgaacggccctcctggactctgatctgtttaaactagaggcgttaataagtgataacctggatctg

SEQ ID NO: 388823 - DNA, 122 bp, Homo sapiens
tggccaccgcgtccacggagagagcaccccaggagctccagaaagaacgtgaccacaacgcgcagaaaccaagctgtgaggccaaggtccagcctttcccgcatggcgctttggctcctggg

SEQ ID NO: 388824 - DNA, 122 bp, Homo sapiens
ccccaggaggggatgggccgtggggcagaccaggggcccagagctcagggcagggggtaccgcttgtggggccgctcatttctgtttcgaggtacaccaagggttagaaaaaccacagtaag

SEQ ID NO: 388825 - DNA, 122 bp, Homo sapiens
aaagaccacctcgactaaacagactgttgtaactatgcattaggccttatacagaaaagacgctgaaattcggttaggcttcccgagacgctggctatagaaacgaccccaaatttctacgt

SEQ ID NO: 388826 - DNA, 122 bp, Homo sapiens
catgcttgcaaactacacaatgctgcaggtgcttcccaggggccacaggctgtcaggaaacgtgttttatgttaagtcacaaacccacttgacttctgggtactggaattaataccagtggg

SEQ ID NO: 388827 - DNA, 122 bp, Homo sapiens
gggcttttccgccggaaagagagtggatttactaggaaggtgggacgttggaggggtggccgcatggagtgagtactgtctctggccaccgagcagagccagtgacagcagcgtcctggtag

SEQ ID NO: 388828 - DNA, 122 bp, Homo sapiens
taaagaaacaagtaaaagacgcggttcctgagcgggggaggggcctttgggcgaaggaggcgcgtcgttttctcgaagccagagaaatttgtcctgtccgccccacccactcccctaagatg

SEQ ID NO: 388829 - DNA, 122 bp, Homo sapiens
tggcttctcttgcccggatcctgccatgacgtcacagggccagtaacgtcatagtcttcccgtgtccatctcctgtggcgccactaaggttggcggtagaacaatctggcagtctctactcc

SEQ ID NO: 388830 - DNA, 122 bp, Homo sapiens
ctggtttgagggtttccggggctctgagctcgcccactccgcctccctgcactccaggcgcgcagtcacttttttacagtgcaaggttggcgtgttaatctccctgggcctctccttgctgt

SEQ ID NO: 388831 - DNA, 122 bp, Homo sapiens
cagatgagtgaagattctgtagcctattatgtttctcttttaccctctctgtattaaagccgatccctcctgtgactttgagatggagtctcactctgttgcccaggctggagtgcagtgga

SEQ ID NO: 388832 - DNA, 122 bp, Homo sapiens
tgggaccggagtgtggacctgctgcctgccagctgtgccgtctcaggctggccatttagccgctctgtgttcgggtctctcgtccacgacactgggaaaaaccaagcccatctcacgggact

SEQ ID NO: 388833 - DNA, 122 bp, Homo sapiens
attaagggctcccaagaggggcccaaaattaccacccaaacaaagccaccttccagtagtcggcggggtcgccgctcccctgcggcagactggccagcgcgcggcgccctccatcccgtccc

SEQ ID NO: 388834 - DNA, 122 bp, Homo sapiens
ctggttgcggcctccagcaaaactgagaatcaaggaggtgctgccgaaagtatcgctcagcgatctacagagaagtctgcgggagtttgacggcggcggcgcagggtagcgcagtctattcc

SEQ ID NO: 388835 - DNA, 122 bp, Homo sapiens
acagaactccctgtgttcgtgaaaatctatactttcccagggaagaatggggggcgggggcgagccacgcaggaaacaattttcaacagaactcaagcaggtgaacggaatggctgtaggga

SEQ ID NO: 388836 - DNA, 122 bp, Homo sapiens
aaaatatgatctgtgacccaaaatagagactcaactatacctgcctgttcaaaatctacacgacttattaagaccctttcacaaatccagtgaaatcccaaaaatacagcagaaatgccatg

SEQ ID NO: 388837 - DNA, 122 bp, Homo sapiens
gaatagattgtaaacgtttctcatcagactttaagagtctgttctatcagcatttccaaacgggaggagggaatgcagagacatgtccagctcccacttcccatcattgcctgaatgagttt

SEQ ID NO: 388838 - DNA, 122 bp, Homo sapiens
agattcggggctgaggggctcactctgcaaccaaggcacgtgcattctggtcatcccacgcggggagcgcgcgcaaggcccgcccagcccccacatgccagccccaccctccagtcggtccg

SEQ ID NO: 388839 - DNA, 122 bp, Homo sapiens
ataaaacccaacaacatagaaggaagcctgccttcactctgtgaagagtgtctggacaaacgagagtagtttccaaacactgatcaaggatttctcccatccacacagtaagacaccagttg

SEQ ID NO: 388840 - DNA, 122 bp, Homo sapiens
ttactcacgctatgatgaactcctaagacgactaactttaatttgcatttaactaactagcgtaagtttagaaagaaaaccattttgcaacaaaatttcccacaagtggaagcattttcaga

SEQ ID NO: 388841 - DNA, 122 bp, Homo sapiens
ggtaaaatgtgcttaaaaaaaaaaaaaaacctatttaaaaaggaatcctgcttgttcctgcgctacatttttgtttagtctctttggttgacttggaatctctgcctgttctcggtgcatgc

SEQ ID NO: 388842 - DNA, 122 bp, Homo sapiens
tccctcggtatttataagataaactcttaagcagttaaggtaaccagaaagaacctaacacgcttaaaccttttctactttcccaacaaaccaacaatcatgatcatctgaaaatattattt

SEQ ID NO: 388843 - DNA, 122 bp, Homo sapiens
caatgcagcacacatgaatggcaacacaaaggtgaaagtatccttgcttaccatgccaaacggctgcatgtccatcccacagagttgccactgttttccttgcaccatcccataaattatga

SEQ ID NO: 388844 - DNA, 122 bp, Homo sapiens
agagacgcctcgccccaccagatgcattaggatgaaacgcgccgaaccgaaggtttagagcgccaggggagaagaggggcggggagagcaggctctttgacccagaggagggaggatctcca

SEQ ID NO: 388845 - DNA, 122 bp, Homo sapiens
gggaagaactgtctaacagtcagcactgtccaaccacagcaggagctgccttggggatggcgcgcttcctatcagccaaggtatgcaagcaggccaaggtgatcacttgcaggtacccaggg

SEQ ID NO: 388846 - DNA, 122 bp, Homo sapiens
tgtgtgtgtctttgtatgtgtctgtgtgtgtctgtgtgtgtgtgtgtgtgtgtgtgtgtgcgcgcttcgttctcagggacaggatggcagctgaaaataatccagcgatggcaaaaacgagg

SEQ ID NO: 388847 - DNA, 122 bp, Homo sapiens
actgtttctacttgaggcattatagaatatgaggcctgtaaaaataatttttgatcttgtcggtcagcttttgatgacaacagtgacaatgaagatggtaagagtaatgatgataactacca

SEQ ID NO: 388848 - DNA, 122 bp, Homo sapiens
tgccctgacaggtgtaaagtcaagccaagctctcaagatataaagtgagacaaataggaacgccatggctgtcctgggaggaaaaggatcaataatcactgagtacttagaaccaaatttgt

SEQ ID NO: 388849 - DNA, 122 bp, Homo sapiens
acggagtttctcggtggccgaaaccctcttttttctcagagtccagtttcttggtgacagcgctgttggttgcgccataaggaatgttgtccttgacaacccgccggccgcagtcattcgca

SEQ ID NO: 388850 - DNA, 122 bp, Homo sapiens
cctgataagaagaccactgagtgactatgaactagctctgtccagttgacagaggctgtgcgccgagtgctgtctccctccgggatctgcataaaacggcgtgcattcagtcctctaaagca

SEQ ID NO: 388851 - DNA, 122 bp, Homo sapiens
cagagtcttattggctacggaaattcaccttctttgggggcctgttgctaaggcggtcgacgtcatttgatcccctccaccttttcgcagggggtccaatttagtcccaattgacctgaaag

SEQ ID NO: 388852 - DNA, 122 bp, Homo sapiens
ctgcccttgtccccatgaccagctcagtagggttggcccagcatcgctctgtcaggtttccgggttggacaagtcttaggaccaaaggagcttgcagtgcccttcccagctccggtgcctct

SEQ ID NO: 388853 - DNA, 122 bp, Homo sapiens
aggcacagagaagctgtttcttggccgcggcatgcttgcatgagctatatggggtcttggcgctgggtctctcctctggaagccgtagtgaggctggaggctacgggaggatttctgggaat

SEQ ID NO: 388854 - DNA, 122 bp, Homo sapiens
caagtacagggttaaatgaactaagtaaggcatgtaaacagcttagtttaatgtttggcccgtggtatacaatctagcattagccatcattattggtaacccttgtttaggcagcctttctg

SEQ ID NO: 388855 - DNA, 122 bp, Homo sapiens
agaatagcagggtgagggaaagcctgggctttagagccagacacatacatggttgagttccggctccacttcttcacatccctgtgtgtcctcgggcaagataatttcaggtttctcatctg

SEQ ID NO: 388856 - DNA, 122 bp, Homo sapiens
agtaattaaagccgcgtggactggctggttttgcatttgaggggagcatttttactttatcgcggagcagaagcctgaataatggccccgtagtgatgaccgctgcggagccgggtgggcag

SEQ ID NO: 388857 - DNA, 122 bp, Homo sapiens
tggcagctgaatctgctgctggcgtaggcggcacagcgccgccaccggctctcccatgtccgacagggcaccactgatcctgctctcctgggccactatggtgactgctttcggccccttct

SEQ ID NO: 388858 - DNA, 122 bp, Homo sapiens
ataatgttgggaggatttaaggaattctccaacaaaggctgattgccttggtcacatgtacgctttcagtatggggtgtgtgtgtgtgtgtgtgtgtgttgggggagtggggtggcaggact

SEQ ID NO: 388859 - DNA, 122 bp, Homo sapiens
aggcggctctcccctgagtcccggcgcccaggtcccagttgaggccaggggagagggctgcggtagctagcactacgccactccgcgtgcgggccagggtctccaaggttcgggtcccgagc

SEQ ID NO: 388860 - DNA, 122 bp, Homo sapiens
cccccaaggtaggttctgcaaatccctagacccaggatatgttccttgaagagagtgctccgtggccaaagtaattagcaaaacatttgggttttttgtctgttttattttttaaatttatt

SEQ ID NO: 388861 - DNA, 122 bp, Homo sapiens
aggcatcggggtctaggtagaatgagcaagggtcctcggccattggcaggggcgggatgacgtggggaggacgggacaccctccggctgggtcactggccaagacagtgggggacacatgtc

SEQ ID NO: 388862 - DNA, 122 bp, Homo sapiens
caccctcggccgggctggaggggcagcgggggaggtggacgaccctgctctctcgtttgccgaatgaatgaaccagcttttccagcgcttcattcattctgcaaagttgatggcgcttccct

SEQ ID NO: 388863 - DNA, 122 bp, Homo sapiens
ttataatatatgatagcattgcaatcaatcacactcttacactgcattggctagtgacctcgaataccacaaaggaagagctagccaacatccaggaatcaattcttccagcttaaaaaaaa

SEQ ID NO: 388864 - DNA, 122 bp, Homo sapiens
gtgtggggcggggcggaggcagggcgtgcgcccccaggctggtgcctggggcagaggattcgcctgcttgacgcgctgatgccttgatttggtctgacaagtggaggctgctttgagaagcg

SEQ ID NO: 388865 - DNA, 122 bp, Homo sapiens
ccgcagcacccggagtgcctctatggttcttcctgtcgttagtcgggagggggcgctgtacgcgcgctgtacgcttgcgcgaggtgacgccggggcagggccggaaggaatgcagcggctgc

SEQ ID NO: 388866 - DNA, 122 bp, Homo sapiens
cctttcttagcagaaatgcaatgcaggcaggccaacataagctatatagaaagctgcagacgttaacagtcataagcttccaaaacaaaagggaaactgcctgatagcacacgtttctaagg

SEQ ID NO: 388867 - DNA, 122 bp, Homo sapiens
gccgccccgcgcccgcctcagacctctctgggacccgccggcctggcgtcctggcccgcccgagccccacggtccctcgggtcctaacctcggcggggcaggcacctcctcaggaagccccg

SEQ ID NO: 388868 - DNA, 122 bp, Homo sapiens
cccccccgcttgaaatctggtttccatgttcacaaaacgcagcccgactggtggaactcgcgactccagacgcagagaagctgtgggcagaggcggaggcagagggtgggaatgcagcctgg

SEQ ID NO: 388869 - DNA, 122 bp, Homo sapiens
tcaagagggcagccgtggcaaaggctggttggtccatttgcaccctaccttgctctagaacgcggcgcaggagcaaagatccaaactcggggtcaccagcaagcgggggtctcggttctaac

SEQ ID NO: 388870 - DNA, 122 bp, Homo sapiens
tttcgactctccctgcacaggccgtgggtcgtggctccgggtgagtggaaacatttgccccgcagcgaccaccgcccctccctccccgacctcgagccacaggaccaggggacggggctggg

SEQ ID NO: 388871 - DNA, 122 bp, Homo sapiens
ccggctcctgacctgagctgtagactgggcaggggtagatttcgcagtggtcgccccagccggcccccagagagcagcagcactcctgctgggtcacgttggtggccaatacgctgtcgcag

SEQ ID NO: 388872 - DNA, 122 bp, Homo sapiens
ccctgggacctcacacttctagtcgcgggagctgcaggtcttacccggagagacgctgcacgtggagccctcgccgctgccgttctcagccggctctggagtgcgggcgggggcgacagggc

SEQ ID NO: 388873 - DNA, 122 bp, Homo sapiens
atcataactacatcatttaatttggccaaaccggcccatttcaggtacccaaataccccacgtgctttcttgcttggctctgggactaatgtggttactggtgcagggtgagtggcaggtat

SEQ ID NO: 388874 - DNA, 122 bp, Homo sapiens
gtaagttgtgctttcatcgcttgcattacgcggcggacccaagttcgcttgaatggtaaacgagcgatgatttgtaataaacggtttaggctgtggggttggctcttcagtcctaacacagt

SEQ ID NO: 388875 - DNA, 122 bp, Homo sapiens
cacacgcctgggaacaggtgctggggcggcacccaagcacgggagccagcgttggggaagcggcacaccccagggagctagcgctggcaaagcacacccaccaagagtgagcgctagaaagc

SEQ ID NO: 388876 - DNA, 122 bp, Homo sapiens
atgattcctctgaagaaccagcctgtgaatcaaggaaacagcatcattaatacagtacgtcgcttaaggattgaaaaataaaccaaactgtcgtttttataagagcacattaaaaacttttc

SEQ ID NO: 388877 - DNA, 122 bp, Homo sapiens
tggggggcctctgtggtctccccagctgtcaagggctgcctccctctgttctgacctcatcgttattctggcagagtatactctgaagcgctggcttattttggaggggatgcaaagttttc

SEQ ID NO: 388878 - DNA, 122 bp, Homo sapiens
ccggaagccggagagctggagctttgaagccaccccggtcaaaggatgctgagtccggagcgcctagccctaccggactacgagtatctgggtaggaaccccctttaactttggggagggaa

SEQ ID NO: 388879 - DNA, 122 bp, Homo sapiens
atccatggagacccgacgccgccggactgcctgtcagctgcagctcggtagcctggggcccgccccgttcgcccggtctgtcttccgcgggccatgctacccaagctgactccgactggagt

SEQ ID NO: 388880 - DNA, 122 bp, Homo sapiens
tccggggctgctccgcccgccgtcccgaggccagccggccgcccagcaccgctccccatccgctctttgctccaggccctggatcttagataggggaagagatgagggtaagaaatcttttt

SEQ ID NO: 388881 - DNA, 122 bp, Homo sapiens
ttttttaattgggttgtttgtctttttgtcgttgagtggtgggagtttttaaatatattacggatattaaactcttatcaggtatatgatgtgcaaagattatctcctgtgggttatctttt

SEQ ID NO: 388882 - DNA, 122 bp, Homo sapiens
caccacgcccgacctaaaagtaaaatctttcaagcacaagttaagaccactgtatctttccgccttgattctccctcctatgtttggagtggactcggacattttgtttttgtattagtaat

SEQ ID NO: 388883 - DNA, 122 bp, Homo sapiens
tgctgcaccacatacgacccatcgtcagcaataacgtcttgttcacttgaaatttgttaacggaatagacctcatgttatttggagggcccggaggaagacaggaagagaagggaatgtttg

SEQ ID NO: 388884 - DNA, 122 bp, Homo sapiens
gaatgaccaatttcgctttgccttgtctgatcatcttcagagtctgcttgtaccccaggacgtacttcccacttttcataacgagttggagcctagagttgatcgactccagcgactttttc

SEQ ID NO: 388885 - DNA, 122 bp, Homo sapiens
ctggctatacgaccttaggtgggtcactacggctcagcctctgtgtcctcatctgtaaaacggggtaattgcacctactctagaaaatcttgagtatacacagaatttgtagctagtaccaa

SEQ ID NO: 388886 - DNA, 122 bp, Homo sapiens
gacagctctctcattctgttgagaattgcttggcccagttctgggccttgtctgaattgccggtttgctgcaatgttttttacaattgagcaatcacctagaaaaaagagaaggtgaaacta

SEQ ID NO: 388887 - DNA, 122 bp, Homo sapiens
gcgctgctgccgctgctgcagcagggccaagagcgcctcgtggagcgctaccacggccggcgcgccaagctggtggcctgtgacggcaacgagatcgacactatgttcatggaccgccgcca

SEQ ID NO: 388888 - DNA, 122 bp, Homo sapiens
gcctttgacgtgggttccagcgttgccgagggaaccgcgtgtttacgcaggagcgcggggcgggacggcagcccagtacccgctgcaaagccgacccgcgacaccgccactccggaggttac

SEQ ID NO: 388889 - DNA, 122 bp, Homo sapiens
ggggctggcgaagcgcgaggacccggggccgaggtgtggggctgaccatagagtgccggacgccggtgtgaacatacactatctgctcctgtagtgcccaggcccctgccggggagtccccg

SEQ ID NO: 388890 - DNA, 122 bp, Homo sapiens
gagctggggatgcagaggccggcgctgaggtggcagcggcagtggaggcttgggcgacagcggtggcggcaaggcctctcccggctgcagctagagtgccgagatgtaccgcagccgaatgg

SEQ ID NO: 388891 - DNA, 122 bp, Homo sapiens
aagcctgctgcacttccacggccattgaatcccaaaaactacaattcccattatgcaccgcgagttcgcggactaaacaggcataaactacaagccccagaatgccttgggcgagacgcgag

SEQ ID NO: 388892 - DNA, 122 bp, Homo sapiens
cctggggccgggcggggcggggcggggggcgcgagcagggaccgtcaaggcgggcggggtcgcaggcagccagggacgcgccctcctcggcggccaccttcgctgcctgttgggggctggga

SEQ ID NO: 388893 - DNA, 122 bp, Homo sapiens
gcccgggcgcgcaggcggcggctagcgctggagccccagccagctccctctccccacgtgcgcgctaggccttggttactctggcaactcgccccgctcagacggcaccaggcagctgaatc

SEQ ID NO: 388894 - DNA, 122 bp, Homo sapiens
aatcctgaattccagcaatacagcaacactgtttggtttgactgattcttgcctccctttcggaaaaagcttccgccgaacagaggattcatcagggtctcggctatgaagcctgtcttatc

SEQ ID NO: 388895 - DNA, 122 bp, Homo sapiens
cctcccctttccggcggcggctgcaatgaattccagatgtgaccggccggctggccggggcgcacgcgggggccgacaggagctgcacggagggccctttgtccgccccccccacccgatct

SEQ ID NO: 388896 - DNA, 122 bp, Homo sapiens
tgtagcagctagaggccgggaggggaggggagaatgaccatgagtctgagtgacaggcggcgaggagaggagccaatatatataaggaaggcccccagcgcgcaggtttcagtagcggcgct

SEQ ID NO: 388897 - DNA, 122 bp, Homo sapiens
caccgcaggcacggcacccggaccccagccaagggccccggggatcgccctgccctgcctcggcctgcagaacgggagtgcagagatcaccctggcatgaccccaccagtgtgtgcccccaa

SEQ ID NO: 388898 - DNA, 122 bp, Homo sapiens
gtctctgtttaatgatgaaagagtgagctaataggaggcaatttcaacttcactccctcacgctaccccttccccctccagactggccgtttcaaggatgaaaattgcattgcaaaatcaaa

SEQ ID NO: 388899 - DNA, 122 bp, Homo sapiens
aatccagcacttctgctgcacggcagcgtgacagttgacggcagggggcgctcatgcggtcgttggagtgagagttcgctgcctactttttggtagctcttcgcttctaattgagagaatga

SEQ ID NO: 388900 - DNA, 122 bp, Homo sapiens
accatccatgcctcggacgccctgaaacacaagatgggtgtgagcagcctgaaggtggcccggagggacctgtggttttcagaggcccggccattcccgagggtgtgacggtcagacctcca

SEQ ID NO: 388901 - DNA, 122 bp, Homo sapiens
ctcgaaggcgggtaaagctgcaagggaaggaagtaagggcgagcccgtcggactacgaagcgggacggaaactacaattcccagcaggccttgggcctcagtgcggccgcgaagcagagcgg

SEQ ID NO: 388902 - DNA, 122 bp, Homo sapiens
ccggtcactcaccgtgtggtgcggcgtgagctggaagaggttgggggagagaatggcgggcgcaaagaacctcaggaagatgaagctgctcactgcagtgtacctgacgtccgggtcatctg

SEQ ID NO: 388903 - DNA, 122 bp, Homo sapiens
gcctacctggcctccttggggaagtgacgaccgctgggagaacatcaggtgcactgtggacgtgggtctgggggtctcacccgcccagcgagagcagaaccaatccagtcaggatgtcactg

SEQ ID NO: 388904 - DNA, 122 bp, Homo sapiens
cgggccgcagcccagcccgccggccagcccagcactgccacactccgatgctgcagctagcgccgtccgacccggaagtaacccctcaccagacggaaaaccagcctccgccacgcgcgcac

SEQ ID NO: 388905 - DNA, 122 bp, Homo sapiens
acggaaagccacaccagctagtgatgtaggcacatgcaaactttctccttcctggcgccccggtgcagagtggccttgggggcggctgctcctccgggaaggtggagcagctggaaaagtgc

SEQ ID NO: 388906 - DNA, 122 bp, Homo sapiens
gcctgggagggccacgctggaccaacgtccctgctgggccaggctccgcgcggccggctgcgggagcctctgctcccgacacctgcctgcccgactcctggcccccaccccatccgcagaac

SEQ ID NO: 388907 - DNA, 122 bp, Homo sapiens
agtgtccctggctggtcttgccaaaggtgcagaagtcgggaggctggtacacagagcaggcgaggtacagtgctgccttccccatccctgtggcaggtaatgtcctgctggagttgagacag

SEQ ID NO: 388908 - DNA, 122 bp, Homo sapiens
gcagctcttgccgtaggatctgttcattgagctcatcctgttcttcattctcttcttccccggattccgtcgatggatccctggggaatccccttgaggccagcagcagggtttgcctggcg

SEQ ID NO: 388909 - DNA, 122 bp, Homo sapiens
accacggggtgccgggggggacccaacgcggaggcagcacggggtgtgggggggacccaacgcggaggcagcacggggtgtgggggggacccaacgcggaggcagcacgcggtgccgggggg

SEQ ID NO: 388910 - DNA, 122 bp, Homo sapiens
gcgttctcaggggcccgagtgggaaggccaggatggggagcctgaccgagggctgcctcacgctagaggggcccagggtgtctctctgagtcaattcctcctgctggcagggaccaccctgt

SEQ ID NO: 388911 - DNA, 122 bp, Homo sapiens
aaactccggacctaactccagcctaggggtacaaaggccagatcccccgccccaaccatgcgaggtccccgagggcgcccccttttgacgtcacggtacccaccatggtgctggcgccgcgg

SEQ ID NO: 388912 - DNA, 122 bp, Homo sapiens
tcgtctgggccgagcccgcccagctggctgagacgcgtggagcctggcggcgagtgggggcgtgcgacggttactctggttactggggccgcgccgcgctggcgagagccgccgcccgcgag

SEQ ID NO: 388913 - DNA, 122 bp, Homo sapiens
acgtccctccgtctgtccgggcggattagctcaggaagcagggcccgctcagctcggggccgaataacgggcgtttgttcccagagtctggctgtcttgtcacttatcagggaagtaggtca

SEQ ID NO: 388914 - DNA, 122 bp, Homo sapiens
ttatagcagagagttaacattcatatgggaaattttgagcaacctgtttgactcaggtcccggtgagagggcagtcttacataggagatgtacagaaagttttagtctccattcctaatcct

SEQ ID NO: 388915 - DNA, 122 bp, Homo sapiens
cctgaggcactgggacccccatggcaccagcaggacgaccacaggggcgcagcctccacccgggagaacacagacactgacaccaacgggttttcaaaaagtcagcaacaggcattagcgtg

SEQ ID NO: 388916 - DNA, 122 bp, Homo sapiens
ccagatatcttcgagagcagttggccaagatttctgacttttaccacatggcctccagcacgggcgatggccctgtccctgtgccaccagaggtggagcaagccatgaagcaatgggaatac

SEQ ID NO: 388917 - DNA, 122 bp, Homo sapiens
gcatcataccttttcctcactgattggttctcattcaagcatctacaaaggaccaggacacggaggtgtacaaggcaggctaggtctgtacctgcactgagtggtatttcctgttccaccaa

SEQ ID NO: 388918 - DNA, 122 bp, Homo sapiens
catgtccttccttcagaagcaggcatgctgcttagtctgtaacgtagactggcaaatgcacggaggtttttccaaaaggctgaggtagaggcattgcacacagcagtcagagacaccgacgt

SEQ ID NO: 388919 - DNA, 122 bp, Homo sapiens
gatgtagtcataaaagggggtcaagtagatgtttttctgttatgtaagcaataatttttccgtgtcttattgagtatggctagcgattatttattacatgctagatgggttctttgcatgtg

SEQ ID NO: 388920 - DNA, 122 bp, Homo sapiens
agcgcgactgggccccaggacaccatctgtgcgagcacggggactctgggccttgacctgcgcggggacacgggccctctctcggccttgacctccgcggggacacgggccctctctcggcc

SEQ ID NO: 388921 - DNA, 122 bp, Homo sapiens
ttcctatctgtcttggaataaatccaaactcctcccaattcatggtcggccttcctggtccgtgcagacctcgcctctcaccactccccctgctcactccgctccagccacaggggtctcct

SEQ ID NO: 388922 - DNA, 122 bp, Homo sapiens
tttgtggctctctggtcccctctttcctctgactttctggcctcgcctccgctggcgactcgccctcccagccccgcgtgccagggctcaggtgccaccccatgcccagtcgaggaagtgat

SEQ ID NO: 388923 - DNA, 122 bp, Homo sapiens
aaatgatagattaacagtaaggaaagagaacagttttctctgttgcttagcaattatacccgttattaggttttgctttagcttgagtctaatggactccagaagtcccttgttttgttttc

SEQ ID NO: 388924 - DNA, 122 bp, Homo sapiens
aattcagcagagagagaattggtggcaggtgtgggtcagccacttcgctccgggacccatcggtttgggacatgagggaggtgcaggagagccgccaggcagcagtgtggtgtctgcatcat

SEQ ID NO: 388925 - DNA, 122 bp, Homo sapiens
tgtcttcttatttgcatatatttctgagcaggaagttatgcgcagtacttttagtctccgcgtgaaaaggtccttcatgctaatctaattcaattcagttctcctttttctttcttcttctc

SEQ ID NO: 388926 - DNA, 122 bp, Homo sapiens
tgaggtgaaacttcttgcccatggttccacagctcagatgtgacaaaactgggctgtaatcgtacctttttaaactcccttccctcgatggaatcccagtgagagcctccatgaactgattg

SEQ ID NO: 388927 - DNA, 122 bp, Homo sapiens
gtcccaaagacactactaaaactgcccggaccctcccgctcccgagcctgcccgttagagcgcaaggaaaactcaccatccggcccccagtgcgtctcggaagagctcccgctccgaaacaa

SEQ ID NO: 388928 - DNA, 122 bp, Homo sapiens
ctctctggccagcacccccaccccttgctttgtttttaatttttaacttttgtttgggtacgtagtagatatgtatgtatatatttatggggtacatgggatattttgacacaggcctacaa

SEQ ID NO: 388929 - DNA, 122 bp, Homo sapiens
ctaatttatgtcctcctccaaacagcatcttggcttgccagccattagggtcatcatacacggaacaacatctctgggtctcagagcataaatacctactgtcaactgggctgggagagggc

SEQ ID NO: 388930 - DNA, 122 bp, Homo sapiens
cacatactcttccaatgagggcgtgatgcagcacccgcctcctccccaaccagatgattccggaaagtacggtgctgcaaaaggacatttcagagcgctttcaacaagctaactgtccagtg

SEQ ID NO: 388931 - DNA, 122 bp, Homo sapiens
tgttccttctggtgcgttcgtggtctacactgatttcaggagtgaaactgcaaacctccgcggtgagtgtcacagctcctaaaaatgcagcacgtccagagttctttgcccctcccagtgga

SEQ ID NO: 388932 - DNA, 122 bp, Homo sapiens
tgggaacaaatgggcggggatttccccggaagtctccctttatggagggttggggttgggcgctccgcagtcctcccagggccgctctgaccggccgctctgtaacttctcgcctcctcttc

SEQ ID NO: 388933 - DNA, 122 bp, Homo sapiens
gcgcgggaactaacgggcagagtctgtggggtcgggatgactgaaaacaggccctgtcttcggtttaggctcaggcggaaaccccccgggggcctctgggggctgcggtcggtgccaggggt

SEQ ID NO: 388934 - DNA, 122 bp, Homo sapiens
ctcttgatttgggtttacacggagtcctttcatggactatcctgagtattgtcagtaaaacgtcttggggcataagaacttgtctgaatctgtcatacataccactgctgtcttttccgagt

SEQ ID NO: 388935 - DNA, 122 bp, Homo sapiens
tcttttctgcattaccaacagctaagaattttagccatgggaagaacttttctcattctccgtaaggccaaaaaggaaaaggcatttgcctgtgtttataattgttaacaagcttttcaacg

SEQ ID NO: 388936 - DNA, 122 bp, Homo sapiens
gggtctccaaggaagatccttttagtcacatcctcaatgacctccttgaccttctcattccggaaggtgaagatgaaggggttgaggaaaggggttaccattgcagtcaccatggccaccgc

SEQ ID NO: 388937 - DNA, 122 bp, Homo sapiens
aacgacggcgcgtaggaacgacctcggagttccggatcgcgcagagggacaaatttgttccggagatactatcgcacggcgaggcatggacgctttcatgggtggttacgcgacagttgcca

SEQ ID NO: 388938 - DNA, 122 bp, Homo sapiens
aaagacctctccttctctcgccggaaatatccctctttcgggaagcgctcccctgccttccggaaaggaagagccctgatcgcgcccctgcactcaagcctctgggtgatagagcgaggaga

SEQ ID NO: 388939 - DNA, 122 bp, Homo sapiens
gagtggcgatctgcgtctgtgggtgacgcgcatcacggggtgtggagaggtgcacctgtgcgggatttccacgccacctccaccctccaccctccaccctccaccccacctcgtgccttccc

SEQ ID NO: 388940 - DNA, 122 bp, Homo sapiens
agtcgcgagcggggaatcacggtcgcgcaggcgcagaagtagtacggtgggccgaaggcgcgcggctgcgcatgcgcactgggcccggggccgggtgggagagttctagactcgatgtttgt

SEQ ID NO: 388941 - DNA, 122 bp, Homo sapiens
ttaaaggctgcggagtgccagcgcgcaaggagtagacggcagcggctgcagcagaggcggcgcgggctgtaccagccccacctgcctgccacctgcgggccccgggcagcagacgtcgacag

SEQ ID NO: 388942 - DNA, 122 bp, Homo sapiens
tccatgggtcagcgtggaactgggcaggcaaaaacctgcccccgtggggctcccccagaccgcctatgctatagagcttgctgtgtggaggtgttctctctgccgtccaggattgtggccac

SEQ ID NO: 388943 - DNA, 122 bp, Homo sapiens
ctctaccaggatggttttggattcctctccagccaggagttggaacatagtagcctgtgtcgtctaaaatcatgaggtcatacccaggtgccttccctttggttcttgacttgccccctatt

SEQ ID NO: 388944 - DNA, 122 bp, Homo sapiens
ctgcggcctgtggttactgactgactgctcactaacttgtttctacatgaaaccacgaatcgtgcagggttctagagaaacaaagggccgcgcgcacccgcaggcccctgcgtggaggcgag

SEQ ID NO: 388945 - DNA, 122 bp, Homo sapiens
ctgcagatccgtctccccggctccaagtttctggttggactggggcgggggtgtccctgccgccgccgtctcacacccccacctccctgagctcagcaccacacccccttagcgctgggcca

SEQ ID NO: 388946 - DNA, 122 bp, Homo sapiens
ttctatgttatgatttgtattcagattattctgatttaactcttgacccagcagccccaccggtgtacaatgatctctgttgttagactggagatctcccgcagcttttctcttctctgagt

SEQ ID NO: 388947 - DNA, 122 bp, Homo sapiens
gggcttttcaatgacgggcggggttacggttgggcagcaggtgggcgtggcaggcataggcggagtcaatctatgagtgggtgggcctatcgccaggccgagagtgggcgtggccgacgtgg

SEQ ID NO: 388948 - DNA, 122 bp, Homo sapiens
atgccaccatgcccggctaatttttaaaaaatttttagagtcgatgtttcgtcatgttgccgagactggtctccaactccggagctcaagcaatcctcctgcttaggcctcccaaagtgctg

SEQ ID NO: 388949 - DNA, 122 bp, Homo sapiens
gaaggtgctgacacctgcacaaagacagcccctcctgagctgccaggaggaggtgctcctcgcagtcagtgtaaataggctgctggaatggccccagatggccaccagggagggccacatgc

SEQ ID NO: 388950 - DNA, 122 bp, Homo sapiens
gaatatgaaccaattaaaagcatttcattagctcttctctcttcatcaggtccgcaacgccggctcaggttctgagacgcagcttcgcgtctcctgggacagtgtcttgagtgcggagcaga

SEQ ID NO: 388951 - DNA, 122 bp, Homo sapiens
acctgcagggccagagcgaggcgcgagaaggacggcggcgtgagggggcggggcgcgcagcgcgagaaggcaggcacgaggggcgagcgcgaggcggggcacggcgcgtggcgtgagacggg

SEQ ID NO: 388952 - DNA, 122 bp, Homo sapiens
ggcaggctgggaagcggcgccatattggcgtcggccgcgctgtattgtcataaatagagccggttttgtggtgttttcactactcggttggatgcctcagccatagtaagtgggaaagtgag

SEQ ID NO: 388953 - DNA, 122 bp, Homo sapiens
agcgtctgtgaatcaggcctcctaagcagatttatatcagtttggcctctgtgagggctccgattgcggaagggcctcccagattaagtgaaacccaaaactaatccactcccggaacccta

SEQ ID NO: 388954 - DNA, 122 bp, Homo sapiens
gcaggagttacccatccaccggctatatttcacggccaggagagtcctctttgtctttttcgcaacaggaatattctgcctttgtatgggcatcatccttatattgtctgcaaggagcactc

SEQ ID NO: 388955 - DNA, 122 bp, Homo sapiens
attcctatatgcaaattagctgctccagtgccgaaagctccgccccatttgtagttgcgtcggctgtccagcacccagtgcaaacgaggcgtgggtcccggaagctctgttctgcgggtggc

SEQ ID NO: 388956 - DNA, 122 bp, Homo sapiens
cccagtgtccccgcccaggtcctcaaccaggtccccgcccagcgtccccgcccagcctcccggggtctacaccaggccacctgcgctcgctggttgacagcacagccccttccggctagctt

SEQ ID NO: 388957 - DNA, 122 bp, Homo sapiens
cgaactccgggcctcaaatgatcctctgcctgggcctgtccaaagtgttgagattacaggcgtgacctattacgtccgacctgccttttgggtttttggtttttgttttgttttgtttaatt

SEQ ID NO: 388958 - DNA, 122 bp, Homo sapiens
ctggggtgggcggggaaagcctcaagcgagtggcgccgccgtgacgtcacatgggtgcgacgcggcgctctaccacgatccggacttctctgtggtgagttggacgactgactagccgggcg

SEQ ID NO: 388959 - DNA, 122 bp, Homo sapiens
agatgtcatcgggcttcagggttcagaagcatcgaggactggtggccggccctctgtgctcgccgtgtgacaattccagtggctttcctggcaccatcagatgcctggtgccacaagcttgg

SEQ ID NO: 388960 - DNA, 122 bp, Homo sapiens
taaaactgagaggagggaacttgtcatattcatctttgtagcaggatgttgatttgtaaacgaagtgttgatgcattgttgatgttacttatttaataaaggtataatagatattagcaggg

SEQ ID NO: 388961 - DNA, 122 bp, Homo sapiens
agtcgctggacaaaactcaggggtcggattccctggcccttagccaaaagcaaagctttccgttctccgggaaagaaaataaacccagtcccctttgagatccagggcaggggagaggaaaa

SEQ ID NO: 388962 - DNA, 122 bp, Homo sapiens
gtgacgcactttacggcggcagcgtaagtgcgtgacgctcgtcagtggcttcagttcacacgtggcgccagcggaggcaggttgatgtgtttgtgcttccttctacagccaatatgaaaagg

SEQ ID NO: 388963 - DNA, 122 bp, Homo sapiens
ccagacggaggcgactagcaggacttgtgctctaggcggctcttggtcacgtgacggccacgtcaccagtgcgctctggcccccaatttccactcccacaagcagtgcggcaggcgccagcc

SEQ ID NO: 388964 - DNA, 122 bp, Homo sapiens
ccaactcctgacctcaggtaatccacctgccttggcctcccaaagtgctaggattacaggcgtgagccactgtgcccgccctcagcaggttctttaaaacagttatttttatgaaatttgga

SEQ ID NO: 388965 - DNA, 122 bp, Homo sapiens
tgggggcccctgggctcccagggtgggagctggctccgaggctggctggctccgcaggtccgctgacgtcgccgcccagatggcctccaggctgaccctgctgaccctcctgctgctgctgc

SEQ ID NO: 388966 - DNA, 122 bp, Homo sapiens
aggcaattattaactccagggaaaacaaaaagttgtgcaagaaatgccatcctagaacaccgtgttctctcctgagacgtgtggtaatgaagctgtaataacacccatgcagctatgatgcc

SEQ ID NO: 388967 - DNA, 122 bp, Homo sapiens
tgggacacacagggagcgtttcttttagtcagcagcatttcctgccagcatggcagcctccgggcaaactcagaggtggaggaaaagtgcagtcctagcaggttgttctcggagccctctca

SEQ ID NO: 388968 - DNA, 122 bp, Homo sapiens
tgcccttgaggagctcaggctgcagaggcgagaatgggaggataactcagccccatgtgccgtccttgaatgggtctaatggggcccacggtcattgcatgtggctgacgtggcgtgactag

SEQ ID NO: 388969 - DNA, 122 bp, Homo sapiens
ccccacctatgctctctaggtggtagtctgactatggggcggagtgggccacgaagcacccgctccagcgcagagcgagagcgctcggggattcagcaccacgaggcggacagctccaggcc

SEQ ID NO: 388970 - DNA, 122 bp, Homo sapiens
tcctctgatataaactgtgatccagctcagaccaggcatctatttttgtcccctgctccccgactatgtaaaaaattcccatcactaaaccttctcattattgggagggggcgtgagcatgc

SEQ ID NO: 388971 - DNA, 122 bp, Homo sapiens
cacagcctgattagacccgtggtacaacagcggaccagagctggagaggtgagtaatgcccgggggtctgcattttctgtctgcactcccactgccctgcagcacctgcgggcccacagcac

SEQ ID NO: 388972 - DNA, 122 bp, Homo sapiens
ccagtgctgctagaagggtcacacatgtcccagaatcccccaggagtgatgcaaatggagcggcccatgccccgatctcagccagtctcttcaccactctggcttttttattcctttttgtt

SEQ ID NO: 388973 - DNA, 122 bp, Homo sapiens
ccccgggaccccttgcaggaactgtatccctgcctgcgacgggggcgagatagatgattccgcgggccctcaccgacctccggctctaaggaaggagtgaaggaagcgcgggggtgattttg

SEQ ID NO: 388974 - DNA, 122 bp, Homo sapiens
acccaggatggctttacctgcacaaaaagtgtagctgagtatctgatcattctctgcagccgcaaattgcttggatgtggtggagggtcctggttcaagcccaaggttaagatcttcttact

SEQ ID NO: 388975 - DNA, 122 bp, Homo sapiens
aggcaacaacgcccctagtctctccgttcgggaagacgcgtggccctgcctgccacccaccggaagtgagggcaaatggcaacagcggctctggaattctatacaggcattgctgaggacac

SEQ ID NO: 388976 - DNA, 122 bp, Homo sapiens
actgtggattctggagcaatgttcatattccatgcaaggatgccaagggccaggttccaacgtgggattgtttctcccgccccatgagggtccattgccaaggagggacacacgcaggaaaa

SEQ ID NO: 388977 - DNA, 122 bp, Homo sapiens
gtacacgcacttcgacgtccagtttttggagaagtttggggtcaccttcaggagggaaggcgagacggtcactctcaagtgcaccatgctggtgacgccggacctgaagcgggtgcagccgc

SEQ ID NO: 388978 - DNA, 122 bp, Homo sapiens
tcaggtctgcacgtggccctgagcagctcgccggaaggttccagcctggtctttttattccgtttcccttcccagggccggtccagccccacagacaccgtctccacccacgagttggaggc

SEQ ID NO: 388979 - DNA, 122 bp, Homo sapiens
cctgtagtatctctgaggtacgcctgtataatgaccagaaggaatttgctgtggtacttacggtaccatttgcttccaaaattcatgtgatttctaccactccatttgaatagattactatc

SEQ ID NO: 388980 - DNA, 122 bp, Homo sapiens
aatgtcctagtgagctgctcccgttgggtaggctcctgcgcctcaaccgcgctcggtactcgacgtttattatcagggaattctcggctgcaagatgggaattccacccccaccccattttg

SEQ ID NO: 388981 - DNA, 122 bp, Homo sapiens
ttgtccatggggtaggtcatgggctgcagggcctcccaggagtcagtggtgtggtcatagcgctcggtgctgtcggcggccaccacgtacagcagtccgtccagcacagaggagctgtggta

SEQ ID NO: 388982 - DNA, 122 bp, Homo sapiens
ggcctcgtcagaagtggagaatgcagtgtcagcatgacacctccggggcatggaggctcgcgccagggctgcacctagctgcctcttctcctggcctatgtcccaaccctggagaatgctgc

SEQ ID NO: 388983 - DNA, 122 bp, Homo sapiens
gcacagagcccggtgcatgtactcagccaaccaatcaggaaaacaacaaaagaggacatccggaaacaggtgaatgaattgacagcttgcactctcaggaggagacgtggccagtttaaaaa

SEQ ID NO: 388984 - DNA, 122 bp, Homo sapiens
ccagggccctgagggaaggcccaggcccaggactggctccagctttcctcctgagggctccgctcttgacggaggctggagtgccggcgctcagggctcacccccttggctccaaggtcctc

SEQ ID NO: 388985 - DNA, 122 bp, Homo sapiens
cagtgaaccaaactgctcatggagaaatgctgaaagcggtcacacccagaaagacaaactcgggctactgtttacacactttacctaaaaatcttcctttttatttttctttaaaatatgac

SEQ ID NO: 388986 - DNA, 122 bp, Homo sapiens
ggactgagggcctcatttgctcactgactgttagccagagcctccctcagttatttgccacgtttactcaaattgcagcagctggcttccatcagagcaagcaaatgagagggagagaggct

SEQ ID NO: 388987 - DNA, 122 bp, Homo sapiens
gtggggagctggagaggagcaggtgcggaagtggctccgctcctgtgggtgtcggggcaacgtgggacgctcggagcaggtgcggaagtggctccgctcctgtgggtgtcggggcaacgtgg

SEQ ID NO: 388988 - DNA, 122 bp, Homo sapiens
cactcctcaccgcagctgccaggttcgccacgaccacctcctggaacgcccacagcgttgcgacccgccagtgccaggacccaccagtgaccggttggagcctcgctcacctcggcggggcc

SEQ ID NO: 388989 - DNA, 122 bp, Homo sapiens
agcgcattcaaggaccactcattggcagagccaagcttaggctcacggcgagagctgactcgagtttggtctccaataaaaaggctatctttattaggaagggcttgagttactagggaaga

SEQ ID NO: 388990 - DNA, 122 bp, Homo sapiens
ggagggaatgggcgaggcaggttgagcaggtttaggattagctgtttgaataatgttagccggctctggggcctggatgctgtctctagttgtctgtcacctggctctagggggattagggc

SEQ ID NO: 388991 - DNA, 122 bp, Homo sapiens
gggcgcggctgggagcgcggggcgcggcctcaagaggagaaggggcggtgggtcctggggcgtgccagaacccttgaggaagaagcgctggtgttctggagtatgaccaccggagccggccg

SEQ ID NO: 388992 - DNA, 122 bp, Homo sapiens
tgggggcggggagacccgcgcaggacccgtgctatcctttgggattttgaggggcgggtccggcaaggccccccaaagtggctgctcctgcgagtctccgagaggggaacaggtggtcgcgg

SEQ ID NO: 388993 - DNA, 122 bp, Homo sapiens
taccgagacattccgtttccaggggcatgcaggaggcagaggccttcctcttacctcaaccgcaagaggccttcctcttttactgatcctcctcagcacagacccttcatgggtgtcgggct

SEQ ID NO: 388994 - DNA, 122 bp, Homo sapiens
tgccttgcctgctggggtgcatgggagcccgcgctgtgggcatgcccttagaggctgccacgtgggggcagctcggcacttcaagcgcccacccgcacgcagccccagacccacaggccgaa

SEQ ID NO: 388995 - DNA, 122 bp, Homo sapiens
gggttaacagggttactcgcttctccttaggcctgtgctccttctcttccttcatggctacgtcccccgctgaagcggcttggccggaacggggttaccccgggcacaaacggctcccggga

SEQ ID NO: 388996 - DNA, 122 bp, Homo sapiens
gggcctcctggttgggcgggggcaccaggaagcacacggagggcacggcggcctcgctgccggagctgctgagcaccttccagtgggacggctgtgcagggcccaccagctggcactcgtca

SEQ ID NO: 388997 - DNA, 122 bp, Homo sapiens
gcacttccaagccctgctcactcatcctcgcctctgcctgcccagctcacttctccctcccggctgcctgcctctgtcccgagcccgccacctgccctcgcggccatccatgctaacagaga

SEQ ID NO: 388998 - DNA, 122 bp, Homo sapiens
gcctggtcactgtctcaggcactcagtttcagacaggcatgtggctccagggaaggccatcgagctcacttcagagcccagccagccccatcccggcagagtcaggatgacaaaggcagggc

SEQ ID NO: 388999 - DNA, 122 bp, Homo sapiens
gcttccggctatgggtaccgcgggccggaagtgtagcgttgccatggcgagggccgggtgcggggcccgcccccgcagcgcctcagggagcgcggggcccactgacccgcggaagccagcgg

SEQ ID NO: 389000 - DNA, 122 bp, Homo sapiens
ccactcacctgtcggcggatgcccggcgaggggcgggaaggggctgtgggaggaaggggtcgcagcctaccacctgcagccctcgactggggcccagaccagtctggccctggccccgcctt

SEQ ID NO: 389001 - DNA, 122 bp, Homo sapiens
ccaatgctccctccaccctgttcagctgcaatccttttatcttgcctggtgccttgccttcgagagggatcacgtcatgggagaactggccctggatctgcctgagagaccgagggcagagg

SEQ ID NO: 389002 - DNA, 122 bp, Homo sapiens
cttctttgaaagtagtaagcaaatgggagttcaacctgctcatgtgtgaaaatgctggtgcgtctggtttacccagctggtgacgccgtggtcttctactgtccaacagtggtatccacagt

SEQ ID NO: 389003 - DNA, 122 bp, Homo sapiens
agaggaggtgggggccggcaagtggggtgctgacagccagtgccacgggacccatgtggccggaggcttggccagtggctcagcagatgacaggcggaaaatccctgtcaccagtccggtac

SEQ ID NO: 389004 - DNA, 122 bp, Homo sapiens
aagacctgatgagagaccacaggaaggggtgaggcccgggctgctgctgcccacggtacccgagatgagggtctggagccgctgtgccacctacctgcccttccagcaggaaccgggcaaag

SEQ ID NO: 389005 - DNA, 122 bp, Homo sapiens
cggccctgacccgaaagcggggcaggggtgcggaggacaggatctccgatgtccctgctccgcgggcgcccgcagtgctgagccgaagctcggcggggctgagctccagctgggggcgggta

SEQ ID NO: 389006 - DNA, 122 bp, Homo sapiens
gtggccagcgggggcatgatggatgggcagagaggaaacaaagggaaaagagggacctctcgtggtggtgaatcatatgtgtctacgtggctaggctgtgctgccctcatgttcaggcatca

SEQ ID NO: 389007 - DNA, 122 bp, Homo sapiens
agtagtgacctgtgggattctggctgggtgtccgtgacttaccctcaaagagaacctgcacgcctggggtcccaggatggctggcttgcccctcccgtccgaagatgacctcgtccttctct

SEQ ID NO: 389008 - DNA, 122 bp, Homo sapiens
catcctgttgtccccttgcccacccttccaggcagctggtcactgcattccaagggaaggcgccaaggggaccaggtgggacccccacctttgacctgcctctgacctcaggcctctgacct

SEQ ID NO: 389009 - DNA, 122 bp, Homo sapiens
acgttgcctctcatataatggcaccaatttcattaggaatcaaatgctcagcgtttctcacgtacgcttctagtccttttggctgcctccctcgaaagaccaagaattaaatagatcagagg

SEQ ID NO: 389010 - DNA, 122 bp, Homo sapiens
ccacttcccaggcagcccaggatgtgtactgtcaccggccttaccgcaggatccacagcacggagcaaacagcatttggaagtcgtgttcgcagtacttccggccttcaaactgcaaagggg

SEQ ID NO: 389011 - DNA, 122 bp, Homo sapiens
ttcagccttgaaaactaggtttcatgtcactctggtagggtaaagtccccctcctggatacgcgtacttgaataaagctccatcttttagataacacattatcacactctattgtaatgcct

SEQ ID NO: 389012 - DNA, 122 bp, Homo sapiens
gggtttggaggggtgagggtagagggatggagaggagggaaaaggacaggcaaaggggcacggatacctccatcagggagtgagcatgcccccacacaaattccttaaggcaccctgtgagg

SEQ ID NO: 389013 - DNA, 122 bp, Homo sapiens
ctgcctgcacgtcttgtcctaaaaaatgttaacggtggccttccgcaagccgggttctctcggcacaccattaactaaacttaagaggtttgtgtctcaacaaagcaaaggcagggaagcaa

SEQ ID NO: 389014 - DNA, 122 bp, Homo sapiens
tctttcccttttcttttccaagatgtaactacggatcagacactaaggaccttcacgtttcgctgatgtagtttttggaggaaaaaggggggggagtgaagggcgtcggtttttttttgtgt

SEQ ID NO: 389015 - DNA, 122 bp, Homo sapiens
gcggggtgggctgggggcgcggatcagtgggacggagttcggggttcggctccgagcgggcgggctggaagtgggggatccctcagccgcctccacgggccggccccgcgctcacgtcggtt

SEQ ID NO: 389016 - DNA, 122 bp, Homo sapiens
tgcagttgacaagggctcggtctccccagtgccacactgttcagggcagtgctgctgtcccggggcccaggctggagctcagcagatttgccttgattggaggaggagggcatcctaggagg

SEQ ID NO: 389017 - DNA, 122 bp, Homo sapiens
ggccttggaatccagctctcatttcgtatgtgacctgcagggaagtaagttaaatgcacacgttttatcaagttcaaatgcaaacttaattttaaatgtatgcaacatcagtttaagcgttg

SEQ ID NO: 389018 - DNA, 122 bp, Homo sapiens
ctcggcaacgcgccctcggcccgcagcctcctgccccctgtgccccgcttcggcccccagcgcagctgcagaggggcccccctcgacgcatacactcaagagcccgaccgcgcggctgaaat

SEQ ID NO: 389019 - DNA, 122 bp, Homo sapiens
ggtagggtataaataccagaatagaatttgggaattgaaggaaggactaaaatggtttatcggcattttttagcatgaggaattaaagtcatattttaaagccttggaagttgaagctttgt

SEQ ID NO: 389020 - DNA, 122 bp, Homo sapiens
taatactgcaatgaataagagtgtatcgatatttctgcaagatcctaacttccattctttcggatgcatactcagatgtgttctttgttttaagggtatatatttttatttagtttgtcaat

SEQ ID NO: 389021 - DNA, 122 bp, Homo sapiens
aaaccaaatccagacctcaccagatctgtcaaggtccaggctcatgacccccctccgggtcgcccaccctaatcgcagtgactatccgtccttgctctgaacagaagtttttatatccatta

SEQ ID NO: 389022 - DNA, 122 bp, Homo sapiens
gctttccacgctcgtgcacccaggtccgcgccagtttctcccgccctgccacacccccggcgctcgcccactcgtgccccactgcccagtggcctgcgcagccctgccctgccctacgcaac

SEQ ID NO: 389023 - DNA, 122 bp, Homo sapiens
gtgtgcaaggtgggggctgcacgtgcgggcttggggactgcgtgcaccaggggctgcaggcgctggggagggtgtggggggctgtgcgtggggctgccctcaccaaaggctgcacgctcagg

SEQ ID NO: 389024 - DNA, 122 bp, Homo sapiens
tgacataaaggattaagaccgcaaattgtccttcatgggtagagtcaggaagcccggtggcgtggcacaacacactttggtcatttctcaaaaaccacagtcctcaccacagtttattgatt

SEQ ID NO: 389025 - DNA, 122 bp, Homo sapiens
tcatggccaaccttgagtaacagcaggtcttctgtgggagaagttgctggagtccaaccccggaagtagcaagtgcctctcccacagctgagggccagaacaccacgttctcttgtgctctg

SEQ ID NO: 389026 - DNA, 122 bp, Homo sapiens
agaggtagcctctgcagatccacagcaaattctactgagggaattctttcctctagaagacgctctaagagtaacaaaaagtaagagctaatttgggtttgtctcctgtgtggtttctactt

SEQ ID NO: 389027 - DNA, 122 bp, Homo sapiens
cccagggccatccaccttgcctctcaggcacgtggtcagaattaatggccctaaaaataccgcccttcttgtttttctccctccggcatggcggcaggggcttatttttggaaggcagatga

SEQ ID NO: 389028 - DNA, 122 bp, Homo sapiens
gcagctgtgccaggcggccggacagtcggctctgtagagacatgagcgggcggcgcgggacggctctccgcccacttggactctatttacggcgctcgggagtgtctctcccttatttactc

SEQ ID NO: 389029 - DNA, 122 bp, Homo sapiens
cacgctaactagggatgaagcctggatttcaaggtgaagcctttctccagttaaggacagcgcgtccaggcgcactggacggaagcagcgctggcagaggctccggacgtccggagtgagct

SEQ ID NO: 389030 - DNA, 122 bp, Homo sapiens
cgcacggtgccaaggagactgtgccctgccttgacaacagttgctaaggggcggagacttcggctcggttcccgagacggaatacccaggagtcgagtacttgggcgcatgcggcaaccgta

SEQ ID NO: 389031 - DNA, 122 bp, Homo sapiens
cattttggccaatgcaaatcatctactctcctctgacaagcctactcatcataacccgcacgtcttgaatcttcctagaagatgaaatcagaccagtcttgcgggctctacatggttacaac

SEQ ID NO: 389032 - DNA, 122 bp, Homo sapiens
agaatttgatgatttaggagctgtggttccagagtcccagttggggaactgtccggttcccgcagggctagaagaggggcctccggcccgggtctgtgtgtctgctcctctggacctcggac

SEQ ID NO: 389033 - DNA, 122 bp, Homo sapiens
gctctcaggctctcgggctcccctgggctgtgacggctgagcggtggcaggagctgagagcgagtgagctagttagcggtctgcacgcccgggagtcagcactgggatatgacagcatgtaa

SEQ ID NO: 389034 - DNA, 122 bp, Homo sapiens
tggggtcaccacagacctgtaaattctcgcccatcttccttcaaccagagcaaatgcagacgttcccctgggaatccggaagtcgcttccttttgtgtttaaagtcgccctgaggctgttcc

SEQ ID NO: 389035 - DNA, 122 bp, Homo sapiens
aaacaagttgtgcaaaatggctgcagggtagattggctctcccttttaaagctctccatccggctgggtttatttgtaaatactgcatctatccttcttagtgttttaggactggctggaaa

SEQ ID NO: 389036 - DNA, 122 bp, Homo sapiens
agcggtgacatgggtaattaattcaaatgagcctggggcaaagttctttaaagggaaacccgacctcctagagggcttcttcaactgtaaaatggggatgataataatagtgtttattgcat

SEQ ID NO: 389037 - DNA, 122 bp, Homo sapiens
agaggtctcaaaacttcagattctcactttcctcttcagcctccagtgcccaggtgcagccgaggtgggaaatccagcctccgcccactcccccattagtggggccgaagctcgctcttccc

SEQ ID NO: 389038 - DNA, 122 bp, Homo sapiens
tggagaggaagctaagttctcgtcttccccgtcaccccgcagatgttcgggcctgctcctcggccccctgtgccaacaacaggacctgcgtgagcctggacgatggcctctatgaatgctcc

SEQ ID NO: 389039 - DNA, 122 bp, Homo sapiens
aaactctggaggattcccaaggcttccactgaaatttttgttcgtggccgggtcttctgtcggttttcctcatctgactctgctggagaggccaccgtgggttgccgtggggggagccgagg

SEQ ID NO: 389040 - DNA, 122 bp, Homo sapiens
ccaaagtctgcgggttcctgcgggggccaggggaggggcgagccctacaggcaacttgaacggagagcgctttgatcactcaccagcccgggaaggcaagccccagtcaggcggaaggtagc

SEQ ID NO: 389041 - DNA, 122 bp, Homo sapiens
ttggaatttccagtggggccacctggtcacagatggggcacaggcaccaaagcacggaggcggagggagcctgacaacagcctcgggggctgacagttgctacattgttctatttgcttagt

SEQ ID NO: 389042 - DNA, 122 bp, Homo sapiens
cccagtgagatgggagccactgagtgccctcggcggtccctggaggggtcctgagggcgtcgtaacgtgtctgttttctcttttggtggctttctgaaaaggaaaaagcattttcattttga

SEQ ID NO: 389043 - DNA, 122 bp, Homo sapiens
atgacgacaaagcctggtcctccgccagcgcggcgcttctagggtcagattatccgcacacgagtatgtaaagacaaaatccaaaatgcatgccatggaatgaggggcaccacacaaggcgg

SEQ ID NO: 389044 - DNA, 122 bp, Homo sapiens
agacggagaggcagtcgctttgagctactcctggctatttgttgggaaatcacctaaatccgttcagatttagccagaaaaggggaaataagtctccctcgccggccaaatcatggcctttg

SEQ ID NO: 389045 - DNA, 122 bp, Homo sapiens
ggtctggattccacatctatacgtatttcgcccccgccccgcaggaggcccagcctgcggcggtggctgcttccccgagacttgagcacgagtgtgtgtggggccaacactggccaggaagg

SEQ ID NO: 389046 - DNA, 122 bp, Homo sapiens
ttatgcagggttgggtaggcctcaggaaacttacaaccatagcagaaggggaagcaaacacgatggagaggtgctgagcaaaagggttggaaaagcccctaataaaaccattagatcttgtg

SEQ ID NO: 389047 - DNA, 122 bp, Homo sapiens
cagcgtctggtgttggaacctgcagttctccgggtcgaaatagtgctggaaggacaagagcgaaccacgtgaaggctggcagtgggggccccacccactccccagctcctcctggggccaca

SEQ ID NO: 389048 - DNA, 122 bp, Homo sapiens
gcgcgaggggaggggagggcaggccgggtgactgcgactccgcgtgctcacctgctggtccgcgaggctgagggagggggcgccgggggcggggccagagcgcggctggccaatgggggagc

SEQ ID NO: 389049 - DNA, 122 bp, Homo sapiens
ggcgccgtggagcagggggcagcgctcattggggaggctcggccctgcaggagcccatggcggggcggggcggggcagggcgggccggggccggggccggggcggggcggggggggcggggg

SEQ ID NO: 389050 - DNA, 122 bp, Homo sapiens
tttgtatttggtgcggagtatcacatcctctccggaccctaacaggatgtgtcgcctgctcgctccaaccccacaaacgccgtctgggctggcactccgacttcttcttccctgttgcagcc

SEQ ID NO: 389051 - DNA, 122 bp, Homo sapiens
tttttttttctttaaactttattttcctttcttaaagaggtccctcctcccccatccccgcgctcaattcctttagctggatccttccagttcatgactgatcggtttaaaatatgggtcgt

SEQ ID NO: 389052 - DNA, 122 bp, Homo sapiens
ggggggtgttgatgcatttatttgcatttgccatttttatttgccttaggaacttcagaccgcaggcctccttaagcatgaactgtttgttaaagtctggtgttgccttttgtggactggtc

SEQ ID NO: 389053 - DNA, 122 bp, Homo sapiens
ggtcccgcagagccttggtacttggacctgaaccttgctccgagagggagtcctcgcggacgtcagccaaggtgagacggcgagccctcagctctccgcccgggctttcccaaaggcgagat

SEQ ID NO: 389054 - DNA, 122 bp, Homo sapiens
ctcagcccctgctggcctctgctctggggactgcaggggtcccttacagtccaggagcctcgagatggtgggctccgaggagggctgagcctcagaattgggtgggggggtgagccgggaag

SEQ ID NO: 389055 - DNA, 122 bp, Homo sapiens
tcctcctctgtaaaatgggccccttctgagggctggctgcgcgctaatggcgggaggatgcgaagagggccaggcagggcagagggaccgggagactcggtgtcccgcgcaggcagaggcgg

SEQ ID NO: 389056 - DNA, 122 bp, Homo sapiens
tctaagactgaatggggatgacctgtggggtgagtgcaggatggcgcctggcccagggaacgcgcttggtgaatgttgactggcgtctgcccgccatggctgggcctctgcgcaggtcacca

SEQ ID NO: 389057 - DNA, 122 bp, Homo sapiens
acggttcgcaagcacctagggaagcctgaccggcgggggaaaagcccaggcgacatcagtcgtgccctggtactggctgcccggcagagggcgccaccatgccccgctctcaccgttttgca

SEQ ID NO: 389058 - DNA, 122 bp, Homo sapiens
agagagccaccactggctgataccccaacttccagaaattcacaatttccatccaggtctcgcctgtccctgtggggccacgctctgaggtgccccagctttcaaggaagggtgttcaggct

SEQ ID NO: 389059 - DNA, 122 bp, Homo sapiens
ggccagcccagcctattttttaatttcagtttatcttatttttgagacagagtctctctccgttgcccaggctggagtgcagtggcacaatcacagctcactgcagccttgacctcctgggc

SEQ ID NO: 389060 - DNA, 122 bp, Homo sapiens
gtgcaggcagggaattctctttgttttccttctctctccctccattccttgaggggagatcgcctttccctctctatcttcctgcagaactctgactcaaagccccaagcaggaatacccac

SEQ ID NO: 389061 - DNA, 122 bp, Homo sapiens
caaaatgaatgatccgaaagaaggctttgatgtgcataaacctgacactggaagagagatcgctctttggggaggaaatatgatgaagaactgagatgctggaatcttataaacataagccc

SEQ ID NO: 389062 - DNA, 122 bp, Homo sapiens
acacacacacccagaggcaccctgtgggagtccctcttaagctctccccactggctcattcgctactgatgacttgtggacccagacactttcatcactctcaaccagtcttttatgtgtga

SEQ ID NO: 389063 - DNA, 122 bp, Homo sapiens
cgcggccgcgcaacgatgggcgggacggggcagaagtgtgggcgagctggggcgtcaccgcgcgccgggtagtctctctcacgccctggcgggtgcgcaggtctctaaactgggcggagcaa

SEQ ID NO: 389064 - DNA, 122 bp, Homo sapiens
tctaatggctcttttttttttttaatcttttttctttgttttgagacggagtcttgctgtcgcccaagctgaagtgcagtagcgcaatctcggctcgctgcaacctccgcctcctgagttca

SEQ ID NO: 389065 - DNA, 122 bp, Homo sapiens
agctgccactgggacatcctgagcttctcccactgtccaaggagatgcccccaacagagccgactcctgcaggaccctgctccagcactgtggtcatgttagttttgattgttagcatctgc

SEQ ID NO: 389066 - DNA, 122 bp, Homo sapiens
cacacacgcgcgcacacacgcacgcgcacgcgcacgcctgcgtacacagaggtgtggtggcggggaaactccgaaggcatagccacggttcccacagccctctggcagggccagctcgctgc

SEQ ID NO: 389067 - DNA, 122 bp, Homo sapiens
acgtcctcttcctacaagccttttccaggacctagcaaactaaggggttatcagcatttccgggactagtatcagcaatccaagggtagcacaagtaattttgtaacacttagtgcctgata

SEQ ID NO: 389068 - DNA, 122 bp, Homo sapiens
ccgggctcagggagcttcagagcaagaaacaccgaaggtgtaaagcccgagcgagcagctcgagtctcagtcctgcagcctaaggcagcccctccaagccgtgggcgccggccgtccgtctc

SEQ ID NO: 389069 - DNA, 122 bp, Homo sapiens
gcccaggttcccgcggccttgcgagggcacgcagggcaaacagtgctttatctttcgcagcggcgatgagctggtgacttttgggggtcatcctgagggacatagacgaaactggttgggag

SEQ ID NO: 389070 - DNA, 122 bp, Homo sapiens
gagatattaacaccacctggcaagagctggtttcactccgggctcccccggaaggacggccggctcggagtgggggcaccacctgaggaaacaatttttaggttcctgaacagtgaccgtct

SEQ ID NO: 389071 - DNA, 122 bp, Homo sapiens
actgttaaccagtactgaggagaagcacaatcaacatagtttctctgtcacctttcttgccggttttttcctcccaaccatggagtctccattttctaagcaattaaattatatattcaaca

SEQ ID NO: 389072 - DNA, 122 bp, Homo sapiens
ggacactcaatgaaaaggccacatgaatccctggggcgtccagagcatgggtgaccagcacgggctcaccacatgaggccaaggggctgcaccatacagcctctcctttggccacccgtgac

SEQ ID NO: 389073 - DNA, 122 bp, Homo sapiens
agtagaggacgattgctccttaaaataagagcgagaggatctttcttacctgactgaatacgtgtgatctttttattatttatgaggaaaactgcagtgcaaacaaaataaaagaccagagc

SEQ ID NO: 389074 - DNA, 122 bp, Homo sapiens
actacctagcggggtgggtcagaagggcggcggggcgggccactaagtaaggcgaaagcccgggaggcgtggtgctgggcggggcgtcagggggcggggcttcgcgtcgggggcggaaccca

SEQ ID NO: 389075 - DNA, 122 bp, Homo sapiens
taagccaccgcgcccggccgagattataaaatttagacataattcatttttaattaaaatcgcagaatggactgtaatagttctgtcaccacctgcgaataatcagcagcggctagtcttcc

SEQ ID NO: 389076 - DNA, 122 bp, Homo sapiens
cgactgccagtccgtcgcccgcacaatcctgctccaaaccgcaggcctcacacttcaccgcgccgcagccacccctaccacagaggagctggaaacactgagcattcctattaaataagcct

SEQ ID NO: 389077 - DNA, 122 bp, Homo sapiens
tcctggtccttttaagggcttacaactgtaagagggtctgcgtgaaagggttgtgatagacggagcaagtgatctataggcaacacatggttagagttggggggttaatctttaacctcagg

SEQ ID NO: 389078 - DNA, 122 bp, Homo sapiens
actcccgggcatccccattggctgcgtgcttctccggctctcaattcgctgtacgtcatccgtgcatggctgcccattggccctctgcaatacttgtcttcatctcaccgcctatgcccccg

SEQ ID NO: 389079 - DNA, 122 bp, Homo sapiens
gagagggctttgcaaaccaaacagcattgcgagactgcacagtgggttgctgttataaatcgtaacgacacacacattcacattctgtaaaggatatatatgtgaagggggcttttctgcaa

SEQ ID NO: 389080 - DNA, 122 bp, Homo sapiens
agctctgctccccgcgcgcggctcacccaggtcccagtcgctttcagccgcgcgctcacacgttttcctgtcgcctgcccccgttctgttcgcgcgtgctgcgctctccagccaccctgacg

SEQ ID NO: 389081 - DNA, 122 bp, Homo sapiens
ggccgcagaccgaggcccacgccgcgctggcaccagggctttggcctggcccgtgctggccggctggcagcgccactagcaggcggcgaccgctgacatttatctttgtctcttttcaggtc

SEQ ID NO: 389082 - DNA, 122 bp, Homo sapiens
tgcgggtcccgcacactgcacccatttcctggatgtcccctgcaggcgcgggaggccatccgggcctgctggctgcggccccctctcagccaggcctggctcagcccactgcgtgggaggtc

SEQ ID NO: 389083 - DNA, 122 bp, Homo sapiens
caggtgctgtctgacctggctgggcggtagctttggctccaaggtccgctccccggtcagcgagatcctgttcaatgatgaaatggatgacttcagctctcccaacatcaccaacgagtttg

SEQ ID NO: 389084 - DNA, 122 bp, Homo sapiens
ttggcccaggcaggaggacctgtgaattctgggaagtggagtccatttgctctgtggagtcgtgggaactttggctcaggcaggcggattcgggggattctgggaagtgtagtccagacgcc

SEQ ID NO: 389085 - DNA, 122 bp, Homo sapiens
taataatttattacttttaacccattcagaaaactgcttttgatttgttttccctttaaacgaaacaaaacatgtttgtggtttcataaaaggaaacagctgagcccttgctccaacgagct

SEQ ID NO: 389086 - DNA, 122 bp, Homo sapiens
caaaccagggggcgatctggaaccctctgggagtaaagggctaagctataagcgcagggtcgacgggcagggaccggaaacaaattctaggaaccgagatccgctgagcagcagggaagctg

SEQ ID NO: 389087 - DNA, 122 bp, Homo sapiens
ggtcttggcccaggtgggctgcggtagggcagcaggactcaccgatgtagcgatcgctctcgttgctctggcccccaatggccacgcggctgcagcccagcaatgcccgcagccgctggaac

SEQ ID NO: 389088 - DNA, 122 bp, Homo sapiens
gctgtcgtgctgccccagcactacttgggtaggtttggtgtcctatatggactcagggtgcgaaagagcactgaagccagactgtgcatctgtggccggttgtgcaggcgactgaagcattg

SEQ ID NO: 389089 - DNA, 122 bp, Homo sapiens
tctcgtttctgtcattcttgtatggtcttgggtaacgtaattcacctcagttcagtcttccgtacaaccagaataacaacacctacgtgatagtatcgatcgcggattaaagatcatccgtt

SEQ ID NO: 389090 - DNA, 122 bp, Homo sapiens
tctcatgagtggttcagcactatccccttggtactgtcctcacaatcatgagtgacttgtcgtgagatctggccactgaaaactctatatcactccctactctccgtgatttcctcttgcca

SEQ ID NO: 389091 - DNA, 122 bp, Homo sapiens
cggacggactcggcccattcccaggtctgggctggcggggggttgggggatctccctccacgctactaggagacagagaacgagggtatcgggagcgggggggggctgtctcccgcctgaac

SEQ ID NO: 389092 - DNA, 122 bp, Homo sapiens
gaggagccagtgggctgcaggcgcaggcgcaggcgcaggcacaggcgaggggttgggtggcggttgagacagcggcggtactgggatgggtaggtgaggatcccgagactgagtgagcttct

SEQ ID NO: 389093 - DNA, 122 bp, Homo sapiens
ttttttttttgagacgtagtctcgcactgttgccagggctggagtccagtggcgcaatctcggctcactgcaacctccgcctcccgggttcacgcgattctccttgcctcagcctcctgcgt

SEQ ID NO: 389094 - DNA, 122 bp, Homo sapiens
tcgaaccggggaactctgcatattttcctcctgggtttgtggggtgtggacagcacggagcgtgatgaaaggatacaggcggctgggcgtggtggctcacgcctgtaatcccagcactttgg

SEQ ID NO: 389095 - DNA, 122 bp, Homo sapiens
tggaagacccgctttttcaagggcgaagaccccacattcttggagggcctagctttcctccgggcccagctctacactcaccttacgcctcttctccccgcgggaggtgaggggttgcgggg

SEQ ID NO: 389096 - DNA, 122 bp, Homo sapiens
ggaggttggtgaaataggggcgtggtctccctcgggggcgtggcgatccggctcaaaaggcggggcctgggtggaacctagcctatggcaattgagaagccagattaaaggggttactagca

SEQ ID NO: 389097 - DNA, 122 bp, Homo sapiens
tctgggaggacagagggcaggaaaggggtgcagccaaaatcaaactcggttccacttggacgagcagtggggagattcgctgtctaaacaactaaggagagtttttaaaaccacttaccaga

SEQ ID NO: 389098 - DNA, 122 bp, Homo sapiens
cttgcctcttgcagcttctgtggccccaggaaatccttggagttccttggactgtagctgcgtcactccaatctctgcctccatcttcacaggatggccccttctgtgtttctcctgtcatg

SEQ ID NO: 389099 - DNA, 122 bp, Homo sapiens
agattccacctcccctcccaagtgaccctcctcctgcctctggtatccttccttttgaaacgaagctcagcttcgaagatgtgaacaagaataaaaggaaaaaattctaatgtatatataac

SEQ ID NO: 389100 - DNA, 122 bp, Homo sapiens
agagtcacagagtggctagagcttgagctgggtggagtttagttacatacgtcacctacacgtagcccttggcagtctccaagtactttcaggccgttggtcgtcccaggaggacctgaaga

SEQ ID NO: 389101 - DNA, 122 bp, Homo sapiens
gccagggccagtgatattgcagccaagagcctggggagagctggctgctgtccagcccaccggctgggtcctgcagtggacagtgaatgccactcctccctccccctaatcactgtgtgtgt

SEQ ID NO: 389102 - DNA, 122 bp, Homo sapiens
ataggaaaggagaaagagttgattctagtcactcacacccagcagccaacacagagtcaacgacctgaaagtatggggcaaaatattctctccttttctctactccatttcctcacttcact

SEQ ID NO: 389103 - DNA, 122 bp, Homo sapiens
aaaacggggctcaccggctttgggaatctcgtcagctgcccccagcgcactggtagactacgaaagttcaaaccccttgcaaacatcaaagctaggaatatttcgcctgagtgcagagggag

SEQ ID NO: 389104 - DNA, 122 bp, Homo sapiens
ctgacgcgagtggcctcccgatcccgcagtcgagtggagaaccgagtcccgacctaaggtcgaatcatcaggcgtccccgtcacccaacaacccactcaggcacttccggtaagaaatctag

SEQ ID NO: 389105 - DNA, 122 bp, Homo sapiens
tttctctgtcctgttattacggcagtaaattatagtaaggttggagcccattctcaacatcgcagaattggctttctgctactatcccaatcacagccaccccaattagtcaccggctgaat

SEQ ID NO: 389106 - DNA, 122 bp, Homo sapiens
ccccaccagaaggaagcgtcccctgggagacgcgttcccagcatctcagcaggtgtggagcggcttccgggtgtgtgctctcccccagggatccaggtgggtcatccatgcttccctcagtc

SEQ ID NO: 389107 - DNA, 122 bp, Homo sapiens
aaatattactgtttattaccaggcataccccagtaaaataaagaggcaaccaggcgatagcgactatctcaccagccgctgcacctataggacttggagacgtcacgagtcacgcaaccggc

SEQ ID NO: 389108 - DNA, 122 bp, Homo sapiens
ccctgtttccagggtctgagcgggtcaccaggtgagcacgccccagagctcaaaactcgtcgctggctgccctgcgtccacccggccgactactggccatggagccgcgcacagggggcgcc

SEQ ID NO: 389109 - DNA, 122 bp, Homo sapiens
gcggcggcggcgacaggcgaggaagcgagtgcagggaacttaggccctggcggggccaggcgcgcccgccccgctcccacagcaaaacttgcggcggcccccgcccgccgcgcctcggccca

SEQ ID NO: 389110 - DNA, 122 bp, Homo sapiens
ccgatggtggttacaggccgactatagggcagaaggccccaggagttcttggtgaagccacgtccatagaaagcacaagggtagatgtgtaccatgctctggaaccacttctggaagcggtt

SEQ ID NO: 389111 - DNA, 122 bp, Homo sapiens
ttattagtcttagcagtaattgccagtgtttaagtagcatattggcatctacttagcaagcgttatctgtatattactggctgggactatgacagaagaaaaggcaaatatatactctaaaa

SEQ ID NO: 389112 - DNA, 122 bp, Homo sapiens
aagctgccttcgacggccgagaagcgcctcgattcttgcccctggctcatttccctggcgcgttttccagacgcctccgctcccaacgctgggctcaaccctgtcttccccagctggtctcc

SEQ ID NO: 389113 - DNA, 122 bp, Homo sapiens
ccatcctggtagcatcctttttttcagtccctgctattgtttctgatggctctctaatttcgcgcatttctccctctttatcctccatttctgcttcccctctgttctccctggagaagggc

SEQ ID NO: 389114 - DNA, 122 bp, Homo sapiens
gccgtctcgttcaggacgatgctggcctgcgccaggaagccatctaggtcgcggtgcgcacggatctcttccttgaagttctttaacttcaggtactgaggggaccccagggacagaaccac

SEQ ID NO: 389115 - DNA, 122 bp, Homo sapiens
gcctcccgagttcaagcgattctcctgcctcagcctcccgaggagctaggaccacagacgcgtgccaccatgtctggctaatttttaaatatttttaatggatatggggtttcaccatgttg

SEQ ID NO: 389116 - DNA, 122 bp, Homo sapiens
gcatactcctaaattcatccattcaatagaataattacataatatctaaacaaacaatgacgtgtggatagcctagtactactctggacactaagtatacagtagagaacaaaacagacacc

SEQ ID NO: 389117 - DNA, 122 bp, Homo sapiens
ggcacaaaccctttctcaagaagggccaaggcattttaaagataagaaacttaaaatcagcgtatttttacatataagcagccacctctgctcatctgtggcccagatacgagtggagtgcg

SEQ ID NO: 389118 - DNA, 122 bp, Homo sapiens
cagccacagctagttgtcaggggccaacatctgggccgggctggaactggctcagaaactcgcgtttgcctgcttatttctgcagctgggctccttgccaggtgcaaccacatctatgagaa

SEQ ID NO: 389119 - DNA, 122 bp, Homo sapiens
cctgaagggcgcctggtgggatggtttggttagtcaggtggaccccactaaggcactgggcgtggctgcacaaaagtggcctccacccagcaagatgatttcagaaccacagttcagatgtg

SEQ ID NO: 389120 - DNA, 122 bp, Homo sapiens
ctatgaaaaaggcgaaggaagaagacttaaagatgatccaaaaaaatgatctgcagaacacgatgactggtgtttagcatcttccataaagacagaacaagataaaaagaatcagaggtttg

SEQ ID NO: 389121 - DNA, 122 bp, Homo sapiens
ggctgcatggctgcaaggttccccatgttgccatggcgggggtggggggcaatacggggccgccaagactggttgaggggcaggtcataagtctagggtttcccctggggccggtccaggat

SEQ ID NO: 389122 - DNA, 122 bp, Homo sapiens
ccaagcgcggctcttggctcgctggcgggcagcgtccacagagtgtggaaccgccgcagccgcagctcccgcccgctggcgggcagacactagcaggagaaaggacacaaggcctgcgtggt

SEQ ID NO: 389123 - DNA, 122 bp, Homo sapiens
gatcgccgagggaaaaagggtggccagaaccggaagcccgcccgagggccaagccgtttccgcgatccgcctgtccccggctccatctcctttttcttgacagtctctcaggtagggccgcg

SEQ ID NO: 389124 - DNA, 122 bp, Homo sapiens
ccgttctcgcccctagacccggcaccacccccaactcagttcccgcacttcctctcctcccggctcccaggttcgctgagaccccagtattaccacccaacaaggctcggcccacgggggct

SEQ ID NO: 389125 - DNA, 122 bp, Homo sapiens
ccccgggagttgtagttcgggactgagaccctgtcggggttgggggatcccgcggcagggcgaggcagtcggataagcgctcctccagtccctgcctcgctctggaccctggctaggctgct

SEQ ID NO: 389126 - DNA, 122 bp, Homo sapiens
gtcacttgactgtcgtgtgcattgttttccccatctgtaaaatcttagtgtccttaaccacgtaaaacacttaggacagtgcataggacgtagggagaactatagttattcattcaaggtgt

SEQ ID NO: 389127 - DNA, 122 bp, Homo sapiens
gggtaaggagaatgctgtcactctacgagaaaacccaaagtgaacccggctaatcaggaccgtgcttgggaagggagcaggggcattacctttcaacaccagaggttctttgccttctctct

SEQ ID NO: 389128 - DNA, 122 bp, Homo sapiens
cagacaagtgccgaggccgccctgcgcgcccaaggcagggccaggcgggagcgggtctcacgcccaggtctgactgcaaacgtaccccaagagatctggtcagtcccagaccgtgtgcccga

SEQ ID NO: 389129 - DNA, 122 bp, Homo sapiens
ccagggaaaaatggtgcgagagatcccacagaaaccaccgagttttacagcacagagaaacgacagattgcgataagccctcttccaggctgcactaaactcaagcctctatcctgctggat

SEQ ID NO: 389130 - DNA, 122 bp, Homo sapiens
tggcggcgtagagcgccagggtgccaacttcgcttccaggcctgtgggttccgcccggcgcgtgctgctgtcagtcaacgccctcggcccgcccccgccgaagctccaccaatcgtagccgg

SEQ ID NO: 389131 - DNA, 122 bp, Homo sapiens
ctcattatgcttgctcttgcatctgccatctgacactttgcttaactcctggccagctaccggtacaagccaagctctcactccataacgtccttcttctctgcatgcccttctccactgtg

SEQ ID NO: 389132 - DNA, 122 bp, Homo sapiens
cagcaggtctttttccagaaagaagggaatgagccaccccaagcaacagctcctgacactcgtgttctgagaaattctgagaaacagctgcaatatctgcctccttaattgtacctggagcc

SEQ ID NO: 389133 - DNA, 122 bp, Homo sapiens
agggctctggacccggcctcggaggcctgaggagttgggaggggcggcggccgcgtcctccgcaactctggggagaagtcttagtttccgcgcagccaaacgcgattggaccccgccctccg

SEQ ID NO: 389134 - DNA, 122 bp, Homo sapiens
gatccgaccaggatgccgctaccggctacagcccagaggcccgctcctgcggcgcaagcccgccttcctgaagaaaaagcccagtcccggcagcgttcttctccggctccgcccttcttccg

SEQ ID NO: 389135 - DNA, 122 bp, Homo sapiens
ggaggtattcaagttggaaaatgcaaagtgtccctttttttttttcacatcaacaacttacgtttatgctaatctacttaaatgttaagtctggccaagcaattagactatttaaccttgtt

SEQ ID NO: 389136 - DNA, 122 bp, Homo sapiens
gacgcagaagttaaggaggcagttactcctagggtcctgtaagtgctggcagggtcagcccgtgagagtgagtgcctctttaaatttgcgtcacagacgcctgcttacctcaccccagtcca

SEQ ID NO: 389137 - DNA, 122 bp, Homo sapiens
ggctcagaaactctgtttggctcctgccacccctggcaccctcactgcatgtctcagaggcgtgtgatccacacacagtcaggccagtctgcttctacttaggagggatcacaaccagaggt

SEQ ID NO: 389138 - DNA, 122 bp, Homo sapiens
catcgactcccagcaccagccagaaggaacttcagatggatgttcctcccactgccaacacgcccacacccattcacaagcagttcacaagcagttcaagtggggtcaaacctgttcacctc

SEQ ID NO: 389139 - DNA, 122 bp, Homo sapiens
gcagggcagggggcagcggagcccgctcactgctcccatcagcccagggttcctggagcccgtccagagccctcagtgcctaaccagggctggagggaccacctgggtgggcctcagctgga

SEQ ID NO: 389140 - DNA, 122 bp, Homo sapiens
tcttgcatccatccctccctggtagctaggtcccgatatactcctgtcttgtgagattgtcgagatgagatgggggaccactcttcctctgtccttcctctctcctttcctccatagcaagg

SEQ ID NO: 389141 - DNA, 122 bp, Homo sapiens
gacacctcacttcttgcataatttctggcatcttcccgcctgcaatgcctgctctctcagcgtctcggagaaggggggatcacacactcatcgtcatgcttggagaatactggaaaggagaa

SEQ ID NO: 389142 - DNA, 122 bp, Homo sapiens
tgccctcgtcacgccccgggaccgcgcacacgtggggactgtttccagacgcactttctgcgggcagtctgtgtggcagggctccctgcccagctcctgcagcctcatcaagtctcccacta

SEQ ID NO: 389143 - DNA, 122 bp, Homo sapiens
caacatggcaaaaccctgtctccacaaaaaatacaaaaattagccaggtgtggtggctcgcgcctgtggtcccaggcgcgatgtaggaggatggcttgagcctccatgttccccaggctggt

SEQ ID NO: 389144 - DNA, 122 bp, Homo sapiens
ggggataatgcatgctgacagcccaaggatgggcccctggcagcctccatcggcctggcccgagccccagggcagccctcatgggcacccaaattacaaaacgtcctgtgaactctccccac

SEQ ID NO: 389145 - DNA, 122 bp, Homo sapiens
atctgttttttttctgttgcccagggactactctaagcaccatgctggttgctgactgttcgcttttgcaagatcttggaatctctgtttgttcacatcacaactcaagaggatacgttctc

SEQ ID NO: 389146 - DNA, 122 bp, Homo sapiens
cgggtcgcgaacctttctcttctgtcccttcagacccaccgccaggctgggttatattaccgcggcctgaaccccctcttttctttgtcagtgagtgggatgaaaagtgagggactggaggg

SEQ ID NO: 389147 - DNA, 122 bp, Homo sapiens
tctgtacaacaaaagagcagtctggacttgagtacttgaggcctgtgctgtgtgtgtgtgcgtgtgtgtgtataaatgtgcacattcatgttcagcagagatattgcttcccagccctaggc

SEQ ID NO: 389148 - DNA, 122 bp, Homo sapiens
gggcggctggccgggcagggggctgatccccccacctccctccaagatggggtggctggccgggcggggggctgacccccccacctccctcccggatggggcggctggccgggcagaggggc

SEQ ID NO: 389149 - DNA, 122 bp, Homo sapiens
ctgtgcagcttccggagagtggcgggttgattttctcactttggactggtttttacttcccgacttctgggtaagggtggccgatgggtccatgtggggcagagtgtggccacagctccttt

SEQ ID NO: 389150 - DNA, 122 bp, Homo sapiens
aatgctctcagattgccctcagccactgcacatgaatctccatagaaactgaaagtcacacgtggcccaattgtttcagggtcctcagaggagttctccctcctccttcccctccccagatg

SEQ ID NO: 389151 - DNA, 122 bp, Homo sapiens
ccacctccgccgggctgaggtgctgcttcctcctctgcttctccgtctggtaggtgtgcacggaccagcccgtctgcagcctcgagagggaacagcacagacggcgtggaggcctccccggt

SEQ ID NO: 389152 - DNA, 122 bp, Homo sapiens
gcgtgacgccggtgcagttggggggcccggaggccctggtggccctgggatggggaaccgcggtggcttccgcggaggtttcggcagtggcatccggggccagggtagcggccgtggactgg

SEQ ID NO: 389153 - DNA, 122 bp, Homo sapiens
gaagacagcccacccaagcatgcaggcaacaacgaaagccattcttccaggagaaggaatcggcattccaagtcaaaagtcaccaatggcgttggaaagaaatgaaaaaccctggttaatca

SEQ ID NO: 389154 - DNA, 122 bp, Homo sapiens
aggccaagccagttcccagggttccctggttgcgagggcagggccagcagcagggcagggcgagcagcaacagtgggaggcgcctcccatccagcatcctcacaggtaaagagcagccctgc

SEQ ID NO: 389155 - DNA, 122 bp, Homo sapiens
cacagaaacacctgggggtcatcctgggagtctctgattgattctgtctgagatggggcccgagaaggtacatatctaacaagtccctggatgatgctgactgctggtttggtgacagtgaa

SEQ ID NO: 389156 - DNA, 122 bp, Homo sapiens
cattgggggttcagagacagggaaccctcagccaattactttacaccatgctggagtatgcggtgctctgtgttactctgtgccataatggagtatgtggtgctctgtgtgaactacccttg

SEQ ID NO: 389157 - DNA, 122 bp, Homo sapiens
agcccacacacctcaacccggggccacagttggaggtggggagatctaagaaacactccacggatgagtttctgaagagggaagtggaccgggaacagcgcatttcctgcttcgcctgtgca

SEQ ID NO: 389158 - DNA, 122 bp, Homo sapiens
aattaaagattctagaaggatactcattcaaacaaacgccatgcattctattatttagggcggaataaattaattacagactgcagggaatattttgcacatgagaatcagtcaccagatag

SEQ ID NO: 389159 - DNA, 122 bp, Homo sapiens
gacatgcaccatctcatttaataatccccacagtagcttcgcaaagaggttctgttatttcggctttatggatgaggacacgggcacagtgaagtttggaagcatgtacagggtcactcagt

SEQ ID NO: 389160 - DNA, 122 bp, Homo sapiens
atacgtggcaaaatacatgcaaaactcacagaagtcatatttcaagttctcagggagaggcgtcacattagcagtattgagtgggaagaggaattaacagggaacagtactgtaaatggatg

SEQ ID NO: 389161 - DNA, 122 bp, Homo sapiens
agttttcctgtagcctgtggccccggcatccacgtttccgtggagagatttcctgtagcccgtggccccggcatccacgtttccgtggagacttttcctgtagcccgtggccccggcatcca

SEQ ID NO: 389162 - DNA, 122 bp, Homo sapiens
aaaatggtatcatagctcccatctcgccccctgcgctgggagaaatgggcgtcttgtcttcgctgcgcattgcatgcggaggagcagatgtctcagcccaggccctagccttgcatcgagcc

SEQ ID NO: 389163 - DNA, 122 bp, Homo sapiens
tccccgcctcaaaagttatcgggagccgcgggagggctgccgggggccgggctggctgggcggaggcggcccgcggcgccgctacatgctaattagcccgggcgggtcgctggctggcgggc

SEQ ID NO: 389164 - DNA, 122 bp, Homo sapiens
gcagcgggacgagccaggatcgcaaaatgcagtgcttgcccgttgagtcatcagctcacccggctgggcctgggccgggccggccgcgggggttggctggaaaaaggccgccaagatgcccc

SEQ ID NO: 389165 - DNA, 122 bp, Homo sapiens
tcctagcattggaggctggtcagtgctcagagcctcggaggtgctccctccttggaagtgcgatcccttcagaagagtgtagctgaggcttctttcagtgactatctagggaatactggggg

SEQ ID NO: 389166 - DNA, 122 bp, Homo sapiens
aattttagacctgttaaggaaataacatcttttttcaataactgaatattgaataataagcgaatgtcctaatttaatttttgtgaaataatggggttagtttatcatagagctcaaagcac

SEQ ID NO: 389167 - DNA, 122 bp, Homo sapiens
atctgaagggaagaatagagaatataagggaggatggaagacttccattcttaagcccatcgacctcctaacagtctccacaagcccagacccaagatattttggagagcgggagtaatgaa

SEQ ID NO: 389168 - DNA, 122 bp, Homo sapiens
agaccccggggcggggaagccccgcagcccggagctgggtccaacctgcattaaggtgggcgtctcaaataccccctgtaaggccctgtaggagcaaagccttggactgggttgcggcgctt

SEQ ID NO: 389169 - DNA, 122 bp, Homo sapiens
ttgcttcaggaactagagtgaggcgaggacagctgtgtgtttgaaacactccagctgattcgaatgtgcatctctgtgtggaacagctgccctagattggtgggtctcaaacttgattgcac

SEQ ID NO: 389170 - DNA, 122 bp, Homo sapiens
tggttattctttgagccactgcttctcagaccctttaattgttcccgttcctcacggactcgatgttaaatttttagggttcaaagcacatcccactcatttgtgaccaagtcagttcatgg

SEQ ID NO: 389171 - DNA, 122 bp, Homo sapiens
aacagctttgaattttatgtcagttgatgttaagatccaacaggaagtttaccctgataacgttaagatgaacagtttgaaagcagcttcctgctggaagttgaaatagagatgattcagat

SEQ ID NO: 389172 - DNA, 122 bp, Homo sapiens
taggccaggtagcttatacagcatggatacactggacaaagggatgattcacatcctgggcggagcagtacagccaatttaaaatttgagcatttaaaaaaaaagggctggacacggtggct

SEQ ID NO: 389173 - DNA, 122 bp, Homo sapiens
cagcaccccggcttcatcaccgactttaaactgcagcatttggagtgataataatggcgtcggtgataaagccggcgtgctgggcagcgtccccctagagttctccatccagtgatccagag

SEQ ID NO: 389174 - DNA, 122 bp, Homo sapiens
ttcagcctcgcctcacccgggcttcagagcccacagaacttctcagccccgtgtcggcgacgaggagctcatggtaaaacagcgcctagggttttgcttgtttgtttgcttttaacagatgc

SEQ ID NO: 389175 - DNA, 122 bp, Homo sapiens
ggactccacctttacaaatttgtgattattacagactctggaggagttgaaagtcctcttcggttaattatggaaaaacagcttgttaagcaaatgctaatgtaagaagatcacaatgtggg

SEQ ID NO: 389176 - DNA, 122 bp, Homo sapiens
cgggctccctaagccaccgaccccagcccgcggcgccttcgagccttctagggcctccggcgccgcgacctcctctcaagatcgagtgaaagaatcttaaaaactgttttttccactcaggg

SEQ ID NO: 389177 - DNA, 122 bp, Homo sapiens
cttcctggaagaagcagcttccaggaggcttcaccatatccttgtcctgccaagtggccacgaatggattagaagattcccactgggtgagaaggctcagaagccaccacagaggatggcgg

SEQ ID NO: 389178 - DNA, 122 bp, Homo sapiens
agggctcaggtcagagcaggagcagccgggggcgcggcccccacgtggcctcccgggacacgtgcccacagcgcgacacctaagtcgctcctttcacagaatagccttggccccggcacggc

SEQ ID NO: 389179 - DNA, 122 bp, Homo sapiens
cttgcaggtggtacaagagaacgaaaacgtcgtgttctgtctggagtgtgctctgcgccacgtggagaaacagaagtcctgccgagggctgaagttgatgtaccgctacgatgaggtcagtc

SEQ ID NO: 389180 - DNA, 122 bp, Homo sapiens
ctcagacaccgccctggcagcaggggctccgtggaatgcaggagacccagcagggggtgccggccagtgtggacggaggggcggggcggggacacgggtgagtcactgcggcaggggcacaa

SEQ ID NO: 389181 - DNA, 122 bp, Homo sapiens
cagcgggcgcaaccggtgggcaaaggtccgcggccctggagaacgccgcggcggggtccacggacaccagaggaggaaccgccaaggtttttccaaaggacaagcggcgcggcggtcctcct

SEQ ID NO: 389182 - DNA, 122 bp, Homo sapiens
ccacctcggcctcccaaagtgctgggattacaggcgtgagccatcgcgcccggccagatgcgttaactttctaaactccgtgagccagcgtccctcggtgttcaggagaggagctatggtat

SEQ ID NO: 389183 - DNA, 122 bp, Homo sapiens
cacttgcatgggcccctgtgtgtgctgggagttgccgggagttgagtgccataggtggggcgaggaagccgagtttgcacacgagcacttctgacaattgccgaaataaattcagaaaagga

SEQ ID NO: 389184 - DNA, 122 bp, Homo sapiens
aaaagaaaaaccatacctcctcttgattcagaacttccgcagagttttcgtcttctgatccggcttgttctcccttttcctttctgcatgctaaaactgtagtttcttttttctgaaataca

SEQ ID NO: 389185 - DNA, 122 bp, Homo sapiens
cggctgcagagtccccctgcggtttggccgggcctcaaaggcctgaaactcctgacccatcgcccagccagaacgaggggacgtttcatgccagccctgtcacagcccccaacgacgatccc

SEQ ID NO: 389186 - DNA, 122 bp, Homo sapiens
ctcttgtaccccacgcagggttgtggcctggctattctgggtgtgtggctcctgagacaacggttgtgctgcaggtcctttcagtgtagctttctcaggaaaaagtatttagggcatgaggt

SEQ ID NO: 389187 - DNA, 122 bp, Homo sapiens
ggctgtgtgaatgaagctctgccggctacgtggggcgctcactcaacttggtgtcctggacgccagagccgaccgagcgcgctgcccaccggcggcggacacgggctccgccgctccggacc

SEQ ID NO: 389188 - DNA, 122 bp, Homo sapiens
gctgctgctgtgtactggccatttcaatcaaagtcgctgcttaacacactggtgcactctcgaattgtctcctatgaggagccaagaaccctcttgggctaagcctcaattttggggcttgc

SEQ ID NO: 389189 - DNA, 122 bp, Homo sapiens
taacctcagctctttccttcccacctttcccggcctgcagctccatgtgcaagaagcttccggcaaccacctgaacccagagcccaaccagccggcccccagtgtggacctagacttcctgg

SEQ ID NO: 389190 - DNA, 122 bp, Homo sapiens
gatctcttcccacttttggaccctgaaagctgggccccgatctcgagttatagaccgcagcgcgcgggcgctcctgaaaggctgcttcaggggaggggttctcccaggtagagtaggccgaa

SEQ ID NO: 389191 - DNA, 122 bp, Homo sapiens
agcttcgcggccgctctcccactcgctccccgcccggcgctagaggagcgagttcggactcggaccccaaggcctcgagtcccgctgccttcctaagccgagcccgggctacctcggtcgtc

SEQ ID NO: 389192 - DNA, 122 bp, Homo sapiens
cgcccgtgagccccctacgtggcttttagctccggtgaaagggtcccgggatgaactgggcgcctccggggcaagccacttaccgcgccacaacgtcgggatattgagattcatcgaaaaag

SEQ ID NO: 389193 - DNA, 122 bp, Homo sapiens
caagtactcgggatagtgaaaagccggagttggaacatggatagccgcttgcaggagatccgggagcggcagaagttacggcgacagctcctcgcgcagcaggtccgcggccctggtgtccc

SEQ ID NO: 389194 - DNA, 122 bp, Homo sapiens
cgttctgttctgaaagcgaagcgtcttcctggctggggctgctggattgaagccctgagccgggcaggctgcagagcgtgaggatggcgcggggctctggtgtgggcgcctgggagcgggta

SEQ ID NO: 389195 - DNA, 122 bp, Homo sapiens
ataattattcccacttaacagcatgggcaaccgaggcacggaaatgttaagtaacacacccgaggactcactagtaacaaatggcaaagccagccgctgccccaggcggtcgggcctcaggg

SEQ ID NO: 389196 - DNA, 122 bp, Homo sapiens
cctcgccattcccatcggagagagcaagcggcaaggctgagaacagcgcgatgagaaagccgagcgcccagaagcccgagtgcagacgcccactgaggacagccttgggtgaggcgggccac

SEQ ID NO: 389197 - DNA, 122 bp, Homo sapiens
aggattagcattttccgtggtgggcacttacagctacagcaacttatccaggggtaaaagcggggagacgggccggttgggcccaggccccttgtggatgggctgctgtccctcagacccca

SEQ ID NO: 389198 - DNA, 122 bp, Homo sapiens
attaataaggaaaaaagttctagaacaaagtctgaaagtttttcaatgtttaacagccagcgagagaaggataaacttacaaaagatgaatagaggagctgaaaaggaaaagtaggagtgac

SEQ ID NO: 389199 - DNA, 122 bp, Homo sapiens
tggtttcctgtgtaagcagccaaaggagaatctcaagaaaggcaaggaaggtagttactgcgtgctccattgtaagccaaatgatagtaataagcaaagagaagtaatctttattaaatatg

SEQ ID NO: 389200 - DNA, 122 bp, Homo sapiens
cgcgccttgtgaacgaaccacggcagaaaaagtctttctgctgacgttaaacagccgcaacgggccagtgatgacacagaaaacaaacaatcccaggaaaacaaagcagcagcgacagccac

SEQ ID NO: 389201 - DNA, 122 bp, Homo sapiens
ggacgcggggtgcctggtcagggctggaccgatgcagaggggggccgtgggcgggggccacggggacgggcgtctgcggactgcggcggtcccggagtcggctggggaccctgtagggggag

SEQ ID NO: 389202 - DNA, 122 bp, Homo sapiens
tacagagagttcttgtttccccttcaccctgcttcccctactgttagcaacttacataaccgtgctactttttatcaaaactaagaaattaacatcctgttagttaaactacatggcagatt

SEQ ID NO: 389203 - DNA, 122 bp, Homo sapiens
aactttttttttttgaagtcttccttgtccctcaagcgaagtgatttccttcaccctcggcgtccccatgaaaccatgttcacacaaatgctattatctctatcatactgtaatacaattat

SEQ ID NO: 389204 - DNA, 122 bp, Homo sapiens
atctttaataccacagccatttcctgaaaatgtatagctttgcaaaagtcttgtcacttccgaaggcttcagaaatgctgatttggaggagttcctatcattaggaatgggacccaggtagt

SEQ ID NO: 389205 - DNA, 122 bp, Homo sapiens
aaagcccgccgcaggcccagccctcacgctttctcttcgcaatggactttgcagcaaccacgtcggccattggctcagctcggccctcgaccaatcagagctaaggttacttccacaccggt

SEQ ID NO: 389206 - DNA, 122 bp, Homo sapiens
ttcccagaagggggaacgaagcccgggaaggcgcttttagcgggggcgtggcgaggccctcgggtttcccagccccctctcaacccggggaccggcagggctggcctggtgccttaagcatg

SEQ ID NO: 389207 - DNA, 122 bp, Homo sapiens
ggttaatgagtaaactcaatcaatcctgctaagagtttatatactcattctcagaatatacggcttatttaaggaacctaaataactgcaatgggatgcccaggtcaaattcaaagagcagc

SEQ ID NO: 389208 - DNA, 122 bp, Homo sapiens
tatatttatgtctatgtctatctgtgttttttttttttttttttttgagacagggtctcacgcccatggcccaggctaaagtgcagtggtgcgatctcagctcacacagcctcggcttcctg

SEQ ID NO: 389209 - DNA, 122 bp, Homo sapiens
ctacgccgctgatatgtctatatatcccttgcagggcagcgacggaccccctgggaaacccggaccacctggaccacctgtgagttgttctaggcttaaaatttaaaattcatgtgtttact

SEQ ID NO: 389210 - DNA, 122 bp, Homo sapiens
gcgcggttgggcggggggggggggggaagctgcgaggcgcatgcgcgttgcagggccgtccgctctgctgccgccgctgttgcagccaccgccgttgccgcctccctgccggcaagtgtgtg

SEQ ID NO: 389211 - DNA, 122 bp, Homo sapiens
gaagagaaggaaggaaaacaaactctggcaagagagagggagaaaggtttggaaagactacggaagtcttcgtatgtactagaagctttaagggcaaaatatgagtcaccaaaggcaagtga

SEQ ID NO: 389212 - DNA, 122 bp, Homo sapiens
gtgggatcttccagagacggctcaatgtacacattgagtatgcctggcaggcatcaccagcgcgctcgggacgctagtggtcagctgcagggggctgtgcccactgccttttgcaagcctct

SEQ ID NO: 389213 - DNA, 122 bp, Homo sapiens
ttaagagctgtaacactcacggggaaggtctgcagcttcactcctgagccagcgagaccacgaaccgggcgggaacaccagaaggaagaaactccgaacctatccgaccatcagaaggaaca

SEQ ID NO: 389214 - DNA, 122 bp, Homo sapiens
tgtcagcctctgtctctgtgtggtgagaaggcgcactggctcgtgcctgcgcgaaactcgcgcacacagaaaagaccaatcaaggacgggtcattcccgccccccgcgcgccttttgcgacc

SEQ ID NO: 389215 - DNA, 122 bp, Homo sapiens
cagaagtccggctgcgggttcaccttgtcctccggcacagggcccggccaccaggcgccacgctggatagcctgcggccctcgcagggtccttcaggcgctccctgggcagccctgctcggg

SEQ ID NO: 389216 - DNA, 122 bp, Homo sapiens
ggacccaggcctcacctgcgagccctgccaccaactttatctcgctaggcctgccctttacggcttgccatccgtgccatctgtttggagcctccttggttatgtatatgacgttcttaata

SEQ ID NO: 389217 - DNA, 122 bp, Homo sapiens
catgagggagctatgagatgtgtccaggagctcacatgtgacaagaatgggctccaggatcgaggcctgtgctcctctccaccggatcccactgctcccttaaccaactttagcccagagtt

SEQ ID NO: 389218 - DNA, 122 bp, Homo sapiens
atcaccctcacccctgcccccaccaggtgccaccgactgcagcagctacttccgcctgggcgtgaagggcgtgctcttccagccctgcgagcggacctcactctgctacgcacccagctggg

SEQ ID NO: 389219 - DNA, 122 bp, Homo sapiens
ttcacatcctcccaattctaaaactgcaaggtattgtaacgataatctgtcccatttcctcgtttttgaatgagaaaaccacagcctagagtagccattacttgccaaagctttttttctta

SEQ ID NO: 389220 - DNA, 122 bp, Homo sapiens
acacacacccacttcggaaatcaagtcggtgcgagggggccggtggcaactgcaggcgctcggcgttgactgccgccggctgctttgcctggaagaagaggagccaagcaaatccggccggt

SEQ ID NO: 389221 - DNA, 122 bp, Homo sapiens
ggaagaaatatagaaaaagaaatacttaaaataacagggaagatgcaagctgaggaatttcgcgtcgtttccacgaagagaagcatcagggagcccatgggcagtcacaggcttcccggtat

SEQ ID NO: 389222 - DNA, 122 bp, Homo sapiens
cctctactcttcatggcagaggacaaagttcatccattgtattatcatgaagcatcattacgttgggcagtcatttggttaaggagacacggtttccccaagttcacctcttgttgaatgtt

SEQ ID NO: 389223 - DNA, 122 bp, Homo sapiens
gggtcccggcctcactgtccccctcgcggtccgggaaagccggcggggcagcttcacgggcgtagccccagccgccccgcccccaactcggggtccccagctcctggggactcagcctcccc

SEQ ID NO: 389224 - DNA, 122 bp, Homo sapiens
ctggggcgtgaggagctggagctgcaggcgagcaggcgccgggcttctgctggggatggccgtgtctcctcccagggtgttttggggagactgtgggtgaccactctcaactctccccgtca

SEQ ID NO: 389225 - DNA, 122 bp, Homo sapiens
taccgaagactcataaatgagtaattaaactgctttaataacacccagaagttcacagcccggaaagattagcttaagtgaaatacaattcaacaggtcttatcaaagagttgttaaaaagg

SEQ ID NO: 389226 - DNA, 122 bp, Homo sapiens
aggcctcaaactaaagcagaaccttctcaaaactacttatatttcaagagatggattaagcgaaaagagctgtacaaagaaataagccattttctatgcgcctgttatatgcaaggcactgc

SEQ ID NO: 389227 - DNA, 122 bp, Homo sapiens
ggctgcggcgcgctggggcgaaggtggctgctgggccgcgggctggcgcgggggcggagccggagctgcactcgcacccccggcccgcgtctggcctccctcgcggggcggggaggtggctt

SEQ ID NO: 389228 - DNA, 122 bp, Homo sapiens
cctgctccctcaaatttctatcatttgaggtgaggtttcgtgttggttcatctgactggccgagtgcaccctggctgtgagaacaggaaatagaattctggcttttgtcttagggatatccc

SEQ ID NO: 389229 - DNA, 122 bp, Homo sapiens
gttacgttggttattagactatcgaaatacttccagctcagttgataaatgtctactctgcggccccagagtgactcttccatgtttctgaacaatccccactaccatcccatgatcctgca

SEQ ID NO: 389230 - DNA, 122 bp, Homo sapiens
tcgggctgcgctgtgggctgcggggagccggaggcctcttgattggctctttgacgctttcggaccaattgtgttgctgcataggcgtggttttcacaggtcgagtgctgggggatagagct

SEQ ID NO: 389231 - DNA, 122 bp, Homo sapiens
acccaggaatggcctctctcatctgagcactcagatccatgttggcattctctgcttttccggagatatgtctcatttgtattaacagggagggtattttagcagagccatttcctgattgg

SEQ ID NO: 389232 - DNA, 122 bp, Homo sapiens
cttctgttaaccctataggtgcccctttttcactgttctttaatatctagaacctccccccgcccctgcccatattatgcaggctgggaactagcactggacaatctaatactgagggaggg

SEQ ID NO: 389233 - DNA, 122 bp, Homo sapiens
caaatgcaaagtaagcaaagtataacaaccaacatttattttaattatgtggtattgaaacgtgtcctcttaatattttttatgagtgatggcttgtagaggtaccacagaaaataaaatta

SEQ ID NO: 389234 - DNA, 122 bp, Homo sapiens
ttgacacagggtcacgggaagccacctccagggcctgtggtcctcttcaggcaggcggggcggggaatgctcaggaccggtgatgatggtgccatgcagagttcagggatgaatgaccacca

SEQ ID NO: 389235 - DNA, 122 bp, Homo sapiens
tcatgttcacagaatggacagccacttactagtggatttgagcatcgttgagtggttttccgctggatttttaaaagtgaagtagaagacagtggactagaaaatagcatgcatttcctgtc

SEQ ID NO: 389236 - DNA, 122 bp, Homo sapiens
aatggcaagttccgcccacctgccagaaacggggatcaggcctggttaccgggagtggggcgcccctcctccttatcccctcccctcttccctgtcccctttcacagctggctgtagctggc

SEQ ID NO: 389237 - DNA, 122 bp, Homo sapiens
cggggggagctgaatggagcggttcacgcgaggtgtgtgcgtcgcgagcagggcccttgccggagctccaattagcggcttttgtaagcgatcacgtaccgagtattgacttggctcagccc

SEQ ID NO: 389238 - DNA, 122 bp, Homo sapiens
cctgcaactgcagtctccgaagtctccaccccagtctccctgcctccagaggactggttgcgattggcctgcaccgctgtcccgttaactcttccgcaagtgtgagtggcgtaactgtcggg

SEQ ID NO: 389239 - DNA, 122 bp, Homo sapiens
tcttgacccagttttccaggcttcaatccagaccgcccacaaacaggtgtgtaaagaacacgtttgcatgtttcagttggagtcagcggaaaggtagggagagaccagcctgacaaaaaggg

SEQ ID NO: 389240 - DNA, 122 bp, Homo sapiens
cctccacttaccccacccacagttctgcctcggaccccggccaatcccccagatctcccccgggaccccccaccccgcagcccacccacccgagcgcacagctcctcacctgaggggcccag

SEQ ID NO: 389241 - DNA, 122 bp, Homo sapiens
cgcggaggaagtccctgaggggaaattgctgctcacctggctcccgctgctccgcaggtgcggtgaaggctaatgtcgaatttctgcagcaatcggagcagcccttactccagttacattaa

SEQ ID NO: 389242 - DNA, 122 bp, Homo sapiens
aaattgtaccggttgtttggctctgagtggacgccactcccaagaagggagctcgggattcgtcgtggccttagagtgggtatggagccgggctggccagaggaagctagctatggagcgcc

SEQ ID NO: 389243 - DNA, 122 bp, Homo sapiens
ctccgaagcctgccgcttcctgggaccatgtttatcccagtgtttatccctgttcacacacgtggttttgtttgaacacgtgactgttacgctttatgtggccttttgatttctccccacgc

SEQ ID NO: 389244 - DNA, 122 bp, Homo sapiens
cttggtgagttcctgaaatccggatccggccacagctgcggagaggagtcagacaggccacggcggttcctcgccggcaagtgctttcgcatcgccgctccagaccctaaaatgcaaaagcg

SEQ ID NO: 389245 - DNA, 122 bp, Homo sapiens
gttcccgaccacaccctggtgaaccacgcagcctaactcagcatgttcccggccacatcccggtgaaccatgcagcctaactcaccacgttcccggccacacagggccaagaacagcccagg

SEQ ID NO: 389246 - DNA, 122 bp, Homo sapiens
cctttttccaggacatggtgacctacttcatgaacctgagccaggcgaatgctcaggggacgccgcgctgggagctcgagtaccagctgaccgaggcctatggggtgccggacgccagcgcc

SEQ ID NO: 389247 - DNA, 122 bp, Homo sapiens
atcctcaactctgatagcacattacagtcacctcgggaagcttcagagaaaaagaaaggacggcaaagcctgggtcccgcccccaccccgcccctcgccgccctcagctgacattctgattc

SEQ ID NO: 389248 - DNA, 122 bp, Homo sapiens
ccggagagtggaataagcgccctgaagatgccggagctcccggctgagcaactggacacgcgacgaacagcagacgctacaggttctcctacccagagggaggcgtttcttctccctcaggg

SEQ ID NO: 389249 - DNA, 122 bp, Homo sapiens
tggcttagcttgcttgcccacactttctctttcttttaaaaatcatttattggccgggcacggtggctcacgcctgcaatcctcgcactttgggaagccgaggtgggtggatcacgaggtca

SEQ ID NO: 389250 - DNA, 122 bp, Homo sapiens
ggtagagctgctcatagtagaacccaggagacttatcttccaggccagtgttctttctcccgtatcctagttttcttaatagaagattattaggtgcagcaataaccaacttcagttagata

SEQ ID NO: 389251 - DNA, 122 bp, Homo sapiens
taatttctggatttatttcccttctttttttggaaacccaaagtggctcacaaagacccacggtttcctaccacttactgggtgtgagatcttgggcaagttactctatgtgcttcgctttc

SEQ ID NO: 389252 - DNA, 122 bp, Homo sapiens
caggggctccttgagagggcgccagggagcagctgcgcgcggatgccttttggccctctgcggccgccgtagctccccggcagaaacccggaagtggaactctgagccattcagcgtttggg

SEQ ID NO: 389253 - DNA, 122 bp, Homo sapiens
agccgtggctgacagcatccccgaagtcctgaccgagttgggcagtctgaagccttcggtcgacccgaacgattcgagccttacactctatctcgtggtggcagtggctgccatctcctgtg

SEQ ID NO: 389254 - DNA, 122 bp, Homo sapiens
atttcacaggtcagatgcacattaaactaactgtaaccagaaaatgcaatgaagccgtgccgtgatgactcatggggtgggggagttacagcctcggctctcgggcaggctcacggggtgag

SEQ ID NO: 389255 - DNA, 122 bp, Homo sapiens
catttgaatcaagcagttcaagaggagcgcgaggtcatcatcgagctgcgcgtacagttccggctgctccagatggagggaaccaaggctgagcagcaggtgcaggaggaccaggagcctga

SEQ ID NO: 389256 - DNA, 122 bp, Homo sapiens
aagatgaacataaggcagaagtggaatcccagcacagttcatcctcagtgctccacagcacggaacagaccttggatatcgtacttcacacaagtttggtgactctttttttatgtctgcct

SEQ ID NO: 389257 - DNA, 122 bp, Homo sapiens
gaagggagcagggggtggggctcgggcggggccaggagcccggcgggaggctgccttcatcgagtaaacgcgtgggactgggaaggacccagtcatctgtatattggttaccaacacgtggc

SEQ ID NO: 389258 - DNA, 122 bp, Homo sapiens
ctgacatgttggaatgccagatgaaactgaaacagaaaaattgtcttggggtctaaaagacgtctgatgtgctgatgtctgttcagtcttctgcactcatgggcgtaaactctcaaagagca

SEQ ID NO: 389259 - DNA, 122 bp, Homo sapiens
tccttcccagcaagcactgcgtccaacccgcgacgtcggaccacaaggcccagcatgccccgcgcggactacaagccccacaatgcaccgcacaccctttactggccggccccgcgctgctc

SEQ ID NO: 389260 - DNA, 122 bp, Homo sapiens
acccctaacctctgcctgcggctggtagtacatgccaatctgagcatgtgttcgcgaccacgatgagtgtgccgcacttccggccagatcgccggatttccgctgagtgacccttacaagtc

SEQ ID NO: 389261 - DNA, 122 bp, Homo sapiens
agcgtcccctgccggccactgtggcggcggctggaatcagcctcagcacttaaggggccgcgcgggaggagttgccccacctccaggcagctctttccagagcagtgagggcaagtctgggg

SEQ ID NO: 389262 - DNA, 122 bp, Homo sapiens
tctcatttaccaaaagttcttaacgtaatgttacaccctcttaacaggcttatttgtcatcgagccagctgacaacaaaacattatgagacaatgggaatttagactgcctttaagaaaccc

SEQ ID NO: 389263 - DNA, 122 bp, Homo sapiens
gaggtggctgagatctggaaacaggtctgcaaatctggtcactggtctcattgccagtaacgctgtgcgcggttgagggagtgtgttgggagaatagccacgcgttgtctgtcctggaagga

SEQ ID NO: 389264 - DNA, 122 bp, Homo sapiens
ggaaaaggccaggcgacaggtgtcgcttgaaaagactgggcttgtccttgctggtgcatgcgtcgtcggcctctgggcagcaggtgggcaaggaaggctggtgtgtgtgtgtgtgtgtgtgc

SEQ ID NO: 389265 - DNA, 122 bp, Homo sapiens
gagtgatggttcccgtccctttgggggaccgtaagggcggctgaggatggggcctgggggcgctctgcgagtggggacattcccctcagcccagcgcggcggccagggttgggcctgccccc

SEQ ID NO: 389266 - DNA, 122 bp, Homo sapiens
tgtgtgtcctttgttctctcctgaggatggctgtggcctcctcctgttcctgacagggcccggtgcccactggctcatgtcagagttcaggcctgaggggaggggtgtttgtgctaacagga

SEQ ID NO: 389267 - DNA, 122 bp, Homo sapiens
gtggcctagaggcagcggacgcaaacacggggagaggtgcaatcgtctcaagtgactcggcgggcggggcccacaaccggaagcgggtgggcgaccttcacccacgtgcgctgcggcttcgt

SEQ ID NO: 389268 - DNA, 122 bp, Homo sapiens
ccgacaggacccgtccatgaggtcccaggcccagggcggtgcagaggcgtgggtgggctgcggtttccctgctcgccttggaggtttttcttagtgaagtgtctgccatcttgtggctgagg

SEQ ID NO: 389269 - DNA, 122 bp, Homo sapiens
ggtgatctgcccgcctcggcctcccaaagtgccgggattacaggcgtgagcaaccacgcccggcccaaaacacattttactaccaggcaggagcctgctgcctcccgggcccgcccccggcc

SEQ ID NO: 389270 - DNA, 122 bp, Homo sapiens
agaaattcagaaatgaagtttagcattcctgtggtgacatgttttattgtgaataggctccgagagcctggtttgaaaccgccaagtaggaacatcgcacaggggacaccttcacatgcgcc

SEQ ID NO: 389271 - DNA, 122 bp, Homo sapiens
cgcagtggatgcagactcaggctacaacgcgtggctttcgtatgagctgcagcctgggaccggcggtgcgcgcatcccgtttcgcgtggggctgtacacgggagagatcagcacgacccgtg

SEQ ID NO: 389272 - DNA, 122 bp, Homo sapiens
attcttggctggcatttatgaagctgcccagggccagtagggagcccattgccctgaaaacggcaagtcccaggccaggcagcattcatcgcaagttgacaagaggttttgggccttaaggg

SEQ ID NO: 389273 - DNA, 122 bp, Homo sapiens
gggatacggctcgtcacttccgccctcccctttttcacggcctcccaattggtcggagcgcgctgcacgtcatgggctcatccaaacccctgcccgggcttcttttctagtcaagtttggct

SEQ ID NO: 389274 - DNA, 122 bp, Homo sapiens
acaggattctgaagacaggagggtatagtgaggccacccattcccatcagggcctgaacacgtgttttgggttaactttggaatgccattggccaagaggaggagtccattcagttggaggg

SEQ ID NO: 389275 - DNA, 122 bp, Homo sapiens
ccaaagccctgccagaagtgcccggcggctccaggttctagatggggaagttgaggccggcggcaggcgcgctccaccgggcgggggcgcggcccgggagcggagcggccggcagggggctc

SEQ ID NO: 389276 - DNA, 122 bp, Homo sapiens
ggttttggggcaagacaggtttatcatggtcactagtggactggaaagaaacacctttgacgtgaatataaaatcagagaatgtggaatcagcaaggtatcatagtggtcacttgggccaaa

SEQ ID NO: 389277 - DNA, 122 bp, Homo sapiens
ccaccaccgcctggatcccccgcacttcgcccgaccaaggccggggccgtagtttgcatccggactggatttggatgcagccaatcctcctttggctgatggaatagtctcccctccccaca

SEQ ID NO: 389278 - DNA, 122 bp, Homo sapiens
aacggccactgttcacggggaagccgggcggcgagcttgaggcgccaggctagggagggccggccctggagcccggcgcgccccgcgacctgctcggctgcccgcggctgctgcacaagccg

SEQ ID NO: 389279 - DNA, 122 bp, Homo sapiens
gcttttgtgtgagagtggcagtctgtttgcttttgtggtcgggatctgctgcacgcacggcgggctgtttgcatgaggcttcctggaggatagggctgggctcggagctgcacgcagtgggg

SEQ ID NO: 389280 - DNA, 122 bp, Homo sapiens
ctcccagagcaagcagccgcagtcagcagagaccccaccctccagatctgccaagcacatcggctgactccagcccccagagccacagagccactcagcaatcaaggagagtagctcccagc

SEQ ID NO: 389281 - DNA, 122 bp, Homo sapiens
catggtgatggcaagtgcgcactctgagcgccgggtgtttaagtcaaatattgattccgccgcgtattaacatgaatgccgctttgagtacctcactgccctctgccagcctcggtttcctc

SEQ ID NO: 389282 - DNA, 122 bp, Homo sapiens
gatcacagtcatctcccttccactaatctcccatgttaagccagcacttgtcactgctatcgtgcattgttatattatccatctgtggtgtagggcttgtctctctaagctgcttaataata

SEQ ID NO: 389283 - DNA, 122 bp, Homo sapiens
tctcactgctggaaagcctggttctgcctttcctaaaatctcgtgtgcaggttcgcactccggctactttcaggcctctagggagcccaggtagcggcgcgcacgcgcacgcgcacacttct

SEQ ID NO: 389284 - DNA, 122 bp, Homo sapiens
atgatgagagcctcagcaggacaatgcccggccccgtgatggctgtgtcactgcacggggcgggctcccatccacgccccttctcagaagagtcgggagcccccactttcctcttggccttt

SEQ ID NO: 389285 - DNA, 122 bp, Homo sapiens
tttcaaatgtaatttataaccaaatacgtcatcaaggctaagtttatctttgtcagatgccgatgtatcatttcgtctcctgtcacactgcctctcttgtggcaggatgcccttctgttagc

SEQ ID NO: 389286 - DNA, 122 bp, Homo sapiens
agaccctcgcggtgggctcggggacttgtgtgtgcacctcgcgctgagaaggctgcctcccggggctcagggtttgtcttcaaggtctgttcaaatttaggctaactcgtccccaaacagta

SEQ ID NO: 389287 - DNA, 122 bp, Homo sapiens
tgaacagaagccagagagctactagccagagaggattttaattgtgcttcatcaattcctcgaattgcttctctttttgttagacatctgttccctctctagccaaggcctgggactcctgc

SEQ ID NO: 389288 - DNA, 122 bp, Homo sapiens
agaaaatggttggtacatgagatcttggttaacagatgcttctgagaaacctaaagctaacgtgtggttatatgtcatctaacttaagtctggccagatatgaaaatgctttaccattagta

SEQ ID NO: 389289 - DNA, 122 bp, Homo sapiens
ccaccgcgcccggctgtgtgtttctacttctttccccacttaattctgaattcaaatccccggtgaaatgtctaaatcatattctttacctttattgcaataaagtctgagaaatatccttt

SEQ ID NO: 389290 - DNA, 122 bp, Homo sapiens
tcatgggaccatggacacatcatttaatccctttgatcctcagtttgctcatcatccatccgtcagctggatgtgatggtatctatcttccttataaactgaccatgaggcttaacttgaga

SEQ ID NO: 389291 - DNA, 122 bp, Homo sapiens
agctggttgacgcttcatttgtttgtgttctttttctttacagtctcctgaatatttacgcgttgctgaatctcctgtggacaaaccaccaataggccaggactgtcctgtggacagacggg

SEQ ID NO: 389292 - DNA, 122 bp, Homo sapiens
tgtccaaggtcacctatatagcaaatgatagaatcagatttgaatccaggtccctgaccccgaaactctactttgtcttccttgccagactactctgagagtaatgaacttcagactcaagg

SEQ ID NO: 389293 - DNA, 122 bp, Homo sapiens
ctagaatcaaatgcactccatacttttagtgccctgggaaaggagagggaagggtactgccgccccatgaatggggcatgtgctcattgccttggcatctggaagattttgttcttaccaat

SEQ ID NO: 389294 - DNA, 122 bp, Homo sapiens
gtaggtgtaccaggaagccccacggtggcagcctgaaacagggtggattgtgtggcggggcgaggcggtgggggagagggacaggggcaacagtgttccgtggaggaaaattcaaaaaaagg

SEQ ID NO: 389295 - DNA, 122 bp, Homo sapiens
tggtccacagacagatgggcaggatgggaggagactttaaatagttcaattccccttaatcgatattttcaaatagcgttgtgtatgtcaagcccagtgctacatgctggagatgcagaagg

SEQ ID NO: 389296 - DNA, 122 bp, Homo sapiens
gcagaggaattctgcctggatatccactagttagaggctatactaaccaactcacgtattcgtttgagcatactgcaagaatatttattgagcacaagctcaatcaccgcattgaacgccaa

SEQ ID NO: 389297 - DNA, 122 bp, Homo sapiens
gatttcccagccaaaaaacccttaattgctacgatgctggcctcccatccacggcaagggcgaaaagtagtgatttcttcgtttaaaggcctttgtttctattttaaatttacccctaagac

SEQ ID NO: 389298 - DNA, 122 bp, Homo sapiens
accaggggtacaggcgaggagccaaggaccagactgtggaacactgtgggtactagcggacgggccgtgacccggatgaagcagaggggcgcctgagttcccgtcacctaagcgacagcctg

SEQ ID NO: 389299 - DNA, 122 bp, Homo sapiens
cgggagggagcgaagacggccgggggcagggcaggccctccgcaagtgacacttaattcccggtctggactgggccggcgcttgaaagcaactaaattagcaaaacagaagtcaactgtcga

SEQ ID NO: 389300 - DNA, 122 bp, Homo sapiens
tccccgcggtgggtgaacccataaagtgaaataaaacatccaggccggaaccagcgaaggcgacgtggagagatgcgactgcaaacacaatctgcccccaggaacacctcccccctcagctg

SEQ ID NO: 389301 - DNA, 122 bp, Homo sapiens
gatgcaattgatgtcaataggtcctttgcaggtagagggacaggtgaggtcatagtctgacgtctgttcttacagggctcctccctggaaatgactcgctctctctgtactcatttcctctc

SEQ ID NO: 389302 - DNA, 122 bp, Homo sapiens
ccattttccatccttgctctaagacaaaacttttcccagagaagaactctttgttgtccccgctcagctgtaattctgccttttctaccttcattccatccttcctctgcccagataaagtc

SEQ ID NO: 389303 - DNA, 122 bp, Homo sapiens
acgtggtgaggcggccttgtgtctgcatactcggtgtggacgcccttctggactggccctcggaaagaggactgtcataacttgagcaccactgcagatcacaagtgcccctgggcagggag

SEQ ID NO: 389304 - DNA, 122 bp, Homo sapiens
tttatcactaggtaaaccgaacaagaacagtttgatcttatcgtgaatcactggagggcacggaacaagtcttacttctagaacccccagggcccagcggagtgtctgacacatgatagtcg

SEQ ID NO: 389305 - DNA, 122 bp, Homo sapiens
tgagcactgtgggagctcgcggggtgtgatgggatagctttccagttctgctttaggacccgccccccagcacgctcctcgacgctgcgaggtcccgccccgcgtgctggccgcggtaaaag

SEQ ID NO: 389306 - DNA, 122 bp, Homo sapiens
ggagaagagcagggcacgggtgataaagaaggcgcagtgtcggtctgtcggtgtcacacacgcgcgcacacacggcggggcgggagccgcgcgagcgagaggagggcgggcggcgtgtgctg

SEQ ID NO: 389307 - DNA, 122 bp, Homo sapiens
tgaggcgcgccaggccctcttcgtaggccacatcagcgggtgagggggacgcgggcgaagcggaggcaggcccggggcaagggccggggccggggccaggcggcggcgtcgagcacgccgag

SEQ ID NO: 389308 - DNA, 122 bp, Homo sapiens
gggagccggggctaggacggtgtgtggggtccgaacggaactcccaggctgtagcgaaagcgtgacagggccggaccctgaagctgaatgaccgctaagtggccctcacgcctcggaaaccg

SEQ ID NO: 389309 - DNA, 122 bp, Homo sapiens
aacagaggtcttagctgcggctctaggctctgatcctacaccttctatctaggatgagatcgactttctagggagtggtcagcacgaagcaccacagcaggctgcagtgagcagagaggaca

SEQ ID NO: 389310 - DNA, 122 bp, Homo sapiens
cctggcggcggattctaccaaagccgaaactagctgggccccaggaagctggcgggaacccgcgaaagtccgtttccagcccgaagagggttcgtttttcttcgttggggcaggaaacaaac

SEQ ID NO: 389311 - DNA, 122 bp, Homo sapiens
atgtgacgctgcgacggggcgtcccggggcagggccctgccaagggacccccaacaaacacgactgaaactcagcctggatacaaagtccacatggaggcactgccagagacgcctgccggg

SEQ ID NO: 389312 - DNA, 122 bp, Homo sapiens
tcggcgggcagcggcatggaggaggtgcgcgtgtcggtgttgactccccttgaagctggtcgggctgttgtgcatcttcctgacgctgtatctggatctgggggcggtgctgagcccggcct

SEQ ID NO: 389313 - DNA, 122 bp, Homo sapiens
ctctctgcccccggccccagggtcctgcaggcagggctggaggtggagcggctccgactgcggaatttctatcaccactaccactccaagaggggcatgtggagcgtccgcagcaggaaggg

SEQ ID NO: 389314 - DNA, 122 bp, Homo sapiens
gggaattttcatcatcattaaaatggtgatttttcaaaaagggcagaaaagtcagattagcgccccctggtggtataggtaaatcccaggggaaaggggaaaccccggcagaggaaggcgaa

SEQ ID NO: 389315 - DNA, 122 bp, Homo sapiens
gacatcttggccaaccaatgacctttggggctgccaaagcgcctgcctccgagagttgggcggggcgagtagttgcaatgacaaacatttaacccaatagcgaggagatttcagacgctacg

SEQ ID NO: 389316 - DNA, 122 bp, Homo sapiens
cccggcccgtgcctttcctccgagcggcagtggcagcctgctcttccccaccgtggtgcacgtggccccgccctcccacctggagagcggcagcacgtccagcttcagctgctatcacggcc

SEQ ID NO: 389317 - DNA, 122 bp, Homo sapiens
agccttcttaggggccgtagtcacagctgggcatggtggagacacaggggacggagcaggcggcactgaagactcttccctaagttggaacacacaggacttgagtacgtgctcaacactcg

SEQ ID NO: 389318 - DNA, 122 bp, Homo sapiens
gctgccctgaagccccgcccggcagcgattccagttcctgatcccactccgggacctccccggccccgaaccttgtgacgtcgagctaagctctgtctgggacccctgcggcctcttggagc

SEQ ID NO: 389319 - DNA, 122 bp, Homo sapiens
aaacactccgcggtacttgcccgatgctgggccccgtgctgagtgctgaggacacaggggcggccagaacaaggcctccaccctccaggggttctggatttccttgggaaagactctaacca

SEQ ID NO: 389320 - DNA, 122 bp, Homo sapiens
gaacaactccaaaaaagcaaactgaagtatctggggaaatatcctaagaagcagacaacacggacagtgagctgccaagcctgcagaccagacttgggcagacctcagacacgagggccatg

SEQ ID NO: 389321 - DNA, 122 bp, Homo sapiens
ctggagtctggatactagaagctgcggttgctcccaggctcgggaactgagacgcagaaccgctgggcgccgcgatttaaagcagctccgcccgcctcagccccggcagccggggagcgccc

SEQ ID NO: 389322 - DNA, 122 bp, Homo sapiens
gattccatagtagaaatgctgttagcaactgctctgaggggctttctaaagaatggggaccgaggccatgtagacacagaggaatggagaagctacccttggtatggacaaaaccttttcct

SEQ ID NO: 389323 - DNA, 122 bp, Homo sapiens
ctgaatcctgatatctggctattttttttctctctctttatatacagtgttaatgtaccgcggtgaggctcttgaagatttcacaggcccggattgtcgttttgtgaattttaaaaaaggtg

SEQ ID NO: 389324 - DNA, 122 bp, Homo sapiens
tgcagcctatgtcagtgcttcactcctctttaaagctgcattacagacacacagacacaccgcggcatcttcatccctgtgggttagagacacacagacacaccgcggcgccttcatccctg

SEQ ID NO: 389325 - DNA, 122 bp, Homo sapiens
ctgacacaggtaacaactagaactaataatctgatcagtaagttattgatctggcttttacgagatcttacttgataatttaaatgaaaactatagttttcacagatgtactgtcgttttta

SEQ ID NO: 389326 - DNA, 122 bp, Homo sapiens
gactttcttttcaaaacgtggatggtgcaatcgtcgcttgcctaagctgctcccctaacacgccctcccgcggtcggggaggggacctggggatagattcccaggggctgggagggccaccg

SEQ ID NO: 389327 - DNA, 122 bp, Homo sapiens
acagtgttctccatcattttcagaccagctgtctagagggctttagatactactttgtttcggctattggcccctaagacacaaactatggccaacaatgacagatgcagagaaaaaagaga

SEQ ID NO: 389328 - DNA, 122 bp, Homo sapiens
tgggctatttaatatttgcagatttttatttaaaaatctgaattcacagtacactgcaggcggttgcttagaagcatacaagtttcaagaagttctgtcaccctgtgtatactctttttttt

SEQ ID NO: 389329 - DNA, 122 bp, Homo sapiens
accccatgtgctaacagaggcagaaactgacgcgacagctgtaggccagtgaacccctgccgccaccaggaggctggaaggaggaaggaagggttctcccctagggctttcagaggcacgtg

SEQ ID NO: 389330 - DNA, 122 bp, Homo sapiens
ctcccaccctgcttctgtggggtgcctcagaggagagcaaggtgaaccccagtatggaaccgagacacggttttgacaacactgttgatcccatttggaaaatccagctatgtgattaacca

SEQ ID NO: 389331 - DNA, 122 bp, Homo sapiens
agctcaggacgcaaccctatgagttggaagccgcaggaggcggaaccgggttgcgggatacgcgttgacgtcacatcctctgggcggggccgcaaggaacccgcgcaaattgaaaggtcagc

SEQ ID NO: 389332 - DNA, 122 bp, Homo sapiens
cacacacacacacacacacacagactttgagtcatatattatatttgcacatcatggatacgaaaacatattcaaagaagttagattatttccttagattgtatatcttaagggctagaggc

SEQ ID NO: 389333 - DNA, 122 bp, Homo sapiens
gagccgcctcagtggggtggaggcagggcaggcctgtccaatgaccccaccccctcaggacgtttcctccgtgcagcctgggccaggggccacgggaggctcttcacctacaggggacgcat

SEQ ID NO: 389334 - DNA, 122 bp, Homo sapiens
ttctgctcattagtgttctgcctctccagcttgcagaacacggcggttccctaattcaaccgcaggcgagattacaccagggtagttgaggctgacgcgaaggccagccacagaaaggccta

SEQ ID NO: 389335 - DNA, 122 bp, Homo sapiens
ttcaacattgtctgcttgggactcaccaccttggtcagcctgagcggctccatcatctaccgttttgaccgccgggccatggaccaccataagaaccccacgcgcactctggacgtggccct

SEQ ID NO: 389336 - DNA, 122 bp, Homo sapiens
tcccagcctccgccctgccctcacccagcccgctgttccccaagcctcgctccaagcccacgccacccctgcagcagggcagccccagaggccagcacctatccccgaggctggggtcgagg

SEQ ID NO: 389337 - DNA, 122 bp, Homo sapiens
ttatttatttatttaattcctcttctccctcaaagcacaatctgctgtatgttaaaggggcggggaagctgctgactttgcagtagcgcatacttactcacgcaattttccattctggctga

SEQ ID NO: 389338 - DNA, 122 bp, Homo sapiens
ccacaactgtttgactttcaaagaatggctcctttctactcctgtaggaggagatcaagccgaactgggcaccaaggatctagatcaccctatgaagtgctgccctcaaacacattctctgt

SEQ ID NO: 389339 - DNA, 122 bp, Homo sapiens
gcagccagagggctggagcctgctcagaggtgctttgaaggtgagttggccaacggaagccggggcagtgccagggtgggtacagattccggcccggtgcatgggcacaggtctgctgagca

SEQ ID NO: 389340 - DNA, 122 bp, Homo sapiens
tgcagggtcaccggagtggcctgagggtggcggaaggaccggtgaactctgtgcagggtccgggacaggcccccaagggaggggacactcgcgctgcgccttgcaggatgaggagccggtct

SEQ ID NO: 389341 - DNA, 122 bp, Homo sapiens
cattaatttgatgacgtagatcaacttaaatttctttaataagatctctctggaattttacggcaaataaactattgaagtggcttgttttatagagaagccaaaatagaagtaatcacatg

SEQ ID NO: 389342 - DNA, 122 bp, Homo sapiens
ctgctgttccaggttctggcaccagctgctgggtcttgggtaagttgcctccctggacctcggttttctcatctataaaatgagatggttggagatgatgccctccaagctcattaaaatat

SEQ ID NO: 389343 - DNA, 122 bp, Homo sapiens
ctcaaactcctgaccttgtgatccgtctgcctcggcctcccaaagtgctgggattacaggcgtgagccaccgcgcctggccgtgattttttttaatgaactttattttttggggcagtgtta

SEQ ID NO: 389344 - DNA, 122 bp, Homo sapiens
gtaagtttgggcatccacatgaatgagctggggcacccaacaccagattacaccaggccacgaccttccctgctgccccttgcctgcttcagaggctgccccgctgcaggtgggggcctcag

SEQ ID NO: 389345 - DNA, 122 bp, Homo sapiens
tggtaggggagtgggagggggagggcccagcctcgggggcctccccagaggcggcgtctgcggtggtggcagtggcgccgtcatccacagaggattccattctcaacccctcttctgagggt

SEQ ID NO: 389346 - DNA, 122 bp, Homo sapiens
aatgagacaactaaagtgcaaaaagtgtaagtaactttcaaagatcacagaatttgaatgcgatggccagggctgagtccatgctctagacagtagtgttcaacctcttcccttggtgctac

SEQ ID NO: 389347 - DNA, 122 bp, Homo sapiens
tcaccagagctctactgtccaaactttttattggagcttcataatgtaggcatgattgatcggttgattgactgcacatgtggttgaactcagtctctaaatcatatggttggtctttctgg

SEQ ID NO: 389348 - DNA, 122 bp, Homo sapiens
tacacacagcatgctggccagctcctcctatgcagagagcatgaacccagcccaaagtcacgagcattaaccgcatgccacgtattccactggacattatgatgcattctttatccagccta

SEQ ID NO: 389349 - DNA, 122 bp, Homo sapiens
agggtgagctggctgccctcaaatatgggcaaggccctcaggcaaaggaggacagcaagtcggggcagtccaaaagcactgcctctcggatcacaagacctctccctaccccataacaggaa

SEQ ID NO: 389350 - DNA, 122 bp, Homo sapiens
atgaatgaagtgagatgggggctttggggattcgggttcacgcaccaccccaaaagcattcgaaggccgggcgaggccaggcactgccgaggagggcgggccgggggaggagcgtattggcc

SEQ ID NO: 389351 - DNA, 122 bp, Homo sapiens
cactgtcacacagagatgggaagggcatgtgcgggtcacttggaagaaaccctgtgaccccgatgagtgcaatgtggtataatttagtagcccatgctcctagtttgtcttcttgcatgtgt

SEQ ID NO: 389352 - DNA, 122 bp, Homo sapiens
cctcgcctcgagcagtttcttcaggacaccgtggctcgggctgctccctgctgccaggcacgctggttggctggcctgggcccggctcacgtgaagggcactggctcttgtgaccacactga

SEQ ID NO: 389353 - DNA, 122 bp, Homo sapiens
cgcaggccgcccgccagccccgctgaccgccgcccccgcgcttcgctggcgccagcctctcgatgggtcttgcactttgattatttgtgttagcagttaatttagcaccgtggccacgtgtg

SEQ ID NO: 389354 - DNA, 122 bp, Homo sapiens
gctcagggcttggaggcgggaagtcagccccgcgttgctggacgaatcgggtcactactgcgactctatttagcagcggaggtctcaaggaacagctttaacctcctctgggataccaaccc

SEQ ID NO: 389355 - DNA, 122 bp, Homo sapiens
ccattcaagcgccgggctgtgttcctgcagctggccttccttttcagagcctcactgtcacgttcttgcagcggcctccccttccggagcctcgctgtcgcgttcctgcagccggcctcccc

SEQ ID NO: 389356 - DNA, 122 bp, Homo sapiens
actccctgggcgatgatgggggctggtcactctggccgggatgcggaccccaccctcgcccgggcccaggactcaccttgtccttgtgctgctccagccactctcgcagcgtggccagcacg

SEQ ID NO: 389357 - DNA, 122 bp, Homo sapiens
cgcctcgcggccgccccctctacactcagggactggcctgagtccggggggtgggggtttcgaggcgggaagccgggctgtcccgaatctcggagggtgcaaggccaggaaagagtccgggt

SEQ ID NO: 389358 - DNA, 122 bp, Homo sapiens
tcccaggctgcgctggccagcaccgcagccagagagcttcccgctccgagcaggagcggacgctgttcgtctctggaggggccatggtgctcgcgactggctgttcctccttatatttgggg

SEQ ID NO: 389359 - DNA, 122 bp, Homo sapiens
agtatatgagacagcctgttccattcatacaaataagagcaacattttgccaagtacatgcggtacacctgcaccccacagaatctggttgtgcttgcctgagggatgacaggctctcctgg

SEQ ID NO: 389360 - DNA, 122 bp, Homo sapiens
ataaccaaatctgagtctgtgataccactgggtgtggccaacgacccacctccacatttacgcataagcaatgagcacagtatattatcatgcatgtgtctgggagagtttacaggcctggc

SEQ ID NO: 389361 - DNA, 122 bp, Homo sapiens
ttcggtttctgctcacacaaaacttttctcccggctcagataaccctgggatctgcaccccgccttccgccccccacccccatcccctcaggcccgtccggatcatcagcacatccctctcg

SEQ ID NO: 389362 - DNA, 122 bp, Homo sapiens
ggagcctccggaagctcgcgctgtttgcagggcggaggagcttggtccctcctcttcctgcgtggtatttgagattcgatttgcgaggcgggaaacgtgtactagcaggactgtcggtctgc

SEQ ID NO: 389363 - DNA, 122 bp, Homo sapiens
cctgggcctccagaactgattgacttccttcaagtcagttcacgactccccagtccccgacgtgagtcatagcccgggcctccagaactgattgacttccttcaagttggggtttccatgac

SEQ ID NO: 389364 - DNA, 122 bp, Homo sapiens
cgcgcagcgacggccgctccatggcggggtgcggtggcagcggcaagggcgcgagtgagccgtgtcgggccggccggcgccttaaacccgccgccccgcccggcctgtccgcgggaaccaca

SEQ ID NO: 389365 - DNA, 122 bp, Homo sapiens
agccgctaaatatagaccaagggggctcagggtctggcaagccgcgggagcctgaagacacggccatggacgcatatgactaagtctttccattttgttctagccaaacatcgtaatgacat

SEQ ID NO: 389366 - DNA, 122 bp, Homo sapiens
tctgttcaacaggctggtggtcctgtcagtctctgagcacctgtggaacttctgcccggccgtaaagctccaactcaaagggaagctctcttctgggaagctttccctgatcctgtctgttt

SEQ ID NO: 389367 - DNA, 122 bp, Homo sapiens
gacgtttcaggcaacgcctctgctgtcagccaataaggagcgggagacgcgtcgggcctgcgctcaatgggccgcgctggtcccgccccactgtgatcgtgagactgcagacccgctaataa

SEQ ID NO: 389368 - DNA, 122 bp, Homo sapiens
tccccaccctcgcccaccctgcatcaagctgcacccccagctccccaccctcgcccaccccggctcacgctgcacccccagatccccaccctcaggtcctggcacccggagtgcacatctcc

SEQ ID NO: 389369 - DNA, 122 bp, Homo sapiens
gccccggcaggtctccctgggatgggccactcggaggggggctcaccttgaggatgccggcgtggctcagcagcaggttggacgtcttgaggtcacggtgcaggatccagttgtcgtgcagg

SEQ ID NO: 389370 - DNA, 122 bp, Homo sapiens
cgcaccggccggggggaagggcacgcgggccacacctggggggcctgtctccagtcagcgcgcgggccaggcggggtgggcgcgcgcgcgtgggggagtccccggtccctgtcaggggcggg

SEQ ID NO: 389371 - DNA, 122 bp, Homo sapiens
acagagactggcagaggccacaaccagggctggtagagaacaggggctggtgccaaggcccgtggagatgggaaaaaggaagacagggctcatggaaagaattgtggggtcaggggacagtg

SEQ ID NO: 389372 - DNA, 122 bp, Homo sapiens
cctcccagctgcccgccctgtgggcatttgcacatatcctgacaagcctgaaagaagctccgggtgcccattgttcagtccaggtgcccattgttcccgggactgaggcccgggaaagggaa

SEQ ID NO: 389373 - DNA, 122 bp, Homo sapiens
gctcttgtgttctgtgatggcccatctaagccagttagtgacttaggttctcccatcccccggtggtggtgggtattcctgtggtgaggctgtttccacagctcagaaaggtaagtttatat

SEQ ID NO: 389374 - DNA, 122 bp, Homo sapiens
ggtgatccatctgcctcggcctcccaaagtgctgggattacaggcatgagcctctgcgcccggccaagaatagtattcttatgtactttgttgtgtgggcaattttaggtacagtttagatg

SEQ ID NO: 389375 - DNA, 122 bp, Homo sapiens
caccccaaaattcatgtgttgaagccctaatccctaattagggaactatttttggagatacggccttcaaaggtgtgattaagttaaactgaggctggtagggtgggaccctgaagagggag

SEQ ID NO: 389376 - DNA, 122 bp, Homo sapiens
gcgctgtgctgtcttccggttcggcgtgtgcggggcgctgtgctaagtcttccggctgggcgtgtgcggggtgctgtgctaagtcttccggctgggcgtgtgcggggcgctgtgctgtcttc

SEQ ID NO: 389377 - DNA, 122 bp, Homo sapiens
tagcagagattgttaaactttgttgagcttctataaagctaactagttattagaaggatgcgtgttcaatatgtatgagtttggggtggctgaggggttgttaccctggctgtcagattctc

SEQ ID NO: 389378 - DNA, 122 bp, Homo sapiens
ccccatgcaggctgggaacggggatggagccgtgaggattctcccttaatttaatggccccgtccactgagctgagaacatggctgtgatcctcagcttgggcagttcctattgtattgagg

SEQ ID NO: 389379 - DNA, 122 bp, Homo sapiens
gaagcgaggatgaatgggaacaagtgggcccccggaacaagacttccgtcacctgccaggcggattttgttcagactccaatcaccgcatttttggtggccacatcaggtctgtggtttacc

SEQ ID NO: 389380 - DNA, 122 bp, Homo sapiens
acaactccttaccatcttcctcatcgtcatcgtcatcctcatcatcttcgtcatcctcatcgtcctcatcctctgaggcaggggcagcagctgctgctttcatcgctgctggttcaatttca

SEQ ID NO: 389381 - DNA, 122 bp, Homo sapiens
aagcgaggcttgcccgattctgtgcctgtgcgcatgctgaaagcaggggcgggaccggggcggtcttccagcagggaaaatggcgctggccatgctggtcttggtggtttcgccgtggtctg

SEQ ID NO: 389382 - DNA, 122 bp, Homo sapiens
cccaggtccccaccccagcctgacaccctctccccgcaatccctcctgcccactccctcccgcaggcaccgctctgtccccagccgttcccggccccgagaccccgttccttccctcccagc

SEQ ID NO: 389383 - DNA, 122 bp, Homo sapiens
aactgcacccatgagtgttacctgaaacccctctgctcactctacactggcttttctccccgccctcagcatatccacaccagaggctgcagggactacaggaggaatgaaaggaagcctgc

SEQ ID NO: 389384 - DNA, 122 bp, Homo sapiens
tgtgtttgctctggaatctgcactttggggttcccggggaggactccttaccagcaagaccggccagaggactagggaagggcggttttgctcaaatgtgtgcctctctcatattccatcag

SEQ ID NO: 389385 - DNA, 122 bp, Homo sapiens
tttcgcggttgagcactgggcctgatgtccagtccccccaccaaattactcctgcaaagacgcgggcttcttgcaattgagccccccacctcgaggtatttaaaaccaccccaaggcacaca

SEQ ID NO: 389386 - DNA, 122 bp, Homo sapiens
aaagtccaacacatttggaagcaagcccctaagtgttgtaacataagcacaatcagatggcgctggggaacagaagatggagagtctgtgaggccttccagagcagtggcattggagctggg

SEQ ID NO: 389387 - DNA, 122 bp, Homo sapiens
ggaggtgttataagagcaatgcagaggttggagtgggcagcagttggggcaggaggaagccgactgctgcctggtctgcaaagaagtcctttcaagtctctaggactggactcttcctaagc

SEQ ID NO: 389388 - DNA, 122 bp, Homo sapiens
aaggaatttcagattcgccccctgcagcccaggagtagtacaatacacctatgaaaaaaacgggagatactgaacaaacctaatcctgtcacagaaaatcaactgtgttttttgagacggag

SEQ ID NO: 389389 - DNA, 122 bp, Homo sapiens
gacttcgcatctgacaaggtctcttggctttttttccaaaaattggggagcataaggaaccggctttggataagtgtaggttaaaagataaaacttgacaggaattacactgccaggcaggc

SEQ ID NO: 389390 - DNA, 122 bp, Homo sapiens
gcaacagccgctccctctcaactggagctgcacccaggctttggctaaaggctgttaaaacgttggccaggtgcggtggctcacgtctgtaatcccagggcggatcacctgaggtcaggagt

SEQ ID NO: 389391 - DNA, 122 bp, Homo sapiens
aggaaggcggttccggcaagccaagggggcgttgtcgtgatgattccgcggccagcggatcgctgcgagtggccttgaaggcagctgctgcaggtgaagagtaggcggcggggcagagagcg

SEQ ID NO: 389392 - DNA, 122 bp, Homo sapiens
ccggtccccgtcgggcggcagcggccggcgctcagccctcgccggccccctgctctccggcgggcagggccagatgtactctctccggcaccctcttcagccccgtggacacctccctgagc

SEQ ID NO: 389393 - DNA, 122 bp, Homo sapiens
gggtggggcgggggcagctttcgagaattacgaggacaggaggcagaggccctccccatccgcattattggaggagagagagcctcccccagcttggggagggggagagcggggcattgggc

SEQ ID NO: 389394 - DNA, 122 bp, Homo sapiens
ggctcagtttccatttccctccctcagtattcttcctggcaagatacccattaagcatttcgccaatcagaatctcattttatagtttttcccattggtctttaactaagactttcttgtag

SEQ ID NO: 389395 - DNA, 122 bp, Homo sapiens
tctctaggccccgttccactcctgtgggagggcagtgatgctggagagcgtgaggggcggcgagtatggccctgggtggcgtcatggcacacaggcactgagtggactgttggtggctgccc

SEQ ID NO: 389396 - DNA, 122 bp, Homo sapiens
agctccaggaagcagggcggccgaggcgccgctccgtgcgcgctccccggcgggaccccgcgcccctgcacgcccctcccgcagtccctgcccactcggacccccaccggtgccccgaagcc

SEQ ID NO: 389397 - DNA, 122 bp, Homo sapiens
ctcctttcttctctttcacaccctcacctttggctaggccactcgatgttgcaagaaacacgtccatcagcaattgcctcagtagaaaactccctctgctcccctcctgcatccacatagca

SEQ ID NO: 389398 - DNA, 122 bp, Homo sapiens
cctgctggctcagaaatgccagacactggcctgcaaggccgactcggaaaagtagtgcctcgcctctacctcctccatttcctgccctctcgcatcctctccctgcactcccactcttccca

SEQ ID NO: 389399 - DNA, 122 bp, Homo sapiens
gccccattttccttcccgctcccccgtccgaggttccccggggcccaggcccgcgcgcaacgccccccaggctcccagtggggcctggaggacagtgtttactagagccaccccctgtattg

SEQ ID NO: 389400 - DNA, 122 bp, Homo sapiens
gccccagcctctgaactcagctggcttgagaagctcagcccaacccttccagcacccagccggccctccgtctcctgagggacgcccctgcccccgacctggaggccctcagtctgggctgg

SEQ ID NO: 389401 - DNA, 122 bp, Homo sapiens
ggggtcccggcggggcggggccaggtgcgccaggcttggggcggggcacctctggctgggcggggcggccgggccccggcgctctccagaccccggcgggtagctggcgctttgggaacctc

SEQ ID NO: 389402 - DNA, 122 bp, Homo sapiens
tcattctttcaatattgcttttctgtttattccattttgaaacacagtagcccctcccctcgcccccagccacccccaaaatggcaaggcttaatcatgctgaaatatgggggcgctggctc

SEQ ID NO: 389403 - DNA, 122 bp, Homo sapiens
agcagaggtcaagtctctgcccagcgccgggccaaggagcttggatttgatccacaggcacgagggagccatgggagaactatgagtagaagagtaacccggtgggatttctataactggca

SEQ ID NO: 389404 - DNA, 122 bp, Homo sapiens
tgcgcccccgcccccatttccaacgcacgcccagcctccgacgcaggcccctcaccccagcgttttaggaagaaagctcaatgcttcattcacaaaaagggaagaaaaaaaaaaaagccgca

SEQ ID NO: 389405 - DNA, 122 bp, Homo sapiens
aggcaggccaactctctggggttacttccccacaggatcataggaggagagaactctgcccggggcacctcacagagccgggtcagaccctggccccagcactcaacaaatggctgttggcg

SEQ ID NO: 389406 - DNA, 122 bp, Homo sapiens
gaggcttgcactggtggggattcgtgcgcaggtttcctgcctccgggcttgggctgtccgcgcctcgccacccaccccaggctcccgtcgctcctcgccggctggcgcccagctggggggtg

SEQ ID NO: 389407 - DNA, 122 bp, Homo sapiens
tccctgtggaagtagcgctcatatttggaccggctcccatctgcagtctacagccagattcgtctttctgaagcttagctccagggatcagccctttcctactcatagatgagctctggctt

SEQ ID NO: 389408 - DNA, 122 bp, Homo sapiens
ggaggtatattggggctgtcacctccttgctggccggagttatttgtagactacagactccggaagaacagacgcgccaccgctctcgcttggcattgccttcggatcgcagctcctccttg

SEQ ID NO: 389409 - DNA, 122 bp, Homo sapiens
agcaccaacatgattaaataattgaactgtctcaccttgcccagtcaagctggattccaacgagggtaattaatcttcatgtgcctgttattccctgccctgctcctgttcaaagtcaagtt

SEQ ID NO: 389410 - DNA, 122 bp, Homo sapiens
acctgcacatccacctgcccctcccccaacgatgcccctcactccagctcccagctcagccgggcccctctggcctctggcttcaggcagaaacctgccacatatactcacaaatagcgtct

SEQ ID NO: 389411 - DNA, 122 bp, Homo sapiens
gctggaggcgctcctgggggagggtttccgcgccgaggagcccacgcgcggtgacagatgcgcggacacacgcacacacggtggcacccacctcgagagagacaatcttggagagaggcaga

SEQ ID NO: 389412 - DNA, 122 bp, Homo sapiens
aaagctctgtctcggaacacaggaataagaagtcccctgcccgcaggggtccccgcgtcccggtgctcacctgcctgctccaccttgtgtgtggcggaaagcagggggacagacgaaagaga

SEQ ID NO: 389413 - DNA, 122 bp, Homo sapiens
tgctcaatgaatagctgtcgaaagaatcaacaccaggccaggaagaccagctaaagcaaacgctcagtgggacaacacctgagcagtggggggcgtgactgcagtaccaagttgggaggaga

SEQ ID NO: 389414 - DNA, 122 bp, Homo sapiens
gcggaacacactgagagccggaagtgttgccttagctccggacgaccggatggggaacggcgcggcccatcgggcaaccggaagcatagcgttcctgtccggaagtcctgagagggaaacgc

SEQ ID NO: 389415 - DNA, 122 bp, Homo sapiens
aaggcggaggggagcgaagcgccgcctgataaatactgtggcccagtcccgcccccctaacgtcacttccgccccgcgccaagatggcggcgcccaggccctgccacgcagacttccgcccg

SEQ ID NO: 389416 - DNA, 122 bp, Homo sapiens
cgccccgcccccggccggggtcacccacccgctgccggggctgacagagaccctggcccgcggtctgcagcctcctcagtcgtgcgtgcgttcattccgctcatagcttctgtcactcagca

SEQ ID NO: 389417 - DNA, 122 bp, Homo sapiens
ggctgcatctgggacattcgacagaaggggaaggtggaaggacgtttcctgggggaggttcgagtcctctctagcccaccactgcagggaggaaagggtaaggagtggaaacccggcccctc

SEQ ID NO: 389418 - DNA, 122 bp, Homo sapiens
tatttccactttaaagataaggaaactgactcaaatacacggaaaacaggatttagtaaacgtgatttatttggaacgtgatctcagatccacagaggtgagaaaaacaggaaaggagaaag

SEQ ID NO: 389419 - DNA, 122 bp, Homo sapiens
gcgctgtgtccgtcgccatgacaggtgggcacggggtcggctgggcggcagggatgcgggcgccctggatgggtggcccggcccgggggtccggctgccttgcgagtcgcctgcaggccgcg

SEQ ID NO: 389420 - DNA, 122 bp, Homo sapiens
tgattccgtttaggtcatgcttcgctggcaggagcatcacgcagagctgcctgcttcacgcgggctgcaccaggtgatgcggggctgtgatctatccattactggtcatgcagatcttctca

SEQ ID NO: 389421 - DNA, 122 bp, Homo sapiens
tgcccagcaccccgtccgtcttccctgcagtggcgccaatctcctggcggtcaacaccgacgggaacatgccctatgacctgtgtgatgatgagcagacgctggactgcctggagactgcca

SEQ ID NO: 389422 - DNA, 122 bp, Homo sapiens
acctgggagtagggtctttcgattttaaaggaacctgtgcccaccctttggctggagagccggcatctgtctctggtgccccgcaggtgacggatgggctggaacggagcctcagggagtgc

SEQ ID NO: 389423 - DNA, 122 bp, Homo sapiens
cacaaagtccacgaaggccgtccgctcgatctccaccggctggccctgcctgtcatagagcgccaggacgaagtgaaagaagttggatttcctcaagttggaaggaggctgtttctcaaagt

SEQ ID NO: 389424 - DNA, 122 bp, Homo sapiens
cgtgatccacccgccttggcctcccaaagtgctgggattacaggtgtgagccaccacgcccggccactaggggtcttaaaacggacagaacacttgaccacagaccaccaaattaacatgtg

SEQ ID NO: 389425 - DNA, 122 bp, Homo sapiens
ctaggcccaagcctgcccgctggcgtcgaagccaactccttactggttcaggtatgtgctcgtctctagagtaaaccaatcagagccccacttcttactcctgggatttggtaaacggaaga

SEQ ID NO: 389426 - DNA, 122 bp, Homo sapiens
acgtcactgaagcgccaggcctgggccgtcccaggctccgctgggtccctggtatgccgtcggtgctcaataagcacttgctgcagaaatgtgtgaaggaaaaagggggctagggaagggct

SEQ ID NO: 389427 - DNA, 122 bp, Homo sapiens
atccgcaggctaaaaacgccccccagggttctccgctgccatccgcagggcaggaacacccggctaggtctctgtacagttcccgcagcaccaccttccacagtataatgacgcccgccccc

SEQ ID NO: 389428 - DNA, 122 bp, Homo sapiens
atgcctgctcaaaactcaagaagccaccaccctgatactcatcaaaccccggagaaatttcgtttttagagtgtcagaaggccccatgaataaccttccagtcactgagggaggtccctact

SEQ ID NO: 389429 - DNA, 122 bp, Homo sapiens
acagaccttatctccaggaaaaaaaaatttagacatgaataaaaacttgtacaatctttgcggaattgcagtgttctgaaggcctatgaatggtctatggactttggacttagaaactctct

SEQ ID NO: 389430 - DNA, 122 bp, Homo sapiens
agacgaagtgggaggaagtgcagttcgcccccctccaggagtttggcgtggttttgtaagcgcacggttgggccctgtcctctgctcagtctccccgaccttcccctcccggaacgcgctca

SEQ ID NO: 389431 - DNA, 122 bp, Homo sapiens
cttgccgaagaggaagctcagggtggagctggtggaggagcccaggctggacctgatgagcgcctcggcccgctcacggacactcaggtggccggtggtggtgacgggcgggggctgagagt

SEQ ID NO: 389432 - DNA, 122 bp, Homo sapiens
atgcgtgaagctcctgcccacacagggagtcaggttcctgtcctgtgcacctggatgctccgggaaggactgccttggggtctggccacgaactccactggctccagctgtgcagccccgca

SEQ ID NO: 389433 - DNA, 122 bp, Homo sapiens
tgaagccggggacaaattccgagcgccggatcaggagcgcacgactgaaaggtaagtcgccgcgagtccagtcagacgtcgacgccgtctccttctgcaacaatctgggagaccagcgtcgc

SEQ ID NO: 389434 - DNA, 122 bp, Homo sapiens
agaggaggaaggaggccatcattttaaaatccttgtcataaaaggaaggagtcgtcacagcggggagggttcacgtctgtaatagaatgggaaactgacagtgttcccaagaaaacgaagag

SEQ ID NO: 389435 - DNA, 122 bp, Homo sapiens
cgcccggtggtcggctgtggtctcccattggctacaccggctgccagtccctggaggaggcggtgcccttccccgccctctccgagctcggcttgaggcgggcgcgggctgagagtccgggg

SEQ ID NO: 389436 - DNA, 122 bp, Homo sapiens
cggagctaacagaggtgcagcttaggggcggtgctagggagtgtgcttgttcacagcgcacggcactgctctagccaaaaggtctgtgtgtaaggggcgattgtctttggaaaggtggaagc

SEQ ID NO: 389437 - DNA, 122 bp, Homo sapiens
agctgccaaacatctggatcaacctgggcactacgaggggttgaatttctaccattatcgcgccttttgatatttttttccagacctcctgctcacatccgtaaagcccactgattctttta

SEQ ID NO: 389438 - DNA, 122 bp, Homo sapiens
caggccgaggaggggcaagtgcactgaagacgtgggaggtcggcgctgagggctggtggccggcagaagagagatcctggcctgggtcccagagctggggggttcccggtggcgggggatgg

SEQ ID NO: 389439 - DNA, 122 bp, Homo sapiens
cctgtcactgggcatcaatctgggcctcccaggcgccggtcacctgggaaagaccacagacgtcagtccccagtgtcatcagcccccccgcatcaggtcccaagtgggggtgtaggggcccg

SEQ ID NO: 389440 - DNA, 122 bp, Homo sapiens
ccggccgggcaaccgaggctgcaatagctccagaactggcctccacagtgtcttcctctacgggagtcagctggttgtgtcacttgacccctcttgttgctaagaggcagcagggacaccca

SEQ ID NO: 389441 - DNA, 122 bp, Homo sapiens
ccgtggacccggctctggagtgcaaactgtgcggccaggtgcttgaagagcccctgtgcacgccgtgcgggcacgtcttctgcgccagctgcctgttgccctgggcggtgcggaggcgccgg

SEQ ID NO: 389442 - DNA, 122 bp, Homo sapiens
ggtctttccagctccacggttttacagtgtggagcggggaaagaaaaactctaaggtcctcgctgcaaagcaaccatcagagctccgccgcgccgtgccgctcctctccgccccgtggtccg

SEQ ID NO: 389443 - DNA, 122 bp, Homo sapiens
cccagacgggccaccacacttacagccctctgcatcgtcgcctgcaacgagtgcagacggcgcacagaggccaccacactgccaggcacgccgggagatgtagtccaggcctctgctcggac

SEQ ID NO: 389444 - DNA, 122 bp, Homo sapiens
cgctggccgagggcatggacagggacttgtggatccacgagcagcaggtggccacactgacggaggccgaggcacagaagcgcgccgacgtgctgctcctgaaagaggcgctgcgcctggag

SEQ ID NO: 389445 - DNA, 122 bp, Homo sapiens
catcaacgagcaccagcggccagaggtgagcagtcccgggaaggggccgagaggcggggccgccaggtcgggcaggtgtgcgctccgccccgccgcgcgcacagagcgctagtccttcggcg

SEQ ID NO: 389446 - DNA, 122 bp, Homo sapiens
agaaagggtgccctagtatggagtactgcagacataagttgctggggagagggagctaaacgctccgttggtgtacaagcaaggtttaaattaaaatcctctgtgcgtattaaccgggttca

SEQ ID NO: 389447 - DNA, 122 bp, Homo sapiens
ttgctcaagaaataataagcagggagggcaatgacagtccggagcgggggagggcctccccgttgagcacatcggccacctcgccttcagcagtgtggttttccgggccatcctttgttgga

SEQ ID NO: 389448 - DNA, 122 bp, Homo sapiens
ctagagcagatgaaagcggagaatgcattttcaaaggacgctcgacctctaaaagaagttcggtgggaaagctgagcgcttggaagaagggggcggggggaaaggggacaaagtaaaagcaa

SEQ ID NO: 389449 - DNA, 122 bp, Homo sapiens
aatgacgcaacataacccacgcccactgagaatcgtcctttcccagactggctcagattccgctttccgattggtccctacagcaagagggcaaggacaattgcttaagttgacctctgggt

SEQ ID NO: 389450 - DNA, 122 bp, Homo sapiens
agaataggctttcaaaagttaaggaacaaaagaggagttggttttccagtctcccttaggcggcagcagattgtgaagcagccaccgggaggaaccaaagtataaattatcaataagaggac

SEQ ID NO: 389451 - DNA, 122 bp, Homo sapiens
actcattagttctgagtaggtctgttttgaaaaggtctttgtgatggtactctaggttgacgtgtccttgctataggtgataaaggagtcactcactgagtcttaggcagagcaatttttgt

SEQ ID NO: 389452 - DNA, 122 bp, Homo sapiens
cggggtcatcaggccacgttcgcaggcacccggggtcatcaggccacgttcgcaggcacccggggtcatcaggcctgagcccaaagtttagcagaaaggagaactgagacccagagagaatg

SEQ ID NO: 389453 - DNA, 122 bp, Homo sapiens
aatgtggggggcggatgatgtgttgggagcatgatgtgaaaaggagagaatcaagcaaaacgcaaactgttgtgctctgaataagcaacactgatggaagcaagttagcctgctccagcccc

SEQ ID NO: 389454 - DNA, 122 bp, Homo sapiens
tcagtccccgtgccttcctctgctcggtgcgttacaaggctgcttcctaaagctgaagttcgacatacacccccacacccacaagactgtcctcacagcaccctttgccgttactctagcat

SEQ ID NO: 389455 - DNA, 122 bp, Homo sapiens
gctatttatttcagcaccaaatatccggacagcgcctctcgggaggtccgagaagagaaccgcgatctgtttcagcaccggggctcaggacagttcccagcgggctccgtttcgtctccaga

SEQ ID NO: 389456 - DNA, 122 bp, Homo sapiens
atgtactacatttgcatgccttttgggtttgccttaattcttacctcatttgcatcctatcgatctggaaagagctgttttggatgaatgcagtataaaatgtaaaaaccctgctaaatgac

SEQ ID NO: 389457 - DNA, 122 bp, Homo sapiens
gggctggccccagggaagttaccccgaaggtccccaagttgggggggtgccagcgctaagcgccgctcgtgggccctcggacggaccccgcgaccgatagggcgcggaaagccccctccctt

SEQ ID NO: 389458 - DNA, 122 bp, Homo sapiens
accggccacctcccagtcaccaaacccactgggcagagtcccattttcactcttccagagcgttctctaccatccggcatgagacgctcttcactgctttcaccactctcctccccagcact

SEQ ID NO: 389459 - DNA, 122 bp, Homo sapiens
atcacagggacagatcaagtcttctcaaagcagagactggtgaaactttccaaatcatggcggtagggcacgccttgcatgttactgagaacttcctcctctctcttgactttgcagtctga

SEQ ID NO: 389460 - DNA, 122 bp, Homo sapiens
tgctcaagtctgggaactagaggcgcgggaaggtcctgcttccccgccacccagagatcacgtttcccagtaaacccaacttccgggtcccattccaggcctccaagcccacgtgacaacaa

SEQ ID NO: 389461 - DNA, 122 bp, Homo sapiens
caaacgctcaggcggagcccccggaccccgacaagcgcccacccctgccagtccccgccccgcacaccgggctcggtccccagcccaccgccggcaacctcacgaacacgtagggggccggc

SEQ ID NO: 389462 - DNA, 122 bp, Homo sapiens
ggtccgggggcagctgacttaggacagcctccctgtgacccgccctcgccggcacggcgccggctccgccccttaagccccctaagtcccgcctctgcgctcccggggcctacccccgcgct

SEQ ID NO: 389463 - DNA, 122 bp, Homo sapiens
tgaaagtgcaacgagctgagctcctgtgggtgaactttgaccatttgaagctaggtagaccgattctgcctctttcttctctcaggaaggttctgaagggtcatttctccttgaaaatcttc

SEQ ID NO: 389464 - DNA, 122 bp, Homo sapiens
gtcctatcgcctgcttaaggccagcgagccgggactcttcgcggtgggggagcacacgggcgaggtgcgtacagcgcgggcactgctggacagagacgcgctcaagcagagcctcgtggtgg

SEQ ID NO: 389465 - DNA, 122 bp, Homo sapiens
agagagagactgggggcccggtccaatcgacagcttatctgggcatctgagggagccatccggcgcaatgatattgtgctgtcagatctgggtatgtatctgctccatgaacaaaggtggcg

SEQ ID NO: 389466 - DNA, 122 bp, Homo sapiens
cgcgcccagacgccgcagcccagacgccgcagccaggggcgggggctctttgtctgggcgcgtcctccgcaggccccgcgcaccgtccccgcctccctggcgccgcctcccaccgccggggg

SEQ ID NO: 389467 - DNA, 122 bp, Homo sapiens
ctgcacttcttaaactagttacactgtaatacttgttttagagtctgcttctgtgattaacgtttctgatcagtaaaatggcatagcactgcttacctcaagagatggccgtattttgtcag

SEQ ID NO: 389468 - DNA, 122 bp, Homo sapiens
cgccatctcatctcacacaccggggaggcccacttgtgcccggtgtgtggcaaggccctccgagacccacacacgctccgagctcacgagcgcctgcactccggagagaggccctttccctg

SEQ ID NO: 389469 - DNA, 122 bp, Homo sapiens
tagggtgaagaacagtcattaattcccctttacagataatagagacttactaaaggtaatcgcctaacttaatgtcacccagatattagatattaagtgtcaaaactgtgatttcaacttgg

SEQ ID NO: 389470 - DNA, 122 bp, Homo sapiens
tccctcaacttctttgtaaggtaggtgaacagatgaggtaaatgatgcagataggctaatcgtctctctccaagtcacacagttaagttgcagggttaggattccagggtcattgttccttt

SEQ ID NO: 389471 - DNA, 122 bp, Homo sapiens
atagcatatgaatgtgtttggaggaagattctctagtcttagtccagctttacatgactgcggctctggccaacaactgaacccagattccggacactcagaaattgtgggaggggataaat

SEQ ID NO: 389472 - DNA, 122 bp, Homo sapiens
acgcattggtgaagtcaacgacaatgctccggttttccaccaagtctcctacgtggtccacgtggccgaaaacaaccttcccggagcctccatcccacaagtcagcgcctctgacctggacc

SEQ ID NO: 389473 - DNA, 122 bp, Homo sapiens
tttagagggaaactcaattccctggttgtatttttctgcagccacgttcagctgggtgggcgcagtgcggagtcatcaggaagtagaaattaaccaggctttgggttccgccaggtgaacag

SEQ ID NO: 389474 - DNA, 122 bp, Homo sapiens
gcgggctgcccctcttcccaccgagctcccggctctgttccatccttccccgtgcctctgcgagactgtctggaatcttctcaggggtcgtgttccctgggggaggcagccgggaggcttaa

SEQ ID NO: 389475 - DNA, 122 bp, Homo sapiens
cgctgccttcacacattgtctgctgccgatcttgtcaatgacccttgttaacgcctctcccgacaggtggacggcatccagacgcggagggaagtttcctcctggggagcagcgcacgtgct

SEQ ID NO: 389476 - DNA, 122 bp, Homo sapiens
agtgtttgctttcactgtgaggtgacttctctttgtatgtgtcaatgaaaagactcacaacgtagtagccttaagagctcagtgaagaggctgggtgatcagggtgggcttcctggaggtac

SEQ ID NO: 389477 - DNA, 122 bp, Homo sapiens
ctaataagaaaggaacaaaaaatctcactactgcccagcaagctgaagggcttgtgagagcgagccacgctgtctttgactctgaggggcactgctgggctgcctccttccacctcttaggg

SEQ ID NO: 389478 - DNA, 122 bp, Homo sapiens
atccgcgggtcctcggcccccatcctttatttttgctaggccgctaaggacgctagaaagcgattcgaaactcccgctttttccatagagatgcttttcttcttatctccttacagtgctct

SEQ ID NO: 389479 - DNA, 122 bp, Homo sapiens
agagccgtaaacaggtgccgctccctcgctgctttaggacttgtgtgactaggaggtgaccggagagcacggaaggcgccacaattacctgaacggggaaccttagcgcggccgccgccatg

SEQ ID NO: 389480 - DNA, 122 bp, Homo sapiens
gtatgcccgccgcggactggcaaggcggagtagcgggtccccaagacgagtagcccaagacgtgggctgctccaaagagggtgagagctgaggatgaacgaatctgatcaggcgcctcggga

SEQ ID NO: 389481 - DNA, 122 bp, Homo sapiens
cctctcttttagaataagtattggaattattctgcgtgactttgaagtacaaaacagacacggcagggaaaagaaagggatttttaacaaatagatcctcctcgtcacccccaaattgaagg

SEQ ID NO: 389482 - DNA, 122 bp, Homo sapiens
aaaaatggttagggttactaagaagccagcaacagagggcagcagagacctcctctggggcgtccgcgtagttcatgttccagttttacaaaagcagctttttctctgctgtggtctctgag

SEQ ID NO: 389483 - DNA, 122 bp, Homo sapiens
ttatttacaccccagcctacttctggcggagccaggcctcagtgcccgcctggcagccagcgggttagcggtgatggagagctcccttggggcctgtcagcctccaccatctggccaggctg

SEQ ID NO: 389484 - DNA, 122 bp, Homo sapiens
gcgggcgtctctaacttcgcggagctcatcgtcaagggtcagctggtggacgccggggagcgccgggacctcaccctcgaggggcggggccggcgacgggggcgggctctgcccgggggcgt

SEQ ID NO: 389485 - DNA, 122 bp, Homo sapiens
tagatgatgtgccggctggagttctggtcgtcgttccagatgaagaggtcgatgaggacgcgcctgttgaactgtgagttcatcagcgccagctgccgctccagctcccactcgagtcctgg

SEQ ID NO: 389486 - DNA, 122 bp, Homo sapiens
gtcgagatgttaaaacactcaaattttaaggttcgactgtgagggggagatagggggtctcgagctggatcgacccctgagccttcatctgcagagtcctgtgcaccagctcagaggacagg

SEQ ID NO: 389487 - DNA, 122 bp, Homo sapiens
cagcgcaccctaaactcggaggaagtgccagacggccaggtcctgggcagcccgggcgctcgctccgctccaggtctcccgagcaggggtgcaggcccgagcacccgcacgtggcgtgcgcc

SEQ ID NO: 389488 - DNA, 122 bp, Homo sapiens
ccacagtggacgctttcctggcccagccttgaccttagcatcggacacttcattatgtagcgatcactccgctccaaccccatcacccctttctgaaatattctgatttccagcctgtaatt

SEQ ID NO: 389489 - DNA, 122 bp, Homo sapiens
ccgcgtccggccgtcctgtcctgctcctgccaggtgggcggtcaaggtcggtctgggtgtcgggcagggaagggagcacccaagggcagccgcccgggctgggcaggagcgagactggtatc

SEQ ID NO: 389490 - DNA, 122 bp, Homo sapiens
ccccaggtgtggaatcaaaacagatcccagagcgcgatccgcggggcttttggaaggagccgcccagggctggagattccgacgcaaagacccggaggcccgcggagctgtgggcgcagctg

SEQ ID NO: 389491 - DNA, 122 bp, Homo sapiens
tgttaaaaggagagggatgatagtccctggcccacagggctgtgtgaggactgaaggaggcgatgtgtataaaggtcacagaccagtacgtggcccaaagtagcatgctctgtacacaccag

SEQ ID NO: 389492 - DNA, 122 bp, Homo sapiens
ctagcgcagccttaagtccgtgatttgaggaacctgccgcttccaaaatacaggctgagacgtcctccccatgaagtagttttgcgctcttgcaccacctcctttgtctacgctgtccctgc

SEQ ID NO: 389493 - DNA, 122 bp, Homo sapiens
gaaggactgtgggaatggtagcaaacagagacatgcaattacatgggtttttttttttggcggttagggggaatgtcctttttaaagattagaatcgtgagcacgtctatattagcagaaag

SEQ ID NO: 389494 - DNA, 122 bp, Homo sapiens
gagaaggggggcgagggaaatggcagtttgtgtcccaggggttcttccccttcttcttgccgcctcctaaagacaaacaaactcaaccccccaccctccggggtatcagggaactcgtggga

SEQ ID NO: 389495 - DNA, 122 bp, Homo sapiens
atccactgacgcagcagtccccgcaggcttttgagacacacattaggagaggactctgcccgctgtctgtctcacaatctgctcgaaatatcttggtcaggaatctcaggatgtctagtgac

SEQ ID NO: 389496 - DNA, 122 bp, Homo sapiens
tttggtgaataaagacatttctcttgagttctgcccacagattaaaaggacaaggacacacgttctttgttgacacttctgcagtgacttctcctttggcgagagagcacccagggccaaca

SEQ ID NO: 389497 - DNA, 122 bp, Homo sapiens
tagcgggggcttgtaagggactgtgagctgagctaaggagaatggaggtggggtgccaaccgctcccaaagggaaatgccatctcccactcacagccagttagccgagaatgggagctccca

SEQ ID NO: 389498 - DNA, 122 bp, Homo sapiens
gaggaggctgcgaggaagggagatcgaggctgagaccaagaggggatcgcgtgggggaagcgtgaggtaatcttgatgggaagattctgaggaagtctgatgtggagagtttgagtgggact

SEQ ID NO: 389499 - DNA, 122 bp, Homo sapiens
agccgggtgtggtgacgcgcacctgtgatcctagctactccaagcatgaggtgggaggatcgcttgagcccgggaggtcaaggctgcagtaagctgagatagcgccactgcactccagcctg

SEQ ID NO: 389500 - DNA, 122 bp, Homo sapiens
gactccaccggctggccggagctggggggcgggggttgctctcctagcttgctccccatccgagtcaacgccagtccagggtcgtgccggactagaccctagggcgtgggtacaaacgggag

SEQ ID NO: 389501 - DNA, 122 bp, Homo sapiens
taggggtgaggcaggggcagcactgacgcctcgcagggctgagtagcaacagctcctccgcgccgcgtttccggagaccctgaaggagtccgcgcgtgcgcagagcgcgtcccgggaactgt

SEQ ID NO: 389502 - DNA, 122 bp, Homo sapiens
cgaaacaaaacagaggtcactggatccgattcccagtaccatagaagtgactcaaaccagcgattcaaccgacaagcaggatccgggccacccaaagccgcgcgagagtttacgtgacgaca

SEQ ID NO: 389503 - DNA, 122 bp, Homo sapiens
gtcactgttatctaaacgcaagtgaagccgagtcacaggacccggatgttgtcagttcgacggtaaacgaccctgccagcttccaagagggcggcttcactgtgcgaataggtgagaagcca

SEQ ID NO: 389504 - DNA, 122 bp, Homo sapiens
tcctgggaaccttgtagtgacttaccctctgcctcctcttgcagacatctctctggattgcgacctgaactgtgagggaaggcaggacaggaactttgtagacaaggtaagcatctctgcct

SEQ ID NO: 389505 - DNA, 122 bp, Homo sapiens
gctcaacttcaggaggagctggatgctaagatccaccatgagggaagtcaccatgttacacgatggaggcccaataaaaacactggacacaaggcttgggtgagcttctttagttgacagta

SEQ ID NO: 389506 - DNA, 122 bp, Homo sapiens
cggccaaccccactgtgtccctgcaggagttcctcatggccgagcagtctctgcctggcacgctgttgaagctggcggcacaggggctgggcatgcaggccgcctgcaccctgatgcgcctc

SEQ ID NO: 389507 - DNA, 122 bp, Homo sapiens
ggggccggtgtcgggagggacccagggactgggaggcgggtcggggctgggctcaggggccgagagggagctgggcttggggcggggccgagacggagcgaggggtccagggtgtgagaaac

SEQ ID NO: 389508 - DNA, 122 bp, Homo sapiens
gcacaggaaggatgaggagctttcactgtcacccctgtcaagaaaccactcaaaccccaccgcctccagctgcttctcgaccgactgcagcggcccctccactcccctcacccccagactca

SEQ ID NO: 389509 - DNA, 122 bp, Homo sapiens
tccagcagcacacacagctcagtagcagcgccccgcccagatgtttatattttcctccatcggccccgccccccgaccatgaggggctctagccacgcccccaagctcaagtttctggggcc

SEQ ID NO: 389510 - DNA, 122 bp, Homo sapiens
gtcatcctcccgccccctggatattacaaaccatatcacaaggggcgtgtacacacacttcgatattggtattaataccgtcctctccctctttgggtattcggtgccatatttcaggtggg

SEQ ID NO: 389511 - DNA, 122 bp, Homo sapiens
agaaaagtctgatcaaagaaaactatacttgtaatagtgctaaccaatgggtaatgctagcgttggggggaaaatatttccctaacaataattgtggaacaaaaattaggttggatagaaca

SEQ ID NO: 389512 - DNA, 122 bp, Homo sapiens
ctgcgcgcccctccttctcttgcgcttcagggggccggccctcagggggcggggcagcatcgcgcgcaaggcctgccggttgctcggggtcgtatgacgcacttttccagctcgagccctca

SEQ ID NO: 389513 - DNA, 122 bp, Homo sapiens
gtcacacaggctgtagtgcagtggcaccatcttggccttctcacgggttcaagcaattctcgtgtctcagcttccccagtggctgggactactggtgcgtggcaccatgccggctaattttt

SEQ ID NO: 389514 - DNA, 122 bp, Homo sapiens
ccggctgcgccggatgctgtttcctttccgctcccaggggcgttgggaacggttgtaggacgtggctctttattcgtgagttttccatttacctccgctgaacctagagcttcagacgccct

SEQ ID NO: 389515 - DNA, 122 bp, Homo sapiens
gtttaagattgttaattttggatttttctgttccttgcatacaaacctaaaattacagaacgcaatttggtatgaagcaaattgcttaactcccctcttcccccacccaccgccctcaatct

SEQ ID NO: 389516 - DNA, 122 bp, Homo sapiens
ctctccaaagtttctctctccttccatcactgctggtctcatatcagtccagctcacccccgccttcctccaggaaaggactcctgacctcattaggctcgcgccccctcccgctgacctcc

SEQ ID NO: 389517 - DNA, 122 bp, Homo sapiens
gggaggtgggaggcggggccgaccaagagcaggagctggagtctgagccggtggttgcagcggaggcggtgatgtcggtgcaggttgtgtcagccgcggctgccgccaaggtgcctgaggtg

SEQ ID NO: 389518 - DNA, 122 bp, Homo sapiens
acccgcgtacccgcttcctggagccgagccctctttcccagcccttctctcccctcctcccgcgcaccccagagcgatgggaggcccttgggcttcttgaagcattttggagctcctaggct

SEQ ID NO: 389519 - DNA, 122 bp, Homo sapiens
aggtaggggctctggggaagccatgccccatttactggtggggaattgagatgcagagaccggaagtagcctgcccaaggtcactggagccccaggcccagggcatagggtcgtacagatct

SEQ ID NO: 389520 - DNA, 122 bp, Homo sapiens
ccgcggggtcaccttgaggcggttcagctggtcgtgcagggctgccttcaaccgcagcagcgtctcctcctccttgcgcagttcctgaagccggctcagcatgttgcctggtcacatagcca

SEQ ID NO: 389521 - DNA, 122 bp, Homo sapiens
ggcaagtgtaggaccactgatggtgatatcccaccctagtgaaatacagtgaagtctttccggtttctgaagctatgatcctcagggtttcacatcacgcaaacagctttctgtggttggtg

SEQ ID NO: 389522 - DNA, 122 bp, Homo sapiens
caggcaggagtctgtgtccctctggagcacgtttgtgaagctcacagaaaccctctgacacgtccatcctgctgccgtttgctcctgcgaggctgacattggtggcaacaaggtcctgaggg

SEQ ID NO: 389523 - DNA, 122 bp, Homo sapiens
gaaccgcggcgggtgggatgccgcgcctgcgcacggggtcaagcggggccatagtggaggcgcctcgcctgcacaaagcgcacctgcggacggtggcgctgtggggatagggaggtcccgcg

SEQ ID NO: 389524 - DNA, 122 bp, Homo sapiens
ctcccattgcatttcttgaacacaggcaaatataggaccaggtactgtgttaggtgctggcgtataagggtaaacaaatgcaacgtgatcctggatttcatagaccctattagtcttgttgc

SEQ ID NO: 389525 - DNA, 122 bp, Homo sapiens
tctgaaacattctctggaaagcttgtcttttcctagccgaatctggattaccaaggcttccggaactcgcaggcttccggagcgacgcaggagccggaagtggctgaaaaaaaaaagaaaaa

SEQ ID NO: 389526 - DNA, 122 bp, Homo sapiens
gggtctttgaagtccagctcaaaagcgtggagggctggttaaaataagtcacagacttgccggtttggggtttctagaaagaaaagtaacttgaggagttgaaggcttgtagaagacctttc

SEQ ID NO: 389527 - DNA, 122 bp, Homo sapiens
catgaatattcacacaagtgcgataaataaagaccatcagcagcctcacatcagttcaagcgcaattttgccaccaattggattacgaaaagcctctgggcttccagggagctttggagctt

SEQ ID NO: 389528 - DNA, 122 bp, Homo sapiens
aggacctcctcaggggaagggtccagagcatgggcatctgaccccaaaggttgggagcaccgtagaggcaggggtggggtggggacagggcccagctggaatggagtgttttgaataagcaa

SEQ ID NO: 389529 - DNA, 122 bp, Homo sapiens
ttctgctccttctcaccgtgcatcgagcaggtgcaacgcacatgccaggcgctggcagcgcgcggcttctcagagctgagcaccctggaggtgctgccacaggtctacaacgtgcgcactgt

SEQ ID NO: 389530 - DNA, 122 bp, Homo sapiens
gagctgggccaaagttactcctaatcaacacagacttcttaccgtgagagcctatcttctcggccacattttatatagccaatgaagacgtgccagcaatcatcccatgtataacttggcat

SEQ ID NO: 389531 - DNA, 122 bp, Homo sapiens
cgccgctgtcttctacttccgggaacgaaggggcggagacccataatccggaagtgacctcgaaaccttttccggtcttactcacgttgcggccttcctcgcgtcacagccgggatggtgag

SEQ ID NO: 389532 - DNA, 122 bp, Homo sapiens
tgcaacgacagatgggcggctgtgggtgggcctgggcgggtcaccctgggatgggccactcggaggggggctcaccttgaggatgccggcgtggctcagcagcaggttggacgtcttgaggt

SEQ ID NO: 389533 - DNA, 122 bp, Homo sapiens
cttctagtcagagaaccagagtgatcatccactggtacataagcgccttcggagagcgagcgtgtcttttcctcttttcttctttttttccttcaaagtatgcttgactggggaggtagggt

SEQ ID NO: 389534 - DNA, 122 bp, Homo sapiens
ccgcccccctcctggccttcggcctgggtatttcctcactttttataacttactttgatccggcctctctttgtcctcgcttccttcgcaaattttattgtccccgtagccgggtctttgat

SEQ ID NO: 389535 - DNA, 122 bp, Homo sapiens
tgccggacacggggctggctgctgcggggcagagcggcggctgagagcggggcgagggtgcggagccgaggcggggccggccggggcagggaatcgggagcgacccacactgcgcaggcgca

SEQ ID NO: 389536 - DNA, 122 bp, Homo sapiens
ggatgggcgggggggggggtctccccgccacgggaggtctagagagcagcggcggcggggcggggcggagtgcagaggcgccgccggcggggcggcttcgggagggcgcggcccctttaaga

SEQ ID NO: 389537 - DNA, 122 bp, Homo sapiens
ccatgcacattttcattaatcgggcccgcttcataactcaggtttactcttgctcagatccgagcctgcgaagatgtcgtgtcaataaccccccagcccttgtgccgttctgcccatctcac

SEQ ID NO: 389538 - DNA, 122 bp, Homo sapiens
gtcagagagactttgggccaccattcgggcgtcctcaggggcttcacatcattgcaggcccggcctcataggaatcctttggttgcaaagcactttcatgtcccttcttttgcggtccgtgc

SEQ ID NO: 389539 - DNA, 122 bp, Homo sapiens
ccgttgagattatgtaactgaacaatgggcctcgtctggaacttcatcttacaaaggggccgatcggcccgtccgggtggccaaggatttgccgcccgttgagtccgggccgccccgagcgt

SEQ ID NO: 389540 - DNA, 122 bp, Homo sapiens
taaaagaatcccgtggttttcggcagttcagaaacccaggcattgccgctgcgtggtccacgggagttgctctggtggagctcggatgcccgggggctgcaggaaagaaggtggcagcgccc

SEQ ID NO: 389541 - DNA, 122 bp, Homo sapiens
ttttctgtaggacaggttttggggtgtgggcaattcagtctgagagagaaggccttaatgcgagtgaacagccctttgcactagcctgggaggaggccaaaatgtcatcctgccttgactta

SEQ ID NO: 389542 - DNA, 122 bp, Homo sapiens
gatgctctgagagctttgatcctcttaaaggactcaagttgtaggcccagtgggggacaacgcaaagtccatgttacaccacagcttattgcactgagccggcgttgatgctggggtttggc

SEQ ID NO: 389543 - DNA, 122 bp, Homo sapiens
aggcatctgcagttgagcaccagatgcagttccttccagcttccttccccctgggaggtccgcttgatgccacttcttcatggcagcacaaacaaggccatggtcttctgaggagggcaacc

SEQ ID NO: 389544 - DNA, 122 bp, Homo sapiens
ctaggcaacatggcaaaaccccatctctacaaaaaaaaaaaaatacaaaaatcagctgagcgtggtggcacaagcctgtagccgccgctactcaggaagctgaggtaggaagattccttgag

SEQ ID NO: 389545 - DNA, 122 bp, Homo sapiens
tgacctcgtgatccacccacctcggcctcccaaagtgctgggattacaggcgtgagccaccgtgcccggccacacctggcttatttttggttttgtttgtttttgtagagtcggcttttcac

SEQ ID NO: 389546 - DNA, 122 bp, Homo sapiens
tgtgaacgaaggagcccagccttataagacgcgagtctcttttccaggcaaacagaagaacgtgctgtgtggggacagctggtgacagtggtccccagtgcccagcacccgcacggtactca

SEQ ID NO: 389547 - DNA, 122 bp, Homo sapiens
tcggggaaattgctcaatcggagcacatgcactcggtcagcttcagctgacgctgccagacggctttccaaagtggcgagcctcatttacaacgtcaccaggaacacctgagggttcaaacc

SEQ ID NO: 389548 - DNA, 122 bp, Homo sapiens
cgccgtgttagaaaatatgaaagaatgggtgaagaaccatggattttagtttatttgccacgcccctcctgtgccatctgataacccagagaatattttgagggtgcttctttttttttcta

SEQ ID NO: 389549 - DNA, 122 bp, Homo sapiens
ctttcctgtgcttcagctccctggaaactggcactgcagaaggaggcaagggtgttaaaacgaggaggcagtgtcaggacaaaatcccaggatctggaaccccaaatacttggctcgcggga

SEQ ID NO: 389550 - DNA, 122 bp, Homo sapiens
ctgtccagcaaagaagcaatcagccaaaatgatacctggaggcttatctgaggccaaacccgccactccagaaatccaggagattgttgataaggtgagttgatgccattcaggaaaaagtc

SEQ ID NO: 389551 - DNA, 122 bp, Homo sapiens
attgcctacactagaaataaacctaggaatgaaggttagattcccagcttagaagtgaaacgttgcaagctctctgtgtagtcaaatactaagtgatgataacgttgcatttgggaccaagc

SEQ ID NO: 389552 - DNA, 122 bp, Homo sapiens
ctgcagtccaacaagtgatggcctggggcggcttcagggagtagggaggggctggaccgacgcccgaatcccacatatatgtgtaacgcattggagtctgcacttgcgtgaccctgtcaccg

SEQ ID NO: 389553 - DNA, 122 bp, Homo sapiens
cgcgtccgcccgcggccggcccgagcctccctgggctggtggcgcctcctgacagcgccgcgcccctggctcccagctcggctcggtgcacactccggacgccgccttcggacgccggggca

SEQ ID NO: 389554 - DNA, 122 bp, Homo sapiens
tgtggactggccactcggcttgaagcttccttgggattggatgttgggaccgtccaaacacggcgacttctcatttgtcagcctgcggcagtttaaattgggtggcggtggtggcatgtcct

SEQ ID NO: 389555 - DNA, 122 bp, Homo sapiens
gatgcctgggctcctgaggccgcccgcttgagggtgaggggtgcagtgggggactcagcccgcgatcgccctcgtgggctgttttctcccaccccctccaccgcaaggaaagcccggctgat

SEQ ID NO: 389556 - DNA, 122 bp, Homo sapiens
aatccattaaatgtatgttccccaagatttcattcctggaattagtttctccctgcccctcgccctcggccacattaacatggatgactgtcaattctatatcccaggcaggcttcacttat

SEQ ID NO: 389557 - DNA, 122 bp, Homo sapiens
cctagcttagagttggaacgaaaactcttttttgcacttttaaaagtccacccaggtagacgtgtttgggaagttttttcgggtgggaaatgggcttcgcccgtacgaacaatccggggaaa

SEQ ID NO: 389558 - DNA, 122 bp, Homo sapiens
gtagctgggattacaggcatgagccaccgtgcctggctaattctgtattttcagtagagacggggtttctccatggtggtcaggctggtcttgaactcccgatctcaggtgatctgcccacc

SEQ ID NO: 389559 - DNA, 122 bp, Homo sapiens
tcaagggcttaatcccacaagactgctgacacttcaggtgccagccacaatgtaatgctccggctacccagatttctgcctaactacaaatttggaggctccaggatccttcctcaggtttg

SEQ ID NO: 389560 - DNA, 122 bp, Homo sapiens
gcagggagtgacagctccaagcaacgaggtgcactcaccgccaaggccaggagagtgacacgggggctgggacttcgctatgtaatgttttaaagaggaaaaaccccactcagcctgcctct

SEQ ID NO: 389561 - DNA, 122 bp, Homo sapiens
gtcctcaagaaagtcctgtgccggcagctgtggccaacagcaacagagagagtccaggtacggagtgtccccagccggggcgggggtgcctcagggccctggccttaggattgggagatgac

SEQ ID NO: 389562 - DNA, 122 bp, Homo sapiens
aaggcccagcgaggcgagcagggcggtgccgcgcagcagcgcccgctggatcagcttgggcgtcccagagctgctaccgcgctctgcggggacaggcctcttgggctcctcgggctccaggc

SEQ ID NO: 389563 - DNA, 122 bp, Homo sapiens
cccagagccctccctgagcaggcccaggatatagaaatggtccagcgttggcctttgacccgggagaacagggtgaaggggacacccaggtgcggactcctgcgggggtctgggtgggccca

SEQ ID NO: 389564 - DNA, 122 bp, Homo sapiens
ctgctgcctttgcttgcagcattctttcttgtttatcgaagcagctctgagcctttttagcgtcctgaagcgctttgagtaacggatgaaagctatggagcccccaaatacgcgcaaatacc

SEQ ID NO: 389565 - DNA, 122 bp, Homo sapiens
gaggcagcatagcaggtggcattggaagcagaggggcctgagctagaatcccggctctgtcgctgaccagtctggtgacccagctatgtgggggtctcaccagcctcactctcctgcctgag

SEQ ID NO: 389566 - DNA, 122 bp, Homo sapiens
taattgactgcttaggaaatgtcagctgccaggctgggctcattcccattggatcttctccgcagctctctaagggaggtgtgagtttttgtatacatttaatgtgtgaggacaccaaggta

SEQ ID NO: 389567 - DNA, 122 bp, Homo sapiens
cccttaatcccgcctaccgcgccgcagcgccgctctagatcacggactccccgccctccgcggtctattcaagcccgcggcctgtgccgctcccgcttccgcttctgccagcccactttcat

SEQ ID NO: 389568 - DNA, 122 bp, Homo sapiens
tttgagagagacgggagataaaatcaccaggacttggtgatggggatgaaagacgggagacgttagagatgactattagggattttgtttgtgttgactgaatggttaggtaaatgagtgga

SEQ ID NO: 389569 - DNA, 122 bp, Homo sapiens
agcacagggactgttgatttaacaccagcctgttgacatccattctgctcactctgtgggcggaatttaaatgtggaagtatggcactaatgagctggcaagggggaaaaataaatagggat

SEQ ID NO: 389570 - DNA, 122 bp, Homo sapiens
ctctgctgatatgataggactcagtggctgtgggtggtctggctgcctcgcccacctccacgtccttgccctgggtaggcaggttcgggatcagggatggagcgccttgttctgctggtcca

SEQ ID NO: 389571 - DNA, 122 bp, Homo sapiens
gaagaaaaaccattagtgcttgtgggctggaggcatggctgctgtgactttggccacaggcggaagccatgggtctagggactggggccattttataaaactacatttgtgtgtgttctgag

SEQ ID NO: 389572 - DNA, 122 bp, Homo sapiens
ccttttctcccctttaatgaagtctaaatgagatgatgcttataagcatctaacaaaacccggcacataatcaatgttcaacaagttattattactctggaattctataaattacctctgta

SEQ ID NO: 389573 - DNA, 122 bp, Homo sapiens
ccacccagagacacaaacgcccaccacacaggcaggtacatggggaggcatggtcgcccacgtggggcactgggctgtggacatggacaggggttcctcggggcagcaggagcaccgtggcc

SEQ ID NO: 389574 - DNA, 122 bp, Homo sapiens
gcaagttgctccagaaacagtacctctccattgcagagggtgcggacttctccagctctccgaacctcacggagactcaggtcaaaatcttgttccagaaccgaagggccaagacgaaaaga

SEQ ID NO: 389575 - DNA, 122 bp, Homo sapiens
gctccgcgtccttgctttcgcctctacttgtgctccagggcgcacgcgcagccctgggagcgggttctcgcgcatagggaccacaactcccagggtgctccgcgtcctcgccgctgtcgccg

SEQ ID NO: 389576 - DNA, 122 bp, Homo sapiens
agtgccagacagtgggcgcaggccagtgggtgtgcacacggtgagcgagccgaagcagggcgaggcattgcctcacctgggaagcacaaggggtcagggagttccctttccgagtcaaagaa

SEQ ID NO: 389577 - DNA, 122 bp, Homo sapiens
ttgggcttatgatttactaactgcaggtctatgtgcaggaaggccagcatcccctcctgccgttgtcacccacatccacagagcagccctagtgccaggtgcagccactgccacccacggca

SEQ ID NO: 389578 - DNA, 122 bp, Homo sapiens
ggggacgtgcgtgtggtttgtgacccctttttccgttggctctcagagtccagagctccccggggtccgccctgacccgtggctccgcctcgcctcgctcccgcgcccagagcggcgctcac

SEQ ID NO: 389579 - DNA, 122 bp, Homo sapiens
gggcggaagtggctactcagggcgccgccatgacgagccgggccggaagaagaggtagggcgccgccgtgacagattagtcctaaagggaacggggttgttagttcaattggctaccggaaa

SEQ ID NO: 389580 - DNA, 122 bp, Homo sapiens
gctgcattcgcgcgttcaaatataaggccaatagagacttattttgcatgacgatgcacacgcatgtatactgtattgaatttttagagcattcctattcgcatatgagatgcataatgcta

SEQ ID NO: 389581 - DNA, 122 bp, Homo sapiens
caatatgccactgagggttttctagcattatcacttccatataccattgcaaatatctgtcgaggaagcattacagaggttctgggggttgtaatgatagaaggacagatcctcccttttct

SEQ ID NO: 389582 - DNA, 122 bp, Homo sapiens
cccacctgccctgccagcgcgcacgcccacctctccgctacaggtgctgattggagagtgcgttccgaactcgcagcgtcggttggctagtcccattgcctatcacgaagggggcggagagt

SEQ ID NO: 389583 - DNA, 122 bp, Homo sapiens
catcagcttcagcggaggcctgattcctgaggtgctctgactggaaggaacctccgagatcggagagtcttccctgtctcctgttgatgctcccattgcactgataggtaaattgatcccta

SEQ ID NO: 389584 - DNA, 122 bp, Homo sapiens
ggaaagtttggtttggcttgtttcattttgttttccttccaaatcatcactgagtatgaacgactgctttcctctcctcacattactcagtaaaaactcccccattgaattgtcttccggtg

SEQ ID NO: 389585 - DNA, 122 bp, Homo sapiens
taattaatcttttttatattagatctctgtgaaccaaataaaagaatatttccatctcaccggtgaggaaactgctgcttataaaggttgggtgcattggccacattcattgagccagaaag

SEQ ID NO: 389586 - DNA, 122 bp, Homo sapiens
taaccgccactgcaatggcgtcatcacatgttatgtgatcactggaaattactacacgaacgttagagagagaatgagaatgaaaaggaaaatagttttgacacgaactgaccccgcttcct

SEQ ID NO: 389587 - DNA, 122 bp, Homo sapiens
gggcctggacaggcccgccgaggcgcgtggagcccgggtggcgccggcggatgtggcgctcgatggtgctcatcttgagcgaggccagcgcgcccccgcacaccccgcacaccaggccgcgc

SEQ ID NO: 389588 - DNA, 122 bp, Homo sapiens
tggacaattctagcaagttcacagacacgccaggggctaggctgaagatcctcagagctgcgtgtgatccaaaaggaccctgtgccaacctcagagagaatggccggtgagactggtggtgc

SEQ ID NO: 389589 - DNA, 122 bp, Homo sapiens
gccgagcacttcgtcctggtcgtccgtgaggagcagcaccacgttgggcctccgggttcccgcagccaccccgaagacccccaggcagccgcccagcaccagcagtagcagcgctgggctgc

SEQ ID NO: 389590 - DNA, 122 bp, Homo sapiens
cactcgactctaaaatttccttccctagtgcacggaactgctgtccaggactctgctctccgactacctcagggaggattctgttttgggaaaagtaagccaaaacctattgataagggttc

SEQ ID NO: 389591 - DNA, 122 bp, Homo sapiens
tccccatttctaggacctcagttctttaagacatttattctgtcaagattcccagatcctcgataaaccttatcactgtcctctagatgcactcttgtttttcaaagtcctttttaaaatga

SEQ ID NO: 389592 - DNA, 122 bp, Homo sapiens
ctgcctgaaggcccgttccggggaccgccgtcacgggttgagggatggaggccagggactcgcccacagtgggatgaggtctggaaatcagagtggacacctcatggggcagcgagggctgc

SEQ ID NO: 389593 - DNA, 122 bp, Homo sapiens
ggcttcttcttcttctcagcatcctgatcccgaggttcagagcccatgtgaccctcagcacgagtgagcactccagtcagaaagtccacaatctcatcctagtgtagagaggagccaaccaa

SEQ ID NO: 389594 - DNA, 122 bp, Homo sapiens
gggcctcacaggtgtgtgaagaccgcagcggagggccaagctctggggaagccgtggccacggagtgcctggtgcaagcctagagcgggcgcgcgctgccgctgttcacacacaggcttcct

SEQ ID NO: 389595 - DNA, 122 bp, Homo sapiens
ttttgagggtccccagtgaagagttacttggccacccagtcacctcgcaatgagatcccccggacaacacactccaccttcccatggagcttccacttgcattttgtttgtgtctgtctcaa

SEQ ID NO: 389596 - DNA, 122 bp, Homo sapiens
tctgcaaggctctttccacagatttctgcgtggttctctccctcacttccttcaagtcttcgcttaaatgctttctctcactgaggccttccctgaccacccaatttataatagccccccca

SEQ ID NO: 389597 - DNA, 122 bp, Homo sapiens
gaataggctgtgacacgcaggagcccccagggaaacggccatggcaatggtgggtgttaacgagcaggcataagggactgctcccagcggtgcttcctctgaagtcattgccacctgcagca

SEQ ID NO: 389598 - DNA, 122 bp, Homo sapiens
cccccacccactccccctggctgcggcagtcccagcgggaacccgacttaaagggacagccgccctccagccagccaaggctgcaagcgggaaccgcagggagacagcacccgccccacccc

SEQ ID NO: 389599 - DNA, 122 bp, Homo sapiens
gttcggttcaattccgcaaaaataattgaactgataaacagttcaggcttcggccgggcgcggtggcccaagcctgttatcccagactttgggaggccgaggcgggcggaccgcttaagccc

SEQ ID NO: 389600 - DNA, 122 bp, Homo sapiens
ggggttgactgttgggtcacctgaaacacacacaaacacacacatgtggatggttaagcacgttggatattcacacacccacaggaagccccccgctaactccttgccggtgtggtcatgag

SEQ ID NO: 389601 - DNA, 122 bp, Homo sapiens
gctcttaaagggccagtggcggcgggaaggggcagcggtggggatcgccgttgaccccggcggggactggcaccctagaaggagttggagatgcggcctcacattctgcaggggccgtctcc

SEQ ID NO: 389602 - DNA, 122 bp, Homo sapiens
gcatctgaagacagacttctatgagttcaatagacacatgaaaagctgctcggcatcatccggcatccagagacagaaagtgaaatcacagccaggtatcactttgcgcccccaggacggct

SEQ ID NO: 389603 - DNA, 122 bp, Homo sapiens
agcagagttaagggtggagagattaagaaatgctatctcaaactcatacaaggatgagggcggccctaaatgagaagatgatctagagcctgaatgcatctcagggaagactttcttaagta

SEQ ID NO: 389604 - DNA, 122 bp, Homo sapiens
tcaaaaacaaacaaacaaacaaaaaacaaataagactcgccgacccatgccatagattgacgacccttgaaggtggctcgtgtacccaggttaagccacgtgtctctaaaatgttcatttag

SEQ ID NO: 389605 - DNA, 122 bp, Homo sapiens
gccgcgggcccaaaccgcaggtcggaccacgaggaggccgggagccgggacaccgcgggccgcccccacccgacccggccccacttacaggcgggccggccgctcctctcctcccccgcgcg

SEQ ID NO: 389606 - DNA, 122 bp, Homo sapiens
gccaccacgcttcagcctgcgttgctgactcgtgcacgaggcaggtctgtctggagtcaccgactctccctcctggcccttcccgtaccttcccgggggctctttccccgtccgcgcccccc

SEQ ID NO: 389607 - DNA, 122 bp, Homo sapiens
gggggaacgtgggggaccgcggggagctgccgggcaggcggcagccgaggtcgtttgaggcgcgcagagccggaaaaccccacggagacggctgggcgggggcggggcgatcggcactgacc

SEQ ID NO: 389608 - DNA, 122 bp, Homo sapiens
ctgaaaggggaggtgaggggtggactggttggtggcagcaacctgtaccggaagcggcggcggcagccgaggcgacgcaccgtgaggcagctgcttgactaggccgcagccgccatggcgat

SEQ ID NO: 389609 - DNA, 122 bp, Homo sapiens
tttgaggatggtagggagattaagaagtacaagactttgaggaatgttggaaattaatggcggctttagggttaagttttgtggagggctctttgcgagctaattcccaggtgaatttagaa

SEQ ID NO: 389610 - DNA, 122 bp, Homo sapiens
ccctcgctggggactaggagacacacggacggggagtgcggggcaggcggacggggagcgcgaggcaggcgcacggcgcggcgcgcggcgttaggcggcaggtgcacgggcgggagacctgt

SEQ ID NO: 389611 - DNA, 122 bp, Homo sapiens
cacactctctctaggatgaatcaggtggagctggcacccagggcgaccccagaggacacacgaggctctcggcattgggtctcagcgttgggtctcttggccgggtctggggggacccctgt

SEQ ID NO: 389612 - DNA, 122 bp, Homo sapiens
taattgcgtttggacacttaaaaggaattgtgtgaagtgggcagaggctctgaagtccaccgccttatttggtatggaaatctgtttctctcaaaataagcgagaggcgcttgtaaacggga

SEQ ID NO: 389613 - DNA, 122 bp, Homo sapiens
cccaaactcgcattaccttatgcttagtcatggtgctaaagtggttgtttcggaaaaagacgctaagttcaccctccttagcagctgctgtcagctcacacagtccgtggtaggtcagctgg

SEQ ID NO: 389614 - DNA, 122 bp, Homo sapiens
tcacttcccagacggggtggccgggcagaggcgctcctcatttcccagatgatgggcggccgggcagaggcgctcctcacctcccagacagggcggccgggcagaggcgctcctcacttccc

SEQ ID NO: 389615 - DNA, 122 bp, Homo sapiens
ggaggtgagtgggacctcggggactccggtcctcctagcctccaaaggagagagtgggggcgccagacctgcctcgggccaccctgctgggaatcgccctccaggaagcaattttgaaaatt

SEQ ID NO: 389616 - DNA, 122 bp, Homo sapiens
ccctccactcccggtgcagaggaaggctcacccgagaacttgctcttgaagtagatcaagcgtggaggctcgcagttgaggaggttgagggtgccttcagagttcaggggccttatctggat

SEQ ID NO: 389617 - DNA, 122 bp, Homo sapiens
ttcagacacaggaagcttttcacgtgctccacctggacctcatctctcagcctcacactccgatcttcagcagcccccgctatgcgcccgagtcttgggacgtcatcccggagctcctagcc

SEQ ID NO: 389618 - DNA, 122 bp, Homo sapiens
tcagcgaagggtttcaggtagtaatggaactcctcccgtgcttccagaagctgctgcagccggcggggtttgagcgccggagttccgggcggcagtagtgtggaccccgcccctccaggtct

SEQ ID NO: 389619 - DNA, 122 bp, Homo sapiens
gccctgacaaaattagtcccattctattctgcactccaaagtaattttctttgtaagtgtcgctgcatttttcatatcttactttggctaagtaccatctttgaggcatcattcatccagtc

SEQ ID NO: 389620 - DNA, 122 bp, Homo sapiens
ctccccggtccagccatgaggctcccctgaaaactgcagggcacaagcccgtctgctccccggtccagccatggggcttccgtgcacggtgacccacaggcttttttcctgaggaaacctaa

SEQ ID NO: 389621 - DNA, 122 bp, Homo sapiens
ctccctccccacagctagccgagggaaagaacggagggcagtaaaaagattcagatgtttcggaaagttgaccagatctcccaaaccctcttaaggttttgcagcggaaaaaaaaaataagt

SEQ ID NO: 389622 - DNA, 122 bp, Homo sapiens
aacccacctggagaccccagcctctcgcgtcaccaccgccggatggccgcggatagctgccgggagtttccgtcttggtctccttggttaccgcgttacctcggtacccatagcaaccagaa

SEQ ID NO: 389623 - DNA, 122 bp, Homo sapiens
cagagggtaggagttcgcgtggacataaaagtctgaaacctgggtggattccaccctgatcgtgcccaattcccagaagtccagcaggcaggaatgtgagctccacgtgcctagggcctcga

SEQ ID NO: 389624 - DNA, 122 bp, Homo sapiens
gaataagagtgtgtgtgcatgcgtctgtgtgcatgtgtatacatttaaggagatttattacgaggaattggctcaggcagttatggaggctggccagtccaaaatctgcagggtaggctgga

SEQ ID NO: 389625 - DNA, 122 bp, Homo sapiens
tgaccctaccgctggaggggagaacctgggcccagtgagcttaatcagtcctcacaaggtcggggccgctgacccactaatcagcttgagcctcctaatccatccccagcaggaaccgcagg

SEQ ID NO: 389626 - DNA, 122 bp, Homo sapiens
tctgttacggggtccaggccggaccggaccaggtccctcccctccgtggggaccgggcctcggtccccctcactgtgtccgagaccaggagtcgggttgggcatcccccacccacacctccg

SEQ ID NO: 389627 - DNA, 122 bp, Homo sapiens
tacagaaacaggtgctcacaagaaataacgttgttagcatcagctatttggtatgacctacgttttcaagtatacaaagactctcatcaggcagcatataccaagggctcataggttgtcat

SEQ ID NO: 389628 - DNA, 122 bp, Homo sapiens
caaaaataaataaataaactaagagactattgggatcccctgtaacgaggagaaagttttcgagtaattggtgcccagactggagtttgagtctgccaaggccttggaacatctttagcaac

SEQ ID NO: 389629 - DNA, 122 bp, Homo sapiens
gcacatctatacctggcatgcactctgcagctgataagaatgaggtaattccataggtaccgataggcagctgtgaaacgttaggtgaaaaatacaagttgcccttttcatgtgaaaataac

SEQ ID NO: 389630 - DNA, 122 bp, Homo sapiens
gctgcaacagcggttctcactggttctttccgggcagcgagcgagaagaatccgttgagccggggccggcgcccgcggggcaactgcaccgcgggggagcccagtcgccccgctcacccgtg

SEQ ID NO: 389631 - DNA, 122 bp, Homo sapiens
cagcccccaactccctcgcgcacccgggacgggtgaaggcgcccagctgccgagcatacccgcgacgcgggttcaaatcccgccggctcccaggcaccctcaccccgccacagcgcgggctg

SEQ ID NO: 389632 - DNA, 122 bp, Homo sapiens
aagtctctcatatactctcctaagggcttctttgtctttccaaaaagtcatttattttcccgtaagtgtcctttatcccccaccccatctctattaaggtgatatataaggcccaaaatcta

SEQ ID NO: 389633 - DNA, 122 bp, Homo sapiens
ttcaaactgtccgcttataaggctgccagttttgactggggaccaatagaagagcatactcggtaatgaggtgaggtttcagtacaagctgctcttctttgggatcttatggtgcagcaaat

SEQ ID NO: 389634 - DNA, 122 bp, Homo sapiens
cggcaatggagctgtcacctcctccactcgggttctgcgaggctgcggcggctcctcccgcgcggtgcgctcactccagctccagttcccagcgaggatgctgcgcctgcctccgctgcctc

SEQ ID NO: 389635 - DNA, 122 bp, Homo sapiens
ctgctgtgcctgctattgcgctcctggcttcttaagaacattctcaaggggctcctaccgcggtggtttttatgtaagatcaggaatcagtttcctgattacagatgggaatactgaagcgt

SEQ ID NO: 389636 - DNA, 122 bp, Homo sapiens
tccattgaaaggcagagaaggaaggatgtgcttgggaactttaagacccacgaacgacagcgcactgatggagcagcccagtgtctgggggtgagtatccaaggccccgcttagaaaaggga

SEQ ID NO: 389637 - DNA, 122 bp, Homo sapiens
tcaaacctacccaactgccactcattccttaaggcccagtttaaatctctgcattttccacgaagccttccctgattactatggcctttagtaatcacatctttccatctccatattctaat

SEQ ID NO: 389638 - DNA, 122 bp, Homo sapiens
gggggtggaaggcgggggccacataatgccacgcccccgcctcgtccccatttgaagccccgcgactcttcactgctggtcaatcagagcccgtgctctccctagtgccggccaatgggagg

SEQ ID NO: 389639 - DNA, 122 bp, Homo sapiens
gctagaagggtgctggaggcaggctgtagtggggctaaaggagctgactgaccagcgctgcggccggtgcccgaagcagcgagcagcgcacctcagctccggttgccgcgcggcatggtatt

SEQ ID NO: 389640 - DNA, 122 bp, Homo sapiens
ttctcagcgctggtgcgagcgtgattacgggaaggggcagaggacctggagcagtgaggacgttagaacacacgggcgcatggacattcacaggtgtttactttcatgaacagctggcatgt

SEQ ID NO: 389641 - DNA, 122 bp, Homo sapiens
acaactcgaccatcagcctccggatgggtacaaacaagtgcgccagccaggtgggcatgacggctcccgggaaccagtggcacatctatgacaccaagttgggaatcgacaagtgtgagaac

SEQ ID NO: 389642 - DNA, 122 bp, Homo sapiens
gttttgtcatttccagagtgtcatttatagggaaccatgcggtctgtaggctttcgagctcgtcttcctctactcagcttagacatttgagatccatccttggttgccgcaagttacaggag

SEQ ID NO: 389643 - DNA, 122 bp, Homo sapiens
tgggggcgtggcaccaggaagcggcgtccgcgccgggcccagagccgcagccgcagccgccgctacagtccgggccgggctccaccgcgcatcctgctccactctggcgaccgcccccgggg

SEQ ID NO: 389644 - DNA, 122 bp, Homo sapiens
tcgacccggagccacagccgcagccccagccccggccacagccacgggagctacagcagtcgcagccatgggacccgcagccggacacgcagcccctcgaggacccccagtcccagctacca

SEQ ID NO: 389645 - DNA, 122 bp, Homo sapiens
gtgccctggggacaggcgagggtctggagtttcctgggtgacaggcagtgtggccctccacggtgggtgggtctgtgatgagcatgtgttggaggggcgtggacaagtgtgtgtgcacctga

SEQ ID NO: 389646 - DNA, 122 bp, Homo sapiens
gacaagtgattaaaaggtgattacagtatttgaaatgtgacatttcaggaaaagctgcctcggttactgagtagcgcaggtcccccgatgtggaacctagttccatccctgccagttcagaa

SEQ ID NO: 389647 - DNA, 122 bp, Homo sapiens
gtgttacccaccgtgggagcgggggggggggcttgcggggagcggggaccagtctggagtcggaaatggcttttctgagcaagtgacattgggttgagattgaagggtcagcaggacgcagc

SEQ ID NO: 389648 - DNA, 122 bp, Homo sapiens
atggctcttccacttcccttcttcttagaagaccctcggggaagtgtgtctgcatggatgcgtgtgcatgcgtgtgtctggctccgtgactcttggggtgcagcctggatgggtgggctccc

SEQ ID NO: 389649 - DNA, 122 bp, Homo sapiens
aggtttaaaaaaatcaattatatgcatagaaatttactccaggccaggcgcggtggctctcgcctgtaatcccagaactttgggaggtcgagagttggagactagcctgaccaacatggaaa

SEQ ID NO: 389650 - DNA, 122 bp, Homo sapiens
ttctggtccctggaattaacatgagcctgtaaagagccataaaagcctgtacataagggacgtcttcccattttcctttttacaaaataagtctaattgtaaatatcattataatgtataga

SEQ ID NO: 389651 - DNA, 122 bp, Homo sapiens
ccctagacctcagaggccctgcccgcagatgtggcgccaaatcccggatgcaggcctaggcgccagcccaggaatatagggagcaaattgttaagaacaaaacaaaacaaaacaaaagtgag

SEQ ID NO: 389652 - DNA, 122 bp, Homo sapiens
gtcgcacgggaaaatgcacggtgcttgacatacactcagcttctaggcagtggcagctgccgtggcgtctgcatcccgcgggcgaggcgggcgctcggggagggccgggggccgggcaggca

SEQ ID NO: 389653 - DNA, 122 bp, Homo sapiens
cgaggccaggccggcatccagtgtggcccggtggccagaacgcgcccaggccatggccgccgctccgtaggcctccgtttcacgggtgctaagtaagtcgaaaagcaagggcatctgatagg

SEQ ID NO: 389654 - DNA, 122 bp, Homo sapiens
tatacatattacatacatatctcaaaataacccttccttctaagtggatgttattcctaacgctattgtctctatctaataagtagtagagccaggatttgaaccctggtttctgactccag

SEQ ID NO: 389655 - DNA, 122 bp, Homo sapiens
ctctaggattctccaaggcactgggcaccagaaccgacagcagctcccgcctggtcctaacgaagtccttcggacaccccttgcgggtggatgtggaggtccgagcacctcaggagggtcat

SEQ ID NO: 389656 - DNA, 122 bp, Homo sapiens
ccgcaccccgtgctgcacagcctgcgccttacagcgggttcatggcgccagcgccagccgcgtccacgctgctgctcccgctactgctgccgtccccgctgccgtcgccgtcgccgtcgccg

SEQ ID NO: 389657 - DNA, 122 bp, Homo sapiens
agaacatgaccgcagcagacgcctgatcctgcgccccaggcgacccgttcacggggcgggcgctcgcccttggcctcgctcctgagccacagtcaccagggtgccaggtaaagggaaaccac

SEQ ID NO: 389658 - DNA, 122 bp, Homo sapiens
gaaggagctcgcccttggaaaagctgtggtcagaatccgtctgtctggctctgcagggcccgatacccagggcttccgctgtcactcagacatggggggcggggcctagcattccatccaat

SEQ ID NO: 389659 - DNA, 122 bp, Homo sapiens
gaaccgaggtcgacatgaagtgggggcactggtgcgagcctgcaaagccaacggcgtcaccgatctgctggtcgttcacgagcatcggggcacacctggtaaggccggagggagggagtcgg

SEQ ID NO: 389660 - DNA, 122 bp, Homo sapiens
gatagaccaagacttagtctcaaaaaaaaaaaaaaaaaaaaaaaaaaaaatccatagacccgcaggaggttaggggacaaagttctggaccttgatctgaggttacacaatgtttttgggtc

SEQ ID NO: 389661 - DNA, 122 bp, Homo sapiens
tacaaaatctcgtccatgatcttgccggcccagcagaatcccagatgtttgtctataacgcgtctggatgttcctatctgagaaaaagccttagtcttttacttgtaagctattcctgaaga

SEQ ID NO: 389662 - DNA, 122 bp, Homo sapiens
tcacagccctaggagctgcccactgtggggactctcagctgacaggcaaggaatgaagcccggtgagccagagagaaatcaggcactgggaaaggaagtctttgagagcccacggaaactga

SEQ ID NO: 389663 - DNA, 122 bp, Homo sapiens
aacgtggctcctctaggtgagcagccctcagtgcgcatctccctgaagtccacattgatccggcagagctgtggggttcacagctcacactgaggcattcagagcctaaaccccactttact

SEQ ID NO: 389664 - DNA, 122 bp, Homo sapiens
gtttaaacccgcgtgtcccgcagctccggactcaggacttgtcctatttccgagatatgccgcgggccgaaggatacctggcgcggatccggccggctcagctcacgcaccgcgggacgttc

SEQ ID NO: 389665 - DNA, 122 bp, Homo sapiens
cccgagcgcgtctgcgatgccgatgctgcggcagcagcggctgtggcggggcggggcgggcgtgcgcgcaggggcgggggaggggagcgccggggaggagagggagggaggagtgagatcac

SEQ ID NO: 389666 - DNA, 122 bp, Homo sapiens
caggatgtaagagtgatcagtctcccctctggagctcccttggcctccaggcccagagaacgtaaatccagccttgtgcggagggcacttgcttctctgggagcaattttgatttccacgta

SEQ ID NO: 389667 - DNA, 122 bp, Homo sapiens
acacttgtagcccaggccaagacccaggccacgcatggaggaccaacccaaagtgctgcccgcctggccggtgtgggccgatgtcactccccagccccgacccagaatcggggactgggccc

SEQ ID NO: 389668 - DNA, 122 bp, Homo sapiens
tggggagggcacatcgtgactgtgtttttcataacttatgtttttatatggttgcatttacgccaataaatcctcagctggggtctggctttgtttcctgggggcaaaggaggtttggggtt

SEQ ID NO: 389669 - DNA, 122 bp, Homo sapiens
tttaacaccgtcttatctcttggagaaattgaaaacaaatgcagagaggaatacgtaatacgtgcatttaatgtgggttttggtcttatatattgcaattctgttctgatttcaggctgcgg

SEQ ID NO: 389670 - DNA, 122 bp, Homo sapiens
caggctagcgggaggctctccgtgaggcacggagggtgactggggacaggcgggcggcgacgggcttgtcatggggatccgggctgcgagacggcactcgtagcatctggggactccgaggg

SEQ ID NO: 389671 - DNA, 122 bp, Homo sapiens
aaaacaaaccctacctctgtcaatacagcgtggccatttacttccacctttacctgagggcgtgttggcgctaggaatgctcgagctgagacaaacttttacgccctcgcgagtcgaggggc

SEQ ID NO: 389672 - DNA, 122 bp, Homo sapiens
aagggaaagggaaaaatacatttcccgtgaggcgttgtgactagaacagctggaggtggacggcagagtgccgcgacgactgccaggagttgtagttctccccggccgcgtcactgcggtgt

SEQ ID NO: 389673 - DNA, 122 bp, Homo sapiens
ttttttttgccatggtggcggcactctcattggtcctggggctcattcgtcactcagccgcgattggctgagtcggcacccagatgcgctgtcgcttctgctattggctggcactcggtgga

SEQ ID NO: 389674 - DNA, 122 bp, Homo sapiens
ccccgggggcttgtgggaaacggcgacctcaaacggaggctgcacagtcgctcaaagccccgcccatcgagctcctcccggcatgcagcgcgcctcgcctcttaagcctcgtcccgtggggc

SEQ ID NO: 389675 - DNA, 122 bp, Homo sapiens
tactattgcattaatcctgctatttgttgcattcatcttgcaacaatgaggtctctcagccgtgaataccagcacctgttcaggaggaggtggggggtaggagggtttgctcttggtgttgt

SEQ ID NO: 389676 - DNA, 122 bp, Homo sapiens
ggattgtaagccaatcagagttgggcatggagggcagagccttcaatttcattggccactcggagcgtgactgtcttgatcgaaggtttcactgaactcattggctggtctggtaaaaggta

SEQ ID NO: 389677 - DNA, 122 bp, Homo sapiens
gatgccccccagaatgtaggatgcccacctgttctggcggtcccagaagaggccagcaagcgaaggatatggagagcctttctgggggatgctggttccatgaaaatttacacctgaccttt

SEQ ID NO: 389678 - DNA, 122 bp, Homo sapiens
acacagaattaccaaaaacctcatgagaaagaaatgaagggatgtttcagggtagcttttcgagtcccaagtgatcattgatttggcccttctgtttctgattgtgaaaaagcattctgaaa

SEQ ID NO: 389679 - DNA, 122 bp, Homo sapiens
aagagttttcccttgccataggtgacagacttttcacgagggactaggcctagttgcctacgtgtacccactgttttcaacggaacctcaggggctgggctgggcattgtgaacacagaagt

SEQ ID NO: 389680 - DNA, 122 bp, Homo sapiens
ggtctcttaatctactaaactccaagaaatcatcatcccactcgggagtactactctcctcgctccgggcccatgacacttgggggtgactatactgaaactatacctggcatctggttctt

SEQ ID NO: 389681 - DNA, 122 bp, Homo sapiens
aagggccagtaaggacacagtgccctctgctggcaagggagaagcctacccataagcgtgcgggcacgggacccccatgatcacataggtcacttctactaagtggcaggccaagccacccc

SEQ ID NO: 389682 - DNA, 122 bp, Homo sapiens
caagatcaagatggcagtaggggctgggcatggtggttcatgcatgtaatcccagcactgcgggagcctgaggcaggaggattacttgagcccaggaggttgagaccaaactgggcaatgct

SEQ ID NO: 389683 - DNA, 122 bp, Homo sapiens
taaagttttgttcctttttaaaggaaataaccacaagatttttcccagcccaaattccagcgccaattttaggccaactttggctgttttcttccaaaagtgcttatgtggaattgggatcc

SEQ ID NO: 389684 - DNA, 122 bp, Homo sapiens
gtttacaacttaggaattgcaattttaaaagcaagaattcagaatgtcattagtgtaagccgtgtttcatatcagtgcattagtagtttttatattaatgtggggggggcagttcatattga

SEQ ID NO: 389685 - DNA, 122 bp, Homo sapiens
tgcgcggggagggggctcccgggtagacaggtctggaaggcggctccccgagagccggagcgcgaggaacagcttttgagataaaaaagctgttacactttctagagctgctatcagtgact

SEQ ID NO: 389686 - DNA, 122 bp, Homo sapiens
caactttctgggctcaagtgatccttccccctcagcctcccaaagtgctagtattataggcgtgagccactgcacctggctaaaatgcattttgtttctgggttgaaatactagcaagtcag

SEQ ID NO: 389687 - DNA, 122 bp, Homo sapiens
ttatttgcccaggggaaacccgagtcgctgcccctcctgtccagcctcagcgctcgtccccgggtcccccagcaggtgaccacagatgatgacggagcctcctggaaccgcctcagtttccc

SEQ ID NO: 389688 - DNA, 122 bp, Homo sapiens
gtgcacatgtgtgcctgcgtgtgcgtgcgcgtgttgtgttccgatctccgcaggagctggcggcagcgtgcatcacaagtgtaacagcgccaaacaccgcatcatctcgcccaaggtggagc

SEQ ID NO: 389689 - DNA, 122 bp, Homo sapiens
gggcttaactgtggggtaagtgactggagggggctgatcagtttcccctttcccttttcccggagctcagtggtagtctgctgcctacgccccgtcagacaagtggcctgagtcccccgcaa

SEQ ID NO: 389690 - DNA, 122 bp, Homo sapiens
ctcggagtgctgcctccagccaaggtgtgtgtttatttgattgcttttggtggcgaggcgcggggctcgggctcgtcgcgcgccccatggccggggagcgcatccgccaaccccgggcggag

SEQ ID NO: 389691 - DNA, 122 bp, Homo sapiens
taattcactgaatttataaattacaaacttttaccattctcaactgataaattgaggcaacgatttaagtataacttgagcaagtccatatagagtggagccaggaacgcagacaatgagac

SEQ ID NO: 389692 - DNA, 122 bp, Homo sapiens
cagccctgtgctccagcctcagaggctctaaccatgagcgctgcaagcctggttgcgctccgtgaatcccagctggggaaaaaactacaagtggcatgaatggaaggcaagttcggtttggg

SEQ ID NO: 389693 - DNA, 122 bp, Homo sapiens
gtgcagaacgactcctgcacaagtgcactgagcacggtggtatttgtcaaagcaagataacggaaataatttaatgtctgttagtggggatggttcaacaaatatttgtactgccatacaat

SEQ ID NO: 389694 - DNA, 122 bp, Homo sapiens
ctactcgggaggctaaggcaggagagtcgcttgaactcaggaggcggaggttgcaatgggcggaaatcatgccactgcacaccagcctaccggacggagacagactccgtttaaaaaaaaaa

SEQ ID NO: 389695 - DNA, 122 bp, Homo sapiens
aggcgagtctgcatcgcggccacactgccctctggatgcccacacatggggctttctccacgtgccccgtcatgtccttcctgtatttgttaaaatccaggtccagtgaaggacggcgcccc

SEQ ID NO: 389696 - DNA, 122 bp, Homo sapiens
agaagtcacttattattttggatccatttccaccacttcacaatcatttgaaaggccacacgaatctatcactctgtaaatgaaaaaacaaaacataaaatcacagaaggcaaaatcactat

SEQ ID NO: 389697 - DNA, 122 bp, Homo sapiens
caaagttctgggattacaggcgtgaccactgttcctcctcccagaattaactttagagatcgtaatttggcagccttttccattagtcagttggaggagttgtgactggagtcagggaagcc

SEQ ID NO: 389698 - DNA, 122 bp, Homo sapiens
agtgcgcatgcggagtcgatcccgcgcaggcgggcggggacggcagccgggtcttgtgggcggagcctgactaagtgccgcccccttgccggctgcagattgctatttctgccccccaccct

SEQ ID NO: 389699 - DNA, 122 bp, Homo sapiens
ggtgagtagatcacctgatgtcaggggttcaagaccagtcaggtcaaaaaggtgaaaccccgtctctacaaaaatacaaaaattagctgggcatgatggcaggcacctgaaacccagctact

SEQ ID NO: 389700 - DNA, 122 bp, Homo sapiens
tcctggtggtggaggccaacagggcggccaacagggacgtgcacggcctttctatcataacgggggcacacctgggcaaccctcacactctgtgtgaaatgttgccccaggatgatcttaat

SEQ ID NO: 389701 - DNA, 122 bp, Homo sapiens
tcataaataaactccctaggttttccacagcaaacttcaccaggcaaagaactgcagctccgccgaccagttagttggtggaggcgcagaaacttgtcctcggaccccacgcagaagccgcc

SEQ ID NO: 389702 - DNA, 122 bp, Homo sapiens
aacaaatataatttataataatcaatgttgtataacttttattctttattattggtaacacgccctaactatcctgtgtgagaatgggaatttcaagtcccatcttgtaaattgtatatgtt

SEQ ID NO: 389703 - DNA, 122 bp, Homo sapiens
cgtgcagcccccaccccgcagccccgtccaggccccgacgcgtgcgtgcagcccccaccccgcagccccgtccaggccccgacgcgtgcagcctcctggcagagccagctgtgctcaggcta

SEQ ID NO: 389704 - DNA, 122 bp, Homo sapiens
ctgcactccagcctgggcgacagagtaagactctgtctcaaaaaaaaaaaaaaacattatcgaagtgtgaattcaaatatgtgcagtctatggtatgtcaatgatagctcaacaaaaattat

SEQ ID NO: 389705 - DNA, 122 bp, Homo sapiens
tcagtgtccccatctgggcagtggaaagtttgactctctgggtccttgtttgagtgagtgcgagtgtgtccgttcctttgctgtctgccccaggcgggggagggggggggaggtggtggggg

SEQ ID NO: 389706 - DNA, 122 bp, Homo sapiens
tccggattcccgaggccggggcgtgcaggagtttacctggaacgtgagcagctttccagacgagttccagactccagaatgctccagaatgctcaaggggcttcagggcagggttggttcta

SEQ ID NO: 389707 - DNA, 122 bp, Homo sapiens
ctctaggaaggcgagcccgctatcccggccaccgcccccagctctgtggtgcccggcgggcgcctgagggagccacttccggaagtgtctaggacgcaggtcctccgtccatgctctatggc

SEQ ID NO: 389708 - DNA, 122 bp, Homo sapiens
agatctaaatttagagtgagagaaaacagtgagccatagaaccagcatccacaacaatttcgacaggctggaataagcaagatgacattgttctgttgtgagcctcaagacattacagaaag

SEQ ID NO: 389709 - DNA, 122 bp, Homo sapiens
tagctggaaacctgacttcacctctaccctagcccctcccctagcgaacagcccctcccccgtcctctgtgaccctcaactctgctgtggatgactctgccgagggaataccgcagactagg

SEQ ID NO: 389710 - DNA, 122 bp, Homo sapiens
tattccttaaggacttcttcccaggccggcggcggcggcggcggcggcggcggcagcttgcgatcatcaggattggaagtgagagcgagtgcccgggccaacctcagcgtctctcagggaca

SEQ ID NO: 389711 - DNA, 122 bp, Homo sapiens
aggtctggagggtcaaatttaccctggccaagatccgcaaggccgcccgggaactgctgacgcttgatcagaaggacccacggcgtctgttcgaaggcaatgccctgctgtggcggctggtc

SEQ ID NO: 389712 - DNA, 122 bp, Homo sapiens
ggttgcggtgagccgagatcgagccattgcactccagcctgggcaacaagagtgaaactccgtctcaaaaaagaaaagaaaagaaatgatccctcaccgaaccgagcctcagttcagtgcga

SEQ ID NO: 389713 - DNA, 122 bp, Homo sapiens
aatcaccgcagagtctgcagtgcggagggggcgggaagtccaggccccgcactcgatccacgctggctccctacggaggcccacctactcgaggcccaccgactcctactgcaatcagtact

SEQ ID NO: 389714 - DNA, 122 bp, Homo sapiens
agttccgggtgggctccgggtgggtgcggactcaacgggccctgcacttggagcagctggcgtgaggggcttagcacccgggccagcacctacagagggtgcaccgggtcccacagcacggc

SEQ ID NO: 389715 - DNA, 122 bp, Homo sapiens
gaggttgggcatggtttgcaataagtactcattttcttgagtttacagtaatgcctcccgcgctgctccgggttgcaaaagcccacactaagcctgtcgtcgaatgcgtgcgtgggtggttt

SEQ ID NO: 389716 - DNA, 122 bp, Homo sapiens
actgacttcaggggcgaggaattccgcctggcgagcgtctagactgcggtgtttctgggacgctgggagctggagccaggacaggtctcccgggagctggtctgtgctgccacctgctggtc

SEQ ID NO: 389717 - DNA, 122 bp, Homo sapiens
tcctatactgtgaaaagaaactgcaagcaaggcagttaagatgcaatcttgcacggtgaccgtaagtcggagaactgcgcggcgaacgaggcctcggcaggggaagcgaaagcctggtgtgg

SEQ ID NO: 389718 - DNA, 122 bp, Homo sapiens
ggcggaggcgcgagccggtcggcgtcgcggagtcggcccgcagacagggcgggcggggcccgtgctcaagggctgggcctggagagtgtgcagcatcctcatgatggcatcgccttattttc

SEQ ID NO: 389719 - DNA, 122 bp, Homo sapiens
agtgggaatgaggaggccaccctttctagttgagacgagagtgaacagagttggagaggtcgcttgactcgcaggacacagaagacccctcagctagcggcaggaagggtttcatgggatag

SEQ ID NO: 389720 - DNA, 122 bp, Homo sapiens
ctggctcgactcagtcctcagcccccagcccccgacccccgacccccggcccccgacccccgacccccggcccccagcgcccggcgccccgcctccagcgctcagcagttaaccaggcaact

SEQ ID NO: 389721 - DNA, 122 bp, Homo sapiens
tgtggttcaaaacacgaaggctgagattcagaggaactacaaatcccataaagtgttgcacgtctagggcctttggggaacgaggtcggccccagcgcaggcgcggtggcgcgagttggact

SEQ ID NO: 389722 - DNA, 122 bp, Homo sapiens
ttgatggagaatcatgttaccaacttttttacatttcaacacttttcttgaatcttaaaacggggtttaattttatttacagaaatcggaagcacataacttgaaattgagaagttctaaat

SEQ ID NO: 389723 - DNA, 122 bp, Homo sapiens
aggaaattccaaattaacaacctccaaagagtttatactcattttttattcctgctaacacggtatgaaaatgaaaccctcttttataaagtcaagagggcagcaatggagaacaatggaag

SEQ ID NO: 389724 - DNA, 122 bp, Homo sapiens
tccaggcagcgcagagcttcccaggggaaatctaagcgagaggctgcacctaggggtctgcggagccgcaggcctggaagcatgcgaccgtgatttcaggctctggggtgaaggcccaggga

SEQ ID NO: 389725 - DNA, 122 bp, Homo sapiens
tgcacgtgtccaggtcgggcctgttgattccggctggggtgtctctagtcacagaggttccggccacacagctggtgccagaacaagggtctggctcttctgttaatcagccttactgaaat

SEQ ID NO: 389726 - DNA, 122 bp, Homo sapiens
aaaacctgtagccaatcagctgcttggctggagcactcctctctggcaagttgacaggcacgtgggcagcggctgggagcgctactgccctctgccaggctcccgcagctacaagcaagcag

SEQ ID NO: 389727 - DNA, 122 bp, Homo sapiens
tcccctgatcccctttcctgggcacaggctgaatagagccttgttctccaccgccggtggcgccacacagcaagggcagcccctagggggctgtgctgcttttatcccaagatgccaggctg

SEQ ID NO: 389728 - DNA, 122 bp, Homo sapiens
acgaatagagctgtttctcctccaatgtcctctaatatcccccaaacaattaaatttccacgtgtatgaaagaaaagccacccctcttgcttcaccattattagaagcattctcacattcca

SEQ ID NO: 389729 - DNA, 122 bp, Homo sapiens
aatgttaggcggagcgggaggtgggccgggccttcggacgccctgtcccgcagacgttgacgagtgcagcgaggaggacctttgccagagcggcatctgtaccaacaccgacggctccttcg

SEQ ID NO: 389730 - DNA, 122 bp, Homo sapiens
cgaaggttggcatgcctgtggcactgtctcgggacagttctcgcgaggtttgcctgggcccgactgctcccgccctgcctcgcgccgccgccacagccgctgccgctggcgccgctcctcct

SEQ ID NO: 389731 - DNA, 122 bp, Homo sapiens
gtccagccgggcaggcggtgccgggcgccccctgtcgggagcggaacgcggcggccggcgcgtcccaactgcccctggcgtcaccacgcgggccccatcaatcgccccgtcgggccgggagg

SEQ ID NO: 389732 - DNA, 122 bp, Homo sapiens
tcccgcacagcagaggcgttccccgcaccagcatcctgcacaagagccagcaaagagaggcgcgcgtggaattaaaatccggggtagcccccggcttctcactgagcacccaccaccaacaa

SEQ ID NO: 389733 - DNA, 122 bp, Homo sapiens
agggctgaagcgcggggcacaggtcccgcaccaggacggggagccacagcagtaccagagcgcgcagtaaagcacagcattccaagttgttataaacgccctgagcccgaggccctggacac

SEQ ID NO: 389734 - DNA, 122 bp, Homo sapiens
cgtgagaccttgcaaagcgcaacgtagccggaagctggtggcggctggtgggcgaccgggcgcatcctcattgcagtgcggcggccctacctcggccctggcctgaccccggcggccctgcc

SEQ ID NO: 389735 - DNA, 122 bp, Homo sapiens
ccatgatcgggccactgcactccagcctgggcaacagagtgaggacctaaataagtttagcgtgagatgaacactgacagttgcctctttagggctctgcttagcacctcctgtgccctccc

SEQ ID NO: 389736 - DNA, 122 bp, Homo sapiens
gcgagacggtcactctcaagtgcaccatgctggtgacgccggacctgaagcgggtgcagccgcgcgccgagtggtaccgcgatggtgagtaggacacggcccagacccgggcacacaccagg

SEQ ID NO: 389737 - DNA, 122 bp, Homo sapiens
agactgatcttcagagaaactaggctgggcacttgagaaagcacttaagggcttgactcccggccattggactttggccaaggcaaacctgcctgctttcctcctcagaaggggcagttgtg

SEQ ID NO: 389738 - DNA, 122 bp, Homo sapiens
ttgtgacttaatagaatgcagggtggatgccactgaccttttaatggtcaaattcaaggacgctttttagtcatcactttacttaacctcgctgctgtgaattcactaatgattatctcctt

SEQ ID NO: 389739 - DNA, 122 bp, Homo sapiens
acatcccggatggtgcctgtgtgtgaccatcacacgcactctgagcaccccgtggtgcagcgggcaggcaggtcatagggtgcctggctgattcccggggaggctgtgggcccttaggcagc

SEQ ID NO: 389740 - DNA, 122 bp, Homo sapiens
gcccactggcccctcggaaagacttgaggcgcaagcacaggctgctgccgcgacactcagcgctgcgcaccgcgggcagaaaacgccgcggaccgacttccggttcgctcagcactaccgga

SEQ ID NO: 389741 - DNA, 122 bp, Homo sapiens
gtctaagcggctaatgaacgtcttgggtcggtttcctcaaaatccagcccattgtttccccggtgagcacgatccgaagccttatcccataacgcactgtagcccgaatctttctgccaaca

SEQ ID NO: 389742 - DNA, 122 bp, Homo sapiens
gggtaggggttgcaagggcctcattttttcttactgcccccatccggttcggggaggtggcgggaccttggcggcgcccggagccggcgtggcgctcatcgagggacgcccggcccaagtgg

SEQ ID NO: 389743 - DNA, 122 bp, Homo sapiens
attgcgctgctgggaggacgcccccacccccatgtcccgcgggcctcacctgccggctcccgctgcttggggctcactttgcctgctgccaagatcatgggcacgctgccgaaggagccgtt

SEQ ID NO: 389744 - DNA, 122 bp, Homo sapiens
cggatttaatttcccccgggaaaagcaaatatcttctgttggtaccgggcagtcgactcacgtagtcttcctttaaaaccaagtctatgccagccgggtgtgaggggagtggtgggggtgag

SEQ ID NO: 389745 - DNA, 122 bp, Homo sapiens
gccttcctgcaaggccccaaagaacccgagtttttgccccttgctgaagggttggaagtgcgggctggactagtgcaaacaagagtgactccaaccgccttacttcagctcattaccgtcac

SEQ ID NO: 389746 - DNA, 122 bp, Homo sapiens
aacagtcagcaatcccttactttccattcattccagaccagccattcagggtgagtacctcgagtgcctcggctccagccactggcaggctgataatgttcgacttacctagtgtgtgccaa

SEQ ID NO: 389747 - DNA, 122 bp, Homo sapiens
gtttaggaattttttcttgtgcacatacctcccttgcaagagcaagagccaccaggcaggcgaggatgaggaccttcatggctactaagtcctgtgaatgtagaaaaaatggaatggtggaa

SEQ ID NO: 389748 - DNA, 122 bp, Homo sapiens
gagaggaacccacgaaaaggtgactggacgccttggagggcgcagttcccgctaggagctcggccccgcccccgcccccagggccagctctcgggaggggcaccagctcgggctggcgggaa

SEQ ID NO: 389749 - DNA, 122 bp, Homo sapiens
aatatcccggagcccgcggcgcccctagggatgtgcggccccggagctgtgccgccgcctcgccagaagctggttgggcagccgcgttcttggatgacttctccttagtactgttcattgcc

SEQ ID NO: 389750 - DNA, 122 bp, Homo sapiens
cacacaatgtgtttcttgttagggactgcaagccggggcctcgggttttgcttttggtgccgcattataatattaagatgcagtttgattccggacaagtccgtccttgtcgctggctgggg

SEQ ID NO: 389751 - DNA, 122 bp, Homo sapiens
ggcttcagcggggactaagagccaacagacggcttggggctggccccaggctgccctgaccgcctttacagcatgcccaggaggacggctccagccaacccagcctccccttcttcctcagg

SEQ ID NO: 389752 - DNA, 122 bp, Homo sapiens
ccctcctcggaaatgggaccctctctgggccgcctcccagcggtggtggcgaggagcaaacgacaccaggtagcctgccgcggggcagagagtggacgcgggaaagccggtggctcccgccg

SEQ ID NO: 389753 - DNA, 122 bp, Homo sapiens
tttaccgcatgcctgctaaggagagcctcttgccgggagacagcctgggagtatgtcaggcgcaggaggaagcacaggccccggcctggatgcccagcagccacggcgttcctgtgtatctt

SEQ ID NO: 389754 - DNA, 122 bp, Homo sapiens
ccctaccatgccccaggcaggcccatcaccttttgcatatgtctttccttctcccaggaacgtctttctcctcaaatatcacaaaaagcattgcctacttcctcaggctggggtggagtgca

SEQ ID NO: 389755 - DNA, 122 bp, Homo sapiens
tctgatttcccaacagtcacaatccagtaaccctcaggcctagtgactcacctcattcttcgtggggagggttccagctctgccagttcaagtttgcccaatcctgttaggaaaatactctg

SEQ ID NO: 389756 - DNA, 122 bp, Homo sapiens
tggaggggaagaggtcacgtcatggttggagatctcacccccgccaacaccgaaggagggcggtgaccagggtcttagaccggtgtgaaaactgaattcccagctgaggcagaggcggctca

SEQ ID NO: 389757 - DNA, 122 bp, Homo sapiens
ggtgcatgagagattgggtcagctttctacatgggccggatgccggctgtcagtggagcacgtggctgctgcagagtgtgacccagctgtccccatctcctgctgtgggtcccttatccggg

SEQ ID NO: 389758 - DNA, 122 bp, Homo sapiens
attatgcattattgggcaataaactctcctgggaagagaaggtattccaaacatttaaaccgttctccaccgactcctgcccgcctcaacacaatgccttgtgagtagaaatgaaaaaccac

SEQ ID NO: 389759 - DNA, 122 bp, Homo sapiens
gtgcccgtggggcggggcaagaaaaggggaagagcccaacggtattaacccctcggcagccgcggcgctgctatgctgcagtctcccgcagagcccttgggaaaccatcccgctagccaatt

SEQ ID NO: 389760 - DNA, 122 bp, Homo sapiens
attcttttgacccggtttatggacttggaatccaactaacttgggaatgagggttcttgccgagatggagggttttgagtaaggggtcctggctggggagagccagagatgaggcccagcct

SEQ ID NO: 389761 - DNA, 122 bp, Homo sapiens
tccttttttgaccagttactactaactagaatttgtcgaagcctctttttgaacatcattcgggactcagatgtcctcagatatagggtccaacatttggcatctatactcagcaacctctc

SEQ ID NO: 389762 - DNA, 122 bp, Homo sapiens
ggcccgatagcggcagcgggccagccgagccttcagagcctggggacggctcgggatgggcgcgcggggcgctgaggacggggagacgggctgggagcagacaggagggaaattccgagcgc

SEQ ID NO: 389763 - DNA, 122 bp, Homo sapiens
ccactgtttgaggatgtctgggggctggcagagcagaagcccagagagccaggctagcctcgggcgcctttcaccaccagggtcccctctcgccgccacggtcccctctcgccgccagggtc

SEQ ID NO: 389764 - DNA, 122 bp, Homo sapiens
ctgtcacacagtcaggtgccccatcagagccagcagtccggcctccaagggggttggagccgctggcacccagccgggctggtcagcctcagcttcgcaaaccactctgtggtctggcacat

SEQ ID NO: 389765 - DNA, 122 bp, Homo sapiens
agctccaagagcagcctgtgtcaggctttaatctgtggacacaagctctgtgctgtcattcgcgtgtcatcgttcgtgtcttgggctatccctagtatcctcgcacacaagctctgtgctgt

SEQ ID NO: 389766 - DNA, 122 bp, Homo sapiens
cccccgctggcgtctgcagagcccccgggtgggacgtctgtctccagacccggggtttttcggctccccggggccgtgccaaccgcggctccaggcgttccttatttagcagggccgccgtg

SEQ ID NO: 389767 - DNA, 122 bp, Homo sapiens
ggagatggaagctagagaggcagagacgtgtgggaccccaaaccaccccccaggtcgagccgttcctagggccgtgcaccccccagccaagtgcaccggagcccccgcacgctcccgggaga

SEQ ID NO: 389768 - DNA, 122 bp, Homo sapiens
tgaattgaccgaatactctcccctgccattactttggtcacttcaaaggtttcttttatgcgcgtccgtgtgaagagaccaccaaacaggctttgtgtgagcaataaagcctttaatcacct

SEQ ID NO: 389769 - DNA, 122 bp, Homo sapiens
tggcccccagcgggcccttaatagtttccgcggtggctgtcgtagctggactacagaccccgcctcctgagcggcccgaagccccgccccttactgccccgcagtcccgcccccgtggcttg

SEQ ID NO: 389770 - DNA, 122 bp, Homo sapiens
tgtggtgaggtcccgtgtctcacgagggttaccggctgaagaagcttatttcacttgggacgcaaatagctaagcattgcatcccgggactaggggaatcacagtaaatcaatccatcgcct

SEQ ID NO: 389771 - DNA, 122 bp, Homo sapiens
acccagccagcagctgcggagggtgcaccgggtcccccagcactgctggcccacctgcgtcgcgctcgaattctagcccagcctcagccacctccccatggggcagggcttgggacctgcag

SEQ ID NO: 389772 - DNA, 122 bp, Homo sapiens
agggagtcgaggagggattccagctccagtttgggtaaatccagctcgcgttttgtctctcgctcaactgtgcagggtccagcgaaggcagagccccagcttcactccctgaggtctgtcct

SEQ ID NO: 389773 - DNA, 122 bp, Homo sapiens
catgttggccaggctggtctcgaactcagtggttgaaatttctaaagggaaagcagtggccgtcagcagcataccatgcacattagggtcaccagggagaattttaaaacactgatgccagg

SEQ ID NO: 389774 - DNA, 122 bp, Homo sapiens
ccagtgactttctccttacctccgcccccaagtaggccttgcaaaaagctgggaggggtgcgttttcaacactggagcttcgcggccgctctcccactcgctccccgcccggcgctagagga

SEQ ID NO: 389775 - DNA, 122 bp, Homo sapiens
tatctttttttttttttgcagttgggttaaaatttggctccaaacaaggtctgcacgttgcgtttttgtgctgtctctaaagactcccttcttttttccatgtaatgcttttgttgaggaaa

SEQ ID NO: 389776 - DNA, 122 bp, Homo sapiens
ggcgcgtgcgggtgcgctgggcagggcgggggcgggagaacccgtggagtgagcctgtgacgtgagggggcgtggcaccgcgaagccccgccccctcttcctcgccctctctcgcgggtcgg

SEQ ID NO: 389777 - DNA, 122 bp, Homo sapiens
ggttcctctacaaccttcctccggattggtctatagggacacgatggccttttacgcaagcgtcacccgtgctgacccggaagttttcttcccagttaaaagtgttggcccgcggcgcgcgg

SEQ ID NO: 389778 - DNA, 122 bp, Homo sapiens
taggtctcaatgaccaagagaggggcagtttgagagatccatgtatgaaaagaacatggacggtatggactaggatatttacactcatgcacgcccgaggtccctcgtgacacaagatgaag

SEQ ID NO: 389779 - DNA, 122 bp, Homo sapiens
aggtacttgaaatgttccatttctgtgtatttttttattttctgtcctatgacagttctacgctaaaggtattttaaaataaaagccaaattggccgggcgcagtggctcatgcctgtaatc

SEQ ID NO: 389780 - DNA, 122 bp, Homo sapiens
cccccgggacccctggcggggagggacagctgggtccaggctttggccatcagtctgcaccgaccggggtgcggagcgcacatgcgacccgggcgcaattacttgggcctcctcgccccgcc

SEQ ID NO: 389781 - DNA, 122 bp, Homo sapiens
cgggcaaagccaggcaggccatggggctctgggcgctgttgcctggctgggtttctgctacgctgctgctggcgctggccgctctgcccgcagccctggctgccaacagcagtggccgatgg

SEQ ID NO: 389782 - DNA, 122 bp, Homo sapiens
tatatgatggacacatttttaacaaatatacccaggggatgggagaccccgggctgccttcggttggggctgcagaagtgtcctggggggacctgcagccacctctcacctgggctctggat

SEQ ID NO: 389783 - DNA, 122 bp, Homo sapiens
gtgcggcggaggccgagcgtctctatgatcctggcttctggcaacgtcatcgtcacgcgccggatccaacccccaaccactttagccagctctagaggcgcgcgtggccgggacggaagtgc

SEQ ID NO: 389784 - DNA, 122 bp, Homo sapiens
gcagtcagtggtgaaaacatatgaagatatgactttggaagagctggaggatcatgaagacgagtttaatgaggaggatgaatgtgctattgaaatgtgcagacagcagagactggctgagt

SEQ ID NO: 389785 - DNA, 122 bp, Homo sapiens
ggcgggcaaaggccatctggtgtgaacctggctgcccagctctttatgcacccagggcagcgtggggcccctctcgccccgcgcgcatctaggagctggggcgcagtgcgagccccccacgg

SEQ ID NO: 389786 - DNA, 122 bp, Homo sapiens
gccccgctcggaaattgcctcccagaccggagacctgcaggtgctgctgcgaagatgacgcgaccagccaaaccggttaaggatttgactgcgattgagaactagtgaggacctctaggaac

SEQ ID NO: 389787 - DNA, 122 bp, Homo sapiens
atatcacctctgtctacatatgactcagtttcaaatcagtctcaacaaatgcttctgtttcgtgggatgcaaatcatatctcaagccctagccacaggagagtctagaaaatgtagtttttt

SEQ ID NO: 389788 - DNA, 122 bp, Homo sapiens
ctgggacccatctttttggtatacagcctgaaagaaaaagaatgttacctgcaactgtttcggaataatcctggtcgggaagaagggggaaatgggtagtaaatataagaaacaatattggt

SEQ ID NO: 389789 - DNA, 122 bp, Homo sapiens
ccgacccgcccatcccatctggggatgagaagattgagggtgcagagccctgtcctgcagcggggatttgcgagctcaacccggcaccccactgattacaggattacgttggacgaatattt

SEQ ID NO: 389790 - DNA, 122 bp, Homo sapiens
aacagaccacatctgatccttggccctgagtccagagtgggaggcaccgtgacaacaatgcgcagagcagggaatgcagggagccatggatagtgctggggtgagctggagtcctggcaggg

SEQ ID NO: 389791 - DNA, 122 bp, Homo sapiens
gcgcgctctgagcatgcccggggcgggcgcccaggggccgcgcggggcgggagtgcagcgcggccgactctaaatcctagtgaggggtgaatggggaggctagaacagccggcccttccctg

SEQ ID NO: 389792 - DNA, 122 bp, Homo sapiens
agaaaaaggaaacagtgaactgttaccatggcgagctgtgcaagatgctgagatctgagacgaaattgaaatactgagatattgataagggctgaggcgatactgagatctggagagagaag

SEQ ID NO: 389793 - DNA, 122 bp, Homo sapiens
ggttttacagtccttgcacaagtaccagccccgcctgcatgtggtggaagtgaacgaggacggcacggaggacactagccagcccggccgcgtgcagacgttcactttccctgagactcagt

SEQ ID NO: 389794 - DNA, 122 bp, Homo sapiens
ctgttggcgttggtgcgggactgcgcaggcgcgcggggcaagagggtggcagtgcgcctgcgccgcgtcggcgtgcggaacgccgcggtgtctcggcgcctctgcgcgcgggaagatggcgg

SEQ ID NO: 389795 - DNA, 122 bp, Homo sapiens
agttaagagcttgctcatggcagggcctcgagagcgccacgactacgtgtcccagaaagccgtgcgcccgggttgtccttccggctagcttctcttgacttcctggcagcccaaggctgccc

SEQ ID NO: 389796 - DNA, 122 bp, Homo sapiens
gagaaaaaggcggcgggcgctcgcctcccccgcctgtcgcgatacgctcctcagcggcggcgccagctcctgtggtgagagcgtcaggctcgactgggccggaccccttcccttcctccccc

SEQ ID NO: 389797 - DNA, 122 bp, Homo sapiens
gccggcggtgttggaacgtggacacgtgcgctttggtaatagggcagcctcccccgcgggcgcagtccccgctgcgagcgcccccggctgctgaggcgggaccgaggacccggagatttgag

SEQ ID NO: 389798 - DNA, 122 bp, Homo sapiens
ttgcgacggccgccgtcggcgctctgcgctccctgcgcgagacctgggcgggaccctcggcgctcacccggccaggggctgcagcccgcacccggacccaggcccatttaaagccccacagc

SEQ ID NO: 389799 - DNA, 122 bp, Homo sapiens
ttaagaacattcttgttattgagatgcaatttactttacctgtcttctacagtttaaacccgcttccatatgaagactaatcaataattcaaaaagtgttaagttctcctttaattctttta

SEQ ID NO: 389800 - DNA, 122 bp, Homo sapiens
gcactgaacaaacactgagcgtgccgtccagatgtcccgggggaggctgaggatccacaccgtggggagtgctctgcccccatggagtgacctggcgtccgccctccacggatggcacgcga

SEQ ID NO: 389801 - DNA, 122 bp, Homo sapiens
aggtgccctcccgccctgctcctgccctcttactgtgttaacgattctccacgtgaggagcgtttcttttccagtgttgggtagaggcgtctgtcggtggggttatttggacagttctttag

SEQ ID NO: 389802 - DNA, 122 bp, Homo sapiens
tataatttataattctcatttcttttatgaaaagggacattctgaacatactgtctgcaccgcactgtgtcacagcagtcactcggtgacaggacacagagatactctactttcctctttat

SEQ ID NO: 389803 - DNA, 122 bp, Homo sapiens
gactcgctaaaaactgtgggtggtggaatggatcctccgcactgagaggacagaacaacacgtgccattttctaatcactgcagcctgtgaacctctctaaataggcaaatgaggccaaggg

SEQ ID NO: 389804 - DNA, 122 bp, Homo sapiens
gatacctgggaaacagatggattgaccaacagtcttggtttgttcagtagtgagcgatttcgcaggatgcaggaatttcaatgctaacacagagacagtccactacaaactgggaagttggt

SEQ ID NO: 389805 - DNA, 122 bp, Homo sapiens
taaagtggtaattaggcctgattatcatgcaaggcagccctggttaaattggaatgtagccggagagacgaaaggctggatggagagtttgctatgctggagacatgctttgatgtctgcag

SEQ ID NO: 389806 - DNA, 122 bp, Homo sapiens
acatcgggaatggtgtctatgtgtccactggcctgcagcaaggacccagttccctgccagcgccagtatgctatccctaagctgtgcccataagccccagtgggaggctggatactgggcaa

SEQ ID NO: 389807 - DNA, 122 bp, Homo sapiens
ggctaaagccgtccttagcccctggaagggcactgtgaaagtggatctgatttgagaagccgtttcctgatgtgggcagccatgtgatgccagccccgaacaagagggggcagcctggagcc

SEQ ID NO: 389808 - DNA, 122 bp, Homo sapiens
ccgggacggtggcgagcccacgcttgccaggcatgacgcctcgacctccagcgtccagagcgtcccttcattggttcacaggaacttttcacatgtgtccgtccacttttcttaggaatatt

SEQ ID NO: 389809 - DNA, 122 bp, Homo sapiens
ggtttccctatgatccccaggctggtctccaattcctggcctcaagcggtcctcccggctcggactcccaaagagctgggatcacagacgtgaaccacgcgcccggccacattccccaatta

SEQ ID NO: 389810 - DNA, 122 bp, Homo sapiens
tttcaagtggttttgatgtttggtttcttgttctgtcacccaggctggaatgtgatggtgcgatttcatacttgttaatttctgcactatggccagtttatacagtttgtatgagttctaca

SEQ ID NO: 389811 - DNA, 122 bp, Homo sapiens
ggagcgcctttaagccgaaaccccgccctctcggtcgtcctggcaacgcctcccccaacccggggctcccacatttcagcaggtgccggagctggagctcccaccgccgccgcccgtgcctc

SEQ ID NO: 389812 - DNA, 122 bp, Homo sapiens
ccgaaggcgaagtccctgctcccaccgccggcacggtgacccttttcccagggtcacccccgaaccaacaaagcacacacacacccgagatgcgccccaggccgcagcgccaaccccccttc

SEQ ID NO: 389813 - DNA, 122 bp, Homo sapiens
gcatccaggcccataaaccagttccttccctctagtgacatgagccaccttcctgtcaaacggggatttctttttctttttttttcttttctttcttgttttttgagagcgagacagtctcg

SEQ ID NO: 389814 - DNA, 122 bp, Homo sapiens
gtcggcctggcaggcgcggcccccggttcagctgcgccggggcggcccagcgcgactccgcgggccttttggctgctcgccccggctccggaacactgtcagatccttctccgcagaggtag

SEQ ID NO: 389815 - DNA, 122 bp, Homo sapiens
tattccaatctgctcatctcccctcccgtccccgctttccccaaggacctactgagatttcgatcccacaacttagtgggtcccatctcacccaggccccgcaatcctcgccttctacttgt

SEQ ID NO: 389816 - DNA, 122 bp, Homo sapiens
caacgaggagggggaatcaaacagaaagagagacaaacagagatatatcggagtctggcacggggcacataaggcagcacattagagaaagccggcccctggatccgtctttcgcgtttatt

SEQ ID NO: 389817 - DNA, 122 bp, Homo sapiens
gtcaaggaggaccaaagagggctagcgtgagaaagccaccacgtggggatcgccgccacgcgccgcccgcaccactctggcccaagcgccggaggggcaagggtccgccccctcccgtacgc

SEQ ID NO: 389818 - DNA, 122 bp, Homo sapiens
aactcgagttttctttttcccacccgtactcagacaaccaacacctatggagggcctgtgcgggagccgctgtgggaggcgctgcctcagagctggtctgataccctgttcctgccggtcct

SEQ ID NO: 389819 - DNA, 122 bp, Homo sapiens
cgggatggtccccaagctcggtcccgatgggttctcattggtgatggtttgcaggggaaccggctggatacctagtgagcattggcacccactgacatttcttgtaatggatacaagaataa

SEQ ID NO: 389820 - DNA, 122 bp, Homo sapiens
gggagctttcagctgactcctgcaggatgaggagttggctgggcacagtgaaagggggggcgtgcgaagcagccagtggcctttgtggatgcctctcagtgtgggaggactgagttatgcag

SEQ ID NO: 389821 - DNA, 122 bp, Homo sapiens
gacatattcagttgtcaatacataaaatcttttcaacatattaactgataagtggtttcccgtttgaatcttgaaaaaaaacaaaacaaatgtctttgttaaaatgtagttgaaagtcaaaa

SEQ ID NO: 389822 - DNA, 122 bp, Homo sapiens
cagcggctggactctgcgccgcagctgccaaccaggctggagcgctggcccggccccccgcggctcgctgctccgcccgccgccattggcccgcggccctagcccagccttgttcccattgg

SEQ ID NO: 389823 - DNA, 122 bp, Homo sapiens
acgcgcaggtgagcgaactcggggggcgcgcctaggcgtaggtatgcggactccgggccgcgaaagacaggtcatgccagtgaacccccaaacccggcccacgctccctgcgccccaagccg

SEQ ID NO: 389824 - DNA, 122 bp, Homo sapiens
cgggagacctgggcacccgcgcagccagccaggtcggagtttaaaggtcccacgacggaccgaactgtcccattgccccagagctttactcagtggtggatgctcctgatgaaatttgggac

SEQ ID NO: 389825 - DNA, 122 bp, Homo sapiens
ccctccccctcaccgcccccacccccaacgcctcgcatcccttggcccgcttctccacctcggggccaccgccagaaaaatgcattcgagatcattcagagtgcacagaaacaaaaatagat

SEQ ID NO: 389826 - DNA, 122 bp, Homo sapiens
ccccgccctcgttccgcgcccggactgggccacgccggatagcgggaaacaaaaaaagcccgagctggaaacttcagagaggtttagtttcgtttcccagaagcatcagttcggtcccaaaa

SEQ ID NO: 389827 - DNA, 122 bp, Homo sapiens
aggacgctggccccgctcgcggctagcttgcacgccagggcacagcgaggatgggagggtcgcagtccctgcagccagccccagccagcgacctgaacctggaggcttccgaggcaatgtaa

SEQ ID NO: 389828 - DNA, 122 bp, Homo sapiens
agcctctggtcgcattttcatcaacttaatcaatacatagttttgttgtatgtgtgtttccgcttaaagacatcttatttaatatatattgttgattcattaacattgaactcagtcaacag

SEQ ID NO: 389829 - DNA, 122 bp, Homo sapiens
gccgccgcgtcctcccagcgccgcgtccccgcccgccgccgactccgccaggggccgagccgccccaccgcctgtcagccctgcccgcggccggtcagtaggtctcagacgcctgggctcgc

SEQ ID NO: 389830 - DNA, 122 bp, Homo sapiens
ccaggatcttagtctccttactccactctgctcccagaacatatccccggctcatgtctacgccctggacaggaatacggagacttcttcactggagaaactaaatagccccactcaggcca

SEQ ID NO: 389831 - DNA, 122 bp, Homo sapiens
acatggcctctgccccttcccaagcagaggcaacatggcggccttagcaagctatagctgcgagatttgaattactccactcgtagctattgcattcctgacgatggcctctgtggcttcgt

SEQ ID NO: 389832 - DNA, 122 bp, Homo sapiens
ggatggttgatataaagccgtgtgtcgttttcagggtgaattctcaacagggaaggcctgcgtagagggcttgcaagatttcgtggaaaccaaaatgtgcattcagcaaagaggggaggcta

SEQ ID NO: 389833 - DNA, 122 bp, Homo sapiens
atgctgctgctggctgagcctctctggaattgcaaacatgctttctaagctcagctctgccgtgctgccagcagacggtcttccagaggaatctccttatcatgagggattctgggcttcag

SEQ ID NO: 389834 - DNA, 122 bp, Homo sapiens
cggctgcgctgctgggcgggggcgggagctggagccggagctggagccggggccggggcccgggtcagcgcttgagccgggagaagagtttgagatcgtggaccgaagccagctgcccggcc

SEQ ID NO: 389835 - DNA, 122 bp, Homo sapiens
atggatctcaaatgggccaagggccccgggcttggaagggcaggtggcgcctagacccagcgttcccgctccacaggtctccaggagttcgcccggcgtttcctctgcagcgggtgctactc

SEQ ID NO: 389836 - DNA, 122 bp, Homo sapiens
gatgtgtcaggaacacaaatgacccgtagaagatgattaattttgttatagtgctttcaccgcaacgcatcaaataaccattgaaacgatgatgaatgctggttgtgtagccgtgaggtgaa

SEQ ID NO: 389837 - DNA, 122 bp, Homo sapiens
aaagtcccagattcaggcctagccttacggctcagggctggtggtcctgggaactggaagcgactgggagttcagatctaagtcgagagggtgcctccctccttcacggcccataattaccc

SEQ ID NO: 389838 - DNA, 122 bp, Homo sapiens
cttccttcagtagaatccttcagattcagggccattatccatttgcctccacttgctttgcgattagcagaatcttctcacctactgtatttgtttcccttttctcttggaggaggagtctc

SEQ ID NO: 389839 - DNA, 122 bp, Homo sapiens
tgaggaaggctggtgcccctgcacacccagtagaaggcttgtgtgtttgggaatgggaaacggggtgaggcaaagagaaagcaggggcaggaggctgggcttccttagcatccagtccatct

SEQ ID NO: 389840 - DNA, 122 bp, Homo sapiens
tctccactcatgttatacacgacgcacaattctccgtttccttatagttttccaacccaccgcaagcattccttgcggattatttttgcaccacttccaaggtctattccttttacagttaa

SEQ ID NO: 389841 - DNA, 122 bp, Homo sapiens
caccccagtttcattctctctctcagccccagtgaccttgattcaccaacatccagcctgcgtcgcagcccatcattgcaatcaagtggagacagagtcggtgggagacgtgacttatccag

SEQ ID NO: 389842 - DNA, 122 bp, Homo sapiens
aaccaggtgagagcagagcgctagccgtgtgcttgtgaagcagcgtgtagctctacggagcgcgggtccttgccccacccccgtcgacagcaataactcatggtgggtaaagctttctcgca

SEQ ID NO: 389843 - DNA, 122 bp, Homo sapiens
cttcctggacgtgtaaacgccaccctacccagccccgatcctggtttcttaccccaccatcgagttcagccacaaaacccacaacccccaaccacagctccgccgcaggcaccccctctcct

SEQ ID NO: 389844 - DNA, 122 bp, Homo sapiens
actgaagcgcttttctctctcacactccggttttaactcgggcaggggctgcggaggctccgcccctgacacgtccccgagccacgtgatacaccgcctcgccgttctactggtcaggccct

SEQ ID NO: 389845 - DNA, 122 bp, Homo sapiens
acccgaggggcccctcaggagacagaccaccagagactccaaggtcggagaccttcccggcgctccaggaaacgcggactcgccccgaaagccggggcccgagcgtccggggcccgcgccat

SEQ ID NO: 389846 - DNA, 122 bp, Homo sapiens
tttatccattcatctgctgatgacatgtgagttgttccattttttagctattacgaataacgctgcaaggacattcctgtatgagtttttgtgtggcaatatgttttcattatacctaagag

SEQ ID NO: 389847 - DNA, 122 bp, Homo sapiens
tgtcgggggagccggcggtgtgcagagtgactgaaggtgcaggctgcatgtcggagctggcggtgtgcagagtgactgaaggtgcaagctgcatgtcgggggagctggcagtgtggagagtg

SEQ ID NO: 389848 - DNA, 122 bp, Homo sapiens
cgtttcgaagagaagttggtttccaggtttcttttttgaacaaaaccaaagggaatcccgcgcggcccgacaaggcctgggaggacgtagtgcacgcgcgaggacccggcgtgggccacacc

SEQ ID NO: 389849 - DNA, 122 bp, Homo sapiens
cacatagtgagaggatgttttcctactggagctgagccgcgggggcgcgccccccggccgcgccctcctagccacgccctccacgcccggccttccgagagcgagctcggtcggacgcacgg

SEQ ID NO: 389850 - DNA, 122 bp, Homo sapiens
ataaggtcacattttgaggtatagaggattagaacatcaacataaatgttaggagggacacgatgcaaccataacagtggtgaaggctcaggaatggacagctgtagacttggccacaccca

SEQ ID NO: 389851 - DNA, 122 bp, Homo sapiens
gaagggcaggctggggcctgagggacgccccgggtctgagagggcagctccggccttaggcggcacccgggcctgaaggggttgtttgggcctcaggcggcgtccagggcggccgaacttga

SEQ ID NO: 389852 - DNA, 122 bp, Homo sapiens
cgtcctgcgggccgggtcaccggtgggggcaaagccaaggtcgcccaggtacagcgctggcgcaggtagacccgagccggcctggggtctgcagcggggcctgctagccgaagtctccgcca

SEQ ID NO: 389853 - DNA, 122 bp, Homo sapiens
atagcggtacgccggggaccctgggcggggccgtgagggtccggcgggcacagcctcgggcgcacagagagaccgcccccagccccacccgagctgccgcagtgcctccggaccgcccgcca

SEQ ID NO: 389854 - DNA, 122 bp, Homo sapiens
cactcccctcggctcaggctccttaaacaacaacaacaaaaccctaatgcaagcacccaccggggctcacaatgtcaaaccctcacctggcatagggaaaatccaagtgtgagagagagaga

SEQ ID NO: 389855 - DNA, 122 bp, Homo sapiens
ggtaggacacccgaattcttggcactttgcacagacatccagctgggtctcaggtgtctccgaagatttgtgcttttcggcaaaaatcttactcaaggaacaaacccaaaacatcccataag

SEQ ID NO: 389856 - DNA, 122 bp, Homo sapiens
tttttttaaacccaaaactagctctcttggaggactgcaaataggttgactggtaaatgtcgttaaccctagttgtatgttaattcaataaagaaagcagggcttttcagaaagactgactt

SEQ ID NO: 389857 - DNA, 122 bp, Homo sapiens
gagaggacacaaaagaggctgaccttccagagccctctgaaaagcagcctgctgctgctccgcgggggaagcccgtcagccgggtccctcaactcaaaggtctgtgtcttgagcttcttcgc

SEQ ID NO: 389858 - DNA, 122 bp, Homo sapiens
ggtaacgaccagccgttcactctggagatgcggggcggcaagaccagctcttcattgttgcgtatggcttctggggtgacggaacactggctcccggagcgggtgtccatctgcaggacaca

SEQ ID NO: 389859 - DNA, 122 bp, Homo sapiens
gactgcggaaggaagggcctgggaggaagcagaaaacctcacgtggctcggggtgagggtcggtttttgtcaccgtgagctggcctctaaaagactttttaagtcccaagtcttctttttct

SEQ ID NO: 389860 - DNA, 122 bp, Homo sapiens
ggagccctagcacacagtttgcaaaggcggggagcggccgagcgcgatggcccgtgtaagcgtccaccggggctgctccgactaccctcaccctaccacctgtgatcttttctccagcaggt

SEQ ID NO: 389861 - DNA, 122 bp, Homo sapiens
agtaactttttggtggaatgctctctcaatgagatgggcggaacattttttgctttagttcgcgtatctatagggtattattttttgctagagtgaaacgaggctcagcatcaatttggttc

SEQ ID NO: 389862 - DNA, 122 bp, Homo sapiens
tttccttgccatctcctcactctgagatcccacttgttgtccagctcaaagagagctttccgaatgagtcactttcaaggcattatatagcactcttctttcattcccttctccctcccctt

SEQ ID NO: 389863 - DNA, 122 bp, Homo sapiens
ttcttccagcccaccgataaaaaaatactcacccccttctccaggcgtgcagcccttcggcgtgccgctgtccatgccaccagtgatggcagctgccctctcgcggcatggaatacggagcc

SEQ ID NO: 389864 - DNA, 122 bp, Homo sapiens
caggtgagttacagcagggtggggctggggtaaggcggtctggtgactgagcccccgccccgtggccaagggagcccccgtgaccgagccgcctcgccccacagttcctctctgggcaggag

SEQ ID NO: 389865 - DNA, 122 bp, Homo sapiens
gtcacaagggggtgtacatcccctgcgatattggctgtaatatcttcctctcccccgctgcgctttaggagcaatgtcacacaaggggtgtacacccccggctatattgggagtgatatcat

SEQ ID NO: 389866 - DNA, 122 bp, Homo sapiens
aggcaggtctggaagatcaagaatgaagctcggagctctctcgcggagcaaggacaccttcgggcttcaggaccacccagggcgtccaaaactgctgccagggctgtgcccccgccccccgg

SEQ ID NO: 389867 - DNA, 122 bp, Homo sapiens
cagcctgtctgccacgctgctccgtctctcctctctgactgtctgagagaactacacagacgagcgcaccaaaaggctgtcaggtctcagtaaatattaattgcgcattttttttttttttt

SEQ ID NO: 389868 - DNA, 122 bp, Homo sapiens
tcgtctgaggggtgaccttactcactgcccatccatcctgcaccaggctggccccggccacgaggctttgcaatcaaggattcccagcgccactaggacttgttgcctgcccagagtttctc

SEQ ID NO: 389869 - DNA, 122 bp, Homo sapiens
agcagtgtgagtgagggccctgaccctagaatcaacgcccaaagagctgtggcgctacagcgggcggggacatggggtgcgcatgcgtgcgggggggtacgcgtgcgtgcaagtgcgcgtgc

SEQ ID NO: 389870 - DNA, 122 bp, Homo sapiens
cttggtgcgcctgcgcagaagcgaggcgcgctggggcgactggagcggttccctcgcaggcggcgccattttgtgctaggagcctgataaaaccggcccggttctgtggaaagtgggcggcg

SEQ ID NO: 389871 - DNA, 122 bp, Homo sapiens
ggcgggggaaccgggaggtagggccgcacacttggaggaacgttgcctgggggttttgttcgcgcacccgccccttcccctctcccggtaaatgtttaacaccaccgctcatccccaagtcc

SEQ ID NO: 389872 - DNA, 122 bp, Homo sapiens
cccggcgggttcgagcgagtagcactttactttccctacaggtggaggcgggccttggtgcgcggctgtccatctccggaccgcccacccgggcactggcccatgcgtctcctcccccggaa

SEQ ID NO: 389873 - DNA, 122 bp, Homo sapiens
cctaggaaaagaacagtaaaggagtgggggatgaaggacagggaatgggaagaagccaagcgagagcatgatttccgaagtcctacactcagcctgatcacacgggaagctttagaacaaag

SEQ ID NO: 389874 - DNA, 122 bp, Homo sapiens
gagggtgatgccagggattccaaggcaccgccatgtactgcactgccctggtcgaatgctcggtgtctgggtggcagctgagctgggactcaaggtggctcttggaacctgggaggcagcat

SEQ ID NO: 389875 - DNA, 122 bp, Homo sapiens
ctcatttttacagcaccaggccacatccacgcgttctctccgtccctactccccgcccaccggagtgttatctggttgagggaatctggtttccctttggtgcttcttcaatctgaagtgat

SEQ ID NO: 389876 - DNA, 122 bp, Homo sapiens
gcagcccataaggaagcacaggtctctgttctgcaaactcaaggaatgaagttctgtcaccgacttgaatgagctcagaagcagattctgctcagagcttccaggtcagagcccagtcccgg

SEQ ID NO: 389877 - DNA, 122 bp, Homo sapiens
tacacataaagtgcttccatggcatactgaagtagggctgtcatttcaaggaaaagtacacgtgattgagttgcaagttgaactagctgcttctccacacaatacctcatttacgtgaaaga

SEQ ID NO: 389878 - DNA, 122 bp, Homo sapiens
cttcctccacaccggaggctcacattacaacgcacagacgtcctggagggtcgcctgtcacgtcacctgttcgcggtctcggaatgcagccctgcacctttaaatccagactgcgtcaggga

SEQ ID NO: 389879 - DNA, 122 bp, Homo sapiens
aaagcagtaactttttgcttagagcttgagagtcaaagttaaggacccacatgtatacttcggctctagcgagtctaaggtgagtaaagccttcagattatcaataaagaaagattttaact

SEQ ID NO: 389880 - DNA, 122 bp, Homo sapiens
caaacgaagccactactccaacatcatattctccagatcccacatccggccactcatatacgggaagctgagactgcacagcatattgcttcactggcagtccttttggtgatggggaaggc

SEQ ID NO: 389881 - DNA, 122 bp, Homo sapiens
agggggcggggcccgggccgtgggagcgcctgaggggcaggagtccagtgttttagccttcgaaggaccatggtgcttccacgtcatcgtgttgtggcgctcccggctatggcagtaccgta

SEQ ID NO: 389882 - DNA, 122 bp, Homo sapiens
agtggttccaaacaattatatttctccttcccagtgcttacatgtggcctgaaaatgcagcgccaccggggatactggcgcctcccggagcaaaagtcactgcctcccggggagtcctggct

SEQ ID NO: 389883 - DNA, 122 bp, Homo sapiens
ttaaaatatctgctatgtgttgaatgggaaaagggttatgtggaagactgatgagacaaccggctcattttacaaggatgttggaaaacaaatctataaactacatgtgatctccaaagccc

SEQ ID NO: 389884 - DNA, 122 bp, Homo sapiens
ttgctccagcgtccactccctcccccccgggaagaaacctctgagtctttcctgcctcctcggtgcccattgcgtccttagccgtccctctgcacctcaattcctggtcaacattttgggaa

SEQ ID NO: 389885 - DNA, 122 bp, Homo sapiens
gggatacttcttcacctctgcaccccggcctggcacgactttgagggcttacccctccagcgtgctcatgaccactgggtgggaacccaagcccagggcccctttcacccctgccgagcccc

SEQ ID NO: 389886 - DNA, 122 bp, Homo sapiens
cgtgtgcgcgcacggccgagggggcgggacatgccggcagtctcgcgataactgcgcaggcgcggaccaaagcgatctcttctgaggatccggcaagatggtgagtgttgcgatttggcgcg

SEQ ID NO: 389887 - DNA, 122 bp, Homo sapiens
catttataggcagtaccctgcaacagacaggagaatccatggttcccttagaaatgtcagcgtggcacccacctccacttgctcttctccagctatttttaccacagtcaaaatcgggcagt

SEQ ID NO: 389888 - DNA, 122 bp, Homo sapiens
gccggctcggcgatcgctgactcgccgggtccgggggctctggaagcgaggcgcgctctccgactccgagactttgcagggttgcaacagacggtggggaggcaaaaaaaaaaaaggaaaag

SEQ ID NO: 389889 - DNA, 122 bp, Homo sapiens
ctgtctctaaaaataagaaaaaaaaaagccatgaaaaaagaggtaggcttgaaataggcccgacttagcttcgctccacctacagtgacccaataagaccagagtaagtattttttgattca

SEQ ID NO: 389890 - DNA, 122 bp, Homo sapiens
ctgttctagaagctacagcagaaacagcatttccagttcaccaaattagtcttctcagagcgcccaaactcccctttctgtgtcttcttccctattcagtggcatcccccaaaccctccaga

SEQ ID NO: 389891 - DNA, 122 bp, Homo sapiens
aagggggctcctctgacccagggcagacggggaagggataagaggcactacagcagggtacggcctgctctggggactgaatcccccatggaggctgtcatgagggatccacccaggagtcc

SEQ ID NO: 389892 - DNA, 122 bp, Homo sapiens
cgtcggggccctggtagctgaagcaggcgtccgcgatgtccaagtggccgaggggcagcgcgtcctgcggactcttgaaatagtaaaggtagcagcggcgcgcgtcgaacacgaaccagcgg

SEQ ID NO: 389893 - DNA, 122 bp, Homo sapiens
agcttagggctgacaagtgagtcagcagaagtgagcagacaatactgcattgggttttaacgtgatgagtcagccttgctatctggccagcttcagtgcagccccctgaagttttaacagaa

SEQ ID NO: 389894 - DNA, 122 bp, Homo sapiens
catcctgcttatatttgactgaaaaacacaaccaccaaaatggacagttcagcaaaagcgcgttgtctgtaattctctggtgttgcttctgggcaaaccctaagtgatggtggagaatctaa

SEQ ID NO: 389895 - DNA, 122 bp, Homo sapiens
agttccagagagcggggcttctatggaagcccagcgtcctggatggaatccaagatggtgcgacaggaaatgccggcgctgctggaatggccacctctcaatgtcacagcttatgagaaggc

SEQ ID NO: 389896 - DNA, 122 bp, Homo sapiens
cttgtttggatcttaaaccgcaattccctcttctgttctcctgggatcacgtgatgcggacgccccgtgcacggtttccaccaagactccctgacgaccacagccagcaagctcagcttccg

SEQ ID NO: 389897 - DNA, 122 bp, Homo sapiens
gccgagcccccctctgctcccggtggcagccagcgagtgggtgtcccgagtctcctcccgcgtgaccctgctgggtccgtgtctccgctcctcggctcccctgggtctctgcctctccgtct

SEQ ID NO: 389898 - DNA, 122 bp, Homo sapiens
aggacagcctccttaggctccagccctacacctcgtaggcttgagtgcataaccagagggcgggggcgaccataatcgatcggcattagatcccggagtatcttatctagagagggacacag

SEQ ID NO: 389899 - DNA, 122 bp, Homo sapiens
gtgtgaagctgccgtcggcgcgtcgtgtgcaaaagcccgcggggaagggggggcggtcgccggctgcaaaaggcccggctgtggccccgcacacctgtgcctgcgcccatggggcccgcgga

SEQ ID NO: 389900 - DNA, 122 bp, Homo sapiens
cggccacacaggcgctgacatcctcacacgtgtgcacacacgcaaggcagtgcctctccacgcatgtacactcccacacacatgcacacacccccatgggtgcgcacgcccattccgtcgcc

SEQ ID NO: 389901 - DNA, 122 bp, Homo sapiens
catcatagacctacaggtacaaagaacacatcgctctggttccctggaattgaggagtcacgtgaacaggttggaaggacagatcacaaactgctgctgctgctgctgctgccgctgctgat

SEQ ID NO: 389902 - DNA, 122 bp, Homo sapiens
aggatcacacggaggatcacgccaccagtggtcacaagacagactggggcacagagaaggcgcccacaacatcccaacggaggatcacacggaagatcacaccaccggtggtcacgagacag

SEQ ID NO: 389903 - DNA, 122 bp, Homo sapiens
tctgcacgagccgggggtggggcctgtctcagcgcgcggcggtggggcggggcttggacacgggcccggctcaacttgagggaggcggggctcgaggctcagaggagttggagcccgctctg

SEQ ID NO: 389904 - DNA, 122 bp, Homo sapiens
tcctccttgcgcagttcctgaagccggctcagcatgttgcctggtcacatagccaacctccgggctgctgtcggcccggcactcggtgatgacgccatcgccgccgactcccggaaaccgag

SEQ ID NO: 389905 - DNA, 122 bp, Homo sapiens
tgaaccggagcgtgcagggaaccggacccgggccgggggcttccctgtgccgcccgggggcgcctctcctcaacagcagcagtgtgggcaacctcagctgcgagccccctcgcattcgcgga

SEQ ID NO: 389906 - DNA, 122 bp, Homo sapiens
ccttgcagacctgtgcacccctcagaggtgccagccttttcttggagagaggaggcagcccggctgctggaacaagcacctgtaaacctggattagaaactgcctggagctgagcatttctg

SEQ ID NO: 389907 - DNA, 122 bp, Homo sapiens
tgtttttttcctacggataaaccacaccaagaagcacagctctgagcacacaccttcgtccgcatttcagggacaaaagtcgtccaaggaatcgctctccacggaggccacatctttctccg

SEQ ID NO: 389908 - DNA, 122 bp, Homo sapiens
tcccagccctgccagtcactcgcgaaagctgctggggaggggacgctgcgagccccgacccgagccaggccagcttggggagcagactctgttttatgggcttcagaagggcagaagggcgg

SEQ ID NO: 389909 - DNA, 122 bp, Homo sapiens
ttaactccccccagctaatgctaaaaatgtgtcctggttcttacacggcactgctagtaacgtggcaacctgagactgttcccaggctcaattcacaggagcccatgttcagcggttattta

SEQ ID NO: 389910 - DNA, 122 bp, Homo sapiens
tgctaaacctatcaaaatcatatatgacttctgggaagccgttctgcttggctggggtttcggcagcagcagggttccctttcctagaaagtccccagctctggccctaccgacgtccgcac

SEQ ID NO: 389911 - DNA, 122 bp, Homo sapiens
ttgataaggtgaagcaagtcacgtgatcataggacagggggcctttccctcttaggtagccgagcagagagagaaggcagcatacgtcagcgttttcttctatgcacttataagaacaatca

SEQ ID NO: 389912 - DNA, 122 bp, Homo sapiens
cagggcaccctgagggtgacggtgaataaggcacagcccttgcccttgtgagcacacagacggggagcagacagaggcggatttcagtgctgagaggtgagatacgaggggaagagagggca

SEQ ID NO: 389913 - DNA, 122 bp, Homo sapiens
aatgcagattctgattcagtaggctggggatgggacttgagactgcatttccagcaagctcgcagatgactggatcctgctgtcttcaggctgcatgcttcaaggggtcattcgcaggtgtt

SEQ ID NO: 389914 - DNA, 122 bp, Homo sapiens
tcttctggaatcaggactcaactccagagccacttgcgaggctcccatgcggcgagactgcggtctccgctggccgcacgctcttctgcatacagctccgcactacactcctctcccctaat

SEQ ID NO: 389915 - DNA, 122 bp, Homo sapiens
gcactggattcagggtggcaaactcaggtaaagctgctctgaatcattcagagttcatgccggagtgccaacaaggccaccagacttggaaatggcccagtgtttcctctctggccacatct

SEQ ID NO: 389916 - DNA, 122 bp, Homo sapiens
ggtggaggtgatagttcatgccacctagagctagatattggagcatcagggctagatcaacgtgctaggtactgattgctggaaggaacccttcagaaatgaaactcctaccaattaatatg

SEQ ID NO: 389917 - DNA, 122 bp, Homo sapiens
gggggaaaccggggaatgatcccacgtccctcatcctcagggctctttgcgccaaatatgcgatctgtttgcacctgactgcaaatgctgctcagaaagctaaggggagtagggataaatgc

SEQ ID NO: 389918 - DNA, 122 bp, Homo sapiens
cccaaccccgccaagcctgtgtgcacgcctgccaggcccctcccccaccgtcccttccttcgaggccctgagcgctcgctcactgcaggcttctggcaggagatgctgcaagtggcggggat

SEQ ID NO: 389919 - DNA, 122 bp, Homo sapiens
gtgatacacagtttccagaactgtctgggggcgggagcgggagcgggagccgagcccgctcggagctcctcgccgccgctgccgctcccatcttaaaaccgtttctcgccggcgcgcccgcc

SEQ ID NO: 389920 - DNA, 122 bp, Homo sapiens
ccacttccctgccctggcctcctccctggtccccagcctctagtcttggcacctccagtccgcctttgaggaccttgaaaaagcgcaaaccaggccgggtgcagtggctcacgcctgtaatc

SEQ ID NO: 389921 - DNA, 122 bp, Homo sapiens
ggaggcaaaccttggacttcaagtcccaggaagcaacgcgtgtccgttttccgggcgccccgccgcggcgccgtggttcccagtgtgccccgctgttgttattccttttatgtgctcccagc

SEQ ID NO: 389922 - DNA, 122 bp, Homo sapiens
tcccgtggcctgtgctcgccgctcgcccgagctctcctcctcgcctggcgcgatctccggcgcgagcctcccaaactgctttataaggcgggcggccgctttgatccgcccacgtcagcgcg

SEQ ID NO: 389923 - DNA, 122 bp, Homo sapiens
tagcagcaggtctagcgggccggagtgggttcctaccgcctgggtgggcggggcctgctgcgcgtcggggcaggaaggggcggggagagtcgggaagggcggggaggggcgggaggggcggg

SEQ ID NO: 389924 - DNA, 122 bp, Homo sapiens
gtcgggagaggtgactccgggctggggagggcagggtagggcagggaaagcacagggatccggggcacggcggggacaaagctccacaccagcaccaggaggccttcctccagatggcaggg

SEQ ID NO: 389925 - DNA, 122 bp, Homo sapiens
tgagaaaggtagagaataagatgattaggtttatgcagtatttagaacacacctttgcaccgctgattaaattatcatcactccttcattccaaaaaaccgtgactgaagtgaataatatgt

SEQ ID NO: 389926 - DNA, 122 bp, Homo sapiens
atgcaactcactcaggaatgtgcaaatttggggaacagttcagaggtgaaaagcactgatcgaagagggagaagctaaaatcaggagacctggtttctactttacagtcccacttactgtat

SEQ ID NO: 389927 - DNA, 122 bp, Homo sapiens
gacggggctgaggctggtgcggccagcgtggcagagtgcaggaggaaggaccacaggtaacggcggttatgtaagtcatgtctgatccgtgtcctgggttcgttcattcatcccatacacgt

SEQ ID NO: 389928 - DNA, 122 bp, Homo sapiens
atacactgaaaccagctcaggcagaacaaaggaacaaagacaaatttcccaggttgcagccggcagtcagaagccagaagccaccaaatagctccctgggttgcttttatgcactcaacctg

SEQ ID NO: 389929 - DNA, 122 bp, Homo sapiens
tctctctctctccccctcactctccccaccctctctcactgcaacccataaatcattcttcgcattctttggctgttcctgcttatgtgagagagctcagctcccagctctctgtgggtgaa

SEQ ID NO: 389930 - DNA, 122 bp, Homo sapiens
gctggaggaaacagcaggaaaagagaaccaggcaggcaagcagacatccccacggagcagcgttgggcccccaaggtgcctgacccacttcctagagtactgaacagtcccagagtgtcaca

SEQ ID NO: 389931 - DNA, 122 bp, Homo sapiens
aagacaaaagatatcctgcctgcttctctaccagggagaataaatgttaagcactggagacggttttagaaccttatgaacccgaatatggatgagctttactaactggcctttatctgcca

SEQ ID NO: 389932 - DNA, 122 bp, Homo sapiens
tcccctggaagtgtgcctgcagcccgagaaggggcgccctgtttccgtgggaggcatgcccggctcccgttgacaggtctgcagctcactcatggaaaggcctgctttccggagctggcctc

SEQ ID NO: 389933 - DNA, 122 bp, Homo sapiens
ttggaaatatcgaaggaaccgactttgaactccagagggatcttttctttggaggttccccgatgcagccctcaagatgcatccgcactccacacctaggaattgcccgcgcccatagaggg

SEQ ID NO: 389934 - DNA, 122 bp, Homo sapiens
tcgtgagccgttcctctcacaccacgtctgctgggcaccctccacagcaggtccaagcctcgtgagccgtccctctcacgccacgtctgccgggcaccctccacggcaggtccgagctttgt

SEQ ID NO: 389935 - DNA, 122 bp, Homo sapiens
aaagtggaagggtactggcatgtggttgggcagggctgcctgaggtcggtgtcagccgaccgtggggcttggtcccaggaggctgcttactgggccctgctcctctggtttcccccaagtcg

SEQ ID NO: 389936 - DNA, 122 bp, Homo sapiens
cttctggatcagagggaacaattaaccccctcaaaattatgatgggaacccacactcctccgatgcagcccttggctgcattgttcatagggaaatttgtccggcatgaaactaggggatgg

SEQ ID NO: 389937 - DNA, 122 bp, Homo sapiens
agaaagaaatatgtaatttttcctttgcaaaagtgctttgatttgaaaccacccagcaaacgtctccaaaagaaaactggctgtgatgcgatcgagagctgcagtgtaatattgcagagcaa

SEQ ID NO: 389938 - DNA, 122 bp, Homo sapiens
cctgtatttcctactgggctccaggccctggactgtgacctcccgctggttggctgccaccggcaccacctggagccgaccatccttatccttgtactggaccacgaaggagtcgaattcgc

SEQ ID NO: 389939 - DNA, 122 bp, Homo sapiens
tcccgagacaggagcccgctgtctcccgctggaggggagactcttgcaggaaagaaagtccgttctgtcgccaccggccagctgtgcccgaaaagtcccaggaagaaactctcgctcatccg

SEQ ID NO: 389940 - DNA, 122 bp, Homo sapiens
cttatcgccatgggcttatccaatcatttcttcacggaacacacgtgggccaacgctgaccgggctctgtgccaggaacccgcaaggcgctgcttgttcatctccagccacggggagctcat

SEQ ID NO: 389941 - DNA, 122 bp, Homo sapiens
aaaagtcttgtttatcttagctaaatatctcaattaaaacactccattctgaaagcatgacgtggcatttggcaccttcgtggtagcacaaaacagctggcgagatgctctgtgctccgaat

SEQ ID NO: 389942 - DNA, 122 bp, Homo sapiens
gagccagacagggccggggccacgaacctgcatcctgcatcctaagcacctattgccatgcgtgaggctaactggaaactcacttgctgggtgcagatagcttccaaactattgtgatgctc

SEQ ID NO: 389943 - DNA, 122 bp, Homo sapiens
cggcaccgaaccacagctggccggccaggttgtcgtgccggatctcctcagggaacttgacgcagaaatctctgggggcgcggtcctgggggatgcactcatccatgatctggttaatgatg

SEQ ID NO: 389944 - DNA, 122 bp, Homo sapiens
cctctgacagttccataataacctgtgtacactttctggcacccttgcttctccaggtcacgccttccaatggaaggggaagcagtgacaaaggtgaaaatcatggcggtaacagaagtcat

SEQ ID NO: 389945 - DNA, 122 bp, Homo sapiens
ggacgctgcagatcagagccagcagaagagcacaggtggcggatgtcaccctcatgacagcggagtctggtcccagcaggcacaggcagggaatttggcgatgggtgagctttatgtatatc

SEQ ID NO: 389946 - DNA, 122 bp, Homo sapiens
cggcgatggataaacaggtctcgtctcttcccagttgcagcccgtgagctggtggcacaacggattaatgaggcaacagggctctagatggtgagtgggatcaatgagacccaattgagctg

SEQ ID NO: 389947 - DNA, 122 bp, Homo sapiens
cagcggtaccggcgaaacgggatcaccaagatggaagagtcggcagagtacgaggcagcgcggcataaacgggagaagaggaaggagaacaaaaacctagccggctccaaacggggaaagga

SEQ ID NO: 389948 - DNA, 122 bp, Homo sapiens
gcctcgacacacctaacgaatggaggcgggccggaggccggtggaaccagctcgagctctcgagggccgtttgggggctcgcgccgtacggcttgtgaagtctcgcgcctctccccttagtc

SEQ ID NO: 389949 - DNA, 122 bp, Homo sapiens
gggacaccgtcttctttcccctctcccccagggcgcggtttcccagcgcttgttcgagagcgagttggcagggttccccaaaagatacaggaggatggcattgctacctggagacaccttgg

SEQ ID NO: 389950 - DNA, 122 bp, Homo sapiens
cgtgggcagaggaacaaccaggaacttgggctcagtctccaccccacagtggggcggatccgtcccggataagacccgctgtctggccctgagtagggtgtgacctccgcagccgcagagga

SEQ ID NO: 389951 - DNA, 122 bp, Homo sapiens
gtattggttcttggtcagtctgctgaattcaaaacactattacctttaatcagcaacttgcgggtgttttattaatagagctgaaaaaggctcatctaacatataagaatttcctggtttcc

SEQ ID NO: 389952 - DNA, 122 bp, Homo sapiens
caaatgctcagcagggttgctatgatagcatgccttcttattcagttcctattctggacacgcagcttgcccgtgactgttgcatgtcaagtggctggaaccaatcagcttatctaaggctt

SEQ ID NO: 389953 - DNA, 122 bp, Homo sapiens
caggcattgtgttagaagagtggccgccggtggccaggcagcaccgcgtggacaagagcccgcgcgggttgttcatgagaaccaggtgtctctcgggtcggcggagggcatttctcttttgc

SEQ ID NO: 389954 - DNA, 122 bp, Homo sapiens
gcaaggtggggagcggacaggggctcacttgagggcccgggggctgctcactcacccctgcgcgcagctggccctggccccagagcctggggcccgcccggagctgctccaggccgcgaccg

SEQ ID NO: 389955 - DNA, 122 bp, Homo sapiens
tagcctttcttctgagtttcccttgttatgtaaagggtcttttctcctggcttgcagagacgcgcgctccatggagcagttcgattctgctccttttgtataagatcgcgcgcgatcagaac

SEQ ID NO: 389956 - DNA, 122 bp, Homo sapiens
ggtgatgcttgccgccgccggagggcaggacgacctcctgcgactcctcatcacaaaaggcgcgaaagtgaacggtcggcagaagaacgggaccaccgccctcattcatgctgcagagaagg

SEQ ID NO: 389957 - DNA, 122 bp, Homo sapiens
gctttaggaaagctccatgtgcccctgaggaacacgaggtctgcaatgggtgcagcactgcgcccgcatccatgtgaagagcacgaggtctgcgatgggtgcagcactgctcccgcatccat

SEQ ID NO: 389958 - DNA, 122 bp, Homo sapiens
gaaggatttcgcggacccgtggggcgactcataaagacttgggcttcctggtccccggctcgcccgcggcctgacggctctataaaggcctccctcccggcacggctctcgcctcggcccct

SEQ ID NO: 389959 - DNA, 122 bp, Homo sapiens
caacttcgtggcctaccgctgccggacgtgcggcatctcgccctgcatgtcgctgtgcgccgagtgcttccaccagggcgaccacaccggacacgacttcaacatgttccgcagccaggccg

SEQ ID NO: 389960 - DNA, 122 bp, Homo sapiens
ttgtcatgtataaactgacattactcttcttgcccatttcagtgcaactgtttttggtttcgtgctcatctggggcattacaatgtcttgtctcagttttgaaattctcatagaagtatttt

SEQ ID NO: 389961 - DNA, 122 bp, Homo sapiens
gaaaggaggggtgtgaaggactcaaaattccagcagcttggctggggtggctgcgccagacgggcccttccccaaagtgcaaacccacccctgtcctcggccccggcgcgctccctccctca

SEQ ID NO: 389962 - DNA, 122 bp, Homo sapiens
taggtaaacagtatctggcacagaatacaggctgtgtaagtggctgctattattgccattcgtggaccacagaggccagtcagagaggcactgcctcattacccagggactaaggcccttgt

SEQ ID NO: 389963 - DNA, 122 bp, Homo sapiens
tgcctgctctggctgagagcccattcataagcccaggcggctgaggggcaggtattgtgccggttactatagcatcaccttggaaagtctcacttggtgagagcggcaggcgagctggggtg

SEQ ID NO: 389964 - DNA, 122 bp, Homo sapiens
actgtccgtctctactcggtctcgaaaagtggcccctgtctggcgttctacccagtgtagcgttggcaaccacagcagccgcaacctaacggcggacgaagactggacgccggaagtcccgc

SEQ ID NO: 389965 - DNA, 122 bp, Homo sapiens
tgagatatttactatctggccttttacagaacaagtctgccagtccctggtatagatcatcgtcttatttgttgcttaaaacccttcagtcacttcccacagtttctaggaaaaagtctaaa

SEQ ID NO: 389966 - DNA, 122 bp, Homo sapiens
accatttgttaaatattctcaccaaagagaagctacaaaagggcccgctttgctggtgcgcgacggcgtgttgctgttcctcactgcctctcgcggcgtccgttcgcccctcgccttcctca

SEQ ID NO: 389967 - DNA, 122 bp, Homo sapiens
gttgggagaaggggttaaactagggtttggttcttttagcttcctgctggattcatccaccgatagacaaggagagtcagggatgagggtaacttggagcccagatgatctcagcccctcaa

SEQ ID NO: 389968 - DNA, 122 bp, Homo sapiens
ggctctcaccccgtgcaggcagggggctgcaggcaggagtgaggcgcggagatgtttacccggaaacaggcctctccttggagaagtgtcctgaaaagcccacggtcccgcgggtatggacc

SEQ ID NO: 389969 - DNA, 122 bp, Homo sapiens
tttaaattgtgtttaaaatcgtggcttgctggatgatggctgaaccgtgtcagctggtgtcggtggtagatacattgtggtaaaagctttttccttcctcccgaccccacctccaatccttg

SEQ ID NO: 389970 - DNA, 122 bp, Homo sapiens
gacggccgtcaaggtggccgcccacaagctctacgagtcgctgggcttcagacacatgggcgccagtgaccactacgtgctgccgggcatgaccctctcgctggctgagcgcctcttcttcc

SEQ ID NO: 389971 - DNA, 122 bp, Homo sapiens
catgaattaagcaaagcatcggaaagtattgacacatgagactaaaataaataagagaaacgagctgctctttatacctagaaatagctggaaattactgaaaaaaattaaagtgcagaggt

SEQ ID NO: 389972 - DNA, 122 bp, Homo sapiens
atagccaggagtagaaaggagccaggtggggcaggggtgccagggagggcagctggagggcgggtctcagggagccccagccacagtgacgaagatgtccttgtagcctttgatctccttga

SEQ ID NO: 389973 - DNA, 122 bp, Homo sapiens
tgataaatgcagagatgatgaatcgaaatgcaaatgacggtgaagtgcctcagccatcagcgctgaatatcattaataccttcccactgttaaatcgatcactgtcatccccggatgccggc

SEQ ID NO: 389974 - DNA, 122 bp, Homo sapiens
ttaaacaaacgcagcgagcgcctccgagctgcgctctcggccgggtctgcgcggcggcggcggcgttacaaattgtaaatttaaattgctcgccggattcattacctcccctctttgatttc

SEQ ID NO: 389975 - DNA, 122 bp, Homo sapiens
ttctcacacacagtccaggcatcgactgaatcacacaatcacactaccattcacagtcaccgtaacaacatcacacacagtctagggcctttatactgtgtcaggtccaccccattacctct

SEQ ID NO: 389976 - DNA, 122 bp, Homo sapiens
ttgtggctttccctttgacaaattgcggggccctcatttccccatgtcactgaatgttcccgggaacctgctttctgcgtgggtagtgaggaaatgcagtgccaaaaagggtgaggggaatt

SEQ ID NO: 389977 - DNA, 122 bp, Homo sapiens
gtggtgtcccctaggggccctcccttgaactcaggcggccctggaatgaattactgctgacggagcaaagagcgccctcagacaatggctctgcggagtctcactgacctcattatgaagca

SEQ ID NO: 389978 - DNA, 122 bp, Homo sapiens
aatatcgggggtgggggggtgatgtttctccccgcatcgcgggggtcgcctgcccccctgcgatgtgtatcgtaatatccagtgaaggagagggggatgatattactacctgcatggtggcg

SEQ ID NO: 389979 - DNA, 122 bp, Homo sapiens
tttgcatcctttagacaaagagaccgtgcagaagcagtcggccgagcatccattatggggcggggttggggaggggcggaaggagaagaaaggggactggggttagaagactttctgttgct

SEQ ID NO: 389980 - DNA, 122 bp, Homo sapiens
cgcggtcggggtggcctggccggggacaaaggcctgcccggggggcgggggcagcgatggcgacggccgcggcgggcgcgggcgaactacaagtcccagcagctcccgctgcggccctcggc

SEQ ID NO: 389981 - DNA, 122 bp, Homo sapiens
ctaattgcaatgttcagtgagagaacataggaaacaagtggtctctcttttccgagacggcgtctcgctctgtcgcccaggctggagtgcagtggcgcgatctcggctcactgcaacctccg

SEQ ID NO: 389982 - DNA, 122 bp, Homo sapiens
cgcccacgcggagcacggcccgggccccttctgcctgtgctgccaactatgcgcagcattcggttcctgaccctggggttgacccactgaccccggggttgacccactgaccccacagagtc

SEQ ID NO: 389983 - DNA, 122 bp, Homo sapiens
agattttctcctctgccgtgtagtttcgagaggggtccagggggatcccaaagatgaactcgatctcgtagccgtggggcacccccatccacaggggccaggagagcgtggaagcacggtgt

SEQ ID NO: 389984 - DNA, 122 bp, Homo sapiens
tcgcagaaacaaataatgagaacttcacaccaattcatttattatatgaatgttttgtcccgtgagaacactggtctatctttagatatgtaatttatcaaacttctttgggcaacccatct

SEQ ID NO: 389985 - DNA, 122 bp, Homo sapiens
tgtgcccagtgtttacctgtgagcattttctttttgcatacaaacgttttggtcaacccacggttgcctcctccaggaacagaatcttttgattcaaatacattgattaaaatttacagaga

SEQ ID NO: 389986 - DNA, 122 bp, Homo sapiens
gagccaccgtggccatcgggtccccgcctggcggaagtggccaggcgtccacgagcgcggcgcgtataggttcacctcgctcgctccgcagcccccaggggctcatggctgcctatcccccc

SEQ ID NO: 389987 - DNA, 122 bp, Homo sapiens
cctgtcacttctcaaagcacctccttcgttctggcaatttagtgagggaggctgggcagccggggctgtccattttatagaggaggacaccaagcctcagggagggagagggaagccggtgg

SEQ ID NO: 389988 - DNA, 122 bp, Homo sapiens
gaggtggggcgctgtggaagagcggcagcttccggtcggcttttctcttccttcggctgccggcgccagcacgtcctgttttcgttggccgcgctgggatggccgccacagctgtaggtgct

SEQ ID NO: 389989 - DNA, 122 bp, Homo sapiens
tccaggatgtaagcgtggttccggaatccattgcaggaggcccatcgagatggtcagagccggggccgattccgctcggtttctgttgaagtcgtgtacaggatggagagcaggtgagatgt

SEQ ID NO: 389990 - DNA, 122 bp, Homo sapiens
tcttctggactgcaggaggcggcagacggctaccagcgctgtatgatggcgcagtacaaccggcacgacagccccgaagatgtgaagcgacgagccatggccgaccctgaggtgcagcagat

SEQ ID NO: 389991 - DNA, 122 bp, Homo sapiens
tagctgggattacaggcatccaccaccatgcccggctaattgctatacttgtagtagagacggggttttgccatgttgaccaggctggtctcaaactcctgatctcaggtgatctgcccacc

SEQ ID NO: 389992 - DNA, 122 bp, Homo sapiens
catcttgcagtaggcctgggtggtcagtttcaccccgggcatgctgacccgggagggccccggaggcccctgggcgcgcggctgaggcctggacccgctgcctggccgcgcggcgcctcagc

SEQ ID NO: 389993 - DNA, 122 bp, Homo sapiens
ggaagctccgagcctgggagcaagtcctgcccggctgtgcaagagcgaggacagcacagtcggctgccttggagacgcggggcaccgccctcgcctctctgctgcagctagcgggatgccag

SEQ ID NO: 389994 - DNA, 122 bp, Homo sapiens
ggcttctgtgaacctgtgagctcctctctgcgcagggcatcctgctggccggccgtgtcccggcgtccccatgctgtgcaggtgtagtgactgcagatagacagccgaccacaatgctgacc

SEQ ID NO: 389995 - DNA, 122 bp, Homo sapiens
acatcacaagggcacccggcgccgactgcggccttgccacctcggcgcaggacttcacagcggcctctcatctgctgaccccgcggcctgggctctggcggcttccctcccgcccccttccc

SEQ ID NO: 389996 - DNA, 122 bp, Homo sapiens
gggccaagagtgatacctgatcctgggggattgtgaaatgacctcatgtggcagcccgcccgcggtgcccgcaaagccctccaccctccccttccccgctcggctccacccctaccccacgc

SEQ ID NO: 389997 - DNA, 122 bp, Homo sapiens
ttttgtaagtattaactcggtaatcacaacaaacacggagcaatctcaatgctgtttatccggaggacagtctgcggggtcgtgacgactgaaagaaaggatgtcacaggcttgaccacaga

SEQ ID NO: 389998 - DNA, 122 bp, Homo sapiens
ggagactgagccgttagtgaggaagttcggtctgtggacaagtgtggtgccaggccgccgcgaggctcggctgcaacctgttcctcgcccgccggtgctcgccgcccgcccgctcgcactcc

SEQ ID NO: 389999 - DNA, 122 bp, Homo sapiens
ccggcgcccacgtgttcccccctttgtgacagggagcgtttccgggcctgcgggtcctggcgggggcggccgtgccccgcctgcgagtgcgcgcccgccgtgtccgacactgccccgggggc

SEQ ID NO: 390000 - DNA, 122 bp, Homo sapiens
caggtggtgaagaggcatgaacaagtcaggccaggctcagctttgccaccagctgtaagccggaagctcagaggaaagacactgttaccctccctctcctgactcaaagcttggggcaattt

SEQ ID NO: 390001 - DNA, 122 bp, Homo sapiens
gaaacaatgagacatagtatctgtccatccggcctgtgatgcttgcttcctttcttccttcgtttcttccaagtatgtacctaatctaccctattccaatgacactgtacgttgctcaaaac

SEQ ID NO: 390002 - DNA, 122 bp, Homo sapiens
catagaaaacacacactttgttttaaagtaacagcgaggaaccgcctcgctgtggtctttcgcttgcttggcattgcccctagggtgctcggagatgggctgtggagggggacgttgggaac

SEQ ID NO: 390003 - DNA, 122 bp, Homo sapiens
aattctggtgttttcctgcagcccagctcagcgtcctaacagtggcccaaagggtgatggcgggggtgtcctctaggatcatctaaggcagggggtgtgaggatgccagactcttgcagcaa

SEQ ID NO: 390004 - DNA, 122 bp, Homo sapiens
ccaccactaccatttcagccatggcagcccccgcaggcccggccccgagccaggcgcctgcgacaccaggctggtccgagctggcgcgcccccctcgccaccttccccaggccgcggacccc

SEQ ID NO: 390005 - DNA, 122 bp, Homo sapiens
gagtccctgcatctgctccctgcctggcctgggctcccacatccacagaagcgccacagccggggagcttcggagtcaccgcacagagtgtgctctctgctctgctctcctcagtcccacag

SEQ ID NO: 390006 - DNA, 122 bp, Homo sapiens
gcactgaccagagcccaggaagcccagcccctccactcaaacagaaccagaggacgggggcgggacagctcctcagagcactcctgccctgccaccaccctccacgcaggacaaaagacaag

SEQ ID NO: 390007 - DNA, 122 bp, Homo sapiens
aacttctcggcagccaccctcaggggctgctgtgtgtcggcttcaccacgaggagaggctcggggccctggtgcctgaatgcaggctgagggatgtcggccgcagcccctgtctgtctttcc

SEQ ID NO: 390008 - DNA, 122 bp, Homo sapiens
ctggaatttgaaaaacacccctctgctttcttgctatgaagaaaatgaccaagtgcccagcgccgctcggctacgctaacgtagcgcagaagcacatactccacccaggaaagggtgcgctt

SEQ ID NO: 390009 - DNA, 122 bp, Homo sapiens
gctttccacggacactttgctgaccgcgaccacgtgtacatggtgctggagtactgcagccgccaggtgcccaggggcggggagagggcaggattcatgtcagctgtgcccgtctctgtcca

SEQ ID NO: 390010 - DNA, 122 bp, Homo sapiens
gtagcgggccccggtgtgctcatctgaaaatgaggccctgccaggatcttcccccaatgccgcccggtggaatgaagatgcggccccccaccctgagtgctggtgagagacacagccagctg

SEQ ID NO: 390011 - DNA, 122 bp, Homo sapiens
ttatatgactaagaggacatgaggcactgatttattttattgaatgagtaaatactcattcggattgctggcttgacattgtattggtgtgctctgacggactcaagcgtctgaatcacttt

SEQ ID NO: 390012 - DNA, 122 bp, Homo sapiens
acggaccttcagcccagggcgaggaggggacggctgtggggccacagggccaggacggggcgatcgctaaatgggatggcatggtgtccacaggactcgactggcgcctttgcccgcaggat

SEQ ID NO: 390013 - DNA, 122 bp, Homo sapiens
aagtaggcagaatgtgcctgttttgtcctttcatgagagcaatttgatctagaggaagtacgaggctttaaactccgggtctacagaattaaaggagggtaaaagaaggacagcaggacctg

SEQ ID NO: 390014 - DNA, 122 bp, Homo sapiens
gcttcggggccaggagccttgaagtggtgtgaggaccccacctgctccccatcaccagggcgtggggcccttatcaagccgagacgtcactgtttagtatcaaatgccaaagtctaagtcgg

SEQ ID NO: 390015 - DNA, 122 bp, Homo sapiens
cccggggcgagggcgggagacttcctgctcagaaccagtccgaccagcttggcgctgggacgcctccccgcgctgtgccgcggcccggggtgccgaggagctgggctgggggcggggacccc

SEQ ID NO: 390016 - DNA, 122 bp, Homo sapiens
gacccgggcgtggatgataagggtgctaactttgtcttcctttcccatctgctgattccccggttctgggctcaggctggctatctgtggagtggcgcctgcagggcgactcctgcatcctc

SEQ ID NO: 390017 - DNA, 122 bp, Homo sapiens
ctggcggaggaagaagcaggtttggggacccgtggtcatgatgaaggtcgcgctggctctcgcacctccacatggctctttacagtttcccaaacctcgctgcccttggtcctcacagcctc

SEQ ID NO: 390018 - DNA, 122 bp, Homo sapiens
ggaaaaaaactgcatctgttttctgtttgttccagactgggaaactaagcctgagattcacgatgcttcagacaaaaaatcagaaggatcattgagggaatgccttggaaggcaaagtcctc

SEQ ID NO: 390019 - DNA, 122 bp, Homo sapiens
catgacccttattgccccccaagtccaggagctttataagaactagaaaactgcccctcccgcaagtctcatgtctcttttcccttcttgtaggtcaggcttcagccatacaattcctgaaa

SEQ ID NO: 390020 - DNA, 122 bp, Homo sapiens
tcttaccagcagagaaactgagccccagagagaggggggcgcttgctggtggtcgcccgtcgttcaacagcgtgttattgaattaccggtagagcctgggctgtttaggtagcacccgggcc

SEQ ID NO: 390021 - DNA, 122 bp, Homo sapiens
gagctcctgggctcaatggatcccccctccttgacctaccgacagtgctgggattacagccgtgagcactattctgcactctacttctgtgagatcaactttattagattgtacatgtgaga

SEQ ID NO: 390022 - DNA, 122 bp, Homo sapiens
gagcatggagggtggggggactgagcagacccccgcattcctgggtgcccgaagggaggccgaggccgcagccgttttcctgaaggtggcagaccaaaaacactgccctgggggtgaggatt

SEQ ID NO: 390023 - DNA, 122 bp, Homo sapiens
tcagtgcccagtggtcaggtcagcctgttgggtacgcagatctagatgatgtttggtttgcgagagatgacgacctctaatttgcctccccttccccgcttctgggggctgctcctcacccc

SEQ ID NO: 390024 - DNA, 122 bp, Homo sapiens
cagaactggaaggactgtagtaaaatgcagatatttgggcccacccccagatacaggcctcgctgtgggacatgctgctatggtcactttctccatgtacagatgaacaaagggtggcccag

SEQ ID NO: 390025 - DNA, 122 bp, Homo sapiens
gtctgggcggtgaaggtgggactgcctgttctgggcagcaagttcccctctccagctgcccgccattcataacatgtccgccagaacccgggaagcacaggcagggctggcttagagaagac

SEQ ID NO: 390026 - DNA, 122 bp, Homo sapiens
tggcgccgcgggcgggaggcctttgtggggcgggcacgtggggcgctgggggcgcgggagcggggccgccatgggctgcggggccgcgcgagcgctcgcctccgtcctctgcctccgcagga

SEQ ID NO: 390027 - DNA, 122 bp, Homo sapiens
gatgatctgcccgccttggcctcgcaaagtgctgggattacaggcgtgagccaccgcaaccggccgatgatttcttgaggcatcctgtcttcatccagccagcagtgccagagcggttctgt

SEQ ID NO: 390028 - DNA, 122 bp, Homo sapiens
tgggggagtcgcccttgctcccccagcctcagccctcgggaggcgcagcgtcagggcgggcggcagcacagaaaccccccgcgccgctagagggaccctcgcagcagctgcgcgggcgacct

SEQ ID NO: 390029 - DNA, 122 bp, Homo sapiens
atgtacagaccacggcgaggggtgttaggggcttctcgggataaaggcagcgagtggctgcgcattccctccccgactctttcagaggtaagccttctgtggagcagaccctaatcctcccc

SEQ ID NO: 390030 - DNA, 122 bp, Homo sapiens
cgagtcgtcaggctcccctcttcgccggcaacgcgtacactcgcgcatgcgcgacttccccggaacttccaaatccacagctggcgcctcagctcccgcactgcgcatgtccggagcgtgcg

SEQ ID NO: 390031 - DNA, 122 bp, Homo sapiens
taccccgagacctcactttattacaagatctttccaaatacccaaatgtccctgcaagcccgttaaataattccctatgctacccttaataacatacaatgaccacatagtgtgagaacttc

SEQ ID NO: 390032 - DNA, 122 bp, Homo sapiens
gtgggaggaaactaaggacgctgggtagatgctactgcgcagaaaggctccctagggccacgtgattcttcccttctcagtccctcctccgactcctctcctctccctgtcactcctccctt

SEQ ID NO: 390033 - DNA, 122 bp, Homo sapiens
acattctgcaagaaatgtggaaatagctcacaggcggctccactggcagctgctgcaggacgcggtcggggaggacgacgatgcggatgtggatgcggaggatgcggttccagacgcttcgc

SEQ ID NO: 390034 - DNA, 122 bp, Homo sapiens
cctcggccaggagttagaagctgctcctctgacctctggaggacccggcactccgaaccccgcgcagcctgggaaaggcctgagattccccgctattgggattcacatcacgacgcggcggc

SEQ ID NO: 390035 - DNA, 122 bp, Homo sapiens
aagtcgtggcgagggagcgcagctgtgctgctggatgttgctgttttcctggcgtgttagcggtggtcagcaggtagggggcggagtatttttacagccagttaaacggcttttctcactga

SEQ ID NO: 390036 - DNA, 122 bp, Homo sapiens
ggtctgcgaacacatgcttcttctgtttgacttatatgggcaccctagggtttgtatttgcgccaaaaagtggaagccaagctttcattgtaaacagatggtgctgctaacaaggaaagtaa

SEQ ID NO: 390037 - DNA, 122 bp, Homo sapiens
ggagcagcaggccagccggccaccgccacccaactcagtcatccacctgcccttcatcatcgtcaacaccagcaagaagacggtcatcgactgcagcatctccaatgacaagtaggttgtgg

SEQ ID NO: 390038 - DNA, 122 bp, Homo sapiens
tttgcctttttcatcacaggcaggctttagtagttcctcaaaacgtgcaccacaactgcccggctgccaaacagaaatgctgatgcctgggcccactctagccatttggcctcggcatcacg

SEQ ID NO: 390039 - DNA, 122 bp, Homo sapiens
tgtgcgtcccactccttgtgccccattggccgaatgcaaaggttctctgctagacgacagcgcaggcaagagcactgaagatactgctgagtattcccctttcaagggaggttacaccaaag

SEQ ID NO: 390040 - DNA, 122 bp, Homo sapiens
caccatagccaaaggagtccgctgccggttgttaggcaaccgacgtgtacactgactcggcgccgttcccaccgccccgcgcgcgcagccccgctccccattggccgtccgctcgtcgccgc

SEQ ID NO: 390041 - DNA, 122 bp, Homo sapiens
gagcacagctctacgaacgccggggacagctgctctccaaagagcaaaaggacatcagcccgttagcggaacaagcttcctgtccatgccttaaaagcataactcgttaactgctaaggtgc

SEQ ID NO: 390042 - DNA, 122 bp, Homo sapiens
acattcaggaaacatgttgatgttgctgattgcaacatgctccttacacacaccagtgttcgagcacttgactcacaggaaatgctcctctgtctcaggcagatttcaggcatcaaacaggt

SEQ ID NO: 390043 - DNA, 122 bp, Homo sapiens
acctgtaaactctgctgactccactaatactgcccttcttcccaccccactgttccccaacgctcagaaggaaccatgtttccctgctgccaagaaggattaagtatagagcccttcttggc

SEQ ID NO: 390044 - DNA, 122 bp, Homo sapiens
tgcagggctggtcttggggaggcagggcagcctcgcggtcttgggcactggtgggtcggccgccatagccccagtaggacaaacgggctcgggtctgggcagcacctctggtcaggagggtc

SEQ ID NO: 390045 - DNA, 122 bp, Homo sapiens
ctggtgcctagccaggtacctgtggggacttgcttcccaagaaattaacttcctgggtgccggggtcgggacaacaggttcgtatacaaatactgggtcccttccagccaatcctgagctct

SEQ ID NO: 390046 - DNA, 122 bp, Homo sapiens
cagcattgaattatgaaattcctgtaggaacctctgctccttcctgcaactttatgaagacgttcattatcagagaagcctgaagttactccataggaactttgccaatgaaaataatcttt

SEQ ID NO: 390047 - DNA, 122 bp, Homo sapiens
tggattctgaggacgtggaagaggccacaccacgcagcagaaggaaggaggaagtgtacccggagctgaaaccaggccctttccaaccaccacacctgtcatcaggtgacccagggcatcct

SEQ ID NO: 390048 - DNA, 122 bp, Homo sapiens
acacccccgtcggcaaagggaggacgacgacccccgcttgccggacctagcggacaggaacgcaaccccgccaggctcgcccgcaagggccacacgccgcgcccaggcccccgccccgcccc

SEQ ID NO: 390049 - DNA, 122 bp, Homo sapiens
gcctcctccctcttttctctccagtgaatcacagaacggtactttcttcctgagctcccccgggaagagggggtgggggaaaaggactgtttagaggctcgatctttcctttttcttttccg

SEQ ID NO: 390050 - DNA, 122 bp, Homo sapiens
gcccttgccacgatggaattctgtagctcctgccaaatgggtcaaatatcatggttcaggcgcagggagggtgattgggcgggcctgtctgggtataaattctggagcttctgcatctatcc

SEQ ID NO: 390051 - DNA, 122 bp, Homo sapiens
tattgtacagatattggttgttaaaacagctcaaagcctacaatttcaatttgaaagacccgttcaatggttttgagtagaccaagactatgttaagagagagaaaatgtttttaagttgga

SEQ ID NO: 390052 - DNA, 122 bp, Homo sapiens
gggcttggttggtggagcccgttctctgctgtccttacatggccctgccatgtgtagtcacgcaccagctgtgtctgcagagccacagggttctgctggaaggacagcgtgcagtccgtggc

SEQ ID NO: 390053 - DNA, 122 bp, Homo sapiens
caacaattatacattatacagtatcctgctcatgactacaaaaatgaaaatcatcttccacgtttatagtgtgtatcagtagcaggtgcctcaacacctcaacagctctgactagttttttt

SEQ ID NO: 390054 - DNA, 122 bp, Homo sapiens
ttaccagcatcgcgacgaccttctgcaaatatttttatagggtaaataactgaatgaagtcgctgggcgcatctaaaatttgaataaatgtaatgagatcaacaaacaactaaaaagtaaac

SEQ ID NO: 390055 - DNA, 122 bp, Homo sapiens
ccccaccggagcctgggaagctggggtctcccagagccaagcctgacccctgggagggggcgtcccgggcagagcctgggcctggtgtggccgcgaggccctgctctccgcggggtgggaac

SEQ ID NO: 390056 - DNA, 122 bp, Homo sapiens
ctcgggtcgggctccttagcggtgtattgtgggatgtgcggctactgggagccgagcctccgccgccagccgcctcccgggcagcagcagcagcagcggcggcggcagcggcagcagctccg

SEQ ID NO: 390057 - DNA, 122 bp, Homo sapiens
ctgcagctgcacctcggcgagatccgcggcctcaaggtgagcgcgggccaggtggggaggcgcggcgcggctgggagcggggtgccccgaggaggaggcggggccaggcaaactttccctcc

SEQ ID NO: 390058 - DNA, 122 bp, Homo sapiens
agttgtaaagtacatcaacaaactttgctgctaaaaaacgaaagtgcagtttctttctctcgggcccggggcggggccatggctcctcctctaggaagccgcgcgagcgcagtcccacggca

SEQ ID NO: 390059 - DNA, 122 bp, Homo sapiens
cccgggcccaggcgggtgtaggtcccacgtgaaactgctggagcccggcggagcttcggacgggaatttggggtcagaacaggtccaggtctcaaggcaacccccaactctgtacagtggaa

SEQ ID NO: 390060 - DNA, 122 bp, Homo sapiens
cacaatatgataaccagaacagaggacgatgacagtgagaaatgggtttcttttatggcccgcttggatccctaatgcccttatttctacacaatccagcctcagccaggaactttaaagga

SEQ ID NO: 390061 - DNA, 122 bp, Homo sapiens
ctcctgtgtagtgtatatttatctgtaagtgagccgttggggaaggattgaatacagagacgctgtctgcttgctgccttaagacagctagctgaattgctgattaacttttaaaataccca

SEQ ID NO: 390062 - DNA, 122 bp, Homo sapiens
cccggggctagccagcagcgcggttccggcgcccgccggctccggccaccgccccctccccgcctccagcaccaccccctaagcgggaggaggaagtgcatccagagaaggaccccgggcgg

SEQ ID NO: 390063 - DNA, 122 bp, Homo sapiens
cccgaagcctactccttccgtcctctccccgcccacctccctctcattcctcccggcacgcgcggagagggactgtgattgttcactttacacgtcactctttgtgacgtccccggcggggg

SEQ ID NO: 390064 - DNA, 122 bp, Homo sapiens
tatttaactgcagagatatactttttacattttctacatttaagatgcacacggaatatgcgatgttgtggagaaaagagctatttgccaaatggttacttgttactttatttttctaaggc

SEQ ID NO: 390065 - DNA, 122 bp, Homo sapiens
agctgcatttaagtggactgtctcccagtgacagaggcgggcggctgcacttagctgtgccgtgggcttactcacagggggtggagacaagatgacatcacaccctttcccacacacaccaa

SEQ ID NO: 390066 - DNA, 122 bp, Homo sapiens
gggcgacagagtgagactctctcaccaaaaaaaaaacgtgagcactttcacctcaagagtcgctaggctcagatgctgaatgcaccctgaaggaactctaaagataccagcctctggagttt

SEQ ID NO: 390067 - DNA, 122 bp, Homo sapiens
ccaggttggacaaggttttgacctacaagggtctcacaccaagaacagtgagtgctggagcgctgtccatggtattcttgctttacactattagtctggggctcagttttcaactgtctcaa

SEQ ID NO: 390068 - DNA, 122 bp, Homo sapiens
atacagtataaatatatttttaaagaaataaaccacactgtagtcttaactgaggaggaacgggggaagttgtctttgcttccttggattccaaaactagtcacctaatttcttgtttcttc

SEQ ID NO: 390069 - DNA, 122 bp, Homo sapiens
aaccgggatcccgcggcgataaagaatcactgtgcagaaccctggagctgggagtcggcccgcccccctcccaaagaaaccgggatcccgcgtcctccccgccgctagcgcagcgcgccagc

SEQ ID NO: 390070 - DNA, 122 bp, Homo sapiens
ctcgtccacctgggaccaacgaaaactcggacatgcccctccgccaacccctcagacccccgcctacctgctccccaaatcgaggcccgcgggacacctggactcggcagccggggtcccgc

SEQ ID NO: 390071 - DNA, 122 bp, Homo sapiens
tggcggggattgatctagcgggctcctcttgggtgcgaattaggggaagaaaagtccggccgactactggatagcatggtctgggattgggctcctcctagcctaggcaaaaccagactacc

SEQ ID NO: 390072 - DNA, 122 bp, Homo sapiens
ccatgtgttgtatatctagcacagccgcagccttgcatggaaccggcacctgtgcctgcgcgtggaggtgcccacccgccgcagcagccagcatgcctggctctgcgcagtggctggacccc

SEQ ID NO: 390073 - DNA, 122 bp, Homo sapiens
aggccaaggcgggaagattccttaagcccagaagtttgaaggtgcagtaagctgtggtcacgtcactgcaatccagcccaggtgacagaggaagacttcatctaaaaaaaaaaaagtgatcc

SEQ ID NO: 390074 - DNA, 122 bp, Homo sapiens
tgatcctcttgtcatggcggtagacggtcttgaccttgaaatcgatgcccacagtactgacgaaggcgggagtgaaggagtcgtccgcgtatcggaacaggaaggaagtcttgcccacactg

SEQ ID NO: 390075 - DNA, 122 bp, Homo sapiens
aggcgcgggctcggggtcagggcaggcagtggacgctcacacacagaggacctacagccgcgggctcagggtcagggcggacagtggatgcccacacaacacagaggacctacggccacagg

SEQ ID NO: 390076 - DNA, 122 bp, Homo sapiens
agggcttggcccaggcgcctggtctgcaacccagacgtttggagtcagcagaggcacccacgtccccgcgcgcccgcaggagggaagccggcgcggcaggtgcgctcagcccaggccagggg

SEQ ID NO: 390077 - DNA, 122 bp, Homo sapiens
cggcccaaggacttgaagcccggcatcttccgacctgccctgcccccacccctgcctgagcggagtcctagcatccccttgggagcagcagcgtcagtggacccagtgctgagaaaagcccc

SEQ ID NO: 390078 - DNA, 122 bp, Homo sapiens
aaaggagttagaaagagacagaataagcatttaaaaggcgggtccagaggaccggagcatcggaggcttgctcgcggcccagagctctcgggctccccacaatttattggtttacaagctgt

SEQ ID NO: 390079 - DNA, 122 bp, Homo sapiens
agcctggcctggtgtagtgtgcaggagccatgtggggtggcaggaccagggtgtggtgtccgttccatctcagcctcccagccagaagccctcagaacacccctggtcccatgacaagagag

SEQ ID NO: 390080 - DNA, 122 bp, Homo sapiens
acctctacacaaggatccattgtggttgctcagcctggccctgggctctgccagcccttccggctcccggaaaatgtttcccgtctggcagctcccagagcagcctgtccttggccaagatg

SEQ ID NO: 390081 - DNA, 122 bp, Homo sapiens
tgcctgccttggcctcacaaagtgctgggattacaggcatgagccaccgcacccagcccacgttaaatattaagattccatgcaggcgaagcaacaggagaacctggcaagaacagatgcca

SEQ ID NO: 390082 - DNA, 122 bp, Homo sapiens
gtgcaccttcagctcggtctcccgcgagtggggggcatcggccagctcctcggctgacagcgcgctgtccaggtccccatagagcgagcggtacttcagcagctcctccttcatgctgtcat

SEQ ID NO: 390083 - DNA, 122 bp, Homo sapiens
ggcgtggcgggcgggtgtggccaggggtgtgggtctgtgagggaccggtcggaagggcgtcgcgcggcctcgggtgacatgcggggggcggcgagcgcgagtgtccgcgagccgacgccgct

SEQ ID NO: 390084 - DNA, 122 bp, Homo sapiens
gcagagccgcgccgatcgccatccggcctgggcactcgcgcgcgatcccggccggcagcgcggcccatggagctcgagaacatcgtagcggacacggtgctcctcaaggcccgggaaggtag

SEQ ID NO: 390085 - DNA, 122 bp, Homo sapiens
ggaagaagctccagtaaaagatgccagcgtaggcgcggtcttagccagctgtggccaagccgcctccacctccagttcagggccggggcctttcccgtcgccgcacgcagcaggtgctctgg

SEQ ID NO: 390086 - DNA, 122 bp, Homo sapiens
tatacagctagaagcttcttgtccctcttaagttctgtagaacttcatgtatactctttgcgtccataggaaaactagtagaattcaactaaggtctgtagcatccataaatgggttcttgc

SEQ ID NO: 390087 - DNA, 122 bp, Homo sapiens
aatggagaagagcccaagatggggggcaggatggagagattccagcagggagtccgtaaacgcacacttttggccaagaagaaagtgcagaacattacaaaggaggatgttaaaagttacct

SEQ ID NO: 390088 - DNA, 122 bp, Homo sapiens
aagggaccacgcggcgtccgggaccccgcctccaggaagccctcccggccccgggccccgcgtcacccaggccccccgtcacccgggcccccggccgcgtcgcacagaccccggacggtcca

SEQ ID NO: 390089 - DNA, 122 bp, Homo sapiens
gacgctcaggcgctgacaacagcctccaggtgccgttccctgcgcatggccccatctttgcgggcagtgtccagtgggcttgtgctcacacctgcgctgggggctccacactagacggccct

SEQ ID NO: 390090 - DNA, 122 bp, Homo sapiens
ctgtgaggatcctttctaaagaagcatgacccacggtcactggaggtcctttattctgatcgaatgtgaccaattttatggggcaggagggggacacctcccaagagactccctctggtgtt

SEQ ID NO: 390091 - DNA, 122 bp, Homo sapiens
cgctcgacctcggagcactctggagaccctaccagaaatctagtgctgggggctcctctccgcgcctgccaccagccttggaggaagctgggcagggccccgtgtggtgcccagcctacgag

SEQ ID NO: 390092 - DNA, 122 bp, Homo sapiens
ttcagatcaactttccgtctgtgccaacgttcgccgcgattaccgttctgctgtggttagcgttccctcatccattggggtcgaggtcttgtaggtccatttggggcctattgaagattttt

SEQ ID NO: 390093 - DNA, 122 bp, Homo sapiens
cactctcttcccaattaccatgagcccgttccaaggtccccaggttttctctcgcagcatcggcacccccttgcagccccgctccagtggcgaccgttcgcggaccccggcctcgcttgggg

SEQ ID NO: 390094 - DNA, 122 bp, Homo sapiens
ttatcttctggggccacagggtgctggccctcctgaataaccaaagatagagaattaggacgaaggagggaggaagagaaaattgcaggaaattcaagtcatgggagggaagtggcattggg

SEQ ID NO: 390095 - DNA, 122 bp, Homo sapiens
agaatctggaggagttacttaattcacagggttgtggtaagggactaatgagaatgcagacgaaggtgttttgcaaagaaagtgccataagcatgcgtcactaggaaagctgatgtatgagc

SEQ ID NO: 390096 - DNA, 122 bp, Homo sapiens
acattcaataaatcggggaacttgcttttctccccaagaccccagatggggcctacccatcgttctcgtgtaacaaaacgtgtaaaaaaaaaaaaagaaaaagaaaaaacaaaacaaaaaaa

SEQ ID NO: 390097 - DNA, 122 bp, Homo sapiens
tgcaccgcggagtactcagatcacgtgtcaaggaaagcactaaggtaacacccagcatgacgcgcgtgcaccgcggagcattcggatcacgtgtcgaggaaagcactagggtaacacccagc

SEQ ID NO: 390098 - DNA, 122 bp, Homo sapiens
accttgagtgagtttcccgagactcagttttttcatctatgaaatgcgggtgatgacgcgcggctgcgagttaggactgcccagtacacgaagaaccctggacaaatgtacttttattagtc

SEQ ID NO: 390099 - DNA, 122 bp, Homo sapiens
gtgttctttatagtttgggaatcataaacccatactcttttaaagtggtttctagggtttcggagtcagacctttgacttaactgactatgtctgttagccaaaatggataagaatggcttt

SEQ ID NO: 390100 - DNA, 122 bp, Homo sapiens
ttttttttttttaacagttgggggaaactatggtctggagataaggccccagacctagtccgtggcagatctggttcagaacttatctcaggaaccccacttcagtgatctcattggtcttt

SEQ ID NO: 390101 - DNA, 122 bp, Homo sapiens
ctgctgctctggcctgggaggcggggccggctgcgcggcgtcatgcatatgcatgagcggcgcggcggcggctccattgtgccctcggagcgggcggcggcgcgatggcgcgggtggcggcg

SEQ ID NO: 390102 - DNA, 122 bp, Homo sapiens
acacagagacttattgcgctggcgaagatggctgaggcgaaggcgtgtccgacttgtcctcggagttctgagggtttcagtgaccccagaaggctgagaagtggaatccgaactcgaggctg

SEQ ID NO: 390103 - DNA, 122 bp, Homo sapiens
ctgcgcgcctgtgtgccggtggcggggtggggaccgacggcgacagcggggcggggcattcgagggggcggagaggtcgccgtcctcccgggcggggcgcgcggggtccgccgcccgggggc

SEQ ID NO: 390104 - DNA, 122 bp, Homo sapiens
ggctacctgagatcccttaattctgaaccatccgcacctgggaggggaagttgaaaggagcgctggagctgagcccgcatccttaaggatcccattcactgcttatgatggtagagctttga

SEQ ID NO: 390105 - DNA, 122 bp, Homo sapiens
tccccgccgccctcagctcgaagtcagccaccatggaggcgcaggcacaaggtgagtggtcgccgatcgccccgagagtcaggtcctggggcgcgcataaaggctcttttcctgcaccacct

SEQ ID NO: 390106 - DNA, 122 bp, Homo sapiens
gactccctatcagactcacagtctcaagttagcagctcacagtggataaggcggtgtgagcgctagacctcaaggcctgaatatgatttggccagtgctcttggctcaatccctgctccatg

SEQ ID NO: 390107 - DNA, 122 bp, Homo sapiens
ggaacatgcacccagtttaccatgaagtatttgttcaacatggcccctctcgctgaggaccggactgcactgtctcatttgctgctgtgtctgcagcacctggaatggagcctggcacttcc

SEQ ID NO: 390108 - DNA, 122 bp, Homo sapiens
attagtttccttaagtctgctctagaggaaatagcttaaatcaagaaactggacaagccacgcctcttctgggtctcaaattgtacccatgtgtaaaaccagtgcccagcccatttcactgt

SEQ ID NO: 390109 - DNA, 122 bp, Homo sapiens
atttatttattcctagtagaactaaacatacgtattatacccacctaaaaatatggcaaacgacttacagtgtctttgtgctgaaaatttaaaaaggttatcaaaagacattaaaagactct

SEQ ID NO: 390110 - DNA, 122 bp, Homo sapiens
tctagaacgttccaggcagcagaggctggcagcgtgggtcccacactgccccacaccgtgcggcaggtgctccatggcgccatgacagagtctgaggccagacctggactggaattgacagc

SEQ ID NO: 390111 - DNA, 122 bp, Homo sapiens
ctgctcttctgttacctctgactagactgttccgctgaatcactgaatggcttaatccctcgcttccttcaagtcttcattgaaaaggtgacacttgtgtaaagtcctccctgataaccaag

SEQ ID NO: 390112 - DNA, 122 bp, Homo sapiens
cgcggtggccccacatctggagcctcggccagacggccctgctggcggctggccggggtgcgtgtgcatttttaactctgggatttgctgacaagttaagaagtcagaaagtcagtgacggc

SEQ ID NO: 390113 - DNA, 122 bp, Homo sapiens
gggaccatggaggtactcgcagccattttcccgactcgggccactccagccaatcatcggcgataatactggctgcccatctgcaccaaaaatatctgcctgtcattggccggctcttgctc

SEQ ID NO: 390114 - DNA, 122 bp, Homo sapiens
gggttctgacctaccacagcgttcagagaactacatccgggtttagaggccgtacgtttgcgatatagcccaatagcagtcgttatggtgggggaggcggggcgagacctacgacgccggcg

SEQ ID NO: 390115 - DNA, 122 bp, Homo sapiens
agcgccgcggagccgccaaagtgtctagactggcatatgatgggaggcagccaatgactccgcggcgctcctccgggggccctcagtgtgcgtttgaggagaacaaaaaagagagagagagc

SEQ ID NO: 390116 - DNA, 122 bp, Homo sapiens
acatgagcgcctgttagtatcagtgcctggatagggctggggacaaatcagtttatgccgcgcacaccgaatccatgcgcctgagtgagggtgggtgtgttggggagtgcgtccaagtggac

SEQ ID NO: 390117 - DNA, 122 bp, Homo sapiens
ttatattttcaaggtctaaggcccgttcagggcatgctctctcttctagtcacatttccacgacacaggggacaatgtgctccgctttccctcattgcagtcaggaaacattttctacagaa

SEQ ID NO: 390118 - DNA, 122 bp, Homo sapiens
aggaagccgggactctgggcgcagctctcccggaccacggccacgtcctggctccagctacggaggcagaaagaagccacagaaacctaaaggacaggaggggaaactgagctttccgcgtg

SEQ ID NO: 390119 - DNA, 122 bp, Homo sapiens
gtccacaacccggactgctctgaaatgtgcccggggaggggcagggaggaggaggtaaaacgtttctaattggcgcaggttcttatattacagcagcagggcagacatgtgaccacgaaaag

SEQ ID NO: 390120 - DNA, 122 bp, Homo sapiens
gtgtcctgggcacgtgtcctgtgcacagcccggtgggggcagctggaggggtctccaaggcggcggcttcctgtctcagagcaggatcccccggcatgtgctccagcaggcaggctttgtag

SEQ ID NO: 390121 - DNA, 122 bp, Homo sapiens
agccgcgttgaaagctggcagttggcttttacacttgcccagcagccgaattagagcaaccgcctgtttctttcgcccacgcagggagtcatatagcccagaaaaaacttcccgggactttt

SEQ ID NO: 390122 - DNA, 122 bp, Homo sapiens
acctctgaaggctacgaccagcaacctgacagtcacaaaggcagccaacaaaagctctcacggctttgctccagaatcaaataggagagccaagtgctacttttaagaagcggcaccacgct

SEQ ID NO: 390123 - DNA, 122 bp, Homo sapiens
acctgcggcctaagcagtaacattcacagccaccccaccccgggaaaggaaccgatctcacgcaccttccataaggtccacagatatccgtagaaggagacgcgaagccccgcccaccccac

SEQ ID NO: 390124 - DNA, 122 bp, Homo sapiens
ctgaaccccggtcccgtgactgctgctcccaggacagagcgtttctggttcaatttctcccgaaaccaatgccctcgtcgtcggccggagcagggttggaagaccatgccagcgcctaactg

SEQ ID NO: 390125 - DNA, 122 bp, Homo sapiens
agagctggcttctcagtcaggcaacacctgtccacctggccagccacactgagcctgtcacgtctgtcacaggccctgctcatcaatgaggaaaacgagggtttctgtggtggaaccattct

SEQ ID NO: 390126 - DNA, 122 bp, Homo sapiens
gcaggagccccccccccccccccccgcccgctccagtcctaactccccacggctccagggcgcagggcccatccttgacagcctgagcgctgacttctatggcagccgcaagtcgggctgag

SEQ ID NO: 390127 - DNA, 122 bp, Homo sapiens
cagcaccgcccccgcatcttcacagacattggctcccatgggcctaacagcagccctatgcgggacggtgtgcctctcgtgatagaggaggaaactgaggcaagaggcggtaagtgacttag

SEQ ID NO: 390128 - DNA, 122 bp, Homo sapiens
acggtggactgcaacggcgtggtgtccctcatcggcggccccggctcccacatcggcgggcgtctcctgccagaggtgaaaattgataaggcagctaccgatgacagtgtaaggaagaacac

SEQ ID NO: 390129 - DNA, 122 bp, Homo sapiens
agaaggactcagagaagcgaggtgggtcagagctcggggtcaacttaccgggggtcctttcggtccaggaaacccgttgggaccctgaggtccagggaggccctagagacagaggtgggggg

SEQ ID NO: 390130 - DNA, 122 bp, Homo sapiens
aagagattgtatagatggagacaaaccacacctctggtgctgactcagtgatgtcttttacgtttatgcccttgagtttatgacgctaactggctaaacttttttgggatgaagtaattaat

SEQ ID NO: 390131 - DNA, 122 bp, Homo sapiens
ttacaaatgggaaattcagggagagtccacccaggctgtcttctcctcccagggccatcacgtctctggagttggggcttagccacaggtctctcaagggtcccagagcccacccctgaccc

SEQ ID NO: 390132 - DNA, 122 bp, Homo sapiens
gaccttgaagggcccgagctgctgccatagcgtgaccgaagggacagcctggctgagccgcgtgacactcgacaagccttctttgtgtgtttgatgaagttcctctctgagcaaggccggcg

SEQ ID NO: 390133 - DNA, 122 bp, Homo sapiens
agaattaaatgggtgtctaacacttgcgggtacatgacatagagggatctatggtttatgcggaaagctaatgggggcaggcgggttactcacaggcagagcacatgcttgtggacctgcta

SEQ ID NO: 390134 - DNA, 122 bp, Homo sapiens
tggatccatcaatccaatctggccagcacccaggggcagccagactgaccagccaggccacggatagccagacaataaacgaccttagggtgtccttcgcatcccgctgggcgggttctggc

SEQ ID NO: 390135 - DNA, 122 bp, Homo sapiens
aggacaccctcacctatgctgacctggacatggtccacctcaaccggacccccaagcagccggcccccaagcctgagccgtccttctcagagtacgccagcgtccaggtcccgaggaagtga

SEQ ID NO: 390136 - DNA, 122 bp, Homo sapiens
tcgagaaggtgctttagtctgaagatggcggcctcagcagcgagaggtgctgcggcgctgcgtagaagtatcaatcagccggttgcttttgtgagaagaattccttggactgcggcgtcgag

SEQ ID NO: 390137 - DNA, 122 bp, Homo sapiens
ggggaggggacggcttggggggaagtttaagacacgcccacgtaagggacccaaaataaccgacacacagagtgcccgaaatcagacaggaagccaaataatccggggcgttgagtcgcttt

SEQ ID NO: 390138 - DNA, 122 bp, Homo sapiens
aaaaattagctgggcgtggtggtgcacgcctgcagtctccggaggttgaggcaagcgaatcgcttaaacctgggaggcagaaattgcagtcagctgagattgcatcactggactccagccct

SEQ ID NO: 390139 - DNA, 122 bp, Homo sapiens
gcgcaggccaggaacgctgctgtctggctctaggcctggggcaggttcccgggtgtggggcgctggcggaccgggcatcagtgtgtgttggggcgcgggtaattcgtaatccggggcctaca

SEQ ID NO: 390140 - DNA, 122 bp, Homo sapiens
gtggattaaaaaaaacagtccttgaccacataaggaattaggtctagtagggaagacaaacgtaggtcaataaattacataagggttatactagattgtgtggtggtacaggtggggaagcg

SEQ ID NO: 390141 - DNA, 122 bp, Homo sapiens
aagaaagcattcctgaaggcaattattatgccttgttatttaaccccagctggttgtctccggggaacagagctgacatccattgtgatcatcctcagcttttcgggtgaaacatggttcct

SEQ ID NO: 390142 - DNA, 122 bp, Homo sapiens
cagctcgtccccggtaagacggccgtggcctgtcagctggaacggtcctgccggatggatcgctctttgagagcgtacactcccgcgtgcgcgacaccaggcggcccgtaggttccaggtgc

SEQ ID NO: 390143 - DNA, 122 bp, Homo sapiens
ttagaatctggtgtctgcccctcccccatcctgatgtaacacatctctgtagcctgaagccggcccagttcttggctcagagctactgcgtctgcagcacagatctgtccctgagcacagct

SEQ ID NO: 390144 - DNA, 122 bp, Homo sapiens
aatcagtctctgccacttcataggtgctagaacaaaagagacttgttccaaatgagatgacgcatgtgaagcgcttacccagtgctcggcaaggggaagcactctctaaacgttagcaaata

SEQ ID NO: 390145 - DNA, 122 bp, Homo sapiens
gagacactcagcttctaaagggctgttagggtggcagtgtgatgtacaaaatcactgttacgtggtcccgtctcgtggtgtgtcactagaactcaaacttttaatggctaacttgcttgtta

SEQ ID NO: 390146 - DNA, 122 bp, Homo sapiens
ctctcccgaggccgtgggtgcggatgcgcggctgacgactcgcagcaagagcaccgccgccggccccagcccgcagcatggcagccgccgcctatgtggaccacttcgccgccgagtgcctc

SEQ ID NO: 390147 - DNA, 122 bp, Homo sapiens
cagaaattatcacgcccaaattcctacctgccttccctggattcctggtttcctaagaaacgggtttggcccacccctgggcgttcgaacagtccacagaagcgggcaaaggaaagacgact

SEQ ID NO: 390148 - DNA, 122 bp, Homo sapiens
tgggtaaccacagttgcccagtggataataagtgttgcctctaaggtaaccactgttacacggtggagaataagtgttgcctctatggtaaccactgttacacggtggagaataagtgttgc

SEQ ID NO: 390149 - DNA, 122 bp, Homo sapiens
tggggtatttctggctcccagaggggcagaaaaccctgaaacccgagcagaagctgtcctcggtgccacgcctggagatgggcattaatagcagcctccctcaggcccctgacgcgtctggg

SEQ ID NO: 390150 - DNA, 122 bp, Homo sapiens
cgagaaccaggcgctggcgaggttttactgctacactgagaggaccattgcgaagcggctcgtcttgcggcggtgagacagccacggggcgggcggcgggcgggacgcgggaggaacgcgag

SEQ ID NO: 390151 - DNA, 122 bp, Homo sapiens
taccctgatttgtaacactagacatttttcctgtgttgattttttttgcttgttgatttccgtcacttctctggtcttctaaagttctaagaaagaatggaaaaatctgtcaactacttaag

SEQ ID NO: 390152 - DNA, 122 bp, Homo sapiens
gtctcaagcgatccgccctcttctgcttcccgaagtgctgggatttcaggcgtgagccaccgcgtccaggctttttggcctacttttatcctgggtccccgtccctgggaccatgaggcgca

SEQ ID NO: 390153 - DNA, 122 bp, Homo sapiens
ttgacatgttttcttactgctgaggcttccgacaccttctcccaggccccccctcccggccggagcttggcctgagctgtcaaaaccccgcccccggagacccacaattggtccaaaaagcg

SEQ ID NO: 390154 - DNA, 122 bp, Homo sapiens
acgggcacggccacccggcgcggcgagggcaggggcgtcacctccatacctttctcggcccgggcgcgcttcatcttgtagcggtggttctggaaccagatcttgacctgcgtgggcgtgag

SEQ ID NO: 390155 - DNA, 122 bp, Homo sapiens
cgccaggagcccagagaccccccagcctaaataacaatggcgctggagagggcgtggccgcgcgtacctggggtgggggaaggggagaaaggcggccagttcggatctgagccactcgcagg

SEQ ID NO: 390156 - DNA, 122 bp, Homo sapiens
gatacttgccagtccatatacagtgtccatctgtagggatagactagaattcaggctaaacggagattccctctttcggctgctgcgtgctgtctcagactgtgtatcttgaagcaggatcc

SEQ ID NO: 390157 - DNA, 122 bp, Homo sapiens
tttgccacaccttgagcttagtctagcaggcaagaaaggtgattatatgcctttcccaaacgggtgtcttcagtgcacaccaaacctgggacttgtgggaaggttagacccagcagagaatg

SEQ ID NO: 390158 - DNA, 122 bp, Homo sapiens
cccaaccccgtccagtcacggtgcagcccccgactttatccccagcgccctcctcttcctcgcataactcatgcccccagctgggtcctcctgggtctccctaggggtgactcgggccaggg

SEQ ID NO: 390159 - DNA, 122 bp, Homo sapiens
tgtaccaggttccctagggtgcaggctgtgggcaactgccagggacatgtgcctgcccaccggcctctggccctcactgagttggccaatgggaaatgacaattgtgaggtggggactgcct

SEQ ID NO: 390160 - DNA, 122 bp, Homo sapiens
acagcagatggaagcatttagcaccgtgctgggctcgtcctgggctcgcttatgtgtgtacggctattgtggctgacatctagcattcttctcactggagaacatggaccaatatactcgtc

SEQ ID NO: 390161 - DNA, 122 bp, Homo sapiens
gaagcgcacgtgcgtcagccgcagcagctcgcgcaggtacagctgggggtgaggccgtcacgcgttagttagctccggtcccatgcggcctgctgcccaggaagcccactcccactggggcc

SEQ ID NO: 390162 - DNA, 122 bp, Homo sapiens
ttgttttgttttgtgagacggagtctcgctaattctccctttttaagtatgtaaacttcccgagaagagggagctttcctggcactcagtaaaataattattaagtggattaatgaatggca

SEQ ID NO: 390163 - DNA, 122 bp, Homo sapiens
gagtccagaggagcggaagtagtcagatttgactgagagccgtaaagcgcggctggctctcgttttccggataacgactacagctccgactgtcagtgccggccttcctcgtgtgaggggat

SEQ ID NO: 390164 - DNA, 122 bp, Homo sapiens
cgggcagggagggccgggggagacctggggccgtgcagaggcgggtgggttgagaggcgccgggcgtaggattgattctttgcaggaggcattggtgacacctcggctgagagcccatggac

SEQ ID NO: 390165 - DNA, 122 bp, Homo sapiens
catacctggggactagtgggtggctgtgcggccggaggctttaaagctttgtcttgcatccgcgggccacgctggaggtcgggcgcccgcaaccctgcgccaggccgtcctgggcttgccga

SEQ ID NO: 390166 - DNA, 122 bp, Homo sapiens
gtagtccacttcccagagggccccaacaatgatgggaacggggaatcaaggctaaggcggcgcagaggcttccgggagatgtagttctgaagacaggaattatggccaggcctctaaggctc

SEQ ID NO: 390167 - DNA, 122 bp, Homo sapiens
gagccccgacttcagagtcccagctccaagcccagggccatgcccgtgtctgcctcagatcgccacctgcaacagccggaacgggaacccggcccccaagatcacgtggtatcgcaacgggc

SEQ ID NO: 390168 - DNA, 122 bp, Homo sapiens
taaaacatagatgtaggtataaggtcacaaaaattatcttccttgtccccaatttattaccgtgactcagaattcaccctgttaatactctgcagctccttcaagataaaaaaatataatta

SEQ ID NO: 390169 - DNA, 122 bp, Homo sapiens
cctgccaggcgaagtacagagagcggactctggagaccccctgaccttgcccgatagtcgcgctgtcacctgttcactccttggggtcaggggtcggggagaggggtgagaccgtctcttcc

SEQ ID NO: 390170 - DNA, 122 bp, Homo sapiens
gagacagtacttggaagcagcaaaatgttcccctggacttaacacttggctgactggtcacgtaggggaggaggaggtaaccaggagaaagctcagagagaagcttccagctatggtcacag

SEQ ID NO: 390171 - DNA, 122 bp, Homo sapiens
cttttatatgttaataattatcaacctggcagctctgactcagaggcagtgtcttttaatcgagtgaactaactgcagcctttccgtactcctactccattactcaaaatagaaaatgccca

SEQ ID NO: 390172 - DNA, 122 bp, Homo sapiens
gccaggcacggtggctcaggccggtaaacccagcactttgggaggctgaggtgggaggatcgcttgtgcccaggagttgaaggctgcaatcagctatgactgcaccacagcactccagtctg

SEQ ID NO: 390173 - DNA, 122 bp, Homo sapiens
attatgtaggaatgtaaagatgttgtgatctattgacaaatctttggaaggaattatccccgtggggaccttagaaatcaggaactctgaacaacaaaacaaaaaagtctttggaatttcag

SEQ ID NO: 390174 - DNA, 122 bp, Homo sapiens
tgttttaaactccctccaacagacacaactatacgcaaacgtacgctacaaacaattaaacggaaatacttagcaaccacccatccaggaaaaaactcacggtgctggggagcctcgtgggc

SEQ ID NO: 390175 - DNA, 122 bp, Homo sapiens
caaagctggtgggcagggttgcaaaaggaggctgagtctgtggctaactgggttgtgcgccgcatcagacatttgttcatctgtcctaagagcctgagggtggtggagatgtttgatgacaa

SEQ ID NO: 390176 - DNA, 122 bp, Homo sapiens
ctcccagaaaaagactccttggtctgcaggtggtgctgcagctccagtgccaacctgggccggctggtcctccctcggaggtttgggggtggcggcgcccagcctgcctgtcatgagtgctg

SEQ ID NO: 390177 - DNA, 122 bp, Homo sapiens
acaatgaggggcctgtaggagcaaacaatgggggattcattgaccccactgaaagaaatacgcacaagcaggcgaaccaacccacatcttttttgttgttgttgtttatttgtttgttttgc

SEQ ID NO: 390178 - DNA, 122 bp, Homo sapiens
cgctgccgccgctcagccctggggcctcagtaccctccggtgagggacctgggctcctgtcggtccccgcacagcggctctggcccagcctgcagccctccttgtgcagctctgcgcccgca

SEQ ID NO: 390179 - DNA, 122 bp, Homo sapiens
acaattataacattttcgaacaaagatcgagcgtcttagcagatcatcccttgaacaactcggaggacgtcacctgacaggagggtgcatgtggttcaggaaagcggcaggcagacactgct

SEQ ID NO: 390180 - DNA, 122 bp, Homo sapiens
cgcagctgaaaggaagctgacgccaacgggcttctcagaagaacaatgactcattagtcccgggctcacggcagatgcggtctcccaacaactggcctccctccaaaaacatggaggaaatc

SEQ ID NO: 390181 - DNA, 122 bp, Homo sapiens
aggggtgtggcgagcccggtttcctaggagacggcccgcgggttgctctcggactgagagcgcgaggcttcgggactgagccctagctgctgcgctggccgaagttttctcgtcggtaaaat

SEQ ID NO: 390182 - DNA, 122 bp, Homo sapiens
cctaaggatacttcagtaaacaaaacagtcccaaattcttcccctatggagctttctcggcgaaggcgggattggttaggagctgacaatcggcagcagacgattgtaaatgaccggacctt

SEQ ID NO: 390183 - DNA, 122 bp, Homo sapiens
cagggagagcaggcctgtatggcgagattggcgcgactggtgatttcggtgagtgttgcccgtccagtgaaaacagggagtccacaattcagagctctctgagcatgtgagccaatttcaga

SEQ ID NO: 390184 - DNA, 122 bp, Homo sapiens
aacttccaggtccttgcatattgacaaactcttcttgtatccatcacttgggtttcctatcgagttgtcttcttgggccaattatgtacatttcccatgtgtttttcttggcatacagagaa

SEQ ID NO: 390185 - DNA, 122 bp, Homo sapiens
aagcagaacttcctggcctcctctgggaagtttctaagactcatccaggggctgcccctgcgggtgggggccctccagaggccaaggcccagagaaaggagaccctagtcctttccgcctgg

SEQ ID NO: 390186 - DNA, 122 bp, Homo sapiens
gccccacttcacgggcccgctcgcttccaccctggacaaagtttggccctaatcgctccccgttgtagctctaactggctccagtctcactggcctacatgccccgacaccggcccgatcta

SEQ ID NO: 390187 - DNA, 122 bp, Homo sapiens
gaagggtggcggatggagccgccctctccccaggaccacaggggcgctttccagtgaaggcgccgtaggaaacgccagtctgtgccgcagtgtacgtagaggcgctatgagcccgagtttcc

SEQ ID NO: 390188 - DNA, 122 bp, Homo sapiens
accacagctaagtccagtctgcctagaagcatttgcggtggaggatggaggggccaggctcgtcatacgcctgcttgctgatccacatctgctggaaggtggatggcgaggccgggatggag

SEQ ID NO: 390189 - DNA, 122 bp, Homo sapiens
aggaggaacgaacccagcggccaggagactgcgcctcacgactgatgagagggaaggcatcggtttctaagttctcaaaacttacaggtgagcttctgctaagagtaaacgcccgcggctcg

SEQ ID NO: 390190 - DNA, 122 bp, Homo sapiens
tgtttagtggttctaacaccaatttaaagtctttccacaaaaatgaactccaaaccttttcgtacatcacttgaagttatctgaggagaaatgggaataaatgaacacttttgagtttacta

SEQ ID NO: 390191 - DNA, 122 bp, Homo sapiens
caactcccaggataacgcgggatttcagcagggccaaaagagtgattgagctctgactggcgacccgacccggcggaaaccacctcgacagcctccagaaaggggcgtggctgaaaatgtag

SEQ ID NO: 390192 - DNA, 122 bp, Homo sapiens
gcatagtcctgttctctccggagcgcgcgggggtcgcggggatgggatactgggcacagccgcgctctccgcccgaggtcggcgttcggccacaaagctaccccggagctctgcgccgccgg

SEQ ID NO: 390193 - DNA, 122 bp, Homo sapiens
aataaaaccaccctccagagtgaagcgcagagctctgacagtcaatgttcagtggtcatccgtaaagaaaaggaatagcacaaataagtgagctggtcacttcgccagactttgggtcagtt

SEQ ID NO: 390194 - DNA, 122 bp, Homo sapiens
tcccatgcttcagatgtccccagaggtcctggtccaggctctggcattggacggaagacccgaggtgggaggcaggaagtggtctctgctccttctctgctcccctctgggcaggtctctga

SEQ ID NO: 390195 - DNA, 122 bp, Homo sapiens
ttcacaccaatcgatggcacccagaaaggcctaggatgtgccctgttcaaactctccctgcggtgcagcttaaatttctatagagaaattcgggagacatttggccgcatctgaaagcgcag

SEQ ID NO: 390196 - DNA, 122 bp, Homo sapiens
cgattggccggggagccggaggggcgggcaatttgggatcgacagtgactcgcgactggtcggcgcggcgaaagcagagcggcgcgccggttccttggttcctgagggcgatggcgcggggt

SEQ ID NO: 390197 - DNA, 122 bp, Homo sapiens
atttggatgtgtatactgacttttctgaactaattctgtgaattggttcaaaattgtgtgcgtcatcatggaaaatcctccaggagagagaccctgtccccacagggcatatacatgttgag

SEQ ID NO: 390198 - DNA, 122 bp, Homo sapiens
caatctattgttattttttaagctcagtgagacatcagggaggtcgctgcttgtcgccaccgctggatggagccttgccggatctcccgggctctgcagcccctctgcggtccctgatgctc

SEQ ID NO: 390199 - DNA, 122 bp, Homo sapiens
gcacgattattttattatatgctttataaaaaaacaaacacccaaagacatacaacacaccgccctcaccccccagcggccattagggagggggcttatacttttcctaatgtagatctggc

SEQ ID NO: 390200 - DNA, 122 bp, Homo sapiens
ttacttgtctgcaggacggctggtccgggcccaggccctcctccagcgacacccaggcctcgatgtagatgctgggcagcccccaccactgcaccgggcctgtgcccgccacgatgcccctg

SEQ ID NO: 390201 - DNA, 122 bp, Homo sapiens
gattcagtggataacagaaaataccttcatttccataatttggcccattaaatgacaggacgaagagaaagtgggaaggactgggatggagaggaggaagaggaaaaggccagtatctcaca

SEQ ID NO: 390202 - DNA, 122 bp, Homo sapiens
gagttcttttgcccttttcagtctaagacgtgggctttctgcaaagcctccccctgccagcgagctctcggagcgcggagcctttagaaattgaggggtttactgtcaaaatgaaaatttca

SEQ ID NO: 390203 - DNA, 122 bp, Homo sapiens
gcggctcgcgtttggggcctctttactcctgtcctttcgtccgccaagtttaagtaacttcgaaaatgcacaccaagccacatttcagaaaggactttagcccgctgctttgaataacttga

SEQ ID NO: 390204 - DNA, 122 bp, Homo sapiens
ttgctgtcaccaggagcgctgtcaaagatggtgcccaccacacgcaggcggcagaagcgacgggtctgcaggagctccagcacgtagcggtacagcatgacgccaccgttgctgaagacatg

SEQ ID NO: 390205 - DNA, 122 bp, Homo sapiens
tggccttacgatggcaattggcatcattctccttgctctgttttgcttttccatatagctcgagcaaaattcaaaaagaactaaatatgcaatatatgttcatatctatgggaaaaatctaa

SEQ ID NO: 390206 - DNA, 122 bp, Homo sapiens
atctgcccacctcggcctcccaaagtgctgggattacaggcgtgagccaccgcgcccggccgaggtgatacatttttgatatgagtactacttcagtgatactggcacttcatattacatca

SEQ ID NO: 390207 - DNA, 122 bp, Homo sapiens
gacacgcccagcactgggataggacccgcccgcccagtcctcattaaatatggcagcgagcggggccgacgtactgcggctgcgcaagttgaaactcctcctggcagctcctccccggcggg

SEQ ID NO: 390208 - DNA, 122 bp, Homo sapiens
gtcaaggaaaaccactgggagaacctccctgcttctgctgaagacctgagctgcttctcccgggtcccccagtgctgacaggcctctagcatcaggtccatgtggctgattctggagatctt

SEQ ID NO: 390209 - DNA, 122 bp, Homo sapiens
ttgtatttaacggcataaactccacaagccttacatatgctgcagttcagcacacacccccgagacacagcaccaaataagaaccgaaggaaaaacttgggtgttatcctggtgctcatctt

SEQ ID NO: 390210 - DNA, 122 bp, Homo sapiens
cggtggtagcaatgctgcttacatttgagtgtcttccgtgccccctccatggctcttgagcgctttggatgtacagtatttttcttatttaatctttgtgacaagtctgtaattctattcta

SEQ ID NO: 390211 - DNA, 122 bp, Homo sapiens
gctggaaacgcgtagggcggggcccagacctggatccagctagccgggcggtgtggggtgcgcatgcgcaatgtccgcttcggctctaggaccgcgcgggcgacagcagggccgcggtgcag

SEQ ID NO: 390212 - DNA, 122 bp, Homo sapiens
taatagtggattgtgttgtgaatgaaaagtaaatgtttattattttaagccactaaaatgcggaaatcaactttttagtcagcataccgtaccgaggggtgactaacacatattgcttcatt

SEQ ID NO: 390213 - DNA, 122 bp, Homo sapiens
tcctcctcagggtctactgcagtgatattttcttgagaataagtttttgcctggcatcagcgctttgtaggtatgagtcttcctttcctcttagtgatggttaaatttaggtgtctacttga

SEQ ID NO: 390214 - DNA, 122 bp, Homo sapiens
aagtttggagcttcttagagactggttaaatggttgtgactaaaatgctgatagtgataacggacaatgaagtccaggctgccaaggtctcagatagaaattaggaacttattgggaactgg

SEQ ID NO: 390215 - DNA, 122 bp, Homo sapiens
gcgcgccgggcgccccgggtgagtccaggtcccaagcggacgccgcggggaggcgggaggcgggcagccagcggctcagcctttccaagtttgcaccaggcgaccccggcgggtgtcgcccc

SEQ ID NO: 390216 - DNA, 122 bp, Homo sapiens
ggcgtcacgccgacgtcaagtcgaggccgccgccgcggggcctggttatcgccggttcagcgcagcccggagtcgcccaggcctgaactcctacccaggtccccggcccccgccccgggccc

SEQ ID NO: 390217 - DNA, 122 bp, Homo sapiens
gttaaaaacctgcagcctcccagttctctttaagagtggctgccaagcctccgtgcgtcacggagcagaaagcctgcaaacgatcataacatcccagtgagaattgtttggagactaaactt

SEQ ID NO: 390218 - DNA, 122 bp, Homo sapiens
aaggagaactatagccacagataaaacacatgcgacacgcctcccggcttctctccttctcgggttgtgctgcaccttttaccagggctgcaaaacatgtggcatgcagggcccagctgatg

SEQ ID NO: 390219 - DNA, 122 bp, Homo sapiens
taggcaaaggtacattttccacgaggcatatgtgactgttgaaagtaggggttttgaactcgacctccctaggtcctagtcacagtagtcctccctgattaactccgagcttccactcctcc

SEQ ID NO: 390220 - DNA, 122 bp, Homo sapiens
ggagaccagcgtgggcaacatggcgaaaccccacctctattaaaaatacaaacattagcccggtgtggtggcccaggcctgtgatccaagctactcggcaggctgaggtgggaggatcgctt

SEQ ID NO: 390221 - DNA, 122 bp, Homo sapiens
cacttggcacggtcagcggaacggtgcggctttaggaaacaccacgtagccacagagcgacgggcctggcgtagccactgttgctgtttgacctgactgagtgccctcacctcctggaactc

SEQ ID NO: 390222 - DNA, 122 bp, Homo sapiens
ggaatctaaaggtcgtaccacaaacttcaaaatgtttctcatttgtcacacaaggttcttcgcagaggcatcacatcgaccccaatacaggtccttcatacccttagttctggttattctga

SEQ ID NO: 390223 - DNA, 122 bp, Homo sapiens
ctatgtctttatttaagtgagccaatcaagtccagagaaaaaacagtgaaggcattttcccgacagtgaaagagtggtggatatatagggcattagttacagatgactgagtgttaaaactg

SEQ ID NO: 390224 - DNA, 122 bp, Homo sapiens
ttcccagacttagtttaggaatttactcaggtgtgttttttatggctgggtgatgtccaacggtattccaaggcttagtttttagagtgctagcagggaaacaaaaaggaaaaaaacctctc

SEQ ID NO: 390225 - DNA, 122 bp, Homo sapiens
gtgtgaggcgcgtgttcgggctcttgccgtccccgcacccgcaccgcggttactggcttgcggtccgccgttcgacaaccagcccttgggtccccgcccgccacggacatgccgcgcgtcta

SEQ ID NO: 390226 - DNA, 122 bp, Homo sapiens
gcagggaccccaacccaggctgcgtctgtctgaccgccgcgacccgggacgcggggctttcgctgcctgcgctcccgaccatcgcagagcccgcgaatccccgctcagtctcctgcaccccc

SEQ ID NO: 390227 - DNA, 122 bp, Homo sapiens
atcaccccctctgggaagcatctttggctgcaggagttgccaggccaactccccctcccgcggtgggtaggacatctttagatttccctccctggttggcagctgtgtgatatggtggacca

SEQ ID NO: 390228 - DNA, 122 bp, Homo sapiens
cggctggcggctggctgcgtgcggggccgaagcggcagcagcggagcagggagtccaagtcggagccgccgcggaggccgcgctcgcgggtatataggcggccgccgcgccccgccccccga

SEQ ID NO: 390229 - DNA, 122 bp, Homo sapiens
gctctgaaaccgccaaggatcgcgagcgacagatttgtgttggccagggttttaagatgacgcaatagctgagtgtggttgaaatgtaactattgttttacaactttgcattaaccttccaa

SEQ ID NO: 390230 - DNA, 122 bp, Homo sapiens
tggcggggccggcggagagggagctgcaccgggcggggcactgggactgtggcgggcacccgcgccgggggtcggacggtgcttctgcaccggcgagataagggtcgcttctgcaccgcccg

SEQ ID NO: 390231 - DNA, 122 bp, Homo sapiens
gaaagctttaccaattcaggcacccagtcaggtgagtgacaggcctcgccgaaggtctcccgctcctccagccccagggaggagccaggggcatcgcgcagcccagctccgcagctggtcct

SEQ ID NO: 390232 - DNA, 122 bp, Homo sapiens
gctgtctcggagacttggacagaaagattcgaggcaaatattctaggctgggaaatttcgcgccgagcccccccctcagttagcctgtctaaaggctggtgtggccagagcgaggcagagag

SEQ ID NO: 390233 - DNA, 122 bp, Homo sapiens
tagagaaaaaaattcagcctttcaagtattcaagaaaagcttgaagaaataaaagaaactcgctgctctctgggccactttaggaggcagagcgttcctggagaacttcaggattcattcgc

SEQ ID NO: 390234 - DNA, 122 bp, Homo sapiens
ttttctctttaagcttgtaagccggtacgcattcatgtgagctccacagatggcctgcaccggcagcaggagtctttccgagaagagccttggaatagtgagcagagctgtggctgaccagc

SEQ ID NO: 390235 - DNA, 122 bp, Homo sapiens
accagaacggcttcgtggggtgctcactatcccctggtcatgcttcggcacagctggcaccggctccctgagggcccactgattggttttacacaagtctgtgaagcttcccacaatgcacg

SEQ ID NO: 390236 - DNA, 122 bp, Homo sapiens
tgaacaggtgataccaaaccgatcaataatgttaacttaaaaatgaacagccacacctggcgtctatagtcccaggtccttgggagactgaggcgagaagatctctagagccagtaaatcag

SEQ ID NO: 390237 - DNA, 122 bp, Homo sapiens
attaaaaaatcaaaggaatggaaactgtttacccaaacacgaaagggaggcttttattcacgtgcaccggcggaagcggccggtttgttaaacacctgcccctcagctgtggctggcccttc

SEQ ID NO: 390238 - DNA, 122 bp, Homo sapiens
gtctatatgacacggcgcacacgtgatgtctgtagctgcttgtgtgtgacacgacgcacacgtgatgtatgtagctgcccgtgtccacatgttctgggcatttctgttgtgtgtctccaggc

SEQ ID NO: 390239 - DNA, 122 bp, Homo sapiens
cggccctgcgcaccgggggcccgggaggagcggtctcgggcctgggcatttggtgggcggcggaggcctggctcccggcagaacccttgcgcgacctctttttctcctgttttcgttgtcag

SEQ ID NO: 390240 - DNA, 122 bp, Homo sapiens
ccacgcggatgttggcaccgtgcacccgatggaagcgggtgggagggggctccgggcgctcgagtccccagagtgcacccgaatccacgggctcggaggcagcagccatctctcggccatag

SEQ ID NO: 390241 - DNA, 122 bp, Homo sapiens
aacatcccttgccccctcctctgaatccaggtcctagccaatggtctggacaacaagctccgtgaagacctggagcgactgaagaagattcgggcccatagagggctgcgtcacttctgggg

SEQ ID NO: 390242 - DNA, 122 bp, Homo sapiens
ggccccgtgcggctcccggtcttgttaccctgctgttgctgctgctgcagctgctgctgccgaacagaattgagtttagtgccggcccccactggggaccgggtggccgcgattgtctgtcg

SEQ ID NO: 390243 - DNA, 122 bp, Homo sapiens
gcccgtggcaccccagatgtggcgatgcagctcaacgcgggcgtttttgagtacaacgggcgcagcgggtacctgctcaagccggagttcatgcggcggccggacaagtccttcgacccctt

SEQ ID NO: 390244 - DNA, 122 bp, Homo sapiens
ggtttctacattgtaaacacaacctccgtgtagaccccaacccccaaaaaggcaagacaacggcgtagccaaacagattggtcattattgtacacatagctggaagggaggggtggtcccgg

SEQ ID NO: 390245 - DNA, 122 bp, Homo sapiens
gttggggatgggtgggcaataagtggtcagcctgggaaggcagacccccagctccgtccccgccaggctggactgtgtctggttccccccatcgtgcctgggccctcatctctccttccccg

SEQ ID NO: 390246 - DNA, 122 bp, Homo sapiens
aacctacttcacctcaattgccagaggcgactgtctcattccatagccaattatagttcccgtggatatttttgctgcctctcttgaagggaaaaattatactaataagtcaggattagaaa

SEQ ID NO: 390247 - DNA, 122 bp, Homo sapiens
tcccaacgcccgttctcaccttccctccagccctctcacaaaatgcttccgtttccactccggttataagaagagtaggcattccactgctgaaacttcttagtattctaaacacaatgaag

SEQ ID NO: 390248 - DNA, 122 bp, Homo sapiens
ctcacccttccccccgccaccgtgggttccagacttgggataagtaaacagcgggtggagcgaggcctacggacccaggccaggtgggagtctgcactcttcaaggggcctgggctgctgct

SEQ ID NO: 390249 - DNA, 122 bp, Homo sapiens
agctggagctggcaagtgggtcagggtatggagggtgccttgtcagaatgccaggtctctcgccaatggccagagtgatcactcccaagaaagcccttgatacaattgatccctttcccaat

SEQ ID NO: 390250 - DNA, 122 bp, Homo sapiens
ccagaaataggttcctgagacttggcaaagtaggagccttgtgtgatagtgcgtcagagtcgagactgagagcagtcctggccagggtgttaacaggatggtctccagtgaccggtattctc

SEQ ID NO: 390251 - DNA, 122 bp, Homo sapiens
caatgcagactgcacatcaattatatggtgatccgctccagggaacccgtaagaacacaacgcactgaacagagggaggatgtgggcagcagagaccgcccccacacgacagccccctctcc

SEQ ID NO: 390252 - DNA, 122 bp, Homo sapiens
gagaccagacctacaataaaaggcgagggaggcacgcaaagccaggactggagcgcgggacgggatgagaccctcagcagaagatcctgggccaccgggacaggggcttggagctgaccggg

SEQ ID NO: 390253 - DNA, 122 bp, Homo sapiens
gtagcagaaggagggagcaggagccgaccagacgtgcaagatgcatattgctgggaaggtcgggaaggatgcagagaggagccagggaagccacgctgctatttatcctctctccctctcgc

SEQ ID NO: 390254 - DNA, 122 bp, Homo sapiens
ttttcttacttatttttccacgttaacttcacaatcaatctacctgattccagggttctccggtgttttaattggccccgctgtggcagccggccagcacgagggacggcacctcgtgacgc

SEQ ID NO: 390255 - DNA, 122 bp, Homo sapiens
gctggccggctcggatgcgccagacttcctctggctaagtgcaaaacatgcaaaaaacaacgctgttctggaggaaaagacacaaaaccagagaagagcaaatgctttcagggtgaatttct

SEQ ID NO: 390256 - DNA, 122 bp, Homo sapiens
cctcgcccccacatcaccccgtcgccaccgggagctgcacgagtgcgacacgcaagggagcgcaggtgtcctcgcggtcccgcatcacatccgcaagccgatttccccagctcgggggctgt

SEQ ID NO: 390257 - DNA, 122 bp, Homo sapiens
gctgggcttccacagaccccaggggaacctcgtgaccacctcctgctagcctgcaggtctcggtgtggctgtcaggccctctgggggtccccagcccccagcccaggcaccgtcccagatct

SEQ ID NO: 390258 - DNA, 122 bp, Homo sapiens
aaagtcagggccctgcgggagctgggggcggggaggcgggcaaggaggggcagaaagttccggaagcctctgcatcagccgccccgttcagacaggctgctggagacccctaagccaaagga

SEQ ID NO: 390259 - DNA, 122 bp, Homo sapiens
tggccagaggccagcgggtgggggctcccattggccatcggccataatgcttccattggtcgaaggccagaccagcggagactcccattggccgagggctgtggttcgccgcacggcctact

SEQ ID NO: 390260 - DNA, 122 bp, Homo sapiens
gtggcgcctccacggaggccctctttcaacccaagtgggcctcgcgaacgggggttaggtcgatgagaagcgccaacacctatggctgcacccactgactgtattatcctctgccccacctg

SEQ ID NO: 390261 - DNA, 122 bp, Homo sapiens
agagcaggatgagcaaggagaaaaagacagtagctgtggggcctggagggccagggctgacgtaggtcccagtgatttgtctctgttcatgtgacaagtcattgttaaggtaggaagtgaaa

SEQ ID NO: 390262 - DNA, 122 bp, Homo sapiens
cccctggatggagatctccggacccccgttcgagattggcagcgcccccgctggggtcgacgacactcccgtcaacatggacagccccccaatcgcgcttgacggcccgcccatcaaggtct

SEQ ID NO: 390263 - DNA, 122 bp, Homo sapiens
agggcccctccccacccctgccgacaccttgttccagagtctcagggcgaagtcccgggccggcccactgagatccaaggtatcagtgtctcgtaggcgctgcacgaactcctcggcagagg

SEQ ID NO: 390264 - DNA, 122 bp, Homo sapiens
aagctcctggccaaataaagcccttccttctttaactcggtgtctgaggggttttgtctgcggcttgtcctgctacattataactgtggggtaaaaagacttattaaacatatagaaatagt

SEQ ID NO: 390265 - DNA, 122 bp, Homo sapiens
cagaagctgctcccctgcccttctttcctaggaacctaggaaataactcggaacctgtaacgtcccactggtttggacatattcctctcctgatctggcctcatctgttccagggaggtggg

SEQ ID NO: 390266 - DNA, 122 bp, Homo sapiens
gggtggcaggaactgcctcactcctaggaactggtagatggtgaggttgagggtgtccagcgcccttaggtcattttctcactgcctgggaacctcaccaaaatacttcttgcttccttggg

SEQ ID NO: 390267 - DNA, 122 bp, Homo sapiens
gcccgctctgccaagaggaggagcaggcagagactcccatggcccctgtgcccctgggcccgctgggagaaacttactgcgaggagcacggcgagaagatctacttcttctgcgagaacgat

SEQ ID NO: 390268 - DNA, 122 bp, Homo sapiens
gctgctctacatgacctacatgatgggtgttacctcctcatctcccattcagtcaacccacgggcactggacttcctgcccgacacccttccctctccccattcatgcctggaattattttc

SEQ ID NO: 390269 - DNA, 122 bp, Homo sapiens
gtggccggagctgtggcctgagagtcagggggcgggcaggctcattccagaagtgggggccgaggacaggcgggctagaacccggggccaccgccccctacccctcctcaggctgagggaac

SEQ ID NO: 390270 - DNA, 122 bp, Homo sapiens
catactcgtacaggaggttccggtttcgtttctctgtagtgaaacttctccttggactatcgttggagatgcagcctccccggggccggaacccccgacgagtcagcaaaggccacaagcgc

SEQ ID NO: 390271 - DNA, 122 bp, Homo sapiens
cctagggggaccagggggccaccgggacccagcgcaacctctgtctcgctccccaacccccggaagcgctaacagcacggttcttacgtaatgccgggcttctaagtacccccaacccgcac

SEQ ID NO: 390272 - DNA, 122 bp, Homo sapiens
tccctcatttttctttacagttagcaccatttacccattcacggagaaccttacagttctcgcaacagggtgatcactcagtaagtactgttgtccctttggtctgtttctggcagcgatta

SEQ ID NO: 390273 - DNA, 122 bp, Homo sapiens
cgcgctctgtcccgttggtgaagtagcacatgcccttaaactggaccaagaaatcctctgcggagaatcacggcgggtcagtcaggccccagcacggccctagccccagcccccagccggac

SEQ ID NO: 390274 - DNA, 122 bp, Homo sapiens
tcaggcgggaggcagcaaaccccagccctggctccaggacagggccgaaggcaggatagacggagcaacgggtccggctgccgccgggatgttgcagcacagggcctcctggctgcctggcc

SEQ ID NO: 390275 - DNA, 122 bp, Homo sapiens
tccttggagcaggtctctgtctgttacagacttcactggtctatctcataccaggcagtccgggagtggccgtgtgacacagcaggagcaatacagaataaaatggctccctcagaagaagg

SEQ ID NO: 390276 - DNA, 122 bp, Homo sapiens
agaggccgggccacggccagcatccggacccggggcagcggcgcaaaggccgcgggcaggcggctgacataggctgaaaggacacgagacgccatggctacgccaacccaggatgcactgcg

SEQ ID NO: 390277 - DNA, 122 bp, Homo sapiens
tggcggtaatgccggagctgggactgttggcagatatgggggaggcaaggtgagcgacagcgccccggaagcagttacctgtagtagctcaggagcccgttgctcagcacgaaccatcgccg

SEQ ID NO: 390278 - DNA, 122 bp, Homo sapiens
tcctagttaaattgtaccccacactgagctgtttaaaattcgtaattacaaaggtcccctcgtgacctcgttttaagaccaaaattcaagaatcattatcacccaatctgaaatcactgata

SEQ ID NO: 390279 - DNA, 122 bp, Homo sapiens
cagaatcttctctctccgggggtcttggcacccggcgactgcgaggtggtggttccggagcggcagctgcagcggcagccccgccagcctggttatcacctctggcaaggtttgcagatggg

SEQ ID NO: 390280 - DNA, 122 bp, Homo sapiens
ccgcgagtctccggctccaagatccaccccgaggctgcgggacccgccagatcctcgacccgggagaggcccaggcgcctttaccaggtttcattttccgtttaggccaaaatccccgcggg

SEQ ID NO: 390281 - DNA, 122 bp, Homo sapiens
ttcaagttcatgtgattgataattataaaatggaacaaaaaaaatctgactgaggaaatccgaaatggtgaaataaactcctgagtcttgtctctgtgtgtttcttaccatttcctagctcc

SEQ ID NO: 390282 - DNA, 122 bp, Homo sapiens
aagcccgactgcccctacatggaaaattcatccctcctccagatgggggattcagggcaccgccacttcccacaaccccgggaatctccctggccacagtcctggcgggaccccccccatcc

SEQ ID NO: 390283 - DNA, 122 bp, Homo sapiens
tattatcaccattgtgtctaccctacttggctccagacccggcccatgcctcagcgaggccgcagtgactcctcctggccagcagagggcgccagcggacacttggctaccggccgcccagg

SEQ ID NO: 390284 - DNA, 122 bp, Homo sapiens
gagggcgcggcagatcctgacggagccagaagtgcgcgactacctgcggggcctggtcagcggcctgcgctacctgcaccagcggtgcatcctgcaccgcgacctgaagctcagtgagtgcc

SEQ ID NO: 390285 - DNA, 122 bp, Homo sapiens
gaggaaactgaagttgaggaatagtgaagagtttgtccaatgtcatagccccgtaatcaacgggacaaaaattttcttgctgatgggtcaagatggcatcgtgaagtggttgttcaccgtaa

SEQ ID NO: 390286 - DNA, 122 bp, Homo sapiens
ccccgggtcaggcgggaccaggaagggatcatccttcttttgagggcacggagccaccgtcggagggcctgtgagaagggtgggaagctgagattacattcctattctgaaaatgtcacact

SEQ ID NO: 390287 - DNA, 122 bp, Homo sapiens
ctcaggggaaaggactgtggagttcctgtctttccctcttccaagatccaagggtgctagcgacctttctgtgttcatggtcagaagcaaggagggagaaagaccaggaaccacacagctct

SEQ ID NO: 390288 - DNA, 122 bp, Homo sapiens
agagaactacaggccaacaccatggctcacaaatacagatgcaaaaagtttcaacaaggtcgagcatggtggttcatgtctgtactcccagcactttgagaagccaaggtgggtgggtcact

SEQ ID NO: 390289 - DNA, 122 bp, Homo sapiens
aaaaacaggcgccatcttctcggcgcggtcctactccggactgtatttcccagaggcccccgcgagtccagggcagccccttcatttgcctgctggaccctccgcctcaagggtaggggaag

SEQ ID NO: 390290 - DNA, 122 bp, Homo sapiens
ctagagtggaccggttgaggccagaatgggaccacaccccacctgctgctcaaagaactccgggctggtgatggctgtggaggaggtgagaggtggctggattttgcatgtgttgtcaatgg

SEQ ID NO: 390291 - DNA, 122 bp, Homo sapiens
acagaaggccgcggcctgtcagagccgaggggcccaggcgactgggggattctgaggcaacgccgagggctcggcagggccgcggacaccgccgcggcttggtttgttattgtcgactccgt

SEQ ID NO: 390292 - DNA, 122 bp, Homo sapiens
cctgttgaattcatcacattcaatacatagttctgaatgcctactacatgctaggtacttcggcccaccaaaagaacacagggtgcagaccaaggctggtggaaaaattaaggtgatgaaga

SEQ ID NO: 390293 - DNA, 122 bp, Homo sapiens
ctgagacggggaggttccatcttggcctgaaattctgcttccaagttcatgttgtggggccggggagcgacggtgaggcgtggggtgggggggtggggggatggggggaggccgggaagtgt

SEQ ID NO: 390294 - DNA, 122 bp, Homo sapiens
gtcggggaaggcggtggcgggcagcaggcccgaggcggccaggtagagcagcaggctgagcgcgaccgcgcggtagcggcccaggtacacgtcggccagccagccgcccacgggcgccagca

SEQ ID NO: 390295 - DNA, 122 bp, Homo sapiens
tcatgtgctgggctctgcaccagtggttttcatttccaccctctcatctttccaagtaggcgctacagtcccttttccccacagcgaggctcagggagtttaatcaacatgccccagatccc

SEQ ID NO: 390296 - DNA, 122 bp, Homo sapiens
cctgctcctcaaggcgccgcggcggcggggatgcggcagaaggcagggccaagcggaaggcgtcgtcaaggttcccgggagaaagacgaggaggtggaggaggcccagccgccagcacagtg

SEQ ID NO: 390297 - DNA, 122 bp, Homo sapiens
aggcacatgagtgtgttaagactttaaaacacgctcaaatgtcatgtgcacacccaatgacgggcaagaataattatgaaaaaacaagaaatctatgtctatgaaaccgtgttggacaaaat

SEQ ID NO: 390298 - DNA, 122 bp, Homo sapiens
aaacagtattaatttgaaaggattttgtcatggagtcaaaattcatttgtggttgcatcacggttgtagtagttgtggtgtataacactttagaagcgaaccaggctatggtgtgtagcagt

SEQ ID NO: 390299 - DNA, 122 bp, Homo sapiens
caggaacatctgaagtgcacagcctccaaaggagatagtgttttctctgcgcagaaagtccgcaagggccttgggagtgacaacagatgtgaacaggaggtccatgagagagagctgcccaa

SEQ ID NO: 390300 - DNA, 122 bp, Homo sapiens
aatccttcagcctccctatcttcattaccaaaacaggaggagtcagacaggaaagccagtcgcccccaatggtctgaacaaggggaagcagaaagaggggctgagggccagtgttctcctgg

SEQ ID NO: 390301 - DNA, 122 bp, Homo sapiens
tgggtctccatcatgtgtctttttcaaagctccccagtttgttctccttccaggctaggtcgagaaccatcgttctcaggtagtggttctgacccaggggcatctcccaaagcttccagcct

SEQ ID NO: 390302 - DNA, 122 bp, Homo sapiens
cctgttgctgctcagcaatgcccttaaggggccctgccccctgcctttataaagccggtgcggtggtggggcagccacagctggcattcagcctccagagcaccagcactggcactggcact

SEQ ID NO: 390303 - DNA, 122 bp, Homo sapiens
gggaggagagagaaaataaatatattttggcacagcaataggaagattctcagaggtgcccgtgaggatagatggccatttctggaggcactgcctctattcccagtgctggctgagttctg

SEQ ID NO: 390304 - DNA, 122 bp, Homo sapiens
aagaaagctcaaaggtaccctgcagacactcaaaacttgagggcacgcaactctcagttacgagtggtggcaatcataatgacagaatgaagtaccagtgcaagaaactggaagcgtgtgga

SEQ ID NO: 390305 - DNA, 122 bp, Homo sapiens
cggcccaggcgtccgggcggcaggcggatggtcgagccgggagatcggcgcttgctgcggcgctctgaccctcgctgcttccagccgagcccagtcccgagccgccgccgcctccgccgccg

SEQ ID NO: 390306 - DNA, 122 bp, Homo sapiens
agcaggccccgataccgggaagagccgacacagccacgaaccagacaagcagacaatcagcggacaatcggttctggactcacccctcatccgggcccccagccccgccagagcctccgtgg

SEQ ID NO: 390307 - DNA, 122 bp, Homo sapiens
gctctctcatactttattaattcataagcatctattgagtgcctactttgtgtcaggcaccgttttaggcactaggaatacaaagaaagttagaacccattcctatttcctggaagctctca

SEQ ID NO: 390308 - DNA, 122 bp, Homo sapiens
caatgatcaaggcgaggcggtcaaggacgtaacgctaacggtggagtgtgagtgggggtgcgcagggtgcatttctatctggttcaaggtctggagggtggccagcctccagggaagagtag

SEQ ID NO: 390309 - DNA, 122 bp, Homo sapiens
ccgtgcctgcgtccccacgacccgcagaaaagcacgcggagccgcagcgctaaaaaaagccgttcctttattctgccccaggcaggctgcagtcacagacacacggggaatccactgatggc

SEQ ID NO: 390310 - DNA, 122 bp, Homo sapiens
gcggggggcggcgagcgcggttgctaagctctccaaggcctcggagggacaggatctgggcgcacctcaccggttgccatggtaacgcagcgccccagcccctcgcgctccgcggtggaggg

SEQ ID NO: 390311 - DNA, 122 bp, Homo sapiens
gggaccaggaaaaacgcagactctccagagtcaatgtctacttcagccagctcaagggcgcgacaacctggcgccgagcatctcaggccgccgcggggaccccccctaagggactcgggaac

SEQ ID NO: 390312 - DNA, 122 bp, Homo sapiens
ttccagcccggttttcatcgttgagtcctatgtccatttgtctaaaacctcacccctggccggcagtgcccccttttgaggctttccaccccgcacgccttctttcttctaattcttaggca

SEQ ID NO: 390313 - DNA, 122 bp, Homo sapiens
aatcgcctccagttagcgtgcttccaccttccactcggaatgctccaagcagggcactcccggggctttgtttctatcactaggacgcgtccccacgcccaggctgtccctgagtccctgcc

SEQ ID NO: 390314 - DNA, 122 bp, Homo sapiens
ttcggggcacaggcagcaagtggattctgcgagccagggttcacccccttgcctagtaggcggcgcggcgctccggaatcggggacaccctgccctcgatccgactcgggaaagcagatcca

SEQ ID NO: 390315 - DNA, 122 bp, Homo sapiens
gatggtgcaggggcccggagacaccgtggaagagtccaggggagtgaggaggggctgggccgggcagcctcaggcccagcgcatgatggcgccccctcacgcctgagcagaaatcagccact

SEQ ID NO: 390316 - DNA, 122 bp, Homo sapiens
tgcgggccctgaccgggcgcaggtggtggtgcgagtgagcagcaccaaggaggcggcagccgaggccaaaaagagcgtttgtcgccgtctagattacatcacgcagagcctccagcagcagg

SEQ ID NO: 390317 - DNA, 122 bp, Homo sapiens
gtatgtagtgagagtttgagtcacactcttgcttaagaggatactctatgcattttcagacgtatgactaactgggcaaaaagtttaaagaataaaattcagaataacagtgttcagcagga

SEQ ID NO: 390318 - DNA, 122 bp, Homo sapiens
acattaggggcagcgctgggcctggaaaaaatccaggcctcctgactcctagcctggagccgtcctgtttccttctgtttcttaaaaaaaaaaaaaaaaaaaaagaaattctccagtattgt

SEQ ID NO: 390319 - DNA, 122 bp, Homo sapiens
attattccctctgcacccgggttaactgaaacccggtgggggtagatccttgccattttccggccctgtaccccactggaaataacatgcggtggtcaagggcatccacctctttaggcaaa

SEQ ID NO: 390320 - DNA, 122 bp, Homo sapiens
ttgaagaaatctgcctagtagatgagaaccagttcaccttaaccattgcaaaccagggcacgccgctcaccttcatgcaccaggagtgtgaagccattgtccagtctatcattcatatccgg

SEQ ID NO: 390321 - DNA, 122 bp, Homo sapiens
ggataagcaaaccaattatgatgaaataattgccttacaaaattgcagaaataggccaggcgtggtgactcacgcctgtaatcccagcaatttgggaggccgaggcaggcgcatcacctgag

SEQ ID NO: 390322 - DNA, 122 bp, Homo sapiens
tggccctagtggggcgagggcgccaggccccggggtgtaaggacacacagaggtgggacgcggcgccgggatcagaacggtctggggaagagtggggagatgtccacaccagaagggtggcc

SEQ ID NO: 390323 - DNA, 122 bp, Homo sapiens
gatacaggtcacaaagactttgctgatgaaacagcttgcggcaaagaagccagccaggggcgggcgcggggctcacgccagtaatcccaacactgggaggccgaggcaggcggatcactgga

SEQ ID NO: 390324 - DNA, 122 bp, Homo sapiens
aagtgttccaaaaaattaagaagcaggaagtagaaaagagagaacaatttcagaagcagacgaaaggaacagtaataggaagatctagcaaggatgtggtggggcagtttcagtgtgagatg

SEQ ID NO: 390325 - DNA, 122 bp, Homo sapiens
gaaaaaaaaaaggcccttaaaactctgacctggagcctcccggctcttcctcactgcacccgcaagcgcgctaagggagacgggaggcacaagcaagtcccaaacctttctctgggttttac

SEQ ID NO: 390326 - DNA, 122 bp, Homo sapiens
ctaagcgcaggaagggcctgatctggtggatgaaccacatggccagccacccagtgctggcgcagtgcgacgtcttccagcacttcctgacgtgccccagcagcaccgacgagaaagcctgg

SEQ ID NO: 390327 - DNA, 122 bp, Homo sapiens
gtcagcaacgtcacctccttcttccctaaggacacagcctatgtgctgttttaccggcagcggcccagggaggggcccgaggctgagttgggctcttctagagtccggacagagcccaccct

SEQ ID NO: 390328 - DNA, 122 bp, Homo sapiens
agctctccctgtggtttgtcttttgcagaggaaatcccgcacctggcggcacttggagaccggctcctcgccgagccgaccgcgcgtgcgcggctccctcctcgtccgtgctgagcgccgcg

SEQ ID NO: 390329 - DNA, 122 bp, Homo sapiens
ggattattaatgggtgttattttgctaatagtccgcccctctaatggggactcttcccaccggcctctcctctttatagccccacacgggatcattctgactctcggattccactttctcac

SEQ ID NO: 390330 - DNA, 122 bp, Homo sapiens
agtacctcattcaaaagcacttccttactcccacggaaaagaagtaatcccagaatgcgccgctccacgccggtctctatgcagtgcattctgggagatgtagtcttttttttttttttttt

SEQ ID NO: 390331 - DNA, 122 bp, Homo sapiens
tcctctgaatccctcttttgtcccctgacctcagatccatggccaggtggccaagttgaacgcaggtgcagcctcggcagtcctccttcccctaggcagtgctgccaggctctctccaaggg

SEQ ID NO: 390332 - DNA, 122 bp, Homo sapiens
aactttttagaattatataatgtttaacctggaaagaactttgaataggaaactagggcccggaaaacatgaatgatttgctgtatcagttagtagctaagctgggacttagcttcagaatg

SEQ ID NO: 390333 - DNA, 122 bp, Homo sapiens
cttttaccctgtagcaggctgcatttcatacgcagttctttatgtgagagggtagactgccgcccccttgtgggagagcgctggagggctagacttaaaaatttcacctaccacccccctct

SEQ ID NO: 390334 - DNA, 122 bp, Homo sapiens
gccgacttcccctcctcttccctctctccttcctttagcccgctggcgccggacacgctgcgcctcatctcttggggcgttcttccccgttggccaaccgtcgcatcccgtgcaactttggg

SEQ ID NO: 390335 - DNA, 122 bp, Homo sapiens
ggttggtgagaggaggcccctaaataggaggggaatggaacaaagcaagatccatagatgcgagaagagaaattaatcagaacatgatccctggctccttggagtcttccagacagggcgac

SEQ ID NO: 390336 - DNA, 122 bp, Homo sapiens
gggagagctatggtgttacatgtttaggacccaacatttatgtaactgggggctacaggacggataacatagaagctcttgacacagtgtggatctataacagtgaaagtgatgaatggaca

SEQ ID NO: 390337 - DNA, 122 bp, Homo sapiens
ctctatataggtgttgtccggacactctcttcagacacctacagaggagggccagggccccgaaggtgtctggggaccttgggtccagtgggcctcttgctcccagccctgcggggtggggg

SEQ ID NO: 390338 - DNA, 122 bp, Homo sapiens
cgcaggagcccggggagcactcacagtgccatccatccccccggtagcccgcggggcatacgcacaagtagctgcccaccacattgacacatgtggccagggcgtggcagtggctaagccca

SEQ ID NO: 390339 - DNA, 122 bp, Homo sapiens
tgctgggaggcagggccgggagagcctgacttcaggacaacttgggcctgcggcggtcgccgggaggcccaaccttggcgtggaggagcccaccgaccggagaccatttggggcctggagat

SEQ ID NO: 390340 - DNA, 122 bp, Homo sapiens
aaatgtgtaatagaagccaaatatggagcagttggctgccgccgccgcagctcaaggatccgacttcatgggggtggggggcaccctctggcgggcggcccggcgagccgcacagagcacgg

SEQ ID NO: 390341 - DNA, 122 bp, Homo sapiens
gcctaggcaacatggtgaaacccagtctctaccaaaaacaaagtacaaaacttagctgggcgtgatgttgtgccccttagtcccagctattcaggaggctgaggtgggaggatcacctgagc

SEQ ID NO: 390342 - DNA, 122 bp, Homo sapiens
agtggcactgcagtgtttgcgcgtgtttctgctcctcaatcgcattggtgtggagccgcccgccagtttctcattcacagtgcagggcttctcaaagcggggctgttctcaggcccttgagg

SEQ ID NO: 390343 - DNA, 122 bp, Homo sapiens
cgagtttgacttctttgagaggctccacacatcgcgggtggctagagtctgcaaggtccgcggcctgggcggggggcggggctaactggaggagaaccaatagggagatggcaggggcagga

SEQ ID NO: 390344 - DNA, 122 bp, Homo sapiens
actctgaaggagcccgactggcgaggctgtgtgggctcattccgattgtcgtggagcatccggtacacgtccgactcggggggcaccgaggctgtgggctcgctgaaacacaggcacggcgg

SEQ ID NO: 390345 - DNA, 122 bp, Homo sapiens
caagatgcttcactctgtgtgctggaccgggaggctgcccctggcagctgagcctgcaggcgctctggccaaccacccggggtgagcccagccattcctgccgagggtgcactggcttgggg

SEQ ID NO: 390346 - DNA, 122 bp, Homo sapiens
ttgtgacatcacacaatgccaacacactgacctatgcaaaggatctttcagaagaggctgcggttgtggtagacactctaaagcttcaccatatggaggcgttatagccaggaggcaccttt

SEQ ID NO: 390347 - DNA, 122 bp, Homo sapiens
cagccgggcgtgggtttggatgccatcaatgatgctaacctcctggaagcatgtatctaccgcctgctgaagctctattgccgggagcagccctattacctgaacctgatcgagctcttcct

SEQ ID NO: 390348 - DNA, 122 bp, Homo sapiens
tgtctccgcgcctctccctccacccagtctcagctgcaaaggcccgctctgcgaggagagcgggtgagggggcggacacgctcacacacacagacaataactgccatggaaactaaccaaca

SEQ ID NO: 390349 - DNA, 122 bp, Homo sapiens
ttcaactcatattaacgctaaccaacacttttgtttttaaaccttgcactgtatctaatgcgcccttttttgaggtgtgttgattttgtctttacacatagattaaagctaatttggagaag

SEQ ID NO: 390350 - DNA, 122 bp, Homo sapiens
gtcttctcatcttttcgtccatcactgaaccatctcctctctctgccaagttagaggaggcgggaaaaaacctccaaataactctcttttctccctcccctcccctcgcctccttttcctcg

SEQ ID NO: 390351 - DNA, 122 bp, Homo sapiens
gccccctgagcctcagccaggccccggaggtctcggctacgcccatctatgaagaggtcccgcacacagcccacgtagcctgcccggagtgctgctgtccacacctctgggggcaggggcag

SEQ ID NO: 390352 - DNA, 122 bp, Homo sapiens
atccaattctatggaaaccagcagattttggggagaacaggtagctgccccaaacacacacgcattaccccatgcctcagactgcttggacagtgtggtccaaccagggggtatattactcc

SEQ ID NO: 390353 - DNA, 122 bp, Homo sapiens
tcgccctgcagatcaggtccagcggactgcaggtccagcagctgccactgcagggtggcccgggccctctgctaggtctcccagctgcttccatccaccaggcatcttctcaagacacattt

SEQ ID NO: 390354 - DNA, 122 bp, Homo sapiens
cccagtccctcatagctagatgtgaccttgtgactaagttctggcctatgagaagtaagacgtatctcatggtgttttgagaaatctacttaaaaatgtaacatgacaggaaacagtggctc

SEQ ID NO: 390355 - DNA, 122 bp, Homo sapiens
ccctgggggtcgctgttgagtgccttgctctgcggcgctcaggtggacactgggcaggtgcgccagccagcgataggcaccttggctgctctgtggctccttgaggtgggggtcctcatggc

SEQ ID NO: 390356 - DNA, 122 bp, Homo sapiens
ccctgtggcggcctgggcatcgtgtctgcagtcctagccgggagcctgcagggaggtgcgcgtcagtcctgttctaaaggaggcactggagccttgtccgaggaggcacaggggctgtgtgt

SEQ ID NO: 390357 - DNA, 122 bp, Homo sapiens
gggggcaaaagaccatgctataaaaagaactgttccagaatcttttttttccctaatggacgaaggaacaacacacacacaaaaattaaatgcaataaaggaatcattaaaaaaaatagtaa

SEQ ID NO: 390358 - DNA, 122 bp, Homo sapiens
tctgctcctctgacagcagaaggagcaggaccataaggaaccaaagagcgtggaaggaaacgatgtgacaggaaagctcagagaaccgccacagggggtcgtcagcaggccttccaacctga

SEQ ID NO: 390359 - DNA, 122 bp, Homo sapiens
cccgtggtgcgggccgggaaggccgggtccccacaaagccggagcccgagcacagcggtgcgagctcgccccaggacatcccacagcacccggagacgggggctggtcccccaaaaccctca

SEQ ID NO: 390360 - DNA, 122 bp, Homo sapiens
tttccctgagggaacctgaaacaaagtataagatatgacccttacaggcatcctgcctaacgaagaggacactggggcatttaactgccagtgcccagcagtcgtagttgagtcctgctgat

SEQ ID NO: 390361 - DNA, 122 bp, Homo sapiens
tttctcgccggtgagagaagttgggcaagcatgtggctgctctcccctgagcggtagctgcgtgtcctggctgtaaggacgctgtagctggccaggcgattttgcacggtgcagcctgggcc

SEQ ID NO: 390362 - DNA, 122 bp, Homo sapiens
tcctgacagcaccttaaccacactacatcagtcgatgagactcttttaaagacttccctccggaaagaatgggactgcttcagattctgggcattcatgggcactcagtatccagggataag

SEQ ID NO: 390363 - DNA, 122 bp, Homo sapiens
agaagtcctggaatctcctccctgggcagtagctcgagctacacccatgagaggccacctcgacagtcatgtgatctcactttaagcctcacagtaacctgcacgccagtgagcatcgtgtt

SEQ ID NO: 390364 - DNA, 122 bp, Homo sapiens
cacctgggcctggccgagacccgtgccgagggcctgcaccagctggaggctgaccacagccgcatgaagcgtgaggttagcgcacacttccatgaggtgctgaggctgaaggacgagatgct

SEQ ID NO: 390365 - DNA, 122 bp, Homo sapiens
ggagatctgtaagccactaaggagaaactccattaaattcctaacactttgaattcaaaacgagtctatcatcagtaattaatttatcaaataacagcatcattttactatttgcccttctt

SEQ ID NO: 390366 - DNA, 122 bp, Homo sapiens
cttctggcatttctcgggcatctactatgtgtcaggccctggaggaggggaggactccagcgcagggaggagccgggtctgagtcattacctccacattctcatgccaagtccatagtcggt

SEQ ID NO: 390367 - DNA, 122 bp, Homo sapiens
tcagctcaaatgtcaccttttgagaggctgtccatgatcatcttatctaaagagcttggccgagcatggtggctcatgcctgtaatcccaacactttgggagatgggcaggtcacctgaggt

SEQ ID NO: 390368 - DNA, 122 bp, Homo sapiens
aagcaaagagagaaagggtctcaacagagctgtagttattttctgtaaccaactggccctcgaaaacaactgacatccttagtcagatgctaagcatgtgatgtggaatggccatggctggc

SEQ ID NO: 390369 - DNA, 122 bp, Homo sapiens
tctgcccgcttgtagtacacctgggggccggacgccacggaggtttgaaaaaggggctcccgtggggtggacacgctgcacaggcacctccagacaccccttctagcacccaccagctgagt

SEQ ID NO: 390370 - DNA, 122 bp, Homo sapiens
gatcattgctatatataaaatattgaccagaattagacttataagtgtgacaaatgtaaccgtgttaacagaagttattcttggaagatgggatcacagatagtttcattctttgtgttttt

SEQ ID NO: 390371 - DNA, 122 bp, Homo sapiens
ccctggagctaatgagctgctgggcaggtgcacagactgaggaagtactcttagcaccagcgaaagtcctcagtcagtaaagcagaggtcagaagtggtcaataataactgaccactaagca

SEQ ID NO: 390372 - DNA, 122 bp, Homo sapiens
gaataatgatgcctaaacctgtctacaaaattttatactttctattattagttctctctacgtatgtcttctgcttgtgaagtccagagtaaggactctgacttattttttctttgaatttc

SEQ ID NO: 390373 - DNA, 122 bp, Homo sapiens
agtttgaaacttccgtgattctaataatgctgcatttgctttaaaaatctctggtgcaggcggggatgtgcacattgctgatggtatggtctgacattgagcctttacctttgtgtactggg

SEQ ID NO: 390374 - DNA, 122 bp, Homo sapiens
gcgttccaggtagagcggggagggagagggtgccccttggcgttcgctgaggaaattgcacgcgcctgttgacccagggaaagcgctgagaaagcatctcactcctgatctaactttactta

SEQ ID NO: 390375 - DNA, 122 bp, Homo sapiens
cgggtgggaacgcccgtttctctgggggtcagctactcccgaggctgcagcaccgccctgcgggccaagtaccctgtttgggagctggctactgcggcatccctcacctcatggggccagtc

SEQ ID NO: 390376 - DNA, 122 bp, Homo sapiens
ccctctccaaaaacaaaaacaaaaacttcaaggccatgccgccgcggccatcagtagctccggctcagaatttgaccgttaaaaaaaggaaactaggctgagctagggcacctcagatcccg

SEQ ID NO: 390377 - DNA, 122 bp, Homo sapiens
ccgactgcccacggcgctcctgtaggcagtgttgaaaaggtagttaagacctccaactcccggtggcagggactctacccatttcacagaagcgcaaggatggaggaaatgagtgcatcctc

SEQ ID NO: 390378 - DNA, 122 bp, Homo sapiens
gatgccaccggcctgtgggtctctgaagggacccccccccaatcggactgccaaattctccggtttgccccgggatattatagaaaattatttgtatgaataatgaaaataaaacacacctc

SEQ ID NO: 390379 - DNA, 122 bp, Homo sapiens
ccagggggcggccgggctaccgtccgccattcccgtgtctctgcgcccgcgggggccgcccgagccggccaccatgccgctgggcctgaagcccacctgcagcgtatgcaagaccacgtcgt

SEQ ID NO: 390380 - DNA, 122 bp, Homo sapiens
cggccgctgggcctccctagaggccggcacagctccgcttccgagcgggcctggaagccccgcccgaggagctaaccatttatgtcacactgtgacaattattctgcataaaattatcatta

SEQ ID NO: 390381 - DNA, 122 bp, Homo sapiens
gcagaatcccatgtgaaccccagactccaactctcgtctgactctcgcccctgcaggcctcgactccacacagggcccagggcccagcagcaggaagtcacggtgccgctgcgaaaggcccc

SEQ ID NO: 390382 - DNA, 122 bp, Homo sapiens
caaaagtggtgcaggagggaagggctatctgaggggaaggctgggcatggctggaatacccgccgcccgcccagtgcaagataatgctgatggtcacaccaagaggggcccgtggctcagct

SEQ ID NO: 390383 - DNA, 122 bp, Homo sapiens
ctgccagggtgtagatactgtaaccaacaagaggccaacctccgtcctttctgcggagggcgccgaagcgtcaagtaccccgcagcatctctcggctggagagccgacggcaagggtggggt

SEQ ID NO: 390384 - DNA, 122 bp, Homo sapiens
catgctgtctggttttaaagtgggtccaagaggtgttatctcgcccagggtctttactgccgctgtcactatcagtaaatgacagtaccagtggtgggaccaacagacacattaatccctgc

SEQ ID NO: 390385 - DNA, 122 bp, Homo sapiens
ccagtttacacagctgccaactccttttcttggttcccactggaatctaggaagaaaactcgccctttacttctccgccccacacccgacgacggagtgtctagaggtctggtcggccttgg

SEQ ID NO: 390386 - DNA, 122 bp, Homo sapiens
taagccctgggggcttccccgggccccagccccgacctagaacccgcccgctgcctgccacgctgccactgccgcttcctctataaagggacctgagcgtccgggcccaggggctccgcaca

SEQ ID NO: 390387 - DNA, 122 bp, Homo sapiens
atcgacagggacatctccaggcggacgcgcaggagcgccgctaaggacagcacctggtcccgaggcttgggggtagctgcttcaccttgggcctgaccacctcctggattccagtcaccctg

SEQ ID NO: 390388 - DNA, 122 bp, Homo sapiens
gggtgcctaaggtgagtgcccacttgcgtccgatcctctgggggcgatgcagggtcggggcgcctcagtgtgtctcgctgcttgttctggttgcagtcgggaaatgtgggactttggggtct

SEQ ID NO: 390389 - DNA, 122 bp, Homo sapiens
actccgtggccactaggatagggctgaggagccgccaggggatgagcacgttgtggccatcgggatggggctgagagtctatctttatccttatgcacctgcccagccgacttcctgacagc

SEQ ID NO: 390390 - DNA, 122 bp, Homo sapiens
ccacgcgcttctctccaggacccaggcggcaccgtcgtgggcagccccgggccaacctcacgtgcttctctccagatacaggacaaagctgtttcagaaggacctggtggtggaagatgatc

SEQ ID NO: 390391 - DNA, 122 bp, Homo sapiens
ctgcaatggggaccgaagcagcgccccgaccccgagccaccttctctcctcgggaggcaacgatggcaggagtttcagttaacaatttacagagaaaactcccaaactatgcatacaaagat

SEQ ID NO: 390392 - DNA, 122 bp, Homo sapiens
cagcctctgcccacagaccccctcccgacccaccgtgctttgtaaccactgctcctggcccgggacttggttcagtaggagttctggtcctcagctcctgaccagctcacagcggctgctgt

SEQ ID NO: 390393 - DNA, 122 bp, Homo sapiens
gagcaggagggagggaatgagcaggcacgcagggaaaacccagtaactgctttgcaaacgcgacccctggtcacaataacccaggcgatgggggcagtttcaggttcctggtgggccctgcc

SEQ ID NO: 390394 - DNA, 122 bp, Homo sapiens
gctgttgaagtagccgagccagaagatgaccttgaagacgccctccgatggcttcagctgcgggaacaaggagcctgtagggagcagagaccgatactatttagctgcttggggagggggag

SEQ ID NO: 390395 - DNA, 122 bp, Homo sapiens
gttgcgggctccgcaaagctgggtttctgttaccgagcctaatgccggcattgtgaaactcgcgtgcaaacaccaagattgacatgggcgtcacgtgatggattagggctccaggaaagttt

SEQ ID NO: 390396 - DNA, 122 bp, Homo sapiens
gaagtgccggggctgctcgaggctcagttcttaggactgcaaggaggcagccccggcgtgcggcggtgcgcacagtctagagtggccagggcgcgagagtgcaacgtcctcctggccccgag

SEQ ID NO: 390397 - DNA, 122 bp, Homo sapiens
tgggaaggcaattcagtctctgtactgcatctgttttcatttatgcataagatatgttagcgtataactactattgataaattttaacagggccactcctcctgagacttgctaagtgatga

SEQ ID NO: 390398 - DNA, 122 bp, Homo sapiens
ggagagagatgcggaaacggtcgcagacaaagcggggcgaggttttgcccatgtgcatcccgcccaacccccctgcggggtacttagggccaaaccggagcgggaaggggtgaggccatcgg

SEQ ID NO: 390399 - DNA, 122 bp, Homo sapiens
ctgctgccgcccctgaaagttcctgaaggctctgggccattcagacagaaagggcagcggcggcagcacaggcctggcatgaacgctcatacctcactgctctagaaccttccacacagtgt

SEQ ID NO: 390400 - DNA, 122 bp, Homo sapiens
cggccccgcctcttagggcgggacgtgcaaggcgattggcgaatgcaggcgagaggcggtcgctattggtccgcggcgctgtcggctcggcgggcggtgcccggacgcaggtgccggccgga

SEQ ID NO: 390401 - DNA, 122 bp, Homo sapiens
aaaaggagcattgccattgaccttaatggcccttccaatcagaataactatcatagccagcgtttcagagttggctttcaaattcacactctcactcagtcctcacattcagcgccccaaga

SEQ ID NO: 390402 - DNA, 122 bp, Homo sapiens
tgtgaagatctgcatggaaacaggcaagatggtgttgcttctcaacctgcagaacctctacgagagcctctacgacgcactcaaccagtactacgtccacctcggcggccagaagtacgtgg

SEQ ID NO: 390403 - DNA, 122 bp, Homo sapiens
gtggtgcaaggcaggcgcgttctcggccgtcctgaaggggcaggatcttcagcctgtgggcggtgctctcgccgtgagcggggccaacgggccgtgttctccctgaaggggcggggtctgat

SEQ ID NO: 390404 - DNA, 122 bp, Homo sapiens
atcactcctgaaacctgtgaaacaacgaaccccccggggagaaacgaacaactccagactcgccgcctgaagagctgtaactctcacttcgaaggtctgcagcttcgctcctgagtcagtga

SEQ ID NO: 390405 - DNA, 122 bp, Homo sapiens
cacccaaatactgcgcttttccgacgggcctaaaaaatggcgcaccaggacattatatcccgcacatggctcggagggtcctacgcccacggagtctcgctgattgctagcacagcagtctg

SEQ ID NO: 390406 - DNA, 122 bp, Homo sapiens
cctcctgccaatactgcctgcactgtccccactccctctggctcccatgatcaccagatccgccctgcaggctccctgtcacctgtggggccctatccagaccccctaatccacttgcctag

SEQ ID NO: 390407 - DNA, 122 bp, Homo sapiens
ttgtccccagtgagctggcaggggcgccggcccagggcggggggcgctgctgtatctaaccggatcgattgtgcataaccgtctaggccggttcgtggaatgttcgtggggccccctgcccc

SEQ ID NO: 390408 - DNA, 122 bp, Homo sapiens
cccacctggtgcccttgatctgcaacactcagattttccttttaccctagctgcacttcacgtactaaatcatcatcaaatagtattttctgtgaaagtcacatgcacgttgcctttcacgt

SEQ ID NO: 390409 - DNA, 122 bp, Homo sapiens
agaagaaaaaagttagctggtggtggtagtgcacacttgcagtcccagctactcggaatgcggaagtttgagcctgggaggtcaaggctgcagtgaggcatgattatgccactacagtccag

SEQ ID NO: 390410 - DNA, 122 bp, Homo sapiens
aacagccaaagggattctatgggccatttgcccaagcctccattttacagatgtaaggaccgaggccagagaagggagggatttcctcaagattaccttgtgagagggaggtgcggtcttcc

SEQ ID NO: 390411 - DNA, 122 bp, Homo sapiens
tgtggcacctgctcagcagcctgtgtatagcttatgctttctctactgtcccacaggaaccgtgtgcacctctgcaggatgcagacccacaggggtggggacagcaggaagagcaagagagg

SEQ ID NO: 390412 - DNA, 122 bp, Homo sapiens
gtaaaaggagggttgtccccagcggaggcgcacagccgcgcgttctccctgcactctcttcgcggtcccatctgttccccatggcgtctcatccgcaaacccggatccaggcttacctggag

SEQ ID NO: 390413 - DNA, 122 bp, Homo sapiens
cgacagtgccgtttctcctacctgaagtctcattgggtatcgcactactggaaggggcggcgctgccatgacagagaaggcaataaaactgaaggcctagctcgactaaaagcgcttactat

SEQ ID NO: 390414 - DNA, 122 bp, Homo sapiens
ccgagaaattgtttaaagctcctcctggaaggtcctcacttctacatgacagacatccaccgcgaatccactaggtaaatccatttagctttgtgtgcggggactagggaggccacttcgcc

SEQ ID NO: 390415 - DNA, 122 bp, Homo sapiens
aattgggactacaggggcccgccaccacgccaggctaattttagtacttttagcagagtacgggatttcaccatgttggccaggctggtctcgaactcctgactttgtgatttgcctgcttc

SEQ ID NO: 390416 - DNA, 122 bp, Homo sapiens
gacaagcttccatgtgtgaaagctacttggcatgaatgcctgggccgtaccaagtgtcaccgcagcaagagggggagtcagaagaaaaacagatcagaccagagcagacaataggcccctaa

SEQ ID NO: 390417 - DNA, 122 bp, Homo sapiens
cgttgctccccctcggcagttctgggaggtgatcagtgatgaacatggcatcgaccccaccggcacctaccacggggacagcgacctgcagctggaccgcatctctgtgtactacaatgaag

SEQ ID NO: 390418 - DNA, 122 bp, Homo sapiens
tcggcctctccgctcgggtcactgcgcatgcgcaggaacgcaagctagcgctttggtgtgcgtgttcgtttttccctttgaatggccgtttacggcaccggcaggccccggatgaaagaact

SEQ ID NO: 390419 - DNA, 122 bp, Homo sapiens
tggagatgaagagcggctgagtgtccccgtctaccccaacccgggtattaccctcttttccgtcttctagaaggggaaaaccatgctgttttgaattcaacatatttagattctgaaaatcg

SEQ ID NO: 390420 - DNA, 122 bp, Homo sapiens
cccgcgagtgtccaggaggctggtgacctgccaaggctgggcgggctggctggagaggagcgggagcgcgggcccgggagagacttgggtatcaggaaactcggaggcggggctggggggtg

SEQ ID NO: 390421 - DNA, 122 bp, Homo sapiens
ctcagagacgggatttgaatttggtaagaatagagtcctggttggctcagatcactagatcgtactgtcagaagctcagaaagtcttaattgagtaggaccttagagatggtatcttctagc

SEQ ID NO: 390422 - DNA, 122 bp, Homo sapiens
gcggcatggctcagacgccccggtccgatgggctaggctcatcttagagaagttgcccagcgagccccaccccatgcggccgggaaatcaggcactgcggggggcgccgtgtggctggtgga

SEQ ID NO: 390423 - DNA, 122 bp, Homo sapiens
gccccaagacaggcagatggaggatgaaatacacaggtcccagtccctgaggccaccttacgtgtccggcccccaaccctgtgcagaaggtcaaggcagaggcgccgaggagggatgggagg

SEQ ID NO: 390424 - DNA, 122 bp, Homo sapiens
agctccgcggttgccgcgaagcgagctggagctgaccctcggcgtcccgtgagcaccccgcggatcaacaccttcattgttgtcgtttcagattattatatgaggctgtttagaaaaacatt

SEQ ID NO: 390425 - DNA, 122 bp, Homo sapiens
cagactcttcccgtgggaggccgatgaagcagccctgggggtgaaggtgcctttcctccccgcgactcacgcccccagagcctcctttttccccacccccaacgcggacctccgcggacccc

SEQ ID NO: 390426 - DNA, 122 bp, Homo sapiens
tcactctgtaagtgaagtcgtttggagaccccaaatgcctgcggctgcgtgagagtatgacgttctcaggactcggagggaagtggacttcagccataggcacgcggaaaaccaccgtggtc

SEQ ID NO: 390427 - DNA, 122 bp, Homo sapiens
ttgcgaacacttggcaggaggagtaacctgagcaaaggcaactgtgcagtctttaaagaacgaaaataccaccttaaatacataccatgtgtcaattatacctcagtaaagctggaaaaact

SEQ ID NO: 390428 - DNA, 122 bp, Homo sapiens
ggaccggggcggcagcggccgtagcagcgccagggacgggggcacgcagcagcctccgctcgcccgcctgtcctgacctgcctcgcttgcccccaaagaatgtcagccaagtccaaggggaa

SEQ ID NO: 390429 - DNA, 122 bp, Homo sapiens
caacgtgttgtgtaagtgaacatctgggaggtgggtgactggtgaagggcgggtgtctgtcggtctttgcttgtcagctgtgccttttagatttttcaatggcagaaacccatgagttacag

SEQ ID NO: 390430 - DNA, 122 bp, Homo sapiens
ccggagttccgtgtagtcgcgcatagctcagctgcagtaaggctgtaaatgtttcccctgcggaatcctgggaactgtaggtccaatcgttctaggtagttgtaggcacttccggctcgagg

SEQ ID NO: 390431 - DNA, 122 bp, Homo sapiens
agggaagctctgtttctgtgggctctgcaccagaagacatttaaaactgatcagtgtacgcgcgagagtagccaaagactcagcgcattaaggaggacgctggcgtggggtcagcagggagt

SEQ ID NO: 390432 - DNA, 122 bp, Homo sapiens
attttgttaaaaagccgggaagctcagggccggtgtggcctccgttctggcctgagaacccggactttgggcagcttcttttccttgcctttgggtctccggctttctcagctctgtgaggt

SEQ ID NO: 390433 - DNA, 122 bp, Homo sapiens
gtggttgagcccctgcttcatagttcaggaggccacacccacctccaggaaggggtgctccgtgacatctgagacaccgaggtctgaaaacagggcctgctcccaatcccaggctgcctcct

SEQ ID NO: 390434 - DNA, 122 bp, Homo sapiens
gtcacagcagaaacaagctggaaggtctcggattgatgggctgagacctgccctgagtgtcgggagggagacccgttctcatgcccggcgtcccttccggaagtcccttctcctctctgggc

SEQ ID NO: 390435 - DNA, 122 bp, Homo sapiens
cccagactgaccctcccgtccagcccccgcaggactcctggggccagccctccgcccccgcggctggcagcacccccagcttgtgccgcagctaggacagctcccccaccttgccccggaga

SEQ ID NO: 390436 - DNA, 122 bp, Homo sapiens
catggcagtgatgaaaacctaacagggtggccccctgtgccagctcaggtgactggagcccgagggcctgacaggttcccagcagctgggccggccagccttgcactgtgggggctggtcct

SEQ ID NO: 390437 - DNA, 122 bp, Homo sapiens
attattaacttctcaaccttaatgaaattgttcttttaaaagtcagcagtcagccgggcacggtggctcatgcctgtaatcccagcactttgggaggcggaggcaggtggatcacctgaggt

SEQ ID NO: 390438 - DNA, 122 bp, Homo sapiens
aggttctgggcaggaggtctggggtggtccctagataagcccactcccaggccccacagccgggtccacagaccccacagccgggtccacagaccccactgggctctctgggacgtggagaa

SEQ ID NO: 390439 - DNA, 122 bp, Homo sapiens
ggaggggagtccagtactgggcgtttttaccttagttccttattctgcacccccccaccccgcctcctccttgcctgtgtgcgcccccaccctctttatcccgggggagcgtgactcggcct

SEQ ID NO: 390440 - DNA, 122 bp, Homo sapiens
aggcactcattcagactgacttctacaggacttctacgtgtgtgataaaagcctgtgaatcgtgagtccctgaaatatggtagcctggcccagcttctaaagaggaccttcgtagccacaag

SEQ ID NO: 390441 - DNA, 122 bp, Homo sapiens
tcgaactcctgaccttaggtgatccgcccacctcatctcccaaagtgctgggattacaggcgtgagccaccactcccagccagcaccaccatttgaaagtggtcttttagtgaagaaatgag

SEQ ID NO: 390442 - DNA, 122 bp, Homo sapiens
gagccaacaacagggaaacaacttgttctttcttatttgctgggacattaatagctccaccgagtaatattcatgtcctttaagcagttcggcattctggaaataattggcatgcaaaaatt

SEQ ID NO: 390443 - DNA, 122 bp, Homo sapiens
catttatattcccaccaacagcatgtaagtgttcagagtctacacatcctcaccaacacacgtctttttggtcacagcctcctgatgggtacagagacgtatctcatcgtggctctgatttg

SEQ ID NO: 390444 - DNA, 122 bp, Homo sapiens
gtgctaggccctgtgccaggtggtgattatgggccctattctcaaaggactcctggtctccgtctgtcacttactttagaaacaagtcatctagccagagccagaagggcactggagatcac

SEQ ID NO: 390445 - DNA, 122 bp, Homo sapiens
tgcggagatcatagagatgaaggactccagaggatcgctccggtccgcctggcgtcacctcgcggacaggcggaggcgggacaggtgctgtgtctcttcgcaggatatggttggacccgaga

SEQ ID NO: 390446 - DNA, 122 bp, Homo sapiens
tctctaagggagaagtcactcagagaaaaaaaaagacattgggctccatctgacccaattcgatttagaagagaattgaagaccatctcccctgtgtctgccacccaccctcccccttttga

SEQ ID NO: 390447 - DNA, 122 bp, Homo sapiens
cccgccaacgtgtgcggtaacctagttctatactgactgagatccggctggagaccaagtcgcacgagagaatggttcctaggcgcatcagttttcctgtaaaaaggattatattccacgtc

SEQ ID NO: 390448 - DNA, 122 bp, Homo sapiens
ctggtctcccccagattccaccaactccagcgaaaacatgtacactatcatgaaccccatcgggcagggcgccggcagggctaatgtgagtgggggcttgcaggggtgcttctcgaggcggt

SEQ ID NO: 390449 - DNA, 122 bp, Homo sapiens
tctcagggaacttggaggcttggcacagggacggccagaaccagggttataggaagtgggcggggcctgcacagctacctctgtgatctcatgaggttcaacaatgccttcttggccagcca

SEQ ID NO: 390450 - DNA, 122 bp, Homo sapiens
tgacgcgccgcggcccccgcgcatataagtgggcgcgtccgcgcgtgcgcaccccgcgcgcgcctctctgtcgtggcgcggcttcccgcggtcttctctgcaaatgggctccgtggcctagc

SEQ ID NO: 390451 - DNA, 122 bp, Homo sapiens
gagaagcagttatttttaattgcttaaaaagccgtttcattttagaaaattttaaatatacgaaaagagagagagaaatgttactataatgaactcccttgaatgttattacccagtgccaa

SEQ ID NO: 390452 - DNA, 122 bp, Homo sapiens
acgccagatacaacatacgtcaaaagcctatcttgttctaagcgggcagccatccaccggcgtctacctaccgaagccatttctgctttttaccagcgacgctggaacagtgttattgtggg

SEQ ID NO: 390453 - DNA, 122 bp, Homo sapiens
taagcacagtcttggcgcagcggcggggcctggtggggcgtggctcggtgagggaggtctcgcttgggggcgtggtctcccccagtaggcggggcttggtgccgggggcggggtctggcggg

SEQ ID NO: 390454 - DNA, 122 bp, Homo sapiens
acagctaggcgcgtcacgaggctctcaaacattttaataatttttagacgccgtgacctgcggttcacctctctcccagcctcccccacgagcaggcagttactataatatgctcgcgcagt

SEQ ID NO: 390455 - DNA, 122 bp, Homo sapiens
acacaaatctgtggtctggacttgctatctttgaggatcagcaaagaattgtctggctcccgggatgtttttgtgctgcaaagcagaaacacagttctgggtacttctccattttgtcctgt

SEQ ID NO: 390456 - DNA, 122 bp, Homo sapiens
atcacgcccaactcgagtagtgggggggcccgctctcttttgacagacagccctgaggagcgtgctcactgctgagaatcacggaactacagaatttgtgaactggaagtgaggtgctatta

SEQ ID NO: 390457 - DNA, 122 bp, Homo sapiens
aagactgtctcaaaaaataataatcatatttaaagagattacagattcttgacaatcacccgcatttcacccacatcttcttgaggttattctcgtatcttcttttttggtgaagatctagg

SEQ ID NO: 390458 - DNA, 122 bp, Homo sapiens
acacgggtgcgatcgcaggcagaagcagtacgggggaacttaagagggggactgtcaaagcgagaaatagaaaccaagaccaggtgaagagcaagagtggaatacagggagggggcggaata

SEQ ID NO: 390459 - DNA, 122 bp, Homo sapiens
tccagggcccaggtcagctctgagcggcccctcccaggccttgccttgctccgagtctcacgttcagtggcgtcgtcgagaagaaccgtcttgcctgttgctatgcacagcgtgccaggacg

SEQ ID NO: 390460 - DNA, 122 bp, Homo sapiens
cggccttcgagcgggagagatgataccccccgagggccgggcctggtccggctcaggatgcgtgccctgtgaaaatgctcagcagccctcgcctttaggagtgctcaggtccagcatgaatc

SEQ ID NO: 390461 - DNA, 122 bp, Homo sapiens
cggggctcttgctgccactcccaacccactgagccctgcctcctgggatcccaccccgggcgccagggatggcagcagagcgacctttctcggccctgtggacagccgctcctcctagactc

SEQ ID NO: 390462 - DNA, 122 bp, Homo sapiens
gacacgaaaattaacaaggaccttctatttctctcatgcacacagcagccttgacaataccggctatttttaaaactgaaattgcacagtactggcttctcacactaatttgttttttccaa

SEQ ID NO: 390463 - DNA, 122 bp, Homo sapiens
ggagtttggaagccactgccttcgcgaggagcgcggcagccaaatgcgcagcccagaccgcggccccggagggagccccgggaattttgtttctaggccccctacttctagcaccctccgct

SEQ ID NO: 390464 - DNA, 122 bp, Homo sapiens
gttgtggtgtcccacagtcacgtcacgtcatcgcactgttgcacggccatgtcctgtaggcgtgttgcatattctcgcatcatgttgtcttagggtcatgtgtcctgtacccacgtcacagt

SEQ ID NO: 390465 - DNA, 122 bp, Homo sapiens
ctgtccttcctccctgatggtttcagagatccaaatgggacaatagacactacagggcatcgttgattacaaacagctgtgaagttggaggggttactgtcgccctgggtactttcacagaa

SEQ ID NO: 390466 - DNA, 122 bp, Homo sapiens
gatcctgtgtccagcacaggagtacgtatctggcttagcgaatatggggaggggggaggccgtagggagcaaagagaaagaaacctgttgacttcactggaggcctcagagtggagtgtggg

SEQ ID NO: 390467 - DNA, 122 bp, Homo sapiens
ttgctagctgtgtgacttgggcaagttattttaccttcctgagtccccgtgtccttatcgcgaaagtgggacaacacccactttataaaattggtgtgaggaagcaataagcacaaagccta

SEQ ID NO: 390468 - DNA, 122 bp, Homo sapiens
ttctttcctgccacacccgcttctgggctataaacaccacaagaacaggaaccagatgagcgttcagaccctggatcctccccatgggcagtcctccttaaacactggatgaataactgaga

SEQ ID NO: 390469 - DNA, 122 bp, Homo sapiens
taagcaatgacatgcgagctccagcaccgcgtctccccggtaggatgctcactgcgctagcgggaggggaccgttaagtattttccggaaccgtttatcagctcggccttggacatatgtcc

SEQ ID NO: 390470 - DNA, 122 bp, Homo sapiens
acacctcatatacacaggcatcagtactttcaaactgctgagtaaacatcttcttttctccgtcttcattctctgatttcgttatctcatccagtctcatgattttaaatatctcctatatg

SEQ ID NO: 390471 - DNA, 122 bp, Homo sapiens
caactcccatcaccctgcgagcaccagcgccttcagagcgcatcctccgaggggcaccagcgccattgaccaccctgctggccgaagggcccgccttcccgaggccaggcgctcccgcgatt

SEQ ID NO: 390472 - DNA, 122 bp, Homo sapiens
ataaagtggttccattttcatgtcaaatatagccgacttaggggtaaacctggaatttcgcgagctatccaaaagcacatgcattgttctaagtcctctgccatgccgggaaagcctgggtg

SEQ ID NO: 390473 - DNA, 122 bp, Homo sapiens
tctgcccgcctgacctcgtgatctgcccgcctcagcctcccaaagtgctgggattacaggcgtgagccacagcacccggccaaaatggggatcattttacaaggtgagaaataatgtttgta

SEQ ID NO: 390474 - DNA, 122 bp, Homo sapiens
tcggcatgcttggttgctttgggttttctccttgaacgacgggttcctgttggaacctctcgctgagctttgtgaatcaggcgccgcgtgtcagtccgggccccaaaggcgcttctcagtca

SEQ ID NO: 390475 - DNA, 122 bp, Homo sapiens
aagttaagtccctgtcaggcctgttcatctctaaaactgtctggaaagaaggatctttgccggcatctccaaacctagctacagagaggaaggctgggcagcctactcctggggcaggcagg

SEQ ID NO: 390476 - DNA, 122 bp, Homo sapiens
gcccagccgggagggccgagctgacggttgcccaagggccagattttaaatttacaggcccggcccccgaaccgccgaagcgcgctgcctgctccccattggcccatggtagtcacgtggag

SEQ ID NO: 390477 - DNA, 122 bp, Homo sapiens
tataagctcatagcttctgcagctatttcaggtgtctttttgctagtcatgtgaaactgccgcctggaattttccaatctcctgcaaccactttgtattattcttatcttacctccagtgct

SEQ ID NO: 390478 - DNA, 122 bp, Homo sapiens
aacaattaatccggtaggtccaaaactattcctaactcagtagattttttaaaggcatttcgcacagtattgaacaatgctggatgctgtgttgagttttgtccctttgctagttttgagct

SEQ ID NO: 390479 - DNA, 122 bp, Homo sapiens
cgctgagggcatagaagtaaaaacacctggtccctgctctcagttcactgtcttgttggacgagaaaacaataacgataaaagacagtgaaagaaaataacgataaaagacagtgaaagaaa

SEQ ID NO: 390480 - DNA, 122 bp, Homo sapiens
cagcgcctcgccccgaggaatccgccattttcccgccttccacctcaaggcccgacccgccggcttttcaaagccggacccgcccccttgcttgcgggtcggaccatttgtggagacgcagg

SEQ ID NO: 390481 - DNA, 122 bp, Homo sapiens
cacgtcctgctggggctagtcgtgtccctgggcggcttgacggagtcgacggtgaggaggcgtcgggctggctggggcaggaggtggctccaggagtgcctggtgcttccctgtctcttggg

SEQ ID NO: 390482 - DNA, 122 bp, Homo sapiens
tgtgcatgtgtgctagcatgcctgtctctgtgtgtgcgtgtgtgttggggggcgggggggcgggtagccagggggcagcagtttcgtgtaaacccagctgccctgcagcctccgggcggttc

SEQ ID NO: 390483 - DNA, 122 bp, Homo sapiens
acttaaagccccgattggagcttattaatatgaagtagggctttacatatgcagtcccaccggcccagccgcgcagccgattggggggcctctgcccaatcaggagggaggcgacgggaggc

SEQ ID NO: 390484 - DNA, 122 bp, Homo sapiens
tcggcggggctgtaccggaagttgcctctacttccgcccgttccggggcggggcttacttcgcagcgactacttgccgcacttccgggctgccaggcagctgctgtggctccaggatgatgg

SEQ ID NO: 390485 - DNA, 122 bp, Homo sapiens
taactctgtatctatttgcagtgatgtagtgctttgccccgcatttcaaacaccaaaacccgcctggcagctggggggttctttttatttcgttattataaaataactgaaaaataaaaaaa

SEQ ID NO: 390486 - DNA, 122 bp, Homo sapiens
acgtgagaggctgaggtgggaagattgcttgagcctgggaggtccgaagctgcagggagccgtaactcaggcatcacactccaacctggctgacagaatgggaccctgtctccaaaaccaaa

SEQ ID NO: 390487 - DNA, 122 bp, Homo sapiens
atgggttttggcatcagacgtagcttctgaatctgactcctctactaattgttagacacacgattcatcctttcagagccttaatttctctcatttgtaaaataaagatcatttatcacaca

SEQ ID NO: 390488 - DNA, 122 bp, Homo sapiens
ctgacagccgggtgggggcagtggaaggccccccacagcctcagaggccaggctggggtgcggggcagtggggagccctgtgagatggggagagaggggcagagctggcccaccgtagggga

SEQ ID NO: 390489 - DNA, 122 bp, Homo sapiens
tccgtctcaaaaaagaaaaagataccaacacacacaacacacatcaccaaacatcatacgcgtttataaatgggggcgataggaaagggtccagaaaggatttgaaatgacttatgagtttc

SEQ ID NO: 390490 - DNA, 122 bp, Homo sapiens
agcgacgcccgcttcccgcaaccgggagagccgattccggccgctgccctcggggggctccgcatacatctagtagcgccatgaccgcccagcacccagagatctgtccgctctcggaggag

SEQ ID NO: 390491 - DNA, 122 bp, Homo sapiens
ctccgcggcctccccctccatccgcttgaccgtccctctgcaggcctgactcttggctcgcgctgagccaagagggtagaggttatcatcactttggggtgccaaacttgtgttctccattt

SEQ ID NO: 390492 - DNA, 122 bp, Homo sapiens
ccattgcacctgccagggccctggttttcccatctgtgagacaggatagagaggcaggaccgcaggcctcagccagctcgggaatggcaactgctggcactccagtgtgcatcagtatgtct

SEQ ID NO: 390493 - DNA, 122 bp, Homo sapiens
cttaagatattttttaatttcccttttgatttcttcattaaccctttgtttattcaagagcgtgttggttaatttccacgtatgtaatattttcaaattttatcgtattatttatttctatt

SEQ ID NO: 390494 - DNA, 122 bp, Homo sapiens
tcttcagaactttgtgacctaaggcaatttacctaatttctctgagtacaacttccttatcgataaaaaagcacataagacctacattcttaagatgtacattctaaaatgcatggctgctt

SEQ ID NO: 390495 - DNA, 122 bp, Homo sapiens
ctctgtaaccgtcacaggaaatggcctcaccaagcccttgaacgacagcgcatggtgaggcgacagctgggggcaagacaggaggcatggaggtggtgggaccatctcctcttgggggcagt

SEQ ID NO: 390496 - DNA, 122 bp, Homo sapiens
gctctctggagtcactcagtcagcagggttgctgtttctacaacacagcaaggtccaaatcgtaggttgtttttttttttttttttttgagacaaagtcttgctctgtcagccaggctggag

SEQ ID NO: 390497 - DNA, 122 bp, Homo sapiens
agacgcaaggcaggcgctggaggcccgctccagcccctgcctgcccgggccagactccaccgccctccctgcgcgtgtggcctcagaaaatcaacccaaccaggtttcgccgagcccgcctg

SEQ ID NO: 390498 - DNA, 122 bp, Homo sapiens
aagcatgttggaagaaaggttgtgttatctttcccttacagcctagttagtctccgaaggcgatatttttagataagtctttccacagaaggacaatcttcctttaccccagcaaggaaata

SEQ ID NO: 390499 - DNA, 122 bp, Homo sapiens
tattttgcagcctcaggacatgaaccatctgctgcctgaagtcgcttgggatacagcccgcgaagcccgcgacaggttttgggagccggacactccctcccacctgaggcatgggcaaagtg

SEQ ID NO: 390500 - DNA, 122 bp, Homo sapiens
gcagcacattgttttatttgttttgaaggctcagagtttgaggctggtcgtagacacccacgtgctctgactctcatcagcgtaatgatcgacttagccagagtcgtgtctatataaaccac

SEQ ID NO: 390501 - DNA, 122 bp, Homo sapiens
ctcaggtgatccacccgcctcagcctcccaaagtactgggattataggcatgagccaccacgcgtggcctatactatatatattatttagggatagaataatcccttattatgattctaaat

SEQ ID NO: 390502 - DNA, 122 bp, Homo sapiens
ccgcaccccaacccccaccaaagccacctactcttcttctgtgggaggccagtccacatccgctctcacccgagagagatattcagctggatccaaagtgactgatgaagggaaggaaatca

SEQ ID NO: 390503 - DNA, 122 bp, Homo sapiens
tgttcatggatcagaacactttgtaaagatggcagtaattcccaagttgatccacagattcggtgcaacccctatcaaaatcctgtctggtatctttacataagcttattctaaaatttata

SEQ ID NO: 390504 - DNA, 122 bp, Homo sapiens
tacagcacattcccaattatggtgtcctttaaaagaatcacctttgtcaaatcaaagttacgactaaaataatccttagatactttttgtttctgagaatatagtcattgctctaaaatttt

SEQ ID NO: 390505 - DNA, 122 bp, Homo sapiens
aggggatggcaggggaagcatagtgagtcctcgggctgatgttcagcttccaagtgtttccgtaatatccgtcaatgaaagcatctccttttacccacgtagagacaggtaaaaagacagct

SEQ ID NO: 390506 - DNA, 122 bp, Homo sapiens
cagctcaggtacaaagacgaggagaaacccaaagcctcgttcctgtcctccaaaaactcacgcagggatacatttacagggcttgagggggtattcgggccacagcctcagaccagctcctg

SEQ ID NO: 390507 - DNA, 122 bp, Homo sapiens
caaggaaacgaagggacggcggagccagtgcggcgggggccgggtgggaggcggtggcctcgtgctggggacccccagccccggctcgcctttgccgggaaccaccaagctaatttttttcc

SEQ ID NO: 390508 - DNA, 122 bp, Homo sapiens
gcggccgggcggccacggggagaaaaggctgccagcaatgggagcagtgcctgcagagcacgcctccgaccagaggccggatccagaataaagaaggagcctcagactctgccgcaaagacg

SEQ ID NO: 390509 - DNA, 122 bp, Homo sapiens
tgcggctgtaccagccctggctgcctgggtcaacaagagtgccagcccccggtgctcaaccgggctgccaatggggttggagaagacagcaggaagcactctcctaataaatgaggggcttc

SEQ ID NO: 390510 - DNA, 122 bp, Homo sapiens
ggaggcggccagtccgtaggcgtgactttaactcaggaagcacacagagcgcagattttgcggataactggcttgacaagcaggctccccttatttcccattatgggcacttctggggagca

SEQ ID NO: 390511 - DNA, 122 bp, Homo sapiens
gcagaaccaagtctcggtagttaggaagatcttggctccaaagtttaacttgcagcgtcccggccgggttcacagcgcatgggacagggggggcggggcgatgcggaggcggagcggggcga

SEQ ID NO: 390512 - DNA, 122 bp, Homo sapiens
gctgagaatacacggctcactgtattctccactcccggagaagagagcccaactgtgggccggcagggtcagctttcaccctgggactgtgggaagtcatcacggacgttgtgtgtggcctg

SEQ ID NO: 390513 - DNA, 122 bp, Homo sapiens
ggcgacagagcgagcctctgtctcaaaaaaaaaaaagagattttggccttaaggagctcccgaagtagtgaggaagataaaggcttagtgatcataaagcactgtactaaatgtagtgttga

SEQ ID NO: 390514 - DNA, 122 bp, Homo sapiens
ccgaaactagagatctctggggatggagctgcttgggaaggcacacaagcgagtgggcctcgcccaggagggagggcacggttctgggcaagccccatcccccgcctgagacgtgggcagag

SEQ ID NO: 390515 - DNA, 122 bp, Homo sapiens
aattcaattagaggttttactcagaacttggctctgcattctatatgactaacccaagcccggtaacttccatcatgctattataagtacaatatgctattgagaaagtactatgttgcaac

SEQ ID NO: 390516 - DNA, 122 bp, Homo sapiens
tccgtgtgtctgggagccacagcctgtgtgtgccacatggatgaggtgggcacctgtgcacgcgtgctgtgtgggtgaatacagggagcgcgggcctgtggcgatggggctgaggtcctgcg

SEQ ID NO: 390517 - DNA, 122 bp, Homo sapiens
ttttaaaattggtgagatttactacaaaactgtctttccagtttctgttcaaaaatcatacgatacagcaccatcaagtctgcattcttgcatggaactggatggaattgagttgtgtggac

SEQ ID NO: 390518 - DNA, 122 bp, Homo sapiens
gctgtggccgcagctgaggcccgacgagcttccggccgggtctttgcccttcactggccgcgtgaacatcacggtgcgctgcacggtggccacctctcgactgctgctgcatagcctcttcc

SEQ ID NO: 390519 - DNA, 122 bp, Homo sapiens
gttagcaagagagaggcagatcagaaagggatgcagatgaaagagacacaaagaaggaaacgcagaatgggttcacagagacaagaaatgcagatatccagactcaagaggtagacaagaag

SEQ ID NO: 390520 - DNA, 122 bp, Homo sapiens
tggttggaagcacaggctagacaacctggagcttacaattggcatcagaagcggggggcgcgtccgggaggtgaggggcgcctctgcccggccgcccctactgggaagtgaggagcccctct

SEQ ID NO: 390521 - DNA, 122 bp, Homo sapiens
tgtcgactgcctgctgccttttaaaataaagtcacaaacttaaatgctttgtttccagcacgtggctgcgctgtctcaggtctctacgagcaacttccaagcctggacctcctgtaaaactg

SEQ ID NO: 390522 - DNA, 122 bp, Homo sapiens
cctgaaagcctccaccctccactgttttaattccaggtttatctgtccctatggattacacgtgcaccccaatttttgacccctctgtgctaggtcatttgtcctgccccttaatcagccct

SEQ ID NO: 390523 - DNA, 122 bp, Homo sapiens
acttgtccaaggtcacacagccaggaaacagatgccccaattctaattctttgcatgcatcgccctggctctgcttctttgcaacaactcctagataggtgattctcaaacttagctgtatt

SEQ ID NO: 390524 - DNA, 122 bp, Homo sapiens
atgagaaaaagctacgtaactctccaccgcccggtggcgggtcacgtgactgcgtctccccgccctctcaccccgctgcctctaggttctgggaagatggcgaaggtctcagagctttacga

SEQ ID NO: 390525 - DNA, 122 bp, Homo sapiens
aaatgacagccttcttaggagtgtgattttaaatgtcagatgccatataatttgattttccggtcgctgctgtaaaattggcacttggcctcattttaaatctgacaaactatatttggctt

SEQ ID NO: 390526 - DNA, 122 bp, Homo sapiens
gcggcgggagcgcttcccccgcagcccagccgggaaattgccgcccctcacgccgcgtggcgccccctgaggaagctaattagcgcagcccagggagctggagacagggggacagagccccg

SEQ ID NO: 390527 - DNA, 122 bp, Homo sapiens
cgcgtgggccagggctggagctacagcgcagtgcaggacatcccagcgcgccgaaaccctcggctggtgccctaccgcctgctggatgaagccaccaagcgcagcaaccgggacagcctctg

SEQ ID NO: 390528 - DNA, 122 bp, Homo sapiens
gtcggtggggggaggggcggcgggggacagagttgcggggcaagggggtgggggcacaagcgctgacttccgtcggaaatcccggccacttggcgctgaatgtttcaagaccatcttttaaa

SEQ ID NO: 390529 - DNA, 122 bp, Homo sapiens
tccactggagacatttcacagaatggccatatcaacaacatagacaattctgttcgtgtacgggtgctttccgtgaatgtgtgtattacatgttctataatattgggcgcactctgtgtcgt

SEQ ID NO: 390530 - DNA, 122 bp, Homo sapiens
tgcgggcccagagtatctaacgcgtccgagtgcgaacagtgtcagaaggcactgaggcagcgcggttcccacctcggcattgcaggcccagagtatctaacgcgtctgcgtgtgaacagtgt

SEQ ID NO: 390531 - DNA, 122 bp, Homo sapiens
taatcccctccagagctccagagcctgtacacaagaggcgctacccctgttaacaccactcgggactctggggaacctaccaagacggcagaggcacgccccagagacagcaaagcttgccg

SEQ ID NO: 390532 - DNA, 122 bp, Homo sapiens
agaagaccttgatgagttttggaaacatcaataatgttctcctgtgtgggaattttttgacgtgtatttttgtttgccgttgttaaaaattactcattgctgtggtttctctgttcttgctt

SEQ ID NO: 390533 - DNA, 122 bp, Homo sapiens
tccattatgaaaccctctacctgtacaatgaatcctattcatttatgctgtttctaggaacgtgcactatctggtttctccctttcttctccactgctttcttctccttcatcaataacaca

SEQ ID NO: 390534 - DNA, 122 bp, Homo sapiens
acaccattgctgatatacaggcttttggttatctgcgagaggccgctgactgagggctgccggaactgaactgggaaggcacacgagggtgctgtcatcaaggcggtgggtcagtggtcagc

SEQ ID NO: 390535 - DNA, 122 bp, Homo sapiens
ggaataggtggggctgcctggaaatgggagcaaaccgcgcccggggctggaagcacccgccgaatggcacagggccagtgcccaccacagtctcagtggaggtgacggactgaaagaatgac

SEQ ID NO: 390536 - DNA, 122 bp, Homo sapiens
cgtccaggtcgtggcagtacttgatggccaaggaaagctggtggaacttcttgcgagcttcgtcctcatgcagggctccccgggttttgattaactcgaggaggtcgccctggaccgcgagc

SEQ ID NO: 390537 - DNA, 122 bp, Homo sapiens
ttagcaaacatttgtggtgtctacatatggtgctatgcaggagggaggaaaatataccagcggaataactgaattttaacattgcaacgatttcagatatcacctgtggaatccttttattt

SEQ ID NO: 390538 - DNA, 122 bp, Homo sapiens
ttaagagattactcattttaatgggtatggcaataatgccaatggttgtgtgtagaataacgtcgttattcttaggagatgcatgttgaaatatttagaaatgattttataatgtgttgcaa

SEQ ID NO: 390539 - DNA, 122 bp, Homo sapiens
tcacaactagcttataaagaaggtcctctttgtatgcccatttcacatgtctaggaagatcgagttcagtatgtggagctgtgattctaatgtcatgcagtctgcctttagagcaaaaatgc

SEQ ID NO: 390540 - DNA, 122 bp, Homo sapiens
aactggtctgatcggacttctcgtcctgggacactgtttactggagtctggccggctctccgtgctcctcttggtacctcattttggggagaaccttaaacccactcgagcagataatctcc

SEQ ID NO: 390541 - DNA, 122 bp, Homo sapiens
caaaacccaaggggggtcagtggccccccatgcactgagctcactgggtctccctgcgcccgtgtctggagtcatacacaatgctgttattttactgcctaatttcaaaatgcacggctgca

SEQ ID NO: 390542 - DNA, 122 bp, Homo sapiens
ctgtctttagcattgctcctgcctcttgacctacttaccttttcaaggagccaatggtgtcgtggggccaggccctggccacctgctctgaatcattgaggaatttcagccgtagcacgagg

SEQ ID NO: 390543 - DNA, 122 bp, Homo sapiens
aactgcacatttaaaataaataattgctttcactggaggttgtagcaaaaaagtgaattccggaaatgcctatgtggacagtagcaacccaccctcaggctgagaatacttgctggctcttt

SEQ ID NO: 390544 - DNA, 122 bp, Homo sapiens
gatctgacgggacaagtgctctgctgaggggctggcattgcaccgcggaggtgagggccccgggctctgggtgggggagcagggcttggtgctgctgtttaccagctgtgagaccggggtag

SEQ ID NO: 390545 - DNA, 122 bp, Homo sapiens
ctttcccctcggtggcggtcacgttcacttacgaaatcacccacacccacttgaagggtgcggagatggccgggatccaagcgcccgggaggcctggggaggagcgcccggggaggagcgcc

SEQ ID NO: 390546 - DNA, 122 bp, Homo sapiens
aggtccattgggtgaactggctgctcatcattctctgtgctgcttctacaggttaatacacgctgatcttctcatccattggtcaaaactggtgctaatctgaaactcctttttttattgga

SEQ ID NO: 390547 - DNA, 122 bp, Homo sapiens
tgcagttcatgatagtgttcctgttcctagagaatctaatgcccctgctgatctgacaggcggagctcaggcagttatgcttgcttacctcctgctgtgcggctgcttcctaacaggccatg

SEQ ID NO: 390548 - DNA, 122 bp, Homo sapiens
taggtggaggtgattgctgagcatggcatacaaatacgatgaacacacttttcctgataccggaattcccaacattggaacctgtgtgcccctttgtttttatccttgtatttgtgaattaa

SEQ ID NO: 390549 - DNA, 122 bp, Homo sapiens
tgggaaggagctttgtttcattgctctggcaacaactcgggggtgcaggagagaaccaggcgacttagagctgtgtagtgactcctttttcggtctatgatcgctgttctccccagggtcct

SEQ ID NO: 390550 - DNA, 122 bp, Homo sapiens
ttgcagcagtttctgaagttgcagatggcacagacgagcacagatgcccctcacccccaacgccagggcgcccagtgcccctcccggcacgcctacctcctgcgccgggaagaggtccctcc

SEQ ID NO: 390551 - DNA, 122 bp, Homo sapiens
tcactggagatttgagggctcatcaccaaatccagaggtccaggtttcccagtacactcacgatttctgggaagaaactgtttttaggattgccattaatgtttccaggcccttcccatttt

SEQ ID NO: 390552 - DNA, 122 bp, Homo sapiens
gctagtgactaggaagacacagggagcctgaaagattctcacctcatgtctggggagcagcgcttcaaagaaactgaagttaggggcttcccagctctcctcttcagctcagtatcctcttt

SEQ ID NO: 390553 - DNA, 122 bp, Homo sapiens
cccactgagtcctcaaacccaagaacgccggcgacttcacacccctgaagcttaccattgcgaagctcggagaatagcagcagacaccgcagcctcgtcaagatgtcggacaaaaaggaagc

SEQ ID NO: 390554 - DNA, 122 bp, Homo sapiens
caggagagtttgccagtagctccccagggttccagggtgtctgccagccttcctaggaatcgtgggcaggcttctaggtgccagtgactcaaactcctttttccacttcccagttcaacctg

SEQ ID NO: 390555 - DNA, 122 bp, Homo sapiens
gggttctgcgcaggcgggcagcccaccctcagggaagagtcacgggaaaggggctcagaacgccggaggtggaccagcgtataaaatcctagggaccaaggttaaacaccgcccttgacctt

SEQ ID NO: 390556 - DNA, 122 bp, Homo sapiens
ccagaccccctcgggagctgctgccaggccaggacagtgtctggcaggcacctgaagtcccgccctgcgcggggctggttcccgaggccgggttgtccaggtcgcggtctggcgtgagtcct

SEQ ID NO: 390557 - DNA, 122 bp, Homo sapiens
tgggcgaacaccaaagcttccaactgttcccttccctgggtggcggcagctgcccaaggtcggcttccgggctggtctctgtgctcctgagcagggggaccagattcagtttcagaaagaga

SEQ ID NO: 390558 - DNA, 122 bp, Homo sapiens
ttcagtcaacaaaaattaatttagtccctacaatgaaccaggtatcccctcatatgctcacgtgcctgacattctagaagcttcacaagaccaaggtggagccactggagtgttttaggtgg

SEQ ID NO: 390559 - DNA, 122 bp, Homo sapiens
ggtgctacgggacctacccccgtggcaaggaagagcaaacccgaacttgcgcacacccggcggccctgtctgaaagagccaccccaacttttgttttgtaaaatgtatgagttttcaaatga

SEQ ID NO: 390560 - DNA, 122 bp, Homo sapiens
cccagctgggacgctgagagcagtaggtggggaggggtgactcctgggcaggctgaagcccgggatgctaaagtacagcctcccaacctgcgggctgcagtacacaggtgggtgagaaggag

SEQ ID NO: 390561 - DNA, 122 bp, Homo sapiens
cctcattctctgcatacaggtcctcatcctgaaattctagtctcctggacttgaaactcccgggaaatgtggagaaaagggtggatttgagaggtgaatgcaaaaagaagggaagaagaatg

SEQ ID NO: 390562 - DNA, 122 bp, Homo sapiens
ccaggctggtctcgaactcctgacctcaagtgatccttccgcctcggcctcccaaagtgccgggactacaagcatgagccaccacacctgggcaagactttctttgactaatcaccagtggc

SEQ ID NO: 390563 - DNA, 122 bp, Homo sapiens
acagatcatgacaacagtaaacattcatttagcgcctgcttcttgccgggaactattccacgtgctttagatgtgtcttgcgtcgctcgatctctcaccagccctgtgtggtagacgatatt

SEQ ID NO: 390564 - DNA, 122 bp, Homo sapiens
aaggacgactctcagggtagaagtccacatttcccaacaggcgctcgggggtacgagattcgttccccgtgggaagagtggtcaagggcttcccagtagtcgtcaacacttccctttgagtg

SEQ ID NO: 390565 - DNA, 122 bp, Homo sapiens
gggccctgccgccagtctggactctgcgcgctctcgaaccacgcccgccggcccagctcgcgccgcagcgcactccacttccggctcggcccgcgtcctcgcagctgctacgcaaccgcaca

SEQ ID NO: 390566 - DNA, 122 bp, Homo sapiens
catctccctgctactaacacagaaactgcaagagggccgggatctttgtcactgtcatgccgtgaccctaacacttagtgcagggcctgatttgcaggaggtgcccagtgaagaaagccttg

SEQ ID NO: 390567 - DNA, 122 bp, Homo sapiens
tccccgcccaaatctcatgttgaaatgtgatcctcattgttggaggtggggcctgagtcacgggagaggatatctcatgcgtggtttagcaccattcctttggtgctattctcgtgacggtg

SEQ ID NO: 390568 - DNA, 122 bp, Homo sapiens
ccacctccctgcccccgccaggtctggaccctgggcactgcagggactgctctcagggaacggcctggccactgatctgcttcagggtgagcatgtttcacagccacctgggtcaggaagcc

SEQ ID NO: 390569 - DNA, 122 bp, Homo sapiens
ccacctccatgggctcccgctataattctctgctggatcccaaggagaggtaacagcagacgcgcccaaacctgggagccttctacagaaaagcagtctccttcctaagtgtcaatgatgtt

SEQ ID NO: 390570 - DNA, 122 bp, Homo sapiens
gcgctgctgcccacccagcggggcctgacacctcctagccccagactccccgtgcgctttcggcccggccagtcctttctgaatatgcgattcctgagacgttagcgtatgcattagcgtga

SEQ ID NO: 390571 - DNA, 122 bp, Homo sapiens
agctgccccagaatcatccatggagcattgcaagcaggcagccgcccaaggcgatgtccacgtgggaggtctgtgtgcttcgccacgttcccaagcaggcttcatgtataaaaagcttgagg

SEQ ID NO: 390572 - DNA, 122 bp, Homo sapiens
agtgaacttcagaactagagggcatcgacgcggcagctgattttgtctgcacacggcccccgtagcctttccgtccaaaatcatttacgcggccgcgaccggtagtgacgtcacgagatttg

SEQ ID NO: 390573 - DNA, 122 bp, Homo sapiens
gacaggtgttgggcaaaaagagaaccagagagacaataactcacagggatgaggaaagagcgggtttcaagaaggaatgaatggttaacacttgttaattttccaaggtcaaatatgtaaga

SEQ ID NO: 390574 - DNA, 122 bp, Homo sapiens
ttcaattttctaaacatctcagaaatacacaagtggtcttaacaaatatagtgcgactgccgtgtggtttcgtgttgcttttgtagtttctaagacactctagcattatttaattagctaaa

SEQ ID NO: 390575 - DNA, 122 bp, Homo sapiens
gcctcctccctcagacccgatctctcctcctttgcactagtgcagtcacagccccagaaacgcaggggtcacgtctgctccccacagccttggtgagcagccgtatctgcaacaagagactc

SEQ ID NO: 390576 - DNA, 122 bp, Homo sapiens
aggaggtggcaggcttccgctggctggatctccgcttcatgaccaccacacctctgctgtcggctgcaggctccacgcccacagtcttgcggtgaatcagccctttttagcgaaggagttgc

SEQ ID NO: 390577 - DNA, 122 bp, Homo sapiens
ttttttcttactggcttctcaattttcttccttctctgcccctacctaaaacattctcctcggaaattacatggtgctgaccacaaagtttctggatgttttattaaatattgtacgtgttt

SEQ ID NO: 390578 - DNA, 122 bp, Homo sapiens
ggggcgggcccggccgggccacgcccgccggaggggaaggaggggccaagcaccgcccggcggggactggtgagctccaagagcctgcgatcccggtccctgcctttactagatgggtttcc

SEQ ID NO: 390579 - DNA, 122 bp, Homo sapiens
cccaccccagccgccggcatgcctcacctccgaaggtcttcaggcgggggtaccccccggcgcagattcacccactgctgaagctggttcatggagctcttgcgctgggcaattttgtcagg

SEQ ID NO: 390580 - DNA, 122 bp, Homo sapiens
catgaaccatttgttttttcaacaaatattgttgagtgagcactaggaatgaaccatgcacgagacagagtatctgctctcacggagcttatcttctagtggggaaaccagacaaacatgtc

SEQ ID NO: 390581 - DNA, 122 bp, Homo sapiens
aagccagaagaaactcaactggtgtcgagaagtccggaagcttgtggcgctgaaaacgaacggtaagacttgttctgttgtgtttcttttgcctgggtgatagctcccgcctgctggatccc

SEQ ID NO: 390582 - DNA, 122 bp, Homo sapiens
agaaaaacaataatgtgacctgatgatgtcattctgagtttctcaactgctcagaagaaccgtggagctcttaaatttgaaattataaaaaaaaaaaaaacctcagttctgctcacatttat

SEQ ID NO: 390583 - DNA, 122 bp, Homo sapiens
acaaagaaatgtcctggtgtgcccacggctagcacgtgctgaggactcgctgtgaggccccgtgtaccccgcaggctgctcttgaaggaaccagtttccaagggaggaggatgatgccagcc

SEQ ID NO: 390584 - DNA, 122 bp, Homo sapiens
tggccctgtgccggtggtgggcagcatctggcacgggggaggcgccgtttcttccacactcgcgcgtcctcagcccagatcatccggtgaagtttccccagcaagtggctccccctgccccc

SEQ ID NO: 390585 - DNA, 122 bp, Homo sapiens
tccctacacactgcaggccctggccctgggcagcctcccccgcctgccagctcctccacccgccttgccctcagcttctctgactgtgggtccaactctgtgactgcctccccatgggccag

SEQ ID NO: 390586 - DNA, 122 bp, Homo sapiens
aggccctctccaaagaggagaaccgaaggccaccctcaggggacaatgcaagggagaaaccgccctctagtggcgtaaagaaagagaaggacagagagggcagcagcctgaagaagaagtgt

SEQ ID NO: 390587 - DNA, 122 bp, Homo sapiens
tcaccttgggagatgacatacagccaacagattggggaagggaagcagaatgttgtatttcgtggaagctttatatgggccccaccaggaagtggcctcgaatctactcatgctccattgcg

SEQ ID NO: 390588 - DNA, 122 bp, Homo sapiens
caaccacccaacttctctccacagccctggagcccacctcccagaagcccggtgtgggggcgggccacgggggagatcccaagctcagtccccacaaagttcagggccggtcggaggcaggg

SEQ ID NO: 390589 - DNA, 122 bp, Homo sapiens
gggtgcgcttacgccacggcgtctgctggcggccgcggagacgcagagtcttgagcagcgcggcaggtgagtagctgtgcgaattcggttctctagggagctccttcttcgcctgctggcct

SEQ ID NO: 390590 - DNA, 122 bp, Homo sapiens
ctcgctcgcgcagagccccggctcacaccagcggccttaactggagaggcgggaacaggacgcggcccacctccgccaaccactcattggtggtggtgccaggagaggcggggcgctggcag

SEQ ID NO: 390591 - DNA, 122 bp, Homo sapiens
ggaagccgagcctgcccgcgaagagactggggattccgaggcggctcctgggagaccggacgcgcgcggcctccgccgctcccagtcccgccagacccgatgccgggctggagaagcgcggg

SEQ ID NO: 390592 - DNA, 122 bp, Homo sapiens
tcctcagggcggggactcgctatacccagaagtctgtcagttgtggtgcctacaggattacgggaatagataggcattcgcttatgacctcagagttagtaaataaaggtgacagcatcttg

SEQ ID NO: 390593 - DNA, 122 bp, Homo sapiens
tcctccacggaactgtaaacagggagaataatacttacccctgagtttgcaggcattgaccgcattgtgccacctgatgaccctgttcgagcttgaaattttttcttctacctctttctttc

SEQ ID NO: 390594 - DNA, 122 bp, Homo sapiens
gggggtgggcggggcgggcgccggggccgggcggtcgctaggtgtgggaggctccctgggcgcgggccgggacgctgggcgcccgccttacaacccggcctgtggaggggtcccggggccgc

SEQ ID NO: 390595 - DNA, 122 bp, Homo sapiens
caccgggaacaggtaccactgccgagaagggagcgagcgacggcggttctgacgccacaacgaggtaagactcagtgttggccgatcacgtgtggctgttgtcatcgccagaggctccgccc

SEQ ID NO: 390596 - DNA, 122 bp, Homo sapiens
gtcctccgcagctgatgggtctcgttggccaaggagcggcacaggacgtcactggcggcccgggcgcgctccccttctgccatgctcctccgtagcaggacgacttccttctctcgctcgtg

SEQ ID NO: 390597 - DNA, 122 bp, Homo sapiens
ccctgggaatgtagaggcgtaagataatcaggatcaccaggctgaacacaacaaagaggacgaaatggatgatctggggaatggggctggggcacagctctgtaccaataacactgtccaga

SEQ ID NO: 390598 - DNA, 122 bp, Homo sapiens
cgacaccctctggattgctagtctcccgagtcaaccgtactgcacgtgcagttcagaccccgcctggtcctctacaggtccctgtcccaggcaagccttagcccacaggttgaacctagttc

SEQ ID NO: 390599 - DNA, 122 bp, Homo sapiens
tagattggcaggacataccacaaatagccacaatcaagaatttggagttccctgtattcacgcaacatcctgtacccatgtcaataattagacataattttacaatcctagaaaattagagc

SEQ ID NO: 390600 - DNA, 122 bp, Homo sapiens
cgggccgggcgagcagggcctgctgaacgcctaccgccaggtgcaggaggtcagcagcgacggcgggtgcgaggccgccctgggcacccactaccgcgcctatctcctcaagtgccacgagc

SEQ ID NO: 390601 - DNA, 122 bp, Homo sapiens
gccccacgcagagcgtcccgacccgcagctccgcctgctcgccgcggcctccgtggagtccggggtcgcgcgcgctccaactctgaaatcttcgcgccacgcctcccacaagccccgtccca

SEQ ID NO: 390602 - DNA, 122 bp, Homo sapiens
tacagaagtttgaggagggcggggccggctccgagcccccggagccctacgggactcccccgattctgccgaggagtccccgccagctccgtgcactcctgcaacactccccaccccacccg

SEQ ID NO: 390603 - DNA, 122 bp, Homo sapiens
agcttgcggtgagccgagatggcgccactgcactccagcctgggcgacagagcgagactccgtctcaaaaaaataacaagtaaatcagtgtggaactaacgagcgccctcgtccctcgcgct

SEQ ID NO: 390604 - DNA, 122 bp, Homo sapiens
atgaagatggagtaggtaccacaggtaatgaaagaaacagcacagcgaaccgcagatatgcgggaggagaacggcagagctagagaagtcacgggaaggcagagttgaacaaatgacagtga

SEQ ID NO: 390605 - DNA, 122 bp, Homo sapiens
cctgggataggctccggccccggccccggcggtggcagcggcatgtgcggagaaggctggcggctctggaacaggttgcctggttgccatgccaacccagggcctgtgtgaactcgggaaac

SEQ ID NO: 390606 - DNA, 122 bp, Homo sapiens
ggggtggggactgagcccagcaggccaggagatgcacagtatgtggtaggtgaggcccagcgcccatcaccacggggcagctttcaccttgacttttttcacaagaaggttcacagctcctc

SEQ ID NO: 390607 - DNA, 122 bp, Homo sapiens
gcgcccgacggactcggttcattcaagccgggctgggtgagcgcagccgagtcccgtaggcgcgggggacaacatgggcgccccggggaaccagggcgagcccgctgccagccaggactgtc

SEQ ID NO: 390608 - DNA, 122 bp, Homo sapiens
gaggggtggggtgattggagtccgatctggaccaatgggcagccggcgggacgggggcggcgacgacaaccgcggccgcaagaatcaacgccgcgccgggccaatccgcagccggggcgggg

SEQ ID NO: 390609 - DNA, 122 bp, Homo sapiens
gaaaaagagacattacctcattaccagacatctgcgtcctcacatatcctggaaagaaatcgagaaaagaatggattgccccaattaggacccaatatgattatcccgagggaagaacaaat

SEQ ID NO: 390610 - DNA, 122 bp, Homo sapiens
aactagggagtactttaccattgctttgtgaaagtaccagaatgcgagaacttgtctacacgtttggccaaaacgcatcctccaacggtgtatgtcctaatcccttcaattttcttcccaca

SEQ ID NO: 390611 - DNA, 122 bp, Homo sapiens
tctccgcggcggtctggtttccccgacgtgttttgtttgcgacgctgtcgtgtaacagcgcgctttacggccgcggggacggagcgagccggcgccagggcccctcgggccgggaagagggg

SEQ ID NO: 390612 - DNA, 122 bp, Homo sapiens
ctgatggagatgtacaaggagattgttgttttcaagccttctaacatagcatccattctgcggcccctagatcaaggagtaattttgacttttagtcttataatttaagaaaaacattttat

SEQ ID NO: 390613 - DNA, 122 bp, Homo sapiens
gggctcagccagaatggtccaggtgcagtccgcgttgttctcgtactctgaagggaagtgcgggctggagatggagctgctggtcccgcgtaaggttcctccgcaggctccctcagctgcag

SEQ ID NO: 390614 - DNA, 122 bp, Homo sapiens
agcgctcggcgttcaggaagaggagcagcagcggaggcggctgcttcagcggcgggcgggcgccagaaaggtagactgagtcccagggagctgcgccgctaacagcccacctcctagccccg

SEQ ID NO: 390615 - DNA, 122 bp, Homo sapiens
atcacccaggattgctccacctctggggcaattatcgggagcagggcggccccagtcagacgcaggcagccccaaagcctgaacaggcagggccagacccaggtaagaagccaaggtccgga

SEQ ID NO: 390616 - DNA, 122 bp, Homo sapiens
gtcggctccgaagggggtgaaaatggtgaattcctaaaaacccagccctgggctcctcctcgagctgccggtagcctggagggacccagcggacagccgggcctggccgcatcgctccaaac

SEQ ID NO: 390617 - DNA, 122 bp, Homo sapiens
ctgatgataaaatgaacgatcacagccctcccaggagggcaactgcacgggtgcctccctcgcaacagtccagacctcgggggagcctctcctgcggaaacggccctcgctgctgtgctgcc

SEQ ID NO: 390618 - DNA, 122 bp, Homo sapiens
tccatcctgacccagcagcaaggagactttattaagaaggaaatccaaagcacagctaatcgccactatgtctgttgttagtgggacgcaggaaagagttgagcctgaactaccagacagga

SEQ ID NO: 390619 - DNA, 122 bp, Homo sapiens
ccccctacctgcccccaccccctcctagggtcctggggtgagggggggtcttccctccaccggaccaccactgtctttggtacaataaatagaaaaaaagggggagaggggcccaagggtcc

SEQ ID NO: 390620 - DNA, 122 bp, Homo sapiens
ttaagtcagttgcctaaaggcaaaggagcatcgcccatgggcaaaaacatcaaaggccttcggatgccaacgactggcaggtgctggccttttgattgtgccaaccccaaataagattcttc

SEQ ID NO: 390621 - DNA, 122 bp, Homo sapiens
gccccagggcctttgcacatgctgttcctgctgccaagataaccacagcactgaccctcacgcaagtctccattcaaatgtcctcttcttaaggaggctcctctaacctccctctaaggagc

SEQ ID NO: 390622 - DNA, 122 bp, Homo sapiens
tgcaaccaggcgttcattaaaacagcatgttgctccacaccgcctcctgttgtctgttggcgcgctgttggggttcaaactgattcaagaaccttacatctggtgccaaatcctaggagggg

SEQ ID NO: 390623 - DNA, 122 bp, Homo sapiens
gagggcagcgggttcttgctgtctttctgggactccttgcgcagctagctatttgcctgccgccttggagttggtctgggtcgcagcctgagctgccgctcttggccccagagacgccgccc

SEQ ID NO: 390624 - DNA, 122 bp, Homo sapiens
ctacagtgcccgcaggccccttaaaagggagccagtgcaacagattggttaaccaggccacgtgttcccagtcttctaaaaatccccaaagactggacagcaaatgccccttaggttgcatg

SEQ ID NO: 390625 - DNA, 122 bp, Homo sapiens
acggcggggaagagtgtgtacgtggtgggggcttcctcggtggcgggcatggaggcttcgcgctgccggctcagtcccagcggcgacaggtcagacagggccgtggcaggtctcctcctgag

SEQ ID NO: 390626 - DNA, 122 bp, Homo sapiens
tggcccagtgccgccaccactggggagtgggaggctcaggcagacctagggccctgggaccgtggcccttggctttgttctagggagggcacaagacagcctgcaggtctttgggcagggag

SEQ ID NO: 390627 - DNA, 122 bp, Homo sapiens
cgcaaagacctagcggtgcccagaggaaagccttcctgataccttcccctcctactctcccgggaacttcatccagtttttccacggatgcttcgggctgatcacgacctttctcccagcct

SEQ ID NO: 390628 - DNA, 122 bp, Homo sapiens
tgtgagatgaagacttttgtgagtcctgaggccatttctcctgaccttgtcaagaagatccgtgatttccacaggaaaatactcaccctcccagagatgatgaggatgttctcaggtaaagg

SEQ ID NO: 390629 - DNA, 122 bp, Homo sapiens
gacccagagaatgttcccctttgcccaagcaggacgaatgccaacgcccttggcagccggcgtcgctcacctcgccagcacagctcccggctgagcgcgtacaccttgtgcgggtcggccgg

SEQ ID NO: 390630 - DNA, 122 bp, Homo sapiens
aggagagagagggaaaagcattcatatcacggggtagagctctgcccttggccccaggcacgttcctgagccctgagtcatgggaagggtggagaagcaggaagggggttttcaaggacctt

SEQ ID NO: 390631 - DNA, 122 bp, Homo sapiens
ctgtgtctcaaaacaaaaacaaaaacaaaaaaaaaccctgcagttgcttccatgtttaggcgctgcccaccaagggtcccaagttggaaaggaaggaggagagaggcagagagagagagaga

SEQ ID NO: 390632 - DNA, 122 bp, Homo sapiens
gcgtggcaggactgccagggtgtgcaggggctgctggccaagctgctgtctcagctgcagcgcttcgatcgcacccaccggtgccccttcccccatgtggtgcgagctggcgccatcttcgt

SEQ ID NO: 390633 - DNA, 122 bp, Homo sapiens
atccgcatctctgacctgggactagctgtgcatgtgcccgagggccagaccatcaaagggcgtgtgggcaccgtgggttacatgggtgagtcttctctgcccggcccactagcctcctgggt

SEQ ID NO: 390634 - DNA, 122 bp, Homo sapiens
gcgtggcattctccctcctcccctcatcctgttgtgactgcacctgctgaatgtgaccggcgggcactggaagcagccgcagccacagccttggtgaggagcaaccgcagccctgccagctc

SEQ ID NO: 390635 - DNA, 122 bp, Homo sapiens
caaggttttttaatactttaaataaaacatctgtttttcaatgtggtaatttaagtcctacgatgagtttattaacatgtgctttttatttagggtatgagctacagttccgattaggccca

SEQ ID NO: 390636 - DNA, 122 bp, Homo sapiens
ggaaggggaggggacaaacccgaaacaagttttctgagtcctactctctgagttttatcccgaaggagtttccacttctggtccaactctcctcactcagcctcctgccacttaacacgctc

SEQ ID NO: 390637 - DNA, 122 bp, Homo sapiens
aagatcaaaggggcacggcaaggaagaaatgtgcatccaatgagtgctaaactgtagatgcgataaaggcgtcaggcaagcactgacctgctccagcagatagatgagctggtctcgagcca

SEQ ID NO: 390638 - DNA, 122 bp, Homo sapiens
gcctatcgaattagggagtccttcaaaagggagcacacgcacccctgaatttaggggactcgggcccttcgtgaccccggatagccctccccgtcctacatctgctataacagcacgacagc

SEQ ID NO: 390639 - DNA, 122 bp, Homo sapiens
gaaagggccggagcgtgcaggggagcacagggcgcgggggcggcactgccgagccgggagcgctgccgcttgggcaggtgccgcggccgctgcccggaggcggcatgtgacgcgcggccgca

SEQ ID NO: 390640 - DNA, 122 bp, Homo sapiens
ggcgacgcgcgggagcggcagccaccccgcccgccaccccggccctgccgcagcgtcccgcgccccgcccgccgcggccccggcctcccagacccccggaccccccaggccgccggcccgac

SEQ ID NO: 390641 - DNA, 122 bp, Homo sapiens
cccatctctactaaaaatacaaaaaattagcagggtgtgctggtgcacacatatagtccccgctactctggaggctgaggcaggagaatcacttgaacccaggaagtggaggttgtgtaacg

SEQ ID NO: 390642 - DNA, 122 bp, Homo sapiens
gtgagcagaaaaatcgagtcgcctctggggacaagaaatcagaaagacccttccttcctccgaagatttagggaactgaagcctcgcacgttaagaaaccactgaaactgtacaaatgctca

SEQ ID NO: 390643 - DNA, 122 bp, Homo sapiens
gctttgaactttcctggagttcgagagtacactggtcctctaagtgcggtctccaaatcacgatgatcagcatcacttgttggaacttgttgggaatgcaaattatcaagccccaccccaga

SEQ ID NO: 390644 - DNA, 122 bp, Homo sapiens
taatgaaagacctcagaactgcagggtcatatgcctccccatccagtggtaactgtacaacgaagaatgattcagggcgtctgtttctgatctttccagatatttgtaagtaatggtaaaag

SEQ ID NO: 390645 - DNA, 122 bp, Homo sapiens
ggcggcggttgcccggatgggccgttagtcggggctcagccgcggagtgagcgagggagacgggaggagccgaacccggcgccatccgccgccatcctcccccgccccaccgccatcccgtc

SEQ ID NO: 390646 - DNA, 122 bp, Homo sapiens
agataagtgaaagttgctcagaaggaatgggagcatttattgaatggaggggattggtgacgcatgaagtcagggagcagacaagggtcagatatgaaatgttacattaatgtgtttgaatt

SEQ ID NO: 390647 - DNA, 122 bp, Homo sapiens
ttaccttgagcaggctctggagtgctgcaaaatgctccgctgtcagggcagccatcttgccgaagtcacatgaccgtggcacccagggaagcgaggtcacgtggctgtcgctgttgtcgcgg

SEQ ID NO: 390648 - DNA, 122 bp, Homo sapiens
aggggtgtggaggctggtgaggcgcctgctgaggagcagcggtggtggggcaggaggaaacggaaggggaacttactcaagctgctctccccacggtcgtttgcagggggcggagcatgcgg

SEQ ID NO: 390649 - DNA, 122 bp, Homo sapiens
gagagaccaatcgtgaggacagtgctgactcacaggctcagaggggctgagcccccaccccgccccaacctcgaactggagcagggggtagggctatccaagcccctctcccctgccctata

SEQ ID NO: 390650 - DNA, 122 bp, Homo sapiens
ttcgctcaatggaaatagtggatttttactgggtagcaggacctccgcgaccacccgctgcgcatgcgcttcacttgggcgtcacccggggaactgcgcctgcgcagtctctccccatccga

SEQ ID NO: 390651 - DNA, 122 bp, Homo sapiens
acttgtggtcccttttggccccatgcagtggggacatagccacctccacatcctgatgggcggcctcaggggcctcccccttcctgctccctacccctgcttgggttccactgggagctctt

SEQ ID NO: 390652 - DNA, 122 bp, Homo sapiens
ctgcataagagagtttcaagaggaggaaaaaattgacaatattaacatagaattaaagagcgataggtagatatttagaaaattgtctcatgtacttatatgtcgcctgtgaactgatattt

SEQ ID NO: 390653 - DNA, 122 bp, Homo sapiens
ccccgggttctggtgttcgtgcgtgtggggcgctagacggctctgtcctggagggcctcgcggtggctccggttgcgggtgccttctcctgcagtgcaagctcgccctggcactggccctca

SEQ ID NO: 390654 - DNA, 122 bp, Homo sapiens
tgagatgttatttgagggcagccttgcttgggtgtggtctatcatagctcctctgactaccgccgttgctacctggctgcaaatgattgttgtcaaggatagagggtccttcagaattcctg

SEQ ID NO: 390655 - DNA, 122 bp, Homo sapiens
gagtccgaggcagagaaattcacctttgctcctctcctttgaagaagacatagctgcctgcgctcaatgaacaaaaagaaccaaaacgccaacacccggctcccgcctctccgggggctccc

SEQ ID NO: 390656 - DNA, 122 bp, Homo sapiens
gcggtggttggcattctgctggtcgtggtcttgggggtggtctttgggatcctcatcaagcgacggcagcagaagatccggaagtacacgatgcggagactgctgcaggaaacggaggtgag

SEQ ID NO: 390657 - DNA, 122 bp, Homo sapiens
ggggctgaaaagggggtaaaaatgcttcagggggaaaaaagtccactccaagaatatacgcgaatgcacaagctgtttgctagcttggttctctagagaaggggagtaacaatccccaatat

SEQ ID NO: 390658 - DNA, 122 bp, Homo sapiens
ctggacctgctgggcatccttgtctccctactgggcgagctctggtgtctcgtgggcgtccgcaccctgcttgacctctgccagatacaggtgggcacccccatcccatgtgtcccccagac

SEQ ID NO: 390659 - DNA, 122 bp, Homo sapiens
ttcaactgccaatactgcaataaggaatgcctcagcctgggtgccctcaagaaacacatccgaagccacacgctgcccttcgcctgcgaaacctgcgggaaggccttctccagaccctggct

SEQ ID NO: 390660 - DNA, 122 bp, Homo sapiens
gtgctgggcgggcgggccccggaattgtcatttctttgtttccgaaggcggaggaggctccgagccccccctccccgtgctaccccctccccccgggtgctggctccatgtctgtgtgaccg

SEQ ID NO: 390661 - DNA, 122 bp, Homo sapiens
tctcatcactggctttggtctccatctttctctctcttcaccatgcatgtggttgtgggtcgctcccccgcccccctccctggggggggcccatctgcaggcattagcaacaatgttaccct

SEQ ID NO: 390662 - DNA, 122 bp, Homo sapiens
caacctaaccgagttggaattttcctttggccaaggggtgtcacaaccttcactgaagggcggagcttgcatcctgtctgcactgcagggcacctcatctttgcatccttcctgtctgaaca

SEQ ID NO: 390663 - DNA, 122 bp, Homo sapiens
tcaaggaatttaaggaatgccagaatttggggattggagggggaaggctaagtatagattcgagtgtcctttcctagaagatatagactggcttgtctgaattgcttgagatctcggcttgg

SEQ ID NO: 390664 - DNA, 122 bp, Homo sapiens
gtcagctctcccaacttgggctagtgatggcgtttgcgtttcaagcagctcagtctaccccgggtttgttggaaatgaggctactctgggtgtcttggggctgagcgtacacatgggacttg

SEQ ID NO: 390665 - DNA, 122 bp, Homo sapiens
ccacgtggcatttgaatttccctctattagagtttttgctacatttccctgaaggtttatcgagggcagacactgaccttaatagtctttgtatcacgggttccagcacagtacttctcaca

SEQ ID NO: 390666 - DNA, 122 bp, Homo sapiens
atctctggcccgccgcgcacctgagctggggggcgcggccaaattctccctcccggtcctcgaagcttctggccccgctctagagggggcagaaagatagcagatttccccggaggtgcgtc

SEQ ID NO: 390667 - DNA, 122 bp, Homo sapiens
ggggctagagaccaggaccaagtccggaaggcgtggctggggtggggcgaggatcggaggcggggctagagacggggaccaagtccggaaggcgtggctggggaggggcgagacccggggac

SEQ ID NO: 390668 - DNA, 122 bp, Homo sapiens
cgaactcctgacctcaggtgatccacctgcctcggcctcccaaagtggtgggattacaggcgtgagcccatggtgcccagcctatttattttttgagacggagttttgctcttgttgcccag

SEQ ID NO: 390669 - DNA, 122 bp, Homo sapiens
agtgctgccactccaccctgagattcagattgggtaggtctggggtaggaacctagaattcgcatttctagcaagttctcaagtgttggatattgatgctgctggtccagggaccatatttt

SEQ ID NO: 390670 - DNA, 122 bp, Homo sapiens
ccagcgtccaggtcccgaggaagtgaatgggaccgtggtttgctctagcacccatctctacgcgctttcttgtcccacagggagccgccgtgatgagcacagccaacccagttcccggaggg

SEQ ID NO: 390671 - DNA, 122 bp, Homo sapiens
tgtggtttcaggcccacagctgcggctgtgtgggttcaggaggtgcccagagtaaagcctcgcactgcgtgtgagcggccagggcccagccgcatccccacggctggggcaagatccgtacc

SEQ ID NO: 390672 - DNA, 122 bp, Homo sapiens
cgcatccatcccacattactgtctaatgctggttcttagcgacactgatggacaagataccgctcctagcctcaacagaatcacagtctagcagagaattcagacaaatgaataatgacagc

SEQ ID NO: 390673 - DNA, 122 bp, Homo sapiens
gtctcggtcttgcctaaaacgaagagagcaatccctgcaccttgtcctagtgaagcccagcgctgcatattcttagttgtttttgacggctgttgaagcatcggaacaattaagagatctca

SEQ ID NO: 390674 - DNA, 122 bp, Homo sapiens
cgtccccccgggagggcgcggaaggcacactgtgttccgtggggcctcgtaaataccctgcggccagagaaccactagagctactggtccgggcgcgggctctggggcgcccagggcagggg

SEQ ID NO: 390675 - DNA, 122 bp, Homo sapiens
aacgccacgggacagccaagctagaagcctgaggagccggagagggtgctggctgccgcgcggccgaggtgagtagggtgggaactcggaaaagcggttggctagcgggtgatgaagtcggc

SEQ ID NO: 390676 - DNA, 122 bp, Homo sapiens
ccagcagctctcccgccgccagaggggcggggacggagggagggaggacggctgcgaggacgtcagaggaggctggacccgcagccacgtcaaccggcaaccccctccccgccaacacgtga

SEQ ID NO: 390677 - DNA, 122 bp, Homo sapiens
taatgaaaaatgtcagtttcttaagtcagcactggtgaaactttcctaaaacaggaatggcgtttgctgagttttctctggggtctctgctttctgcagctagcttccctgcttgactgcct

SEQ ID NO: 390678 - DNA, 122 bp, Homo sapiens
ctaggaagcacttcccaattcagtgacttttcactagctttttagtggatctgatattgacgtctagacctaaacccaaaggactcagacatcaaatggccagcagttagcattcctatgaa

SEQ ID NO: 390679 - DNA, 122 bp, Homo sapiens
tttaatggtgaaagttgtagcgactgatgtgtgtaccacaatggcattggctaagttgctcgtcctttgagatagatgtcaatgtgattaaagaaattgagtacaccttagcatatgaatta

SEQ ID NO: 390680 - DNA, 122 bp, Homo sapiens
tggctcatgcctgtaatcccagcagtttgggaagcttaggcgggcggatcacctgagatccggagttcgagaccagcctgaccaacatggagaaaccccatccctgctaaaaatacaaaact

SEQ ID NO: 390681 - DNA, 122 bp, Homo sapiens
gggcggggctggggcaggcgcaggggtctcccctccattacagcagaaaggccccaggtccggcgtgactccccggccgggcgacacaggccgagtcacttcctcgcccgtgcccgggtgtc

SEQ ID NO: 390682 - DNA, 122 bp, Homo sapiens
tcaggctggtctcgaactcctgatctcaaatgatcctcccgcctcagcctcccgaaatgccggcattacaggcatgagccgcctggcctggatagatgtttatgatacactgttgcatgaat

SEQ ID NO: 390683 - DNA, 122 bp, Homo sapiens
tctgcccacttggcggggcgaaactaaactcgccgaggaaagataagggggcggggctgacgttgagaaagctggagggcagggaaatgggccgagtcctgcatcatccaccgagtgggggc

SEQ ID NO: 390684 - DNA, 122 bp, Homo sapiens
caccacattcaccttggtacccactgctgcttacatggctcctgctccgtgggaacgtcccgcagatgttttcctaaccaaggtgctttcccgttgcagatcgtggcaggttgatcggcggc

SEQ ID NO: 390685 - DNA, 122 bp, Homo sapiens
tgtctgtgttcctagccactcaggaggctgaggcaggaggatcggtgagcccacgagctccgggctgaagtgcacaatgctgactgagtgtgcacagtaagtttggcatcaatatggtgacc

SEQ ID NO: 390686 - DNA, 122 bp, Homo sapiens
agggccccgttcctgttctgggatgcatgctttgggcttgctattgagtgggcacacaggcgtgcacacacacacacacacactcattgctgaaaatgtgcccagaaaattaattctcgttt

SEQ ID NO: 390687 - DNA, 122 bp, Homo sapiens
tgcaggggactttcttggttttagcactaaaaatcccatgtcctgggagaccttagtccccgacaaactgtgttggttggtgctgcaggctgaataatggctttccaaaaatgttcacaatc

SEQ ID NO: 390688 - DNA, 122 bp, Homo sapiens
ggagttggcttcggagccaggagctgggacctgctgactctggaacgtctcctctggctgcggagcccccgccccacgtggggccgtgcgtgaatcctaccagcccctgtctccgcaggggt

SEQ ID NO: 390689 - DNA, 122 bp, Homo sapiens
ttccatcccctgaggtttagctctgcccggagctctcaaaaccgcagcagctcccgggatcgcccttccctctcgcggttcccgttcgctcttttcccgttctcctgtccttcaccccacca

SEQ ID NO: 390690 - DNA, 122 bp, Homo sapiens
tagcttccactcccttgtgtgtattctggctgggggccagattggggaagcccttctccccgggtctgccctgtggggggcttccggaaaagggaaccctgcggtacccccaggccaaagca

SEQ ID NO: 390691 - DNA, 122 bp, Homo sapiens
ctcagctcgtcggcactgccactcccagccccagttcagtttccgagtctacctctagttcgtctgctgcttacttgctaacttggaattccatctgagacccagcctgaggccgtcacctg

SEQ ID NO: 390692 - DNA, 122 bp, Homo sapiens
aacacgccctgtctcggcgccccgcgcaggcgcacacagcgccgctgccagctccacgcccgaccctacccatattaggagaacagctctccagacgtgtctccagggccaggctccgccct

SEQ ID NO: 390693 - DNA, 122 bp, Homo sapiens
taaagctggccaccgaaaccccagatacatccctccctggggctgctcaggtgccacttccggtgcagctgtcagatgacacaaggtttaagctctcccatgtgtcagatcagagcagccag

SEQ ID NO: 390694 - DNA, 122 bp, Homo sapiens
gccttcccggcggacggatgatggacagcctgactctccaatcgcgtccttaaaagggtgcgggcaggccaatgagcggacagcgagggccggagtggggctgaggcttcggtgcagagctg

SEQ ID NO: 390695 - DNA, 122 bp, Homo sapiens
acgtctctcccctcgccacgtgctcgacgaccccagagccccgagtttcttctcccgaaccgcttgccacgtgtccaagccaaagctgacgtgtttcagcagggcgccgccccctcccaggc

SEQ ID NO: 390696 - DNA, 122 bp, Homo sapiens
tagcatgtacagcacaaagcgtttgctctaatgtgagctatggactttagttaatagtaacgtgtcaatattggttcatcagttgtatcaaatgtaccacactgatgccagatgttaataat

SEQ ID NO: 390697 - DNA, 122 bp, Homo sapiens
agcacagctgacagcaaacccaaagtcaatgagacagaaatgtgtcttccttccacgggccgttctaaaattgcaaggtaatggacaggagtgtcctcttaaaggaaagatggaatgaatag

SEQ ID NO: 390698 - DNA, 122 bp, Homo sapiens
acaacatagcaaccatgtatggggtgtggatgcttcaaccacagggtacccaccactctgcgtcacctcctgccacactaagtggctgcttggctcactatgactcactggctcctgaaaac

SEQ ID NO: 390699 - DNA, 122 bp, Homo sapiens
atggcgccccctggtggcgcagggagctttccccagttcctcaccctcgtgctttaggagcgacttagaaactactcagtccatttattaaaccctttctaggacacgctgcggatcattta

SEQ ID NO: 390700 - DNA, 122 bp, Homo sapiens
tcaatctcagggatccctccctggcaaggaaaacccagcgcaggtaatttatgttcttggcgtagagtctgttcccaatatccaggaagactcagcccgcagccccatcttactgagcaagg

SEQ ID NO: 390701 - DNA, 122 bp, Homo sapiens
agacgttggtttacagcccttattcctgggagctcttatgtatttgagctacatataactcgttcttctctagccttggccatagtgatcaagggcccctggaacttgaatgcatatagtca

SEQ ID NO: 390702 - DNA, 122 bp, Homo sapiens
gccaccagcatggcctcggcctcctgagtgcagggcaggagactcatggcgcgcagggcccgtaacacgctggaggccaggatggacccgacacaggggagcgggaggctcggcccggccgt

SEQ ID NO: 390703 - DNA, 122 bp, Homo sapiens
ccagctctttccccagacactgagagctggtggtgcctgctgtcccagggagagttgcatcgccctccacagtgagtattgctcttcttcttgttgcccccaacccagtgtcatcttggccc

SEQ ID NO: 390704 - DNA, 122 bp, Homo sapiens
atcctccaggtttgggagtacaggttccatggttgtgacagggttgggactgacaagcatcgagttcctttgagcagttctgtccatcgtagcctggggcacactgcagacaaagaggatta

SEQ ID NO: 390705 - DNA, 122 bp, Homo sapiens
gaggccgacgtgttcgctgggagcattcagtaactgcgggcggccccgggagggaggttgcggggaggggcccgataggagctttcaggcagcaagtcccccatcctggaggttacaagggt

SEQ ID NO: 390706 - DNA, 122 bp, Homo sapiens
ttcctccttgtaagaaacccctgtccccagtcagagataacatccaactaactccagaagcggaagaggatatatttaacaaacctgaatgtggccgtgttcaaagagcaatattccagtaa

SEQ ID NO: 390707 - DNA, 122 bp, Homo sapiens
aatggctatttgttagagattagctacattaaagcattaataacctgtcctagtttgaaccggcatcttaaggagaattgctagttcatttggcatgtacataatgttagggggtttgttta

SEQ ID NO: 390708 - DNA, 122 bp, Homo sapiens
gttccccagggcaggatttccccctggtttgagcattgctgtcttcccagggcctagaaccgttcctaggcacctagtaggtgctcagtaaattacatgtggaaacaggaaattgccaagct

SEQ ID NO: 390709 - DNA, 122 bp, Homo sapiens
gtggtggggtagctgtgcgacatgggcaggttgcttagcctctctgtgcgtcctttcctccgatctgaaatggaggtgcagtttgttgtgaggattaaatgagatgatgcgttcagagaagc

SEQ ID NO: 390710 - DNA, 122 bp, Homo sapiens
ttcgttctggtttcttgggcagtgactgggatgttcaaactattaattgggatagaacaccgaagctggttaaaaacaatatttcttatagaaattgatcttgaacatggatcaaggttcac

SEQ ID NO: 390711 - DNA, 122 bp, Homo sapiens
gcctgtggcctaggccccgcccctcccgctgcttattggctgctacgtgaacgagacaaacgcaagcaacaaccaatgggagtggcccacggcgcgtctttcccggggaagccgacgcggac

SEQ ID NO: 390712 - DNA, 122 bp, Homo sapiens
cggggagggcatgccaggaagaaagaagagcctgggaagggaaggcgacagggcaggcttcgccccaaattttgcacagagcaggatcttctagaacccagagaggccccttccgtccctgc

SEQ ID NO: 390713 - DNA, 122 bp, Homo sapiens
cagagcggagaaccagaagcaccacttctctcaggctgatgctctaatctcggctccccccgcccctacaatggcgtagacggcctccgccgcccgactcacacacaccctcccccgggaac

SEQ ID NO: 390714 - DNA, 122 bp, Homo sapiens
aagagtaacaggactctgaatggatgaaactaatggtctccatgcaatatggagtgaaaccgtccttgatcctgctgctcagaaacatgcagctgctccctcttgaaagacaattcactccc

SEQ ID NO: 390715 - DNA, 122 bp, Homo sapiens
tgagaatgtattgcatgaaaaaactgtcggtatcactggtttcttaaacactgccgtgttcgacatgtgagttaataaacaaatcactgttttgagtgagaaggaaaaaagggaggaaggaa

SEQ ID NO: 390716 - DNA, 122 bp, Homo sapiens
acgctgcaaggcacacattgctatcgtttggatctgcaaagcccacagccaattctcaatcgagtccattctcccttctattcacagcaaggaacccaccagaactccactccaggggaaat

SEQ ID NO: 390717 - DNA, 122 bp, Homo sapiens
ccaccctcgtccctggagccagccccgtaccttgccacctggcgtgctcccggctagccgcgcctgcgtccatggcaccctgccaggcgcgtgcctggtgctcctctagccgctggttgtgc

SEQ ID NO: 390718 - DNA, 122 bp, Homo sapiens
tttttcctctttgctcattgagccctgggcttcctttcgtcctggtactgttcaagattccgttcagaattttaagaggaacgggactcccctggcttggttccagatgaccaccgtggagg

SEQ ID NO: 390719 - DNA, 122 bp, Homo sapiens
ccaggttcaataaggattacatcatggagcaagtatgcggggcagcctgagaatcaaagccgtcagcaccggcggctggttaactgtactgttgctgaaacacatccttcccaccccctccc

SEQ ID NO: 390720 - DNA, 122 bp, Homo sapiens
actgagaagatatgcaggctgggtggaccaatagggaggagatggaactccagatgattacggctgaatttccttccagccgaaagggatggaggctcagaatagaagttaaatttttggga

SEQ ID NO: 390721 - DNA, 122 bp, Homo sapiens
ggtggggaagattccgttattttcctgaacacctaacagtgatgctgcaggctttctggacgggacgggacctcagacacaataatccattccgccgtcgccacgcagtgcctttcgaccat

SEQ ID NO: 390722 - DNA, 122 bp, Homo sapiens
gagaaaaataaaaacccttattatcctgctatgtagagaggttcactcttaatatcttaacgcactgtctttagtcttttcgggtgtctataattacacacctaaacatatgtttggaacaa

SEQ ID NO: 390723 - DNA, 122 bp, Homo sapiens
cagcccttcctggtacagacctcggtcgtgcgcgcacgcacacacacacacacacacacacgcacgcacacacacggtgcttcaccccagccaggccagaccaaaagagaccattatttcct

SEQ ID NO: 390724 - DNA, 122 bp, Homo sapiens
taccagcctcaagctgggccggtgcgtggtgccagagctgtactgcgcaaccgacatctacgaggcggcacccggggatgcggtggcggtagcgcccgcttctgtggagcctaccagttgga

SEQ ID NO: 390725 - DNA, 122 bp, Homo sapiens
tcactcagctgacaatgaatttctgaagccttcagcaaagcacagtttgctatattaattcggcacatcaatctggtctcttggagctgcgctggatccctgtcactccccaccataagtca

SEQ ID NO: 390726 - DNA, 122 bp, Homo sapiens
cgctctgcgtcctggtgtctgatatgcaccgtgaagcgctctgcatgctggtgtctgatacgcaccgtgtgaagctctctgcgtcctggtgtctgatatgcaccgtgtgaagcactgcgcgt

SEQ ID NO: 390727 - DNA, 122 bp, Homo sapiens
ggaggaggccccggcctggccgcacgtgtatgatgacaactcggtaatgctgcatactcccgagtgcgcggtggggaagccaaccttggagagctgagcgtgcgaccggcccggcgcggggg

SEQ ID NO: 390728 - DNA, 122 bp, Homo sapiens
catgattgattaaacctttggccattggctgtcaacttaatcttgagcctcctctccttccgagaggttaggggtagtaatcaaagacccaaccctgtaatcctgccatgggctttctggag

SEQ ID NO: 390729 - DNA, 122 bp, Homo sapiens
aaccctagctgtcttgttctcctctgctggctccccagatcccatcgtagcacaggacatcgtactcaaaggtgctttatagatatttgttgaattggtgaaccatggacaggaaccgggaa

SEQ ID NO: 390730 - DNA, 122 bp, Homo sapiens
cttctgccccccaccgggggagctgtgtaggtttctcctttggaaaatttattgttggggcgattgctattattgccggctgtaagggaagataagacacaaaaatcctttgtctttgtgca

SEQ ID NO: 390731 - DNA, 122 bp, Homo sapiens
ctaagagcccaggattaagggaaagagaagacagagggttggcaggggcggggggcggggcggggcagaacgggtgttggctcagatctcttccactgccataattttctcactgatataat

SEQ ID NO: 390732 - DNA, 122 bp, Homo sapiens
aagagggaaggaaggagcaggccggggacggggacggcgtgctgccctgcgtggctcccgcgacctggcttctcctggggggttaaagatcagccacagagcacaggggtgagggtcaggcg

SEQ ID NO: 390733 - DNA, 122 bp, Homo sapiens
ctaaacaataaacttaaaatcacctgcaaacctattaagcaccattgacattttggtgtacgtccctctgtggtcccgttgctgcctgtctctctttctgtctctctctctctccatacttt

SEQ ID NO: 390734 - DNA, 122 bp, Homo sapiens
gcctctgcaggcggttttcaaggcagccgtgtgtgcttgcatgtgaggcggcaaaaacagcgcgctgcagggccggcgcggtggctcacgcctgtaatcccagcactttgggaggcggaggc

SEQ ID NO: 390735 - DNA, 122 bp, Homo sapiens
cgaacacatcctgggagctgtagggccggttctgctcctgcaggtacctcaggaggatcccggcggctacggagagaaaggcaggggagggggccactcaaccgacctcctcacccactgcc

SEQ ID NO: 390736 - DNA, 122 bp, Homo sapiens
acagtccccaggcatctgccagctggggctggggggcccaggctgcaccagactggtgggcgggcctccagccagctccccagcagaggtctctctggggctgaatggggcacgtgcccagg

SEQ ID NO: 390737 - DNA, 122 bp, Homo sapiens
gtacagcaaacgccaccatggagcaggactcagccatgaaaaggaacaaggctctgatgccggccacagtgtggatggaccttgaggacatcacactctatgaaaggagccagagacagagg

SEQ ID NO: 390738 - DNA, 122 bp, Homo sapiens
ccccccacacacacacacttggacactacacacacagctgaggagtaactttcctcttctcgcggagcaccctatcccctattatcggcatctgatcttcctagttcggatccccggaacac

SEQ ID NO: 390739 - DNA, 122 bp, Homo sapiens
ctgaaaagacctgcacccacccccaaaggggcggggctggtgggcggagaggaggcggggcgcgctccttcagccccgcccaccagccctggactccggctcccgaggagcggagctagcgg

SEQ ID NO: 390740 - DNA, 122 bp, Homo sapiens
gaggggtcgggcctcctcctgctcctactcccgagaggctccggcaatgagaataggccccgcccccccgcgcagccaagtctacggaccaagtccgagcctgcagacaagctccgccccca

SEQ ID NO: 390741 - DNA, 122 bp, Homo sapiens
ggttacacaggtcagtcctcatgtgactcactgggaggcatctacacaggggcacaaatacgaggaggcagggattgtgaggccacttcggaggctggggcctcggctgactgattcactgc

SEQ ID NO: 390742 - DNA, 122 bp, Homo sapiens
tattagctatgggctcttcggcactaaatgccctgtaattttcctttaagttataaaagccgaatacttggcagggtgtttctactttctccagcctattcgaagcctttcaagtgttaatt

SEQ ID NO: 390743 - DNA, 122 bp, Homo sapiens
taggtagcattactcttgatgatgcaggcatgagtgatgtcctctccattccccaatcctcgagccccttgaaatgctatttgaggaatgctatcaaaacaccagtgctctttgagagaatg

SEQ ID NO: 390744 - DNA, 122 bp, Homo sapiens
caccgctcgcccgtttgccgggaacacccggagggcgagactacagctcccaggagtgcacggggctcctcggcagtacgcgtgtgcggcgccaggagaggacagctccagtgctgatgttg

SEQ ID NO: 390745 - DNA, 122 bp, Homo sapiens
caccctgaattgatacctttagggggttgagtatctgtttcaaatcagcaaagtgcttaccgcaaaaggaacaccttaccaaaagcaagatgaaaaagtgagggcagagtgtcatgattatt

SEQ ID NO: 390746 - DNA, 122 bp, Homo sapiens
cctagcttggcctgggcgccgcagaccggagccagaagcacgctcgcgggggcttgcgaccgccttcctgggaagctgtcccctggcaggcatgggtgctttacatcctgagctgggaagct

SEQ ID NO: 390747 - DNA, 122 bp, Homo sapiens
ctgaggcccctactctcccgggccccagtttagacgaatgggctataggcagaacacacacggccagggttctttctggtgccctaccacctgtttccccaaacaaagacatcaggacccac

SEQ ID NO: 390748 - DNA, 122 bp, Homo sapiens
cagcccggccgcggcacctccgcctcgccgccgctaggtcggccggctccgcccggctgccgcctaggatgaatatcatggacttcaacgtgaagaagctggcggccgacgcaggcaccttc

SEQ ID NO: 390749 - DNA, 122 bp, Homo sapiens
gttcggtcgccgaatgttacccggttctgaatgttacacttacacattccattcccgacacgacagcgctgacctcatccatccacgcagcccgcgctgccattggccgagcgtcacgtccg

SEQ ID NO: 390750 - DNA, 122 bp, Homo sapiens
caatattctgcttgccactcaagcaacccatgcctgtagggcatgtctaatatctcatcacggcaaatttaagatattgggaaatgaaattcaccttgccccattccctgcaacggggaaag

SEQ ID NO: 390751 - DNA, 122 bp, Homo sapiens
cccccagccttttgtgcgccgcgcggtggggcggtgcccagcttgggggaaggagagcggcgcttatcgaagtgtggtcgacctccatccgcccaccgagcacttgggacccgctgcacata

SEQ ID NO: 390752 - DNA, 122 bp, Homo sapiens
gtccggggatgaagaattcggctctggagtcacagactcaagttcaagtgccagccgtaccgcttgctagcagcgtggccttgggcaagtcacttggcttcggtttcctcctcttagctgca

SEQ ID NO: 390753 - DNA, 122 bp, Homo sapiens
catggtcaacaagcttcttgtaatttgagggcaatcaagcaagagaagttccgccactaccgtaagaacattatcattcaagttttatgaatttcataccaatttccaaatctggagaatga

SEQ ID NO: 390754 - DNA, 122 bp, Homo sapiens
gaggggagaggagcacaagccgaccaatcctaaagcaacagtggcgagggctgggccaatcgaaggtcaaggctgggagggtcccgccctctgcaggccagacccccttaggggagcgcgag

SEQ ID NO: 390755 - DNA, 122 bp, Homo sapiens
ttgtcaaatgggagtgagggctgcccctggcagtggggtccacctatgcttagtggaccccggagggactctggccagtccaggctcacattgtcctctgtgtcccgggtctccatgtgcag

SEQ ID NO: 390756 - DNA, 122 bp, Homo sapiens
cactcaccttggtgtggaggacgatgggcagaggtagtaaaaccaacacagtgaaaaccacgaagagaaatcggcgataaaccagaatgtaactgaagaatttcattgtcctgagcaggtgg

SEQ ID NO: 390757 - DNA, 122 bp, Homo sapiens
cctgttgaaagccactggagacccacaaaggccacaaggaccaaagaccgaggtctggagcggagaagcccagagaggtgagcaggacgcccctggggacacgatggggccttggggcccag

SEQ ID NO: 390758 - DNA, 122 bp, Homo sapiens
tttctatttgttattgtcaattaatttcaatgtaattaagttccaagaaagcaggaactgcgttttgttaactgctgtatacgcagggccaataagaatgtgggggtagatcttacacactc

SEQ ID NO: 390759 - DNA, 122 bp, Homo sapiens
agaacagattagaattctcccgaggcactctgggaagggccagcacttccggttttaggtcggctactccgaaccagaggtggggtgggggcccggctgccgcggtgcctggtgggacgcga

SEQ ID NO: 390760 - DNA, 122 bp, Homo sapiens
taactcttccgcaagtgtgagtggcgtaactgtcgggctcttggccttggtcccgcccttcgctcgcctccgaagcctcgcctacttgacgtcatacaatgccgcaaagcgcagggctgatc

SEQ ID NO: 390761 - DNA, 122 bp, Homo sapiens
agtcgggatttctccatgttggtcaggctgttctccaaatccgacctcaggtgatccgcccgccttggcctccaaaagtgcaaggcaaggcattacaggcatgagccactgtgaccggcaat

SEQ ID NO: 390762 - DNA, 122 bp, Homo sapiens
acgggaccctctgcagaggccatgcgggactggggccacagtgggggccccggtgagggccgctgccgacaggggaatggcaggggtgcccgaagcacaagatggcagggactgggtccaac

SEQ ID NO: 390763 - DNA, 122 bp, Homo sapiens
ttcggtctcctctgccgacaccgagcacgcgccgcttgcagctggcttgggtgccgccttcgcctccatacccagccaccactcagctacagagcccgcggcagaggaggagcgcgggcagc

SEQ ID NO: 390764 - DNA, 122 bp, Homo sapiens
tgggacccagccgctccggccccccacccccagagacggcccaggcccccttattagcagcgtgagaacagacagacacaggcaggtcccaagctgcccacagcagaggaaagacctggatg

SEQ ID NO: 390765 - DNA, 122 bp, Homo sapiens
agttaaaagacctgttctacagtaagagacaaagaattgaagagacttgctgaaggtcaccgaagactgaggtttttatcacttaagaggccagaatttataagatttgaacatggatgcct

SEQ ID NO: 390766 - DNA, 122 bp, Homo sapiens
gggacccgccagatcctcgacccgggagaggcccaggcgcctttaccaggtttcattttccgtttaggccaaaatccccgcgggttggtcggggcgggggcggggctcggtgggcggggctg

SEQ ID NO: 390767 - DNA, 122 bp, Homo sapiens
cctcatggccctgctgctcttgctgttcctgggcctcctggggctctgggggctgctctgcgcctgcgcccaagacccctccccagctgcccggtggcccccggggcctcgcccgctgccgc

SEQ ID NO: 390768 - DNA, 122 bp, Homo sapiens
ccctcaatctccaggagccaatgcgagactttggctccgattaagcgacggcccgagactcggggtgcgcgaggaggatcgacagagtggtgaggggacctaggagggcgggagtggcagag

SEQ ID NO: 390769 - DNA, 122 bp, Homo sapiens
ggatttcctatattagaatataatgtgcttgcttcattggattgagagaaatcagatgatcgaggttaggagctgtgtcaaataaatctgccgtatcataggaaaaattaaggatattggtg

SEQ ID NO: 390770 - DNA, 122 bp, Homo sapiens
caaagctgagctccttgaagtcacaagctgattacgggggatttgaggctggcccagctccggggcaaatagggtcgaatccctggatggctcggtactagacaaggatcatcttggggctg

SEQ ID NO: 390771 - DNA, 122 bp, Homo sapiens
ggcggggcttcttaactcttcaacctggccttcccacgggtccctctggacaagggatggcggggcgcaggggaagctgattcccagccccaccccagcccgtagcagagtggtcgtaagcg

SEQ ID NO: 390772 - DNA, 122 bp, Homo sapiens
gtttccggcctctgcccgtccccctaccccaaactctttctcttccagctgtgcccaaagcgggaacactcgtcggaacagccaccagcggaagaccaaccagcaggaggagagctgccaga

SEQ ID NO: 390773 - DNA, 122 bp, Homo sapiens
gcgacggccgcgggtctgtgagcagcgggggcggggcctggttgtggcccctccttctcccgtccccaagttccctgggtgggaacggggtcttggggtccctggctgggtggccagacccc

SEQ ID NO: 390774 - DNA, 122 bp, Homo sapiens
ccagaatgaggagaggacttaagagcaggcacaaggttcgctgccatgactgatgtgaagcgacctgacgcacaagcggagacttttctccttggcagccaacaacctgcagcaggcaaggc

SEQ ID NO: 390775 - DNA, 122 bp, Homo sapiens
ctcagatccaagattctgggtacccaggccttcttcctctaccactcagaagtggggtaccgaggcttcttctcccttagggacccaagactcctggcctcaggccctcctccctgagaccc

SEQ ID NO: 390776 - DNA, 122 bp, Homo sapiens
tgacctccagggctcaagcaatcctcccacttcagcctcttgagtagcgggactatagggcgcatcaccacgcctggctaatgtttaaattttttgtagagatgaggtcctactatgttgcc

SEQ ID NO: 390777 - DNA, 122 bp, Homo sapiens
cctctcacgtccccctggagaattgcacgtgctgccacaccagatccagaggcacagagccggggcacgttcctgtcaagggtgctggccctgccattctccccaggaggtaggtgtgcggg

SEQ ID NO: 390778 - DNA, 122 bp, Homo sapiens
accagagtcgtcagtttccaagtaattatttttgctttggaacccacctgctatcctgtccggtttaaagatgtgctggaacaaggacatacttcttaattagcagagggtgtggataagtc

SEQ ID NO: 390779 - DNA, 122 bp, Homo sapiens
ctctaacaacactgagtgtggcagcttggctggaccaggcccaaagttgactacctacctcggggcgtccatgctgcggcagcgtgtgtggcgagtcagccaaggaggactgagcatgtgaa

SEQ ID NO: 390780 - DNA, 122 bp, Homo sapiens
tccccctcacctcctcggctgctgtcttcctgccaccctgagcaccaaatccaaactcctcgccagggtcaacagggtcccagccctcacaggaccttgacctctgctggcccctcactgtc

SEQ ID NO: 390781 - DNA, 122 bp, Homo sapiens
ggagtaaaaagactcactttgggaaaaacttagaggagagcctagaataaataaatatttcgtgggaaatttttcaagtcaaattctgagcactgtataatatgaacagtatggatggttcc

SEQ ID NO: 390782 - DNA, 122 bp, Homo sapiens
cgccgttctgaagcccgtagctgttcgccatagaggagcaggccgcggcttctaagatggcgtctttttcctcgtttcagattcttcgctgctgctgccttaccgccgagaaccaccacccg

SEQ ID NO: 390783 - DNA, 122 bp, Homo sapiens
aggagtggcggggccatgcagtgcaggaagttcatgcccaccgccgtctcgtggatgattcggaaccggagatcccatggcaatggctccgaagccagcagcttttccagggagcccgtctc

SEQ ID NO: 390784 - DNA, 122 bp, Homo sapiens
cactttcctttgccagtttcctaaatgtgagttctccagggtttgattcttcaccccttccgttctcatattttttacttttataaggtgttgaacaaacgtaattgcttatttcttctttt

SEQ ID NO: 390785 - DNA, 122 bp, Homo sapiens
gggcattttggagtaggagatttcggctctgcctaggaagatacctcagaaaattcccctcgtgcaatttcactttgcatatgcttctcctgttcttccatttctaatccataaaatcccaa

SEQ ID NO: 390786 - DNA, 122 bp, Homo sapiens
aaatgtcagtatctttcttgccttagctccaccaccaattgcatatgatgttggacaagtcgaattacttctctgagccacaatatcctcacctgcaatctgtgaaatgaaatggtaggaca

SEQ ID NO: 390787 - DNA, 122 bp, Homo sapiens
cccggctcgcttggctccgcttgcctcggcgctgtcagggaaggggccggcccgccgcgccgggagggagcttttaaagcgacacacacgcctcccaaccccgagggccaagcgtgcgagcc

SEQ ID NO: 390788 - DNA, 122 bp, Homo sapiens
ctcctgcccctttcggccaagagaggaaacttgagcccgatgtggtttctgcccacaccccgcccccaccttgctcctggccagcgggggcacacatggctccaagcctctcccagccctcc

SEQ ID NO: 390789 - DNA, 122 bp, Homo sapiens
gaggctccagcctcatctgcctcctatcccctgccttgttcagaggcccagagctggggccggaagtgatcatgaagatggaaactgtggtctggctcatgatggtgcatcactgctgtgtc

SEQ ID NO: 390790 - DNA, 122 bp, Homo sapiens
ttttatgaagcataaatatcaaaatggaaaaatatttgcacagttctttgtaaatataaacgtcttgtgtggattattgttgctacagtattaatattaactgcagtaacaacactgctgct

SEQ ID NO: 390791 - DNA, 122 bp, Homo sapiens
catgcagcagggcgcggggggctaccgcgaagcgcagagcctggtgcagggcgactacggcgctctgcagagcaacggacacccgctcagccacgctcaccagtggatcaccgcgctgtccc

SEQ ID NO: 390792 - DNA, 122 bp, Homo sapiens
ctgcctccccatttctgcatcctggtgcagggccttgggcttctaactcccaccgtctaccgggacctgagcagcaccaaccacaagagggcagacagacagaccacccacaggctacctcc

SEQ ID NO: 390793 - DNA, 122 bp, Homo sapiens
gtctcaagttgtctcatctgggcttccgtaagaacggtttcttcataagagggccttcagcgacagccaagctcggaaaagaacgggaataagttgtcttttatatttcctcaaatactgtg

SEQ ID NO: 390794 - DNA, 122 bp, Homo sapiens
ccgggcaggccccgccccctggtcctccaggaaacgctgccgaggagtaggcggggcgggcgctttggttccgagggtgcttctgctccgactgcttttcccacgggcgtcatctatagtcc

SEQ ID NO: 390795 - DNA, 122 bp, Homo sapiens
tccctggaccgcaaaacaggcttgcactgggtggcaggcaaccttcaatgggtgaatagacgttccttcaggcccaagtgcaggcagccaccctcgctgtaggtgtgtgtgtccgtgcctct

SEQ ID NO: 390796 - DNA, 122 bp, Homo sapiens
ccagtgcacgctgcttcgcctgataaggatacctttgacagtggctgctgctgctgctgacgcacctctgtgcttgctgcagaatggctggggtttgggaatggaatgataaggaacacaat

SEQ ID NO: 390797 - DNA, 122 bp, Homo sapiens
aaccacacacattattaggaagtgacacagcctaaattcaaacactgcttcactcgggctcgtgcttataaccttacctaggtgtcttaaatgccacaccaaaataacttctcatttttttt

SEQ ID NO: 390798 - DNA, 122 bp, Homo sapiens
ggagggcgcgactcccgcgtgttatcaaaggaagtcataaaggattgttgggggacgcaccgttttctcagcccaagctaggttgctttttccttcttaagactttagatatgtcgcagtga

SEQ ID NO: 390799 - DNA, 122 bp, Homo sapiens
gcgcagggatggagacggtgtttcgtgggctccgattggctcagtagcctatctttggagcgaatcagcgagcggagagggatgaacttctctgactggccagatccagtcacatgccaaca

SEQ ID NO: 390800 - DNA, 122 bp, Homo sapiens
acttcttccttttggctcagtgatttggaggtctcaagatttattttcctttcacaatcacgacatggttgttttacatcattacgtttggggatggtttgtcaaacagcagtagtaattgg

SEQ ID NO: 390801 - DNA, 122 bp, Homo sapiens
cgacgggggctcgggaagcctgacagggcttttgcgcacagctgccggctggctgctacccgcccgcgccagcccccgagaacgcgcgaccaggcacccagtccggtcaccgcagcggagag

SEQ ID NO: 390802 - DNA, 122 bp, Homo sapiens
aggtttcagcagctaccggaggcttccagcaaacacggcgcagctgccccgcgcggcagtcgcagtgttcacagccctagggttctccagctgtgcctcgtcttctctggggcccctttctt

SEQ ID NO: 390803 - DNA, 122 bp, Homo sapiens
caccttttaaaaatttcttcctctttccccttcaaatattgaagctctcaaaatcatcttcggagaaaggcacaaacctacctcccagatgtgcatccttcatctgggcaaaataaactttc

SEQ ID NO: 390804 - DNA, 122 bp, Homo sapiens
acagatacagtttctgaccaatgagctatatcccttgacagtgaagtgaattatgcctttcgtggattccaaagtcccacatttctctgaagtgggtttcatgtgccacaaaaagacattgg

SEQ ID NO: 390805 - DNA, 122 bp, Homo sapiens
gcaggccttggacgtccaggattagccacgcatttcgccaatccagaggcaggggagggacggtgcaggcgcagagtattgggtttggctggcctcgatttaaagagacagaagctgtcggg

SEQ ID NO: 390806 - DNA, 122 bp, Homo sapiens
agcttgggggtaagaccttgtttcagacctgttttcttcacactgtggtggaagcggcagcggctgtggccgctctcccttctgctcacacagacaatatggcggcgatggagtggggagca

SEQ ID NO: 390807 - DNA, 122 bp, Homo sapiens
atgttttaaaaggtgggggccgaggacggaggaccggatgaaactccctggagtaagagacgtggaagtggagagagcaaggcgaccgcagccaccccaaccctgggctgctcccgccgttg

SEQ ID NO: 390808 - DNA, 122 bp, Homo sapiens
acggagacagtgactccaggtgagagctatgctgttcattagtccagccatgcaggaacacggctggcagaagggcaattccgggggcaacgggaagagtccttcttccttatgaaggcaga

SEQ ID NO: 390809 - DNA, 122 bp, Homo sapiens
tccccgcttgcctcagctgcagcagcgggaagctcggtggcaagcccttgtagtcctgtgcgatggcgtctcgatatgacagggcgatcactgtcttctccccagacggacacctttttcaa

SEQ ID NO: 390810 - DNA, 122 bp, Homo sapiens
cggcgggagcgggccggggccgggcgcctcctgcatgacctagacgtctctgtgtggctccgtcagttccatgacgcgcactcttatgtaaactgctggatcgcggccgcgggggaggtcgg

SEQ ID NO: 390811 - DNA, 122 bp, Homo sapiens
aaaggtaatatgacctccatctggctctcctggataattacccttgaaatccagccaccacgtactgaggaatgtgtcaggccatatggagaagatgtggtatttttgcccatagcctcata

SEQ ID NO: 390812 - DNA, 122 bp, Homo sapiens
ccacctgaccaacctccacaggctgggtggcccggaggctgggctgggcgagtatctcttcgaaaggctcactctcaagcacgactaagagccttctgagcccagcgacttctgaagggccc

SEQ ID NO: 390813 - DNA, 122 bp, Homo sapiens
cgtgggcgcccgccggttgccgtgggaacgaggcgggctgcagtcggggagtcagagccacgctggtgggcagagaagagatgcccaaggaggaggcggttggctttgtctgggtgcccaag

SEQ ID NO: 390814 - DNA, 122 bp, Homo sapiens
aaagagcagtcttggtgtcaggacagcgagtgaggggtcggcgagaagccggcctcggctcgccacagtgccacaggatccctgaagcagaacccctgaagggctgaaactgcctgctcctg

SEQ ID NO: 390815 - DNA, 122 bp, Homo sapiens
ttcacgcctagcgtcgcgtataccggaaaactgcatcgtccagaattgcttccgagtcggcgcggcgcaaggcttgctgggagacacataacctcgattttcttccgccatccggctaaata

SEQ ID NO: 390816 - DNA, 122 bp, Homo sapiens
tgccctgcttaaaattctctcagggctctgatttgcgtcaggataaaatccaaacgccatcggccttgcgcggttttcttccagttccagagtgtcagtcctctggccgatctaaaagccct

SEQ ID NO: 390817 - DNA, 122 bp, Homo sapiens
gtagagctttgcgtcttcgtaggtgtggacggagactcacgactgaaggttgctaaattgcgtttttcttggctactcaggagcgtacgtacctggctgggtcccctgcctccgggtaacct

SEQ ID NO: 390818 - DNA, 122 bp, Homo sapiens
agatcagtttgaccggtgtggacacgtgctggttaagcactcaggcctacgtgggccgagcgggatcttgatcatggggctggtgtatggatccaccgtcggattccgtctgcagaggagga

SEQ ID NO: 390819 - DNA, 122 bp, Homo sapiens
gcagcgggaggagcgcgtagacgctgctggatggtacccgcggccgggactgaactccgccgcattgggtcttaccccggactccgagccggaccccgcgcccgcaccttcagccgggcagc

SEQ ID NO: 390820 - DNA, 122 bp, Homo sapiens
gtggaggacataaggcttcctcaaatgcacgcactgcaacaccgcagcagaccatgtgatcgccgggacagctatgaagtgacagcatacgagccatctacagtgtgggtgggccgggcaaa

SEQ ID NO: 390821 - DNA, 122 bp, Homo sapiens
gctgcggtgacccaggccggcaggtagccaggggctctctgcctgggaggacaccttcggcggctggcgtggggaaaggggccgcccggccggggatgccccgccaggaggagggagcggcc

SEQ ID NO: 390822 - DNA, 122 bp, Homo sapiens
tgatagttttgttaaaacaaaaaaaaagaggataacactctctgcctcattagtttgttacgtgtgttaacagtatacataaagggcccgtcatagtaaatctttgttgggaatttttcttt

SEQ ID NO: 390823 - DNA, 122 bp, Homo sapiens
cgggcccaacctctccatatttacatatgtatgaggtcgcctgggccagtggcgaggaggcggagcttctgggggtgggaagggggcgggcacccccagagccgcagagtataaagaccgcg

SEQ ID NO: 390824 - DNA, 122 bp, Homo sapiens
aagccccacccatagagcgaggttcggaagtccagtctcattagcatcccttgtcttccgcggtgttgcagacttatcctcagctcaagcgagtttggggcgttatggagccagccaagtct

SEQ ID NO: 390825 - DNA, 122 bp, Homo sapiens
ctgagcaggctgcctgggagcttgctctgggttgtgctttttttctggcagaccaggaaacgcttgcacttcagcatctttctctgtgttctcttccccagcgggcgatgatgagatctcat

SEQ ID NO: 390826 - DNA, 122 bp, Homo sapiens
tgtggacagtcttccccggcacacatcggctgacctgcatgcccagactgtctcctggggcgcctgtacaagttggtcctagaatccaattcttcctggaactgggtgtcatttcaggacag

SEQ ID NO: 390827 - DNA, 122 bp, Homo sapiens
gggaaggccgtaagtcagggcctgctgctgccgggtgctgcccctccacgggctccttaccgactctcggtcgtagaaggccttgagctggctgcgccacttcctccgacgctgcagcagcc

SEQ ID NO: 390828 - DNA, 122 bp, Homo sapiens
aggaccaagggactctggcaagatggggtggttttccgaatgccagaccgaggtgccttacgaaggcagctgccaatggttctgtggcacagactggctcctgagaacccagacgaccttga

SEQ ID NO: 390829 - DNA, 122 bp, Homo sapiens
gcacagccaaccggactgtaccacatgttcccttctccctgggctgagcaatcgcttccccgctaaatgttcggcagcactttgccttgtacgtgtctacgtctgcaggaggggctgtgact

SEQ ID NO: 390830 - DNA, 122 bp, Homo sapiens
gggctgcccggcccagcggcgtccgtccagcgtcccaccctactcctccgcttctaactccggctaagaaagtcccagattcaggcctagccttacggctcagggctggtggtcctgggaac

SEQ ID NO: 390831 - DNA, 122 bp, Homo sapiens
ttcttctctttctccggaaagccccatctcctgccagccctcagctttccagagcgcacgcgccacctgtccaaaaccgttctctggcggcctgtgcctcccactttaaagtcaaagtgatt

SEQ ID NO: 390832 - DNA, 122 bp, Homo sapiens
ccccgccgccgccgcggctccggctcgtctccatggaaaccgcgcgggataagccgctttcgtcagcagtgggctcgcgccaggccactgtcacccgtattctaaatcaacctgagccgcgc

SEQ ID NO: 390833 - DNA, 122 bp, Homo sapiens
caggtgctgtgcagtgggaactgcaagaatgggcccatttacttctcccggcttcatgggcggggcactgttgccacctgcacttccagacagggtagctgggctcagagaggtcaagcacc

SEQ ID NO: 390834 - DNA, 122 bp, Homo sapiens
ggagggggagggcccattcatttctcccttgacaggtggtttgtgtttctgattggccagcgccgccaggctcacacctccctcccccaactctctggaatgtataattatctgcccggggg

SEQ ID NO: 390835 - DNA, 122 bp, Homo sapiens
acacaaataagcggcctacaaaatggagtcgcagccgtcaactcgccctcggcctttttgcggccctttcacgacagagccgggcccctttacggtcacgccttcggcaagaccaggtagcg

SEQ ID NO: 390836 - DNA, 122 bp, Homo sapiens
tggaaagtacatctgattggtccactcccacaaccaagcagacatttgcatggggtgtaacgttgtaactttactttagcctctgattggttgaccaatcagactggttgcaggccactact

SEQ ID NO: 390837 - DNA, 122 bp, Homo sapiens
ttataagccaggaaccgcgggtgaaaaccagtgtgtatcacaacatcacacttccctctccggatgcactgtgtcttgccatgccatgcactccagattgtaatctttgcttctcattctca

SEQ ID NO: 390838 - DNA, 122 bp, Homo sapiens
cccccctctctctctttctctctctctctcttgcttggtttctgtaatgaggaagttctccgcagctcagtttcctttccctcactgagcgcctgaaacaggaagtcagtcagttaagctgg

SEQ ID NO: 390839 - DNA, 122 bp, Homo sapiens
cagtttgctactgactagagatattaaaggtacaaaaacagccagaattagatgtagagtcgcaagggagttttgttactaagacgtcatttctaatcagggagaaaaaatgagttacggaa

SEQ ID NO: 390840 - DNA, 122 bp, Homo sapiens
aaagcggctccgggggcatagcgggccagtaagggccgctcctcctttgaagaggttttgcgtctctttccgccggtggcgtcggcgctcacgcaggggcgggtcccggtagcgccaggcgg

SEQ ID NO: 390841 - DNA, 122 bp, Homo sapiens
aagaccacaatgactaacacatatatatcagaatagctaaaataaaaataaaacatcaaacgctgaggagcatgagtaaaaactagagctttcacacattactggtgggaatgtaaaatcgt

SEQ ID NO: 390842 - DNA, 122 bp, Homo sapiens
gatatcttcatgaatataatgaatcaggcattcgtttcccttttcctggtcatctatttccgtcattgagattacccccataatttcaaacatcaaatggtattttatttcttattcatatt

SEQ ID NO: 390843 - DNA, 122 bp, Homo sapiens
gggcggtggtgcgggcgtccgaatgggcgttttctagatacggggcgcggactagaggctcgctgggcccggagaccggcggactggagtcggggaaccggaggtggggagggggctcccgg

SEQ ID NO: 390844 - DNA, 122 bp, Homo sapiens
gctgcatggagaaggagataccggtgtgtggggtggggcatgataaggggccgtggagcccgaaggtcactggtcaagacaaaagtctgtgtcctcgcagacgctcaccccacaggcgtgta

SEQ ID NO: 390845 - DNA, 122 bp, Homo sapiens
ctggagagttccctgaggacagcttatttcaccctggatggctctggcgggagccaggcccgtgttttgtggtcttaacacgagtcaccaggaactggccttcccgggactcgctggcatct

SEQ ID NO: 390846 - DNA, 122 bp, Homo sapiens
atgttggagcggatgaagcacgagaagacggtggacatctatggccacgtgacctgcatgcgatcacagaggaactacatggtgcagacggaggaccagtacgtgttcatccatgaggcgct

SEQ ID NO: 390847 - DNA, 122 bp, Homo sapiens
tcctgggaaatggcacctcctcctctctagcggactgtgtggtgggaactcccctctttccgggaatggtgctgtctgcccagccccacccggccttgtaatgaacactttcccccttttcc

SEQ ID NO: 390848 - DNA, 122 bp, Homo sapiens
ctcaggctccttctgacagttggggctcagggtctcagcccaaccgactcctggttgccacgccggttaccatgggtgcagcctggggacgctgtcgtctgtggccagtgagtgcaccgagc

SEQ ID NO: 390849 - DNA, 122 bp, Homo sapiens
gaaggccccagggattcagagttcaaaatcaaagaatcgagacccgagcctcctgtgccacgagctgtagcttctcgggtggtggccgcagaggccaggatcgcatagctggatgaacattc

SEQ ID NO: 390850 - DNA, 122 bp, Homo sapiens
agcattaggcagtgctagaccatacagagcctcataagccattttgaggaagtttttaaacgggtgacaagaatttttcagagaaaaaggaaagatgccattgaaaaagaagtcaacaatac

SEQ ID NO: 390851 - DNA, 122 bp, Homo sapiens
gggcggaccccggggaggcagcggcggggcctggcgggcggagcgggaagcagcccgaggcgcgggtcggagggggcggcgggtgggaggtggtcggcgagagcggcagtaggcgggagggg

SEQ ID NO: 390852 - DNA, 122 bp, Homo sapiens
aaccggggctgcgcgccgcgcttgctggccagctagagttctgggtgggcgtgggcttggcgggcccgcactcggagcagccagccggccccgcaggcccggggcagtgagggtaattagga

SEQ ID NO: 390853 - DNA, 122 bp, Homo sapiens
cttgtaaaaacagttccctccaaaagggcagctcccatgctctttatcaaaatacctgcacgccttgttcctcatcgcctccttgtatttctgaatgagtttctgcttctcttctttctcct

SEQ ID NO: 390854 - DNA, 122 bp, Homo sapiens
ctgatgcgcagcggggcgacccccgctctgtgccggaggcagcgtttctaactcaggcggcgtgggccgaggtagagaaccaccaaaattaccatctcggagcggtgccggaagtcccgcct

SEQ ID NO: 390855 - DNA, 122 bp, Homo sapiens
ccaagagattgctgtcaagtaagctcctccacaaatctgcagaaacctcaaagattacagcgctcgcacggcaggagcgcagcggcttcccatacgccggcagacaatggggcggaggaagg

SEQ ID NO: 390856 - DNA, 122 bp, Homo sapiens
acaaaaacatgttccaaagaagagggtgccccagctcaggacctcatccaaggcagtttccgaccctgggtaccagggaggtcaccacttcccagcagccaggtggcttctctggccccgca

SEQ ID NO: 390857 - DNA, 122 bp, Homo sapiens
aagccaattgccattattattttctaagatagagagatttttcttttttggcttccagagcggaagttattcttgtattagcatttctttgcaaaacagtctgttggattgtcttgagaaaa

SEQ ID NO: 390858 - DNA, 122 bp, Homo sapiens
ccgactccttccactgtgccagtttgcccttgcgcggtcgcggtggggaatagatggagacgtggacagctcaaataaatcacagatggaatgtaaggttgtgcctagcaggctgccggccc

SEQ ID NO: 390859 - DNA, 122 bp, Homo sapiens
agccagcaacgcttaagcaccagggccggcgagtgccctgccgtggcacggctccagcgtcgcgctctcgaattcatttgctttccttaacgagagaaggttccagatgagggctgaaccct

SEQ ID NO: 390860 - DNA, 122 bp, Homo sapiens
gtacatcacggactggcagaacgtcttccgcacgtacgaccgggacaactccgggatgatcgataagaacgagctgaagcaggccctctcaggtttcggtaactcactcactctggcttgtg

SEQ ID NO: 390861 - DNA, 122 bp, Homo sapiens
gccaccatcggggtggacttcgccctcaaggtcctcaactgggacagcaggactctggtgcgcctgcagctgtgggacatcgcgggtaagcgcggccgcgagtttcccactccagagccccg

SEQ ID NO: 390862 - DNA, 122 bp, Homo sapiens
atctactgaaagcaggacagcccaactcaggagcaagccacccacttccagcccaaatggcgtttcagtagcatttttaaagagctgaatagagatgccaactgaactggaatgacagtgaa

SEQ ID NO: 390863 - DNA, 122 bp, Homo sapiens
aaaggtggtatttagtggcggtccccacactgcccctcccaggactgttttctaagcccacgtgagatctctcctgatccctttgaggtcttaatacaagagccgggcctacgggtgggaga

SEQ ID NO: 390864 - DNA, 122 bp, Homo sapiens
ctctcatttttttggtcaatttattccccacccaggcataaagaagggatactatttatccgggtctctcagaggcctcaacaaaccttggagcatatagagaaaatgtgagcaataggtac

SEQ ID NO: 390865 - DNA, 122 bp, Homo sapiens
ctccttgccgcgtctctcaatctcagtgggagtggcgggcactgcctcttccctcctgcgcgcccggaaccttttgagtgggcacagcacgcagcccgcgcgcggcacaaccccttccccca

SEQ ID NO: 390866 - DNA, 122 bp, Homo sapiens
gcagcccaggcggcggccggtcccggcgcccccgcccagatccctgcgccgcccggcccgcgtgcttgtctctgggtctctgcatcttcgcgtcccggggcgccccgtccacgcctcctccc

SEQ ID NO: 390867 - DNA, 122 bp, Homo sapiens
aacactaaacctgcgcacccttttccgttaagtagttcctaatagtccagcacagccttccgcccggccccgccctcgcctggctccactctgctcctgcgctttgggaatcgaagctgggg

SEQ ID NO: 390868 - DNA, 122 bp, Homo sapiens
agctgttatgagttgtgaattccctttgtcagacaaaaagcaaaacatattccttggtaccgtataaaagcactggagggagggaaggcagatatacttaccattagaaaatagaacgttgt

SEQ ID NO: 390869 - DNA, 122 bp, Homo sapiens
aagttcccacagagtccacacagggcctcagcatagctgctgggcaccttggcagtcactcgtgcattccagtcataagtgacagtcaggccaaagtccgtgcgcacgacggcatccctgcc

SEQ ID NO: 390870 - DNA, 122 bp, Homo sapiens
agtcaggacccgtcccagtcccgggtgagcgcttttggatctgggttctggctcaacccacgtaatgccccaatctaaagttttctacgtgtgtgtggataggaaagtctaaatagagttta

SEQ ID NO: 390871 - DNA, 122 bp, Homo sapiens
tccctgcgaccccgccgggtaagcaccaccgcccgggcacagacgaggcaacggaggcctcgagaagaaaagcagtttcctcagcgtcatctggcaggtaacagagtggggcgggtccaagc

SEQ ID NO: 390872 - DNA, 122 bp, Homo sapiens
cccagctccgccattgttcgcctcaggctcgccaccttccgacagctgtgtttgcgcatgcgcgacgggtgtgcaccgcctctcgacttccggttcacccagcatttcctcttccctgtttt

SEQ ID NO: 390873 - DNA, 122 bp, Homo sapiens
ggggcggcgggggacagagttgcggggcaagggggtgggggcacaagcgctgacttccgtcggaaatcccggccacttggcgctgaatgtttcaagaccatcttttaaaaataactgctcta

SEQ ID NO: 390874 - DNA, 122 bp, Homo sapiens
ccacacccccaccctggagagtcacagccagcagctgctttgatgtttgtggcgggtgcccgcctcccttccctccaccccggactctcctcttactccctccataagagcctggaatgatg

SEQ ID NO: 390875 - DNA, 122 bp, Homo sapiens
tcccctctccatgataataaaagtgttccccagtacctcattttattattcaccaataagcgttccgagtcatgggaagtttccattcagaaattacccagtgagagaagactggggtgact

SEQ ID NO: 390876 - DNA, 122 bp, Homo sapiens
accttgcctggataatgggcgagttctccgggtggattaatcctcgcgtcgtctttgggccgtcagtttgggagtgacagtaacaaggctcccggggaccctgctaatttgcactccattca

SEQ ID NO: 390877 - DNA, 122 bp, Homo sapiens
atacagggaggggaggctccctacccctacccctgctgcccagctgcagccaggccggtgcgtccatgtctaggggcaggctgcagcaagaagacgtgggaatgcacagccccagggattgt

SEQ ID NO: 390878 - DNA, 122 bp, Homo sapiens
aggaaatacactgaaaaagcaatccattttgcaatagcattttacattactacaaattcacgaggttcaaccttcaatgcccatgtacctttcacaaaactattgatcatttcctatcaatg

SEQ ID NO: 390879 - DNA, 122 bp, Homo sapiens
gcccgcgagcgcgctttgggccttccacgcagtgcggcctgcgcgtcagggacttctttgcggcttaggaggatgttggattgtttttcctgggcacgtctagacaggtcacatgaggacac

SEQ ID NO: 390880 - DNA, 122 bp, Homo sapiens
cagcattggcgggagggagtgcggtgcacggagccagggcgcttggggatcttgcgccagcgtctcttgtcccagcggcaaagcagcagcaggcgaaaggtgtcccggaaggctttgttgca

SEQ ID NO: 390881 - DNA, 122 bp, Homo sapiens
cgcgcaccggggcgagcaagggagccgtgacaggtgacagtgcgcatggccaatcagacgcgagtgtggcctcccggcgtcccgcccactccggcgcctgcgtcattttgggcaccatggca

SEQ ID NO: 390882 - DNA, 122 bp, Homo sapiens
gctgtaagtgtcatatacacactggctttctaagacttagcatagataacaaaaattagccgggcatggtggcgggtgcctgtagtcccagctactcgggaggctgagacaggagaattgct

SEQ ID NO: 390883 - DNA, 122 bp, Homo sapiens
ttgctattaatgacacagctttggagttatccacatggctttcaaatgtttagaggcagtcggtctctatgcccatgtgtctgtcattgggacttcatttatgagctttctttttttttttt

SEQ ID NO: 390884 - DNA, 122 bp, Homo sapiens
ccggagagctggctaacccggctgagcgttcgcctggcttccgcggctcttccgcgtcttcggctctcaaacaggggaaactcgggcattgagctctcaagaataagaaccctaactctgct

SEQ ID NO: 390885 - DNA, 122 bp, Homo sapiens
aggtattagttatttctagaaacaggagaaaaaagtgtagaagtttgcagttgcatgccacgaggctcaggatatttaatgttccagcagctttaggtttaatttactttaagtttgcatta

SEQ ID NO: 390886 - DNA, 122 bp, Homo sapiens
ggccaggagctggaaaggcgctgagcccaggtggctttcactccctgtgtgtgaggccatcgctcagcatctgcacgctgtctgctgcgtctaacgacccctcctctaggttggggatcctg

SEQ ID NO: 390887 - DNA, 122 bp, Homo sapiens
aagtaagccatgagactgttaagtgcttgtgaggttctttattatggagtgtcctgaagacgaagggttcaactctcaaaagaataaaaaagatacccatctatggccaggtgcggtggctc

SEQ ID NO: 390888 - DNA, 122 bp, Homo sapiens
aattttttcttcaaatatttaagcacctttttcaccatgtgtgttttgtttcttttctttcgtgcccctctgtcctcatccctgtctctctaggtggcagtgggagacattgtgaaggtcgt

SEQ ID NO: 390889 - DNA, 122 bp, Homo sapiens
aagttgtcccaagagatacataaaatcaaccccaatttttcatgacaattcattctccctcgttatctacagattcagttttctgtgcctgtgaaaaagaaaggaaaaaaaaacatatagtt

SEQ ID NO: 390890 - DNA, 122 bp, Homo sapiens
tgactcctcaaatctcatactgtcattgccagaacagtccagaatatctggaggcctacacgtgaaatgacagtcatccgtctttgagtatatcgggcacaccctcccctacatccccgccc

SEQ ID NO: 390891 - DNA, 122 bp, Homo sapiens
cccaacctcccctccagatttagtacaccagaggcgtcgcagcaacggctgctgcctgcgcgcctcagctaggcgggctcggatatttttaaggccacattggaaatcccgggcatgctccc

SEQ ID NO: 390892 - DNA, 122 bp, Homo sapiens
gggttccctgcatccaatccttcacaatgctgtcaggtctagaagcataaccctactccccgcaccctcctattcaaataccttcaatgttacccagtgcttacaggataaaggtcaaattc

SEQ ID NO: 390893 - DNA, 122 bp, Homo sapiens
agagggctcggagctccctctgttatacaaagtcggagagggagaggagtccgggaggttcggagcaaagaattcaccctgcctgccttagagaaataaagtttaattgcgatctgtagtta

SEQ ID NO: 390894 - DNA, 122 bp, Homo sapiens
gctcggccccgcccctttgggcttggtccttctcacgccaccaatccgcgcctcttgtcccgccccctgcccgcgagtccgccaatcccgcccttcggaaagcgtcgcctggtatccagctg

SEQ ID NO: 390895 - DNA, 122 bp, Homo sapiens
ctccagccccgagggaacccagaaggtggacgccaccattgtggtcaagagctaccggcccgcccaggtcacctggagccagctcccagaggtagcgccggagggtgggtgaggctgcccca

SEQ ID NO: 390896 - DNA, 122 bp, Homo sapiens
ctccaagcacctcaaccaccatggtgtgagttcttccaaaccagctgcaggataggtcctcggcccttccaggaagggaagaaggaagggcagtcgtgttataagccccaaaggcctccaga

SEQ ID NO: 390897 - DNA, 122 bp, Homo sapiens
aagaggaggaaagaacatttttaactcttagaagtaactcaagctttccaaaatttctcacgataagattgttttgagttaactgggtgatttattttgaaatgtgtacatagtagtggatc

SEQ ID NO: 390898 - DNA, 122 bp, Homo sapiens
tggacttttagctacaaaggggaacttcctgtgccaagccctggtttcctcataccccaacgagtgctgtgggtttcaacagtcttctctaaaagggtgccccaaggttattgtgtggagtc

SEQ ID NO: 390899 - DNA, 122 bp, Homo sapiens
gtgcccacctctcccaggagccgcacgtagccgctctctgcaaggggtgaccgtcaggggcggggccctgggggcagggcaccaactgaatcccaaaggaggccagcctgtggggtggggct

SEQ ID NO: 390900 - DNA, 122 bp, Homo sapiens
ctctttcccctcatcctgtcttcatccttcccatgccacgaaccccttgctctgtgggaacgccggcggctcacccgcgcaccccacctccttcccctcatcctgtcttcatccttcccacg

SEQ ID NO: 390901 - DNA, 122 bp, Homo sapiens
tgtacttatcctttgagaagtatgtcttcacctctaaactgtgaggcaaagttctgccaccgattctacacaactagtactgggactgaaaatacaaagctgcttaataaatgtttttagtt

SEQ ID NO: 390902 - DNA, 122 bp, Homo sapiens
tgcagccactttgttctcctcacccggcgacgcgagctctcgccctgctccgggagcccccgagcccaaagaagggaattagaaagtttagccttgggaggaacagagggaggcgcctctgc

SEQ ID NO: 390903 - DNA, 122 bp, Homo sapiens
gggggaagacgccagtctgctcaagtggtgcccaaaccagaaatgccagtgtcatgtccacgtttccgcttcttcggagaagggacctgtctcacacgtccagccagagcttctgagctgga

SEQ ID NO: 390904 - DNA, 122 bp, Homo sapiens
tggacccacattctctctgggtccctcctcacccggggttttaggagttgatgcaggtggcgaccccagaactgaagctccttttccagtagtcaccttgacgcccctaacatctaccccac

SEQ ID NO: 390905 - DNA, 122 bp, Homo sapiens
aactgtccagcactcaccagcttctgactggactcagagtgagaatctggttttagatggcgcctgacttgaagcaccctctagtgttaaggaaaggaaggtaacagcctgaaagagaggga

SEQ ID NO: 390906 - DNA, 122 bp, Homo sapiens
agcaggtctcttgctctcccttcacttcctctttcacccctcccagctcactctcctttccgttcatgccttgcgctccatggccagcacagggctaggagtgagatgacaacccgaagtgc

SEQ ID NO: 390907 - DNA, 122 bp, Homo sapiens
ctgtttcactactgttgtgctacttgtgtctttttacaccatagccaagcaaaaccactgcgcagttttctttttcatttccaggctttgcacacgccgcttcctctgcctggggcactttt

SEQ ID NO: 390908 - DNA, 122 bp, Homo sapiens
gccccggcgttgtccgcgcgtcacctccccagccctacgcgcgtgtccatcccgagcccgcgaagcgagaaccgccagaggctttcctccgagcggaagaagcgccttcacctttcagtgcc

SEQ ID NO: 390909 - DNA, 122 bp, Homo sapiens
ctcctctaccttaaacttctgggtgaagcccgttctctccagcagctgtggggaacaaggcgctgcctcccagcctccgctaaccggcttctgaggagcgtgcagagggagcagcagcaggt

SEQ ID NO: 390910 - DNA, 122 bp, Homo sapiens
gcttctcttaatggccaactctcctagtgcacataaaatacaacttaggcccaggtgtggcggctcatgcctgtaatcccagcactttgagaggctgaggcggacggatcaactgaggtcag

SEQ ID NO: 390911 - DNA, 122 bp, Homo sapiens
ggaggagtggctggggaagctgaggcagagccaccaggctgggctgcccagggcggggggcgaggtcccttcctgaaaagtgtgcaaatgacagctgggagctgtgtgaccccagcaatccc

SEQ ID NO: 390912 - DNA, 122 bp, Homo sapiens
tgaaatggtggataaactggttctaaaaataatcacagatgataatttgtacactcttaacgtcaatgtcctgttatgcaatttctccgttaaaaaaattatatttgtagagaaaaggaaac

SEQ ID NO: 390913 - DNA, 122 bp, Homo sapiens
tggagacccagactctgcagggttcagcatcaaagtccccagctatcagcccccagacatcgccctctaagttcccctaacaccagtcccaggaggcggccagtgcggtggctcatacctgt

SEQ ID NO: 390914 - DNA, 122 bp, Homo sapiens
ttccggcctgccggagaaatgattgctgggagttgaagtattcctggcgataatggctcccgctcccagtcttctccctccctgattccactctgccggatcccacacaccggcaaaagtct

SEQ ID NO: 390915 - DNA, 122 bp, Homo sapiens
aacctgtgctcagcattccaccccctggagcttgggcttggtcttccctgcgggtccctgcgctgacattcaggcggggagccaggaggcctggcgcgcctccagagcccgccgggggagcc

SEQ ID NO: 390916 - DNA, 122 bp, Homo sapiens
tcctgctggcattgggcaatcctgtttgaagattccggatctagacactggggtgtgggacggcttcagacaggtagaggtatgcgtggaaaattcagttctcagcagcttctaatcaggat

SEQ ID NO: 390917 - DNA, 122 bp, Homo sapiens
ggagcctcgcccttgcccccctccgggacgagcgggcagatctaaaagcttccctaccgccgcccaggcggtcgatagcagactcccaggctccgtttctgcctgcccggcagcccgggccc

SEQ ID NO: 390918 - DNA, 122 bp, Homo sapiens
tgagcaaaggcgggagagagacgtgggggtcctaccggggtcacttgaaaaccccttctccggcctcccccacgctaacccatctctcctggcacgcaagtctggaaaggccactggcccta

SEQ ID NO: 390919 - DNA, 122 bp, Homo sapiens
cctgaggcccttccgagctggcatctgcccggagcagctgacctaggggctctctgccaccggctctttagcaccccagaatcgttctgatgggcatgaggtggacccaacactccccctta

SEQ ID NO: 390920 - DNA, 122 bp, Homo sapiens
ggcagcaaagaacagtgtgctcagctcctcaggctccccttcacccttaaccaacaagcccgccactggtagatatgagagctcaggagagcctgtgcttttgagtgtactccaagttaagg

SEQ ID NO: 390921 - DNA, 122 bp, Homo sapiens
gattggctgtgggaagcttcccttccgctgtctggtgcttagaggccgggcacatagagacgtctctctgagctcttgacctttgtgggtttggaataacaggcaggaagatgccccgaagg

SEQ ID NO: 390922 - DNA, 122 bp, Homo sapiens
ttcatggccaagattcctaatcttttgttctgtttcatttccccgttaggagttgtaagacgttcatcgccgtgttatccttgagtaaaggtgagtattaggtgcgagagccttttgaatgc

SEQ ID NO: 390923 - DNA, 122 bp, Homo sapiens
ggcgtgcagggctccagacaaggacggaagaataaccaggaagcaaacccatcaactgtgcgccaggccctgggctaggcttctcttctaggtgggtcaataactcttcacagcaatctgtg

SEQ ID NO: 390924 - DNA, 122 bp, Homo sapiens
cacagtctctcccttagtttagggcggagctatcagtcctgagatgcgctttgatgatgacgtagaatagagtcgtccaagcctagctacccgagcgctcccatggtaacaggcggtggtga

SEQ ID NO: 390925 - DNA, 122 bp, Homo sapiens
accccgtctccaccaaaaaaatacgaaaaccagtcaggtgtggtgtcgcgcgcctgcaatcgcaggcactcggcaggctgaggcaggagaaccaggcagggaggctgcagtgagccgagatg

SEQ ID NO: 390926 - DNA, 122 bp, Homo sapiens
cttcaccccacactgggcaaaggtgctgtgaccagatgtcctctgctcccaggatcagcccggggtccctgcagaggcagcagaaaggggcccactgagtactcaggtgtcacccccttagc

SEQ ID NO: 390927 - DNA, 122 bp, Homo sapiens
ggctctggggagagagcatagaggagcccaagtaataccggagggccagaggtagtggggcgtggggtatggcagaattttcaggaattgatgggttcactgtgaaggaggactccttgtgg

SEQ ID NO: 390928 - DNA, 122 bp, Homo sapiens
tacaggtgggtgaagttaagtggctgctggagcgtctcgggggacagccagtgtctgcggcgccgagagggccgttcgtggactcaaatgggtatcacccctaccgtttatagtcctcccaa

SEQ ID NO: 390929 - DNA, 122 bp, Homo sapiens
aggagtcgcgaaatcactagtcggctcagccataccaccggccgggtccggagtctagcacgcaactgtctagtcttaatattttagaaaggataacttatcaaaatgaaatctggataatt

SEQ ID NO: 390930 - DNA, 122 bp, Homo sapiens
gagcctcggttacctccatgaccccctgctggcccccctccatagcccccaccggagctgcggggacccccatcacggccccagttctgatggtagtcataactcattgtcctggcagacta

SEQ ID NO: 390931 - DNA, 122 bp, Homo sapiens
tctgcccacaaagagggcagtgggcaattgttctcttcaccagagaatggtttttgtcaacgttcagtgagatcatttcaccagtgaggtggccacagcggcgctttctctacccaaacctc

SEQ ID NO: 390932 - DNA, 122 bp, Homo sapiens
gtgatgcatgtctgtaatcccagctttttgggaggctgaggcactagaattgcttgaacgcgggaggcagaggttgcatcacaaaatccgccacaacccctggatttcctcaagggattccc

SEQ ID NO: 390933 - DNA, 122 bp, Homo sapiens
gccgggctggagcaaccggcaaacgagccccactctctggctccaggaggctagtggtcacgtttggctcatttgctcttcacgggccccctcccaggaggagggggggaagcaccaggggc

SEQ ID NO: 390934 - DNA, 122 bp, Homo sapiens
gggttgacgctggcgtggcggccatgtttattgagggcacctggcttctcccgcttgcgccgccgggtgagcctgaaggcgcgcacccacctggctccaggaagagggaccgagctcgcgtg

SEQ ID NO: 390935 - DNA, 122 bp, Homo sapiens
cagcggcgcagcttctgtagttgggctactggaggggtcgctcagaaacctcatacttctcgggtcagggaaggtttgggaggatgctgaggcctgagatctcatcaacctcgccttctgcc

SEQ ID NO: 390936 - DNA, 122 bp, Homo sapiens
ttcaagccagagtattggtcctcctcccagtacagaccacaccaggtccctggtcagccccgtcaagcctcttgaggaggagcctaatgcctgcacacttaagcctgctgggcaggtgcagg

SEQ ID NO: 390937 - DNA, 122 bp, Homo sapiens
ctgtccctggtggccttgcctgcctgccagcccataacgtcatccctgcaggaggagaggcgccaccttactaaggaggtggggatctcagacccgtgggtgggtcctgagccattccactt

SEQ ID NO: 390938 - DNA, 122 bp, Homo sapiens
tccaggtcacctatcacgacaaatcaccggccttctcctgaccccgagcagcggcccctccggtcccccctggacaacatgatccgccgcctctccccggctgagagagctcagggacccag

SEQ ID NO: 390939 - DNA, 122 bp, Homo sapiens
ggactggggccgcgagggcatacccccgaggggtacggggctagggctaggcaggctgtgcggttgggcggggccctgtgccccactgcggagtgcgggtcgggaagcggagagagaagcag

SEQ ID NO: 390940 - DNA, 122 bp, Homo sapiens
caacagaaggggctctcggcttgtctggcctctctggcctcccaagcaggtgtgggagggcggggcaagtgtgggctgatcagctactccatatggccagggtcctgtgctggtgcctggct

SEQ ID NO: 390941 - DNA, 122 bp, Homo sapiens
cccataaaatctggccaccctcttccccgacccgatttaccaaatgtcagagtcccacagcgcaccgagaaacaccactgtcctcctggagctctcccacacaatacaggccttgactgagg

SEQ ID NO: 390942 - DNA, 122 bp, Homo sapiens
agatgcttccagtaggaggagcaaaatatctggttgcctctcttttctgatgttagcccccgcagattgcacagatccattacttctgtagggattgcaattaatattctagtgctattgat

SEQ ID NO: 390943 - DNA, 122 bp, Homo sapiens
ctggctgttggatgaattctctttttccctctgacccttcagccccgctgggtgcgtgggcgcctgggaggctcaggctgctgcccggagggggcggctgctgactcagatctattgctgct

SEQ ID NO: 390944 - DNA, 122 bp, Homo sapiens
gtctcaaaaaaaaaaaaaaaaaaaaaagaacattacgtccagcggactgaaactccagaacggctacgatcttcgctgaaactactacttacagatacgagaactggtggaccacactatct

SEQ ID NO: 390945 - DNA, 122 bp, Homo sapiens
tatgcccagggaaaagattacagccttccatcagaatataacacaaagcagccctttaaccgggcaataggtgtattttggtagaaatccttgtgaatttgcaaatcatggatgttccaaaa

SEQ ID NO: 390946 - DNA, 122 bp, Homo sapiens
tgaaaacaagtagcttcaatacggtaattactgtacttgttaaagctgacgtaaactccccgagaatttcctgtcccttagaaattacccctaaaacaaaaacactgtcacgtgggcaatga

SEQ ID NO: 390947 - DNA, 122 bp, Homo sapiens
cctgtgttatacttcctatttttaatgggcttttatgatgttttaggtttttttgaatcccgtgtccttcaagtgctttctaactttgagaggaagaaattgaccacctggactatggaact

SEQ ID NO: 390948 - DNA, 122 bp, Homo sapiens
gaacaactactgcccccactatgagaaggtgagtggggactacgggcaccctgtctacatcgtccaagagatgccgccccagagcccggcgaacatctactacaaggtctgagtgcccggca

SEQ ID NO: 390949 - DNA, 122 bp, Homo sapiens
tcaagaaagtgtcgcgattcactccaaactttgctagttttttcactagaagcggagagtcggggtgatgggggttcaactagctgggggagggacagcattcaaaaattctccacccccgg

SEQ ID NO: 390950 - DNA, 122 bp, Homo sapiens
acctgcgcttgtcactatcgcctgagtaaaaataaagccttcctaatttacctcacttctcggggaggggaacgtccacctgatcccaaaatgaacttcgtgattctgagcagactctgctt

SEQ ID NO: 390951 - DNA, 122 bp, Homo sapiens
attcctatatttaataatattaatagtcatatttgctccgggcgcagacccataactctacgtccgtattccctactgaacgttatgcccagtcttgactccaaatccccaggtggtcgcct

SEQ ID NO: 390952 - DNA, 122 bp, Homo sapiens
acctggcctaactcctgggaggtggagcagtgaacccaagggcccctgactgcgggagcccggagctcagtgttcctctacaggttcccccaaaggggtcccgggtggcctggaattaacag

SEQ ID NO: 390953 - DNA, 122 bp, Homo sapiens
tacacggcccccaagtggagcaagctcatcaggacgacattcctccagacgatgttctgccgctgcccgcgcgcgcctggcctctccgggccgccgccgccctcagagctttcgagcccggc

SEQ ID NO: 390954 - DNA, 122 bp, Homo sapiens
gggagcgcgtgggagttgccgtcgcccagggtcccatcatcagcacttgctcttttccatcgctgtgtcgttctggcttttttctcaacccgctctagcaggcttgtagcagcgtctcattc

SEQ ID NO: 390955 - DNA, 122 bp, Homo sapiens
cagtggagtggcagggtcccagccagtgagtgagaagcagttggcagctgagctagacctcgtcctgcagcgacatcagaacctccaggaaaagctggcggaagagatgctaggactggccc

SEQ ID NO: 390956 - DNA, 122 bp, Homo sapiens
agcatgtttgaagagcagcaggtctcacagagtttgctctttaatactctccccagcacacggaaggggaagggggtggaggttgctgctatgagagagaaaaaaaaaacagccacaataga

SEQ ID NO: 390957 - DNA, 122 bp, Homo sapiens
gttaggggggcctcccagcagaacatcccagggagattcactggaggagaacgggccccacgcccttggggtcgcaactgagttcagggtccctgctggatgtccagtggcctgtcccaact

SEQ ID NO: 390958 - DNA, 122 bp, Homo sapiens
ttaaagtaagtcaggattcaccttatgcagtactgctgtggtttcgcagtggccagaaaacgaatgtcacctccccgggtgccttataatcgctagcccttcgggggcaattcttcacgaag

SEQ ID NO: 390959 - DNA, 122 bp, Homo sapiens
cgggaggtgccagctgcggggactgctgggacttgtagtccgcgcgttgggggaccgggacggcagtgtcggggggctcggggctggtgcccggcgggcctctgcgtgtcccctggagcctg

SEQ ID NO: 390960 - DNA, 122 bp, Homo sapiens
actaattaaatacttttatttacaacaaaccaaaccgacctgcaagggagggccagtccccgtccctgcggcggtcgccgcagcagcagcagcaaaaggcagcggtggcgtgcaggtccagc

SEQ ID NO: 390961 - DNA, 122 bp, Homo sapiens
gacgcggcagccagcttggcggggctggggtgaaagaggacgctgcgtgggggagggctccgcggcttctgactggctggagcatcaggattcatttgcataatattttctgacggcttctg

SEQ ID NO: 390962 - DNA, 122 bp, Homo sapiens
tggcagacagcatccaattaatccccactacccaattcagtttcttcccctgacctgacacgtccctgcccagctgtgcctcccactgttcaccttttgaggcacaaaacgggctgtttatg

SEQ ID NO: 390963 - DNA, 122 bp, Homo sapiens
cagagtaggcatttgataaatatttgttgaagaaatgaatttgtaaaataagcagacacacggtaatcaaaagtccctgtggtaagagaaccccttttgtagtatgtatgtcatgtaaagat

SEQ ID NO: 390964 - DNA, 122 bp, Homo sapiens
tctactttctatcctgtattgggtctttgtagactgtaaggcgtggggttcctgctctcacgcagcctatcacagcatagacaagagcattatgtaaacaacacagaaactcattccccaaa

SEQ ID NO: 390965 - DNA, 122 bp, Homo sapiens
ttgtgcattctgtaaaaagtgggaaacactgttctccggattgtgtgggtgatcgccggtcgcctagcttgccgttcttcaggtatctcctgctgctccagaatctacatctgaatgtcaag

SEQ ID NO: 390966 - DNA, 122 bp, Homo sapiens
agagctggccgtggcggccggcgcgccccgcgcacaaaagcacccagccccaggggagggcgatgaacacaccacatcccgggcccgggccccagctgctgctaccgctgcgtgcgctcagg

SEQ ID NO: 390967 - DNA, 122 bp, Homo sapiens
aactcactgtggttgcatgtgtttggcagtggctgcatccctttccaacagcagccctggcggggcagcccctcttcctgatcttccagactcactgggcaatgttggtccctctccttgtc

SEQ ID NO: 390968 - DNA, 122 bp, Homo sapiens
tgcgcgctcgccgggctgctgtgggtccgcccctccgctcctgcaccgacgccgcaccttcgcctcgagttctcctgtgatcccgtgtttcctggccggagtttcttaccgttctctggaac

SEQ ID NO: 390969 - DNA, 122 bp, Homo sapiens
ctgcggcctgggtgacctgcaatctacgggcaggacctgggagacccggccgagcagagccgtggtccgggggtccgggcggcattacctttattcttgggcatggcggtggcggcgacctc

SEQ ID NO: 390970 - DNA, 122 bp, Homo sapiens
gggaggtcaaggctgcagtgagtcgtgatcacacgtctgcactccagcctggttgaagagcgagattccgtcaaagaacaagaaagaagaaagaaggagaaggaggagaagaggaggaggag

SEQ ID NO: 390971 - DNA, 122 bp, Homo sapiens
ccccgtcgggcccggaggtttgtgcaaccgcggagaacaccgagtgctggtcgcacggggcgtgccgagccgccttccggcgcgccctccgcactttccccgcctagtcatccctcgctccc

SEQ ID NO: 390972 - DNA, 122 bp, Homo sapiens
tgtacaaacgcggcataagttgacacatggtccgctgcataaagacagtagagaaaaacacgacaaaatgtcagtttgaatatgcaagtggtcaaagctagagaatgaataaagacttatga

SEQ ID NO: 390973 - DNA, 122 bp, Homo sapiens
tcccaccctactcttcttgtttcatggtcatcttgtactgtaaccaatctctcctataatcgacaaaggtccccagtcacatcaacaattctaaggggtcctgaccacataaagcatatatg

SEQ ID NO: 390974 - DNA, 122 bp, Homo sapiens
ggaaagctttcaagaattgcacacgtgaaatgctctttgcgtgtctcccggtctcccacccgcccccgacacagaggcgcaggagtaaccctgctcccttccgcgtcctcgccccaccacga

SEQ ID NO: 390975 - DNA, 122 bp, Homo sapiens
gagctggagcgctgcgcctttaattctggggcgggcggggggcggcgggaatttctgctccggttccctctgcatcgcgggggcagctgtcacctgtaaggcgagcgcggcgcgggggatgg

SEQ ID NO: 390976 - DNA, 122 bp, Homo sapiens
tttgatcgtcccggcagaacgacgtgggcggccagcgcagcctggtcaacaagtggacgacgttcctgaaggcgcggctggtgtgctcggtgcccggcgtcgagggcgacacccacttcgat

SEQ ID NO: 390977 - DNA, 122 bp, Homo sapiens
tagcaagggggctgtatggcttgaggccatagtccaggacatcatcggggtatgcgggtccggagggtgggctggcgaccttatgtgcattcggctcttctggaaagagaagggggaagggg

SEQ ID NO: 390978 - DNA, 122 bp, Homo sapiens
gcctgttagtgcagtcaaaaaatattcttaagcaataagatgaatttaacttgtcatttacgaagtcgaattcaaatggagacagaggagagaactcaggagagggatcctcctgttggaaa

SEQ ID NO: 390979 - DNA, 122 bp, Homo sapiens
gcgcctgcgcagtgggagttggactgaaatagggtggggaagggcgcgtcttactttgtgcgccggtctttcttctgcgcctgcgcatgagttggactaaccgggcttcttatctttctctg

SEQ ID NO: 390980 - DNA, 122 bp, Homo sapiens
attgcggaagtgaggggagggagaggccgagagaaatttcggtactgcgcatgaaccgagcgtgacgttgaggtttgaaataaccggcaaagagtaaaggctgaaactagcttcctgaaagc

SEQ ID NO: 390981 - DNA, 122 bp, Homo sapiens
gtgcttttgggcgaatcacctcattccccggacctcatctggaaaatgtggaaattataccggatgactggtaaggttctacgattttattctgatagggtctgcacatccttgtggttgca

SEQ ID NO: 390982 - DNA, 122 bp, Homo sapiens
gcatctgttgggcggggctacggggcttgtgatgccgcccgctgaactttgtgacacagccgcttgcggagacaggaagcggtcgcagcacgtcaggcccgccctcttccgcggccgcggtg

SEQ ID NO: 390983 - DNA, 122 bp, Homo sapiens
ggtcagagtcagagactcaatgacatcctaatgctcagcgaattgggagtaggccacgcacgatacctggaagctctgaggtttaggcacagaagtccacatcacacccattctagaaagaa

SEQ ID NO: 390984 - DNA, 122 bp, Homo sapiens
ggcttacttaacactcttgaacgtcaaaacccacgctcagtacccgcttcaagtggaagtcggtgttgagatacaagcataggaacgaactcaaggctaacagctgttctgtattcagagcc

SEQ ID NO: 390985 - DNA, 122 bp, Homo sapiens
aggaatgagagttactggcaggaaagaggagagcctctgaaaccaggaatcacttcccaacgtgctctcctccgctagtgcagagtggagggtgaggtcagtgcaaccattctcacctcaat

SEQ ID NO: 390986 - DNA, 122 bp, Homo sapiens
cgggaccgctcctgggccttagagaagacgcggataagggccaaggaaagagggaggtagcggttgctgagctccttcggcgcttcggctcctgtagctctgactattcggaccgtcaaggt

SEQ ID NO: 390987 - DNA, 122 bp, Homo sapiens
acactagtgagaaatctaacaagtttgtttatttaaggcaagggttggcaaactatagcccgtgggcccaatccagccagctgcctactttttacagccagtaagctaagaatggttttgac

SEQ ID NO: 390988 - DNA, 122 bp, Homo sapiens
catgaatgctgaattagttaatacctaatttgttcctagaagaaatacaggctaggttcccgtgagcctctggtcaaaacattttcatcaactgatcaacatagagccttgctttatatgtg

SEQ ID NO: 390989 - DNA, 122 bp, Homo sapiens
tgaatgagtgctggaagaggctggctgcttgggtgccggcaggatcgaactccactcactcggacccactgacttccacccttcatgggagggagcacataggtgagcgggtacaggaacca

SEQ ID NO: 390990 - DNA, 122 bp, Homo sapiens
agtaaattaaccttggtaagggaattgtttttatgacagagaagaatgaagctttttgatcgtgaagaaaagtgagttagatttaaaaaggaaaactttttaggaaggataaaggacattca

SEQ ID NO: 390991 - DNA, 122 bp, Homo sapiens
tgaccccaccaggcatcccacaaatgtgacccttatgtgtctgttaaaaactacacttaacgttttttaattcgagaaaacctatctgttgctgttatgtacagtgctgtaatcagcaaacg

SEQ ID NO: 390992 - DNA, 122 bp, Homo sapiens
ttcttttatttcttgacatgcacacatatatggatcaaaaagtatgtacaactagaaaaacggactccaagcaaaaatggaaaacatgtttccatgagcttagatttccgggtatattactc

SEQ ID NO: 390993 - DNA, 122 bp, Homo sapiens
ccagtcccggataaagaccttctaggtatgaatgatctttgtctccatatctttgcctaccggagggaggaaccaccgtaagcggagactccgggcggcggccggcggaagggctgggcggg

SEQ ID NO: 390994 - DNA, 122 bp, Homo sapiens
tcttgggctcttccttggcggccccttcggtggagatgaccttcctcttgggcatcctggcggcagggagggcgcgtgccaggtgcctgcgggccgcggcgcaccgagagccttcacgaagc

SEQ ID NO: 390995 - DNA, 122 bp, Homo sapiens
ccctcccagctgtcacaggcacgtgtcccaaggcagccgattttgcttttattgcttgctcgtcttgaggtactcccataggctatttggggcttttctgtatcgttcttttcactttcccc

SEQ ID NO: 390996 - DNA, 122 bp, Homo sapiens
gctgctgtcaacccggtaaagctcacaagcccccacaccagatccccccagatcctctcacggctcagctccagggaccggcagagactctccccggacgggtctcgcctccctaagggtct

SEQ ID NO: 390997 - DNA, 122 bp, Homo sapiens
aagttggtctcgacacctggactagccgggttgtatttggaaacgcggagtgagtttttccgtgctgtgtaggtaagcgaattggcgggttggggtttgtggtggatatttgggccaaaact

SEQ ID NO: 390998 - DNA, 122 bp, Homo sapiens
cagccggaagtccggtcccgcccgcttcctgtgcgtcagcgcggccgccgtagcaatgcgcgcatgctcaccagcctttctctcggacccggtagtggtccgtgaagtccgcggagtgggcg

SEQ ID NO: 390999 - DNA, 122 bp, Homo sapiens
ctcaggctcctgtgaaatcaacttcctgacactgagtcttctgagataggaattaactttcgtctctgttttttcagcaactagcagagtagttgacatagaacaggtatttaataaatatt

SEQ ID NO: 391000 - DNA, 122 bp, Homo sapiens
gcacccacccgggcggtttcacccgccccgccggccccacccacgggctgcgggcggccccgcaggacaaccctcacagacggcggcagaggcccggcccagccaggactccaccccggtga

SEQ ID NO: 391001 - DNA, 122 bp, Homo sapiens
ggccatctcccagtagtcgtagctgtgcaggatgctgttggtgatgctgacgtggttggccgccatctggtggatgcgctgtgggatgctgacgatggtcgacggggacagggcgctggcgt

SEQ ID NO: 391002 - DNA, 122 bp, Homo sapiens
ggacccggcgggccgctcggcacaggccgggacatgaacgcctggaagtctggctgggagcggacccatgatcgaaggaccaaaggagccgcttgatcgctggacctggccctgcgacccca

SEQ ID NO: 391003 - DNA, 122 bp, Homo sapiens
taaggatttcttctgcttatagtcttgcattttatcactcttctattgcagttttcattccgggaaaatggaaaagcaaaacaaaaacaaaacagaacagtaactcagggctcataaggatg

SEQ ID NO: 391004 - DNA, 122 bp, Homo sapiens
tgaacacctgctacataccaggcacttgaggtttcactgagcaatgcaaatctcagccctcgaggagcatatactttagaactggaggaaacagacaataaacaatacacacagtcatgtca

SEQ ID NO: 391005 - DNA, 122 bp, Homo sapiens
acgcgagtggggacaggggggccttcagctgggccccagggaaccgccccgtggcgctctcggcctcgctctcactcacggtgctacaggtggtaagcaaattgactatgttgtggtcgaaa

SEQ ID NO: 391006 - DNA, 122 bp, Homo sapiens
tgccttcgtccggagctgctttgacctccgagggggcagcggtggcggtgggggcctcaccgtgggggactggctggactccatccgcatgggccggtaccgagaccacttcgctgcgggcg

SEQ ID NO: 391007 - DNA, 122 bp, Homo sapiens
ccgccccagaaggaacaggtgtgtagtgagtggggaactggatagggaaccagaatacttcggttgccgtctcagagctgctcttaactagctgtgagaccttaatcaacccacttaacctc

SEQ ID NO: 391008 - DNA, 122 bp, Homo sapiens
tacagaaaggggaaagggaatgtttacaggaacaagtcatcaaacacctttgctcagtttcgccatgtcctaaactattctgatagcttgcatctgtatagcattttacagtctcaaagcac

SEQ ID NO: 391009 - DNA, 122 bp, Homo sapiens
agcctcaggtgagatgagccgcaagggtccggggccgcgtctctgcacgctggggtggggcgcgctttgcacagcaggccggtgcctgggctttcaggagcaattccgttttgatctcacat

SEQ ID NO: 391010 - DNA, 122 bp, Homo sapiens
tataccatactactctaccctctcccccgcttaatgccatgtaaagtactacatgttggccggttgcggtggctcacgtctgtaatcccagcagtttgggaggccgaggcagaaggatcact

SEQ ID NO: 391011 - DNA, 122 bp, Homo sapiens
agcactgctgaccctgaggcccaggcgggcgggagctcaggctccgcagaggactatggccgggggtgctggggcaggggcctaggggaggggctgcaggggccaggcaggagctgtgaaac

SEQ ID NO: 391012 - DNA, 122 bp, Homo sapiens
tgtatactggggttaccaggatgactaagacaagcactaccctcttggaggtgaagttcacgaaggggagatggacattaaataactggttacatggtaagtgatctggtgataatagtggt

SEQ ID NO: 391013 - DNA, 122 bp, Homo sapiens
agcacagaggccacgggtccgataagtcccgagttggctgccttccctcactatgtagcccggggctctgtgctcatacatactttacccaggagctggcatgtgaggcccctgcagcctcc

SEQ ID NO: 391014 - DNA, 122 bp, Homo sapiens
tctgtgatgcttcctcctctcctcactatgagattctcttcttcctttgggctcttgactcgttgtttgcccctcttccctagcacctatcaccccgcagctaggattacacacactttata

SEQ ID NO: 391015 - DNA, 122 bp, Homo sapiens
tacaagacggcctctcccttcgtcggagcccggatcctgcgccacttcctgcgccttctacgaccccaggcggcccgacaggcaccatggccacaacctcatggccttggacttaggcttcg

SEQ ID NO: 391016 - DNA, 122 bp, Homo sapiens
ctccccgggccgggcgccggacggtgggcggctgcgagcgggcgggagggctgcggaggacgcgccgcctgcgcctccttcccttcgtgcctcgccccgggcggcccggggctgccgcggtg

SEQ ID NO: 391017 - DNA, 122 bp, Homo sapiens
tctctgctggcccacaggcccctcccgtggatggacctgcagggttgcctcccctcatgtcgcccccagccgcacctgaaggccccctcagttggccctctcagcccaggccccaaccagca

SEQ ID NO: 391018 - DNA, 122 bp, Homo sapiens
tgaggagtacctatttgtcatctttgacttcctgattggcgtcctcatctttgccaccatcgtgggaaatgtgggctccatgatctccaacatgaatgccacccgggcagagttccaggcta

SEQ ID NO: 391019 - DNA, 122 bp, Homo sapiens
ggcgggtgaaacgattaccacccatagtgcgaggagagccatcgacagatattggcccaccgccgatgggcgcctggttgaatatgacatagatgaagtggtatatgatgaagattcacctt

SEQ ID NO: 391020 - DNA, 122 bp, Homo sapiens
gctagttagcagccggcgagacggagacagagggtggttccgggattcacagtgcagaggcggccagagcagtgcacagcgccccgagaaatgggcccggattccctgggattgaagggaaa

SEQ ID NO: 391021 - DNA, 122 bp, Homo sapiens
ggtccgaaagacgcggggcgttgtcggtttgaatgagagcgcctggagccggggcgcaggcgcagaggagggcggtgttgagaccggcggagcggcgggacccctaggtggcggagggacgc

SEQ ID NO: 391022 - DNA, 122 bp, Homo sapiens
actaaagtcctcagtttccaatctgtctcaaagtactgggcccgggggtgggaggcttgtcgcggccccacccctgcttactaaccgagccctccccgcgcagaacccaggcccgggaagag

SEQ ID NO: 391023 - DNA, 122 bp, Homo sapiens
tcccggggctgccaagcggggcgtgttttggtcactggtgctgcccgctttggcgtaaggcgccctcccgcgtccgcatctgctctttcctgggctctgaagggtcccggatgaaactctct

SEQ ID NO: 391024 - DNA, 122 bp, Homo sapiens
gggctcaggtgtctccgtccatgtgcccctgccacctccagtaggtaggattgaaattgccgatagggcaggctctggggctgtcccctcccataccctcccctgctcccatttcctgtggg

SEQ ID NO: 391025 - DNA, 122 bp, Homo sapiens
gctcccaggttaatgctccaataaaaccaattaaaaaatctcctagtggcttccggacctcgatctttaacctaaaataacagggaggaaagacacttgaaaatatatgacagtcttcaagg

SEQ ID NO: 391026 - DNA, 122 bp, Homo sapiens
gcggtgcgatcatagctcactgcaacctcaaactcctgggctccagccattttccctcctcggccttcccagtagttggaattacaggaatgtgtcaccatgaccagctaatttttaaaaat

SEQ ID NO: 391027 - DNA, 122 bp, Homo sapiens
tgagcgaagtcccgaacgacgacgggtggaacggttagcggcgatcgggcggttggtctccgtactaccagaccttgctgtcggaagagacaaatggtagaatgacaggccacgtttggccc

SEQ ID NO: 391028 - DNA, 122 bp, Homo sapiens
acaccatggaaccgccacgcatgtgtagctgccttcggctgtctaatcctcagagaaccccgcccccatccacaaacccaccactcacaggcggtcccgcctggttccagcgagccgcttcc

SEQ ID NO: 391029 - DNA, 122 bp, Homo sapiens
gttgagacgccgagtcaagtaagagagacagtgaccgaagggggtcttgagggtttccttcgtgtgttttcgggcacccctaggtcaggtgatgtcgtctcagacttcacctgggtgctcct

SEQ ID NO: 391030 - DNA, 122 bp, Homo sapiens
atccaatttcatgtgtctaggatgacccatcaactccagagaagggcaggaagaaggtgccgctcttaggctcagagggactcagaggtagaagttcaaccatcctttccctccccacccac

SEQ ID NO: 391031 - DNA, 122 bp, Homo sapiens
cggttattccacgcatcggttgtccctcaggtaagtggtgaatgatgcctcagcagccttcgcttctactcctagagcagagctttgcatttcgacggccgttctttcaccatttcagagac

SEQ ID NO: 391032 - DNA, 122 bp, Homo sapiens
gtggaagacggggagggctctatgtctgggaaggggctctgaagaccacgtgggggcgctcgaaggggcctggggccaccctcctctctgggtcaaaggtcatcgcaccggcaggggagaac

SEQ ID NO: 391033 - DNA, 122 bp, Homo sapiens
ccaaacaccgcgtctccgcctcgccctgcgggccggaggatattcaggagagtgggaaaacggccggtcccaaggttaggcttaggcggcaacagaaagcaaactgaacgcacacctcttta

SEQ ID NO: 391034 - DNA, 122 bp, Homo sapiens
gggcagcgtcctcgttggcgatgccatgggtggcgtcctcgttggcgatgccgtggacggcgtcctcgttggcgatgccctgggcggcgtcctccttggcgatcccgtgggcggcgtcctcc

SEQ ID NO: 391035 - DNA, 122 bp, Homo sapiens
cggcaggcggaagggcgagagacttggacaggaggtgcatcttgcccggggaaggctgaacgaatgagagctcggtccctggtgagaaagagcccagagcccgcgagaggcgggcagcaagg

SEQ ID NO: 391036 - DNA, 122 bp, Homo sapiens
ctcagggaactatttcccagtttggaaaactgctccagacttgggaccaggaccagctgccggaaaagagccgcctgggaaggggtggaccgcccggggcttcacctttgaccccgggagaa

SEQ ID NO: 391037 - DNA, 122 bp, Homo sapiens
ccaccttcaaattaatatgatcgttgttctcagtcttgactccttccttgggcttttcttcggccatggcgagcgccggagtctcctcagctgccgcttcacaaaagaggtaccaggtccgc

SEQ ID NO: 391038 - DNA, 122 bp, Homo sapiens
gctgcgccccctggcggcggggcccatccctctccgctcccggccgccgccgccgcgggccggcctcgctccatttgcagcctccggaggcttcgttcctccgagcggctgctcccccggcc

SEQ ID NO: 391039 - DNA, 122 bp, Homo sapiens
cctccaggttcaggccctccctgaccacagggctgttctcagaaggaaggcaacaaggaacggttccgcagtctgtctcgggcgctgtgcccagcgcacattccaggcctcatcactgaaca

SEQ ID NO: 391040 - DNA, 122 bp, Homo sapiens
gctccaaggctgttgttttgtaggcttggaattcgtgagagctctctcccgctgagagcccgaggggggagggagccgtgaccccacggagactccctggtcaccgcctcccctttgtgagc

SEQ ID NO: 391041 - DNA, 122 bp, Homo sapiens
cgggcagagtggggccaccttggggcggaggttttgcgtctgtggcgttcttggaagacacgtgaaagtgaggccgtaagccgatttatgtaaagcctttacttactatatacatgcatatg

SEQ ID NO: 391042 - DNA, 122 bp, Homo sapiens
taggaccttttttttttcttcctttaagaaaatcctaggtccaaataaggcgagggctgccgggagcacggtgagctggccaagtcctcctgagcaagcgagtggcggctggcccggccggc

SEQ ID NO: 391043 - DNA, 122 bp, Homo sapiens
tttaagagattctcatgcctcagccttctgagtcgctgggactacaggcaagcactaccacgcctagctaatttttttgtatttttagtagagacagggtttcaccatactggccaggctgg

SEQ ID NO: 391044 - DNA, 122 bp, Homo sapiens
ccttgcaaaagtggcagaaaaaccggtgggcggcgccgtggagcagggggcggcgctcatcggggaggccccggccgcacaggagcccacggagggggcgggaggctcaggcatggcgggct

SEQ ID NO: 391045 - DNA, 122 bp, Homo sapiens
cagctcatcaaggcctgatatgtttaccacattgtttttgttttctctttaaacacttggcgaattattctgaggctttcatttctctataatgaacagaatatgtttattaataaaggccc

SEQ ID NO: 391046 - DNA, 122 bp, Homo sapiens
atgaagaagcacgaattactcagtgaggcgtggccaactgtgtttttagagaaagtcccccggcgctcagggctttgtgttttctggaatgcgaggtgacaagcccggtcccaggtggcccc

SEQ ID NO: 391047 - DNA, 122 bp, Homo sapiens
gcgaaggggcgacccctggactggaggcggtgcctcccgttgctcccccgcctgcgaccgcggcctcaggtccgatccccaaatctgggcctgagcctaagaggaggcaccttgggacgctg

SEQ ID NO: 391048 - DNA, 122 bp, Homo sapiens
agtgctgactctgggcgccgctgttggccaaagtggagagcttggcgctccagatctcctcgcgcagccgcagcgcgctttccagggcagccccagctcagactccccagcgccagccttta

SEQ ID NO: 391049 - DNA, 122 bp, Homo sapiens
cttggtactggtgggtgaaatgggtccgggctacctgttgctgcggagtcctaacagaaccgctacaggaatgggcccaccctacctaagaaaaactgagggctggagcacgggttagcctg

SEQ ID NO: 391050 - DNA, 122 bp, Homo sapiens
gaaaagagaggtgccggcaggagccggggctgcacgcggcactcggtgctcctgggctggcgcgggttccaggtgagcaccagctcggcaagccccacacttggcgtggccagctggtacct

SEQ ID NO: 391051 - DNA, 122 bp, Homo sapiens
tcaggccacactagcggttccagcgctcttggctctcagcccccacctgccgggaagggtcggtctgcactctgccttccacgacggcaggttagaaaatgattgtttgtttacaatgaaaa

SEQ ID NO: 391052 - DNA, 122 bp, Homo sapiens
tataaaggcatgctaggaaatggtcttatgaaatcatcacaagtcattttttttctgttgcgaagaactgatggtaaaagcagtttgcatgcggcgttcagacttactatctaggaaaaaga

SEQ ID NO: 391053 - DNA, 122 bp, Homo sapiens
gagatgggggctttggggattcgggttcacgcaccaccccaaaagcattcgaaggccgggcgaggccaggcactgccgaggagggcgggccgggggaggagcgtattggccacgcccggcca

SEQ ID NO: 391054 - DNA, 122 bp, Homo sapiens
gtgtaaataattctgagcagctccaggtcctgagcccagcaagcacgtgctgcggcagggcgcggggagggcgcgcttcgcggaggaagattccgggcggcccgaacgtgctcgcgcccgta

SEQ ID NO: 391055 - DNA, 122 bp, Homo sapiens
ggagagaggcggggccggggcgggttgttgtgaggcgactgcgctactgccggagcggggcggttatggcggctccatattaacagcctcctcctcctccgccgccgccgccgtctcctcct

SEQ ID NO: 391056 - DNA, 122 bp, Homo sapiens
ctaagcagttcggaaaagcgtaatatttgggtgggagtgatccgattttccaggtgcgtccgtcacccctctcattgactcggaaagggaactccccaaccccttgcgcttcccaagtgagg

SEQ ID NO: 391057 - DNA, 122 bp, Homo sapiens
tgttaggtaaacttcatctttgcctgcatcatattatgtattggttcttctctgccccctcgattgtaaactcctcaggggcagaggtaacagctttgcagccctgggagttaggtttgctt

SEQ ID NO: 391058 - DNA, 122 bp, Homo sapiens
cacaatgcctggcacacaagcattccatgtatgtttgtgggtgagatttttgtttggtttcgttttaccattgtgaaagtcttcatacttaggaagtcttgctgctcctttatgctccttgc

SEQ ID NO: 391059 - DNA, 122 bp, Homo sapiens
gctggcctatctatgagggtgctggcctggcgggtctgtgcttgggtgcggccactatagcgaaatttggaccccaaggtcaggaacttggcttttggtggctgctctggagaaacaagcct

SEQ ID NO: 391060 - DNA, 122 bp, Homo sapiens
gaaggggtggctatgtaggcagaccaagccaatcttctggaaaaaggctaaaactacaaacgagattgtgctaaagcttaagtgttgggcccaactgcagatctaggagaatgctggctact

SEQ ID NO: 391061 - DNA, 122 bp, Homo sapiens
aggcagtctgccctcaatttgagatgagttataaatagcagtgccgacttccttaactaccgctctctgaggtaaaatgcaggttaattactgtgggaatcaattaggggggttcttttggt

SEQ ID NO: 391062 - DNA, 122 bp, Homo sapiens
ctttagttgcggcctcagtctgacaggccagggctaagtaagggtgaaaagttcaccgtccggaagtgctgttgaggtcagaatcacgtgatgaggagccgacccagactcccggtaattcc

SEQ ID NO: 391063 - DNA, 122 bp, Homo sapiens
agacatgctctggaaatgtgcgatgtgtttgggaaagaactcgtgtctgcttccaaataccggattaaagagcgagagcgtggggctccaggaacacctgagtgctttttttgaaaccatgc

SEQ ID NO: 391064 - DNA, 122 bp, Homo sapiens
gaacacaagtgttttggtttttttgaaaattaactctcctcaaacaacccgatatatcttcgccatgcgaggcttctttaatccttcagaccacctgcagaaaaagtgcctggtaagtaaat

SEQ ID NO: 391065 - DNA, 122 bp, Homo sapiens
gtcgtgtacagcgtccacgatagcgtgccttgtcggtatcattagcaatgtcgtataaagcgccctcattggtgatgtcttgtacggtgccatcattagcgatgttgtgtacagtgtccttg

SEQ ID NO: 391066 - DNA, 122 bp, Homo sapiens
gggatcatttctatagtttgttaaatacttggtgttctgatactttactcaataagcatgcgtatctctgaaatacaggccattccgtatctggtactcactaagttcacaaactgtgatct

SEQ ID NO: 391067 - DNA, 122 bp, Homo sapiens
tcaagattagaaagtaacaaggaatatgcccaaactgtcaaatgtcacctgttatgtattcgtccctattccttaactatgtatttttatttcagtgagagaaggaaagttgtaaactagcc

SEQ ID NO: 391068 - DNA, 122 bp, Homo sapiens
agttgcgtcggagcatctggctttggggtggccctgggtgggactgcctgtttggattaccgcgcagaccttggcgccgcccccacacctgctgccagaagttgggtcgaacagattgaccg

SEQ ID NO: 391069 - DNA, 122 bp, Homo sapiens
gacgtctgaacaccactccacgaagtccctaactaccacactatcaaatgggctgtgaatcggtggtgggaaatgcctccaaatatgcagatttcagcagaaaatacatttgactgggttct

SEQ ID NO: 391070 - DNA, 122 bp, Homo sapiens
ggaggctcccctttccctgagttaccccgactgactcggacctgggctcagtgaggcatccggcccggctggggagcggagcgcggtctcggcagctccccttcccttgagaaagcgggaac

SEQ ID NO: 391071 - DNA, 122 bp, Homo sapiens
ctgtcaagtcctataaacctgactcaaagacatcgcaaaccgtgcatgtcaaaaactactcggctgggcatggtggcatgtacctatagtcccagccactcaggaggctgaaatgggaggat

SEQ ID NO: 391072 - DNA, 122 bp, Homo sapiens
caaaagcctgcctcgtgagcacggcaagagctctgccagggcagtcccagctggcccaggcgccgcagcgctcccgagggccgtcgagcaaaggcgggaggcgcagccgggctgtcggtgga

SEQ ID NO: 391073 - DNA, 122 bp, Homo sapiens
ggcagccgctcctacgagcagcaaagggtggttctgggtattgtcggcccagcgctcactcgcggatgtattttcctcctgtgccctgcctgacatctcaatcggaccaaaaacacccctct

SEQ ID NO: 391074 - DNA, 122 bp, Homo sapiens
aaggaacgtttaaaaatggtattacatcaagtcaccacagacaccctggcgaatattcctcgtgtgcccatccctcacatgccctttgtctatgtaagagaaactcattacatgttctactc

SEQ ID NO: 391075 - DNA, 122 bp, Homo sapiens
ccatcaggtggggccggaaaagggaggggcagtgccggggtgtccaccccctacccaccgcgcccaggactccggagtcccagaagcctggggcgccctgcagctctgaccttatgccggaa

SEQ ID NO: 391076 - DNA, 122 bp, Homo sapiens
gttcttgtttctactttagtcagctgggctgggcgtggtcctgcgaggaggtgggcggggcgcactgtggggcggggccggtggggacgtgggcggggcgcattgaggggaggggcctgcgg

SEQ ID NO: 391077 - DNA, 122 bp, Homo sapiens
ttgaatggaaccatttcgtattttaaatggcatgtgctgctcagctgcaaactccctattcgctggaattccacgtgcgaggggaagcatgcctgggccgctgggtgagcccttggctggcc

SEQ ID NO: 391078 - DNA, 122 bp, Homo sapiens
ggaagtgataaggaactcattctatcattattatagttatgataacaccacacagcagggcgactggtgagaccaggattaggagatggattatcagggttccttccttccaactggtgaga

SEQ ID NO: 391079 - DNA, 122 bp, Homo sapiens
tcggctggggttctcccaggatctgggcacaggccgcttgctctggctttggcgcccggccgccgcccttatatgcagcctgctcggctgccccgccccggccctcccagctcggtgcgtca

SEQ ID NO: 391080 - DNA, 122 bp, Homo sapiens
cacagcccaccagaagtattcaaaatagccaatcctaaatgtttactctgctctaccttgcgattctcacagaaatcccaataaaggctttggcctaggatttccccttgctcctgtgttct

SEQ ID NO: 391081 - DNA, 122 bp, Homo sapiens
catctcaagtcactcccgccagcagatgaaggtacagtgagcatgggcgttcccggccggcgctgtggcggtgttagtgtgttagtcacggatggtgtttgtgttggcgactgtgcatcatg

SEQ ID NO: 391082 - DNA, 122 bp, Homo sapiens
gcttgtttatttgtaaagaaatagcccattctgcgcagtctcaacagtggccctgggaaacggcagccctgcttttatttttaaacctcaaagttcatcttagagataaagctttcttttct

SEQ ID NO: 391083 - DNA, 122 bp, Homo sapiens
tttaaaattagcgttcatagagactggagaaatagaaacaaatcatgccaggcggaaaaacgttgagataattctagcctgaaatgataagcagagtatggcagtgaaagcaaacctacaac

SEQ ID NO: 391084 - DNA, 122 bp, Homo sapiens
caggcaccaggcactggggtggaccctgtctaaagaagcaagtccctcagatacatcagccgacccaacaacctcctacacagagagggaaactgaggtcccgacaggaccagggtcccaca

SEQ ID NO: 391085 - DNA, 122 bp, Homo sapiens
gatcctaatgttgcctgttgctacagctgactttcccaaatggtggacttgagatttaatcgacttcaaaaccgtacacacagtcgcggcggtaatagcacttccctgccccctggcttttc

SEQ ID NO: 391086 - DNA, 122 bp, Homo sapiens
gttgttaagagcctggcacctccctcctatcgattttcttgctgctttgtcttgcttcctcgcttaccatgtgatctctgcacatgctggttctccttcaccttcacccacaagtggaaaca

SEQ ID NO: 391087 - DNA, 122 bp, Homo sapiens
cctccaggcctcggttacgggtcacacctggcactgccaggcctggggacgtggtgcggccggtgcggggaggggccttccaggctgctgtggggcccccggcctcgccccaccccgccccg

SEQ ID NO: 391088 - DNA, 122 bp, Homo sapiens
cagaagggaagttacctgcgcggtggtggtagcaccggggagggtggccggtgggcacggcgggctccaccccgcggctggcctggcgctcacctgtcgggctggggaaggggtcgctgccg

SEQ ID NO: 391089 - DNA, 122 bp, Homo sapiens
cgtttaagcgtacagctcagcggcattaagtgcatccgcgataccttgtggccatcaccacgtcgactgccagagctctttcatcttcccaaactgaaatgctatacccattaaacactaac

SEQ ID NO: 391090 - DNA, 122 bp, Homo sapiens
tgttgtgtcatggaaagtggggaactacattacccagaaagctctgctttaaacgacagccggtcagagccagtgagcactcggaaagaaggcatttccacgtgtgcacgtaacgtaaggcc

SEQ ID NO: 391091 - DNA, 122 bp, Homo sapiens
gttaccaagttatcatatgcaagtttcctgattccggcaatggattcaatacaattgcttcgactaaaggaaacgtttagattttagagggaattgcttattctcaatcattctccttgctc

SEQ ID NO: 391092 - DNA, 122 bp, Homo sapiens
tcagccccgaccttgtcagtgagttgtaggcgttgaggctgggctgcctcgagacagtcacggcctggccagatggctgggagctgtgcacctggatggagtccaccctctgcggggcgggc

SEQ ID NO: 391093 - DNA, 122 bp, Homo sapiens
ggagaggaagaggggctcgctggtgtcacgcaagggatgtcagagtctggaggacaggcccggggtaggggctggtgcaggcagcgggaggcgcccggactcacccgatgacgtagaccagg

SEQ ID NO: 391094 - DNA, 122 bp, Homo sapiens
ttttaaaatgaaagtagagttccagggtcaggaggcgttgaccgggggacagagagactgcgggtcaaatgtgaggccataaactgtcaagatgacacacggtgcgggcctggcagggcatg

SEQ ID NO: 391095 - DNA, 122 bp, Homo sapiens
ggtcctggagctggtcacccagtaccgccagctctgtatctactggaccatcaactacaacgccaaggacaagactgttggagacttcctgaaacagcagcttcagaagcccaggttcaggt

SEQ ID NO: 391096 - DNA, 122 bp, Homo sapiens
acttgcacctctgtagtggtctggcctggggaagactggctggggtggacagaaggagggcgggaccctcagagcccactcttctagtctgtgtgctggaatcacccctgtcctccccaacc

SEQ ID NO: 391097 - DNA, 122 bp, Homo sapiens
aagaggagccaaacgtcgcaggagcaatttcaaagacgtctggggaacgaaaagggtcttcgatccaaggaccagcctaggggccatcgggaaccaaggctctgggggatcccagcagggcc

SEQ ID NO: 391098 - DNA, 122 bp, Homo sapiens
cgctggacaggacctcgccagttaccgaaagaattgtctgagaaaggctctgatctgacccgaaaggcccttggttcccacggcaacgcctcagcgtctggcagtaacaggctctgtgcccg

SEQ ID NO: 391099 - DNA, 122 bp, Homo sapiens
tgtgggtgccggagcccacccccgagacccctgtcttcaacatctgctgatttttgttggcgtttctcttttttgttattttgctttccacactttaaataattaatacaattacttttaaa

SEQ ID NO: 391100 - DNA, 122 bp, Homo sapiens
gaagatggagaagccacagacagcgtcctgcgtggggtctgtgggcgctgacccagcagccgtgcagggaacagccctgcccgcagaagcggatgccggggcaggtggcagtgcaccccgag

SEQ ID NO: 391101 - DNA, 122 bp, Homo sapiens
tggatatctcctgtggggtgtcttcggcacgtcccatcgttgctgcccgatctggggtgccgaagcggccggccacccaattactcgaggctcacagactgaatatgcaaacaagcagtggc

SEQ ID NO: 391102 - DNA, 122 bp, Homo sapiens
ctctaaggcttgagacttgagtggaagggtttctaacagaaatcctggggccatgatgttcggggagcaagagctaagctgtctggtgcaatagccactaaccacgtgttgctgttgggcac

SEQ ID NO: 391103 - DNA, 122 bp, Homo sapiens
gcccccgcagcagttacaggccggggcgaggaggggacggaacccgctctccgtgattgacggaaaatattactcttcagcccgcctcccgcgtgcccggaagtcccgccttctaaaaagga

SEQ ID NO: 391104 - DNA, 122 bp, Homo sapiens
cttcctcttcctctgaactcatgtgcaaaatatgctacgctgcatcttcagggaaagcctcgcggcccctgacagcagccgctggagcggtgggcccgcccagctctccccgcgccccctcg

SEQ ID NO: 391105 - DNA, 122 bp, Homo sapiens
agtctcctgggctcttcggggcggcggaagagccgagaaccttcgcgaaggtggggcgggcgcccccgaggttgggcccgcggtatgggcagtggaaactgcgcatgcgcggcgtcagggtc

SEQ ID NO: 391106 - DNA, 122 bp, Homo sapiens
cctccctcagacccaaaattcctgttcttcagatccctagagacccaggaatctaggctccgatcttgcccttccctgtggaacccaaacttctgactctgtagttcgtttttccctaaaag

SEQ ID NO: 391107 - DNA, 122 bp, Homo sapiens
ctgctgcggtggccctgagcgaggaacaagccattcggacccgaccgatgtaaatacagccgcccgtccgcccgccttcctcccgggctccccggccttgcccgccccctcccgggcgtccc

SEQ ID NO: 391108 - DNA, 122 bp, Homo sapiens
ccttcttctgcttggcgtccaggttcttcatgtacctctggacccactcctgcttggggtcgccacagaactgctggcccttcttggtggtgaagctgtggaagaaagggacaggggatcag

SEQ ID NO: 391109 - DNA, 122 bp, Homo sapiens
gcaaatatttctgttgtttcagcctaattttaacactcattaccatttgcagcccataagcgaattgttttgcatagagcctgcattgctaagccagtagaaggaactagtcttttaaaaac

SEQ ID NO: 391110 - DNA, 122 bp, Homo sapiens
ccctatttattagctttaaataacaagattgggaaggatgttagaacccaaaaaaagtttcgttgcaaaatcaagtggagggaaaatgactaagaaaattgagaatcacagaaaaaagaaat

SEQ ID NO: 391111 - DNA, 122 bp, Homo sapiens
tggttaccagcctcccccgttgttaggagccagaccggaagtggcgcgcatcttcggcgccgccgagaaatttctcacggtctctcgctgccccagggcgccaaaaggagaccaagaatgga

SEQ ID NO: 391112 - DNA, 122 bp, Homo sapiens
aggttctgctctgaggacaagaagcagggggagatgggggtggggaggacagagagagaacgagagaaaggttggagagcacaattctagtgacaggagggagcagtttggcccccagtttc

SEQ ID NO: 391113 - DNA, 122 bp, Homo sapiens
ttcttttgggtttccattgcctactgggaaatgtagttctcggggccaggggagccggcacggaagcggctgtgcgcatgagcagatgaggcctagccgaggcggcgggacccccaagtttg

SEQ ID NO: 391114 - DNA, 122 bp, Homo sapiens
agccatttgggacctcttatttcctgcggaagccttggcttcctgctggtgacctggcagcggcccagggcggctgcctcctccctggctgtggttcccggcggcggggagctcctgtcttc

SEQ ID NO: 391115 - DNA, 122 bp, Homo sapiens
agcttccagaggcacctgggatgatgcccctctagcggtaggcgaactggggagtgtgggcggcgggggaaggcgaggccctggaggacctgttgtttttcctgttgcaagtgaaaaggaaa

SEQ ID NO: 391116 - DNA, 122 bp, Homo sapiens
caggcagccacctcttcggtctctgcccttaatgtggggcagagtggcaggtcagagccccggccctggccccggccccagccccagctcctcctcagccacaggggcatctccaattcctg

SEQ ID NO: 391117 - DNA, 122 bp, Homo sapiens
gggtccaactgggtgctacagagcctcgagctccgctgcgaagcacccggctgcctcgctcgccgcccgcacctcggttccccacaggccgcccccgcctccgcctgggccttcgaggattg

SEQ ID NO: 391118 - DNA, 122 bp, Homo sapiens
ggcacacccgggctgcagacggccggcagggaaaccatggaggaggccacgcggcagtgccggtatctgatcactcacccagaaaggaggcaagtgagtggattgtcaggtgagtcgcaatc

SEQ ID NO: 391119 - DNA, 122 bp, Homo sapiens
ttgcacccagtctgcactccttcacctcttacctacccgcctcaccttctccccagacgccggagcctgagatttaaccccttccggccctcgaagggaagagggaagactaaagacaacgc

SEQ ID NO: 391120 - DNA, 122 bp, Homo sapiens
cggggcggaaaggtctcctggctgtctgaggtccagtccccgactctgggcctgcagcagcgagtggcggcgagggaaccgcaccccacagtccccgcgggcggggatgcggaaggcaccgc

SEQ ID NO: 391121 - DNA, 122 bp, Homo sapiens
cgccgcagaggtgaaagaccaagaaggtggagcaaacttttagggagcgcctcttgggcccgcgtacccttccgcctgttcctctctgattggccagcgtgagtcacggacgcccaatcgcg

SEQ ID NO: 391122 - DNA, 122 bp, Homo sapiens
agtaaacccagaccctggcggagggctggggaagagaagacaatgtggtgcgtgaacgcccgtggaacggaagaaccagctgcttctagaatcctctcaagcctggccagcttctggccagg

SEQ ID NO: 391123 - DNA, 122 bp, Homo sapiens
cttcccatcttagaggccgggcttctccttccgtaaaaggactgattttgcccgttcctgcgctgtccccgggaaaagcccttaccaccgagttagtgggactcccagcactggggtgatga

SEQ ID NO: 391124 - DNA, 122 bp, Homo sapiens
gcagtgggcaccccaggaaccgaccagagcccagtgtggcagctggaacacaagcacatgcgggggccgaccctccgcaaaccaccttgcagagcagcgacctgggcagtcgtccacactca

SEQ ID NO: 391125 - DNA, 122 bp, Homo sapiens
aatagagcagtcctgttttaattttttcagcaaatctctttggatttgcatatcttggagcgtggctcagagtggatatatcacattaatcattctctggatccaagcaatgatgatcagac

SEQ ID NO: 391126 - DNA, 122 bp, Homo sapiens
caggtaggggcactgcccattttggccaagggtcacacagcatctacatcacaattgcaccggagtttaaaaatgtctggccctgtccctccccaccacccgccgctgtgtccagacagaga

SEQ ID NO: 391127 - DNA, 122 bp, Homo sapiens
tggaaggaatgtacttccagagagtgattcccacgatcaactttctgagaaatgacttaccgctaaggaatgtttccagacaaaatagcttgaccttcttttgtctctcaatcaggttggga

SEQ ID NO: 391128 - DNA, 122 bp, Homo sapiens
aggagttcaagaccagcctgggcaccatagtgagaccctgtctacaaaaaataaaattagcgtggcttggtggcacacacctgtagtcccagctactcgggagactgaggcacgagaatcgc

SEQ ID NO: 391129 - DNA, 122 bp, Homo sapiens
gtcaagagtagcctgagccaggcctccaggccctcctcgcctcttctacccacacgtgttcgtaacgctcagcatcagaagtgcttaggtcctggagggcttgcagtttctctgcctctgat

SEQ ID NO: 391130 - DNA, 122 bp, Homo sapiens
tggagacctgcataatgaaattcagacagtggtgactaacttcccctcagaacaaggtggcgtgggctggcagggagcatgcttctcccaaggctggggcataaagctgagtgagaggaagc

SEQ ID NO: 391131 - DNA, 122 bp, Homo sapiens
caagaatagagataagaccagagtgtggaaatctgggtgccaatctatggaatttgtattcgtattgatataaattaaatatcatggaaaatttaaggacaggaagctacatgatcacattt

SEQ ID NO: 391132 - DNA, 122 bp, Homo sapiens
tccgcctggggcgaggggggttccgggccagataaagccgtctggttcccacggtccagccgccgcctacccgccccccgttgtagctcagcacccacccccaggacgaggccccctctagg

SEQ ID NO: 391133 - DNA, 122 bp, Homo sapiens
gtccgttgccgatttggggctggaattgtgctaagtctggggataaagaggtgaacgagacgctgaccgagtcttcaaggagcatcacttactaaaggggctttcattatagaactaaagct

SEQ ID NO: 391134 - DNA, 122 bp, Homo sapiens
gggggaggggagccagaacactctgatctgttcctgccagctcagggacctcgggcaaatcgagtcagctccctgtgagaggcgggagtgggcggcatcagtggtttgcagagacgtaggtt

SEQ ID NO: 391135 - DNA, 122 bp, Homo sapiens
aggtgagggcggggctggatgacgggggcggggctttgaatgggcggggctggcgaacgccgggaagagtcgtggtgggtggggctgggaggggcaggaccgtgtgggtgtgggcgtggctg

SEQ ID NO: 391136 - DNA, 122 bp, Homo sapiens
ttctgggttgcaggcctgagttcctgcatttctaacaagctccccatgatgctgatgctgcggataggcagagcacatcttgaccagcacatagcttgcttgcttgttctccatcttgtttg

SEQ ID NO: 391137 - DNA, 122 bp, Homo sapiens
agcggaacgccggaaaccgcagatccacggaggtcagggccgcggagagctgtagttccccggaaccggaagtgatggcggacctccggaaaccgtagattccgggcggtcggagccgccgg

SEQ ID NO: 391138 - DNA, 122 bp, Homo sapiens
gagactgtgccttccagagggcaaggacccttccagtcctgcaaccctgaaggcttcactcgcccactgagacacctggcctccaccggttggactctttctggcctccttctcttctgggg

SEQ ID NO: 391139 - DNA, 122 bp, Homo sapiens
caactattttccagaaatggaaagaatggacttgccccagggccttcgagggaagcaccacgttattttcggcaacttggagaagctccacgacttccaccagcagcacttcctccgggagc

SEQ ID NO: 391140 - DNA, 122 bp, Homo sapiens
gctgaggttggcactttggcaggggtacggggtacctgggggcacagggcccctgccagccggctcttggccagctccactttggtgaggcagctccttggtgagacaggctccaggtccac

SEQ ID NO: 391141 - DNA, 122 bp, Homo sapiens
ggggcggacgcccaggaggcaacttctgagacgcagctcctgagaggggcagggaccaggcgcgggaggccagagggggcacagagaacaaaccccctcagaagtgaagaggagagcggaag

SEQ ID NO: 391142 - DNA, 122 bp, Homo sapiens
cagccattttggacaagctctggcctcttgttaaatgtgacatactgagtcagaggcagacgtccttctgtggttattcgcttcctgtctgattaatttgttgtttgttgttccttcctcct

SEQ ID NO: 391143 - DNA, 122 bp, Homo sapiens
caggaggggtctgacctggcgccggcagctgacaggaaaacgtccggcccactgtcagaccgcagcccggggtggggaggggacatttctgcaacacttccccagcagccgaggccgccgcc

SEQ ID NO: 391144 - DNA, 122 bp, Homo sapiens
ccacaaggcgcacgaaataaacgtggagtgacacccgccagcgctagactccggcctttgcgctcctgcaggatttagtaaggatgtagaataccggcagggatgccctggaacagccccct

SEQ ID NO: 391145 - DNA, 122 bp, Homo sapiens
ctaaccagggagaggaggtactgaagagcgactaaactggctgcagcggagagatcagcccgaaggcgtccttgaggagcatacggaactccaaggaaggagtagaataaggagcaggcaga

SEQ ID NO: 391146 - DNA, 122 bp, Homo sapiens
cttctggattcagaatcgcgtccgtcagagactccaaagcacatttgctagatcgacaggcgtgaggagccagcggctcccggcgcttgggaggctgcgtcccacctgcattcaggccccgg

SEQ ID NO: 391147 - DNA, 122 bp, Homo sapiens
ctatggatgggaagagtttttgaccgaggagctggggcaggggagtttctgatgcggaaacgccacaagcagagcaaggggaagaaccagccctttgccaggcaggcgtctgggcagatgca

SEQ ID NO: 391148 - DNA, 122 bp, Homo sapiens
aggtgccgttttccctgccagctgtcccccaagctgtgtacaaagggatggttgatctgtcgctaggaacaaagaaaacaggaagttagggaggaacagggtcattgagaataaaggcagct

SEQ ID NO: 391149 - DNA, 122 bp, Homo sapiens
gtctcagcagaaataaatgtttacatgtttagatcattcttttatccaagtgtcccttatcggcttccatttcctctttactctgattgaagagtctagcccagctcttcactccctctttt

SEQ ID NO: 391150 - DNA, 122 bp, Homo sapiens
tagagcgctcgacaaatgtttactgagtgcccacggggtgcctagagcctggcgggacgtcgcggggatgcggctggaggaatcggagccggccctgccctctcggcactcgcggtccggac

SEQ ID NO: 391151 - DNA, 122 bp, Homo sapiens
gctctgctctctgcagccctgggtctggttggaagttgcatccctggtgaagggcggccgcggctttccagctctcccaggccagttcccgtgttttctctcccgccttccccatagtccag

SEQ ID NO: 391152 - DNA, 122 bp, Homo sapiens
ctggtctccatcccggagcagcgcccttccaccctccttgggcggcgctgccccagcggccgggtgttttcaccgccgaccgcgagcttcctaccgttcatccatccgccgcaggaaggggg

SEQ ID NO: 391153 - DNA, 122 bp, Homo sapiens
gtcctaaagactgttccagtgaacctttccctaaatcaagatcacctggagaattccaagcgggaacagtacagcatcagcttccccgagagctctgccatcatcccggtgtcgggaatcac

SEQ ID NO: 391154 - DNA, 122 bp, Homo sapiens
gtgccctggcccagaaactatgcagacctcttggcgatgttacccccaggaactacctcccgtggacctcagagctccatctgggtaccttggccaaagccatccgctctcccctagacact

SEQ ID NO: 391155 - DNA, 122 bp, Homo sapiens
gagctgagggtgagggtggggccgggtcggtgggacaggccgggtgggccggaggtggcgcggccgcacggctttgttccggaaagcccttaggtggagagcgatgtggggcgcggcagggg

SEQ ID NO: 391156 - DNA, 122 bp, Homo sapiens
tgcacggcacgcagcagtggaggaggttaccctgggtcgccgacgccaggggaagccaagcgaccgaccccacacttctgagccccgccggggaagtccccgggcgcggaaacaggtggtgc

SEQ ID NO: 391157 - DNA, 122 bp, Homo sapiens
taggaacggaaaagcgggagactttttcaacctgcacccagcaccttcattcatccccagcgtctgactcccgtcggccaccgtactggtctgagaggaagggtggctgcgagaggaaaggc

SEQ ID NO: 391158 - DNA, 122 bp, Homo sapiens
tttgactttccctgaacaccggctgcctgtgactcacggacctgaggccctgggaggagccgcggcccccggatcccccggagaggcctttcggggccgcggccggcagccccggccgcccc

SEQ ID NO: 391159 - DNA, 122 bp, Homo sapiens
atattttaaaagagaggttcttacctgctggaagcatgtactggtgtattacggatgagacggtctcataggtggaatttgctgtgaaatgccccaggaaacaaaaagccagaggtcagagt

SEQ ID NO: 391160 - DNA, 122 bp, Homo sapiens
tgcctgtagtcccagctactcatgtgactgagatgggagggttgcttgagcccaggatttcgaggctgcagagagctatgactgtctgtgaactgctactgtacttcagcctgggtgacata

SEQ ID NO: 391161 - DNA, 122 bp, Homo sapiens
tctgcctcaaagcctttgcactatttcattttcctgcagatgtccttctttagatcatcacgtagtttacccctttcccttcaaaatctttgctcaaattttaccttcttgttgaggcttac

SEQ ID NO: 391162 - DNA, 122 bp, Homo sapiens
tgggacgctgcctgctgcctgagtctctgccctggtaaactgtctctgagttgaggagcccgcaggtgtgcttcccggtgtgccctccgtgctgggggcgtggccaccaggagcaaggtgtc

SEQ ID NO: 391163 - DNA, 122 bp, Homo sapiens
ctcggccgcgctccaccgccgcgcgccacctcgtgctggcctccgggaggcagccgcccgcgcacgatttataaatgcaaaggccttattgttgttctttgttcagggataccattgtctag

SEQ ID NO: 391164 - DNA, 122 bp, Homo sapiens
agctaggaatcttccctgagtcctcttgcctacggaatgaagtccacagacttgggggagcgttcgaacccttctaaggccacttcctttctccagcctctcgcgcccagttgactcccggc

SEQ ID NO: 391165 - DNA, 122 bp, Homo sapiens
acgtgcgggcagcaaggcctgcgatacttgagcacccctccccctctcccgtttacaccccgtttgtgtttacgtagcgaggagatatttaggtttctagaaggcaggtcatcgcaggcccc

SEQ ID NO: 391166 - DNA, 122 bp, Homo sapiens
ggagtccaccctgaagtttgcaaacatagctgcacaggaaaatcacaggaattgtttcttcgaagtatagattcctagggctacctcagcctagcttgtggaaatcctgatgcccagggaga

SEQ ID NO: 391167 - DNA, 122 bp, Homo sapiens
accttcaccatcctcaccctcattctctatctggattctgggaactcaccatgacacacacgcacctgcctctttcatccaaacacccttcaatagtctgaacaccctcattctcacaccag

SEQ ID NO: 391168 - DNA, 122 bp, Homo sapiens
tgctctacagctacaagtaaacatctgcaggctctggccccaggcatggccctctctgggcgggtatagccatctcttgtttttttttttttttttttttgttttgtttttttttttttttg

SEQ ID NO: 391169 - DNA, 122 bp, Homo sapiens
tcccacagaagaacccacaggtgaaaaaggtcccaggcgaaggggatttcattcccaagtcggtgcttcccaggaactgggttaaatgctgctcagggccacctcccgggaagatgagactg

SEQ ID NO: 391170 - DNA, 122 bp, Homo sapiens
gcttgcggcctgacgtcgctgcggcctggcagtgaccatgtcggcgtccggcccctcggccggcgatagagttgcggctaaaatgaaaggacgcccagttacatttgcatcgtagataaaga

SEQ ID NO: 391171 - DNA, 122 bp, Homo sapiens
ggttaagctgcatggggtagactgtaagaggcttttgtctgttccactcacagcaaagcccgtatgctccaggaattgttagtaattgctgtgtttgtttggtgaagtggatgatataagaa

SEQ ID NO: 391172 - DNA, 122 bp, Homo sapiens
tgctggaatgttctctgatataaacagaatgaattcatcgctctgactgcatatataatgcgtctcaaataaacgtcactgtgtcaaatctactcacctctaaaacaagaattttaaatgag

SEQ ID NO: 391173 - DNA, 122 bp, Homo sapiens
tattactttccttattctaattctcaacaaactttcgtatttaatatctttcttcttcaccgaattataagatccatcagggagggattatgtttatcttgtttcatcactctgcatacaat

SEQ ID NO: 391174 - DNA, 122 bp, Homo sapiens
acattttttaaatgtgtatctaattgtccctcccttttaaaaaatcttacaatggcatgacgtctcaattcagggtaaggaaattgtttcttcacattccctgtacaccgtacacatcgcct

SEQ ID NO: 391175 - DNA, 122 bp, Homo sapiens
taaaccctcatattatgcattgcatcagccatgataaataaggttcgcatttgtcagatccgatcaacttggtttctagggtagtccaatttcagcagactgctctagcactaatcatcttg

SEQ ID NO: 391176 - DNA, 122 bp, Homo sapiens
cgagaggcgggactctgagggaagtcaatcgctgccgcaggtaccgccaatggcttttggcgggggcgttccccaaccctgccctctctcatgaccccgctccgggattatggccgggactg

SEQ ID NO: 391177 - DNA, 122 bp, Homo sapiens
tccctccccctccaaccagcaagttactagacaactcccaagtacctgtacatgctgtctcgccaggccctctcccttcactggtgcttcagggactctggagggacagggacattcatcag

SEQ ID NO: 391178 - DNA, 122 bp, Homo sapiens
tgtgactccccattaaccttttattttctaattttggcttttcaaaatctctatgaagggcgtgcattcactttagattggttcaaccctgttagtatttactggggtgcagggggatgaga

SEQ ID NO: 391179 - DNA, 122 bp, Homo sapiens
gccgggtagagcaatatacactatgtacagactctgcgaatcagtccgctcggcgggcagcgtcctcgccaggtccaggcgccttggccggggaggagggggcaccagtagggaagggcggg

SEQ ID NO: 391180 - DNA, 122 bp, Homo sapiens
gccttcgccgccttcggcctcatgaccatcgccatcagcactgactactggctctacacgcgcgccctcatctgcaacaccaccaacctcacggccggcggcgacgacgggaccccccaccg

SEQ ID NO: 391181 - DNA, 122 bp, Homo sapiens
tcagggtgttgggggcctgggcagttagggagcgcatttgcctgctgctagggatgcctgcgctgttactcctcccccttccttttcccggtaaggagagggggtggggcttcctcccttgc

SEQ ID NO: 391182 - DNA, 122 bp, Homo sapiens
aggccatgaccagcacagcagctgcttgtccctctggctgcagagggggtagatccaaagcgtggggcctgagcacgtggggtcctacccgctcctcttacaacgtctaaaacagcaagatt

SEQ ID NO: 391183 - DNA, 122 bp, Homo sapiens
gggacggtgagatcaaagaggtagacctaggccaggagggactgccagggctccttcccgcgggccagcctctcgtccttcctcccgggacggggctctttccctttctccggatgcgggcc

SEQ ID NO: 391184 - DNA, 122 bp, Homo sapiens
ggtgtactcctggccagcgcctcaatctaggcgggggtacagtgggctgtgctccgcaaacggggagcaggccgggtctggagaggcctcggcgctgctttcccaccttgggctacgctcca

SEQ ID NO: 391185 - DNA, 122 bp, Homo sapiens
ggcgctgcgcacaccccagtggccgcccaggacgtgcggtcactggagagcccccagccacgcccctagatgctgctgggcggcctgcaggagtaccaacattgcagacagaacagcgacct

SEQ ID NO: 391186 - DNA, 122 bp, Homo sapiens
atgacacactccatagagggatcgctgcactacaggtggtgacagcagggtggcgtgcgtcgcactgagagaaggtgtccacggagagtccgtctgctcctccttgccttcaatgtgtcctc

SEQ ID NO: 391187 - DNA, 122 bp, Homo sapiens
tgcccctcccccggggatccgggaggcagtggggtccctgggaggctgctccctgcagaacgcgatggacagatgcatgggcaccgggccccagcaccctctggcttccttcatcctcccca

SEQ ID NO: 391188 - DNA, 122 bp, Homo sapiens
agtggacttccccttacatcagcgggccagctcctgtcaggcaggcggccggcgattggccgggaggaggcagtcattcaaactgccttttgtgtttggctaatcagggcagcccaggttcc

SEQ ID NO: 391189 - DNA, 122 bp, Homo sapiens
gtgaaggaatgggatcccgaggtgcttgccaggaccgtagcaggcggaagctgctggcagcgcgaacgggcggctcccgccggcgtgggtgggggaagggcggcagccacacccggaagtcg

SEQ ID NO: 391190 - DNA, 122 bp, Homo sapiens
tggcggtggaagtccacattacatccgcggagcaatggctgggaacgttgcataatagagcggggctcaaattccaaattaagtttctgaattttttccatctggaattttatttgatgatt

SEQ ID NO: 391191 - DNA, 122 bp, Homo sapiens
gatggttcttttatttacctcaattgagtacatccatctttgttgtagttcagtgttctccgagtgtgatgcctggaccatcagtatcagcatacttgaggaattgttagaaatgaacattg

SEQ ID NO: 391192 - DNA, 122 bp, Homo sapiens
tgctctggctactgctgttgttatgagcaacaaactccattgtctctgacccaggagtctcgtggtttccgcagactccatgaaactggcagcctaatttgttagtttataagtaagggaca

SEQ ID NO: 391193 - DNA, 122 bp, Homo sapiens
gcggggaggaggtggggccgaggggcgggaggaggtggggccgaggggcggggctgggggcgttggggaaaggcggtaggtgctggatatagacccctgacagttgtgttttgtgggttggt

SEQ ID NO: 391194 - DNA, 122 bp, Homo sapiens
cggcccggctccacccgccgctccccggcagagccccgggaccccctaattggctgcgggcgctccccggctccgcccgtcgccgcagggcactctggaaactgtagtccccccacaccacg

SEQ ID NO: 391195 - DNA, 122 bp, Homo sapiens
ttccttgggccacactttctgccttgacagagccccggaagagcccagctcagcccaggacgtggagtcctgaacacatgcagtcctggcctcacgcctgccaggagacatcaccccaagga

SEQ ID NO: 391196 - DNA, 122 bp, Homo sapiens
agcagctccgagtctgtgtgtgtttgtggaccggtgctcctgtctaacggactctgctggcgctttgagaagagctgcctcagtagcctgctcccccagctcaggcctttctgctcttcctc

SEQ ID NO: 391197 - DNA, 122 bp, Homo sapiens
ttgtactgaccacacagtcagggatggtgggctccagtctgggccttaggggtggggcgtcgggttgggagaggtcttgccgacctccacctcctggcatcactccagctccaggtagccca

SEQ ID NO: 391198 - DNA, 122 bp, Homo sapiens
aaggtgagaaaattaaagttagcaacataacttccctaacttgatgaatagcatttgcttcgaaggatccttctttaggaagaattctgatggtcacagtcactcacaaatggggttgacat

SEQ ID NO: 391199 - DNA, 122 bp, Homo sapiens
aaccaaccaatgaggcttccgcttggtggaggcaggcaagattttgtgcaactggacgcacgggcagctcgcagcatttcctacctgcagtagaatttcgagccgtctttagccaggtagcc

SEQ ID NO: 391200 - DNA, 122 bp, Homo sapiens
tatccagctttttggggaataagcatgcacgttggaaacgatctcgccgtctgtgtggagcgtgaatgacgcagcaccgagggcaccctggtggctgcagcagggtttgcctgtggcgtttt

SEQ ID NO: 391201 - DNA, 122 bp, Homo sapiens
acctctccccctgaggcagcccagtgaaggctgaagtgtggcaattcacgttgtgggtggcgaggaaagggggaggggtgcctatgggcttcccactcccaagctcgaggagtcacccttcc

SEQ ID NO: 391202 - DNA, 122 bp, Homo sapiens
cagtagctggaggagcgccgggagttgaagccccgcgccaactacgcagagaaaactgggcgccagatttcctagaggaagaatgggcagggaagatgtgggtctaaaggcagaaagactta

SEQ ID NO: 391203 - DNA, 122 bp, Homo sapiens
aaggaactggaaggcggcgatgctctctggagcggacaggcgtatttaatatcccacccacgcatcacctaacagcctctggggcggtgtgttccttatgttgggagtggtttccatagctg

SEQ ID NO: 391204 - DNA, 122 bp, Homo sapiens
agacccacaacacgtgtgagccacaacacagtggcagctccctgcctctccccaagcctccgccagcgcctccctcatggtcttgcagaaacacaggaagaactctagtaaacctgggtcag

SEQ ID NO: 391205 - DNA, 122 bp, Homo sapiens
taatgagtgttaggatcacgcacacagctcctagactacagttagcctaagaaaccatgccgccctccattttcttaccgatgaaaagcctatagtgtgtgtagatagtctaagtttctttc

SEQ ID NO: 391206 - DNA, 122 bp, Homo sapiens
cggcatcaacgtgacggtgtcgcagtccaccacggtggtgaacggcaggacgcgcaggttcgcggacgtggagatgcagttcggcgcgctggcgctgcacgtgcgctacggcatgaccctgg

SEQ ID NO: 391207 - DNA, 122 bp, Homo sapiens
ttgcttctgggccactgcaggttggcctcctcaatacaagctgatgtctgcagggagcgccgcgtgctgggattgcaccacgtgttggtcacaaatcgaggtcgccttttggcctggtctgc

SEQ ID NO: 391208 - DNA, 122 bp, Homo sapiens
tctttccattatacccacttggccaaagctagggccatgacttgggccaggagaagacagcgttacctaaggcaaaaccattgggttcagctgcgtcgctggctattaaaggtccgaagccc

SEQ ID NO: 391209 - DNA, 122 bp, Homo sapiens
cacatgcacccacgctcacatgtgcagacgctgcggtacatgcaggcacaagtgcacacacgtctacctggtgctggggacacaaaacagtgatcacagcacagaacaaaaaacataagaaa

SEQ ID NO: 391210 - DNA, 122 bp, Homo sapiens
acatagccctgcctggtggccctttcctgtagccacagctatagttacagttacagttaccgctacagcacattctgagttctcagaacttctctttctccttatcacttcagacctagcaa

SEQ ID NO: 391211 - DNA, 122 bp, Homo sapiens
agacggggaggaagagcgccagcattgtaggcaggggagcactgggggaactgggatcagcgtggccgtcgcgggcggggacagcactgggggaactgggatcagcgtggccgtcgcgggcg

SEQ ID NO: 391212 - DNA, 122 bp, Homo sapiens
catccctaataagctttactgtgaaattatggatgaaaggatctttgcacgatgcaggtacgtagtgagggacagtaatgttagttgataacgattacaggtatgttttattttataatgaa

SEQ ID NO: 391213 - DNA, 122 bp, Homo sapiens
ttcggcgtgccgctgtccatgccaccagtgatggcagctgccctctcgcggcatggaatacggagcccggggatcctgcccgtcatccagccggtggtggtgcagcccgtcccctttatgta

SEQ ID NO: 391214 - DNA, 122 bp, Homo sapiens
aagccggttacgtacgcctgagggccaggcgaacctcaggctctttgtcctactaaaaagcgcaggtattttctgtttctctggacagctgggtctctcggcaagaatagaaagcgaaggtt

SEQ ID NO: 391215 - DNA, 122 bp, Homo sapiens
tacgagagtttgtgagtccgaggttgccatgttggagcccctgggcaggaggtgtttccgcgcggaggctggtggcccgcggtggacgcggcgccctggctgcgagtctgcggagctgagca

SEQ ID NO: 391216 - DNA, 122 bp, Homo sapiens
cacagtgagacaaacacaggtcataatgagagcagaagaccacaacagccacatgacacgcgtacacacacacgcacacatatatatacacacacacatgcacacacacatacacgcacaca

SEQ ID NO: 391217 - DNA, 122 bp, Homo sapiens
gcggagggcacagcctggcagccaccgttggcggcaggagagaatgggagaagggagacccgcttctcagcacaagggcatctgtctactcccgaacatggccggagattcctgtccacagc

SEQ ID NO: 391218 - DNA, 122 bp, Homo sapiens
gccaggacaagaacccattaccttgacattagagtaatgaaaccctccatgagcccccatcgttccacaactctgaaattccaacatctgtttgctgttgggcttttatttagttggcaaac

SEQ ID NO: 391219 - DNA, 122 bp, Homo sapiens
ttatctcctctaccaggcctgctggggcttcttgttcacccaccttggaaacgccaggtgcggacttgatttttccagagttgagatgatggtacttagtttatagggttggtatacagtaa

SEQ ID NO: 391220 - DNA, 122 bp, Homo sapiens
gtgattcttcttggaggaaatgacaggcggaggggagagtagtgcatcaggaagtgaagtcgccagtcaccatggagcaccacccagcaccaggcgtcgggcctgggcacatcagagccagc

SEQ ID NO: 391221 - DNA, 122 bp, Homo sapiens
tcacctcctgctgtaccacctggctcctaacaagccatagacttgtacaagttcctggcccgggggttggggacccctgccctagagccttcagaaggaacacagtcctgccaatccatttt

SEQ ID NO: 391222 - DNA, 122 bp, Homo sapiens
cgtgggaacgcgcacctgcgagtccctgccggctgaggagccgaggtctgcgacctctgccgacctgagctcaggcgcagcagcgcagacctggccgccgtatcccctctggctgggatgcg

SEQ ID NO: 391223 - DNA, 122 bp, Homo sapiens
cacggcggtccgggggcctcgaagccggtctgaccccaagtacccgggccaggcggctgccgtcttgtcgccccagcccatcccctcagccagcccgcctggcggcacgggacctagcccca

SEQ ID NO: 391224 - DNA, 122 bp, Homo sapiens
cggccccccgcaagcagggatggggcggcgagagcgtgacctggggcgtctccgagactccgccccacgggggtatcctgaggctcatatgggaagtggacagtgcccctccagagaaacgg

SEQ ID NO: 391225 - DNA, 122 bp, Homo sapiens
gcctcgccccctacacgacccggaattcgacgccaacactggtttctggggcaacttctgcgtagctatgtgactagcacccggaaataattgccaccgccatcttttggtgcagaaggtga

SEQ ID NO: 391226 - DNA, 122 bp, Homo sapiens
tagataagttatttgagtgaggacagcgctgcggtccgcctggagaaagggagcttcctccgcacttctacttcatcgtgacagcagtggtcgcagcgccactggccatctggagtcctggg

SEQ ID NO: 391227 - DNA, 122 bp, Homo sapiens
gaggcgcgcgaggtccagagagctgcactggcctggggagccggctgggtccgagggccgcgggaaatcggaggagccagggcgccagcatagctgcaccgcctccagctgcagcgctcagg

SEQ ID NO: 391228 - DNA, 122 bp, Homo sapiens
tggcctacagcggagagagtcagtccatgccagtggtgggatgtggctgcaaaaaatggtcggattcatggaagtctggtgtccagctggcaggcattagtggtcccatgaatacagctgtg

SEQ ID NO: 391229 - DNA, 122 bp, Homo sapiens
ggtatgtgtgtctgtctccatatgggctaagtgcttgaattagtcaagtgtgactcggagcgtgtgtgtgtatgtgtgtgtgtacgcgcgtgtgtgccaccagaggaagcagcagcaagagg

SEQ ID NO: 391230 - DNA, 122 bp, Homo sapiens
gcggcggccccgggaacccggagcgctaaggagaacggacctcagaggttgtctgaaggccgaggccaagatggcggtgctgtcaggtgagcgcggcaccggcggcgggtgtggggccgcgc

SEQ ID NO: 391231 - DNA, 122 bp, Homo sapiens
ggagaaaaccttagaccgggaacaacagagttaccatcgtttagtcctgactgccttggacggtggacatccacccctaagcggcaccactgagctccggatccaggtaaccgacgccaatg

SEQ ID NO: 391232 - DNA, 122 bp, Homo sapiens
tccggggctcgccgtactggggggctcctgggggggcacggctctaggctgggactgtcccggggcctctcggagcccgcccgcccacgtgaccgccccaaaatatccgacacattttctcc

SEQ ID NO: 391233 - DNA, 122 bp, Homo sapiens
aaaggagaaggagaaggtgacacgtggagagcggccattgcggggtgagcgggccaccagcggacggcagacacggccagagcggagtctcgccacgggacaacctgccacatcccggctgc

SEQ ID NO: 391234 - DNA, 122 bp, Homo sapiens
cctccagggctgcgtcggtgctggcctcaaagccgtcacagaccagcacggtgagggtgtcgcccacactgcggagcagctgcaccgcctcgccgtgcgtcaggcccagcaggctctgctgg

SEQ ID NO: 391235 - DNA, 122 bp, Homo sapiens
gctattccaagcagcatccttgatgtctcgtttcacgggtctgtttcacaccgtggtgagcgctagctgtaactctcatatctcagctatttgtcttggcagctcctcctgttttgctaact

SEQ ID NO: 391236 - DNA, 122 bp, Homo sapiens
cgtctttgcagcttggcgctcggcattatgggtaatgtagttctcagaagcccagggttccggtgccctccctgagattcacccggaacaagggctaagcggcccgcggagggcgctaggaa

SEQ ID NO: 391237 - DNA, 122 bp, Homo sapiens
ctcttcagataaagctgcctttgatagtcttcattaacccctcccatatttgcccctcagcgtcccttggcttagcagccccggcctttgaagtccaacctaagcattcttagatggtgagt

SEQ ID NO: 391238 - DNA, 122 bp, Homo sapiens
atttttacctcttgatttccctggtcccaggctgcaacttcagctcgctccgccatggggcgcacgtccgccagcctctgtgagctcagctaagtatgatgcctaggctagagagctacgtc

SEQ ID NO: 391239 - DNA, 122 bp, Homo sapiens
gtatgcatatagcatagctaatgtactattgctgggtccatttattcaatgaataattgccgctatgtatcagacattgttctaggcctaggaatggatacataagtgaacaaagcaaagat

SEQ ID NO: 391240 - DNA, 122 bp, Homo sapiens
tgtcacagttcttaaaaatggtgtgtccagagtttgtcccttctgacgttcggacctgtccggagtttcttcctgctggtgggtttgtggtctcacttcgtggtctggctgactttaggagt

SEQ ID NO: 391241 - DNA, 122 bp, Homo sapiens
gatttacctatttgggagatttcacataaagaggtcatacaatatgtggtatttcatgaccgctcctgacttggcatgttatcatcgtcattccttttaattgtacatatttgcaagctcta

SEQ ID NO: 391242 - DNA, 122 bp, Homo sapiens
cttgctgcggaacttcttcccgctcgggctgcggggaggcgggacggtcggcgccccgggcggaccccagaccccaaacccaggcctcggccgcagacccaaacccagtcccagccccagct

SEQ ID NO: 391243 - DNA, 122 bp, Homo sapiens
ctatttgatcgtgggcagattccttcttgtgcctggacctgggtttacccatctgtaccacggtgctgagcaggaacagagccctattcctgtggatcatttggaaatgtgtagggatgtgt

SEQ ID NO: 391244 - DNA, 122 bp, Homo sapiens
ggccaagactcagggaaacattgagacagagcgcttggcacagaagtagcggggtcagggcgaagtcccagggcctcaggcgtggctctcaggatctcaggccccaaaggcggtgtatggat

SEQ ID NO: 391245 - DNA, 122 bp, Homo sapiens
ttcgcaggaccgctcctccaaccccatgttatggactgcttccatgccctggaaacgcggcggtgaacaagacgacactttccgcccttgagaaactcgtactcccacaagttcttggggac

SEQ ID NO: 391246 - DNA, 122 bp, Homo sapiens
cctccttgcaggccaccgccctccctggggtgcagcaacagcccgcggtgcccaggtccacgtgccccaaaacctcggtcaagttaaagcgaacgtcttacgtcttcagacaagttgcgtcc

SEQ ID NO: 391247 - DNA, 122 bp, Homo sapiens
tgacaaaccgcgacgcctgttaccagggtaaccagcctgggtacaacatctaattgggtccggggaacttcagggagaaaagtctcttcatatctagttccggaatgtcccccttctggtgc

SEQ ID NO: 391248 - DNA, 122 bp, Homo sapiens
aacggcgtgggccccgaagcggggccgcttttcagggagtgcgcaggttagcgaggaccccggtgaggcgagacgccaccctcacttggctgtctttgttgctcccacctccccagccccag

SEQ ID NO: 391249 - DNA, 122 bp, Homo sapiens
acggcgctgcgggaaggaggcaagtccggcaggaaccagcgcatggtcgggggcgagggacgggagatcagctctgcgggcggcagtgcactctggtcagagacgatattgactgaagcctc

SEQ ID NO: 391250 - DNA, 122 bp, Homo sapiens
tgagatccaccccgaggctgcgggacctgcccagaccctcgaccagggaagaaactcgggcgcctttacccggtttaatttcagtttaggccaaaatccccgcgggttggtcggggcgggag

SEQ ID NO: 391251 - DNA, 122 bp, Homo sapiens
caaattttttcccccttgcagatccgggagagacggctaacacttttttcccccaacagccggtccaaggagatttgctgttgaataataacaaaggagagaggatacgtatttaaagaaaa

SEQ ID NO: 391252 - DNA, 122 bp, Homo sapiens
tacgacctgggccgggtcttgctcaggccggagcttgagtgacttccctcagtccctttccgggagtatccagggtgacctgccctaatcctgtctctggcctggtccgggggtcctgcccg

SEQ ID NO: 391253 - DNA, 122 bp, Homo sapiens
ggatgaaaggagctgtgtgtgtgcatttggatggctgcagggtggtccggtggtcacccccgtgctcaaaggtgtcgccctccctgcaacacaagagaaccattgctccagggggagtcaga

SEQ ID NO: 391254 - DNA, 122 bp, Homo sapiens
cccgagtccgctgccctcttcctcttggtgcccgaggtctgaggctgtggggctgcctggcgtctccagacaccccacatgcccgcctgggccccgcaggacatcctgcgccccgtggctgg

SEQ ID NO: 391255 - DNA, 122 bp, Homo sapiens
gcactgaacttaatgaacacctttgtctgaattgtgcatcctagctctgtgatggtacttcgcatcttggcgaatgaataggatcctggaaatcaggaatccacatgttctgtcttcattct

SEQ ID NO: 391256 - DNA, 122 bp, Homo sapiens
ctgggcgtggcgggcgggtgtggccaggggtgtgggtctgtgagggaccggtcggaagggcgtcgcgcggcctcgggtgacatgcggggggcggcgagcgcgagtgtccgcgagccgacgcc

SEQ ID NO: 391257 - DNA, 122 bp, Homo sapiens
taggaaccttctggatttgaaaagctgtaaatatgaaccactgggacttcaccccagtgccgtgctggacccccggcacccccaacacccttacctttatcctgttgacatgcaggtgtgta

SEQ ID NO: 391258 - DNA, 122 bp, Homo sapiens
tgagcgctctggtccagcgtttccacccacagctcatacacgtgtggcagagcttccgtacgggcagaaccacatccagccggctcagaagctgcagtgatcagaaccacatcagggtttgg

SEQ ID NO: 391259 - DNA, 122 bp, Homo sapiens
tcacatccacgtgctgcaggttgacacggcacttgtcggccatgtccaggaagtgctgcgcgttcatctcatccagcaggatgtagactgggacccgacgggccgcggcctccagcacttcg

SEQ ID NO: 391260 - DNA, 122 bp, Homo sapiens
tggggttggggtgttccaggggttctctagaggctggttctggcttggctgccaggaagccgtgcaccagagcaaaccgtccacgggcctcctgcttgcttctggtgacactgagaccccac

SEQ ID NO: 391261 - DNA, 122 bp, Homo sapiens
ctctgctcgcccaacgagataaaccaaaaactgagaagggctcctcattcattctctggacggcagcttccgcccttccccgctgtctcttccattacattcgcacattcttgggtgcccca

SEQ ID NO: 391262 - DNA, 122 bp, Homo sapiens
cctatgaacccagggtggagcctcagcctgatcaagcatgttcttaatcacaaaggtggacgggagagagactaggatgggctgtgtggttcctaagttaaacaatgccaagtattctacac

SEQ ID NO: 391263 - DNA, 122 bp, Homo sapiens
ccccgacgcccgactcagtcgcaaacaccggagttggggaaaaccaagtaataaaaccctcgaaactgcgcctgcgcgccggagggttacacgcaatcccctctgggaggggagggaccttc

SEQ ID NO: 391264 - DNA, 122 bp, Homo sapiens
agagtttttggaagaagagcagtttttggagctgggcagccagcagtggtctgtctgccccgggactggccagcagcccctgggccctctctggggtgccaggacctcaagccttagaggaa

SEQ ID NO: 391265 - DNA, 122 bp, Homo sapiens
aagaggaaattcccggaggaggcggcggagggcggcggtggcgctggtctggtagggggccggggccgcttcgtagagcggcccctcccggcctccaaggaggatctggtgtgcacaccgca

SEQ ID NO: 391266 - DNA, 122 bp, Homo sapiens
ccaatcctgcacggtttcccggcgggcagccccgtaatcgcggtgcggcagctggtgccgcggctgagcccagccagcgtgcccgggcccctctgcagactgtaccatcctgcccgagcggg

SEQ ID NO: 391267 - DNA, 122 bp, Homo sapiens
gtgtgcatcccggcgcccaggggcttgtgagcagcaggtgcgcgttccaggcagctccagcgacccttaaacctgaccgcgcgcacgtccggcccgagggagcagaacaagaggcacccgga

SEQ ID NO: 391268 - DNA, 122 bp, Homo sapiens
cagctccccagcaagagggcacttccgtgcagtcaggcagaacagcctgggcactgttcacgaaagcctaggagagaaggctgggccatccctgtgcgacgttaagcatttgtgcaggacac

SEQ ID NO: 391269 - DNA, 122 bp, Homo sapiens
acgtagataatggggtggtctgtgccaggggtgtgataggggagactctagccagtggaacgaggaggggtcatcaaatcttagaaagaagaacacggggccctgctgtcaaacttcaaaga

SEQ ID NO: 391270 - DNA, 122 bp, Homo sapiens
aggttcctgcatgtgccagaaatccggtcccggcaaagctagacgctctgcaatgacaggcgttcccagctagggactcctggctgcttggagcttgaaaacacctggcgtggttctcgagg

SEQ ID NO: 391271 - DNA, 122 bp, Homo sapiens
ctggatggtggcctatgagtagtggttaagagcacgggtttggcgtcacagttatgaagccgggttctgctgacttgagacctggaggaatgccttgagctctgacttctgtgtcctttcct

SEQ ID NO: 391272 - DNA, 122 bp, Homo sapiens
cacactccctactcggccccctgccgcatgctatcaggttcaaaacaccccgcggagaaacgccactgctcaccaagcagaaaggcacatccatagacgatgcggccccatctcggggtggg

SEQ ID NO: 391273 - DNA, 122 bp, Homo sapiens
gcagcagtcgccgacaggggtggggcgcatgcgcacagttgctaggcaacggcggccgggcgccgcggcgataaccgcgccggggctgtgtgtgtaggcagaggcgccagaggaggaggagc

SEQ ID NO: 391274 - DNA, 122 bp, Homo sapiens
gaaccttggctggaggcacaaggtgcccaggggcaagagcccggggtccaagcttccaggcgcacatcatcctctgggccccgggccctccggctggagcactccctcacccgcatcccatc

SEQ ID NO: 391275 - DNA, 122 bp, Homo sapiens
cagcccggttcccacctctcaggtggggcagatgccagaggcctcccgggtccacgcccgcgggccacttggaccgccctgccccggccaaccccgccccacccagactcccgcccgcgagc

SEQ ID NO: 391276 - DNA, 122 bp, Homo sapiens
ttaaatctatatttatgatatttcataaggagttattgtttcagaagccacacaggctggcgggaagtcggaaacgaccaacagattcgtttgcctcgccgtggctcccagctgtaaaaatt

SEQ ID NO: 391277 - DNA, 122 bp, Homo sapiens
tttggccttttggaacgcagtcaccatgctgtgaggatcccagatcatatggaaagaccacgtagaggagaacagaggtgctccagttggcagccctaattaagctcctagtggacagtcag

SEQ ID NO: 391278 - DNA, 122 bp, Homo sapiens
ccagctggaagggaaggcagcggggcggccgacccaggctgcgagtgcttaggggggctgcgggggagggcggggactggctgtttgggaggagcggaagggagggagagggggctggaggg

SEQ ID NO: 391279 - DNA, 122 bp, Homo sapiens
cgttgaacttagcaagcgccggcacctagcggatagcgctggtattgccaaacaaatatccgttttggcgccgtaaagggtgctgctaaagagaaacagcatgctcttagaactaagagcgg

SEQ ID NO: 391280 - DNA, 122 bp, Homo sapiens
gatctctgcccacaaattgcattccaagggtgatggcagtggtgtcaacttagctcaaggcgcaagtgtcatgagtcatgtttccctccctttggagacacctgcccaagcaaatcccaagc

SEQ ID NO: 391281 - DNA, 122 bp, Homo sapiens
cccaatacctggttggtcacgtcccccgggaggccccggatcagtatcttgcggcggttacggaactggcgctcggtgtgttccaggcgtttccggatctcttctggatctagaggcggcag

SEQ ID NO: 391282 - DNA, 122 bp, Homo sapiens
ggccccggcgcagtggcctagcctggaccgcaaggccgaagccgcctccgggccgcgtcccggtgtttcgggttgtgtaaccttggccaaaatgcttaagcttttttcctggctgccaaatg

SEQ ID NO: 391283 - DNA, 122 bp, Homo sapiens
catcctactccacctacattcccgaaaacaaccccagaggagcctctgtcttctcagtgacggcccatgaccccgacagcaacgacaatgctcatgtaacttactctttcgcggaggacact

SEQ ID NO: 391284 - DNA, 122 bp, Homo sapiens
aagttaatgagaaggttttcagtatttgctaggaatgcagtaactggttaggactgtgggcgccgctgttcactaatctggtagatacaggcagtacacacaggtcaggaggaggaaaaaaa

SEQ ID NO: 391285 - DNA, 122 bp, Homo sapiens
actcctgagtgaagcctctcctcagcgtgactcaggaacatttcctcaggcattatctgtcgcacaggccttgccatccagctcgcttcttcagctctgacacccagtcggggttgtcatct

SEQ ID NO: 391286 - DNA, 122 bp, Homo sapiens
tatagaccaccagagacccctgaggtgtcacctaagcagggacttgatgggagtgagcctcgtggggactcggggaggctcatccaagtggagcacagtggaggggtcgtgtttggagctgg

SEQ ID NO: 391287 - DNA, 122 bp, Homo sapiens
aataaacaaaccatgttagcgaccctgtttttatttttactttggcctctaggaagttcacgattgatttttttcactccaattttagtaactgtaggggacattacaacacactttcatgt

SEQ ID NO: 391288 - DNA, 122 bp, Homo sapiens
aggaggcaggcggcaaacgagaggtattgaaaaggccactttaaacaaatccgggtgacccgtttggggatctctaggctatgcatcttgttggtgttgaaacctcggcagtaaaacatatg

SEQ ID NO: 391289 - DNA, 122 bp, Homo sapiens
agcctggccgaattggtccattctgttcctggtgcggttcctcctctagccacatgatggcggcatgagcattgccgtacttctgcgctctcaagtctagcgctttaaatccccagttttaa

SEQ ID NO: 391290 - DNA, 122 bp, Homo sapiens
agcgggactgggacaagggcatggcctgtgtgggccgcaccaaggaatgtaccatcatcccgtccaaccactacggacccatcccggggatccccgtgggcaccatgtggcggttccgagtc

SEQ ID NO: 391291 - DNA, 122 bp, Homo sapiens
gggctggcgtcacctcgggcaactggagaggaaaggttcttgtgtttattttttccaaaacgactccttgactgcctccctctggggctggaaaaacccagaactgcccaaatgctcagtgc

SEQ ID NO: 391292 - DNA, 122 bp, Homo sapiens
cagacaacagaactgaagttgaaagacgtgaccagggctgttaaacgccatccagcccaacggttttcgctcttaagcccctgcagggcctgttagaacaaagctgcggggcccagtccccg

SEQ ID NO: 391293 - DNA, 122 bp, Homo sapiens
tgtgactcaccatgctatccatatgttgaggaaaatatactcctctgctctaaaagttcacgttcccatgcaaccatatgatcgctaatgagggcttccatgtgtcctaaatattgagaagt

SEQ ID NO: 391294 - DNA, 122 bp, Homo sapiens
tcccctcttcctccccttcctcctccctccctccctcctggggcttcccgccagctggcccggggccaggcctgccacagccgctgctgttgcagttgctgcagccactgcttaggctgctg

SEQ ID NO: 391295 - DNA, 122 bp, Homo sapiens
tcctggggagctgcaggggcacagaacggtttggggtgctgcatggggcagcggggggcccggtccagacaggccaggagggcggcagtgggagtgcaagtggcccaaccggagaacaggct

SEQ ID NO: 391296 - DNA, 122 bp, Homo sapiens
cagttctcgccacccccaccgtgttggtcctttgtgccctctgggcggtcgagcacccaacggtccacctccaccagggcagccacctgaatttactcattaagaatttacctaatgtggct

SEQ ID NO: 391297 - DNA, 122 bp, Homo sapiens
ccggcccaccttggaaacccctgatggatccctgctcccagggtcctgagacttaagctccgcccagagccctgcgggatttctcccggtgcccacgaagtccatcccaaagcaaccagctc

SEQ ID NO: 391298 - DNA, 122 bp, Homo sapiens
gccaggtcgccctgaaggttttccaaagggcttggctccagagccacctggcagactgcccgtggccctgctgtcgggccccaggccgttgtcctgctctgaccacagagttttaatgtttt

SEQ ID NO: 391299 - DNA, 122 bp, Homo sapiens
gaagtgatcacagtacaaagagatgccactcgcagcctgagggacggaagggcctgacggcggccatcctccaccagccacgttccggggctgcgcttggcactttaactgcacccggcact

SEQ ID NO: 391300 - DNA, 122 bp, Homo sapiens
tttacatcacccagtacaatatgcacatgtacaactgacccaaacattttgcaaaacagtcgctgttactacatgagatacattctgaaattgtttcctaacaagggacaccaggacaaatt

SEQ ID NO: 391301 - DNA, 122 bp, Homo sapiens
cccctgccctgcagagggtcaacaaggacctgctaccctcaggatggcatctgtctgccccgcccctcagtccatactcacagtccaaagctagcatgggcaggagtgggctagggctcttg

SEQ ID NO: 391302 - DNA, 122 bp, Homo sapiens
ttccagcggcaaaacaaagagacgtctccagcaacagaatccaaagcagcatttttaaagcgagcaattcatccccgatctcatcacaaagtaacagcgaccatcctgctcgccacagacac

SEQ ID NO: 391303 - DNA, 122 bp, Homo sapiens
tgaaaaggcgtgtatactgaaaagctacactaatgactaaaacttaatcggccctctacccgctgtattccgcatcataatccagtcaagaaacaacccaaaacactcacttcctatcaaaa

SEQ ID NO: 391304 - DNA, 122 bp, Homo sapiens
gacggccgggaatggaacggggcggggcgtttcccagcccgaggaaaacagccctgaaagcgcggccaggaatggatgggggtggggcgtttcccagctgctctccagggagccgcctggag

SEQ ID NO: 391305 - DNA, 122 bp, Homo sapiens
acaagatccctattcaacagatctcctggactctcattttgagaatcacgtttctctccgcgtgagttgcaccaaaccattcagctattattaagtgtctcattgtctgtctgtttacctat

SEQ ID NO: 391306 - DNA, 122 bp, Homo sapiens
acgccggctgcctctcagccaccgtgtgtctgtggtgtgtgatcccgggtgtctgtccctcggtctcgtacatccatgtctctcgtgaagcccgtggccctgcctttcttcttctgtaacct

SEQ ID NO: 391307 - DNA, 122 bp, Homo sapiens
gatgtcattccgagacttcatgcgggagttcacccgcctggagatctgcaacctcacacccgacgccctcaagagccggaccatccgcaaatggaacaccacactctacgaaggcacctggc

SEQ ID NO: 391308 - DNA, 122 bp, Homo sapiens
tttttaaaaattattactcctttaaaggattattcaggtaaaggaagccgcatctgctgacggttccgaaaacaagaggattaggagcccgtccacagatccaggcccgcagacccccaccc

SEQ ID NO: 391309 - DNA, 122 bp, Homo sapiens
agggtcagttttcaaaatctgtggcgtgaccccgccactgagatagatctgcagatgcttcgtcccagtcagggaggccgtctcggcatttccaggttcttaacgctcttgatttttaccct

SEQ ID NO: 391310 - DNA, 122 bp, Homo sapiens
ccccgcggtgcccggcgggaggggcgcgagggtgcacgcgcggggtgggggcgcgggagccgccccctgcccgccccgcgcgcatgctcccgccgcacctgcctcgctcagtgttccacacc

SEQ ID NO: 391311 - DNA, 122 bp, Homo sapiens
ctcaccttgacactcccagccagctggggtactgatcccacccttccccggccgctgccccgggagtggggaggtagagagagccacacccgaaacacctttccacgataaacttttattct

SEQ ID NO: 391312 - DNA, 122 bp, Homo sapiens
aggagtcttcgctcttccgctggagaaagccggagctggcggtagcagcgctgcgtggggcgcctccttcctctgcctttgcttcttaagtgaagactgtgacactgtgacttataataaga

SEQ ID NO: 391313 - DNA, 122 bp, Homo sapiens
aaaaacaagcgtggaggagcaaagattcccaatccccgggttactaccgcgcgcgttctgcgcgagccattgcaatgccagcatttactgtaagcagaatttgaaggcttttgaaatctttt

SEQ ID NO: 391314 - DNA, 122 bp, Homo sapiens
tatagaatagatcggtcgggggtggtggctcacgcctgtaatcacagcactttgggaggccgaggtgggtggatcacgagttcaggaggctgagaccagcctaaccaacatggtgaaatccc

SEQ ID NO: 391315 - DNA, 122 bp, Homo sapiens
atgctcccagccgaataaaccacttccttctttaatccagtgcctgaggagttttgtctgcggctcatcctgctacatttcttggtttcctgattaacggacagtcgaggcagccccttagg

SEQ ID NO: 391316 - DNA, 122 bp, Homo sapiens
tccacattcacccacagtcatcttgggcaggcacatctaggcctggcttctgttctggtgcggtcccaagggaatggccatgcattgatgagtttggtcctcagttctgagtggccctgggg

SEQ ID NO: 391317 - DNA, 122 bp, Homo sapiens
gatgctcactgcgctagcgggaggggaccgttaagtattttccggaaccgtttatcagctcggccttggacatatgtccttttacccttcagcaataaaaacatggccctttctccccgctc

SEQ ID NO: 391318 - DNA, 122 bp, Homo sapiens
taagcccgtttattccccctcgaagcgtttccactcagttcttgatcattcatgtgaaaacgagccatctccacgtctcccaaacgtcttcaaaccgtttcctaagtcttgtaaggccgcct

SEQ ID NO: 391319 - DNA, 122 bp, Homo sapiens
ggggcagaccctgagcctcctgttgcagcattttgcggcctgggtaccacagggatgtggcgacctctttcctcatcctcggcccagacgaaccaccatggccctgggactgaggacagtct

SEQ ID NO: 391320 - DNA, 122 bp, Homo sapiens
ctaccacaggggggcagcaacccaaaattcacccaatttgggcacttggatgggtgaccccgggccccaaccacagggatccacagttctggtggattattgcattaataggaaacattgta

SEQ ID NO: 391321 - DNA, 122 bp, Homo sapiens
gggggactcccatggagcgcggactcctaaggaagtcgctgggaatcccaccggctgtaccgcagggcgttagtacctagatggcttcggtgcccccaagcgatgggctcaagctacagggc

SEQ ID NO: 391322 - DNA, 122 bp, Homo sapiens
tgacccggtcgcctggccgcagtgagtcaggctgggagggcggggccgcgccggctgctgcggctggcacttggccctttaatccccttcgtgggcccctcaacctggagcggataaattct

SEQ ID NO: 391323 - DNA, 122 bp, Homo sapiens
aggcacgtcctgacacttcagatgcgccggatcctgccatgcttgagccaaagctctgggcgattcccatgtggctcaggctgaaagcggagctctcatgaggcaggccgggcccctgcacc

SEQ ID NO: 391324 - DNA, 122 bp, Homo sapiens
gctggccagacaccattcaatgtcaggcagctttacacaggaggtggagctctggggtgacgtagagtgaatgcttatctttcgtgttgtcatgaacttctgtgatttagctcactgcctat

SEQ ID NO: 391325 - DNA, 122 bp, Homo sapiens
gaaattggaatccagcagcggcgagcagcagctgggcggtcacatctgggaatgcaaagccgacctccccctcctcctcctcctccccctcctcctcctcctcttctctcacccaggatcac

SEQ ID NO: 391326 - DNA, 122 bp, Homo sapiens
agggtgggctctggcctgtggggagggtcagggtgcccaggtactgccactagcctcctccgcctcctggagtttgcccagggccctttgctgccggctggcagggcggagctggcgggaag

SEQ ID NO: 391327 - DNA, 122 bp, Homo sapiens
gaagaaccagaggagaaagaatgccagcgttgagaggaggttttccccttaatccaactccgttcttgcatgagggaggcaatgaaaggccagagaagtgaagggatttgcagaggacacac

SEQ ID NO: 391328 - DNA, 122 bp, Homo sapiens
aaaaaaaaaaaaaaaagaaagtaaattccacgaaagacgggccttgctcaccctgctcgacgctgggttcccaagcccagtcctgcacctagtcctcgaaggagggggttttcatactattt

SEQ ID NO: 391329 - DNA, 122 bp, Homo sapiens
ccgaggatcccccacccacggcgggcgtgaggaagggcttctgagtgactggagctctaccgcgtgtgccccgggaaggccaggctacccgggacggggctcggctccccaggtgagctcgt

SEQ ID NO: 391330 - DNA, 122 bp, Homo sapiens
gacttccacacgaacaagcgcgtgtgcaaggagatcgccattatccccagcaagaagctccgcaacaagatagcaggctatgtcacgcatctgatgaaatggattcagagaggcccagtaag

SEQ ID NO: 391331 - DNA, 122 bp, Homo sapiens
aaaggaacttcctgtcaaccaaagcatacatcgcttacaatgttgaagcggttgagaaaacgcacactcagcatctgtctaacatctttagattaaaaactaaaactaaaaggtgatttttt

SEQ ID NO: 391332 - DNA, 122 bp, Homo sapiens
cgcgctgtacgggcgctgggtgctggcgcgcggcctctgcctgctctggaccgccttcgacgtgatgtgctgcagcgcctccatcctcaacctctgcctcatcagcctggaccgctacctgc

SEQ ID NO: 391333 - DNA, 122 bp, Homo sapiens
gccccccaaacgcctgagattggggggaccaaattaaaagcagctgtttaacataccttccgagccaggcgaggagtcctgaatgggggggaacgccccccacgggctattggctccccggc

SEQ ID NO: 391334 - DNA, 122 bp, Homo sapiens
tgtgcggcagctggatgttagccaggctgtggatcagagactggctcaggttcgccagctcgtggaggagagactcgttctgctgctcaatcactttgttctcctcttcgatggtcttcagg

SEQ ID NO: 391335 - DNA, 122 bp, Homo sapiens
agccacgcagccccttcctgggctcaggctccttggttgattctaggctcagcgttttggcgcagcctttgctctccaagagacgcctaagcgcctgggcgccgtgcttctgctgcgcgtcg

SEQ ID NO: 391336 - DNA, 122 bp, Homo sapiens
atgttcaagtccctcatataaaatgaggcagtattggcatataacctatgcacattcctccgtacactttaatcatctctagattacttataactaatataatgtaaatgctatgcaaatgg

SEQ ID NO: 391337 - DNA, 122 bp, Homo sapiens
aattgttgaagctgggtgatgggtacttagaggatcattacattattctatttctgtgtacgactgaacattaataaggctttaaaagggggactgctgtgaaaaagagaaaaaagtaggga

SEQ ID NO: 391338 - DNA, 122 bp, Homo sapiens
caagtggtgtgtgtttttacacctctctggccctttagttttctgctgggaaacccagaacgccagtccagacaccgaggagccgaggaaacaggacagcaggcagggggctgcggagagca

SEQ ID NO: 391339 - DNA, 122 bp, Homo sapiens
acaaagcttttggctgataggaagcatgacagcactggggccctacactggaagcgggaccgtccagagaagaagactgcgcacagggatcgggagctgggacacacgttagtcaaggtgta

SEQ ID NO: 391340 - DNA, 122 bp, Homo sapiens
aaccttactttgagtcactcaagcattgcccctcaaagctgggcctgtttttaacttctacgccctgcccaaatccaggctgcatatgaagcagttctcttcaggaaagtcaggaaaacaaa

SEQ ID NO: 391341 - DNA, 122 bp, Homo sapiens
aggaaggcgaggagcgggcgttcggcggagacggcctctgggccgcgcgccttccggcaccgtggcccccccacacccccgcgggatggctccacgagacacccagtcaggcaccctggttc

SEQ ID NO: 391342 - DNA, 122 bp, Homo sapiens
gtgtctgctgctggcccgcgtgctgtggctgtccagtgagtagtaagtcctgctgtcggccgccgggcacagtggcggcgagtccgagcgcagcgcgtcgtgcgccccacgcaggcccagga

SEQ ID NO: 391343 - DNA, 122 bp, Homo sapiens
tccccgcgcagggcagccactccgcgccgggcggcgtcctggccccgacccgggcgggggcgctttatccccgctgggggtgacgtcaccgccccgccgtcctccccgccccctcccacccc

SEQ ID NO: 391344 - DNA, 122 bp, Homo sapiens
caacagccccgccctgcacatcggcagtgtcagcgccacagacagagactcaggcaccaacgcccaggtcacctactcgctgctgccgccccagaacccacacctgcgcctcgcctccctgg

SEQ ID NO: 391345 - DNA, 122 bp, Homo sapiens
gggaaggtggcccaaggtgcaggtcataggcaggcccgtcccgaagctccatttgactttcgaaaaattctgtaacccagttcagcgaaggattaaatcgtcaggttttaaatagagacctg

SEQ ID NO: 391346 - DNA, 122 bp, Homo sapiens
gggcagcgtcgccccctgcgtgccacctctctccacctctctcttgtccctctctgccaccgtccacgccgcagccgcagcagccaccgcggctgcacacagcttccctctgtccttcgcgg

SEQ ID NO: 391347 - DNA, 122 bp, Homo sapiens
ctaattcccacagagccgaagttcccaccaaaggccgagggttaaggttactaaaatcagcgtttctgaatcctgtctcaagttgtctcaactgggcttccgtagaacggtttcttcgtaag

SEQ ID NO: 391348 - DNA, 122 bp, Homo sapiens
ataaccttttaaaatacagcatcattaagtgggaaactgaaagcctgccattgttgttgccgtttaacagctgatacaggtttctggtgatgctactgttgcctagctaccctgaccacatt

SEQ ID NO: 391349 - DNA, 122 bp, Homo sapiens
ccttggaagaagatgtctgcagaggtaggtggattgcagggagggactaaggggctggggcggagttagctcatttattagattggaattccaagaaggaagcttagaagccgtctagagca

SEQ ID NO: 391350 - DNA, 122 bp, Homo sapiens
aatggcagtgctgggttcacccactcctcccctttttcatctgcacaaagttgagggaaacgggagaatctgtgctgagaagactcagacccaggagcccctttcacaggcccctagttggg

SEQ ID NO: 391351 - DNA, 122 bp, Homo sapiens
cctaaacccgcctgcttcccagccatctcaggcccgcgctctcctcgcccctgcagggcgcgagccccacctgagtctgggtgaggcccagagaggccgccagctcggctcgctccggcaag

SEQ ID NO: 391352 - DNA, 122 bp, Homo sapiens
agagcctttctgaagagaattatatcaaactaattacaaccaagaaataatagtatgaagcggatgctgtttggaggacaggaaaatttatcgggaaaattacataatccctctgattccac

SEQ ID NO: 391353 - DNA, 122 bp, Homo sapiens
atgccccagcgagtcaagcgggcagacgagtggcgatctcggcactagcagcagcagcagcgccgggctgtccccgggctccgactcggacagcagcggcgtggtgtgtggcggccgcggag

SEQ ID NO: 391354 - DNA, 122 bp, Homo sapiens
ttcttaaacagtgtttggttcccacatgatcggctatttaagccggagagggtattttggcgcttagtcgccttaatcgctatggggttgcattcttcatctgtgctactgaaaaataggct

SEQ ID NO: 391355 - DNA, 122 bp, Homo sapiens
aataaaagaaagtacactgatacacatctagaatccctcagaaatcattcacatgtttaacgtgtattctctctctctctctccccagactccctccaagaacaaaaacctgttattttttt

SEQ ID NO: 391356 - DNA, 122 bp, Homo sapiens
agaaaaaaatttttttccacctaacggcttttccctgagctttcaggaggccattgaagccgttaagaccgggtcaggtgaacaggaagttaaagactgaaaaggagacacaaaactgccga

SEQ ID NO: 391357 - DNA, 122 bp, Homo sapiens
ttcaaacgattctcctgcctcagcctccagagtagttgggattacaggcgcctgccaccacgcccggcttacttttgtatctgtagtagaaattggggtttcaccatgttactcgggctggt

SEQ ID NO: 391358 - DNA, 122 bp, Homo sapiens
tcagcacagacacgctgtgatcacacacagaggccacttcctgtgaccattttaccaaaccggtaaagcctggattccttgggaacctactttgccccaggagctccgtagaagcatcgaat

SEQ ID NO: 391359 - DNA, 122 bp, Homo sapiens
cgcgcgccgccttcacgtgcagcgcgtagagcgagagcactaagcccgtcaggcaaagagcgagccgcacccagccagggctcccccaggtgctgcccattatctccaggttccgcccgagg

SEQ ID NO: 391360 - DNA, 122 bp, Homo sapiens
aaggacggggccaagacccggaaccgaaaagcaggtcacgatagcgctggaaggcctcgtcgaggactgagcagccgggctgcgcggccgagctgacatcgtactggaattgaaagttgttc

SEQ ID NO: 391361 - DNA, 122 bp, Homo sapiens
aaaacaggatttgagaacagatagatagatattttccattatggcacaaacgtttaaggccgagtcagcaccggaaatgttcagggcctgaacatgtttgtttcctcacattagtaccaaga

SEQ ID NO: 391362 - DNA, 122 bp, Homo sapiens
tcaaaaaaaaaaaaaaaaaaaaaatccacacggtgagagctccagtggcgtcagggtgcacgtttctccatctccgtgccgtgagcttcatcgcgggtagaaaatggcttggtcgctggtag

SEQ ID NO: 391363 - DNA, 122 bp, Homo sapiens
cccctgggacgcccagagtcaaaaaaacagcaaaacacgggtggaagggtgcgcggcacacggggcccctcgcaccgcggcggggagtgagacgcggcagccggggcgggagacgggggggg

SEQ ID NO: 391364 - DNA, 122 bp, Homo sapiens
cttctctgaaaccagttccttctaactttataatgttatttatctgcaggtccgttcactcgacctcatccagccttatggcgaatggtttttggtgagtttatattagcaatgtaaaagga

SEQ ID NO: 391365 - DNA, 122 bp, Homo sapiens
ttaaagggtacctggcagcgctgggctcctctggacagtttccaactgaggttaagcccccgcatccggccactcggagtgctgggagtgctgcaggctgcagggagaaagcaagccagaga

SEQ ID NO: 391366 - DNA, 122 bp, Homo sapiens
ggcctcacggccccagctgcctgccccacgagcagctgccacaccagcccggactgtcagcgcaggcccatccagatggaggcctcagcccagtgcccgcctgaccggtttgcctgcctgtc

SEQ ID NO: 391367 - DNA, 122 bp, Homo sapiens
ggatgggcggtctcacacacccaacgtgcacaccacagccgtgtatactctcagccttcacggctctgtatgaggctggtgttgtgcccattttgcagatgagagaatggagactagaggag

SEQ ID NO: 391368 - DNA, 122 bp, Homo sapiens
cgggttcttgatctcactgatttcaagaaagccacaagtcctccggatgagtgttacaatcgttagatgcggtgtagccagagttcattccctctgacgttcggatgtgttatagagtttct

SEQ ID NO: 391369 - DNA, 122 bp, Homo sapiens
gccagccaccccgctgcccttcacctgcgtggctgcgggggcccaagagcgctgaagccccgagggagccggtctctagaaaagtcagcggctgaagctgacagcccactctgaataaataa

SEQ ID NO: 391370 - DNA, 122 bp, Homo sapiens
gttcgggcaggtgagataatacctaacctgaagcaaattatcggatgcagaggcttagagcgagtgacttgtattctttactgaagaatataagacctgggggcttcacttaaacgccaaag

SEQ ID NO: 391371 - DNA, 122 bp, Homo sapiens
aagtgcgcggatgctgaggtcgccgggccgtcactgctcctgggttcttctcctccttatcgtccaagatggttcctggaggcccacacatgtcctctgtgctctgttcgcacacacacaaa

SEQ ID NO: 391372 - DNA, 122 bp, Homo sapiens
gcaaaaaagaaaaggaaaagaaaaaaactggaatcagatggtcaaatttcacatcagcaccgagaggctgttaggagactccattctgctcgcggctgctccggctccaggtccggcttccc

SEQ ID NO: 391373 - DNA, 122 bp, Homo sapiens
tcgcgcctgcggcctccccagcgtctgcgccgcgagtccgctggacccgccagggcgtaacggcgggtaacccgccccacccgccgcacaacacacccaactgcacggactcacgtccggga

SEQ ID NO: 391374 - DNA, 122 bp, Homo sapiens
cttgcttccttcttacctcctttctcggaagagatcttcctcctccacccacacctgcgccgggctctgcctcacagcactgccgcaggtggtggggcccactgaggacctcccctccctca

SEQ ID NO: 391375 - DNA, 122 bp, Homo sapiens
cggggcagggctcgggaccggcagcccgccatgcgcgagcgcccccgcgtggtgggctcccgcacagtacagccggagcctccctgacgggcgccaccccctgctcaggggctcgcggtcgc

SEQ ID NO: 391376 - DNA, 122 bp, Homo sapiens
ctggagtcattaaaagaaatatgcttgcaattaaaaaaaaaagccagctatttctgaggccggtcggtgtgtccaggagtgttcaaggcagtgttaattatggcacatagaacctctaagct

SEQ ID NO: 391377 - DNA, 122 bp, Homo sapiens
cggtcctcgcgtcgccccgccccacccgcccctgcttcggcgggaatcgtgtttgcccggcgtgtagtccctgacaagcgtgccctgtaggagaaaagtctgtgtcctgtgaagtgtgaccg

SEQ ID NO: 391378 - DNA, 122 bp, Homo sapiens
gccttgctgcagccgtctccgctccggtctgctcccacgccgccccaggccgtcctccagcgacagcgagctggagtggacgattccctgctgccttcgcatcccctgcccaggtcccctca

SEQ ID NO: 391379 - DNA, 122 bp, Homo sapiens
tatattgttgattcattaacactgaactcacagctaacagcagtataacttatgcatgaacgaagcttacctaacacatgtatttctcccataaggcacatcatagcccgcttgcactaaag

SEQ ID NO: 391380 - DNA, 122 bp, Homo sapiens
ctgggaggtagcaccacggtttctcagcagtgttcgtgcaaattatcactataatgcacccgtgcaggcccagcagcctgtgcaagtatcacagcaccatacagacatgaattcatgtgtct

SEQ ID NO: 391381 - DNA, 122 bp, Homo sapiens
gagtgtatgctagaggctcgtggagggcagtgcagccccgtctcccaggttaccaggagacggcccaggctgcagggcccctcagtgtgccatcaactcctctcatgcctggaacttgtttg

SEQ ID NO: 391382 - DNA, 122 bp, Homo sapiens
gcaccagcgacgctctagggtgtgtttttctacttccctaggcccaagcctgcccgctggcgtcgaagccaactccttactggttcaggtatgtgctcgtctctagagtaaaccaatcagag

SEQ ID NO: 391383 - DNA, 122 bp, Homo sapiens
taatggtgaggagagcgctagatttctctaaacagtcacaaaaactatacccagcctcaacgctgaggaggtcatggccagtttctttatttcttgaagaaatggtctgaccccaccagttc

SEQ ID NO: 391384 - DNA, 122 bp, Homo sapiens
gagcacaacggcacccccagagccacgagcacaccgccacccccagagccacgagcacaccggcacccccagagccatgagcacaccggcacccccagagccatgagcacaccgccacggct

SEQ ID NO: 391385 - DNA, 122 bp, Homo sapiens
taacaacatcccagccccgaaatgcagtggagccagtttccaaggaagaacagcagcagtcgacccctaacaacagggcacaggtaacggataaaagctcaccccgatttccaagtcgccaa

SEQ ID NO: 391386 - DNA, 122 bp, Homo sapiens
aggaccaaggacaagctggccttcatgcagcagtccctgtcgggccctggggccgggggccgggcccccaccatcgtgctcacggcccacgagagggccatcaagtcggcgctgctcacggc

SEQ ID NO: 391387 - DNA, 122 bp, Homo sapiens
cttaagtgatcctctcatcacaacctctggaatagctgcaactacaggtgtgtaccaccacgactagttaatttatatttatttatttatttatttatttatttatttatttatttattgag

SEQ ID NO: 391388 - DNA, 122 bp, Homo sapiens
tggcagtggcccgcgatgagagagggtccttccccttcaggctaggtgtccctggtcaggcgaccccttggggcacccagcaatttagggcttcagcttccttttccttcgatacccaggag

SEQ ID NO: 391389 - DNA, 122 bp, Homo sapiens
agggacaagtccccaggaccctggggcagaccttctgcttttgtcccctgcccctccccgcgccccggggattccacgcagccagagaacccgcaacaactccgctcatcttggcgtcagaa

SEQ ID NO: 391390 - DNA, 122 bp, Homo sapiens
ggcagacgttgcagatgcctgctgcttgactcaggctgtagccacattcctcccaaggctcggaataaagttccaacagctttaagtttgaattatttaacttccaataactataaagtcat

SEQ ID NO: 391391 - DNA, 122 bp, Homo sapiens
aatccactgtcagcttgcactctgcacctggaagagccacagacactcaacaccagcctgcgaaagcagcaggaggagagctataccctgcaaagccacagaagcagagctgcctgagtctg

SEQ ID NO: 391392 - DNA, 122 bp, Homo sapiens
gtggttcaccattccttcttcagtaagaatttcatctcctctctgccactgttatccactcgttctccagtcatcccctgctcaattaattcctgagatttagaccaataatttgaggttaa

SEQ ID NO: 391393 - DNA, 122 bp, Homo sapiens
cgggagacacggagcgccagggacaccgcacagattttccgagtgaatctgcggacgctgcgcggctactacaatcagagcgaggccggtgagtgaccccggccaggggagcaggtcacgac

SEQ ID NO: 391394 - DNA, 122 bp, Homo sapiens
ctcccggcccatccgcctccttctccacctttccagtcttaggttgcattacacatggagcgcaggtgttgagtggtactgacaggaggaattgggaggagtgaatctgcttcacgctcttg

SEQ ID NO: 391395 - DNA, 122 bp, Homo sapiens
cattccaaatggtttctcaggttcaactaacttattttcagagcttcttctgcaggcacacgcacacccgaatagctaaacaaaactggaagatggaaagaataaccatattaaataaagaa

SEQ ID NO: 391396 - DNA, 122 bp, Homo sapiens
ctatttacctttagaaggccagatttttattgtcctctggaatacagtgcttcttccagacgctataaaattcaagcctaatatttggtaaacttccctagtgtttgtgtttcgtaaactgt

SEQ ID NO: 391397 - DNA, 122 bp, Homo sapiens
ccgggctgggaagggagcggagcgggagcgaccagcgagcgcagccggccgaggtacgggcgcctggcggcgccgcaacagcggcaacagcagcaggaaaaaaaatgagagcgagctagaga

SEQ ID NO: 391398 - DNA, 122 bp, Homo sapiens
acttccgcgcctcctctctcccctcgccatgctctcctcttccttcccagtgagcagctccggctcctacagcactcccattcgcaagtccctgaggcgggcagcaccacctttcagggcat

SEQ ID NO: 391399 - DNA, 122 bp, Homo sapiens
gggccgtggctgtttatgtaatgcgaccccaggcccgaaacggcctcgggcgagtaggggcgactgaaaagctgggagcccacgtagtaaaacccagttacctagcctggacgcgggcgagt

SEQ ID NO: 391400 - DNA, 122 bp, Homo sapiens
gcgatcggatgagctgacccgccactaccggaagcacacaggcgccaagcccttccagtgcggggtgtgcaaccgcagcttctcgcgctctgaccacctggccctgcatatgaagaggcacc

SEQ ID NO: 391401 - DNA, 122 bp, Homo sapiens
tcccggcgcatgattaatattcaatgagcccagatccgcggctggttcgccgggttgaggcgggggtagcgggcggggccggcgctggggagcccgcgacccgggcggggagggcgtgtgtc

SEQ ID NO: 391402 - DNA, 122 bp, Homo sapiens
ccttggagaccctaccaccttggaccccttcagacaccataccctccgtcctcaggcccgcggagaccctgacccaaccagacaccgccgtctgctcctgacacttggaagcgccctttccc

SEQ ID NO: 391403 - DNA, 122 bp, Homo sapiens
tgccactgaggctgcagccgggggccacaagggcaggatgggcccaggcctttcctaccccgaggcccccagctgaggagcccgcttcctccacactcctcccctggtactcctgcctgagg

SEQ ID NO: 391404 - DNA, 122 bp, Homo sapiens
aggagccgggaagaagagccggtgttctctctgttcctcgctagcagcttgggacattagcgccgagatgtgccccatatctgagctgccttcagctccttggaaacggatccaggtttttc

SEQ ID NO: 391405 - DNA, 122 bp, Homo sapiens
ccacaggagaagaaaagaataagtggagtgatgtattggaatgaccgagaaagaatgagacgtaatttacaagtgaaaggaatggccttgactaggagtgaagatacacacaaagaatatgg

SEQ ID NO: 391406 - DNA, 122 bp, Homo sapiens
gggtccatacttaggtctttaaaggagggaacatggaaggggaccctactgggggctccacggctggggctctatattcagctctttggtctgggcgtctgccccaggtcccctactgcgag

SEQ ID NO: 391407 - DNA, 122 bp, Homo sapiens
gtgggagataaggctcatggccacagacatctgcgtcagagataggaggtctcaatgccacgggcaggggcaactcggactgtggggcgtggaaaggactggggaagactggatgagaaggg

SEQ ID NO: 391408 - DNA, 122 bp, Homo sapiens
gtacggaggcggtcatactcctcctggcccgcagtgtcccacaggttcaggttcactgtgcgcccgtcaactgcgctctgcgcgctgtaattgtcgaacacggtggggatgtactctttggg

SEQ ID NO: 391409 - DNA, 122 bp, Homo sapiens
tttcttgtatttatagtgttattatggattttttcacacagcttatttgttatttgttttcgcttttcacaggagtatttgattctgattttatctctgctccaggggtctatcattccatg

SEQ ID NO: 391410 - DNA, 122 bp, Homo sapiens
gcaggcgcgtcagccgagctcggcggtggcgcgggcggctgggacgcagctgcccccgctcggcgcccgctgcacccttagcagccactgccacctgggcccggagcctccacgatctcgcc

SEQ ID NO: 391411 - DNA, 122 bp, Homo sapiens
agtccatgaccgattgtaatatcccattcaagtccctcttttatttttttagaaatgctacgtatattttcactattaggcaaggtgatatagtttggctgtgtcccacccaaatctcacct

SEQ ID NO: 391412 - DNA, 122 bp, Homo sapiens
agcactaccacagagggaatcccaaactcgctgctgagaacagaacagctgtgccctcgccgactgggacccgagtgacatctactggagcaagcaggggctgcacgtgagcaggcagccat

SEQ ID NO: 391413 - DNA, 122 bp, Homo sapiens
caatgattaataaataatgctaacactcgatgctggtaaccagccaatgcttacatgaagcgtggataggccaggcaccattctcagcactgggcatattttaccactaactcctcttcatc

SEQ ID NO: 391414 - DNA, 122 bp, Homo sapiens
cactaaatactaaaccaaaagacactgttacacgcggttttcctctctggccagccagaccgccggtctgaggtccacttgccaaagtgatgcctggctggcagtttcatccaccaacagaa

SEQ ID NO: 391415 - DNA, 122 bp, Homo sapiens
gccgcctccagcctctcgccagtgggaagcgggagtagccgcgcggccggagtccggaggcgaggggaggtcggccgcaacttccccaggccaccttaagaggacgatgtagccagctcgca

SEQ ID NO: 391416 - DNA, 122 bp, Homo sapiens
ggtgcacatgggtgccggcgggcgagctgcggggggagggggggcggggtgtggcctccccgcctcccgggcgggatttgcatgtgtgtggtggccccagacttcctgctccttctacgctg

SEQ ID NO: 391417 - DNA, 122 bp, Homo sapiens
ccctcatctcaggcacaggcttggggcccacacgatggccgacaccccggccgcagcagacgccgcatggcagagccgaagcagcagcagccggggcccttcacacctgcgcccctgcccat

SEQ ID NO: 391418 - DNA, 122 bp, Homo sapiens
agacgtccccctacgtcccggggcccctgccccaacccgcgtcccaagcgcctgctctcgcgcctgctgcaaggcaggacttcgcgcgcttttccccaacccatgacactctaggaaattca

SEQ ID NO: 391419 - DNA, 122 bp, Homo sapiens
agggtaaaaaaagggaaacagggaccctctgcgaagccagagtcctgccagtgaacttcccgcctcgcagattgaatcccaggttccacccaggaggaggaggggccaggctcctcccagct

SEQ ID NO: 391420 - DNA, 122 bp, Homo sapiens
ctgaattttttcggcaaagaaaaaaactgcaatggttgagccaggctgccggcagcctcccggcttgacgcttctccagccgtgcagagtccactccggttactttgctgcgagtccggagt

SEQ ID NO: 391421 - DNA, 122 bp, Homo sapiens
cgagcctgctgctttcttgctactgcttcggcttcccggctaccccccggacggtgaaggcggcccagctgtggatggtcagatagcccttgtctcccgccgccaatctctggcccctagca

SEQ ID NO: 391422 - DNA, 122 bp, Homo sapiens
caggccttaatcacccccattccgtgcggtggtatctcccaggctctacattctcgggagcggcgcctcccaagggggtcctgggaccttctcgcgctcctcctggcctctgagggatgcgt

SEQ ID NO: 391423 - DNA, 122 bp, Homo sapiens
gtgttgaatagacttggcttccaggtatccctttctatcggcacagctgcggcattcacccgtgcaagcttccggcttgcttctctatgtctgcagttcgattttacaaactgctctttttt

SEQ ID NO: 391424 - DNA, 122 bp, Homo sapiens
gtgtgtggtgtgtattgtgtgtgcccgtatttggtctcgggtaggcggaaagccctgccccgcccctcctcccgcctccacccgggaacctcgatgacgcccacagatgtttatcctggtgc

SEQ ID NO: 391425 - DNA, 122 bp, Homo sapiens
ggctggcggcaaatgcaatacagggcgttggggtcgtaaccctcacattcaggcttcggtcggcccaagtctccaggctcctcatctttgatgtcctgagccgcctttccctccaacttact

SEQ ID NO: 391426 - DNA, 122 bp, Homo sapiens
ctttagtgtaatccatagcagttattgcattggagcagcagtccctcactttgaaaccttcgcaatagcccgaggagctgcctttcatattttccaggttattgataaggtaagacctctta

SEQ ID NO: 391427 - DNA, 122 bp, Homo sapiens
ccaccactgtgttataacacctccattccacatcataatcaggtcaattaccttggctaacgttgaaaaaagaaccttctctcaatggctacagatagcaattcttcttgtgataggagagc

SEQ ID NO: 391428 - DNA, 122 bp, Homo sapiens
aggcttcggactcgcctccgctggcggtctcccggcccagccctgtctcggttccgcgggcggctggtaccatgtgccctcacccccagctcactgcacctggggaagaggtgggcttggcg

SEQ ID NO: 391429 - DNA, 122 bp, Homo sapiens
caaggtggtccgggccttctgccgtcagccagccacgccccactcccagtggtcctcttccgacatgaaagatgccaggaacaggaaaagcaaaacagcgcgcagcgactttcctactctag

SEQ ID NO: 391430 - DNA, 122 bp, Homo sapiens
tctccccaaacctagctagtgtttgtgctgcctgtaatgcccttctttctttgcaggggtcgccactttaggtcctggtcctccttcagaaagtttttcctctttctccccagcggggatag

SEQ ID NO: 391431 - DNA, 122 bp, Homo sapiens
cactatggtcgccgcctccgccaccgctgccgtagttgctacggttaccgctatggttaccgctaccgttgcagtcaccgttgccgctaccgctgacgtcaccgctaccgttacagctaccg

SEQ ID NO: 391432 - DNA, 122 bp, Homo sapiens
tgagaaaccgaggaacgagccagacgactggaggcaggttccaggcggggggcgtggcctcgggcgactgccggatgtcctcttccagaaccgggccgtgccccggaagcagttgttgttgg

SEQ ID NO: 391433 - DNA, 122 bp, Homo sapiens
aagcgcaactccttgaaggaactgtggcttgtgatccatgggcgagtctacgatgtcacccgcttcctcaacgaggtggggcctgggaggtgggaggcctctgaagctgctggggcgagggg

SEQ ID NO: 391434 - DNA, 122 bp, Homo sapiens
acctcaggtgattcacccgcatcagccttccaaagtgctgggattacaagtgtgagcccccgcacacagccaagactactgcttttataaagagagacattaaagagctgattgttatttct

SEQ ID NO: 391435 - DNA, 122 bp, Homo sapiens
cacggtgaggacgggagtcaggacgggatcacggtgaggacgggagtcaggacgggatcacggtgatgactggggtccactgaaggggacttcttctctgatgtctgaattctcaagagaat

SEQ ID NO: 391436 - DNA, 122 bp, Homo sapiens
tgggtagccattgctttgattgtgctttatcttcaggatcttactggtaaagccgtgcttcgtatcctgttacagttcttgaaagctgtgcttcaggatcttgatttcacttcttttaaatt

SEQ ID NO: 391437 - DNA, 122 bp, Homo sapiens
ttgaagtagctcctgtgaaggctaggagagagaattagggaaacaaggattgttgtacagcgggtcacgtgaggttgaggacattcaatttcaggtcataccagtctgcttagttgtgtgat

SEQ ID NO: 391438 - DNA, 122 bp, Homo sapiens
ggcggggaggggagggaggcgcaggggagtgcagctttctgcctctcacagacactcggtcgcacacacggggccgagaccggcggcagcggccccgggctggctgtggtcggcggcagcgg

SEQ ID NO: 391439 - DNA, 122 bp, Homo sapiens
tggcctggggaccaggcaggtgggaggcaggctcatggcgggctctggctctgtcataggcggtggagttcctgtccaaggctgtggacagtccaaacatcaaggcagtggacgaggctgtg

SEQ ID NO: 391440 - DNA, 122 bp, Homo sapiens
aggagccgggaggagggcggcgggcgggcctgtctctttaaggtgcccgaggctcgcgggcgctgcgctgaggggacggcgggaggcgcggcctggcctcgcactcaaagccgccgcagcgc

SEQ ID NO: 391441 - DNA, 122 bp, Homo sapiens
gggggctgagatgacaggggtgagaacgtgccgacaagtgtcctctgccggggtctgggccgcggctcgccgccgaagagagagaccgaggcctggaccgcgggtcggcggggaggttgggc

SEQ ID NO: 391442 - DNA, 122 bp, Homo sapiens
tctcggccagcacccgctgctcgggctccgccgccccgggccccgcgcccccgcccagcgcggctagcttggcccgcttccgctccaggatctcacgcttccaagcgggcaccgcagcgcgc

SEQ ID NO: 391443 - DNA, 122 bp, Homo sapiens
ggccgttaggagagtgtggtgctgtcttggaagaagtgtgaagcgggattaggtgtcctgcggtgtgattagtggacaggcattgttccccaggaggcccaggcagcttggaggcaagtgtt

SEQ ID NO: 391444 - DNA, 122 bp, Homo sapiens
gcccgctccgtgctgggccgaggccaaggccctggcagccctgcctgcttgcccgggtcacgctgcccacccacggggaaagctgagccctgtggagtgcacaccatgctgtcagcagtgag

SEQ ID NO: 391445 - DNA, 122 bp, Homo sapiens
tgcaatgcttttccctgtggcttctgtttaagggtttggtcagcagggatctgtagcagacgatgaagggagggagagaaaagagagatctgggtgcttagtccctggcttccttcctgcaa

SEQ ID NO: 391446 - DNA, 122 bp, Homo sapiens
ttcagaagagtctatgctcatacaagcattcatagacatatacctgcctgcttctgtatgcgaatagtaggaaatcatacacagttctgcactttgcttttttcatttcataatatctgaga

SEQ ID NO: 391447 - DNA, 122 bp, Homo sapiens
caagtacctaccgggaaaaaacaccaggtgtcttggcggagttgaccacaagaaggggcacgtgcgcaatagcgatcctagagagggctctggtatctcggattaacaagggcccagagtcc

SEQ ID NO: 391448 - DNA, 122 bp, Homo sapiens
tgccttcttcccaacccccagcctcagctcaagatgctgagcagccccacagacccctgccgtcccttatggaagtcagcacgtcaggggacatccctgatgctgccttttctggaatctcc

SEQ ID NO: 391449 - DNA, 122 bp, Homo sapiens
gtcccctcctccagcaatgcaaccctataataaacaagtctttccttgatcctcccctgccgcgagcgccctcggggaccttggcagctgcagccgccgcggatcctttccagaaagggggc

SEQ ID NO: 391450 - DNA, 122 bp, Homo sapiens
tgggcggcgggagctctctgggacggccggtgaccttggggcagcctctcaggagataggcgtggggtagagagagctgcgcgtggcccatgtgacatgccgcgggcgagagggttaactgc

SEQ ID NO: 391451 - DNA, 122 bp, Homo sapiens
cgttgcagaattgttaaaacaatgccattgttgtcactggattttgttttgttttgttttcggaagtatagtgatttttttggtaaaggtatttgtgttaacgtgtaattgatttattattt

SEQ ID NO: 391452 - DNA, 122 bp, Homo sapiens
ggttcaagggctttattccatctctctcggtgcaggaggcggcgggtgtggggctgcctgcgggctgcgtctagttgcagtagttctccagctggtagagggagcagatgctggtacagcat

SEQ ID NO: 391453 - DNA, 122 bp, Homo sapiens
gtgagtttaaaaatatgtggaagcaaaccgcagtgagatgccacttcgcaccagccagggcgtccgtcaagaagacagacagtcgcaggtgcgggcgagtacgcagagaaatcggaacctca

SEQ ID NO: 391454 - DNA, 122 bp, Homo sapiens
cccttgcgttggggcaggacagcccggcgccctcgggtcaggccatcctctgcgctctgccggggctgctgcatcggcctctgcgtgcctccactttggcctcacgtgtccctacccaggat

SEQ ID NO: 391455 - DNA, 122 bp, Homo sapiens
cccccataccccgtcgctctgctgcgtcctgcctgatgggcgctgggcttccatttctcacggggatcctgcagtttctcagccccatgcactctgggacgaagttcagctcatatcaggcc

SEQ ID NO: 391456 - DNA, 122 bp, Homo sapiens
tttttaggaatgtacttaaaccattactactcaaagtgtagtccatggaccaatagcattcggcagcattgttagaaatgcagaatctcaggcctccacaatcagaatctgcattttaacaa

SEQ ID NO: 391457 - DNA, 122 bp, Homo sapiens
cgctctgagcccggcgaggcggcgctcagtaaaatgacccgaaaacgatccccgactaagcggctctttatcccacagcaaaacggctttcttaagacccatctggtattatctggatccct

SEQ ID NO: 391458 - DNA, 122 bp, Homo sapiens
tcacatccacagtggggtggagctgtatggcacaagatttcatcatgttactcagaatggcgagcaattattcaggaggttataggatatgcaacttccgcaattactcctgcagattgtat

SEQ ID NO: 391459 - DNA, 122 bp, Homo sapiens
ggccccgagagttggctctgagggttgtgtgaggtcctggggttggtcccaggtgatcttcgtctgatagatgctggaaggaagatgttttctggcctcccaggggcctggcccagcctggg

SEQ ID NO: 391460 - DNA, 122 bp, Homo sapiens
ctttctctctttctttctttctgacagtcttgctctgtcacccaggctggagtgtagtagcgccatcttggctcactgcaacgtctgccccggggtttaagcgattctcatgcctcagcctc

SEQ ID NO: 391461 - DNA, 122 bp, Homo sapiens
ttactgggagtcacgacgggaggggcaagccagaggactgggatcttcttttagaaaaaacggtccaggaatccactgtagggatttgactcttgtgaaaggaatgggacttgggagaggaa

SEQ ID NO: 391462 - DNA, 122 bp, Homo sapiens
gaaataaaggcccagatccgggctgcctggaggcccccaagcgcagtaatgtcagggttccgggcggcgttgacggcaggggacaaggacgggagcgcatgcagcaggcgctctccctgcgt

SEQ ID NO: 391463 - DNA, 122 bp, Homo sapiens
ccaagaattcaaacaaaaagaacgccacagtgagagcaatcacgtcgggtgttctgtcatcggtattcccaagcaaacggtccacctgagtggataaatagatcatgaagagtcctagtata

SEQ ID NO: 391464 - DNA, 122 bp, Homo sapiens
caccacctcccctggccctcttgttacactttacatcctgaggcagcgctggtctgagcccggcccgccttagttctggcagttttcacatcacatattttgaagctttattttttggtgaa

SEQ ID NO: 391465 - DNA, 122 bp, Homo sapiens
aaaataaacgccggaccggattttcctctgcaaactagaaaatggattggactagtactgcgtgcatcaggacgaattactgaagtcttagaggaggctagtgtctccaggcagggtatggt

SEQ ID NO: 391466 - DNA, 122 bp, Homo sapiens
cgcacatgggcccgcgtcaccatggacctggcctggagtgggtgcaccacggccacatagcgttccacgctcagggcagtgacgttgagcactgaggccaggcagaccatctcaaacagtag

SEQ ID NO: 391467 - DNA, 122 bp, Homo sapiens
gggaaaatgtaggtgagaaatgttagtcctccccttcagtgatttaggtatgaaactagccgtcagaatgagacaagcgagcttctaaagcgatgccgtgaccgcagtgcctgtgcagtgaa

SEQ ID NO: 391468 - DNA, 122 bp, Homo sapiens
gcgctccgggtgccccagctggaaggcagggtgtacctggtgaattctccttcttctctgcgtacacctggcaggggaaggcataacgcagggccacggaggcgaacagcatctccacgcag

SEQ ID NO: 391469 - DNA, 122 bp, Homo sapiens
gagcagccaccgagcctcgagtacccgggggcaggcgcgggcctcagcgagacgtgctgccgtttctattggagagacaaaatctaaatgttatcaggaggattttcatttatcaggaaagc

SEQ ID NO: 391470 - DNA, 122 bp, Homo sapiens
gcgcaggccgcgatatcgcagcggatcggagcaggccggaggggcaattaagaccccggccgtgtgcgtccggcctcagcagccccgccgctcggcggacacgcagaccccgccggcccggg

SEQ ID NO: 391471 - DNA, 122 bp, Homo sapiens
ctcctcacctcccagatggggcggcggggcagaggggctcctcacatcccagaggatgggcggccaggcagagacgctcctcacttcccagacggcgtggcagctgggcagaggctgcaatc

SEQ ID NO: 391472 - DNA, 122 bp, Homo sapiens
ctgcagggtctcaggggcggggaaagaaatgcgactgtgcgcagctgcagtgggtgcgagcgcgacaatcatcgccccgcctccgccacgctatataggtcccagatctgatttggttttcc

SEQ ID NO: 391473 - DNA, 122 bp, Homo sapiens
tcaggaggcgggtctccctcctcgggaccgcctctagggcggagtctcgaggctgaaagccggagactcctggaagggcctgggtggagggtttcactcgtccctctgaagaaatcttagaa

SEQ ID NO: 391474 - DNA, 122 bp, Homo sapiens
gtttcaggtggatgtgcgatactactggttttcttgcacagactatttcccatacaggcgcgctcttcaaattaccaaagatattttcagctttcgtccatttactgatctattcatttatt

SEQ ID NO: 391475 - DNA, 122 bp, Homo sapiens
ccctcttccctggtctctctcgggaaggtgcccaggtgagtccagttcccggctcggacacgcccctcttccctggtctcgcacgggaagtcgcccaggtgagtccagttcccggctcggac

SEQ ID NO: 391476 - DNA, 122 bp, Homo sapiens
ctgcaagggctccgcggtcgagtgtgggtacgagtggaggagtgagcttcccagagccgccgggctccccgaaagtggagcgccgccgccgccgccgcccaagctcacagctgaaagcactg

SEQ ID NO: 391477 - DNA, 122 bp, Homo sapiens
aaatggggtcttatcatgctctcatttccattctccctgaacctgctctgctcctcttcacgctgacattttcctactaaagccaggctcagagtcagagacttgctttctgagacttctgt

SEQ ID NO: 391478 - DNA, 122 bp, Homo sapiens
cttccctgcctagactctccactgaggggtttggcaccagcaccccgcccagagcagtgccgctgcccaaatcctcgcaggcagctcatcaacgcaattgcaactccggctggagccccgga

SEQ ID NO: 391479 - DNA, 122 bp, Homo sapiens
gcagcaactgtgacctctgccccgcagacccggacatgccgccagagaggccaaggcgtacgctctccgagccttccctgaccccatgtgccaaagcctggcccagcaacgccatgtgtgca

SEQ ID NO: 391480 - DNA, 122 bp, Homo sapiens
acctacttctcaactccccaacttgcttttcctccttctctgtattttttccggtttcagcgaaaaacaaataatgattccctttattagatgtaattctagatatttctacttcctctatc

SEQ ID NO: 391481 - DNA, 122 bp, Homo sapiens
ccagctcggacacgggaggtgtgaatatatttttcataaagcccaggcctttatgcagaacgattttcatcctctagtgagaggctgaagtaacaaagtgctgttgttaagattcttcccat

SEQ ID NO: 391482 - DNA, 122 bp, Homo sapiens
ataaaatcctcggaattttctctttgagcaactaactaggtctgttactgaagccctctgcgagcttggatgctggacgagggagagggtgaggccaccaggcaatgagcgccctcggcggc

SEQ ID NO: 391483 - DNA, 122 bp, Homo sapiens
aattaaatcctgtgcttagatcgaactgtaacattattccaatcacatttatcttgcaggcggcggaggagatggcagcctcgctggaaacgcgcgggggagcctgagccggcggccgggga

SEQ ID NO: 391484 - DNA, 122 bp, Homo sapiens
gcctcctcatctgcagaatggacgcagtccacaccgcgtgctgtggaagggttggagcgccggtttacatgacacagggctatcggctaagggggcgctgggaacgtggaaggtgctctatg

SEQ ID NO: 391485 - DNA, 122 bp, Homo sapiens
agctgtgccggtgggaacaggtcaaaggccacccctacactagcaaggtgaccctctggacgcggtctgtgcgtctcctgctcagagccagaaatcagcacccgaaggcatgagactgccag

SEQ ID NO: 391486 - DNA, 122 bp, Homo sapiens
gttgggtcccgcagttgcagggcggccactgtcttcagcgtctgagtgactcttgggtcccgcagtcgcagggcggccactgtcttcagcgtctgagtgactcttgggtcccgcagtcgcag

SEQ ID NO: 391487 - DNA, 122 bp, Homo sapiens
ggtgcagactgcccggcgggccgagctgtgagggtccggcatgtggggtgagggctgagacggcttcccctgtggcctctgggcagccaggacacctcccgacagccgtgcccgcctcctcc

SEQ ID NO: 391488 - DNA, 122 bp, Homo sapiens
agacagtgggggaagggggggggggtgggggcagaagccgggagtggggcttgtcaatttcgccttggcgccgggtgaaatccactccacgcggactgtaccaccgcacaagttgcacccac

SEQ ID NO: 391489 - DNA, 122 bp, Homo sapiens
aggcacactggaggggaggattgcagagccgcccatctgtttctctgcaattgtttatcccggggcccccttccagctgcataatttctcagagaagacactaaacaggcagtgagcgagtc

SEQ ID NO: 391490 - DNA, 122 bp, Homo sapiens
ccttgccccaaatcgccggcctgccgccacttcccctcactagagacccctaggcgtcgacggcagagttcctgagaaccctggagaaggaacggcctgatactgagctgggactccgactc

SEQ ID NO: 391491 - DNA, 122 bp, Homo sapiens
ctataatggaaatgtgatgatactacctcttagagttgtaaggatttagtaagttttagacgtaaagtacttggaacagtgccttcctcatattaagcattgtagaagtgttagctgtaatt

SEQ ID NO: 391492 - DNA, 122 bp, Homo sapiens
ccgtgtgggggaggagctgggacccgggaaatggcaggtgtcctctgaggggaaccgtgtcggggaggagctgggacccgggaaatggcaggtgtcctctgaggggaaccgggcgggagagg

SEQ ID NO: 391493 - DNA, 122 bp, Homo sapiens
tctttccactaccttcccttgtctgagtttcccctgtgaaaggaaaataaaatctttggacgccaaattcactatgccaaagggaaaagcttgggaactgagtcatgcaaaaactaccttcc

SEQ ID NO: 391494 - DNA, 122 bp, Homo sapiens
ggtctgggcccctcttacagtggcagcttgttgctctttgatgccctgagagggcatttccgctctattcggctgcggagccgcaggctcgactgtgcagcttgcggggaacggcccactgt

SEQ ID NO: 391495 - DNA, 122 bp, Homo sapiens
tggccgagaacaggaccggagctcaccctgctgggccctcctgctgatttcagcctggggcgggccagggaggagcgcgaaggcagtgaggacaagagagcttaaaagatgggagggagagc

SEQ ID NO: 391496 - DNA, 122 bp, Homo sapiens
cactttgcagccaatcatcttcggcagacagtccgggcggcggggctggagggctcagaacggtccaatcgctggccgcgaggctccggcgaaccaatgggagcgcagcggctgcggcgtcc

SEQ ID NO: 391497 - DNA, 122 bp, Homo sapiens
acactcgcctgggtctccggttggcggctcggacggagttcatttgccgggctgaggtggcggcgttggcggagggacacacacacgcacacgcacagcgagcttcggggcaggagaaaggg

SEQ ID NO: 391498 - DNA, 122 bp, Homo sapiens
aatctctgctggccccccagtatctgcagaagagaccttataccctgttttttttggagacggagtctcactccgtcgcccaggctggattgcggtggcacgatcttggctccctgcaacct

SEQ ID NO: 391499 - DNA, 122 bp, Homo sapiens
gtgtggatcttttggtgttgcgtgagggctgagctctggcggaaggccttcccacactcccggcactcgtagggcttctccccggtgtggatgatctggtgcctgagcaggtgggagctctg

SEQ ID NO: 391500 - DNA, 122 bp, Homo sapiens
gggccccctccgaggcagatgcttcctgcgggggcgctgttcctgggcccgggaagggggcgttggaaccccgagcggtccgggccgaagcctgggactctcgtgcgtccccacccctaccc

SEQ ID NO: 391501 - DNA, 122 bp, Homo sapiens
tgggtgccagggaaggaccctggcgtcagagccagggcctggacctgagttacccattaacggcactccactggttttcctttaaagaaatgaataaatacaactgcagtggggctgcttgt

SEQ ID NO: 391502 - DNA, 122 bp, Homo sapiens
ttagtctgggtcagcttagggttatctgtcttcactttggagatttaccagatgttcttacgcttcacttcgttgttcaacgacagatacaaaaatataaagttaattttcttccagcgaat

SEQ ID NO: 391503 - DNA, 122 bp, Homo sapiens
cgggctcggcggatgcggcagcccggccgcgcgcccccccaccccactcctcccgcctcgcgtcctgtcccggcgccttccgcgcaccggccaccgccagtctccgagccccgtgacctgca

SEQ ID NO: 391504 - DNA, 122 bp, Homo sapiens
tcgggctgggcgctgcagtttaccgatttgctttcgtccctcgtccaggtttaggagacgcgtggggacagccgagccgcgccgggcccctggacggcgtcgccaaggagctgggatcgcac

SEQ ID NO: 391505 - DNA, 122 bp, Homo sapiens
ctgcggacttgaaacgcctgtcactgcggtctggaaacgcctgtcgctgcggtctggaaacgcctccgcgctctatcagtctgggtctcctcgagctcgaagtggcgccagtgggctgccgc

SEQ ID NO: 391506 - DNA, 122 bp, Homo sapiens
gtgctgcgcaagttggggctgcgccctgggtatgattgggctctctcagcgcttgctgtccgtgttgtcctttggcaagagaggacggtcctaggattgcatcagtctggtggtctggtgga

SEQ ID NO: 391507 - DNA, 122 bp, Homo sapiens
aggacaccgagcgagggcgcctccgcggtcctacgggaacctcaggacactgagcgagggcgcctccgccatcctacagctgttctcttaacgtcgagcctctggagcccagcaatccagag

SEQ ID NO: 391508 - DNA, 122 bp, Homo sapiens
gccacccccgggtggcttgtagccggtgcgcggggtggctggggctacgtgcagagctgtcgcggagccggaacagcagcggtgaagcccctcggctcggccgagaccgccgtgcccattgc

SEQ ID NO: 391509 - DNA, 122 bp, Homo sapiens
gtgaggggaaggggaccctgtcatcctgctttatttatttgggtcccaacaccccgcagccgcatgccccttatgtccctcttctccctcttgcatgctttacctgtcccacacccatgcca

SEQ ID NO: 391510 - DNA, 122 bp, Homo sapiens
ctggcccacaggccaggcctaaaaaaaactcgtggcttcccggtgcctctgtgtgagtcccgcgcgggcggcccttcatcctcttgccaagggcccgcctctatgcgcccgcccctgcgaaa

SEQ ID NO: 391511 - DNA, 122 bp, Homo sapiens
atcattgttatccatggccatacctctttgtcactggaaataaaaacctatttctttgggcgccctttcctagaactggcttttgagtactcttttagctataagcttttgttaaattgtag

SEQ ID NO: 391512 - DNA, 122 bp, Homo sapiens
cataattgcaaactgttttggcagcaaaacgaattatttcggtagcaagaagagacttaacgatgctatgtgggagaaaaactaagtccctactatctttctgagagcacgtctcagaggac

SEQ ID NO: 391513 - DNA, 122 bp, Homo sapiens
ttatagttagatctggttataggagaatcagtgtgagctgaaaggtatcctaatgtgtgtcgctatgtcaaagcagaaattttagtagttcaattcccagtgatatgtgaccagagctgcag

SEQ ID NO: 391514 - DNA, 122 bp, Homo sapiens
ggacccactgtggctagagcggttcagaacttcacacctactttttcttcttcaggggttcgggcgcttgagccacgggagggcgaggcagcttgaaatagaccttgaccaggtcatagata

SEQ ID NO: 391515 - DNA, 122 bp, Homo sapiens
gaccttgggtcagacggctctctttggctaaggtaatttctagaacaaggttgagctgagcgtcatcaatgaacactccaccagctggggaagcacctctgttctgcaggggagatctgggc

SEQ ID NO: 391516 - DNA, 122 bp, Homo sapiens
tcccggtgcttcctgatctgcgactcaggcccacctgcagcaggatgaacccaggaagggcgagaccacccatccgtcagggccggcttcctctaccagtcccagtgtgggcagccctgggg

SEQ ID NO: 391517 - DNA, 122 bp, Homo sapiens
cactggggcttctcagacactgggtgcagcccacagagcagggcgaggcatgacctcacccgggaagcacaagggatcagggaattccctttcttagcaaagggaagccatgatagacggta

SEQ ID NO: 391518 - DNA, 122 bp, Homo sapiens
gccgcgaacaggccggcgaggctggcaaggtgcccgggcccggggcggaaagcaggaagtcgatcccgcgggcgcggcccagggtgcggcgctgcagatgcagcacggggtcgcggggcggg

SEQ ID NO: 391519 - DNA, 122 bp, Homo sapiens
cactaagttgtggagccatagcattttaaagccaaaagagttttgtaaaggtcaactagtcggcctccctgattttacagatgagggacttggattctaaggtgatgtgtccaagatcacat

SEQ ID NO: 391520 - DNA, 122 bp, Homo sapiens
tcacagactcggggtccaccctggccggctccccttgcctgagcactgtcccatgggctccgccttcccttgggggtggcaccaggcacagaaacctggaacccgtctcagaagggcccgcc

SEQ ID NO: 391521 - DNA, 122 bp, Homo sapiens
gaagtggcttttgtgatgcagctggtgaaaaagctgatgattatcattgcccgcccagcacgtctcctggaatgcctggtgagtggactctaggaaagtcaggtgggcagatttagaggagg

SEQ ID NO: 391522 - DNA, 122 bp, Homo sapiens
ccatcatgatgcctcctgccatcacgttggagctcatcatggtagtcctcaccgtaggaacggtgggaggggacggcgccttgagagggagccagaccaaagcctgtggggccatgggctct

SEQ ID NO: 391523 - DNA, 122 bp, Homo sapiens
ccactcgacacagacaatattcaccccagagctgagaagggaggggctgcgtaatcccagcgatggagcccaaggttcaggagccagcaaaccagtcctgctctgtccatcaccctcgggga

SEQ ID NO: 391524 - DNA, 122 bp, Homo sapiens
atagacaattcctctctcacattggtgcttgtgcgtgtgtgtttgtggcaggggggctgtcgaactcaagtcccggttactggcaagaacagtcccgagagcatcattaaagagccacgtgt

SEQ ID NO: 391525 - DNA, 122 bp, Homo sapiens
aatagtcagtgtgagctcagacctcctgtcctgggcggatggaggccccagtggcagagacggtgccaccaggcagtcctttgctgaggtgtgggaggctggactgacccgacttacagggc

SEQ ID NO: 391526 - DNA, 122 bp, Homo sapiens
ccctttgggtttagagcaacctaggaccaaagcttgcaaagtggcttctggggaggcctgcggacctcgggccacccacccggctgggggacccgacgctttcggtttacggcaggggggag

SEQ ID NO: 391527 - DNA, 122 bp, Homo sapiens
tgcactaaaataaatttctttgacacatttcaagacagctattcagaagggcaggaaatacgagaagagccaaaaagctgtctttagtgggaaagacttgcatctgtagagaaaatttgcat

SEQ ID NO: 391528 - DNA, 122 bp, Homo sapiens
gcgtcgcattcaccctaataggcgggcatacaaatgccgttgcctggagccgcagcccagcgaatgggacccacagcggcgcgccctttagttgactctgtcttattcgccgcaatagctga

SEQ ID NO: 391529 - DNA, 122 bp, Homo sapiens
ccggccttttcggaagtcactttcacctaaccttacagactaccgctccgccggaagtgacgcagggcagcggcgtcgcgggggcggggctcgggaaagacccgtgccagcgggcgtgtggc

SEQ ID NO: 391530 - DNA, 122 bp, Homo sapiens
tgcttttatcttcagtccaggtaaagttgtttctgtcacttctcttttctttcgctggatcgctggacttttatttcaccccttcagtgttgtgtagctttctggattttcctcagtgatca

SEQ ID NO: 391531 - DNA, 122 bp, Homo sapiens
cgaggggagaggtccagcctgccttccctcctcaatgcttcctgtacgtacaacataatacgctgagataaccaacgcttggcgctgctctttgcaaaggatttttcctgctgtcatcctca

SEQ ID NO: 391532 - DNA, 122 bp, Homo sapiens
gcccgggcctggtcctctgtcggcagtgagtcccttggcgtggctgtatatgcttccatacggctgtatagcacatatacacggacacacacacacacatatatatacacacactgctatat

SEQ ID NO: 391533 - DNA, 122 bp, Homo sapiens
gtctcagtaaatggagtagccatcctttctgttatttagcctccaaacctttgtcttcctcgattcttatttttctctcaccccacatctaatcttatgagaaaatattattaactctactt

SEQ ID NO: 391534 - DNA, 122 bp, Homo sapiens
cttcccgcctcccctcttccacgcgccccgcacacctggcccaggtgcggcttcgcccctcgccctgggcccgcagacactcacctgtccagcgcctctctggggtcggcccagcgtgtctc

SEQ ID NO: 391535 - DNA, 122 bp, Homo sapiens
tccgtccccattgggctactggcccgtccgtcagctgcctgtgcccaatggacagagggccggcgctcgtggcggggcggaggtgcccggcgcgtggtgcccggcgggcgcgcggcaccccc

SEQ ID NO: 391536 - DNA, 122 bp, Homo sapiens
caaggaaagcccagctcagaggtgagatgtccagcctgcctcatgaagctatggcataaacgtgcctggactgcagacgccttcctttttattgcaggacacagccgtctgcccctcgtgcg

SEQ ID NO: 391537 - DNA, 122 bp, Homo sapiens
aaaaaattatttgtttatttatatatttacttttactcaggacaagcatccctcgttctccgaacccactcacagcctcagtttccacgcccataaaaccaggatggagtcaggacccctgc

SEQ ID NO: 391538 - DNA, 122 bp, Homo sapiens
ctcctgccctgggtctacccagggctacaagggtcttttgcggtcgaccctgcggggaaccggtgggaaaactgaggtccctaaacacagattcggagcgccctcttccagttggcagctgg

SEQ ID NO: 391539 - DNA, 122 bp, Homo sapiens
gtcccccgagaccctgcacggctcgggaagagcggcccggccggggcccgcgcctcccagcggggtctacccaaggggacttgttgctcacctggcctcccgcagtcgccgtcagcgacagg

SEQ ID NO: 391540 - DNA, 122 bp, Homo sapiens
ggggaggcagggtagccccccaattccctggaggtgtgtacggggggctgtggtgcacctcgcaggatgcccccccacacaccctgtgtcctgtagtcccccggcacagccagaggccatac

SEQ ID NO: 391541 - DNA, 122 bp, Homo sapiens
agctagggtgacaagagcggggactgcaggagaagcaggggaggggacaggattgtttgccgctggagagggagaaagccactggcccactctgttgtctggcctctgggtttttgcccagt

SEQ ID NO: 391542 - DNA, 122 bp, Homo sapiens
gattacaggtgtgagccactgtgcctgcccagtgctgcgatctcgactcactgcagctttcgcttcctgggttcaagcgattcttctgcctcagcctcctgagtagctgggattacaggcgt

SEQ ID NO: 391543 - DNA, 122 bp, Homo sapiens
tggttaagaaaaaagagggagaattcaggtgccacagtggccattctccggtgaccggagcgtgttactcagaaacggatccgtcagaggccaatgggagctgccggccttcagggcgcgcc

SEQ ID NO: 391544 - DNA, 122 bp, Homo sapiens
ggaaggcgccgtggacagcccaggccgcgacaggacggccgcgggccggggccggggcgacgcacccctcccccgcgccacctcaggccgaccgcgctctggccgctgccgggcgggtctgc

SEQ ID NO: 391545 - DNA, 122 bp, Homo sapiens
gatggccacacatataaatccagtgaaaaaggacgaacctgaagttgccagtgtgaagcccgtgagtgtgcagtgaaccgcagagaaagcttcttggtgagttgagtttgtggagtggccca

SEQ ID NO: 391546 - DNA, 122 bp, Homo sapiens
atttaaacccaggcagcctggagtgcagctcatactccatacctgggatttccgcctcgccgctctccgactgcttccagacatgcaggggccctgggtgctgctcctgctgggcctgaggc

SEQ ID NO: 391547 - DNA, 122 bp, Homo sapiens
agtgaccgggggcaactgagcaaaacatagaacagaaactccctctcgaatagagacccacgcacggaaggatgatacactgtgattccccgacgtgggcctgcagcaagagacgggtgcta

SEQ ID NO: 391548 - DNA, 122 bp, Homo sapiens
ctcctcaagtgcagacacacccacctccacctgctccacctctgtccactcggtgaccaccgcatcagccatcagggctccaagcccatctcctgtggaccacgtccttaggtaacttacag

SEQ ID NO: 391549 - DNA, 122 bp, Homo sapiens
cggagatgtaacggtgagaaaaactcggtgttgtccaggccctccaggggctcaggggctcgtggaagaagtggacattgaagtatttatcacacaaatgagtgtaaaagtacaatagcata

SEQ ID NO: 391550 - DNA, 122 bp, Homo sapiens
agcacttaaagaaatctattaatgccacacatatctaaaccgctccaggtctgcaagcagcgacacagcacacgcagtgcgccctggctagaccaagccctagccaaacacagctcattcac

SEQ ID NO: 391551 - DNA, 122 bp, Homo sapiens
gaattctaaaaaggaacccctgaaggcttatgtaatagcttatttgatccacataaaaagcgagataggaaatcaagtttctgctagttagacaaaagctattttccttcattaaaatgagt

SEQ ID NO: 391552 - DNA, 122 bp, Homo sapiens
ttcctctttactgatatcttcacatgcttattgccttattcattttctaaagtgtgccagcgtctttcagaagtcagctaaattagtgcagttgctcatccatcagacagttttgttataaa

SEQ ID NO: 391553 - DNA, 122 bp, Homo sapiens
acccagggctggagcctgaacctggcggggccccccgtgaatggaagagcctgggccacgcgaaggtggaccccactcagcctccagccgtgccctccacgccccagacaccgccgtcttcg

SEQ ID NO: 391554 - DNA, 122 bp, Homo sapiens
acttggagcccactgagggattccacggggtcccggggacagcctggatgggaagcggtgcgtctgcttccaggatccccccgtgctcctctcatctgaggagccggctggcacctgcagtg

SEQ ID NO: 391555 - DNA, 122 bp, Homo sapiens
aagacctaaggaaaactttgtcctggatcacagtgacttgtggcctctgagtgcctttcccgatttcctggtagtttcacttcctggaatgccacagtctgacttctacatcagtgccagag

SEQ ID NO: 391556 - DNA, 122 bp, Homo sapiens
ctgccctgtgcgtttaccaagggctgacccaggcattgagccacatgcacaaccgccttacgtccttactatgtccctgagatgtggagggttttatcccctttttgcgggtagggaaattg

SEQ ID NO: 391557 - DNA, 122 bp, Homo sapiens
ctagattttcactgctggtgatgagggaggggctgagcacctgctcccaggctggcctcccgggtcccagccacagggttacgtaactgggctggccctccccactcagctacgcccagcag

SEQ ID NO: 391558 - DNA, 122 bp, Homo sapiens
aatcattctgccataaagacatatgcacatgaatgttcattgcaacactatgcacaatagcgaagacacagaatgaacccaaatgccaatcaatgacagatcggttacagaaaatgtggtac

SEQ ID NO: 391559 - DNA, 122 bp, Homo sapiens
tccccgatccatggggtggtcaacacgatgttcttgaggtccaggaagggttgctccaggcgactcccatcagggaggtagacccacaccactcctacctgctcggcaacaaagaagcgatg

SEQ ID NO: 391560 - DNA, 122 bp, Homo sapiens
aaataagcacaggtagacatgcgtgaacggtttgaaagcttcgcctctgcctttttttaccgcccacccttcacccccaccccttgctccagccagccccctattttaaaatgaggcatttc

SEQ ID NO: 391561 - DNA, 122 bp, Homo sapiens
cctcttggcggtcctatgtcggagacctccatctcccggccggggtggctggggcctgggcgctgttctccggcccttcccgggaaggggagggggttcccgccagtttcctgcctcccccc

SEQ ID NO: 391562 - DNA, 122 bp, Homo sapiens
agcccaacatctcttcatgctttgggccctaagttggttcctgccaaaagccagagacaccgtgcagtgggttgaatggcagcctccaaaatatatatccacatcatgatccccggaacctg

SEQ ID NO: 391563 - DNA, 122 bp, Homo sapiens
ggagtttcggaagggcccaaggcatctttagtattctgccagttggtaactgagcgcctccgtgcctaactgtgttttaggctctggggttactgaggcgaatgagacagcccgagtctctg

SEQ ID NO: 391564 - DNA, 122 bp, Homo sapiens
cccaagggatgacaccctgtgccagcgcaaggccagaaacagatcagaaacgcctcccttcgcttccctggcttttacggcagcccgtgatgttattctcgtggaattccgtgtgcagagtc

SEQ ID NO: 391565 - DNA, 122 bp, Homo sapiens
ttacctgccaaatcaacttaaaataaaatcggtaaattcattcctgggttttgctctcaccgagatatttaatacaagttgcttggctgacgtataggaaaaagaaaaggcattttctacac

SEQ ID NO: 391566 - DNA, 122 bp, Homo sapiens
caaggcgctgggttcccagaagtttctagaatgaatacggagggctacatatttcacatgcgcggggcggggaaactgctgggcgattacagattcccgatggagctggccccttcgtggcg

SEQ ID NO: 391567 - DNA, 122 bp, Homo sapiens
gcctttttcccgcttcggggcgccggggctgcgactgtggccaagcacttccgggtccgccgcaatctccttagcgagggcacccttccccggctggaaccatcgcgacgtgactgctgccc

SEQ ID NO: 391568 - DNA, 122 bp, Homo sapiens
cggccaggtgagggcccagacgtgggggcgtagacgctgaggggtggccgggtgggtctgcggctctgaggcctggctttcattctccatcagtccctgtacgagcggttaagtcagaggat

SEQ ID NO: 391569 - DNA, 122 bp, Homo sapiens
cacctctctcagcctcctccctcatcaaatatttgtcggaggcattatcaaggatcaaaccggtttgatccagtgcagtgcaggaaacgcgggcagggtggaggggcctgggcttgttgacc

SEQ ID NO: 391570 - DNA, 122 bp, Homo sapiens
ggaagtctgggctgcagtgaaccgaaccgtgatcacgcctctgggagtagtccattttgccgcagcaatcctgcaggggtaggctgaagtgagatcacgagttttatttagtgatcacttgg

SEQ ID NO: 391571 - DNA, 122 bp, Homo sapiens
gagctagctcccggcgcggagctccgcctacggcccgtccccggcgcggaaccccgcccacgagcccgtttccagcgtggaacaccgcccatagcccgtccccagcgcggagccccgccccg

SEQ ID NO: 391572 - DNA, 122 bp, Homo sapiens
gtttttgcgtgacagtgggtgtgctgggtgcgctgattgtgctttgaatggctgtgtaagcgcaagcatctcttagtgtgactgtttacccacgggccttctgatctgaatgctgtaggcca

SEQ ID NO: 391573 - DNA, 122 bp, Homo sapiens
gcccggcccctaacaggcggggttccaaagcccggacgaccacgtcccggaacgcggccccgcccacctcggctggccgcaccccgcagttagaaagccacgccccctggctcgcctcgcct

SEQ ID NO: 391574 - DNA, 122 bp, Homo sapiens
accaggcaggccagaagcagcagctggacagctggcatctcaggcccaaagctgcagcaacgtgcacagaagaacctcattgcagaggcttggtgaggcttcctctggaaagctctgctgtg

SEQ ID NO: 391575 - DNA, 122 bp, Homo sapiens
ctacaaacagtgagcgctcttccatctgaatgtcgtcagttctttaaagaacacacaatccgctctgggtttcctcaccacagccttggtgtgtccagacatgtgctcaggtgcccttctcc

SEQ ID NO: 391576 - DNA, 122 bp, Homo sapiens
cagggagcacttgtgagacggcagcttccagggccagtgcagggtgcctggctgggtttccgtgggcctgaggggctgccatgctctcaacgcgtgcttggtacctgcagcccccacagact

SEQ ID NO: 391577 - DNA, 122 bp, Homo sapiens
tcaggcacagaagacacagcgagaaccgtgagccgttacgaaagcctaaaacactgagctcgcgtcctgccaagcagcaggcgcacaaacctacacctccgagcgctccctggaggtcccgc

SEQ ID NO: 391578 - DNA, 122 bp, Homo sapiens
cagtcaccagaagaaggttacaggccatgaactgcacgctcaggacgttgctcatctgcccggtgtacacgcccacgagctcgctggaggagccgtcggcaggtgcactgcagtaagtgttc

SEQ ID NO: 391579 - DNA, 122 bp, Homo sapiens
caagcactttctgtggaaaaaaaaaaactgggttccaaaactgagaaaaggggccgggcacggcggctcatgcctgtagtcccaacagtttaaaaggctgaagtgggaggatcacctgaggt

SEQ ID NO: 391580 - DNA, 122 bp, Homo sapiens
cgccctaaaagtgtgtcagcagcccccgccaccaggtgattccattcacctgggagaaaacggaggctcccaggtgagtggagtcacttcactcaacacttccttattcagctcccaatgca

SEQ ID NO: 391581 - DNA, 122 bp, Homo sapiens
gagcccctggctgggcagccccaggggccaggagctctcttggagacaagcatgtgtatgcgtttgtgtgcagctcttcttcctgctccctgcacattgagggcttcatggggggtgcgagg

SEQ ID NO: 391582 - DNA, 122 bp, Homo sapiens
ttgtggccaacccagaatacataacctgggggccggagagccagctgggacccagaggcccgggttcctcagaacggtttctctccaaaacgtgggcatcccacctggctgacggtaacgga

SEQ ID NO: 391583 - DNA, 122 bp, Homo sapiens
gactttaatgaatgctgtcagtgtttgtgagacctaatggtcagtatgggaaaggagagccgggaaagtggtctagctgcttcaggataggtggatgagagtttgctctgattgaacggaat

SEQ ID NO: 391584 - DNA, 122 bp, Homo sapiens
ggcgcgggcgcgagcgtgtgtgtctgtggggctgctgtgggactgtctgtgctaggagagcggcggaaaacccggcgtggagcgcctgcagtccgccgtccggggtcgcgcccgccgcgggg

SEQ ID NO: 391585 - DNA, 122 bp, Homo sapiens
gagggtgtctcacaggaatattaggtagagtgtgacctcggcattcacttggcaaactggcgctggcacagggcaagccctgaggtcctcatccatgaggataatcccttcagctgccaaaa

SEQ ID NO: 391586 - DNA, 122 bp, Homo sapiens
atctgtgctgagagagataaatggattagatctggcatgtattttggaggtagagctaaacgtacctgacggattttatgcagaggtgagagaaagggaggaatcaaagatcactcctagtt

SEQ ID NO: 391587 - DNA, 122 bp, Homo sapiens
gattgcattggagcagcaatcagcagatgccacgctgagctcagagacaagcagtgtagacgggacaggcgtcccaataccgctaagccaccaccgccagcccgctgggttctgagcagttt

SEQ ID NO: 391588 - DNA, 122 bp, Homo sapiens
ggcagaaagtgtgagaagcacttgttgtaggtgacccagacatgcctcttgaattgaattcggtgatctgcttcttcagctgctttcttgtccctgcccagcaggatgccaggaaacacata

SEQ ID NO: 391589 - DNA, 122 bp, Homo sapiens
aggtggggagcttggcccgcggtcgtggttcccgccgtcctgtgcctttaaggctctcgccgctcaccagcatttggggctcctgctgtgtcggcccccagctgacttggctttaggggtcg

SEQ ID NO: 391590 - DNA, 122 bp, Homo sapiens
ttttggtgtctaatcaattagtgtttgcgcagtcaagtaccgtagatttaacagaataatcgttactgcccttgtctttatttgacccgcagacacctagaagatttaaaaatgaaacgccg

SEQ ID NO: 391591 - DNA, 122 bp, Homo sapiens
cctccgtgcaggagagcagctccctccagcggcttccctcgcgctttgtgccttgcccaccgctcagacgctctgctctgaaaagtaaagttcacaaggtatcttcagctgcaaggataaaa

SEQ ID NO: 391592 - DNA, 122 bp, Homo sapiens
gacgttgtccttgaggtggtcgatggagccgcagaagatgagctgccccgcctggcccagcgacggcggccgcgccagctggtccaccgactgcgacagcaggaagtcgggggtcttgccct

SEQ ID NO: 391593 - DNA, 122 bp, Homo sapiens
cgcgggggtgctgggatgtgtagttttctgttgtggacagccacccctctcttttcctcccgttcctccagactttcacctcccggcagccggcgaggcttttccgaggcaaaacagcggag

SEQ ID NO: 391594 - DNA, 122 bp, Homo sapiens
attttgttcagcaactacaaaaggcagatgtgaaaagtagttgcagaacaattcggtgcccgctgccgctcgttgtgctgaggacgaacggcgctgcgggcctggctccctatggcggctcc

SEQ ID NO: 391595 - DNA, 122 bp, Homo sapiens
ggtgagggctgaggcggcagccgtgaacgccttgctctgaacgctgccatgctctgatgccggggacagaagtggacaggaacgccacacgtgcagcccacaggaacagccaacgtgcagcg

SEQ ID NO: 391596 - DNA, 122 bp, Homo sapiens
gggtacatagcaggtctaggaccagaggaggccaaggggacagaagatggatggggatgtcggggggcctcccccgtgtccattcctggtaaacccagcttcctgtgcagctcaggccttgg

SEQ ID NO: 391597 - DNA, 122 bp, Homo sapiens
agcgcgccgcagccgggcgtccccgcgcgggcgccggagaggaaggaaggctggcagcctcgtcacgtgtccgctgcagtcgcgaaacaggtctgatcaatttctgtttacgtctgcctgga

SEQ ID NO: 391598 - DNA, 122 bp, Homo sapiens
acaggcctcggaatgctgcctcaccttgttcacctgggacagcggggtcctcacggctcccgcaggcagccggcccctgctgctgtcttcaaacagcctcccgggggaccgctctctccgcg

SEQ ID NO: 391599 - DNA, 122 bp, Homo sapiens
ccggaagctacctggatgcaagggcttaaacccccttcacctgggcctaggatgtgttgtcgaggtcgctggccaggttttagccaggaggtctcgcgctaaaactttttggccccgcctgg

SEQ ID NO: 391600 - DNA, 122 bp, Homo sapiens
tgaagaggccaaggcaacagtgcagtgatttattgaccagactttgcagcaagaacacagcgaaggtggggcccgtacaatccagcctggcagagggtctggcccccttagagcagaatctg

SEQ ID NO: 391601 - DNA, 122 bp, Homo sapiens
tggaagcctcttgcaaaccaaggttaaattcaaagtccccagcccaccgaatggaccctccgctcctctacagggcttccagagaaacctggaaaaccagctcaggccctgccgcaaagggg

SEQ ID NO: 391602 - DNA, 122 bp, Homo sapiens
cttaagctttgagaggatcacactatgcaatgtattcctactttctcccaatataaatcacgctattaaattaaaaggagagaattcttccaccaaattacacactaatggctcttaaccca

SEQ ID NO: 391603 - DNA, 122 bp, Homo sapiens
ctgttcctcccgatggctgcacccctcccctctccccggctgcagcagtcccagctaggccggactgctaagcctggcccagagcacggctgacaattcacggcagcctccctggcccagcc

SEQ ID NO: 391604 - DNA, 122 bp, Homo sapiens
aataaagtaagcccggactgagtgcggaaaggcgggcctggcgggtctggtctccccatgcgggccaccagaggccctgcagccttcagtcgcttgaaggggtaatggcgcttccactcaca

SEQ ID NO: 391605 - DNA, 122 bp, Homo sapiens
gggttatgcatgccttctgtttctgcacctgcctctgccaggttgccttttatgcatttacgagttaatttttaccttttcagaacagtgcaagtagtttggccctttttgctacttttgta

SEQ ID NO: 391606 - DNA, 122 bp, Homo sapiens
gtgggctggcggtgtatgaagttcgcacggatcctcagggtgctgacccagccccggttccggagggccagtgtgacgacacctcgtggcccaggagagcagggcgggccacccatggccac

SEQ ID NO: 391607 - DNA, 122 bp, Homo sapiens
tgagcgggcgtcatccaggagggcatcatcaacttcacgtagtccaggtggcgcttcaagcgccagtaaagctcgtggggcagcacgtcctgcaggttttccccgtgcggcagcagctggca

SEQ ID NO: 391608 - DNA, 122 bp, Homo sapiens
tcagctccacccctgggcggcccctgagcagcacgactgggcctgaaggggcagggctgccgtcacaggctctggcccctgggagctcaaggggtgaatccctgatcccaggtgtgggactg

SEQ ID NO: 391609 - DNA, 122 bp, Homo sapiens
cctgctccctccaatcagagcccagcccggggccagagcaggaagcgcggcggtgggacgcgcggtgacagccccgcgccccccggggcccgccggccaggggagaggacggtgcggccgct

SEQ ID NO: 391610 - DNA, 122 bp, Homo sapiens
ttgggagacggcacattaatgccagtctctgtagcaagatcatactgtctccgctccatgcgctatctcattttatgcaacagttcaatcgtcctgggtgggaggaaagtccctcttgctgg

SEQ ID NO: 391611 - DNA, 122 bp, Homo sapiens
agccatctcctgacagtctgggggtcaccctgccggcccccaccccatgccctgtgctggcgtgtgtgccccccatatctgcatggctgtgagacgatttgccctaccagctcctgcccttt

SEQ ID NO: 391612 - DNA, 122 bp, Homo sapiens
cctagttctggttattaaatgaagcctgtcctttactgcttaggcacgctgtcaataatccggtttattttaatttcatggaggcgaagtttcattggcctgatgtgtcttaacatttatcc

SEQ ID NO: 391613 - DNA, 122 bp, Homo sapiens
gcttttcttcctcaggctcccgagttgtctactcagaaacgcgggcgttgtttctcacatcggtgtccccagctcacaggcttttcttgctcctctgaactgggacgggcgtcgctgaccgc

SEQ ID NO: 391614 - DNA, 122 bp, Homo sapiens
gcagcggggcgacccccgctctgtgccggaggcagcgtttctaactcaggcggcgtgggccgaggtagagaaccaccaaaattaccatctcggagcggtgccggaagtcccgccttaccgta

SEQ ID NO: 391615 - DNA, 122 bp, Homo sapiens
ctcccagttggatgctggtactctcagctaaaagtgttcagagaaggaccgaactccactcggcctctctcagattctgaaatgaggaaaagtttagtattcatctaattatgtttttaaga

SEQ ID NO: 391616 - DNA, 122 bp, Homo sapiens
gaaacgcagtgtgctaaaaaagtgcatgcagcccaggctgtggcctaggccgtcggttcccggccatgcctagctcctctgaggtcgcccttagtgaggacacgaggtgccctcacctcttt

SEQ ID NO: 391617 - DNA, 122 bp, Homo sapiens
actcagccataatgttaatatccatctccccactcatggctcctgagtttatggcccctccgcagacatctcttctagactccagactcatatatccaaaatgacatggccatgtggctgga

SEQ ID NO: 391618 - DNA, 122 bp, Homo sapiens
ggcaaggctccgccctactccccgcccatttagcgcctcctgactgctgaatggcgggctcgccttggtctccgtgctgattggctggcagctgtacagcctggcacttcgccctccaccac

SEQ ID NO: 391619 - DNA, 122 bp, Homo sapiens
gacctcggctcactgcagcctccacctcatgggctcaagcgatcctcccacctcagcatccgggtagctaggaccacatgcgagcgcccctacagccgatttaaaattaattttaatagcag

SEQ ID NO: 391620 - DNA, 122 bp, Homo sapiens
gccgagcacttccagcgagctagcgagctagcgggtcgcgctgcgcgggggaggaggactcgccccccgcccgaccctagcggagccttttgttcccagccagaagtttgcatgccgggacc

SEQ ID NO: 391621 - DNA, 122 bp, Homo sapiens
ctcggcgttgagcccgggtagggccaggtggctgccctttcacctagggtagtccctggtcgcctccgctcttcgcctaaaaggggatgcagctccgggaaagtaaggccgccgcggttgcg

SEQ ID NO: 391622 - DNA, 122 bp, Homo sapiens
tgttttatttgaagcaggcattttctggcttaaagaaataaagaagcactcgtatgggctcgggtcatggagaattattttaaggctatccaggggagtaagtctcatagcccatctgtcat

SEQ ID NO: 391623 - DNA, 122 bp, Homo sapiens
aaaccttgttgctcctccactacccaagtacttcctgtgtcaggcaacatagggttccttcgccctttggccttgcacttttgtgacatggtgctggctgaattgacataatgggcagtagg

SEQ ID NO: 391624 - DNA, 122 bp, Homo sapiens
cctcgcggaagttggggctcagccgggtcaccaccagcttctgcatggcttggggaatggcggagccctggaagtccaggaagtggcgggcgtacgacatgtccacgatggcccgggccccg

SEQ ID NO: 391625 - DNA, 122 bp, Homo sapiens
gtgggcaggggcaggaccagcgcgggggcacgtcggggggtggaaagcgggaagaccacgcgcttgtgactgtcagcattcaccgtgaagtccgtgtctataggaggggacacgggcaggct

SEQ ID NO: 391626 - DNA, 122 bp, Homo sapiens
ccctctgccagttcctgccaaagctaatctccctgcggcctgttcctggcagtggttgcacgtgggtatctctgctgggcaggcctgcttccatcactggcacggaccccatttcccaagaa

SEQ ID NO: 391627 - DNA, 122 bp, Homo sapiens
gccccccacacacagtgaagcaggctcccagccacatggcatccatgggacagcactcatcggtggcttgcccatgccatacccaaaccttgcccctgatgtggacttgactcctgttgtgc

SEQ ID NO: 391628 - DNA, 122 bp, Homo sapiens
actggcacacttttctcaagacatcttgagctgctggtaactccctgtatgtacctttcacgcaaactgccctgcctgtgctgtcaatagcccttgggtattccacacactctggaatacca

SEQ ID NO: 391629 - DNA, 122 bp, Homo sapiens
ctcttgcgtcatcacgcgggcgttggagcttacgccatcgcgcgtcctagagtcctagcacgctattggctggctgtcaagcaatgggaggagtcgtgagaacctggatgacagcgggctga

SEQ ID NO: 391630 - DNA, 122 bp, Homo sapiens
cctccttcaacaaccccatggcatccgccagccgcccaatagtgccggactctgaccaagcggtgagacctcgggcaagtcattttgcaaccgtccagtggattcaccttgcccgctgcata

SEQ ID NO: 391631 - DNA, 122 bp, Homo sapiens
ggctggatgatcgcttaagcccaggagttaaagaccggcccggacaacaaagcgagaccccgtctctccagaaaaagaaaaaaagagagagagagagagaaattagccgggcgtggtggcgt

SEQ ID NO: 391632 - DNA, 122 bp, Homo sapiens
ccagagctgggcaaacactcaggcccaggcagctgaaaaattcacagcaggagcagctaccgaagcgactgcagcctcttcctcctcttcctcctcctcctcctcctccgccactgctaccg

SEQ ID NO: 391633 - DNA, 122 bp, Homo sapiens
aaaataataaaaagcactctagaaacactgtcaaaaccagttctctgtttgtctaggtaacgattacaacttctttattgctgcttcttcattttttctttaaatgggtgcctactccagca

SEQ ID NO: 391634 - DNA, 122 bp, Homo sapiens
acttggtctcgcccaccatcggcggtagtgggtaggggcggtgggtgggacctgatctgtcggacagtaggggcggggcttttcgcgatgccccgcccctaggagcgctggcgtcacgcccc

SEQ ID NO: 391635 - DNA, 122 bp, Homo sapiens
tgagagggagttagaggaacctgttcaacgctgacacttcaaaagctcgtgcagaggctccgtggcaacagtactgccggcttcctgtgtggctttccgtttattagcttgttgtttggggg

SEQ ID NO: 391636 - DNA, 122 bp, Homo sapiens
agttcctccggggtacaatgagtggctgacctccaggcagcgccagtgccaacctgcctccgggcgggtgtcccaaacggtccgccagagcgctgttggttcagcagtcccatgcccggtgc

SEQ ID NO: 391637 - DNA, 122 bp, Homo sapiens
ttcccaaagaaaccacgtgcgcactaccacctaaaactgccaatgaaaatgaaggtcctgcgcagtaaaatatttatacaactgctggggccactaggcttcagcgggtgtggaggcgggga

SEQ ID NO: 391638 - DNA, 122 bp, Homo sapiens
ttttttcctgccttgaggaactttaggagatttcagaagataaatgctctttaaattcaacgtggcacaaaaggttactgggaagaaaaaacacgtttgccaatttggacttccaccaaatg

SEQ ID NO: 391639 - DNA, 122 bp, Homo sapiens
ctcccacaggcgggtccctggatccccactgggtcccaaggcttccctgggtggctggggcgggtctcacccccgtagcccgccctctgctccgagatgtgcttctccagcctcagccgcag

SEQ ID NO: 391640 - DNA, 122 bp, Homo sapiens
ccatctgcccacaccagcgctcttggacgttctttcccagggctgccataggtccgtggccgtttgtcatttggactcgtttattcggttcaagctcaagagcatctttggaaccatggccc

SEQ ID NO: 391641 - DNA, 122 bp, Homo sapiens
ccgggccacctgggatatcacatcctccactgtgggctcagggcttggggatctgggaggcgtcagctgttgtggaaactgggagaagcccaccaggggtgaggggaccggagcagggggtg

SEQ ID NO: 391642 - DNA, 122 bp, Homo sapiens
cacatgccctgcaccggtgtgagagtgtatcccggacccccgcgcacccccgggctcccgcgcaccacaaggaccccaagcaaatcctggcccccattgcagctcccaggtccccgcgcacc

SEQ ID NO: 391643 - DNA, 122 bp, Homo sapiens
gcaaggggaggcagcaggggcgctcagggctatggtctcctcagcccgtggccagcagctcggctgagcctgggtctggaggctgggtggggttgggggactcagcgtcacggtgacatcag

SEQ ID NO: 391644 - DNA, 122 bp, Homo sapiens
ctcccccctgcccacccccgccactcggtgactaagaactgctgcaagcaggcaaacctccgagcagtttttaagaggctggaaggagacataagagacttcagctgctgcattccaagccc

SEQ ID NO: 391645 - DNA, 122 bp, Homo sapiens
caggctggagtgcaattgcatgatctcggttcattgcaaacttcgcatcccgggttcaagcgattctcctgcctcagcctcctgagtagctgggattacagatgtgtgccaccatgcccagc

SEQ ID NO: 391646 - DNA, 122 bp, Homo sapiens
gcctccctcggctgcccacaagaggccctcccagactcatcatgccggagcccgaaccggcgggtaaccaaccctccataagccgtactcacctgtcaggaagtggtcgcccagcagccatc

SEQ ID NO: 391647 - DNA, 122 bp, Homo sapiens
ggtcagattaacatttcaacacaatgagtctcaagggaggagaaaaaatttaaatccattcggtagccacctatgaggcctaaagcagtagaaagcaaagcaaattctccattgaggtaagc

SEQ ID NO: 391648 - DNA, 122 bp, Homo sapiens
ggccatcgccttcctggagagcctgaagttccacaaccctgacgtctacaccctggtcaccgggctgcagcctgatgttgacttcagtaactttagcggtgagagctccgactttgacggtt

SEQ ID NO: 391649 - DNA, 122 bp, Homo sapiens
ctggcattcccctgggcatgggtgtcgagggcggagacttccgggactcccacctccttgcgcgggtgagattcgagagatgggggacaggccaggagctcagaccgctctttgagactctc

SEQ ID NO: 391650 - DNA, 122 bp, Homo sapiens
aagagtcaccttagtcactctgaacacttgtcacataaccaggaaaagtgtctatcacctcgccctggctccagcaccggctgctaagaatagagaccacaggagtacagaattagaggtca

SEQ ID NO: 391651 - DNA, 122 bp, Homo sapiens
agcgccggtacccgagggagcccgcaagacgcgccccgcccgcccaccaggctccctctccgcccccgccccgagccccgcccgcccaccaggcccaccccgccccgcggaggggccgcagc

SEQ ID NO: 391652 - DNA, 122 bp, Homo sapiens
ttgagtggttcccacttagttcgtctgggatggtatttctcaattcttcactataagatacgaggctattttctccagaccctgaactctgtgagggcaggagctgcccctgtgtttttttt

SEQ ID NO: 391653 - DNA, 122 bp, Homo sapiens
tccaaattccttttcggagaacttttgttcacaagattaaaaaggtcacgcagctggtgacggagcctgggttttttgatttagacattgtatccatgtgtgagatcctgcccatccccgct

SEQ ID NO: 391654 - DNA, 122 bp, Homo sapiens
ccaatgtgtatccgccgggggctgtaactgtcgtggtgtcacagtgagtttatgtactggcgcctgtgtgtgtcaagatatgtgtgagcctgtgagtcgtgggtgcatgtgtcgccatcatt

SEQ ID NO: 391655 - DNA, 122 bp, Homo sapiens
agtaaggatgaaatgagttcatgtgtgtaatgcacttagaacaattcctggcaccaaaaacgcattgtaagaggtgttgttgctatgattcctgaggaattctcacctgtccactttccaca

SEQ ID NO: 391656 - DNA, 122 bp, Homo sapiens
tgacgtcatcggggcgccggaggcccggggcgcctgggaatttgaagcaaacaggcagcgcgcgacaatggcggtcgctcgtgcagctttggggccattggtgacgggtctgtacgacgtgc

SEQ ID NO: 391657 - DNA, 122 bp, Homo sapiens
agctacgtctagaatcagaagagcccaagccctctcatttcaccgaaagacattctggagcgtatagtggggaaaataaatttcctctgaagtctttttcagggaaatggaaaattacatat

SEQ ID NO: 391658 - DNA, 122 bp, Homo sapiens
gtttcttcttcctgccatcttctaagccttcctccgcacctccccgactcttcagtaattcgcagagcagccagcaaccagcaaaactcacccctgtgagtacaacctcagctgagctctct

SEQ ID NO: 391659 - DNA, 122 bp, Homo sapiens
gccttggcagtgagcttacggcccgcaccaggaggggccagcctgctgccaagatggggacggttccctgggccccgcggtctgcggtgccgcctcccacttcaccgcacggtgctctcttt

SEQ ID NO: 391660 - DNA, 122 bp, Homo sapiens
gacccctcgctaggcggggttcgggaccaggtgaacgctgatctgatagttgacacgggacgactgtggcatcatccttgctgccgtcaatatcccgagagggaggaggttgggccgggagg

SEQ ID NO: 391661 - DNA, 122 bp, Homo sapiens
tgcagccatgcatggccgggcccgcattgcacgcttgatgttagaatctgaatacaggagcgacatcattaatgcaaaaagcaatgacggctggactcccctccatgtggctgcccactacg

SEQ ID NO: 391662 - DNA, 122 bp, Homo sapiens
tgtctgatgactcctgtacaatgagatgtgtattctttcactgtgccctgtatgttcaggcgcagtcttactgcctcttttaaacttcctgatgggagctgtcctccaccagcaggacttcc

SEQ ID NO: 391663 - DNA, 122 bp, Homo sapiens
cgccgccaggtcatcgcgctgaccttcgagaagtttgacctggagccggacacctactgccgctatgactcggtcagcgtgttcaacggagccgtgagcgacgactcccggaggctggggaa

SEQ ID NO: 391664 - DNA, 122 bp, Homo sapiens
gccatccgcgacccttggctccctccttgtatgtggcccacaggtgtcgctcaagtcttccgaccgccaaggctcggacgaggagagcgtgcatagcgacactcgggacctgtggaccacga

SEQ ID NO: 391665 - DNA, 122 bp, Homo sapiens
tcttaaaagctgtgctcttaggtgccaaggttcagatctgggcacaattatcaacctgagcgcctgtttcagattatatgctgcaccaacctaggagtggaatcagagcactctttttttaa

SEQ ID NO: 391666 - DNA, 122 bp, Homo sapiens
ttctggaagcggggataattttgtaaaacgctggtcaccacgctccgcccgggccagatccgagggcttgagggaccccaggccaaggcctttagggtaccaaagcttggaggcccgggggc

SEQ ID NO: 391667 - DNA, 122 bp, Homo sapiens
agctgcaggaggtggagaggtaccggcttctccccgggccctcagcttgaagcagggcctcgtgccccggcgctccaggccgcgcccccttggcgccgggtgtcctgccgctgcttgcgcag

SEQ ID NO: 391668 - DNA, 122 bp, Homo sapiens
ctctgatcaagcccagcaggtgccggctggccacacagagtgcggggcccaccgagccagcgcccaccctgaacccgcaccggccggcgagcgcagcatgcagcccagactccggcctgtgc

SEQ ID NO: 391669 - DNA, 122 bp, Homo sapiens
accaggctcggtctctgatagatggtagatgctcagtaaaggtttgtcaccagtattcctcgaggcaggggagcacatttttatggctccctactgttctgtcgcactgttgctgaaatcac

SEQ ID NO: 391670 - DNA, 122 bp, Homo sapiens
gaggaaatgtcccgagggtgggcaggcaggatggagtgggctcccacccaatgccgaccacgcatgtctctggcccccagacagagctgtgaaccaaccccgctcacggctaacaagcccac

SEQ ID NO: 391671 - DNA, 122 bp, Homo sapiens
ctgtgtattataggaagcgatttgtcaggctgtgcttttttaatgcattaacactatatccgagtcatcactctttcatatcagaacattaatagaaaggatacaaagtcactttcaatctg

SEQ ID NO: 391672 - DNA, 122 bp, Homo sapiens
aactaaggctcagtcacctgagtaagcgtggtgtcgacctcagagcgggcaatcacccctcgttttaaaaccaaagtttccctcgcagtcgatttggaccaagactacccacaatctcccca

SEQ ID NO: 391673 - DNA, 122 bp, Homo sapiens
cacacaaatgggaccatcctttgctgaagacgcctcggcgtccctgtctcagtccgcaagcggcattttacttgaagaaattactttgaaggttcttgtctcccaaagcagaaaccctgagc

SEQ ID NO: 391674 - DNA, 122 bp, Homo sapiens
ttccccggcctcctgagagccaggcagcgggaggtgaggagccgcggtaacctgcgcctccggaggctggccctctgctggggagttcaaacacggtgtaccatgtagcacccccaattact

SEQ ID NO: 391675 - DNA, 122 bp, Homo sapiens
gttgctgagattaacaccttatcatgctattaggaccacttatgaatcttgtagtcccgacgaagcctacaatttagggactatccattccagctgtctccatttctatagcctcctacatg

SEQ ID NO: 391676 - DNA, 122 bp, Homo sapiens
tgcccggggcttgctatccggcctgcggcggcggaagcggcccctgagctggcgggctcacggggacgggccccagcacccagatcctgacccctgtgcccgggccggcattcacacctcgg

SEQ ID NO: 391677 - DNA, 122 bp, Homo sapiens
ggccaggatccagggtcactagaggccctgaaacgtggtactggccttggagacagacctcggcctcggcctcccggcctagtactcccctgctcctccccactgccaaacacttataaaga

SEQ ID NO: 391678 - DNA, 122 bp, Homo sapiens
cttggtcggaggaaacctctggcttgtgggggaaatactcatgtaaatggcttaaaacaacgtggtacatctatgcagcctgctactggagtagccaatatccattagccttcatttccacg

SEQ ID NO: 391679 - DNA, 122 bp, Homo sapiens
tctcctcacttctcagacggggcggctgggcagtgacgctcctcacctcccaggtggggtcgcagccgggcagaggcgctcctcacatcccagggcagaggcgctcctcacatcccagacgg

SEQ ID NO: 391680 - DNA, 122 bp, Homo sapiens
gcgcgtgcgcacctgacggtcagacgtaggcggaacgccccgaggtcataggcggggtcacgcggaaggccgggcagcgcagggcgaaaggaggctgtgtcctcagcctcctccctcggcac

SEQ ID NO: 391681 - DNA, 122 bp, Homo sapiens
gacctactgtgcgcgcaaccaagccctgaaaaatgtccagaggaggcgcgcactaagctgcgctagggagtagagaaaaatcgaggaaacaacggtaaagaaaaggtgggtgtggcgggcgc

SEQ ID NO: 391682 - DNA, 122 bp, Homo sapiens
gcaccacagctctcgggaggtgacccggagataatggcccagtaggaacactcaccatagcgtctgtcttggtagtctcttgccggacaccgcgaggataccacgcgtgtcggtttggacgg

SEQ ID NO: 391683 - DNA, 122 bp, Homo sapiens
gaactacacttcccggggggctcggcggtgcacccgccggggtcgcggattggaggtttccggttggaaaagccccttggcggctaactggggaggactggaagaaatctaggatggagcca

SEQ ID NO: 391684 - DNA, 122 bp, Homo sapiens
gcaggcgaagtcttgggacatttctgacttacatttgggtctcagggagccaaggcactgcggggtttaatttacacccgctgggctgtttatatccccaggggcccacaaatacgcatctg

SEQ ID NO: 391685 - DNA, 122 bp, Homo sapiens
gccccctgagggagtgagggcgggggcggaatgacgcgggtctgacgctctgtcttcgagcgcggctgcggagctgagcgatgagtttggcacatggctttggagcccgggcttgggaaata

SEQ ID NO: 391686 - DNA, 122 bp, Homo sapiens
gcgtaggtctaggtagctctgtccatgttggtgggtaggacttagaggcctgaacacctgcgcctcctggaactgagccagcagggccagaggagggtgcctcacactgatagaaaggtgat

SEQ ID NO: 391687 - DNA, 122 bp, Homo sapiens
ataaagaatgcacttccatttaggaagtcaaccacttgaaagttttactttttcattagccgcatggaaattgaaagagtatgagctggaaatgatcattaattccacatggagatcttaca

SEQ ID NO: 391688 - DNA, 122 bp, Homo sapiens
aaagttttgtctgtaaacctcttgcagttaagcctgttgtctgttgtagtctgtaagatgcgacatagctgtgtctgtgccagtatgccggaatctcagtgcagtgtccagactgcgtattt

SEQ ID NO: 391689 - DNA, 122 bp, Homo sapiens
gctcctctgtggtatttcccggtcgtctctgctttatgccctctctaccgagggagtgagcggtttgcaccccatctggtgacagaaaagccagttgtgcagaaaaccttgattggcgtgag

SEQ ID NO: 391690 - DNA, 122 bp, Homo sapiens
gcctccctgtgcacactcacctgtctacccccggggtcctccacccacctgcccagcccccggatcctccacccgcctgtccagcccccgggtcctgcactcacctgcccggcttccctgtt

SEQ ID NO: 391691 - DNA, 122 bp, Homo sapiens
agggaaagaattgaatgaccaaatgggggatgatgaggcaatccaaagatgagcaacagccggaagtcactactactcttaagactggagagataaaggaagtgaatggtgctctgatgcca

SEQ ID NO: 391692 - DNA, 122 bp, Homo sapiens
gtctaggctgttggattcttgcattttagggaggaagggagaatggtccagaaagtaaagcgggcctgtttccggtcatctcgagtcaatgaccgtgacttgtataacttagatctgacttt

SEQ ID NO: 391693 - DNA, 122 bp, Homo sapiens
ggcccccagaggcatttgagtttgagaccccagcctcaggcagacatggaaaccctccttcgctggccagtacccagcagggtgaaggcaggaggagtagagggtctctccacactaaggga

SEQ ID NO: 391694 - DNA, 122 bp, Homo sapiens
tccccacagaccggatcagggcctggcgagcctctgtgcctgccgtgcggtgtgaggacccgcggaccccaacccgcccttccctccgtcctgacccggcgccaggctcagctccagggcga

SEQ ID NO: 391695 - DNA, 122 bp, Homo sapiens
ccattgacaagataggctttttctgcattagatgacagctgcaccgtaattggtgaatttcgctaaattgagcatctcagtggagcataactgagcgtctcactctgcggtcaagtcttccg

SEQ ID NO: 391696 - DNA, 122 bp, Homo sapiens
ggcgacgtggccagcccagtcctgccgaggggtggggctggccctggggctcgctggccccgcgccgccgcggagagagcgcgcccgggccaccccggctggaaggcatccccggaatgcgg

SEQ ID NO: 391697 - DNA, 122 bp, Homo sapiens
ggaagcgagccagagccttgtgtgcacgtgtgtgtgcgtaacacacaaaccagggggcatcgctaataaatcaaatatcgtgataaattcaggagggccatcgatcaggtccacttggctgg

SEQ ID NO: 391698 - DNA, 122 bp, Homo sapiens
actgctcggtggaaccggtacgtcggtgaggcggaggggttgcggggccagcgcgggcagcgggacctcgaaaaggcgcggagggcgagtggacgagggtggggaatggggtctcccaggag

SEQ ID NO: 391699 - DNA, 122 bp, Homo sapiens
tcacgggggcgttctgcgcgtccttcctccccggtgcgatttccattctttttcctctcgcggtccccaggagcccaggcacccctcgactccccgggactccctgcgggcccgaagccgcc

SEQ ID NO: 391700 - DNA, 122 bp, Homo sapiens
ttgctacccctgaagcttactgttagtggtcgagtttttctggaagtgggcttccgcgatcgcggggaccaacgccctgagctcttgtgcccaaaggggatcgccaggttttttgatgcgga

SEQ ID NO: 391701 - DNA, 122 bp, Homo sapiens
ggtacagtttgaaaagctcctgacgtcaggctggaattcctattgtgtttagaaaaggctcgggcaaagccagcccaagttcgctctctgcacacctcgagcacctcgcggacggcgtgggt

SEQ ID NO: 391702 - DNA, 122 bp, Homo sapiens
ttccatccagatctgtagagtgtcttaatgtcacgatattcagtacacattgattcctttcgcatccagcttgctttcgccatgcttcaggtaacaatacccaccttcgctctacagtacca

SEQ ID NO: 391703 - DNA, 122 bp, Homo sapiens
acagaaagagaaaaggatgacccctcccggagggactctgccgggcgccgaggatgtgtacggggggagtagggacactccaccacaccacggggtgcagacgcccgtccagtgaactcgag

SEQ ID NO: 391704 - DNA, 122 bp, Homo sapiens
aatttcacctctcagtccggcctggttttgaaccctcgccccactccacccctggtttcacgatttggcggaaagggtccaggattgtagggactcttccaactctgatcccagacccctgc

SEQ ID NO: 391705 - DNA, 122 bp, Homo sapiens
cgtcgcccaggctggagtggtgcagtggcgcattctcacctcactggaatctccgcctcccgggtccacgccattctcctgcctcagcctcccgagtagctgggactacaggcacccgccac

SEQ ID NO: 391706 - DNA, 122 bp, Homo sapiens
tggagtttagcactcaaagacccacttcccaggaaaaccctacctgggatgtgaaaagtccgggctttcggtttttggcgataggttggagagaatatatacacacaaaaagtgacaacccc

SEQ ID NO: 391707 - DNA, 122 bp, Homo sapiens
cccgccccaggagccccctcccagcccagggagccggcgcccactgcagagccgcgggcccggggactgggaactatatatacccgggcacacgtgtgtgtgcctgtctctgtgtgtgcgcg

SEQ ID NO: 391708 - DNA, 122 bp, Homo sapiens
taatgatcccattgacaaaaacagagtgataagacacttaagaataaattctgcaagaaacgtatgcacaacctatatgaagagaacacagactgtctgaatgaatggaaggtatatactgt

SEQ ID NO: 391709 - DNA, 122 bp, Homo sapiens
ggctgtcttcataccgctttcaaagtcggcgggcgccttgcccaatagcaaagaacatatcgcccccatttcgaagattgatggaaagtttgaccaaccgcatctcagacttctgctgtctc

SEQ ID NO: 391710 - DNA, 122 bp, Homo sapiens
atagaacataagtctggttccaccagttaatttaaattgcttataatttcacctttaaatcggccactccaactcatcagggttggcaacaaataaagtgtgatttacaaaaagaacctagt

SEQ ID NO: 391711 - DNA, 122 bp, Homo sapiens
gagaagcccgtcgtctctttcccgttgttctctctccgcggccctcaccccaccgccagccgggcaggctagaacctttcagttgccagaatcctccgctgccgctcacgatggtggcgagt

SEQ ID NO: 391712 - DNA, 122 bp, Homo sapiens
ctccacttaggctcctccacaaacgctggcgggtgtgccgccctccagcctctccgcccccgtcccctcggtcctgcagatcaccaagcagctctcctgggcccgcggctgctccgggcctc

SEQ ID NO: 391713 - DNA, 122 bp, Homo sapiens
ccagagcaagcaagcactgcattcaaggaattacaagtagccgcctgtagatcagctgagcgttgacaagccagaaactcatctttgagcttttctgtcttggaaatatgaactcagcccaa

SEQ ID NO: 391714 - DNA, 122 bp, Homo sapiens
ggcgcttccggactcgtcacggctccctgagccgacctggcagtccaccccctgcgcatgcgcagtgtgcaggcctgctagattaccacccgggccatccaggcctgcgcggactttcctgc

SEQ ID NO: 391715 - DNA, 122 bp, Homo sapiens
cctggagccgcgggagctgtcgtcctacgtgtccgtgagcgcgcggagcggggtggtgttcgcgcagcgagccttcgaccacgagcagctgcgtgccttcgagctcactctgcaggcccgcg

SEQ ID NO: 391716 - DNA, 122 bp, Homo sapiens
agccagccacggaaataatccaaaaaaagccggtgatagcaacgaagccaacaggacacacggaaggcgctggttctaggcaagtcacagaccggagcggggccaggctgggatcgatgctg

SEQ ID NO: 391717 - DNA, 122 bp, Homo sapiens
tgaagaccttacccagctaggtcgtcaaccccaggagacaggaagtggaaccgctaattccggtgcggtggcctctgggaaatacagtcctgagcagaaagaacctcagaagtcttggtcta

SEQ ID NO: 391718 - DNA, 122 bp, Homo sapiens
atagccatcgggttgggaagatgtcacctccacatggccactggaacgggtcagactttccgcaatttttttcttttctttttttttgtttgaggcagggtctcgctctgtcactcaggctg

SEQ ID NO: 391719 - DNA, 122 bp, Homo sapiens
ggtggtggtcctgatctactggcatttgctggtggtatatctaagttggcagtttcaaaacgcctacgactcagttcaatcatattctgcatttccgtcttactactcaacaatagtgttac

SEQ ID NO: 391720 - DNA, 122 bp, Homo sapiens
ggggagctgcgctgactgcccactgcgtccactagatggcgcgctggctgcacaggtaagcgcgtcgcaccttccctgagtgggtccagctttcgggaatcacctgccggtatagccagcac

SEQ ID NO: 391721 - DNA, 122 bp, Homo sapiens
ccggcagccccccatccagtcggcctgcccggggtgcgcagggttagcctggagtgagctcgccccgcccggggttgcgcggccctggggggtcctctcgcggcggctcctgggacctgctg

SEQ ID NO: 391722 - DNA, 122 bp, Homo sapiens
gcccaggcgccggcgctgcgtcttctcagtcagcctggccagggcccagttgggtcgcagcgcggcgggcgccgatgggtgccgacattcggggcaggggaacgggccgccgcccggcgccc

SEQ ID NO: 391723 - DNA, 122 bp, Homo sapiens
ggaaataaagtgtctaataaatgtaatgtgcttaaatcttttggcccagcccctacctcccggcagcctctccaggcccagaactttctccagtcagcctccacagaccaagctcatgactc

SEQ ID NO: 391724 - DNA, 122 bp, Homo sapiens
atttgttctgcagcgaatgagaaaacagagtcatcctctgcacagcaagtagcagtgtcacgccttagcgcttccagctccagctcagattccagctcctcctcttcctcgtcgtcgtcttc

SEQ ID NO: 391725 - DNA, 122 bp, Homo sapiens
tgaaactgcagaaagcgaaactgcagataagagggggaactacggtagacgccacccacccgttagtcacttgggagccgtctgggttatcagatcaactgtctgcaagtattgcattgttt

SEQ ID NO: 391726 - DNA, 122 bp, Homo sapiens
cccccaccccccctttaattgaaactgtgtgcatgcagtgagcgcaggattctagtaatccgacgggaggatccacttaaaagactaaaatccagaaaccccaggaaaaaagaataggaccg

SEQ ID NO: 391727 - DNA, 122 bp, Homo sapiens
catgagccgcgcggcctttgagggtgtggtgcgagccctgctgcagaagcccagtgcccgcgtggctgtcctgttcacccgttctgaggatgcccgggagctgcttgctgccagccagcgcc

SEQ ID NO: 391728 - DNA, 122 bp, Homo sapiens
gctacttccgcaagcaacccatcagcaagtccttcgaagtacactagatttggatgccttcgtccacctccacaactccccctactccctggtccaagccaccctcatctcttgcctaagta

SEQ ID NO: 391729 - DNA, 122 bp, Homo sapiens
atcagtaggatgtgggtgggaccagataagggaataaaagcaggctatgggagcctgcagcggcaactggcttgcgtctgtttccacttttggaaggtttgttcttttgctctttgtggtga

SEQ ID NO: 391730 - DNA, 122 bp, Homo sapiens
catcgcaagactagggactgaatctggaaggtagagtccccgccccagggaggggcccagcgtgttggagatctcaaggttttttcccactgattctctaagtcttggccttatctaacaca

SEQ ID NO: 391731 - DNA, 122 bp, Homo sapiens
gctctcctccctggagctggggctttgggaaggtcgagtagaccctcagtgagtgggatgcgcgagttggggacgctagttgcggggcagcaggggtccacgcatttccaagcgccctttcc

SEQ ID NO: 391732 - DNA, 122 bp, Homo sapiens
agaaacatagaactagcttttctctttgcttagcacatacaaatggaaaaacagcgacaccgttacctacatttactagtccaatgcgtacaaccttctgtagtatatcaactgccaatgag

SEQ ID NO: 391733 - DNA, 122 bp, Homo sapiens
cggaggttgcagttagccgagacggggccttggcactccatccagcctgaggaatgagagcgaaactccgtctcaaaaaaaaaaaaaaaaagtttccgagcaattcaccttttcgcacattg

SEQ ID NO: 391734 - DNA, 122 bp, Homo sapiens
gctgcgaggctgacccgcccagccaggcgcggcgtccggctccttgacggccacgccccgcgggaagagaagcctattgggtggtcacgcctcctcctaacgccagaacctcatcccgcttt

SEQ ID NO: 391735 - DNA, 122 bp, Homo sapiens
ccgggcttctgctcccgaggtgggtggaggcagggcaggaacggcacattctcccagcaacgccgacgtcatccaagaattaacccaagccagaggacgggcatcgccacccagcaacgcca

SEQ ID NO: 391736 - DNA, 122 bp, Homo sapiens
gtgttggccttggccagggtcgcgggccctctccccgtggcctcgtgtattggtaccactcgacccccaggggggcaagggtagttgctaggtctcccgagccagcttgctctggagggaaa

SEQ ID NO: 391737 - DNA, 122 bp, Homo sapiens
tggggcccgccgtgctgcccagccacactcggagacctgtggggacagggcacggtggcacggacggcagaggagccccgccccagccttggtcagctaggagggacagcctgcctgcagtg

SEQ ID NO: 391738 - DNA, 122 bp, Homo sapiens
aaggatctgtgagaaaaaagaaatcctttctcccctacagggaagatgctgagtgtatcacggaggcagatccccagttgacaaaagtaattctccagagaaagggggagctaaaaattgtc

SEQ ID NO: 391739 - DNA, 122 bp, Homo sapiens
gccggagctccggaccgctagccaggggccctctgcagccaccgggaatggggctgagggcgggttcccgcccctgtgcagccgccccagggccgactgcctggctcggccgcagccactgg

SEQ ID NO: 391740 - DNA, 122 bp, Homo sapiens
tctactagacacttcaatttccctgtgatgaccaccaggtaagggaggattcctttagggcggagaccatactgatattctgtttcctagacaggggtctcctatagggtttctagatacct

SEQ ID NO: 391741 - DNA, 122 bp, Homo sapiens
cctaattactccttgggctttaccgtgatgtgatcgcagacatctcatagctagctcctccgaagagacaaatggctcgtgaacccgcagttcttcaacaaactgggtgtagaccaacagtg

SEQ ID NO: 391742 - DNA, 122 bp, Homo sapiens
ccctgtcacgaatcccggtcgggttctgggaggcacagcctcggggttgcgggccgggtgcggctcggcggtggaggactcacttcctgctccatccccggctgggccctggggcggtgagt

SEQ ID NO: 391743 - DNA, 122 bp, Homo sapiens
gaagcgcggagcctgaacacccaggagacacctgtcagcttggtgaatgaaggcttgcgccggcctggcatttctgctacgcctaagcgcggatagtattggctgaatggtaggggaaggtg

SEQ ID NO: 391744 - DNA, 122 bp, Homo sapiens
cctgccacagcctggtgccccatggcctattttctcttcccttgggccagctgagcagcccgtggagtggggctggcaacagcagtgcaatgagggcatcagacaccaggtggcggcacagg

SEQ ID NO: 391745 - DNA, 122 bp, Homo sapiens
taggaaatgacttggcagtacagccggaggattcagggtctggacgatagttttcccagccggaggattcttcgaagagcgcttagtaaaggacggaagttccacgtgtttgtgttgagcaa

SEQ ID NO: 391746 - DNA, 122 bp, Homo sapiens
agtggaaggctggcttgaggaaccaattcaggttctccactgactcattcattccttcaccgcctccttcattgattcttcatgcgttcattcattcagtaaacatttattgagcagctgtt

SEQ ID NO: 391747 - DNA, 122 bp, Homo sapiens
cctgaccaccttctgcagccagatggaagacttcattttggtgatgggggacactgtctccgtactcaatagctgtggagttgtagataggctgtgctttcttcatgaaatctgggaactct

SEQ ID NO: 391748 - DNA, 122 bp, Homo sapiens
tgccatttaaggactctttgtctttttgagaactaaactcttaccttttttcttctcttgcgcaaattcctatttaagggacctgggaagccatgccctacagagcataaagtctcactaga

SEQ ID NO: 391749 - DNA, 122 bp, Homo sapiens
tcatagtatgccgttcagtttctaaatttggggtgaaggcatttacatgccatttcctggcgcctgcagaccccagcgtcgccccttcgggaggcacgtgctttacctgtcgccgtgtcagg

SEQ ID NO: 391750 - DNA, 122 bp, Homo sapiens
tcgccctcatcgtagtcttctgccttgacaacagtcaccaggtagcctatgccagagttgcggggtatgtagacctcggcagtgccgttaatcagaggtggggctgtgatgaccggggtgtt

SEQ ID NO: 391751 - DNA, 122 bp, Homo sapiens
gcgccagtcgttctggggatgggggtgctacttacccacctaacttgtagttgccgaccccgcccacccaggcccggatgaaggctgggtcggccaggagggagaccggggtcacggagcct

SEQ ID NO: 391752 - DNA, 122 bp, Homo sapiens
ttgcagaatatttattgtcctgcaatcataaaaatgaggtcagccaagaactcacctggacgatggacagatagaaaggtctggtcaaattcatgcttgtacagcacccattataaactgag

SEQ ID NO: 391753 - DNA, 122 bp, Homo sapiens
catgctcaacctagggagaggtaatggggatgcagagcaacagggcaaagaccctgccctcgagaactcccctatggagacgaaacttaccagggaaacaacttgagaaaaatacagcaatg

SEQ ID NO: 391754 - DNA, 122 bp, Homo sapiens
gcaaggggatgtaagggatttggggctgcatgttctagtccctgtttcattatctgtccccgaaacagctaagctggaggctggcttactcctccgagggcctaggtctcaacatttggtaa

SEQ ID NO: 391755 - DNA, 122 bp, Homo sapiens
gacaccgtgctacacccccctgatccaagtggagcagtcagaggccctggaccaggtgaacggcagcctgccgtccctgcaccgcagctcctggtacacagacgagcccgacatctcctacc

SEQ ID NO: 391756 - DNA, 122 bp, Homo sapiens
ccatggtgccctggggccctgctacaggtgctcaggtagggaggtagggtgcctgctgtacgctggacctggacctactgggccccaggcaggacatcctttagaccctctgggaggctcca

SEQ ID NO: 391757 - DNA, 122 bp, Homo sapiens
cccgacgggcctctgactccagcaatacagcgaatcagcggctttcgggaatacatttttcggaaaaagacttcttcctcggttttctgctctgcacacgttgaaattttccccagtttttc

SEQ ID NO: 391758 - DNA, 122 bp, Homo sapiens
gcttagaggtccaaggttctaggataccctcacctgcagcaataccactcattctggcatcgtgagcagcgcttagaagcctctgcactgcagtaagcacagcggggccgctctggagccac

SEQ ID NO: 391759 - DNA, 122 bp, Homo sapiens
cggtgagtgtccaaaaaatgggcggggtggggattttaggcaggggagccccctccctcgcgcagccagaggcctcgggctggcgggggcgcatgcgcagagagccctcgcggcccctttat

SEQ ID NO: 391760 - DNA, 122 bp, Homo sapiens
cgccaaacacactggaagcatccacagctgttttaaattggttttggtttctggaaatagcgcactcggtacggcagcatctctggcctccagccggggttaaccctgacctgaacgccctg

SEQ ID NO: 391761 - DNA, 122 bp, Homo sapiens
ctcgggaaccaatgagaggaagagaggaaaatgggaacgtttgcagtcagccctaagccccgaccagaggcagttccagccgccagggtccctcacacaacgctgaaagcaaaatacacgta

SEQ ID NO: 391762 - DNA, 122 bp, Homo sapiens
aggagcccaggattggagaccccacccctgctgtgacatcacaggggagtggagtggagacgaacaaaaagggggtcccccgccctggtcctggcctcttggaagccagagtatcaagagca

SEQ ID NO: 391763 - DNA, 122 bp, Homo sapiens
gcaggcggcccgcacccgcgcccctgcccacggggctaggcggcgctcccggcctacgcccggctgccaagaagagaaaggcgctcacctgagtcaccgaagccttcctttggggcccctcc

SEQ ID NO: 391764 - DNA, 122 bp, Homo sapiens
gctaggtccccggagaccctgctatggtgcgtgcgggcgccgtgggggctcatctccccgcgtccggcttggatatcttcggggacctgaagaagatgaacaagcgccaggtgacggaggag

SEQ ID NO: 391765 - DNA, 122 bp, Homo sapiens
ccctggagaggagcggggtgcaggcaggggctgcagggcactccccagcaggtgcccggacgttgtgaaagaaaacgtctgggagctgctttcctctgggcgttcgtgggatccctcccctt

SEQ ID NO: 391766 - DNA, 122 bp, Homo sapiens
ggtgggcggtgccctgagcggggctcctagtgggcggggctctggggtggcggccgttgccgggctacgggagagcgcggagccctgcgctgggaggtgcacggtgtgcacgctggactgga

SEQ ID NO: 391767 - DNA, 122 bp, Homo sapiens
aaggagccaggaaatgcgggggtcggtggggtgaggagcacggggttcctacttcatcctcgcggaaactttgccaccggctcagtgtggagacctcaccgtcccgcttggatccgtggggc

SEQ ID NO: 391768 - DNA, 122 bp, Homo sapiens
ggacgcggggaggggtatcgcctcctcggcggaggctggcgtggtcaagggcacaggggacggcgccggcgcctcggcagggacagtggggacttcggggtcccggctctccgctggtgcct

SEQ ID NO: 391769 - DNA, 122 bp, Homo sapiens
gaaagccgaggggaagcggaagtgccggatctgtttgggtcacgtgggggcggatgtcgacgggtgccgctgagaaccataaaacttctggccctgctgccaggactttccgtgggtgggaa

SEQ ID NO: 391770 - DNA, 122 bp, Homo sapiens
ctctcttcagccctgtgtctgtgcttgagtgggggcgagcacggggctgagactagaggtcggcctctgcctggaaagtcccgatgtctgagcggaagtggagcgaagtgtggcgcggaagt

SEQ ID NO: 391771 - DNA, 122 bp, Homo sapiens
aactcacctcctgggcagtccgcctgccccgtctccaccaggctccgcaccagtggcagtcgaggtactagggccagaatccccgccacctgtcggcctgtcatctcacctactccctgctc

SEQ ID NO: 391772 - DNA, 122 bp, Homo sapiens
cgagaatctcccggaccgttccagcgcctcgcgtgagccccgcccaccgccgtcctgcgccgccgggcacagatgacaagtcctccaggaagccagagcgaccgtttccgctacgcgacggg

SEQ ID NO: 391773 - DNA, 122 bp, Homo sapiens
ggttcacccaccgccaacagcgccccgcagagctcggttcacccaccgccaacagcgccccgcagagctcggttcacccaccgccaacagcaccccgcagaactcggttcacccaccgccaa

SEQ ID NO: 391774 - DNA, 122 bp, Homo sapiens
tttgtccaagcctgggcatgggtggggggccttgtctgctggccacgcaagtgtcacatgcgatctacattaatatcaagtcttgactccctacttcccgtcattcctcacaggacagaagc

SEQ ID NO: 391775 - DNA, 122 bp, Homo sapiens
catttgtgcaatttttctctgactgtagctaaaatccaaaaagataaactattatttcagcgtgtcctccagcaactcaagaataaataaaatgaaaagtccataaaaaatgagtaacagta

SEQ ID NO: 391776 - DNA, 122 bp, Homo sapiens
gcaggacctatggccggtaaggggcagaccagacttgagggtgtgggtgaagcaggagaccgcttctgccgttgaagtcagggggtcctgaagttcccactcacaatctgaaatctcatgac

SEQ ID NO: 391777 - DNA, 122 bp, Homo sapiens
agaaaagcaggaaaagtcttccctgaggaggtgacatccgcacttgttttctgggtggctcgaggagtggtgtgggtcccaggggacagatggaagcttgaagggcagagggtaggaagggg

SEQ ID NO: 391778 - DNA, 122 bp, Homo sapiens
gcccgcctggggctcggggcggtgaggcccggggcgcggggtagctatggcgacggcaagcgcggcccgcggcgccgcctgacaggtgtgggccccggcggcggcggcgtggagcagcatgt

SEQ ID NO: 391779 - DNA, 122 bp, Homo sapiens
ctctaatatagaggaggaaaagaagggagggtagcaggacaagaaagtgggttgtttacacgctgtggcctccagctaggattgtgaaacaccctgggggactctgggtgtggtgaagttgg

SEQ ID NO: 391780 - DNA, 122 bp, Homo sapiens
ccaggcatacctgcccatggaaaaccaaaactgttacagacagaagtcacagtgacagagcgttggtaggatggagtggccagggaacctgtgagaggagcctgtaccgacactgcctgcct

SEQ ID NO: 391781 - DNA, 122 bp, Homo sapiens
cgagtcaggcatcgtggtaggacctggcgagtggggccggggagagcgggacgcctggatcgggaacttgtcgcattcacattggctgctaggaggcctcggcgaccacttccggatccggg

SEQ ID NO: 391782 - DNA, 122 bp, Homo sapiens
gcaagcttaggctgaagcctttggcgcctcgggctctggacctacaaaacccagagtgcacgcgagcgctgagccaatcaggtgctgcgcctcggccagtcaagcgggtgtgtggcaccttg

SEQ ID NO: 391783 - DNA, 122 bp, Homo sapiens
cgtgtgcggcgctgtcggcgggggcgccggtgaccgcgggaccctcggccgcggcggcggcgcagccacacaccccagctcccgcggatgttccggccgtgtgaacggaccgtggttcccgg

SEQ ID NO: 391784 - DNA, 122 bp, Homo sapiens
tctgggtttgccaggtatgtgcctctatcctgcagcccttcattcaacaagaagtggagccgatctttactgccctggagatgcagagccacctgcatgaaggatgttggctatccatcctt

SEQ ID NO: 391785 - DNA, 122 bp, Homo sapiens
cgtcacgaggcgggggcggggcctcggaacgcgacgccccccgtcccagctttagccactcgtgacgtcattgcccggactccactgcctcctgcgccgcgcttttgccaccctgggcacgt

SEQ ID NO: 391786 - DNA, 122 bp, Homo sapiens
ctgctgccccctcgcggctgcttcttgcctcgcaggccctgatcctttggattcggtccgcgcagagcgccaactggacatggtgctagaggttgggtggtcagacactgtgatcccgggtg

SEQ ID NO: 391787 - DNA, 122 bp, Homo sapiens
caaatttcccaggagaatctggtctcagttcagctagcctgccaaaatatcttctgctcacgtggtgatttctttgctgttttccatttctttgtttcctgctagttactcagcagggagtt

SEQ ID NO: 391788 - DNA, 122 bp, Homo sapiens
aggagtctcgtctttacatccttattttctttttttattggttggcacctatgccactcacgtggtggagaggcggggcaatagttggagatgattggttctgagaattggctgtgaaagcg

SEQ ID NO: 391789 - DNA, 122 bp, Homo sapiens
ggctaattttgtggtttctgtaccatcacatgcctattttaagacactctccagcactgtcggttagggagtgtaaattttgcaatattttctgaaatgtggcaatatcaaaatgtaaaagg

SEQ ID NO: 391790 - DNA, 122 bp, Homo sapiens
ggggccgttactttcccagagcggcggggcgacgtcaggcggaagggcgcggggcgcgcacgctttaaatggcattcgctgtcatccgagctcagagccgtgtgggcagccgcgggctatat

SEQ ID NO: 391791 - DNA, 122 bp, Homo sapiens
tggctcccggagggcggggtggtgggggaagggaaggatggagctggagcatgcgcagtgcgcacagcggcgaaccggactaatccctgagcactattccaggagaggcgagggcttgggcc

SEQ ID NO: 391792 - DNA, 122 bp, Homo sapiens
caatgtgtatcatctatgcttttcagttttgaacataaagcagtggctctgagcgcgactcggagggcgacgccgcggccgcagccatgggtgctgggcctgcaggggcgcgggggggaggg

SEQ ID NO: 391793 - DNA, 122 bp, Homo sapiens
cactacgggtcctgcgggtcccgcgggtcccggattcgaggcgaagcggcccagagcctgcggctgctcagacctcctcaccgcgcccacctcccagccacctcctggctccaggtccagag

SEQ ID NO: 391794 - DNA, 122 bp, Homo sapiens
ggtggtcgatgggactgggcgcagtggagcagggggtggcgctcgtcggggaggttcgggcggcacaggagcccatggagggggtgggaggctcaggcatggcgggctgcaggtcccgagcc

SEQ ID NO: 391795 - DNA, 122 bp, Homo sapiens
cagacctgtgaaatgcagtccttttttcttttctttttctttttttttctttgcaaggctcgtcagatgacccaggtgaagctatgtaactagccagtaagggagctcaaaagctcaatcca

SEQ ID NO: 391796 - DNA, 122 bp, Homo sapiens
gggccaggccgccggggatgtctgtggttacctccaagctctggaggccttggcgagacccgcgccatccgcagcttggttcctgcgacctcagccgcagggcggtccggctccggtttccc

SEQ ID NO: 391797 - DNA, 122 bp, Homo sapiens
accctgagcatgtgaaggtagaaggcagagccattgtcctgggcctcaaatgtcaggccccggctgcctgcctggcctgtggggcccagagccctggatgctgcatgcagctggtgagtggt

SEQ ID NO: 391798 - DNA, 122 bp, Homo sapiens
caagagagagtccagagcaaagaaacaaaaaatgcaaagcgttttgggaagaggaactagcgggaggaggcctctggaaaggatactgatgcccttgaatgctagggcatgtgtagtaaaaa

SEQ ID NO: 391799 - DNA, 122 bp, Homo sapiens
gaaatatgccaccatacccagaagagtttacctctgatcctgagattagggagcagatctcgactattactacttttattctgtcctttcagtgacaaataatcattaaacaggtggctaag

SEQ ID NO: 391800 - DNA, 122 bp, Homo sapiens
gcggggcgctgggtgggcacaggaaagagcagactgtgtgggggaggcgacggcgtttgccgggctgaccaggtacccaccttatcccagcggagccactgcccgatggccgtgtccagctg

SEQ ID NO: 391801 - DNA, 122 bp, Homo sapiens
catatacgtagtgactggatcattgtggatgcccttttaaaagacatgcattacgctgcacgtggtggctcacctgtaatcccaggactttgggaggctgaggccagcagatcacaaggtca

SEQ ID NO: 391802 - DNA, 122 bp, Homo sapiens
gaacctactgttcagccaggagaagtatgtgggtcaacagtctcaggagcaggaccaggccgctggtgcctcatgtcggcctccaactgctaacccttgccccagagcacccgtgggctggc

SEQ ID NO: 391803 - DNA, 122 bp, Homo sapiens
aggagcttccagaatgggttctgagattggtcctttccaatcttcaaggccaatggacctcgggagaggggggcgggtcatctgggccttattttcttcttcctgcggccgagcttcactcg

SEQ ID NO: 391804 - DNA, 122 bp, Homo sapiens
aaaaaaaaaaaaaaaaagccagcgcacagacccagggagctgacaacacacgggcatacacgctgggtgctttggacacaaaagccacaccgtagggagttttttctctcattcactcaaac

SEQ ID NO: 391805 - DNA, 122 bp, Homo sapiens
catctggagcccattgatcctaaagagcttcttgaggaatgcagggccgtcctgcacacccgacctccccggttccagagggattttgtggatctgaggacagattgccctagtacccaccc

SEQ ID NO: 391806 - DNA, 122 bp, Homo sapiens
cctgcaacggtgagcacgtgggggaggagtggcctcttgggcctcctgcacacagccaggcgctgctctttaccaggtaagcatccagtgctgcaggccccgggtggcgcgcactgccgggg

SEQ ID NO: 391807 - DNA, 122 bp, Homo sapiens
actgagattggttgggcatgacatatggtggatctagggttgaatgacctccccagggaacgcaggcttgaagtggaggctgagaatgcaatccgagtacagccataggccggtcaaaggta

SEQ ID NO: 391808 - DNA, 122 bp, Homo sapiens
gcccgccaaagccggaagccggaaaccgtcctgttcgctacagctgcgtggctgattggacggtttccagcccagcgtccctgattggataatgcttgaggccccgccccctcaggtcctga

SEQ ID NO: 391809 - DNA, 122 bp, Homo sapiens
caagccttgttcgccgcaggccccgcccacaggagccctcgcccacgagacgcccccattcgctgggcctccactcaatgcaaaccccgcccactggccccatgcccaacgtaagcctcgcc

SEQ ID NO: 391810 - DNA, 122 bp, Homo sapiens
gtttcctcttttctaggagattaaaataaggcaccttgtgccagaaaacactgggctgggcgtttgctgttcacgtgtggagctcggggaatgagccggttctcagcgggctgcgtgtggtg

SEQ ID NO: 391811 - DNA, 122 bp, Homo sapiens
tactgaatgaatgaatcgaatgaaaagggtcagcaccgtctgggactcagtttaccctcgcggtcattgggctgcttcaaccaaggggatcgctaagaacacccctccccaccttgggtccc

SEQ ID NO: 391812 - DNA, 122 bp, Homo sapiens
agctggcgcagcggggcccttcttccctccgcatccccttcagggagcaggagcccagggcgccctgggagctgagcctgggacttccaggacctcccctcaggttgttctctgattcttcc

SEQ ID NO: 391813 - DNA, 122 bp, Homo sapiens
ccagtccaaccaaacccagccaacaggaagcagccgggattgtgctatcattcagtcagtcgacaaacgctgaatctatactgcacactctgcacctgattccctactggaaaccaagcttc

SEQ ID NO: 391814 - DNA, 122 bp, Homo sapiens
acactggtaatcccagcactttgggaggccagggcaggagatcgcttgagcccaggtattcgagaccagactaggggctggactgtaggagctgtatcttactccatatcatacccttatcc

SEQ ID NO: 391815 - DNA, 122 bp, Homo sapiens
ctggggtctggcacagcaccagcctcataaagggcactcagtaaatatttgttgacctaacgaatgaccaaaaaataaatgaaagctgggtgtggtggctcacacctgtaatactaatactt

SEQ ID NO: 391816 - DNA, 122 bp, Homo sapiens
cttctcctaagaggctgttacttttaggatataaacaccaggctggggaagacagtattgcgattatggtttacaacgtgcttaccagttaataagtaaaatattagcaatcacatgcctga

SEQ ID NO: 391817 - DNA, 122 bp, Homo sapiens
gtgctaagcccctcattgccagggccggcagggctggccggctgctccgagtgcagtgcccgccaagcccacgcccacccggaactccagctggcccgcaagcgccgcgggcagccccagtt

SEQ ID NO: 391818 - DNA, 122 bp, Homo sapiens
aaattacttgctagctcctgtggtattcatttttttttttttcttgagcgtttttgtgctcgagccatcggtttctgatacagcttgcttgagaatcaagatatttcaatgctggaagatct

SEQ ID NO: 391819 - DNA, 122 bp, Homo sapiens
tgatggttgggggctgcttttctggaagaagtgggtctcaggcaggcacctggagggcagcgcgaacggagggctgtttgtcgtgggaggcgcgtctctctgcagccctggcaggcgtgggg

SEQ ID NO: 391820 - DNA, 122 bp, Homo sapiens
tccagggctgagtccgaatctccctcatcagaaaacttctccgaccactgattgactatccgctgcatccccttcacgtggtagaggatgtcgtccagctcggggaagatgtcctcgttctc

SEQ ID NO: 391821 - DNA, 122 bp, Homo sapiens
ggaagtggctcttgagagggtgaagatagcaggaaggtggaggaagtttgccgggatagtcgtgaaggtaaagtgagatccctctgtgggcttgcctgcctccagccacattcaccagctgg

SEQ ID NO: 391822 - DNA, 122 bp, Homo sapiens
cgcacgcgcgccacgcccatcgaaccctcctaactcactatagacccgaaacggcactcacggggcgacagacctgctagctgactgcccgcgtctactgccttcccacggtgttccagcag

SEQ ID NO: 391823 - DNA, 122 bp, Homo sapiens
cctggaactggcggtacatgtcgcgctcgctctccatgttccccgcgctcggccgctggccggatgctcccagcgcacttcgcacctgttcaccctaggctcatgaaaaatgcagccccggc

SEQ ID NO: 391824 - DNA, 122 bp, Homo sapiens
cgagcggggaggagcttggcgggacacggccctggaggggcggagctgggcgacagcaggcgggaggggcgggggcggtcaggagggaagaaatctgggacggagacactggggggacgggg

SEQ ID NO: 391825 - DNA, 122 bp, Homo sapiens
atgctcgttgtcagccagttgccaagagcgggagtgaagagcctgcaaggcccgggagagcgcggattccggagtagggaggcgagggggcagcgtgggagaccagagggaaaatgggctga

SEQ ID NO: 391826 - DNA, 122 bp, Homo sapiens
gctcctagggggttccttccacagctggtgcgcgtgcgcaagagtgcgtcgaggttgttccgcggcaatttatgaaactcggagccggcagtgagttgagggttcggcgaggtcagggattc

SEQ ID NO: 391827 - DNA, 122 bp, Homo sapiens
atgattataggagccctcatgcattgagaacatgctggatgccaggtgccttacatacatcgtcacatttaattctcacaacatcccttcaaggtagggagtacttctcccattttacaaat

SEQ ID NO: 391828 - DNA, 122 bp, Homo sapiens
tcacatcctttgcctatatttttttgggggtgacacttgttaatttgtaagagctctttacgtatagggacatcagttttctaacctgtaaggaagtcttggctgggagttgaaaccccagg

SEQ ID NO: 391829 - DNA, 122 bp, Homo sapiens
cccgggactggcagctgaaaggggttcgcgtgtggttgcctgttgcagcgcttatttatccggcgctttagagtttccgaagagctgttttcacctgtgaccctggccacaaacttgtgagg

SEQ ID NO: 391830 - DNA, 122 bp, Homo sapiens
cagtgaacccacacatggatagtgaaaatgagatggctcattcggtagtgaggatgcaagcggcatggcctacagatagtggagccctgatttgcctgtgctatatgggagttattttcaat

SEQ ID NO: 391831 - DNA, 122 bp, Homo sapiens
catggcgccctagaggcgttactgctgctcccggctgcctagggcggcgcgggtaggccccgttgttctcgtgcgttaatagggaaagctgccttgattatcttgtaattctctaccaaacc

SEQ ID NO: 391832 - DNA, 122 bp, Homo sapiens
gaattccggccaggttgcccttcctgaggcaggagtcagcctcaagctggcccaacaagccggggaagggggacgggcgtccctcctgcatatggctctttgtggcctgcaaaggctgttct

SEQ ID NO: 391833 - DNA, 122 bp, Homo sapiens
caaaaaatagtaaggactgattgggaaacactaatccatattccacacacacttgtctttcgcatttatgtaatttcaacattcagttatcaggaggcagcacattttattggtcaaataca

SEQ ID NO: 391834 - DNA, 122 bp, Homo sapiens
tatggccagtggctacaccccacaggaacagaacattttcatcatcaaagaaagttctagcggactatcttaaaattttaagttgctgtcttaaaatatattaccattcaactggacagaga

SEQ ID NO: 391835 - DNA, 122 bp, Homo sapiens
agcggaaggatgcagtacctcggaggcatgttactttaactggatccagagggcgtctttcgggacctgtctctcctgactgcactgaccttttccttttcccaaggccgcatgagtactta

SEQ ID NO: 391836 - DNA, 122 bp, Homo sapiens
ccccggaggtgcggccgctgggaccagcgccggccctggctccattcgggtcgcccagcccggccaggactggcctcccgcttccagccgctgccggcaccctcagccgtctggcctcccgc

SEQ ID NO: 391837 - DNA, 122 bp, Homo sapiens
ccgagatgcagacgctgaaggatccggcagctgcacctagactgatccaagcaacggaaacgccagcggccccaccccggccctgcccggcttggcccgtcccacccccgccagggccccaa

SEQ ID NO: 391838 - DNA, 122 bp, Homo sapiens
gccacccagccttccagcgcctgcgcgccgcaccgcggtggtcgcgggcgcggacgcggacgcctgccccctaaggaagcccattggccagcggatggggccagcaccgcctcgcgccggtg

SEQ ID NO: 391839 - DNA, 122 bp, Homo sapiens
aggaagtaggagggtaagaatctttctgggtggcagaataatagatgggtctaccaagagcgatgtatatacccagtaaagccatctctaaaactgtgtttctgcattgttacagtgcatag

SEQ ID NO: 391840 - DNA, 122 bp, Homo sapiens
tctgaagagtaagcctgcagttccgggcttcacttcccggcagtgggaatttgcgaagcccgtctcctttcctgtgtcggcactgcaaggccttcaaatcggtgctctgccccttcaacacc

SEQ ID NO: 391841 - DNA, 122 bp, Homo sapiens
ctggctggctgagagctgccggggaggcgctggcgggtgccgagagcgcactgaccctgacgcggggtgcagcacggctgggaagcccccgggcctttggctaagcgcgccgggggacggca

SEQ ID NO: 391842 - DNA, 122 bp, Homo sapiens
tcagcggcgccggcaagggctgcctgcgcgcgctagccgtcaagttcaagaccacccacgcgccgcctggggacacgctggtgcacctcggcgacgtgctctccaccctctacttcatctcc

SEQ ID NO: 391843 - DNA, 122 bp, Homo sapiens
tcttaggatcacctgggtcctgttggccgacttggaggtgctgccttttcaatgacaaggcgtttgttatgtgtaaagaaaggcgttgaattggacggtctccagcttctgcccagcatgga

SEQ ID NO: 391844 - DNA, 122 bp, Homo sapiens
atttgtctttataccaatacaatcagaagctgtaattttccgtatttttatggaggaaggcgcccacaaaagcaacagtgctcggggctcacaagtcagaattcagccctgggcatccctga

SEQ ID NO: 391845 - DNA, 122 bp, Homo sapiens
ggctccgactcggacagcagcggcgtggtgtgtggcggccgcggaggcaacgggggcatgcgcggcgccgtgtcccgctcctggagcctggagagcctgcgctcggccaccgccggtaagga

SEQ ID NO: 391846 - DNA, 122 bp, Homo sapiens
ccgcgggggtgtgggggcgtccgcgggtatctgggggcgtccgcaggaggcggggccgtccgcggggttcctgtgctctctttgggcagcgttacctgatttcatcaactggctgctcccgg

SEQ ID NO: 391847 - DNA, 122 bp, Homo sapiens
ggctttctcactctggtcggcggagcctcgcagacggtgcccaggagccgaggatggagccgcagcccggcttggagacctcgggctagcagccgcagcggccagaccaggaccggcctctc

SEQ ID NO: 391848 - DNA, 122 bp, Homo sapiens
aaactcaactcattctttcccctggctacagaaagaactgcacttaatccacatggaatgcgttctctttcaatgaagaatcaagttcttgcccctaaaagtgactctcacgtcacatctcc

SEQ ID NO: 391849 - DNA, 122 bp, Homo sapiens
ggggagaaaagctgaagtacaaagggcactggctgagcctcttacaccaggtgaggccctcgttattggtagatactgagttccaggattcagtaactagccaactccatgactgctgcgct

SEQ ID NO: 391850 - DNA, 122 bp, Homo sapiens
cttgtaagcatcaaaattcataacaagtgcaaggctcggaatcacaggtccagcactggacgatgcccggcgcgccgggaagcggcgcctcagacggcggccccgcgtccccatggtccctc

SEQ ID NO: 391851 - DNA, 122 bp, Homo sapiens
tcggctgccttggtcttgtcagcctgcatgcagttactgagcgcctcctctgcctgcttgcgcgctgccttgagctccaggatctcctgctgcagccgcaggcgctctccatcgaaggccct

SEQ ID NO: 391852 - DNA, 122 bp, Homo sapiens
gagcggctgcgcttcctactgtcggatcagtcattgctgctgcttcctgagtaccatcagcgagtagaggtgggtggggcagtggttggggcaggggggctaggggacagcagtgtgtccaa

SEQ ID NO: 391853 - DNA, 122 bp, Homo sapiens
atgctgaatgggccacttgggaccggaagtgacttgctccagacaagaggtgaccaggcccggacagaaatggcctgggaagtagcagaagcagtgcagcaggaactggaagtgccttcatc

SEQ ID NO: 391854 - DNA, 122 bp, Homo sapiens
ccagccaatcaaggagccgtgtggctcgccactaacctctgccctgcagccgcgagggcgcgcgggaaatcccgagtgcatctggaatacgcagagtcagtaagaccatggctacgtcctcg

SEQ ID NO: 391855 - DNA, 122 bp, Homo sapiens
agacagagggtcagggactggaccatccagtgttgtaatcagggcaagtagaggaccctccgacagaatcctgagcctgtggtgggtgtcaggcaggagaggaagccttcagggccagggct

SEQ ID NO: 391856 - DNA, 122 bp, Homo sapiens
ggcggcggggggacaaaaagctccggcggcggggggtcaaaaagccgcggcggcggagggcgaaataatggagatggggtagaaggctggcacagcttggcattgctggagtggatgtgaca

SEQ ID NO: 391857 - DNA, 122 bp, Homo sapiens
gccactctgcgtcgcttctccaggcgacatcggctgggcgggatcccggctctccatctccgccacactcaccgaaacacgaaacacgtgtgctccggccccagccgcttccaggtcagggc

SEQ ID NO: 391858 - DNA, 122 bp, Homo sapiens
gtctggcacaccaggcatcgatctccgcaaaacgaactggaaaatgctcttccccagaagcgcagcacctgagcgtgtgacgtgcacatgtttgtgtggaaggcccgagacgccatccaacc

SEQ ID NO: 391859 - DNA, 122 bp, Homo sapiens
agggggcataagagactttggactttcctttgagacagtagaaagcgttacatccagaggcgagattctagcctggggtccccgccttcccggcctcctcttcctctccctctgactccctt

SEQ ID NO: 391860 - DNA, 122 bp, Homo sapiens
aatgggcggctcgcgccgaatggaagggattgtctgacccccgtgacgtcacaaagctggcggggagcgcgctcctcttccgcccccgccccacccccggccgcagccctctccgcctcccc

SEQ ID NO: 391861 - DNA, 122 bp, Homo sapiens
gagtttccactgcgacgtgggtttgcctgatgtgaatgcaaccctgcaaccggcggccttcggataattagaagggcctctggggacgtccaggaacggagtcacataaaggggtaaaacac

SEQ ID NO: 391862 - DNA, 122 bp, Homo sapiens
ttcgtggcggcgctgggcagggcagatttagggtgtgatcgccagatcctatcccaagtccgccttcctgacggggaggacgtctgaacccgcctgccacggaaacggcccgttcggtagcc

SEQ ID NO: 391863 - DNA, 122 bp, Homo sapiens
cttccgcttccggcggcaaaccatacttccggtttgtcgttgctataggaaccgctacggcgtttgaaagtgtccgggttgcttaggatccctacaggtagcgcctctggatacatgcgtgg

SEQ ID NO: 391864 - DNA, 122 bp, Homo sapiens
gaacctgtccaggagctggcatgacgtgcaggtctctagcgcgtaggtacctgccccaggcgcacccctgggggctgaagagaacgggcaccacacgtgccccggcatgtgggggggcgtcg

SEQ ID NO: 391865 - DNA, 122 bp, Homo sapiens
gagcccatggcggggaggggcgtctcaggcatggcgggctgtaggtcccgagccttaccccgcggggagacagctaaggcccggcgagaagtcgagaacagcagctgctggcacaggtgcta

SEQ ID NO: 391866 - DNA, 122 bp, Homo sapiens
cggggagaagaagagagactcggagaaagacagagacatacagggaaagagagacgcacacgctgagagaggtagaaatagaagcagagagaccaagataaggacaaaaagacacaagagag

SEQ ID NO: 391867 - DNA, 122 bp, Homo sapiens
ctcgggaggctgaggcagaatggcatgaacccgggaggtggagcttgcagtaagtggagacggcgccactgcactgcagctggggggacagagcgagactccatctcaaaaaaaaaaaaaaa

SEQ ID NO: 391868 - DNA, 122 bp, Homo sapiens
gagacgggcgggaccccagatttctgcctgtgggcgatggaagtgaggttcactggccagcggagccggacacagaacgcgcaaaacgccgtgtaggcctggaggagccgaagagcaggcgg

SEQ ID NO: 391869 - DNA, 122 bp, Homo sapiens
gcctgactgggcccaaatccctccttacctctccatcccgcatctccacggtcttcaccacgatgttcctcttgaggtggccttctgacacagacttggtgtccaggctggtttctgcagat

SEQ ID NO: 391870 - DNA, 122 bp, Homo sapiens
ccctctctaagtcataccggaagaggtggagacacatggcaatctttgaggtcaggcagacggagaaaagccctaggcaaggtagaatttgtgcaactgtaatctttgatagcctcacaacg

SEQ ID NO: 391871 - DNA, 122 bp, Homo sapiens
aatggaacagaataaagtgctaccttttttgggaggcaaccggttatccatttgcatacacggctgaagttgcttctcttcttgctgaagggttttgcctccacccactgtgagtgcaaaac

SEQ ID NO: 391872 - DNA, 122 bp, Homo sapiens
ccctcaacgtgtctgcagagtcttccaaacttaactgtttattaactcgcgctgcagcggcgcagaggaccccgctcccctgagctccgcgagccccaccagctgggggcgatcgcagggac

SEQ ID NO: 391873 - DNA, 122 bp, Homo sapiens
aaggaaaatccctatatcctggagaaattatcatcattcctgaattccaccctcagagatcgtgattcagtagttctggggtgggtcccaatagtttgcagcctggattattctgaagcaag

SEQ ID NO: 391874 - DNA, 122 bp, Homo sapiens
aggggttcagccgctgcagaaactccgaatctgctaacgtgaagtgccaagactgctgtccgccagcgccctcactcccccagggcctgtacctgtagcaggaggctcacgttccgagtcct

SEQ ID NO: 391875 - DNA, 122 bp, Homo sapiens
gccccatcacttttattgcttcatgatgcctgtcattagtggtgtgtttgagacgccccacggtgttcttacaacataaaacctgggtgacttgcagcgggggtggggtcgggcgcatttat

SEQ ID NO: 391876 - DNA, 122 bp, Homo sapiens
acccccttggtgtttccgctctctctcaatgcccattctttgtgggttcctggttctctgcgggttctttcctgctgaagacaattctcttcctctcccagtccccaagactggggggttaa

SEQ ID NO: 391877 - DNA, 122 bp, Homo sapiens
ctctgggactgggcctggctgcgtcaaggtggggctgacatgaagtccccttcatctgtccggggtggcccgtccttctgggagaggatccctcacaagatgacttcccaggtcgcgctccg

SEQ ID NO: 391878 - DNA, 122 bp, Homo sapiens
cctaaccccatggacatctggggacatgctacctgccttcagcaaatagaggccctcacccggtgatggcagctccgctggggcacagccactgagccttcctttgagccctccctgcagag

SEQ ID NO: 391879 - DNA, 122 bp, Homo sapiens
cggcggagccctgaattgggccaaagaggtgccctatggtgaggcctgcaggacattgggcgagagccgggtccagtgtgggcctcggggcgcggtggggtggaaagcggccggggagggga

SEQ ID NO: 391880 - DNA, 122 bp, Homo sapiens
ggggagtctaggagccccctgctaagttgctgagcgagtcggagccccaagagctagggtcgagggggtggggcagcaggcgcctctgccgaggctgcaggtaggcacttccccacccccgc

SEQ ID NO: 391881 - DNA, 122 bp, Homo sapiens
ttcctgcgaagcttaacctggcccaatatgcaagagacctgagagcttagggaccatctacgagcctccccgcagaactttctctctttcctgggatgcatcagtagagagccctcaaggga

SEQ ID NO: 391882 - DNA, 122 bp, Homo sapiens
agcacgctgcctggtggacagaaggtgttcatcagtgtttgctggactacgaggaagacccgccttgaccacagcaaagcccgacgtgccaagcagcaggacaggggtgtgatagcagggcc

SEQ ID NO: 391883 - DNA, 122 bp, Homo sapiens
cgcagtagtgcaggatgattggattacgcaaaacgagacagatgccatctgtgagccacgcgtaagctgctaagtgccaaaatgaacatccttattaaacgatggagttctcataccatttg

SEQ ID NO: 391884 - DNA, 122 bp, Homo sapiens
aattctgagctactaagtccatatagcaaaatatgtttccatttctgacacctgggatgccgcaggaattaccacttagagagataaccaaaggggctgaaagtcaacttcaaaatgccccg

SEQ ID NO: 391885 - DNA, 122 bp, Homo sapiens
aactatttaaggatccaggtgttgcaaggcggtaagttttgcagccagtgtccatgaggtcggggctgggactagattagggtagatctaagcctgggcttgggagtgcagctagcgcagaa

SEQ ID NO: 391886 - DNA, 122 bp, Homo sapiens
attgtgctgggcacatggtgcttaagtgccaggttcagccagctaaggcgtgagcagctgcgagaggggtaggcatggaagacaggaaactggacatcagaatgttctaatagaaagtgaca

SEQ ID NO: 391887 - DNA, 122 bp, Homo sapiens
aacttatttagtgctgatttacgggaatagaatggtttaaggaatttgttggagattgctcgtttaaaaaatgccttgggttcattatgatttggtaaattgtacggtattgctatatttca

SEQ ID NO: 391888 - DNA, 122 bp, Homo sapiens
aagattggagttagaatcttaggtcagtaattcgctgcctcggtaacctccatcagattccgcccccctgaggacgagtctcttcatctttatgaaggggatgtggtattggcacccctggc

SEQ ID NO: 391889 - DNA, 122 bp, Homo sapiens
gctccgaagtcctgtgtgacgcccacgtgacctcatgaggctgtgtgatgtcacagcgggcggggtggtgtgtgcccagcctggtcccacagtccatagtgagcggcagacagaggggtggc

SEQ ID NO: 391890 - DNA, 122 bp, Homo sapiens
cacggccctcctatagctcaggcctgggtgggccagagtgccccgttttcttggcttccccgtgcccaaggtgctgttccctctgccttctctggctcctgagctgaacctcagtgccttat

SEQ ID NO: 391891 - DNA, 122 bp, Homo sapiens
tttgcaggggtgagggtcggggtaaggggttcatttcctcgattattccaccaagagaaacgagaggtttgtccgccttggggaagacacggacggggcccagaccgtcccgggcgggcact

SEQ ID NO: 391892 - DNA, 122 bp, Homo sapiens
cccagccccagggaagaactccacagagcccaggtctgcatctgcaggagcgagctccctcgacaacaaccaaccatcccccaacctgcatttttttgacattttttttccccaaaacaagc

SEQ ID NO: 391893 - DNA, 122 bp, Homo sapiens
gtgtgaggcctcagccctggtggtgctctctctggaggggctgaggccctgtgtgtgagtcgagtgtctcccagctgtgaggcatgcagaaaaggtggatttgaggattttaatgcatgaag

SEQ ID NO: 391894 - DNA, 122 bp, Homo sapiens
ggcaggcgctgggcttgtcgaggccgccgggaggccggcaggaacacggacggggaaggccgccgtgaggcaagagctgggcccggggaggctgctgcgaggccactggtgggcctggagag

SEQ ID NO: 391895 - DNA, 122 bp, Homo sapiens
cccgaagctaatccctgattggatgaggcaccactcctcgtggggctgcttaggccaccgcgcgcgctgcgcgctgggaaacgagtggagacacgaggaccagcgcgagcggtcccggtggg

SEQ ID NO: 391896 - DNA, 122 bp, Homo sapiens
ggcattactctttgacaatatcaacagcagctccaagcaggttgcagagggcagggttagcgggtggacgctgatgtcactttcccacaagctgacaagtctggaacacaccaacacattaa

SEQ ID NO: 391897 - DNA, 122 bp, Homo sapiens
agtcacagcaagttcaagggttaagttaagaccagaagccatgcctactttgccttctgccggggtggtggagtgagctcagatattctgggaggggagagttggggaattccagccacatc

SEQ ID NO: 391898 - DNA, 122 bp, Homo sapiens
tgagcccaggagttcaaggctgcagtgagctgtgatcgcaccaccgcactctagcctaggcggcagagcaggacgctgtctcaaagaaacagtgtctcattacattcccgctgttcccactt

SEQ ID NO: 391899 - DNA, 122 bp, Homo sapiens
tgaacaatgaacaaccgagtaacacttattgcctcagttgaatggtttcagctccagtagcgtaggaggctctcaagagaggaggcacctcaagatgcctagcagagaaaattagaggagta

SEQ ID NO: 391900 - DNA, 122 bp, Homo sapiens
tagggctagactgtccccatctctcaggtccatcctctgaggctgagtcagtgcccctgccgagagcccagaagcttcattactgtatctggcaggtggttcggagacaggtggtggctgca

SEQ ID NO: 391901 - DNA, 122 bp, Homo sapiens
tcaatttccattatttcaatatgcatttacacatattctgatgtttattgaccaatgctccgtaaaaatccaaaggcaaatgagtgaatgatggtaagcctcgagaccacacggtggcgctg

SEQ ID NO: 391902 - DNA, 122 bp, Homo sapiens
gggtccacgccaaaacgacgggatgggctattttccagctgttctcgagtgaaataccaccgtttgttgttgttcttcctctctccctccatagtgcttcaaccagaaggcagcggcgaagg

SEQ ID NO: 391903 - DNA, 122 bp, Homo sapiens
cggagcaggcagccttcgagcaggacagtctggtcagcaaagaggctcatctcacagcgccggcctcgggcctgtccctgctgccgctgccgggccgctgctctttcgagtatccaggcacc

SEQ ID NO: 391904 - DNA, 122 bp, Homo sapiens
cgttcccctgctgagaagggaactgccaacccgtgtaaagtctggtctagtgagtgttcccgggagtgtgcaggtgttattcctgaaaataaggccggccactaccagacagagaagctgcc

SEQ ID NO: 391905 - DNA, 122 bp, Homo sapiens
ggggacctggggaggccgtggccgggtccgcccgccccgtgtgcacccggagcgcccgcgcggaccccgagccccattccccgccacgcgcctggcgctccccgcgctcctggggctcctgg

SEQ ID NO: 391906 - DNA, 122 bp, Homo sapiens
cctcgcggcgtcccaggcagatagctggttattcaggtttcgttggaagaaatacgttctcgtccccctgaaaggcccagtccagtcaggtgatggactcctccctgaaactgcacgaggtc

SEQ ID NO: 391907 - DNA, 122 bp, Homo sapiens
atatttctgttaatctccaaagtattcccaatgactagtttaaaagaaaaaaagattgatcgagtattaagaccacaggttaagcagaagaatttagagaacctgaagttgataatgggtaa

SEQ ID NO: 391908 - DNA, 122 bp, Homo sapiens
ccagcgcgggaatgttccatttgcccttttgggacattcagagaggcttttccgggctgccgcggcgcttccacgcagaggaggcgtcggcttccaggcagcttggcgatcttgttattgga

SEQ ID NO: 391909 - DNA, 122 bp, Homo sapiens
ctcagggtcagcaggaggaaaccacgcactacatgctgggagcggcgcgacggaggaccgcgttgtatgctgggacttgtagtctcgcccttagccagacccctcggaccacttaagttcgg

SEQ ID NO: 391910 - DNA, 122 bp, Homo sapiens
ccagagagcaccaggcacacacatgtggttccgcagaactagagttgttactcttcgccgcgagggaaacacgcacctggggactgtgggaattcggccctcactcttactggccgggagca

SEQ ID NO: 391911 - DNA, 122 bp, Homo sapiens
cctgcactgtgctgagtcagacatgccttgtggcatcatcaagtaacaaggttgagaaaacgtgggtgtggcaaatccatttctgagtaacagcctttttggagggaagagattggctaatc

SEQ ID NO: 391912 - DNA, 122 bp, Homo sapiens
tattggctgggtcagggggcgtggcgcggcttgaccaatcgcgggcggcgcgcttaggcacgtgtgtggacaggcctgagaatcagagaaaccttctctggggctgcaaggacctgagctca

SEQ ID NO: 391913 - DNA, 122 bp, Homo sapiens
atgaataagcgggtgcgtggtaagaacgcagaggcagccaccaggtatcgatgaccctttcggagcacgtaagcaataaaagtgaggaatgaaataaagggtaatccgagagcacagggtta

SEQ ID NO: 391914 - DNA, 122 bp, Homo sapiens
gggacaggtcctggagccctgctggactcagggtgggtggaggctgtgcctgtggacggccggggtggccaggacggccaagggctgggaggcacgtcccccagcccagcccccatgtacac

SEQ ID NO: 391915 - DNA, 122 bp, Homo sapiens
cagacgtgttggtgggcgcctgtagtcccaactactcgggagcctgaggcaggagaatcgcgtgaacccgggaggcgaaagttacagtgagctgagatcatgccactgctctccagcccatg

SEQ ID NO: 391916 - DNA, 122 bp, Homo sapiens
gtaacttttgtaaacccaaaagaatatttcttattcccagggcaagcatggattattaaacgcatcttcaccttttttactagaagataaacctgagtataaatctttttctacctcttatt

SEQ ID NO: 391917 - DNA, 122 bp, Homo sapiens
cctgaggaggaaaaataagtttaaacctttctgtgaaaaagaacgtggagccctttctgccgaatggaaacccgctaaaccccgttatggagtctgctacaattaagcatctaaccaggaat

SEQ ID NO: 391918 - DNA, 122 bp, Homo sapiens
gagatgaccgtggcctcaacagggccaatcgggggactcgagcccgacaacagggcaagccgccaacagcgatcaatcagaggggaggagcggctcccagatacccaatcagcggccttcag

SEQ ID NO: 391919 - DNA, 122 bp, Homo sapiens
tcaaggtctgtgttagagaaggtcatttgggaggctgctttcgtcttaatacctgcttctcgggaaaagatctttacgctaaaaataattaaaaccataaagcatgtaactcccgacgacag

SEQ ID NO: 391920 - DNA, 122 bp, Homo sapiens
acccagaacccacggtgagcacccggcaggaagtggccacagcaccatcactggaggccacgcggagtctgaggacagcagctttcccccctatgctgttgtggggactccaggctcagcct

SEQ ID NO: 391921 - DNA, 122 bp, Homo sapiens
acttcaatttctcacaacagtcctttcttttactgaattagttgtccctcctctgggtttcgaaatcatcctctgcatattaccttcaaagaaggaatcacactgttctctgtttgtttata

SEQ ID NO: 391922 - DNA, 122 bp, Homo sapiens
taggagctggcaacatgctggagacataatgacagtaaaaccatcatcaaacctcaaaggcgatatttactaagctcttagtgcctgcaagacccttctttgtacctcagtctatttaatcc

SEQ ID NO: 391923 - DNA, 122 bp, Homo sapiens
catcctgttgggacttgattcgttcctcaaattttcaatttaccgtaaacaaaggggacgcgcgctgacccggaagtgaaagctggaacccggccggagtagctctgagcgccggctgtgag

SEQ ID NO: 391924 - DNA, 122 bp, Homo sapiens
gcgacatgcgagtgctggagaggaaccctggacgccaccatttcacatggaagaggcaggcgacatgcaagtgctgaggaggaacccttgacgccactatttcacatggaagaggcaggcga

SEQ ID NO: 391925 - DNA, 122 bp, Homo sapiens
gcacacgccgccaagccggtcaaccgcagacaaatctgactcttcgccaactagtagccacggagagcagcaaagggaccaaggtccttcaccgcctgctccaaaaagacacggcaacctcc

SEQ ID NO: 391926 - DNA, 122 bp, Homo sapiens
gcgcatcggcgccccggctgcttctgctctttctggttccgctgctgtgggccccggctgcggtccgggccggcccagatgaagaccttagccaccggaacaaagaaccgccggcgccggcc

SEQ ID NO: 391927 - DNA, 122 bp, Homo sapiens
caccacctgattgggcatcctgcccctcccctgccagctcctgccccatcgctctccctccgggaggccagactctggacctgtgtaacaattaactgagggagtccctcctccctgcaccc

SEQ ID NO: 391928 - DNA, 122 bp, Homo sapiens
gggccttttaaaatagcacatgctttgaattcttggtagtcagcagtttcacatagtctacgtagtactgctggacagggcctaagtcatgcatgtaactggtttagtcagactgaaatgtg

SEQ ID NO: 391929 - DNA, 122 bp, Homo sapiens
cacttcccgtctcagaatctaaacgtggtcaccttcgagtagagaggcccgcccgcccaccgtggacagtgccacccgcagatgacacgcgctctccaccacccaacccaaaccatgagaat

SEQ ID NO: 391930 - DNA, 122 bp, Homo sapiens
gacacgcgcggcagaagctgtgctcgcacgccagaagcaccgggtcctcgaaggagcccccgcacagaggacacgtcgccagctgctccagacgctccaccagccccgggcccagctcgggc

SEQ ID NO: 391931 - DNA, 122 bp, Homo sapiens
gaggcaggagaatcgcttgaaccccggaggtggaggttgcattaagctcgcaccattgcacgccagcctgggtaacagagcgagactccgtctcaaaaaaaaaaaaaacaaaaagtttactt

SEQ ID NO: 391932 - DNA, 122 bp, Homo sapiens
ggctccggcatgggcgcaaaaacaccagtgcggaggagttctcgggaccccccggggctgcggggccttgcggggacagccccaggcccggagctgcagaaacacccagaccccgcgcctcc

SEQ ID NO: 391933 - DNA, 122 bp, Homo sapiens
cttaggtccattcttttctaaatagagacccagaaaggttaaataatttgccaaagtcatcgggtagagtggttatataatttaccatgtaaacttgcataaccttcaaaggccgggtgcgg

SEQ ID NO: 391934 - DNA, 122 bp, Homo sapiens
gagaaaaaatggctggatgtcagggagaggtgacttgacttcagagaagcagctggacatcgaagagtcaacttgacttctgaggagagaagtagaaagtcaacttgacttcaggggagagt

SEQ ID NO: 391935 - DNA, 122 bp, Homo sapiens
ggaagtgaggcctctgtgtgtgtgtgtgtgcatgtgtgagtgcgtgtgcaccttcgatcgcggtttccagcagaaatccttgcaaagaagacagtagtgctgtgtgctgcacggatggcatg

SEQ ID NO: 391936 - DNA, 122 bp, Homo sapiens
gagaatcgatcggagatgatcctatgtggctatggcccaggctccgcctctcgcgaaatgcgacaaaaaagcatcattttcagtatttggtctggaggccttgcctgctggtcttcggagag

SEQ ID NO: 391937 - DNA, 122 bp, Homo sapiens
ggtctttcggggctcccggcgacccgcggtgccgacgcaacgccgacgtatggtgccaagcgaactttaaaaagctgcttcggacaaaccagagccaggatttccactgtcggggacccggg

SEQ ID NO: 391938 - DNA, 122 bp, Homo sapiens
ttgatgatgatgaagggcaggtggatgaccgagttggctggcggcggctggctggcctgccgctccgcgtgccggtttctctgcaccaggttcttgaaggcaatttgctgtagaataagttt

SEQ ID NO: 391939 - DNA, 122 bp, Homo sapiens
agccggtgcaggacctcaacatcgtgctcaaggtggagtcctgatggggctggccagaagcgggcgaggaaaaggggccgggttttgttttgttttgttttgttttttagtcttagtaaagc

SEQ ID NO: 391940 - DNA, 122 bp, Homo sapiens
cacacggcaccgcctcctcagggaagctgttcctccccacaccccggtggatggctgtcccgtacccccagtctgccccatggccaaggcaccacccctactggctcactggggtcctggca

SEQ ID NO: 391941 - DNA, 122 bp, Homo sapiens
acagtttgatggagatgcggcccaagggcttgccgtcgacggtgatgtcaaaaaagacgacggagttgaccatggctgatagtacagggctcacagtgatggtggcatctgcaaagataacc

SEQ ID NO: 391942 - DNA, 122 bp, Homo sapiens
attgtttgtgtggcaagagagaacacaaaagtgattgctttttctgccttttccctgctacggagtaaggatacttttgctggaacagattcaagaaatgcaggggaaaaacgaagccttaa

SEQ ID NO: 391943 - DNA, 122 bp, Homo sapiens
tggttttaaagttaccaggagaactgcgggtgaggtcaggttcagaaatgggactgatttcggaggcccttagtactgacatcactcaaattgctcaacagagacctccaagtggagcagtg

SEQ ID NO: 391944 - DNA, 122 bp, Homo sapiens
gggaaaggaagcagtgttgttctggaccagtagttctgacaggcaaggatatcctgaccacgccaccacattcacacttcagaggtgctgcaccgggaagatcattctcatctgacagatga

SEQ ID NO: 391945 - DNA, 122 bp, Homo sapiens
gagcgcttccagtcgggttacttctgggggacaagaaaggcaccgtctgaacggtcgagacgctttttcccgctacggttttccccggagctgacaggggcagcaaggtcggagttgatccg

SEQ ID NO: 391946 - DNA, 122 bp, Homo sapiens
catgagggggcggggaggggcggggccgcgccgcttggggctgaggttcgggaggtaacccgggcttcagacccccacggacacaccgctctaatccctagccagtgagcgagtgcgtgaga

SEQ ID NO: 391947 - DNA, 122 bp, Homo sapiens
agtggcacgtcttcgggtgagtgtgcggctgtgctggagcccgggttaccagctcttgcccgcgcggaataggctttaagaaatcggagctgcagccatctgtttttctcttaatgctgcat

SEQ ID NO: 391948 - DNA, 122 bp, Homo sapiens
ggcggctccgagaagaacatgaatcagcggcggcgacggcggcgacggcagtggaaggagcgcggtggcgcgggagcggccccggggaccccgcgctgctgacggcggcgaccgcggccgga

SEQ ID NO: 391949 - DNA, 122 bp, Homo sapiens
aaagtgaacatataaaattatacgattgtataaaggatatcgtccctctaaagaacttttcgctgagctcatattcggatgacatgaacattaaacatacatatatatatatatttaaaatt

SEQ ID NO: 391950 - DNA, 122 bp, Homo sapiens
gatcttatgttaacagtcataaatggtaaccagcgagttagcttggaggtgcgtggagatcgcccctcgcagctactctcagcctttttctttggagttggcagctaaaacctacatggccg

SEQ ID NO: 391951 - DNA, 122 bp, Homo sapiens
gcaagatcgacgaaccacacctcttcccgccggataattcacctttgccaatcgcaatctcgttaaattccatgatccagactcagcagttgtcgcaccatgtctgacaaacactgtattcc

SEQ ID NO: 391952 - DNA, 122 bp, Homo sapiens
tatattttgtttaataggaaatatataataatagcattttatgtaataaaatatgggcaacgattatcttggaaattaaagagtcaaagcaaagaaatgaagggctggtaaaatgaattttg

SEQ ID NO: 391953 - DNA, 122 bp, Homo sapiens
gcctcctttttctacctccagccctaacctctgaccctactgtctgtgattggaaagaaacgaaacagtggtactgggaagagctgttcccgacctaaaccttgcacacaaatggtgtcagc

SEQ ID NO: 391954 - DNA, 122 bp, Homo sapiens
agtgaccctctccttacctgtcatggctgagacatccaagagagagagccctgttgccagcgcagcaaaggcatcaaactgcctattccagctgcaagtggagaggacacagctgcttgccg

SEQ ID NO: 391955 - DNA, 122 bp, Homo sapiens
gcaggcggcgcgagagggggctgcagttgggcgcggcaagagcaattaccagtgttagggcgccgggctcccccctgcagcagagggagggagtggagccgtccggcggggtttagcgcggg

SEQ ID NO: 391956 - DNA, 122 bp, Homo sapiens
atgccaagaacaattactgcatgctcactatgcattaggcatcttgctaagctctttacccgtgtcatctcgtttgtctcacatactccctgaaaggtagggtcactaacctattatatttt

SEQ ID NO: 391957 - DNA, 122 bp, Homo sapiens
gggggtgtgggggaagggaaactcccatccgaagggacaacatatacaaagctgcagaagcgtgacatatttgggcgatcccaaacactggggaaagagctgtggtcattaagtctggacag

SEQ ID NO: 391958 - DNA, 122 bp, Homo sapiens
ttaacagctgtaacactcactgtgaaggtctgcagcttcactcctgagccagcgagaccacgaacgcaccagaaggaagaaactccaaacatatccaaacgtcagaaggaacaaaccagacg

SEQ ID NO: 391959 - DNA, 122 bp, Homo sapiens
cctggtgccaagtggcttttgggagacatggatggacacctgatacctggcagtctgcatcgagacattgatttttttttttttgagatggggccccactctgtcgccaggctggagtgcag

SEQ ID NO: 391960 - DNA, 122 bp, Homo sapiens
tcgagaggacatcaagagcacgtcaagagcacgtcaagagcacacggacaggcactggcacgccggcaggtcattgaccggcagaacagagtttggccagggctgtcagagaagagtcgggc

SEQ ID NO: 391961 - DNA, 122 bp, Homo sapiens
gcacccctggaggaaattctcgaggtgacctggacagggcgggctgggcgaggacgctcccggggcctggaggcggagtcgggggcgggcgcgcgcagtcatctgactcggtgactcacccg

SEQ ID NO: 391962 - DNA, 122 bp, Homo sapiens
ctctgccccttcttcctcctccccaccccttttctttatgtcatactgccggctggggcgcgcagtccagttcttcttgccttgggtttgttctgagctgagaggactatgggaagtagggg

SEQ ID NO: 391963 - DNA, 122 bp, Homo sapiens
cccgggtagagtggaaccccttaagctaagcgaacaggagcctaacaaagcaaatttttccgtctgccctttccccctcttctcgttggcagggttgatcctcattactgtttgctcaaacg

SEQ ID NO: 391964 - DNA, 122 bp, Homo sapiens
aacccccggggccctcacgtgacctcgggaaccaatgagaggaagagaggaaaatgggaacgtttgcagtcagccctaagccccgaccagaggcagttccagccgccagggtccctcacaca

SEQ ID NO: 391965 - DNA, 122 bp, Homo sapiens
gggaaggagggcggtgtcggcaggagccaggggtgtcctctggcttcccaaagctagggccgttccctccttccgcactcggctcccagacctggggaagagaagctgagggtggcggagcc

SEQ ID NO: 391966 - DNA, 122 bp, Homo sapiens
aagcgagccacagagggctggctgctccccggggcttttataggccattggtaacccccgcggctcattccttctctatatttggcaagaggatgagtggcccccccaagccgagaaccagc

SEQ ID NO: 391967 - DNA, 122 bp, Homo sapiens
gggctccgtagtgtgggaggaggatctcagtcatagagaagtcctccagctcagaggctacgcagctccaggaacaagagaccaggggagtgcagggtcagctgtctttgatcatgactctg

SEQ ID NO: 391968 - DNA, 122 bp, Homo sapiens
ccccaacatccaaatgacccatccagttccaaatgacccatccagttccaaatgacccagcggctgagcccgctgaacctgctgagccctcaagggccagctgctgtccctggtgctgaaac

SEQ ID NO: 391969 - DNA, 122 bp, Homo sapiens
tcgaagtcggaggctgattttgtcttgctcagtcgctccgccggagctgagccgctggaacgacccaaacctacctgaaagcgcgtctctgcagtcccgctggacttctccggctcgaactc

SEQ ID NO: 391970 - DNA, 122 bp, Homo sapiens
cacgcgcgtctgatcgcagtctggctccccgagtcatgagttcccgcccctcccccgtcccgccccgggcagctgcgcaccctgggcctgacactccctggccctgcctccacccaggaccc

SEQ ID NO: 391971 - DNA, 122 bp, Homo sapiens
ctcaggggctgctgggcacaggctggagtttgtccacagagatggcattatgagcagggtcggtctctcaggctggcccacaaaacccacaaaacccacagaacccgcaggcctctccgcgc

SEQ ID NO: 391972 - DNA, 122 bp, Homo sapiens
tcccaccttggcctcccaggtagctgagaccacaggcacaagccaccatatctggccctacgtaagctttatgtgggtgcaataacagatctcaaaccagctctcagctcaagagaagggga

SEQ ID NO: 391973 - DNA, 122 bp, Homo sapiens
tggcggccctcactgaggggtacagctctccagcgggccctcatctgccctccaaacccacgtgcctccccagtggaaggccagcaaaaccacgctggaagagttggggtaggaaagcagaa

SEQ ID NO: 391974 - DNA, 122 bp, Homo sapiens
gcaatgcctgggtacatggtgctccctccagataacacggtgttggcatagagatccttgcgaatatccacatcgcacttcatgatagagttgaaggttgtctcatggatcccactggactc

SEQ ID NO: 391975 - DNA, 122 bp, Homo sapiens
gggaggtttgtccaggaggacgctggtcacaccgcgtttctgaagctttcgattcctcttcggctctgctctctgcagccgccctgccttccctctgcgcgtctgagccgagtccccggcgc

SEQ ID NO: 391976 - DNA, 122 bp, Homo sapiens
tctatttgagcatttttatctggcctgttgcctctttctccccacttttgtctagctcaacgcagtcacatgatgctgacgaaggttagccttagaagttagggtagcctgctgagtttcag

SEQ ID NO: 391977 - DNA, 122 bp, Homo sapiens
tctgtgtcaattaaagagcctggccagctggacctgggctgtctttttgacaaaaacaaacgtcatccccctcccagctgagcacttgttagaactggactttaactgagggcctgaacccc

SEQ ID NO: 391978 - DNA, 122 bp, Homo sapiens
gcgggcggtcctgctgcggataagtgcggtggcctacgcgccgaggtttgcaggctactgcgtcaccctgaccaagagaggccggggaacctttcccgtttgcgccaacgcttggttaattc

SEQ ID NO: 391979 - DNA, 122 bp, Homo sapiens
gcttttctcttttttttcactttaaagccgtcggttgctttttctcctccgcacagaagtcgcgctcgggcagcctgcgcgctcgcagcaggaaccaggctccaggcgccggcgccggggcc

SEQ ID NO: 391980 - DNA, 122 bp, Homo sapiens
cctgctgggaaggagggagttggggcaagatgtctcgggcttctttttcttttcaggagccgggaagaggctggaaaggagagttccagcaccccgactgtaagatccacgcccaggggaag

SEQ ID NO: 391981 - DNA, 122 bp, Homo sapiens
agagggcacatttgatccattgagaaactcaagtcaagtgctttaaaaatagaaataatccgggtttctcagaaaaaaatgatcactgagtataggcctggctagaggagatgagatctcaa

SEQ ID NO: 391982 - DNA, 122 bp, Homo sapiens
gccacacaaggactgactgctagtaggttgtggagccagccccaatccagaacggcaggacgaaccccaagttcttcctgcttcaccccacaccgcctcctccagcactgtttcacccctat

SEQ ID NO: 391983 - DNA, 122 bp, Homo sapiens
cgcttgcagaactcgccccgcctccgccccacccatcgtgtgacgtcaccatatcggtcccgcccctctacttcgcgttgctcccgggactgtcaaccgcgtccggaagccccgccttttcg

SEQ ID NO: 391984 - DNA, 122 bp, Homo sapiens
tttgtgtaatatcgcgatccttctctggtgttccttgttttagctgacgacactcgagagcgccaattttcctagattcgattttgtggtttggaactgtggttttggaatccagagtagtc

SEQ ID NO: 391985 - DNA, 122 bp, Homo sapiens
gagccggaggttacctcgggctggccgggccccagccggggctttgggagtcagaggagccggaagaatgcatggccggcggcggggccggcggaagaaggcggtggcggggccctgccccg

SEQ ID NO: 391986 - DNA, 122 bp, Homo sapiens
ttcaggtgatccgcccgcctcggcctcccaaagtgctggaatcgcagacgtgagtcaccgcgcccggtctgaaaattatcttttaataggggttagctgcatgagttaaaatctcattgcca

SEQ ID NO: 391987 - DNA, 122 bp, Homo sapiens
ttcctggagtcccctcagataaacctcctgtgcccaagaccttgtcagggtctgcatttacgggaacccaactaaaattccaggaccaccatataaaggtccctttgtcgggggctgggcct

SEQ ID NO: 391988 - DNA, 122 bp, Homo sapiens
agtgagtaaggaagggtggctattgtttagtgctctctagcaaaagaatgggattgggggcggggttggggcgaggattgagtttaactggcattggctctggcttttctgcattccaaact

SEQ ID NO: 391989 - DNA, 122 bp, Homo sapiens
ctcctcatcgaggcccacctggtggtctctgctccacctgtttgctgcagggagcagggtcgggagcatgtgcatttcggagagctctggttgctccgtcatagaagccatgctccacatcc

SEQ ID NO: 391990 - DNA, 122 bp, Homo sapiens
tggtccctcctcctgcagccccgaggaggcagggctgtctgtggatcccagatcggttgtcggaaggcccggaagaggagagctgccctccaccaccactgtctcctcctcctggacaacag

SEQ ID NO: 391991 - DNA, 122 bp, Homo sapiens
tcccagcacttttctccatgctgtgtggttactattgtcttttgaaacttcaaaacctatcggaatgtaggccactaggtcagggcgtcatggaaacccttgtgtgcagggagcagcagaca

SEQ ID NO: 391992 - DNA, 122 bp, Homo sapiens
cactttcacaacgagtactatcctgactgcccagatcaaaattgcaacctgaccctcatccgttataccccgctgtgcttttttcatagcatgtatttagtatatcatatagttttcggatt

SEQ ID NO: 391993 - DNA, 122 bp, Homo sapiens
aacatgctcttgctagcaaagattctctgagcctcttgacagccagaaatgatccttccacggagattcttccattgggtttcaaaggactgaagcttaaactcgggattttttttttcagg

SEQ ID NO: 391994 - DNA, 122 bp, Homo sapiens
gtccccggctgggctggggcttgctggctttgcaggagcactggcaggatctgaggaaagcgttcctcacagatgtctccttcagaggctggtggattccttaacagctaattagtgagaag

SEQ ID NO: 391995 - DNA, 122 bp, Homo sapiens
taatgtcgacgtcttctttcgggctcgatcaaacaatcaggagatctgtgtaggccacagcgtcattgcacgccggggtccttgcccgctccctctctctgccaccgctcaaagcctgggag

SEQ ID NO: 391996 - DNA, 122 bp, Homo sapiens
ctccagatggtgagcctggaggaagactcgtgttgggcccacaggccccaggccagtgtacgtcagccaggtgctcagcccatggtgtgctgaagctctgacccttcctgactccgtggtct

SEQ ID NO: 391997 - DNA, 122 bp, Homo sapiens
agctgaacaggcaaggctgtatgtttggagaagctgggaccctatccgctgcactcagagcggggaccatccgccaagggagacagggaagggtctgtgccacctgctggagggagggcaga

SEQ ID NO: 391998 - DNA, 122 bp, Homo sapiens
attcctccctcctcctcccgtcccaacgccagagcggaggtggggagggggcaagatgggcgaggcagagatgctctcccagccgccggttcttccagcgccgcgcacctgccgccccttcc

SEQ ID NO: 391999 - DNA, 122 bp, Homo sapiens
gccgggtgccctggagcctgacaggctggggccagggcaggggacctggtgtggggtctccggagagggtccaggcgtgagggaagctgggtcaggacctcggagacgtggcctttggagga

SEQ ID NO: 392000 - DNA, 122 bp, Homo sapiens
tgataccttgtatgacttgattatgagtcagagcatctggacagactgtctgataggctgcgctgagcagaatgcatccgtctgggtcaggagtcagtgctttgctcactgaaccacctccc

SEQ ID NO: 392001 - DNA, 122 bp, Homo sapiens
acgtcagccatactattttatagtcacatcacgtacgccagcttttatccatgctgcatccgccgcccgatcacaacttgaaaatggagtctgaattcttatccatgctgcatccgccgccc

SEQ ID NO: 392002 - DNA, 122 bp, Homo sapiens
tgccttccttggagcttctccgctggccggcacagcccccactccctgtgcccccacccccgcgcactcagctgtgtacactaccctggaccatggaaaagagggatgaaagaggaggaagg

SEQ ID NO: 392003 - DNA, 122 bp, Homo sapiens
cggtgtctgctcccaacccccagcaccccagtttttctggttttgggggcaagccagggccggaagcgccccggtggcggagcccgcagcctggctgagggctggcgtcctccaggctcagg

SEQ ID NO: 392004 - DNA, 122 bp, Homo sapiens
ctgctgccgtccagcgcctgggccggcggccacccgagaccccggcctccccgggcccggcgccctggcagcacaagcgcctgcccaggccaggccgaaacacacccaccgcagggaccccg

SEQ ID NO: 392005 - DNA, 122 bp, Homo sapiens
gggggcagcagccaagtttacttcatgactctgaaccgtaactgcatcatgaactggtgacggggccctgggctggggctgtcccacactggacccagctctccccctgcagccaggcttcc

SEQ ID NO: 392006 - DNA, 122 bp, Homo sapiens
ggacaagccccagagtttagtgtgtccagtatccagcatggagacagcacatgcattgtgcgagaggagcacaagggcccaggggctgcatggtgggggtgggcaaggctgtcagtgcacgt

SEQ ID NO: 392007 - DNA, 122 bp, Homo sapiens
gcaagaactgtatttctgtattttacctgttgtatttatattcacaccttctgcctccatcgtatgttaaatatgtaattagaattaaaattgagtcacgctgtgctaacagtttgatgggt

SEQ ID NO: 392008 - DNA, 122 bp, Homo sapiens
tccaaatcttagcttctccaggatggcgacggctgccacttggagagtgcctaccattgtcggaacccctgctggaggcttcagtaggggcgctccctgggtatccatcagacaactctgtg

SEQ ID NO: 392009 - DNA, 122 bp, Homo sapiens
ccggcggccgccaccgtccaggaacagaaagccgaggggttactaaggcaaccaggagcccgacggcccgagtgcgcctgcgcggccgccacccggtggctgacgaagcagggccttgcgtg

SEQ ID NO: 392010 - DNA, 122 bp, Homo sapiens
gtttttttttttttttttttttaacagctgttgagctattgctcttctgtgataaaatcccgtagaagatttaacctgctatggatttctgggaggtcacagggctaagtaaactcggaatt

SEQ ID NO: 392011 - DNA, 122 bp, Homo sapiens
cacaacacgtaggtgaaagcacaggcaccatgcggaggccccgagcaccccttagtggggcggggtggggggaggaagtcagtccataatgttgtagttacggatcttggggggcctctggc

SEQ ID NO: 392012 - DNA, 122 bp, Homo sapiens
tctttaggcccaaagcagagccctgtggcgctaaagtgtgcctgagtgagcctgtaggttcgaactcgagcaccaggtaggggaggcctgggctgagggcagagcctggatcagtcacccag

SEQ ID NO: 392013 - DNA, 122 bp, Homo sapiens
tccgttggagactggcccaacgctgcattccctgagatcaaaacttggacacagatggtgcgggttccccaccagggctgctgaggcacctccggtggagactggccggacactgcattccc

SEQ ID NO: 392014 - DNA, 122 bp, Homo sapiens
atgggataaagtgccagatgctgggaagctgcgggacggggtgggggtgtcgggggcgctcggatcctagtccaatgcctaaaggacaggccacttcgtacccactttgtggcacgctgagc

SEQ ID NO: 392015 - DNA, 122 bp, Homo sapiens
cagagcattgattcaaaattgttcctccttccagaaccaactgccgaagggtgtgaggagcgggggtgggggtaattctctctcaccactcccttcacttttacttcaattctgtaggatct

SEQ ID NO: 392016 - DNA, 122 bp, Homo sapiens
ctcgcgggccaatgggtggcagcctctctgcataggcaacgagtgccggccgggggtgagcgtcccaggcggttccgctcaacagacgctgctgtggctgcgccgggctgcgacactgcagt

SEQ ID NO: 392017 - DNA, 122 bp, Homo sapiens
cgcctgtggcgtcgtgtttgctgagggcccggctgccgttgactgaggctgcgatggcggcggcaggccggggtcgggagcaggactcggcgcgcttcgtctatgtgacgcgcttcggctcg

SEQ ID NO: 392018 - DNA, 122 bp, Homo sapiens
ttatataccattgctcatttcaccttccaaaaaccgaatgtccatggctgttgaagactgcgaatgggatttatagtaaaatctcacttgttgagacccagttggaagaaagcctttcttag

SEQ ID NO: 392019 - DNA, 122 bp, Homo sapiens
actgcagcctccctgcctgattctcctcactcctgcccagtgcctgcgattgcaggcacgcgccgccaggcctgactggttttcgtatatttttggtggagacggggtttcgctgtgttggc

SEQ ID NO: 392020 - DNA, 122 bp, Homo sapiens
ttttccccttgctccgcgcacaagcagttcaacgtaaggaaaggtctaggcggtcacccgcggagatgcggctctgtgacatgaccctgggaacagagttgggtttctttacgctctgtgtg

SEQ ID NO: 392021 - DNA, 122 bp, Homo sapiens
gcttccaaccctggcagcacgttagagtcacttgtgggactttaaagaaagattttttgacgtgatcttggttacctggctgtgtgtgtctctcaagtcagaactgaacactagatgcaata

SEQ ID NO: 392022 - DNA, 122 bp, Homo sapiens
caaggccaggcagcaggggcccggggaccccatggcggcccctctcagcccacaggcccccggggcctgggctccttcgaatatcaagacactacagaccgtgagtatggccaggctgctca

SEQ ID NO: 392023 - DNA, 122 bp, Homo sapiens
ctcggaatgcttcccggaggatgcgaggggcgggcgctgcggggaagacggtgctactcccgcgcgggaccgcgtgatgtttccgagtcagcggtgaaacctgcggcttccgcgcgtccttt

SEQ ID NO: 392024 - DNA, 122 bp, Homo sapiens
ctcgggctccggggcgcggggactccagggcgcaggactctgggtttcggtagcgctgggcgcgtaggctccgagcgctcgggggacgcgggacgtagggatcccggatgccggcaggaaga

SEQ ID NO: 392025 - DNA, 122 bp, Homo sapiens
tcgcgccctactaccccttgacctgtgttcacctctttaaactgctactggtggcaacagcgccacaaacagctataaattaacctaatgacgccacaatggacactatacccacactcaat

SEQ ID NO: 392026 - DNA, 122 bp, Homo sapiens
ccatcactgctgtctagttccagaatattttcgttactcacaaaagaaaccccatgcccacgagtgctcactcctgatttctccctcccccacctcctggcaaccaccaatttgctttctgt

SEQ ID NO: 392027 - DNA, 122 bp, Homo sapiens
caggccgccgggggtcgctgcccatcaccctcgggcccgacccgggtagcgccgcgtctgcgccgcagctgcctatggcgcgacggaaaagtcccaccctcgggtcctagtggccctaggac

SEQ ID NO: 392028 - DNA, 122 bp, Homo sapiens
gtaatcacctcaaacgtgcagcctttttccctgccaaagtattaggaataacaatgcagccgcacctggcatgcctgctgccagaccttgtccaaatgcaagggcagaattcactgctgcag

SEQ ID NO: 392029 - DNA, 122 bp, Homo sapiens
gcatgagggcaggtagggagagaggctgcggcctggcctgcggcctcaccccgccctccccggcaggactaccgcaaccccctgatggagatggagcccaaggcgctgagcgcccgcaagtg

SEQ ID NO: 392030 - DNA, 122 bp, Homo sapiens
gagctgggcggcctggggcagccggatcctaccactcctcatttctgctctgggctggaccggcttcccttttcttctgttgttttaaacggttggtgttgggatagaaaggcccatgggtc

SEQ ID NO: 392031 - DNA, 122 bp, Homo sapiens
agtccacctgactaccgaatagcacagcgtgggggggcccaccttggcctgctgagaacacggccctgagcctgcggtgggcagaagcatcaacacgaagcctgttttgtagtcaagtgtcg

SEQ ID NO: 392032 - DNA, 122 bp, Homo sapiens
accgcggcccttcttggggcccactccaaggctactggatcaggacccccagtctggggccgggcattttcaaattaatcagcaggctctaggtggtggctcatgcctgtaatcccagcgct

SEQ ID NO: 392033 - DNA, 122 bp, Homo sapiens
gctcccctaggtcccggaagaaagccggcccctgctccgcgcggccagcgacactcagagcgagattgtttgggcctgggaggaggcaggcagcgaacccaacttgtacagtggggtcttgt

SEQ ID NO: 392034 - DNA, 122 bp, Homo sapiens
tccgtgcctgagcccttggcagcaggcggtccctggcgttctgcggggccatggtggacacgccaggagatctgcaccccgtgggcggtcccagcccacacatggggaagccgagaggacgg

SEQ ID NO: 392035 - DNA, 122 bp, Homo sapiens
ggacctggcgtccagtcattgtgcgctgggaaggcggtgatggcgacggaatttgggacacgcggggcgtcccgggggcagccagggcactgcaggccggagccccctgttcccccgcatcc

SEQ ID NO: 392036 - DNA, 122 bp, Homo sapiens
caagtgtttcttggtctcctcgttaacatgcatgccacccaccccagaacgagtggcctccggtgtcatgcccgtctgcattctgtgacctaatacatgcattttcccatggaaaaatccac

SEQ ID NO: 392037 - DNA, 122 bp, Homo sapiens
ggggaggggaggggagggtccgccctggggacccctcagatcatcttcatgttgaacttgcgcgcgcctccctggcccgccgcggcggccggcccatccaccttgcggaaggagtactccac

SEQ ID NO: 392038 - DNA, 122 bp, Homo sapiens
gcgggggtgctgggagagccccggctgccgctggcatcccacccccactgctcagctcctcggccaggttggggcagggaaactgcccgcctccagttgccatggagactgggctgtcagga

SEQ ID NO: 392039 - DNA, 122 bp, Homo sapiens
cgaggctgaggtgggaggattgcttgaaccagggaggcagaggctgcagtaagccatgaccgcaccactgcactccagtatgggagtcgtctcactccagagtgagaccctgtctcaaaaaa

SEQ ID NO: 392040 - DNA, 122 bp, Homo sapiens
agaaaataccttttggagggttagaagatcaggggacatggttgttcacatttgctgccacggaacaccgccagtcttcacttggaaacagaatcacgccttgtgaagagatcatccctaag

SEQ ID NO: 392041 - DNA, 122 bp, Homo sapiens
gcaagttcatgagagtccgggcattctgcttgatctcccgggcatccacaaagaccttggcgaagccgatgccgtagcggatgtcggcagagcagccaccccacttccagccctcgtcccgg

SEQ ID NO: 392042 - DNA, 122 bp, Homo sapiens
gccccgcgccgggccggtgaagtctggtgctgccgagcccgcttagaaagcacggccgcgcgctgtcggacgcaggcccacaggcccagccgacccaggcagcaattttcctagccccgccg

SEQ ID NO: 392043 - DNA, 122 bp, Homo sapiens
taagagtccccatgtgcctgtagtacaaacagctgtccaacatctgccaagagttaagaacgaacacattgaggaaacttgcttttgttcatgaacaacaaacctttcatgacagtcagttt

SEQ ID NO: 392044 - DNA, 122 bp, Homo sapiens
aaggtgggcgggactaagtcgccttagtccgtgacgtgcggtgtagttggggaaacgcaccgtggttccccgtcgggtcaggagatcccgagccccaggctggcgtgggcgaagcgtacaat

SEQ ID NO: 392045 - DNA, 122 bp, Homo sapiens
aggtcattacgcgagcaatgatcttaatttccaggcggaaaacgagtcccgggacctcgccgattggggaagcagtgaataaagtcacctgcttcaggcacccgcttggcccgctcctcccg

SEQ ID NO: 392046 - DNA, 122 bp, Homo sapiens
ctcaagtgatctgcctgcctcagcctcccaaagtgctgggattgcaggtgtgagccactgcgtccagccattgagactgatttgatgcaagtaatgagcttagagaaactgcaggcctggtg

SEQ ID NO: 392047 - DNA, 122 bp, Homo sapiens
gtcgcccgtccctggcttctctgacagccgtgttccatccccgccctgtgccccttctcccggacagtgccttctccagggctcacccaggagggtgcagcggtggcccccggggcggtggt

SEQ ID NO: 392048 - DNA, 122 bp, Homo sapiens
gcataagggttgggagaaatcaggtgtcctcaataataggctccgtgtggaagccgcttccggtttttaagtttaacgcccaaattcatagaaatgggactattgtggggctcggggactaa

SEQ ID NO: 392049 - DNA, 122 bp, Homo sapiens
atcacagggcacgccagggtcagaggggctgcaacccttggacacagggcacacaccacccgccccatacccgtcctgggcaaggccgttacctagtcctggggcatgcacagctattggag

SEQ ID NO: 392050 - DNA, 122 bp, Homo sapiens
ctctgcgcggctggtttcccggcggccgcgcgtcaatcactacgagcccggagttgggggcggagccacggtcaccccgcgcaagccttgccgcccagcagcccccatgcccctcggcccct

SEQ ID NO: 392051 - DNA, 122 bp, Homo sapiens
ccaccccagcctcagagggagctgctggcactgtcccctcttgagcagcagcgcttttcccggactctagggaagtagccattaagaggcccaagaaacaatggctccctccatgcaggccc

SEQ ID NO: 392052 - DNA, 122 bp, Homo sapiens
tgagtttcagagttaggggtattgcagtgggggtcctgggctgaggctggggcccaattccgagcactgacgttactgtcttgtccccacagaagccgatcctactgcagggccatgagcgg

SEQ ID NO: 392053 - DNA, 122 bp, Homo sapiens
ttccggtcccactgccctggccgttgaccgcacaccggccaccgactgagccgctagtttcggttgccgctgcctccctgcccgtccatgacgtcctccactgtgtcgccggtgcatgacgc

SEQ ID NO: 392054 - DNA, 122 bp, Homo sapiens
cccacccctcctcctcggccggcggccgtgaccctggcaagcgtctgcccaaagcccagccgcctgcagcccgacccctggcggctgggagggccccctgcacccaggtagcttcccaccat

SEQ ID NO: 392055 - DNA, 122 bp, Homo sapiens
caatgtggagaatttggcagaaagtgagagcctgatatagatagtgttactaattccccacggtcttgggtggcccataggagattaagaatttcctattatccaagctggggaacatgggc

SEQ ID NO: 392056 - DNA, 122 bp, Homo sapiens
agggagtattccgggagcataaaggactcctcttgggtttcccatcctaatggggctgtccgtcctgccccttcccttatggaccaggattagggagcgtggactgctgcactgggcacgaa

SEQ ID NO: 392057 - DNA, 122 bp, Homo sapiens
aggctggggtgatgtccagcagcctggggagcaagccagagacacagtgaagggcctgcacgtttgtccccagcgcctggtttctcccttcccgcaggagcgcctccccatgaaggggtcca

SEQ ID NO: 392058 - DNA, 122 bp, Homo sapiens
tgctaaaaaaaaagtaggcttctcttaactgcatgtaaaacgctcatcagttggaaataacgaagattaaaaggaatgcctagttttcttaaaggttaatatgataggccaggcgcggtggc

SEQ ID NO: 392059 - DNA, 122 bp, Homo sapiens
caagctgggcctgaaggcctctttgtcaggcatgatggcttctgccaagaacatctgtggcgccaggcgttggtgtccacggtcagaaatgtggctccttcatacctggtccagaacgtcag

SEQ ID NO: 392060 - DNA, 122 bp, Homo sapiens
gtatagccctttgatgggctctggctttatttgaggtctgatcaggtctgtcctgctgtgcgcttgggcctcctcccagtcagcactgattgttgctgtggagtagccagcacctgcaccct

SEQ ID NO: 392061 - DNA, 122 bp, Homo sapiens
tgctctggcagacgaccccgaagttaaaggatgttttccccataacgaatgttcaaagttcgtgcatcactctgctgttccctacacataaccgggaaacaggtttaatccaaaatgtaacc

SEQ ID NO: 392062 - DNA, 122 bp, Homo sapiens
ccctagaggccatggcaaagagacacacagcgaagcagggtgataagcctgttgctgtcacgtgccatcagttttctggtttatttgataaatatggcacagactcagaatcgataagaagt

SEQ ID NO: 392063 - DNA, 122 bp, Homo sapiens
gggcctgtaaggaattagtgccctcagctttaaccattttccttctggttcatgttcaaccgggctacattacccgcccctctctccgcagcgtggttttgcgatggggtatgtgtaaaatt

SEQ ID NO: 392064 - DNA, 122 bp, Homo sapiens
gacaggcggggacagggtctgggaaaacccgctaggcaccgaggcccagagggcgtcgggcgtccccgcaccgagtgccgcccgccgcgacccgggaactgcctgctccccggacgccaggc

SEQ ID NO: 392065 - DNA, 122 bp, Homo sapiens
aacgtggtgaaacccccgtctctactaaaaatacaaaaattagccgggcgtggtggcgcacgcctataatccagctattcaggaagcggaagcaggagagtcgcttgaacccgggaggcgga

SEQ ID NO: 392066 - DNA, 122 bp, Homo sapiens
tccctccggaagcccttggtgccatctgtctgtcctgtctctgccctgtttatacaataacgaaagaagaaggcccacccctccttgtgggctttttctcaggcccaggaaaatgctgacaa

SEQ ID NO: 392067 - DNA, 122 bp, Homo sapiens
ctgcgggacgcacggagaccgcggtcagcgcgccgcctggccggcccagcgcgcccagcccgcgcccagccccgtccactcccgtccagccccgccgcccggccgcagtccccagggcgcaa

SEQ ID NO: 392068 - DNA, 122 bp, Homo sapiens
tgtatccaccccagaggccccagagcctccatctcaggagcagtgggccatccctgtggacgccacctcccctgttggtgatttctatcgcctcattccccagccagccttccaggtacttt

SEQ ID NO: 392069 - DNA, 122 bp, Homo sapiens
acctcaggtgatccacctacctcagcctcccaaagtgctgggattacaggtatgagccatcgcaaccagcctgattaaatttaaatagctacatgtgactgtggttaccatattggacgatg

SEQ ID NO: 392070 - DNA, 122 bp, Homo sapiens
gcgaccggaagccacttaaagcagagatcgaggtgacaggcgagctggctggactcggagcgcggtcgaggctttctgcgttcgcggcggcggaatggcccgtgcgcggctcgccgcgtcgc

SEQ ID NO: 392071 - DNA, 122 bp, Homo sapiens
ggcgggaagaggcgcggacacgcgcacccggcccgccgcgggggcgcgcctggctctgggcggggctgtattgtcctccttcgtggtggagcataatcaaaatggcttccagctggtcctcg

SEQ ID NO: 392072 - DNA, 122 bp, Homo sapiens
ggaggaggatggcggggtctgggggtgcttctcggaggaggaggcggacccggggcgcagcgctggaagaatccgcgtccaacgtctagtccccgaagcctctcgggaggcggggcgggcgg

SEQ ID NO: 392073 - DNA, 122 bp, Homo sapiens
aaaaaaaaaaacagcctcaaagagaaccggtcagtgaaagtgcagagtggctggagcaggcggcctgggggaggggcgaggcctggcgctgcgcgattccgcatggaagagtgacctctgga

SEQ ID NO: 392074 - DNA, 122 bp, Homo sapiens
ggggggctcgccggcatgggcaccagctcagagcaggagggggtgctgcgctgggaatgccggggagcctggctctggagtcagacacccctggagttcagcccatttactcacacttgtca

SEQ ID NO: 392075 - DNA, 122 bp, Homo sapiens
ccactcaatcacatccagcctcgcgatgtgagacccgatatgttttcagcagttacccagcgtcctgcgggtctctccgccactcccgttacatgtgtttttgggtaatcgccagtcttttc

SEQ ID NO: 392076 - DNA, 122 bp, Homo sapiens
atcccgggagggggaggctgcagtgagcggagattgtgcctcgctggctgcactccagcccgggcgagagagccagaccttgtctcaaaaaaaaaaaaaaaaaaaaaaaaagcctaatatgg

SEQ ID NO: 392077 - DNA, 122 bp, Homo sapiens
gcagcgaccactcggccttcccctgctcctgcctgccaggtgctaaaaatgccggggatgcgcaggcgcactgggagaggccgcagggcacgctgggcagtgcttctgggccctctgctgct

SEQ ID NO: 392078 - DNA, 122 bp, Homo sapiens
gtttacctttgtcctgggggccctcagatatggcccatccatcccctgagtgttttacctcggtcctcgagaccctcaggtgtggtctattaatttagtgtttactgcaccctggggactca

SEQ ID NO: 392079 - DNA, 122 bp, Homo sapiens
cgcctgcgccggggccgggagtgcatggggcggtcggggccggagccggctgcacgggagcgcgcccggcccgacccgtgtggaccctgcgggaaaggaaggcgggctggggacgtgtctcc

SEQ ID NO: 392080 - DNA, 122 bp, Homo sapiens
tcattgccatcgtttagtaaaacctcgctttaataaaagcagggaggggtgcgcagagcccggacactttcatttcggtgggagacaaatcgaatcagaaagtcagttgggggcgcactgtg

SEQ ID NO: 392081 - DNA, 122 bp, Homo sapiens
gaatcattaactctgaaaacccaaaaagcaactgtctagcagagtctcacattagcaaagcgatgtggcttaaaggtgagaatgcaatgctttgaagtcttatattcattctaattccagct

SEQ ID NO: 392082 - DNA, 122 bp, Homo sapiens
cttatttctgcacagttaaattttacctatccttcagtacctggctcaaatactcttttacgaggctatatttaattcttccactccagcataaatgctgtctacctgctctgaattctcca

SEQ ID NO: 392083 - DNA, 122 bp, Homo sapiens
gcatagccagccctcagagccagtcagcgcagggaggcaggaatcaggccagctgcctgacgactttaatgttaaaatgtgttgagcattcacaggccacggaactctgctaagtgaaccaa

SEQ ID NO: 392084 - DNA, 122 bp, Homo sapiens
tggggtctctttgtttagctcttctctcatcccaggactcaggctaggctaaatttctagcgccgtgtgtgcttgaaagcagacaggtgggattcttggaaagaacatacacaacacagctt

SEQ ID NO: 392085 - DNA, 122 bp, Homo sapiens
gcagcagcagcaacagcaactgcgaaacgtaagtgagaactaagtcgtttcgaggccagacgttcagctcgcattcctgcacacatcgcgggaaccccacagggccagggatttgagggctg

SEQ ID NO: 392086 - DNA, 122 bp, Homo sapiens
cttggaggagggaagttgtgcctgtgacactgagttcactcagtggggcctggctccagccggagctgcttagggagggtctgacagcaggcggggagggggcttggagggaagaagaggag

SEQ ID NO: 392087 - DNA, 122 bp, Homo sapiens
gtttctgcttctgtactctggctggagaaacctttcagcacatgtatcctgtctgccagtcggaatagtcacaatgttgcagggacttcagaggaacctgggatgtctcacatttatgccaa

SEQ ID NO: 392088 - DNA, 122 bp, Homo sapiens
tttagaccttacacaacttctgaatgtaagggtgagcactgtttaccaacttgtagtcaccgaaaagaatatgggtttcgttctgctttaccaacataataaggagaatcttcaaagagaaa

SEQ ID NO: 392089 - DNA, 122 bp, Homo sapiens
ttgagttagcacagattgtaaaatgcacccctttcttagggaaaggcatcaacactaaaccggtcattgggatgcctgggttcaagccaagattgccctccggcatgaatctcaacttcctt

SEQ ID NO: 392090 - DNA, 122 bp, Homo sapiens
tgccagcagtgccggcccaccggcgctgcgctcgatttctcgccaggccttggctgcctccgggcagggctggggacctgcaagccgcgatgcctgagccaccctccaccaccccctccccg

SEQ ID NO: 392091 - DNA, 122 bp, Homo sapiens
tcaggccacatggagagcaaagggagagatcagttacagccacctttctctgatgagctgcgggctagctaattaaaggcttttgctgcctataccagagaggggaaagaaggtaaaaggcc

SEQ ID NO: 392092 - DNA, 122 bp, Homo sapiens
ccatgcaggggatggtgtgcatgaggcaggcgctgctgtcctacgatgtcagccgggtgacggggccagggctccagtgtcgctgccatcgggcccttggggagcatccctggatggcaggg

SEQ ID NO: 392093 - DNA, 122 bp, Homo sapiens
gccccggaggccgaagctgggagcgtgtccgcgactctctcttcctcttagctcttgttccgtaaataactaggagagaccaaacaccacacctctcccacttccagtcaccgatctttgtg

SEQ ID NO: 392094 - DNA, 122 bp, Homo sapiens
ggacacccccagatcccctctgtggtgcgtgaggggacagggtggtcaaggggactggcacgtggatggtggcagtactgcttgtgacttttccccttgaagctgaggctgcaactgcaggt

SEQ ID NO: 392095 - DNA, 122 bp, Homo sapiens
aggaaccgacccgccagctggggcgccggctgtgcccgccagggtggcccccccggccgtcgcgccagccccacaccctccctgccaggcttggtctaggggacttccctctgtctgggtct

SEQ ID NO: 392096 - DNA, 122 bp, Homo sapiens
ggaggtgagaaagggtagtgaatttcacctggcccttgttgagtatgtgatgcctgtgttcgccatgtgaacagcagaaagcagcaaatataaggatcgagagcacggggtagagagagggc

SEQ ID NO: 392097 - DNA, 122 bp, Homo sapiens
gtcatgctgtctgctttgtttccaggggtcttcacggcttctctgcccaggggccagaaccgaggaggccaggagggctgctggggctaaggggtctaaggacctcgttgcacacgctacca

SEQ ID NO: 392098 - DNA, 122 bp, Homo sapiens
ggcttgttgtgatttttccagggagataagccatatgagaatgctctgtaaactgcaaagcgctgcctaaagctcagggagtgtctgtgttaaaaaccatcaccatcggcagttggtttctg

SEQ ID NO: 392099 - DNA, 122 bp, Homo sapiens
gtgtcatgtagggtttactacccgctagtatcgaaccctagcaatgtacttaaggctctccgcctcagtttccccttctgcaaaataggatctaactcacaaggttgtcatgagataacaca

SEQ ID NO: 392100 - DNA, 122 bp, Homo sapiens
gaagcagatcagccgggtggaggcgatgcgcctagggccgggctggagccactcgtgccacgccatgctgtacgccgccaaccctgggcagctcttcggccgcatccccatgcgcttctcgg

SEQ ID NO: 392101 - DNA, 122 bp, Homo sapiens
ccagagtaatttttcaaactccagcttaccgctaccaaataactgcagcttactgctccgcgtcgcaagtcaagatgtggctccttcattcacacacatctcttgagcgcttcccgtgtgcc

SEQ ID NO: 392102 - DNA, 122 bp, Homo sapiens
tccacacgtaatgacctctctcttactctggtcctcaggtcatggttctacttcagcgtccggggaggaatgccaggaaaactcatcaagatcaacattatgaacatgaacaagcagagcaa

SEQ ID NO: 392103 - DNA, 122 bp, Homo sapiens
aacacgcctttaacgtcctccaaaagaggttccacagcaataagaaaaaacaaaaaccaccgtgaaagtaaagtgcttgtcattgcttcaaagaggaaacacacaatggtttctgaggcctt

SEQ ID NO: 392104 - DNA, 122 bp, Homo sapiens
ctgactgctcccctgaaggtgcaaagtcaagtctgcaaggctcccagggtgaggcccttccggggagttgccatatgaagcattttagccttgcttaatttcacttcctgttccttggggtt

SEQ ID NO: 392105 - DNA, 122 bp, Homo sapiens
gaccctctgagtcctccacaacgaagtcgtctgcctagaagggccggaagtacttcagggcgcgccgcggacccaccccctcgcttccggcatcggctgtggggagtaccggctgcagtcgg

SEQ ID NO: 392106 - DNA, 122 bp, Homo sapiens
tcccacaacacctcatcctcccgtcctgagtaatccgagcagccccgtcgccaggcacagcgggagggagggtccaagcctcctcgctctcccaggagagatggggggtgggggtgaccccc

SEQ ID NO: 392107 - DNA, 122 bp, Homo sapiens
gagaacgctgcatctggctaacgagatcgtaacaagatcgccacccggcgtctccaaagccgggatgcagccacccaggcgagacgctgccctgacactgcagtgatgtgcgtgcttggcac

SEQ ID NO: 392108 - DNA, 122 bp, Homo sapiens
tctcactttgtgtagcccccagaaccgtgaggggcatccgagtgggtgagcacaggcgtccgctgaagagccgcctggaccagggcggtcagcgctgcggggaggcctttgcccgaccgcgc

SEQ ID NO: 392109 - DNA, 122 bp, Homo sapiens
ctgcatgcccacgtggccaccatggcactcttggccccctgctcaaaatttctgatctttcgaaggccacctctgccaggaagggcctggagcccaggtggtttgagcaggggatggggagg

SEQ ID NO: 392110 - DNA, 122 bp, Homo sapiens
tggaaagggagctcttgccggggatgcgggaagatgtttctggaggtgcccggcccagggcgtcctggggcaaggagtggccaggcaggtcctatgaggaccctcctagggaaatccgacct

SEQ ID NO: 392111 - DNA, 122 bp, Homo sapiens
tgttttggcagataaacctctcataatgaaggcccccgctgtgcttgcacctggcatcctcgtgctcctgtttaccttggtgcagaggagcaatggggagtgtaaagaggcactagcaaagt

SEQ ID NO: 392112 - DNA, 122 bp, Homo sapiens
tccgtgagactgaaaggactcatgcatcttactgtaacccgggggccaggctggctctctcgctgtacattctgtaaaggtgtcttctcttctcagactcttcctcggtcacacgtctgact

SEQ ID NO: 392113 - DNA, 122 bp, Homo sapiens
tgtcctgaccaaacgtcccaaccctgcctgcctcatctgttccggggctgctgcctaaaccgactcacagagtgccagggctggacaggcctggagggatgacccagaacagcctctttctt

SEQ ID NO: 392114 - DNA, 122 bp, Homo sapiens
tgatcttgaagaaagaagaaaccctcgcgacacctggggtttgctgctcctaacagaaggcgcgggggcgtggtgacgagcggagtcctttgaggtatggcaggaggaggacatgcgttcga

SEQ ID NO: 392115 - DNA, 122 bp, Homo sapiens
ggtgcgtccatcagggatttcagggactccaaagagttattacccttgaatgctcggttccgcctgacaacccagaaatctctgccaaggtgcctggtcttgaggaaggctcagcaagtggt

SEQ ID NO: 392116 - DNA, 122 bp, Homo sapiens
gtgacacagtgttgcctaaggatgctctctggtaaaagtaagtatacagcttttgctactcgcaaacatacaaagcaagaaggaggacagtcaaaaaccgcgtcatatcacttaggtcctat

SEQ ID NO: 392117 - DNA, 122 bp, Homo sapiens
gccaagtgtaaagcacccggtctcctgtgcctcccagccccaagacgacctctgggccaccggagtccagacctggtccaagaggcgaggtccccctgggaagtgcctgaaaagtaccctgg

SEQ ID NO: 392118 - DNA, 122 bp, Homo sapiens
tatgcaaaggggcttttactcgtataactttatatgtttatttagacattttaattaatacgtctatatggagtacaggtgtattatcagtgtaattaaactctgatatgatattagaaagc

SEQ ID NO: 392119 - DNA, 122 bp, Homo sapiens
catagatatttaagatatcctgtcagttaggaaaacagaaatctgtttagatttgggtcccgttaagctataaatagcttaaggagaagaattaaatattgtagagggtggcaaaccatgac

SEQ ID NO: 392120 - DNA, 122 bp, Homo sapiens
taacaatacttaactagattctttgaaatactggatacagatctgcattgctaacatccacgtcactaacccatcttgagcctttgctgccgaacaaatctgcacagctatccccatagttc

SEQ ID NO: 392121 - DNA, 122 bp, Homo sapiens
caaaataaatgtacatgttttaggacgtcgcgagccgtttgaggcagcattccccaaggacgccacttagtctgtaggtttagcggctagaaagattcagaagctgagttcagtcctgccgc

SEQ ID NO: 392122 - DNA, 122 bp, Homo sapiens
ggtttctgttcctcattgtgcagaagaaaaactgaggcctaacaaaggaagggacttgcccggtgagtcatcagaataatccaggcctcctgccccgtccagagccctttctaggggtggat

SEQ ID NO: 392123 - DNA, 122 bp, Homo sapiens
cctttcctggtcaaggaaaggggtgacagacggcacctggaaaatcgggccactcccacccgaatactgcgcttttccaacaggcttaggaaacggcgcaccaggagattatatcctgcacc

SEQ ID NO: 392124 - DNA, 122 bp, Homo sapiens
gacagcacagtaataagcatatgctccagagtcagaatcatgcaccactagctgcatgaccggtggcacattactaaatcatctgtgccttgtcttcaccttttataaaataggaatgttca

SEQ ID NO: 392125 - DNA, 122 bp, Homo sapiens
tctcttatcaccacatgacaccttgtattttacctgcttgatgttcacacggacctctgccggagcagaccctgcaggccccctgcggctctgacccaatgcccaggaccatgcctgtgtgt

SEQ ID NO: 392126 - DNA, 122 bp, Homo sapiens
tgccaaacactgccctgagcctgtcataggcatcagcactaggccaagggctgcatgcaacgagattgtctgctgccgccagaaggtactcatattgatggcgctgttgcttttcacctcag

SEQ ID NO: 392127 - DNA, 122 bp, Homo sapiens
ccaccggcgctgcgctccatttcttgccgggccttaggtgcctccccgcggggcagggctcgggacctgcagccggctatggctgagcctccccgacgagcaccgacccctgctccacggcg

SEQ ID NO: 392128 - DNA, 122 bp, Homo sapiens
ttgaaaaagagggaatggcctgtggccaacagtctgcagctaattgaatctaccaaccatcgtctgagtgatcttggaagcaaatccacctccagttgagccttgagatgatgtagcctcaa

SEQ ID NO: 392129 - DNA, 122 bp, Homo sapiens
ctccgcgccaccgcctactggtactggtgaaggaccacggcgagcccgcgctgacggccacggccactgtgctggtgtcacttgtggagagtggacaggcgccaaaggcctcctcacgggcg

SEQ ID NO: 392130 - DNA, 122 bp, Homo sapiens
gattcagaatccagtgactaaggacatatctatatccctaagagaaagaaccttgggacacgatgatggttatatgctgggacaattccatcagcccttctgcaaaggagcctatagccatt

SEQ ID NO: 392131 - DNA, 122 bp, Homo sapiens
cactcccaaggcttccactgtcacccatttggaatattcccaaactaattatccatgaagcgccattttcatttctccgtctgctagctgtccatttctgatcgggtagatagcttactgtc

SEQ ID NO: 392132 - DNA, 122 bp, Homo sapiens
gcccacgccttccaagccatcgtccacgccctccaagccgacgcccggcaccaagccccccgagtgcccagactttgatcctcccagacaggtcagtgggctgcaggcggctttgtccccat

SEQ ID NO: 392133 - DNA, 122 bp, Homo sapiens
ggtaggctgggatctggagatctgggctttatttgccgttctacttcagcaacaaaaattcgccgctttggggaagacatgacctttctctggggttgaaccagaagacttcccaggactct

SEQ ID NO: 392134 - DNA, 122 bp, Homo sapiens
aacttgtgaatgggaacctgccagggaatagatgctattgctgggtcccgcagttgttttcggggtagttaggctggaaagtcccagccaacttcctctaagaggtgttctcaggccaggag

SEQ ID NO: 392135 - DNA, 122 bp, Homo sapiens
tggcaggagccaggggctggcatgtatcctgtttggccaaaccatcattaagtggcagttcgagaataggccctctaagctcttgcactggtgtcataacatctggggatttcctgtgtgtc

SEQ ID NO: 392136 - DNA, 122 bp, Homo sapiens
cccggccactgctgctccacgggagccagtcttggatacctagggtgggggacagggggacgggaagagcctcggttgtctccaggtaggcagggaacccggagcatttatttaaagttact

SEQ ID NO: 392137 - DNA, 122 bp, Homo sapiens
ccgcctagatacctgactttatagccttgggggtctccatggcaatggctgtcctgggagcggactgcgccgtcagggcagagacggacggggcgggggagaccgctcctgacccccacccc

SEQ ID NO: 392138 - DNA, 122 bp, Homo sapiens
tgcctgtgaacttaaagtgaccacaccctgttcccctatatatttatagtactagttgctcgctctctctctctctctctctctctctctctctctctctctctctctctctctccctctct

SEQ ID NO: 392139 - DNA, 122 bp, Homo sapiens
ctggagcccgacctggggctgactgcagagcaggctgctggcagggaccaaaaggagctccgcgccaggccggaggctgcgcccgtcactcgcggtcccggccgggtccctggcgcgtagtc

SEQ ID NO: 392140 - DNA, 122 bp, Homo sapiens
cccgggatccacacgcagatgcccagaaagcgagaggacagagggcgcggggcgggaagacgcgcctcggccggggcagcaaggaaaagacgttacaacagccgttttcagtcagggaaatg

SEQ ID NO: 392141 - DNA, 122 bp, Homo sapiens
attttggagggcagtgccagtggttagggtgatgagggagggatggaaaggaaggaaggccgaaacccaagttaggaaatagactctccagactgggagactagctctaggtagagggtaca

SEQ ID NO: 392142 - DNA, 122 bp, Homo sapiens
aggaaatcaaggcacaggaaggaataaggcttgccaaagtcacacctttcagcagtggagcgtggaggccactcctaaacccaggcttcatggccacctgcgctctgtggaggcctggggtt

SEQ ID NO: 392143 - DNA, 122 bp, Homo sapiens
gaggagatctggctggcagccgtgaagctggagtccgagaatgatgagtacgagcgggcccggaggctgctggccaaggcgcggagcagtgcccccaccgcccgggtacgcagtggcaggca

SEQ ID NO: 392144 - DNA, 122 bp, Homo sapiens
ggagcaggggcggggtctttccagggagtggagcctgggcagattggggcctgtggaggccgcactaggatcgtagaaggagtggagccgtgctctcaccctgtcttagaggacccggaagc

SEQ ID NO: 392145 - DNA, 122 bp, Homo sapiens
tgcggactcttgaaatagtaaaggtagcagcggcgcgcgtcgaacacgaaccagcggctgcggtagccacgcagggggcccttgcccgacagcttctgcagatagccacacagccgcgctgg

SEQ ID NO: 392146 - DNA, 122 bp, Homo sapiens
gacatttcccggatgcccggaaggtggcgctagagacccccttgtcggctcccaagagagcgctaagcatggtcttcacatcatcgggaagaagccaaacttagacgcccggatggtttcca

SEQ ID NO: 392147 - DNA, 122 bp, Homo sapiens
caatcccctcccagcgccgcaccaccggccacgttctgcctctgggtttgcccgtctggacgtccacataggcagaatcctgcgacccgaggcagttgcacccagctgccttcactccagcc

SEQ ID NO: 392148 - DNA, 122 bp, Homo sapiens
cctgggaagcgccgctgagacttcagggtcgtagtgacagaggaaccacccgaggctaggcggggagagggtgcagtttccggatcccgaaggcttcgagaagagccgacctgtctggaagg

SEQ ID NO: 392149 - DNA, 122 bp, Homo sapiens
ttacttcttgccattcctctgccctccaagtgtagaggggacaccgtgggccttggcagtcgcgttccgactccggtctggtgtatgggttgcactcggtctctctggctattttgtgtgtt

SEQ ID NO: 392150 - DNA, 122 bp, Homo sapiens
ggtgcccaaacccagtctgttcaatggcatcacccggtttatcatgacaactacttcaggcggtgggcagccattactcacacagcagcagagatgaagaaccaccaccctgtgggcaaacc

SEQ ID NO: 392151 - DNA, 122 bp, Homo sapiens
ccagcggctgggatgcggcgcgcgttccgtctttccgtatggaaacatggcgcctaggggcgggccatccccagcttcgagccaccgccagctgagactcatcggcgggcactcggccatgc

SEQ ID NO: 392152 - DNA, 122 bp, Homo sapiens
tcttgtgatgtcttctgagaaccaacttattcctctttctctgagaagaacttgacccctcgccccggggctgagtgcttggcagccacatttgtgttgagatcttgattcctgctctaact

SEQ ID NO: 392153 - DNA, 122 bp, Homo sapiens
ctttctatttgactggggtatccttggtgagctgagggctttctccaaacttggcttatgcgtttaacagtgagtcagaccagcccctgctaccttcgttggagaaattcaatctccttttt

SEQ ID NO: 392154 - DNA, 122 bp, Homo sapiens
gctatttccaggccacagagtggaggtctcagtcctccctccctgcccccaaagccctgacgtgacccagctggcctcactgcgactgggctcagggccagggtgacaggtgggcaccccct

SEQ ID NO: 392155 - DNA, 122 bp, Homo sapiens
tggctgtctgcagcgcgaggttcacgtctattgttttatgcctccgggagagctaccccgcgtgatagatcttttcagatccatcactggaagaaaaaccctggtgataacgattatctccc

SEQ ID NO: 392156 - DNA, 122 bp, Homo sapiens
ccggcccggcccagccgggctccctcagcgcatgggagaggccgtgggagccgaaagcagcgcggcgcagccagcacccggtccagccacccagctcggccttcggctgcctccttcctgcc

SEQ ID NO: 392157 - DNA, 122 bp, Homo sapiens
cgtcagggaccgcggcaggctgtgtccgtctgtccgtccccgtctgtccgtccgccagcccgcccgctcccggtgccctccgcaggcctttccgcagcaagcccgctcccgcccccgagccg

SEQ ID NO: 392158 - DNA, 122 bp, Homo sapiens
cctcttcagttttcatatgccgtgcacagtgagacaggggagcagagccctgggagccggcgcgctctcgagacgtggactgtcgccccggggagaagacagcagactgtgcttctgagctt

SEQ ID NO: 392159 - DNA, 122 bp, Homo sapiens
ggccagggaccttcttgccacattctgggctctgcccactggagagttcaggacaggacccgggtgcagaccggaggcccaggcgcagagttgttatgctcagggccatatggaaaatgtga

SEQ ID NO: 392160 - DNA, 122 bp, Homo sapiens
ccccttcccgggcggtcctgagccggctagtctccaggtaaggaggcggccgcaacttcgcggcctttcccggagacggggctggctcctcttggcagccacctgcagcctgacgcctccgg

SEQ ID NO: 392161 - DNA, 122 bp, Homo sapiens
gaggccgaggggatggcggcccgggccgcagtgggccaggccccaggcctgagagtgtggcggcctaagctggcccgctccccaagcgggcaagggctttgtccggaggcctgggcatggcc

SEQ ID NO: 392162 - DNA, 122 bp, Homo sapiens
ttctcaccaagttgtagtagaaataccgatagtcatatcctggcaggatccacataccaccggttatagggagaacacttttgtgtgcctggatggttttggacaaacaaaggtgaaatctc

SEQ ID NO: 392163 - DNA, 122 bp, Homo sapiens
catccctcagttcgtaaccaccagcctctacaggctctctgaagagctcgcagaagcacacgtgcacacacaggcacgcaggtccacacgcatgcacacaagtccaaccacatgcatgacga

SEQ ID NO: 392164 - DNA, 122 bp, Homo sapiens
ccacacgcacgatgacgtcaaacgctgctatggcaaccgttgattggtgcccacagcgatcggggccccgcgtaaccgccgctccccggcgctcgtcctgcccgcccgcgctggagggcgag

SEQ ID NO: 392165 - DNA, 122 bp, Homo sapiens
ggaagggaaagcaatgggaactcgtgtgaagaaatggattatataaacagagcttaccatcgcctgcgccccattatcctataatttaccctgcatgggagcatagaaatatattaaactag

SEQ ID NO: 392166 - DNA, 122 bp, Homo sapiens
gtttccctatgtcgacataagccacaaaaaaatatggcgtccgctttcgacagggcgttacgtagacccgactgtttttatttatttatttcgtggccgtctccctcccttcttggccaaac

SEQ ID NO: 392167 - DNA, 122 bp, Homo sapiens
accagagccaggaaaggagcacttggcatcagagaagagaaaggcggaggtgacattcagcgccaaattagcagccgccacagccaaatattgtacttgcctccaatcttcttttatttttc

SEQ ID NO: 392168 - DNA, 122 bp, Homo sapiens
gcctgttatatgcaaggcactgcactcccttgtcacttgttaatttacaagaagactcgccggtccagggaagggagaggggaataggtgcaaggtttgtggagggcggcaaactgcactcc

SEQ ID NO: 392169 - DNA, 122 bp, Homo sapiens
gcgtccggttattgcaaatgcattcagtccagtagcactagcccaggaaatataagccaccggctcacgttgctcctcacaggtatgcggcgcttccgctggcctccaaggacacgaagccc

SEQ ID NO: 392170 - DNA, 122 bp, Homo sapiens
acctcagctgatccacccatctcggcctcccaaagtgctgggattacaggcgtgagccaccgcgcctggccagtataatccattttcataggaaaatgtgttttctaaatttgaaaagcaaa

SEQ ID NO: 392171 - DNA, 122 bp, Homo sapiens
agaagtcattatcagttgctttggggaagagttgcagaagcttcatgaaaagtatcaggccgttatttacttttcatactgcaagccttggtctgaaagggcagacagataataataccttt

SEQ ID NO: 392172 - DNA, 122 bp, Homo sapiens
tagacggggggggggcagtgagggctgggtgcggggtctagtctcagctgagcagcagcccgcaagaaccggcggatctatcctatcagaagtcggaagtcatctatcccatcagaagagtg

SEQ ID NO: 392173 - DNA, 122 bp, Homo sapiens
ttcgttcaagtggggagaatcctcctaactgcaagtggggcttgagcagatgcccgtgcccggctgattctcctacatggaaaacttccaatttcgctcggattcaggctgcttctggagct

SEQ ID NO: 392174 - DNA, 122 bp, Homo sapiens
cctcgcacccgtgccccatcatgctctgcgtgctcgttaggtgccccatcatttcccgctcgctctcgttacgtacccagcctccggcccctgtaagtgccccatcgtgctctctgtcgctc

SEQ ID NO: 392175 - DNA, 122 bp, Homo sapiens
caccgtcgcacagaccgctcccctcctcctgcctcacccaccttagacactgacgccccacgatttgggggcgcgcgacctcaatccaaactaggtcctgctgaagtctgatcttttctcct

SEQ ID NO: 392176 - DNA, 122 bp, Homo sapiens
cgggtcccgagccctgccgagcgggaaggcagctaaggcccggtgagaaatcgagcacatcgctggtgggctggcactgctgggggacccagtacaccctccgcagccgctggcccgggtgc

SEQ ID NO: 392177 - DNA, 122 bp, Homo sapiens
ctttctgaagagcctcacaagcatccacttgaagacactggcattcagcagtctttcttccgaaggccaaaagaataagaaaaaagccacagcatatttctgctgtagaaggagcatatcac

SEQ ID NO: 392178 - DNA, 122 bp, Homo sapiens
ttcatgtgcccacatgtccctgagctggattagcgtggctgggagcaggttgggtatcagcgcatcgcccggggaaagttcgtaggcaacattcatttgcacaacgagcgcactttgaaaga

SEQ ID NO: 392179 - DNA, 122 bp, Homo sapiens
gggatgtgaggagtgcagctgcccggctgctccatctgggatgtgaggagcgcctctgcccggccgccccgtctaggaagtgagtgcctctgcccggctgccccatctgggatgtgaggagc

SEQ ID NO: 392180 - DNA, 122 bp, Homo sapiens
accacgcgagcagcaggtgcaagacgcgggggtggcactgagatgacataaaaccacactcgcccccacctcccaagccctgacggcctccgccacggccctcctgccaccccaggctggcg

SEQ ID NO: 392181 - DNA, 122 bp, Homo sapiens
tctggagggccttcgagaacccccacaccagcacgatggccctggtgttctactatgtcacggggtttttcattgccgtctctgtcatcgcgaatgtggtggaaacagtgccgtgcggatca

SEQ ID NO: 392182 - DNA, 122 bp, Homo sapiens
tcggacagatcgggagatcctcccgggaaccgctctcgatgagcgcctggcactgggagccgctgctgtgcagctccacgaagccggtcaagggctccacctccaggaagccccgcctggga

SEQ ID NO: 392183 - DNA, 122 bp, Homo sapiens
ccagttgctattgcctggaccgcctctgccggggtctgggagggctgcccttacctgactcgcaggtgggcactgcgagagtcgttgcctcctgctgagatcacccggcaggtgtacgtgcc

SEQ ID NO: 392184 - DNA, 122 bp, Homo sapiens
cggcgcagtggcctaaaaaggaggccgagccagtccctagctccgccttcccgggccctgcgccctagtggcctctgcgcggttcttcccgacccgcaaacacgccgccacccaaagcctct

SEQ ID NO: 392185 - DNA, 122 bp, Homo sapiens
gtttgctcttgtatccctatagtccaaggtttctcaatctgcacaattgacatttttggccggagtgttctttgtggtgagggctttcctgtgcattgtaagatgttcagcagtatccactc

SEQ ID NO: 392186 - DNA, 122 bp, Homo sapiens
tttaaaggagacaggcactattgaagtgtgaagaaatcggctctaattcaaaaaggcaatcgggcagaaaaagccctcaacattaccctgctagttattaatcagaaagggctctctcctcc

SEQ ID NO: 392187 - DNA, 122 bp, Homo sapiens
tgtccatagttcaacagaaagcatggatgggccatgccagcactgtgctgagcatgcatacgacattaaacacaaccctccctcaggcagctctgctgtcctaagatgtgtaaccaggattc

SEQ ID NO: 392188 - DNA, 122 bp, Homo sapiens
cttggtgcacagttaccccggtctgtgcccgtcccctgagaacttggtgcacagttaccccggcctatgcccgtcccctgagaacttggtgcagttaccccggcctgtgcccgtcccctgag

SEQ ID NO: 392189 - DNA, 122 bp, Homo sapiens
aaagccggacgggcagaaagccgtggcagcggcgggcaaaaagccgcggcggcaaaaaggcgcggcggcgggggcaaaaagccgcggcggcggggaccaaaacgccgcggcggcggaggcaa

SEQ ID NO: 392190 - DNA, 122 bp, Homo sapiens
gacccagtggcccccgctcgcccgcctgctggggagatggggagctcctaggacaggggccgggtcctcaagatgtggcatgaggaagggggtctcactgagcccccaagcggctcccgcac

SEQ ID NO: 392191 - DNA, 122 bp, Homo sapiens
cctcagccctctttcctcccgcgtccccaggaggtgcctctggaagccacggagtcccatcggcaccaagaccgactgccctttggggtgaggtagtaggttgtatagtttggggctctgcc

SEQ ID NO: 392192 - DNA, 122 bp, Homo sapiens
tcccctatctgtaaaatatggatgacagtaagtctgagggccttgggctgctaggaggggcgagcactgaggacagcagccaggacacagctgtgctgttgtacatgggagctgccactact

SEQ ID NO: 392193 - DNA, 122 bp, Homo sapiens
gagggactttccattttcctgctttctcttttcatttcggcttaatcatactgggaagtacgttagcttgaggttgtccctctctgtccagcagataggcaggtactgctccctgtggagtc

SEQ ID NO: 392194 - DNA, 122 bp, Homo sapiens
gtgagccccaagctatccgccccacccccagccctgcggggctttctgcctgccacacgccgtccctgctcactaccccatcggtttccttcgggagtcttcaaagccagtgcacgtgctcc

SEQ ID NO: 392195 - DNA, 122 bp, Homo sapiens
aaaagcaaatcaacccccacccaagcccccctggggaagaggaggcctcacccgtcccgccgaatccccgcaaacagcttgttctccatgtcgccgtagcacaggctgcagagcagcgtgga

SEQ ID NO: 392196 - DNA, 122 bp, Homo sapiens
acttgtagtccatttataagagggttgcgcttgcgctgtagccgcccagcgacctgtgcgcggcgtctgagcgagctgcagccggaagaacattcggttgttgatattgcctcagccttttg

SEQ ID NO: 392197 - DNA, 122 bp, Homo sapiens
aactcacactggaaaaagcaagttctatgggagttttccctcttaatcaagagctggttccgtgactcctagtggtcttgctctattcttttgagggcttgctgcctccctccctttcttat

SEQ ID NO: 392198 - DNA, 122 bp, Homo sapiens
caccgtgtaaagaacgcgacttgcacgtgggaaggcttcagagcgcagggccacggccgccgaaaggctttgctgctgggggctgcgtccttgctctagtggccagtcactcacctgctgtc

SEQ ID NO: 392199 - DNA, 122 bp, Homo sapiens
gagggtgtgggccttagccatgtggccgtgatggtcgtatctgaagtgtgaatacttccccgcgctatcttctaacctgcgctgtctcagcttagtgtgaacgtacggaccgttctcaaatc

SEQ ID NO: 392200 - DNA, 122 bp, Homo sapiens
gctcgccggcgggaccatgaagaagttctctcggatgcccaagtcggagggcggcagcggcggcggagcggcgggtggcggggctggcggggccggggccggggccggctgcggctccggcg

SEQ ID NO: 392201 - DNA, 122 bp, Homo sapiens
ctattctttataatacttaatgtattgtgtttctggaaagattggtcttcccaactagagcgtaatttgctttgtggtaagaaccttttctttctttctctgagggggaacccagtctcact

SEQ ID NO: 392202 - DNA, 122 bp, Homo sapiens
gggcgcgcacaccctgtgcatccacactccaggccgctcccaccctctccggagcgcacacgcgcgcccctgacctcagggatgcttgctcagaaagcttgggacacgtctttactgagact

SEQ ID NO: 392203 - DNA, 122 bp, Homo sapiens
cgcggcgcatgccgggaaacggcctgccgggggaggggcgcgcctggaggcgcagagaggcgtctacgcaggtccggaagtcggcagcctgccgggaagggggcggccccgcctccggctct

SEQ ID NO: 392204 - DNA, 122 bp, Homo sapiens
cagtgccaggagtatggttgagatgctaccaactgccattctgctggtcttggcagtgtccgtggttgctaaagataacgccacgtgtgagtaagtgtcggggcaccttggtgggggaagga

SEQ ID NO: 392205 - DNA, 122 bp, Homo sapiens
ccccgcctcaaactgcgtgggcggggagagtgacgtcacttggcccgcgcttagggccctcgcggggggcttgtgggtcctcctccccctcccactgacaactgccccaactgctcttcccg

SEQ ID NO: 392206 - DNA, 122 bp, Homo sapiens
cggtctgctaagtagcgggtggtgtttcttgacacttttcgctaccgctagaccacggtccgctaggtaacgggtgtcttcccagacgctggcgtcaccgctagaccaaggagccctctggt

SEQ ID NO: 392207 - DNA, 122 bp, Homo sapiens
aggtaagtaaggaggtctctgtaccatggctcgtacaaggcagactgcccacaaatcaaccggtggtaaaccacccaggaagcaactggctacaaaagccgctcgcaagagtgtgccctcta

SEQ ID NO: 392208 - DNA, 122 bp, Homo sapiens
tttttgcgagtgacctaaggccacttctcgggggagctgggggttgccttcccacgtctgcgcgtctgcaccccatgcccgggcctggaagtcagactcgggggcggtgctgcagcaccagg

SEQ ID NO: 392209 - DNA, 122 bp, Homo sapiens
tcccttagcaaacttaaaagactatcagaagcaacttgtgccatgcagtgccatggagagcgctggatggctagccagaagaaaagggaaggttgtagtggaaatctacgtgggtttgcagg

SEQ ID NO: 392210 - DNA, 122 bp, Homo sapiens
tacctagcggagggtctcctgaattcacggtcagagagagcgtcgccatctccaccagtccgctggtccacctgtcagtacgcctggctcgtgccagaactacggaggaccccgcgaaagga

SEQ ID NO: 392211 - DNA, 122 bp, Homo sapiens
atgaaacgctgtcacctacccacatccgctggctgtgacgcttgtcaaagtgttctctatcggctgcatgcctagaccaccaaagcgttctgaccggacagtgtcactggagaaggcggcgc

SEQ ID NO: 392212 - DNA, 122 bp, Homo sapiens
agtggtaagatgagcgagcagtcgactctggttggaagggtccagggaaatggggtcactcggggacgtgggccgcctccgggcgggcaacgcctgagaagcacgcagcgctcggcgcccag

SEQ ID NO: 392213 - DNA, 122 bp, Homo sapiens
agcagcactcaaacagatgcagctgcacccacgcgcccgcctgctgccagagccactctccggagcctgcagtcctgaagacgcctcagcaggggcaggcaagaagacaccccgcgaacccc

SEQ ID NO: 392214 - DNA, 122 bp, Homo sapiens
cccgggaccgggtccgctcaggaccagaagtggtgcctggcagccatctggccaggaggccggagagccgggcccagcgggagcgccgagcgctggcttccttttcccgagagtctttagtg

SEQ ID NO: 392215 - DNA, 122 bp, Homo sapiens
cctctagtgaggggacgtcaggcgagccagcactaggccggtaagcatgggcagccaggccgagggcagcttgcgccgctgaaggccgggagaacggaatcaaggcggaaatagtgtggttc

SEQ ID NO: 392216 - DNA, 122 bp, Homo sapiens
tctgtgtatacaacagttggatatccttatggctggcttgttaaaggagccagctggtcccgaatgagaccttcttaatcttcggtgggtctgaggtggaggaggatttggatctgggacac

SEQ ID NO: 392217 - DNA, 122 bp, Homo sapiens
aggaagccccgcccttttttggtctctctccagtggtggttacagatgcccattcttctgcgtctccactgattggtcaatggagagtggagcgcaccctctcaccagatggtaggactgtt

SEQ ID NO: 392218 - DNA, 122 bp, Homo sapiens
atcacagtcatcctggtcacctggcattctagctatccttgtcctctggcctggggcccacgaggcagctcgcggcagtcacaaggaggcagatttgggcacactgtgaatcagagtcgcgc

SEQ ID NO: 392219 - DNA, 122 bp, Homo sapiens
gtccggtccagccgcagggccatgccctgtgctgcggttgccgtgtcccaggcgccgccgcgtcaagatccccgtctttcccggccagccaggcggcagcggcattcagctcgtgcactggg

SEQ ID NO: 392220 - DNA, 122 bp, Homo sapiens
gaagtggggggtggggggcccggggagatggacaggcaccctgcccccctccccgaccgccgcattccaggctggagccgcggatgaggtcatcccgtccggttcccctccggccaagacag

SEQ ID NO: 392221 - DNA, 122 bp, Homo sapiens
cccgcctccagccctggccccgccccgccgctctccccttctccgcccctgccctggctccgcccccgcctgcccgcgcaccgcagaaggcctcctggaacttcctggacagcttctcgatg

SEQ ID NO: 392222 - DNA, 122 bp, Homo sapiens
gactatgcatccttctgggtcagaactggacacacagccaccagtgctggacaatggcggcggctcagggacacactggagccctggcccctgcagagctcccagcatggttgggaagagag

SEQ ID NO: 392223 - DNA, 122 bp, Homo sapiens
aaggaaggaaaccctttccccggctcatagcacctgccatccagggccctcccagggctgcgtgaactttagtcacgtggtgacaggccgagtcaccatgccaagtcactgtgcgcctcctt

SEQ ID NO: 392224 - DNA, 122 bp, Homo sapiens
gaaccaggagggactgaaggtgttggggcggctggtggcactcccaccccacagaaggtacgcgtgctgggccaggcagccccccacctccataaaccagcccagggaagccagctccaggc

SEQ ID NO: 392225 - DNA, 122 bp, Homo sapiens
gctgttgggagtgagagagcaagtcctctgtggagaacacccagtctggggcgaggggagcgctccattgctgtggctcctgccctggagatggccccgggaaccccagcctgccacgctgc

SEQ ID NO: 392226 - DNA, 122 bp, Homo sapiens
agtggtcgatctaaaggatcttttcagagccactgccgttttcatcaagagcagctgtaccggctctccatctgatgtgcgtctgccttgcgcagcagtcaggggccaggggcactcgtggt

SEQ ID NO: 392227 - DNA, 122 bp, Homo sapiens
tctagacacagtttgcccttctctcagccttcaatagttgatcagcttcctggagccaggcgagggagggctggatgagataagagccttggcttggaaaggacctgttgttgttagccatg

SEQ ID NO: 392228 - DNA, 122 bp, Homo sapiens
agcagcattagcatcacctgagaacctgctagaaacggaaatccactcagaaacctctatcggatcagaaactccggggtggggcccagcgatccaggtttttagccctctaggggattctg

SEQ ID NO: 392229 - DNA, 122 bp, Homo sapiens
gtggatccgcagccccagtgcaggctctcggcgcaggcggcgtccaggtaaaccacagcccgtttcactttggccagcacctgctcccatccttgctgggtaaaggacagtacgcccgaggc

SEQ ID NO: 392230 - DNA, 122 bp, Homo sapiens
caggagtttgagaccaacctgggccaacatagtgagtgcccatctctagaaaatattagccgggttgctgggagcgttaactcactcctgtagtcccagcactttgggaggtcgaggcagga

SEQ ID NO: 392231 - DNA, 122 bp, Homo sapiens
ccttacttaaaacgacacaattagctcaaacggactcatcctaccttagattctactcgccgcgaatggatgcatgcagcctgccatcaagccacggaggtaccacatttctcaaaagcaaa

SEQ ID NO: 392232 - DNA, 122 bp, Homo sapiens
aggcgacctcctgggctctaacgtcccagctgcagcagctgcgcctggagcatgaggtggcggcaacacagctgcacctcgcgcaggctgccctgcagcaggcgctgaatgagcgtgatggg

SEQ ID NO: 392233 - DNA, 122 bp, Homo sapiens
ggaaatagccatggagaaaggaaaatgcaaaattaacagagtcaaccaatacttatttaccgtctactatgtgctaggtagtgtttgggggactgaggttacagcagcacatctaacatttg

SEQ ID NO: 392234 - DNA, 122 bp, Homo sapiens
gggcaggcccctagggaaggcagaccctccccactctcgcagaggtcaatccagcttctccgcagcgcccagggggcctcccgctcccttctagatgcgccggagcgggccggaatatcact

SEQ ID NO: 392235 - DNA, 122 bp, Homo sapiens
cagcgttaacagctcctgaaactttgacactgctcacagcgagttggttgactgcttcaccggcgtgtgctgctttcatggaggaaacaaatgtgaagaccacgctgaaacttgatagagat

SEQ ID NO: 392236 - DNA, 122 bp, Homo sapiens
atctctccccaacttgggctgtcccaaccctcggctggtcaaagttaccgggcagtgctgcgaggagtgggtctgtgacgaggatagtatcaaggaccccatggaggaccaggacggcctcc

SEQ ID NO: 392237 - DNA, 122 bp, Homo sapiens
ctgaagaccctgcttagaggccctgtcctccttgcggcaagcggccattgccatggaaaccggagccgcagggctatctgtccgggattgtgacgcccagatgggagtggtgagaggagaca

SEQ ID NO: 392238 - DNA, 122 bp, Homo sapiens
ttgacgagacgtggacactgcctgaggctcagcctccccggcttcagttctctgacgtgacgctttgtgtgcattgaacaggcaatttccatggtcagaaacaaactgggtatgaaattgaa

SEQ ID NO: 392239 - DNA, 122 bp, Homo sapiens
gggaggacgcggctgctctgctccctcaggaagttcaacaggaacggtacgaattctttccgcagggcccggagtgagctcagcgcggccgcctccccagcgttatcctagggcagaagcac

SEQ ID NO: 392240 - DNA, 122 bp, Homo sapiens
tatttagtaaatttttgttgaatgaattaagtgaatgaaagaatgaataaatgaaaggaacggtcttctctgaggtatctggatgtgacgccaaaagggtcagaaccacattttcaattccg

SEQ ID NO: 392241 - DNA, 122 bp, Homo sapiens
tgaagtacttgatggtggcaagatcctgatatcaaagtgaggcaccctcttgttgtcagccgagccactctaccccatagctctgccagagcctggtgctggaagtagagagaaagaatgaa

SEQ ID NO: 392242 - DNA, 122 bp, Homo sapiens
ctgccagacagaaagcgctttggatgcctgagaaacaacagcttgtccgggctactgatgcgaagagaggccatggtttcctttttctctgctctgaatggcagccttgacgtcacaacagc

SEQ ID NO: 392243 - DNA, 122 bp, Homo sapiens
ctgactttgctttaacgagagcaactgcactggccattcccacaggtatctctagcccctcgtctacgtgaaatgagtgcattcactcagataaatctctaaaatggtggctggaggctgtt

SEQ ID NO: 392244 - DNA, 122 bp, Homo sapiens
gacgtaagagaggaaagtgtgagtggccggggggcctccccccgtcagaagtcgcgcagtcgcgcccataaaacgccccctccgggcggctagggcaggtgagcgcgtccccgggcctcccc

SEQ ID NO: 392245 - DNA, 122 bp, Homo sapiens
gacctggagcccagaaaagggggagcgcgcggaagcgccgccaaatgcggggactggctccgagcagctgagagtacagccccaaccgcatgagcacgacctgggccctgccgccctccctg

SEQ ID NO: 392246 - DNA, 122 bp, Homo sapiens
ggggttgcctagctgctgctgctccggtcagagcatctgttttgcagggcggctttgtcacggttctgccagctccacaccccccaccgtctcctccctacctggtccgtcctgggtgttga

SEQ ID NO: 392247 - DNA, 122 bp, Homo sapiens
gcaacttttgaaaacttcacacttgttaccatttagaagtttcctggaaaatatatggaccgtaccatccagcagtgcatcagtatgtctgaattggggaagtaaaatgccctgactgaatt

SEQ ID NO: 392248 - DNA, 122 bp, Homo sapiens
cgttttacacacctggtcccttagtgggactctgcccattgtcccttgtccctcacagatcgcgtcccaggtcccacgcctgaaaactcccctcttaacttcaccccgaatcccgcccgacc

SEQ ID NO: 392249 - DNA, 122 bp, Homo sapiens
ggccggttgggggtggggtgtgcctggcacatgcgccgcgggcactgggtggggggcctccgagagtcggaaggaggtggaggagagcgcgacgctccgcccagtctccgcccttgggcggg

SEQ ID NO: 392250 - DNA, 122 bp, Homo sapiens
taaccagcgcctttagggctagcctcccccccagctcctgcctgaaaaatgacatttcgccggtgtctccggagggggctgaatttcactttgtaactttctgcggaacccgagcccgggtg

SEQ ID NO: 392251 - DNA, 122 bp, Homo sapiens
gacgatccattctctctttccctcccactgggaggtgaagactgaaccagttatgacgtccgtgttttcagtcttggattcttgaagagcgctgtgcctgctttggttttggtttgggtcag

SEQ ID NO: 392252 - DNA, 122 bp, Homo sapiens
atccctgaggctgtctaaatcaggcactctctctccagggctctgctctaacagagtgagcgaggtttcataccattcttccacctgctgtttcactcacaaagatcttctcttcctccatc

SEQ ID NO: 392253 - DNA, 122 bp, Homo sapiens
caggatgcaaagtgatgtagatctcccatggtgaagttctgcaggtggatcaagtggacacgcagatgtgactgggtaggggcttgggggctggggaggatggggctgagacagtgaagtgg

SEQ ID NO: 392254 - DNA, 122 bp, Homo sapiens
aaaagacacacgtattaagcacttgtgcggtgtgtgtgtgtgtgcgcgcgcgtgtgtgtgcgcgcatgtgcttgcattttctccaactacaagccagtggaagtaggaacttaaaaactccc

SEQ ID NO: 392255 - DNA, 122 bp, Homo sapiens
gggggccgccgctgggaaccagcccctccagaaagagccgtctctgcacccgctcccacccgtgggaagcaccagatggggctgtctcccgagacaaagcctaaaaccaaatgtaccggaat

SEQ ID NO: 392256 - DNA, 122 bp, Homo sapiens
tttagaaaggtgagctatgcgtagaagaactacttgggatattcaagtgctgtatttgaacgataagcctatagataacagtctgaagctgcaagggagactttgttagtacactactataa

SEQ ID NO: 392257 - DNA, 122 bp, Homo sapiens
aggtcgtaaccaggagtgtagtgtagcacattaggtcgtaaccaggagtgtagcgtaggtcgtgaccaggagtgtagcgtaggtcctgaccaggagtgtagcgtaggtcgtgaccaggagtg

SEQ ID NO: 392258 - DNA, 122 bp, Homo sapiens
gcctcaggctgctttgtcctgatagtgctgtcctatgtgtccatcgtctgttccatcctgcggatccgcacctcagatgggaggcgcagagcctttcagacctgtgcctcccactgtattgt

SEQ ID NO: 392259 - DNA, 122 bp, Homo sapiens
tttggactgacccaacctcccgctttctctttgtaggcgatcagtgggtgaccgcggctgcgagggactttgtcatccgtcctccaggatctggggagaaagagccccatcccttctctctc

SEQ ID NO: 392260 - DNA, 122 bp, Homo sapiens
ctggtgccgctctccccagcagtgcaggacaaaagccaggggaggaagagatggcttagacgcccgggtccctccgcggcctcctcctgaaaggctcacaaagcgctcctttattctcccca

SEQ ID NO: 392261 - DNA, 122 bp, Homo sapiens
agtcggggagcgcatgccggggccgtactccctcctgggacagcgagccttccgaaagtccgagccccaagaaaagttgaccctgggtctgagagtaagagggaggagccgagagcatggac

SEQ ID NO: 392262 - DNA, 122 bp, Homo sapiens
cagtgtcacctttttttcaccttttaattttatattatttgcgtcatacatttcctgtaacggaagtgttaattttactgtactttttggtaccttttgggaatctaatgtattgtaaggta

SEQ ID NO: 392263 - DNA, 122 bp, Homo sapiens
agtagccttctctcattgcatgctcattacaatctgagcagggagctataccaatcacgtcggtggggaagctagcacagagaggtgacaagccttgtccaacacccctagctggtaagcgg

SEQ ID NO: 392264 - DNA, 122 bp, Homo sapiens
ggaggcacaaaatcgctttgtgcgacagcgcccgacagcttctccgcccggagccggctccgccgtgaatgggccgcggacaaaggcgtcccctcccaagtacctgtaattggagcgtccat

SEQ ID NO: 392265 - DNA, 122 bp, Homo sapiens
ttttgaattaaaaaagtaaattactgctaaaatcatcaaagtatgacttactgactaaatcggtcagtacctgtcctgagaacagtgacgatttgcatttatttggccactttaattttcat

SEQ ID NO: 392266 - DNA, 122 bp, Homo sapiens
cgcagcgagcgctgccactgccgcttccactggtgctgtttcgtggtctgcgaagagtgccgcatcaccgagtgggtcagcgtctgcaagtgagcggcccggggtcccctgggccctgatcg

SEQ ID NO: 392267 - DNA, 122 bp, Homo sapiens
ttaaactgctgctacagattcagcaggtgggagagtggaactgaggtactctgtttctgacgtgccccctgggtggccctactcctggtccctggagcactttgagcagcgagagtttctct

SEQ ID NO: 392268 - DNA, 122 bp, Homo sapiens
tttcgagatgaaaccgttccacctcaggccatcaggaagtgatatgattctcgtgaggagcgcgcagccgagatcccgcgcatgtgcaatccacaatagggttcgagcttctgtgagaatct

SEQ ID NO: 392269 - DNA, 122 bp, Homo sapiens
ctgcgcgacccggaatccttggaaggacttctcggaaggactcctctctgacaggtggggcgagcctatggtcgtttggacgtggagggatcctttcagaaccggcgatttcttttatttag

SEQ ID NO: 392270 - DNA, 122 bp, Homo sapiens
cagcccaagcatgggagaactaccagcattgcctcattgcaaaaaagaggaggaaaacaacgtgatccatgtttaacaaaagagtctgtggactaggaggtgggagggtaactacctgctga

SEQ ID NO: 392271 - DNA, 122 bp, Homo sapiens
gctgagtttcggtttctcagaatcagcagcagactgcgcccgccccagagaacttccccacgtattctccactgaggccccgtccgaccttatcgcgggttaacagcccaggatgttgactt

SEQ ID NO: 392272 - DNA, 122 bp, Homo sapiens
cttaagttcaaacaatgggcatcctatagccacctaaatgctaatagggcggccgccatgcgggaagtctcagatgttaggcttgcttgggagaacatggagaacttctcaatactcacgga

SEQ ID NO: 392273 - DNA, 122 bp, Homo sapiens
tcccccgccgccaggctgacttctcatcgcttgtttttctttttgcatttttcctcccaccgccgttgccgccctccccgtcctggccgtccgccctccgccctctgcagggacatctctac

SEQ ID NO: 392274 - DNA, 122 bp, Homo sapiens
caaagggcggtgcaggggagcgagtacaagctgaggcatcagcctgcctcagcgcttcttcgtggctctgtgatcactaagacaatttccctggtcacctcagtacctcagtgccttcgttc

SEQ ID NO: 392275 - DNA, 122 bp, Homo sapiens
agaccagctgctttgggcaaccgaggctgcttctgggtgaactcccaaactagatggtgccgagagccctggacctggcagctgggctggacatcacatggctctgtattccaggaaacggc

SEQ ID NO: 392276 - DNA, 122 bp, Homo sapiens
tgttgtatgaattaagtcgtaagacacttggaataatgcttagcacaaaatagtatcaaacgcagggacattttatgtgtgttctgttacccaaaggcatacattacgaaatatatagatgc

SEQ ID NO: 392277 - DNA, 122 bp, Homo sapiens
ctcagtgcatcaggaatgggtgtatgggtgtgtgtgggtgggtgtgagtgtgggtgtgtacgtaccaataaacaacctggttttaagacaatgtacaaatggcctccagtcttttttttttt

SEQ ID NO: 392278 - DNA, 122 bp, Homo sapiens
ccagcgcgtcccccccgcacccccggcccctcctccgcgccaactgtgtaaatcagccgccgcagtcctctcgccgcgcatcgcaggcaaaatcccggcttaggaagcaaggaagcaagtga

SEQ ID NO: 392279 - DNA, 122 bp, Homo sapiens
cggccagcctgtggagtcctccctgagaagcggagggcccggcttccaccgtgactccagcggcctgcttggggttttaattattattttgaaatttctgaatcgagctagagcgagagagc

SEQ ID NO: 392280 - DNA, 122 bp, Homo sapiens
atgctgcacacaggccggggttcactcctgtaccctccctgtaggatgctgcacacaggccggggttcactccggtaccctccctgtaggatgccgcacacaggctggggttcactccagta

SEQ ID NO: 392281 - DNA, 122 bp, Homo sapiens
gggcagcctcatttggggaaatgctagctgctgtttccaaagtggggaagcccacggtttcggacacagggctgacagcgctgctccagcagcccccagggccagaggaacccggccttagc

SEQ ID NO: 392282 - DNA, 122 bp, Homo sapiens
ggttctgtgccctttggctgcctacctctgaatatcctggccagcaagccatgccttccccgcccctggggccctgggagcccttcagctcctgtccccataatgggtcctgggcctaggat

SEQ ID NO: 392283 - DNA, 122 bp, Homo sapiens
agccaagatacagaactgttctatcacaaaggtctcatctggactcttgatgtttctcaacgtgcaacacttaggcacatcagaatcagttgagtcatttgttaaatgtgcagattcctccc

SEQ ID NO: 392284 - DNA, 122 bp, Homo sapiens
attggaaaaagaactgggtgggtggggcctgctggccagcgcggaaaaagctcgggcctgcgcattggagctcttgactggcccgccccccaggtgcagcgggccaatcggagtctagacgt

SEQ ID NO: 392285 - DNA, 122 bp, Homo sapiens
aatctgcggtcattgatggtggagtagattgtttgccaaactattaccataactgtcaaccgaaatcagaaaaataatctcattgtgctggacagatgcgtttcctgcattattgatatagt

SEQ ID NO: 392286 - DNA, 122 bp, Homo sapiens
ccgagggggagggtccggcgggcaggcgtggcgttggcctcctctaggtctgggggtggccgggctgcgtagcctcggcagggaccagcccagcccggaaggcccgactatggtacccctgc

SEQ ID NO: 392287 - DNA, 122 bp, Homo sapiens
gtttataccttttaatagccctcactacaacctagaagctcccatttataaatgaggaaacggaggcacaaagtaacttgtcaagggtcccacagcttgaagtggcaccagcggcatgcaag

SEQ ID NO: 392288 - DNA, 122 bp, Homo sapiens
tggtgccctctgacaatttagtgcacccgaaatctctggggaagaacccacccttcacggcggggcttcacggacacgaaggccatcggtgtttttcacctactggggagaagggatatgtg

SEQ ID NO: 392289 - DNA, 122 bp, Homo sapiens
attgcccgaggacacatagcggtgccggcgtctctgcatcccaggtgtctgctggggcctcggtttccccatcgcacagagacctcatcacggggcccatccggggaggaaggcggcacagg

SEQ ID NO: 392290 - DNA, 122 bp, Homo sapiens
gcacaagttcctgggcccgcccatcttccggacttgggcggggcgtaaaagccgggcgttcggaggacccagcaattagtctgatttccgcccacctttccgagcgggaaggagagccacaa

SEQ ID NO: 392291 - DNA, 122 bp, Homo sapiens
gaacgcagtttccctgtggtggtaaaaacacattcctgacaagtgacaagcagaagagtccggcagctgcagcgcctcactcggctgggacctcgtacttgaagatgacgctgaagagccgg

SEQ ID NO: 392292 - DNA, 122 bp, Homo sapiens
ctccttcccagacggcgcttcagctcattccaccgcccccagcagcccggtcgcccccaccgccactgagaaagcaaacaaaggggaggagacccctgcaggttctggatgccgaaggccaa

SEQ ID NO: 392293 - DNA, 122 bp, Homo sapiens
gtgccagacagtgggcgcaggacagtgggtgcagcgcaccgtacgcgagccaaagcagggcgacgcattgcttcattcgggaagtgcaaggggtcaggaagttccctttcctagtcaaagaa

SEQ ID NO: 392294 - DNA, 122 bp, Homo sapiens
agttcagaggcagtgttaatcacaaagcaaaaatgaaaatcttgcacaatcacaaatgggcgcccaggactgtatgttatttgtcaatcctgtgatcttcttggcctgagtacacacgatct

SEQ ID NO: 392295 - DNA, 122 bp, Homo sapiens
tgctcccaaaaatggcggacgcattcggagatgagctgttcagcgtgttcgagggcgactcgaccactgcggcgggaaccaaaaaagacaaggaaaaggacaaggggaaatggaaggggcct

SEQ ID NO: 392296 - DNA, 122 bp, Homo sapiens
cctggcggccggaagtgcgggactcgagggctctgcagcagagctccgtgggggcgtcaacgtgaattccagcacggcaaggttctctagcaccccggcctcagccttctgtctatacagtg

SEQ ID NO: 392297 - DNA, 122 bp, Homo sapiens
ccccaaacaaggaaaacacagtcttctgggctaaaaatacatatttatgaagtccctatacgcaggcaggcggcgcgttccagctgccggcctggcccagggaggacttggccgcgcggccg

SEQ ID NO: 392298 - DNA, 122 bp, Homo sapiens
ggcattgtgctttccagggtggggatttagggcttttctttattgggttggggatttgtgcgctgatcatcagcttgtcttccttaggtagcacgctggcactcttgggtgtgtgtgattgg

SEQ ID NO: 392299 - DNA, 122 bp, Homo sapiens
caaacccctccccgtcgagcagaacacccacagcagcctgagtgactctgggggcaccttcgtgatgcccacggtgaaaacggaggcctcgtcccaaaccagctcctgcagcggtcacgtgg

SEQ ID NO: 392300 - DNA, 122 bp, Homo sapiens
tgtgccccttctgttcctgcttccttcccctccctctgctctccaccaacctgtgctcttcgccccagcagcagcgcaccagacccgaagaaccatcacatcatcaagtttggcaccaacat

SEQ ID NO: 392301 - DNA, 122 bp, Homo sapiens
agaataaaatataagccttaagtcatcttggttaccataaatctcagaatgatgctttttcgatacttatgcaattcctattgcccaatttgaaaatgtcctggttcatttgaaaacagtcc

SEQ ID NO: 392302 - DNA, 122 bp, Homo sapiens
acatttgcgaggttctctctgaattacatgttggtctaaaagtaatccactatctgggaccgagaggaaagcatgtgtggaagaggcaggcattattagcagcgcgtccgcctcggccacct

SEQ ID NO: 392303 - DNA, 122 bp, Homo sapiens
cagcaatttctttccctctgagtgcttgtcatccaaggaccccaagtgggaatgagatgacggctttctcatctcagggaacccacaattctctatcactttcctaattgtgggaaagctca

SEQ ID NO: 392304 - DNA, 122 bp, Homo sapiens
cctcctccaggaagcgcgcccagacagtcctcggccgacagcgggcgcctgccagcccaccgtgctagtcttaagagcagccagggcagttaggaaggtccttctgccgcgagagaaaaatc

SEQ ID NO: 392305 - DNA, 122 bp, Homo sapiens
ggaaacagttttagaaaagttaactatattatatatatattaaataatagaaaagaaaaccgatttggtaattaggaagatataagttatatcaaaaaatatgctttcagtagttagatggg

SEQ ID NO: 392306 - DNA, 122 bp, Homo sapiens
tggataggggcaaacctacccttaaggaattagaagcttaattcaggaacaaaattaactcgaggttcccacacaagccagggaaaccttatccacctctactgggtatcttagcattgcca

SEQ ID NO: 392307 - DNA, 122 bp, Homo sapiens
tcaactctattacattttctggcaatgttttagagcgatgtgtctcgcgaatacctttcacgtcaaacaagaatgaatcgtagacaacaccagaattcacaaacgctgcaattaatactcaa

SEQ ID NO: 392308 - DNA, 122 bp, Homo sapiens
acgaggacatcagtggtggccccggtgctaccttaagtgctgctgcatttgggaagctgacgtggggcacgttttctttaacagcgagccagtgagtccccgtgcagccgtcaccagcccca

SEQ ID NO: 392309 - DNA, 122 bp, Homo sapiens
tctgtcgccgctggagcagctgcggctcggggacccacagacacagccggggtcgggagccgcccggggcagggctcgggagagcgggtgagttccccggcggcgccaccaccctccttgcg

SEQ ID NO: 392310 - DNA, 122 bp, Homo sapiens
tgtgtacctgcagctttcaggcttcccacacctggttggggagcaacctccttcccccgccgcccagatatcagaggagtatacctctcccaggtgagaccactgagcctctgggatacccg

SEQ ID NO: 392311 - DNA, 122 bp, Homo sapiens
cgcgagatcaggggaggtaggaggcccaccctacgccctgcccccgcggagcacaagccccgcctgcgtcccgagctcccgggtccgcaaagctgggccccaaagagctccaacgccggaac

SEQ ID NO: 392312 - DNA, 122 bp, Homo sapiens
ggcaacagagagagactccgtctcaatttaaaaatcaaaacaagccctttcttgcggtgacgacctacccacgagaacatgcctctcgcaaaggatctccttcatccctccccagaagagga

SEQ ID NO: 392313 - DNA, 122 bp, Homo sapiens
gtgagaaagacacctgaggcgtggccttgggcaggtgagaagacacctgaggcatggcctcgggcaggtgagaagacaccttcaggcgtagcctcgggcaggtgagaaagacacctgaggcg

SEQ ID NO: 392314 - DNA, 122 bp, Homo sapiens
atgcccccctggagttcacgtttcacgtggaaatcacacccaacgtgcagaaggagcaggcgcactcggaggagcatttgggaagggctgcatttccaggggcccctggagaggggccagag

SEQ ID NO: 392315 - DNA, 122 bp, Homo sapiens
agttttattcgtacacgcttaatatcatgggttgtcaaatcatgcttccaatttgcaatacgtcactcatttcagggtaatgacttacacatacaattttcaaacaaaaatgtaagatttac

SEQ ID NO: 392316 - DNA, 122 bp, Homo sapiens
aagagggactgtaggcctggtaaacaaaagttggctgtaacatgagccaggatatggaagcgtgaccaatactttggactctctcaatgctggccctctgcggttcatggctctcctccctt

SEQ ID NO: 392317 - DNA, 122 bp, Homo sapiens
tcgggtgggtagcggcgagcgctgtgcggtcagggcggggctcctgtgccctgtcggtggcgcagggagctggacgcggcccgttaccgccacacttcagccctgcttccccgtcacttttc

SEQ ID NO: 392318 - DNA, 122 bp, Homo sapiens
gggcgtcgagagggaacgagactgggacgttcccaaactctgggggaggctccgggaggccgggcttgggtgggcctccaagattgttcccacacccctgcccgctgcaaacccaatgcctg

SEQ ID NO: 392319 - DNA, 122 bp, Homo sapiens
tgcagctggaacaactgaccatcctgggggctgtgttgctggtcaccttcagcatggcagcgccaggaatttccagccaggccgactttgctgagaaactcaagatgattgtgaagattttg

SEQ ID NO: 392320 - DNA, 122 bp, Homo sapiens
ttgcggcctcgtggccgggcagctggaagcgcaggacttccaccccagaggccattgtggcgggggtgggcaaccctggttgggaaggaaaccggtcagagacaaaggtctctggctctccg

SEQ ID NO: 392321 - DNA, 122 bp, Homo sapiens
gagcataggagggagatagaacagtgctaggagcagatacaggcctggtattggcaaaatcgcaaagggttttttcccaatatgattagagagggaataccctttttaaaaaatagtcttgc

SEQ ID NO: 392322 - DNA, 122 bp, Homo sapiens
agttcacgttcccagccccagctccgggccagctttgcgggccaggcttcctaagcacagcggtcctaggccctgggtgcaaccctctgctgctcggttcttagctgtacatctggcgactt

SEQ ID NO: 392323 - DNA, 122 bp, Homo sapiens
acaaaacacaaaaacaagtgttggtttttgtgtggagatgtgtagaaattagaaccctgtcgtactgctgatgggaatgtgaaatggtgtggctcctgtggaagacaatttggtagttccac

SEQ ID NO: 392324 - DNA, 122 bp, Homo sapiens
tctcccttaacagaaatgcgtgttggactagatgtgaggagccttctgcttctgaatatacgatatctgaaaaggggcttaaaaactcaaacgcagcgggtagctgtgattcaaaacccgcg

SEQ ID NO: 392325 - DNA, 122 bp, Homo sapiens
tccgcctgggagtgtgtgggagttttctgaaggttctgttcctggttgagtctctaaactcggaggctgagaacaaaaaagtaaagcaggcagacacacctgtagtgtcagctacttggaag

SEQ ID NO: 392326 - DNA, 122 bp, Homo sapiens
ggggagaaagagtcccctcctaggaagtgtgtcagtactttttcattttactgtctactgcgctgggcactctggacacacagtgacatcagatccagcattcactctggggatccccagtc

SEQ ID NO: 392327 - DNA, 122 bp, Homo sapiens
acaggtcctctccacccaggctccagccccacaggatgaccacagaccacattccatctgcgtttctcaagaccagaggacaaggagtaagcacaatgtgtccggacaggggacctaggggg

SEQ ID NO: 392328 - DNA, 122 bp, Homo sapiens
taaggattcaccccgggtaggtgctttcccaatctttgcttttatgactccttctgggaacgatgagttgagtagccacttcccccatccacccaatccacgaaaatagaatggatggtgac

SEQ ID NO: 392329 - DNA, 122 bp, Homo sapiens
agcttcattagaaagtctgctgcaggtcacttaagaggtgctacccaaagtggcagccaacgaagtgtgacatcagaggcctcaagacctggcaccaatcctgacatccccctaacctttct

SEQ ID NO: 392330 - DNA, 122 bp, Homo sapiens
ccatttctggaattgtgtttgtgtaatcagaattctatgcaactccctagcgcatgctttcggttttctttctctgtagcttggtatttctttttatttatactgaggataaaatattcaaa

SEQ ID NO: 392331 - DNA, 122 bp, Homo sapiens
tgtactcgtaaaacaaggatcatcgatgttgtctacaatgcatctaataacgagctggttcgtaccaagaccctggtgaagaattgcatcgtgctcatcgacagcacaccgtaccgacagtg

SEQ ID NO: 392332 - DNA, 122 bp, Homo sapiens
gagaacctgaggattcctcacacatgtagtactcagagctctacggaaacccaggcacctcgacctcaagaggatcagcctggccagggtggcacaactcttccttccccgtgcacagcagg

SEQ ID NO: 392333 - DNA, 122 bp, Homo sapiens
tcaaggagagggccccatgacagcacagcaatacacaagcacacctgacacaggctggcacgcctccccccaaggtggggctggtgggtctacatgacttctctgcatcctgaggatcggcc

SEQ ID NO: 392334 - DNA, 122 bp, Homo sapiens
aactccggtctcaggggacagaatcctgaaaccctggctctggggtccggggcaggggtgcgctgcctcaggacagacggtgaaactgaggtccagagccggacatccaccgcctgcggagg

SEQ ID NO: 392335 - DNA, 122 bp, Homo sapiens
cctacaccagccttcgtgcccctggggctagcgctggaagcagcactggacgcaggaaagcgagaagccggctggggcgtaaagactgctctgggacccacgggagtccctcgccccgctta

SEQ ID NO: 392336 - DNA, 122 bp, Homo sapiens
cccgggcctggcgggggcatgagggtggcccggggcaccggaggacctgggcagggctggcgtgtgggccgagcagcccggcaagttaatcagggcttcacacccagactccggggccgccg

SEQ ID NO: 392337 - DNA, 122 bp, Homo sapiens
cttgtaaacttcattttcctggaagtaacagttaatagcaaagttgatgaaaaatattcccgtccacttgggtgcaagtctcattttgcaaagtctgtcaaatgcacgatgctcctatcagc

SEQ ID NO: 392338 - DNA, 122 bp, Homo sapiens
aaaacagaaaacagaaattgcctttgagggggcccagatgttggatttagaccaagacttcgaattataaatacatttcaaaattaatgtaattataagtaaatataaaagaggtatgatta

SEQ ID NO: 392339 - DNA, 122 bp, Homo sapiens
atcgatccctaggtcgccgctgtcgccaccgccgccaccggccgcgaactccccctttcccgtcacgtcacacaatatcggatcgtccattcgctgccgccgcccgccactcaagaaatccc

SEQ ID NO: 392340 - DNA, 122 bp, Homo sapiens
ccaccactttcttgctgtagctcccagcatccttcacaaactcctgcaggctagaggggccgcgggagaaggtacgctgaaaggagcccttgtcgcctggccctcgcggcagccctgatcac

SEQ ID NO: 392341 - DNA, 122 bp, Homo sapiens
tttagtggcatccctggcctctacccattagatcccagtggcacccagacacaaagatgtcgccagacattgtcaaaggcactggggtgtgggtgctgggtaaaccagccctggttgagagc

SEQ ID NO: 392342 - DNA, 122 bp, Homo sapiens
tagtctactttccggtagcggtgccagggcagtggcctaatacggaactccatttcccggcgtgcctcgcggaggccgctgaactcagaagcgggaggccggttccggttgcatcagcgagg

SEQ ID NO: 392343 - DNA, 122 bp, Homo sapiens
cggccgaggacccagaactgcacagcctgagccccagattgccaatgccttaggcgctcccgcagagtcgagccccgcagcctgtctgccggggccgaccccggaatctgccgcggctcgcc

SEQ ID NO: 392344 - DNA, 122 bp, Homo sapiens
gctcttctctaccacgcgatccagcttagcttttaccttttctctagaggtagagagggccgggtgccaactccttgctcaacttctcactggaaaagtggctgccttcctccgtctccctc

SEQ ID NO: 392345 - DNA, 122 bp, Homo sapiens
ggaaactccctctttgaatgcagtagcattggataattgtggatgttctctggcgtctggcgccgcaccaggacttgatcaccagttgtttcttcaaggcaaggcgatgtggaagctaagcc

SEQ ID NO: 392346 - DNA, 122 bp, Homo sapiens
ggcgggcgcgcggccttaacccgtgcgacgccgggcagctcctgcggcagccggggagggcgtgatggagaccacgctggaaatgggaatcaaggcacgtttctaaccttgtactggaacga

SEQ ID NO: 392347 - DNA, 122 bp, Homo sapiens
gttggtgtctcctggaagtcacgtcctggctggggctgacttggatttcacctgtcttttcgcttctgccgcagcagtttgcgttaggggcattgggacggtagaaatcttaagtccacagc

SEQ ID NO: 392348 - DNA, 122 bp, Homo sapiens
gcttcgcaggtagctctgagggactgctgcagggccgcgcgtccaccgatggggaaaactcgctccggaggtaggggcgtagggccaggggcgagggcatcgcactttgcagggggacacca

SEQ ID NO: 392349 - DNA, 122 bp, Homo sapiens
cacagtggtaatttcactaaaggtagtaacgacactaaggaggccagtacttacgctcgacgggtgctgaacggcagcctcgtgttgcagcctcacccgctggggcatcatgacgtcatcct

SEQ ID NO: 392350 - DNA, 122 bp, Homo sapiens
cccgcaggaatggaatactttttcttcctgtgtttaaatttctacggaaaatctgaccggcgcggccaccgcccctgccataggcgggcggagagcgcttatatctttaaggcaaaggcggg

SEQ ID NO: 392351 - DNA, 122 bp, Homo sapiens
gggatctggcattgaagcatctgttgatccactgtctcttcgccactccttgtcgtaacacgagaagtgattcctagctctgaggtgtccatgcagagaccacagacacatgcagtgactca

SEQ ID NO: 392352 - DNA, 122 bp, Homo sapiens
tgtctgctttctttgtgaacattattttcctgatggcgttacagttttctgcgatgaccccgatttaatgcgcagtggagaccctaaggggtcggcgagaggaggggcgcgggggactttaa

SEQ ID NO: 392353 - DNA, 122 bp, Homo sapiens
ctcccgcaggtgggtgggcccgaggagtgccctgtaggtgtttccgctttcgctgctcagcggcttctagacgctgacattgcacaaccaggtgtgccagaaaaacaggcacattgtcaaat

SEQ ID NO: 392354 - DNA, 122 bp, Homo sapiens
gctcactgcaacctctgcctcctgggttcaagcagttctctgcctcagcctccctagtggcggggattacaggcacccgccaccatgcccggctgttttttgtatttttagtagagatggag

SEQ ID NO: 392355 - DNA, 122 bp, Homo sapiens
aactgggtgtgtgctggtgaaggacacaatgaccagtaggccttctagtgtgctgggtgccgggcacagccaccactgcctttgcaaatgtggacacaggcaaaaaaaaaaaaaaaaaaaaa

SEQ ID NO: 392356 - DNA, 122 bp, Homo sapiens
aaatgctgaccagctccctgttttggaaaatgacctcatccccaggctgcccacaggaggcggagcatgccaatgccgttccttactggtgtgtatattactgtttttgtccttttcatgca

SEQ ID NO: 392357 - DNA, 122 bp, Homo sapiens
tcccacccacgatggggcccaccagcccgacccggagagtgtccgtgaagcagccggccccgcaaggacggctttggccaccaaccggaggtgggcctcatcctcccagatccatggagtcc

SEQ ID NO: 392358 - DNA, 122 bp, Homo sapiens
gacgagccctgcgccctccgcggccgcccggcgcgagctcccgggcggggcgctgtccagcgcgcacagagttaaaggcatcatcgcagccattagagggaaaagttgcggcgccgcgagcc

SEQ ID NO: 392359 - DNA, 122 bp, Homo sapiens
gagaccgccgccaagttcgggccccagctgcaggcatctgaagcctagacccatccatgccgcgttcgcctatcttttttggaaatatcgaaggaaccgactttgaactccagagggatctt

SEQ ID NO: 392360 - DNA, 122 bp, Homo sapiens
aaccctgtgcatgaaccctgggcctggcacgtggacctcctgtgaccgtccccacaggcccgtgaggctgagcttggcactgcccaagaccacacagtccatgcgcagtggagctggggtcc

SEQ ID NO: 392361 - DNA, 122 bp, Homo sapiens
aggctcaggcaggaggatcacttgagcccaggaggtcaaggctgcagtgaaccatgatcacgccactgcaaaccagcctgggcaacagagcaacaccccgtctccaaaaaaagaaaaagaaa

SEQ ID NO: 392362 - DNA, 122 bp, Homo sapiens
tttaatctcttggtccttcagtttccacacctaggaagctggaacagcagcagcatccagcgccaggactggagtcatatacgaactctggcacctgggaggcgcgcgtcctacgtcagttc

SEQ ID NO: 392363 - DNA, 122 bp, Homo sapiens
tcccccacagcctcactctcgcacccgccacagaaccggatccattttgaaatattgaagcgactgatggggacgaagggaaccacacaccacactcaaaaactcttgatgttttcttgcta

SEQ ID NO: 392364 - DNA, 122 bp, Homo sapiens
tccagcatattaaattaggtagtttttcttatttactttttgccgtgggggcctcacaatcgcagtgctgtttagttaagaatcaagtcaagaaaagtttgggaatcggtgtatgtaacttg

SEQ ID NO: 392365 - DNA, 122 bp, Homo sapiens
gacaccttggaaatgaagtttatgacgtcatcgttgcggctggccaatagaaaaagctcccgcggagaggtgttccttccccttcgactcagcttcttcacccgcgtgagcgagcgcgcgcg

SEQ ID NO: 392366 - DNA, 122 bp, Homo sapiens
ggccacctcagaagtccaccggggtcctggcgcgaggcctgtccttcacagagcaagggacgcggcacagacgctggcggcgacttgggccccacctgggccccgcgagggggtcgagacgg

SEQ ID NO: 392367 - DNA, 122 bp, Homo sapiens
agaaatgtaaatgattaaaattccaaaaaattagttgcaagtttgtatcatttacggaaccgcactaccaatttgggaacatcctgtgtctcccataacctggcgaatttcttttggattca

SEQ ID NO: 392368 - DNA, 122 bp, Homo sapiens
tgggtggtcggggaaggctcgatgagaggccgggtggtcagggaaggctcgatgagaggccgggtggtcagggaagcctcgatgagaggccgggtggtcggggaagcctcgatgagaggccg

SEQ ID NO: 392369 - DNA, 122 bp, Homo sapiens
gcccagggggcctggaggactgcctctcacatgtgcacgcacaggacagcctgtcctgtgcggtggcggtcacagcattttctctacctttcttgaaagtgaggcctgcagagactgaaggc

SEQ ID NO: 392370 - DNA, 122 bp, Homo sapiens
gcaaagcgcgagggctggaactcagacccagaggggcggtccctgttgcaagtcatctcccgaaagggcggggccggggctcatcccggaaggaccggtgtctaggtcaccctggagcgctc

SEQ ID NO: 392371 - DNA, 122 bp, Homo sapiens
tcgtggtgacttctacttggaaatgtgacctgcgaaggtctccttgcttatatacctcagcgtctcctgatattagggtattttcaaattcctcctaattcttcacagcagtcttctttgtg

SEQ ID NO: 392372 - DNA, 122 bp, Homo sapiens
aataccttcagctaagatttcccatctaaatacacttaagaggtggcttagttaactggtcgtccacaaatattgaagctgttgttaactcctgatatattctctgaaaagagaatattcat

SEQ ID NO: 392373 - DNA, 122 bp, Homo sapiens
gaggactggaggcgccagccggacagcctatgagtaggtccctgggtcggtgccgcttcgcgggtcagcacggcctttctcagagaaaacctcctaaacgtgtgaagaccgctttgggggaa

SEQ ID NO: 392374 - DNA, 122 bp, Homo sapiens
ttccaactctatcaactttacaagtgcaatcgggccaattgacaggagcgcctcgctggccgcttgttttcactaggatctcagagcgggacctagatgtccctggcctttgcagaggtggc

SEQ ID NO: 392375 - DNA, 122 bp, Homo sapiens
aggcgccggaccccgcgatggcttagtgggatgcagtcggagacgcgaacctccagggtgcggccctccctgcggcaggaggaggggtcagggcggccacgcggccggggcttcgtgcccgc

SEQ ID NO: 392376 - DNA, 122 bp, Homo sapiens
gccctcgacggcctccacggccgcgtcccaaaaccgccctccccacgcccctgcgcccagcgctctgcagtaggccctcgacagcctccacaactgcgtaccaagcacagtgaccatccact

SEQ ID NO: 392377 - DNA, 122 bp, Homo sapiens
cactgtatcagaggttaacatttgggtcactggttgctggtttgcacctctgtcaataaacgattgagggggtatggattcaaccagagacctgaccctcactgagagtcctgaatgcaagt

SEQ ID NO: 392378 - DNA, 122 bp, Homo sapiens
cgtggatgtccgttgtgtcccgagactaggacgtggctccaggtgcgccctgccccgcggcgaggttcccagaatggcccttcccagcccctaccgaaatcctagcgaagcccccccatatt

SEQ ID NO: 392379 - DNA, 122 bp, Homo sapiens
gtcacggcggcggcgtggggttcgctgtgtgacacaattacaacaactttgtgctggtgccggggaagtttgtgtctccaacgaatcccctcagtgctccccagccccgcgcgctccggccg

SEQ ID NO: 392380 - DNA, 122 bp, Homo sapiens
acacagagggagaggccggatggcagagcgtgcacggccgaccccaggatgcaacagcaccgaatgccagtgccacagagagcaggctgtgccacacgcgggcctggcatgacctggtgccc

SEQ ID NO: 392381 - DNA, 122 bp, Homo sapiens
ggttgtaagttcagcctttggtgtttgcactactgctatcataaggggtcagggacattccggggagaagtgaccactaaggtgaggattagagagtgagtagaagtgagccagacaaaaaa

SEQ ID NO: 392382 - DNA, 122 bp, Homo sapiens
ggtatcgaagcacaagcggcataagtccaaacactccaaagacatggggttggtgacccccgaagcagcatccctgggcacagttatcaaacctttggtggagtatgatgatatcagctctg

SEQ ID NO: 392383 - DNA, 122 bp, Homo sapiens
tcacagacagagggtctccggccaccccccacacacccaaagacaccaggttctcaaacgcggttttatgggaacagagggaccggctccatcagaagcatttactgaaacagaagaaacag

SEQ ID NO: 392384 - DNA, 122 bp, Homo sapiens
aaaagcaaagcatttcttcccttttggaggctgagttcttttttccccaattcgggagagcgcaaccagccaactaccaccttctcagaggcgcggacaccgcgcgttgtcgctggatccag

SEQ ID NO: 392385 - DNA, 122 bp, Homo sapiens
cagaaggagttgggagatgagccttccgcaaactcctgacctgtgggtccgtccgttcaacggccaaaggctggcggaggagggatcccctgcctttctcggaacggaacggagcagagtcg

SEQ ID NO: 392386 - DNA, 122 bp, Homo sapiens
cacccctttgcttaaatacctcctgtggctccccattgtactgtgtctcctctgtaatgccggtcttgacttcctccccaacaggcacattaatcaccagggtttttgtagttctttgtttc

SEQ ID NO: 392387 - DNA, 122 bp, Homo sapiens
ctacaggcaagagaagcgtaacacagcctgacaatttcgctgagttgaaaagctaataagcgttttggggtgtggatgacaggggaaagatacttagaatttgcaaggcagtgttcctgaaa

SEQ ID NO: 392388 - DNA, 122 bp, Homo sapiens
acagctgttcttcctagcttggaaagcaagtcatttgttttctacacacacacatgcatgcgcgtgcacatacacacaaccacacacacaaacacacatggttatcaacatgctgctaggaa

SEQ ID NO: 392389 - DNA, 122 bp, Homo sapiens
ggtggcagcagctccacttgtccccacggaagacgccagggtggtaggagcccagcagtccggtgttgttgatgctcaccttccacagcgcagacagccactggttaagctcattcacacac

SEQ ID NO: 392390 - DNA, 122 bp, Homo sapiens
agcccagggcctctgagtaccttggcggctagccaggacttggttcacccacttctaaaacggcaggaacacagtggcagggagccacacagactcagtttccctgttgtgtaccaagcatg

SEQ ID NO: 392391 - DNA, 122 bp, Homo sapiens
cagccccatccccattcccaatttggcatcctctttgctttctccggatctgcttggtgtcggtgacagccgaggggagtgggaaaggagctggggagaaaggcaaaagaggcaggggtgca

SEQ ID NO: 392392 - DNA, 122 bp, Homo sapiens
gccattttagctgtgctctcattttagcataaaagggagtttctcataaacccagactaacgttttcaaaattcataattgttctttccctatatttgccattaaaaccttgattacaaaac

SEQ ID NO: 392393 - DNA, 122 bp, Homo sapiens
gccgggaccagatcaacgccgagatccggaacctcaaggagctgctgccgctggccgaagcggacaaggtccggctgtcctacctgcacatcatgagcctcgcctgcatctacactcgcaag

SEQ ID NO: 392394 - DNA, 122 bp, Homo sapiens
cgcccgcttaccttggagacgcagcaactgcagcggaggctcccccgcgacccggccgcgcgcgaccaagtgctcagcgcagcgctccccctgccgccccgccccgcccccagccccgcccc

SEQ ID NO: 392395 - DNA, 122 bp, Homo sapiens
gtgaattctacaccttcaactgaggtattcagattcttgcactgggactgaatagctagtcggggcgactcacagagagcgaggaaaagcagggtggggagatggcccacccggggggcaac

SEQ ID NO: 392396 - DNA, 122 bp, Homo sapiens
ctggaaaattttgtgattgagcaagcaaatcaagcccatgcgtagtagtagactgggaaccggtgggtgtgagacccaggctctatgtggcctacactcttctgaactcttctgagtcttga

SEQ ID NO: 392397 - DNA, 122 bp, Homo sapiens
gatgctggatgggcgggacctgcgcacccttgacccctcctggctccggggccaggttgtcggcttcatcagccaggtgcggggccacatgggcagcccttggctcccactgcccgtcctcc

SEQ ID NO: 392398 - DNA, 122 bp, Homo sapiens
atcctgccgatagttctgcgcatgtccactgcccactgtttggcttcacggaaccctgtacgcatgctcctacgctgaactttaggagccagtctaaggcctaggcgcagacgcactgagcc

SEQ ID NO: 392399 - DNA, 122 bp, Homo sapiens
tgtattcaaaatacaagcaattgaaagatttcctcggtcattctttcagtccttaatatgcgtagtaatgagcctggaaacaggttcaatccctcagcaattgtttaccttcctttgaaaga

SEQ ID NO: 392400 - DNA, 122 bp, Homo sapiens
ggccaatcttgggtcctgtggttcagaaactttcatctggtccttttcgctatccttctccggggtcttttcaagcatttaacattttggggatgcctgttttgtacccagcaagacgctga

SEQ ID NO: 392401 - DNA, 122 bp, Homo sapiens
ttctctcaaacccaggaaaactgcattctcatccccattttccataaacgtgtcctgtcgcgtaccactggtaggtagtgtagctgaaatatgtttccagagtcttatctctaacagaccac

SEQ ID NO: 392402 - DNA, 122 bp, Homo sapiens
catatccgcacagaactggcttggatttccaccccccaggagccggggtcaccagtgcctcgcgcaccgcggtgctgcgcaggccgcgggcatacgggggtgaggaccccgggcgttggaca

SEQ ID NO: 392403 - DNA, 122 bp, Homo sapiens
gcaggcgcactctgccggcaacgccgaggcgcttctgcatctgtgggccgaggtgtgtggcgagcgtccgagcggctggggaaagtggggtgtgggaacactgaggggtcccaaagaaaggg

SEQ ID NO: 392404 - DNA, 122 bp, Homo sapiens
atacttaaagaatgaagagctctgtatacaattgttttcactgctctgacaccaatttaccgaaaaaccttggtagtaagtcatttgctccaagcctctgtgtcttcattattttaaaaaca

SEQ ID NO: 392405 - DNA, 122 bp, Homo sapiens
tgtcaactccccgaggtggggctcaggcgctggaggggtcggggccgtggtctcagtttccgtttcttccctgccggctggttcacagagacaggtagagacagatggctggtgtgtcgctg

SEQ ID NO: 392406 - DNA, 122 bp, Homo sapiens
aggcccgcgagctgcgcgggccgtcagcacccctagccccggcgcggcggcgtgcgttcccgcctttgtccagctctgggttttcaaaccttgccccgctgaaccattactccctgtagggg

SEQ ID NO: 392407 - DNA, 122 bp, Homo sapiens
ctaagaggtagaaacaccgagactctaccaacaccgcggaaacacaaagccaaccaggagcgcaactgtaacagtgcgtccccatgccaaacacatcccccgcgctctcctccgtttccggt

SEQ ID NO: 392408 - DNA, 122 bp, Homo sapiens
aaaagccgatcgacaactctgtagtgatttagaagagaattgcaagacattaacacagagcgtcctaagtgacaggatggtctggcgaccacatttcccggcagccctcgcacagccaggcc

SEQ ID NO: 392409 - DNA, 122 bp, Homo sapiens
gagtatgcagttaaagtaattggagattctttgaccagacgttttgagagtctggcagcccggaaaggtgggatttggcagctatgtgggaccttccttcaggcactaaagggcttcctgaa

SEQ ID NO: 392410 - DNA, 122 bp, Homo sapiens
tgatgtccaaatgaaaaacatggttaataccggggtaagatttgacaaggccagtaatgccgtgatctatcacagatggatccatccagacccgggggaaagactgatgtttaaaaagaaaa

SEQ ID NO: 392411 - DNA, 122 bp, Homo sapiens
ctcactcaccagctcatggtcccgaacctgcgtctgccgccggggtcctcagccacaactcgtttctctagggtcacttccggattcaaccagtctccaggaagtgacgtaagcccgcctct

SEQ ID NO: 392412 - DNA, 122 bp, Homo sapiens
tataagaaggaaaagaaaaaaaatgaacaatggggttttatcatagtgttgggaaaccaccgtttcaaaggtgaaagtgtccttttacagtctcacagcgatgcctggcaggaagtgtgttt

SEQ ID NO: 392413 - DNA, 122 bp, Homo sapiens
agagttgttgtgagggttaaataaactcagtataagtcaagtgctcataccaatgcctgacgcagaataagtgcatgatgtaaattatttcaattattattataagataaaatcctggccgg

SEQ ID NO: 392414 - DNA, 122 bp, Homo sapiens
ccgccagcgcgtgcggcggaggccgagcgtctctatgatcctggcttctggcaacgtcatcgtcacgcgccggatccaacccccaaccactttagccagctctagaggcgcgcgtggccggg

SEQ ID NO: 392415 - DNA, 122 bp, Homo sapiens
taaattgaatctggaaccctggatcattctatgaaattttccaaaaagctagtcagaggccgggcaccgtgggtcacacctgtaatcccagcactttgggaggctgaggcacgcggatcacc

SEQ ID NO: 392416 - DNA, 122 bp, Homo sapiens
caggctcctggttgcaatatacggtaacacattgtgctttgtattgagatgtcctggactcgcgcacacaaactcagggctataagataaagataatttaaaaatacaacagaccagagtca

SEQ ID NO: 392417 - DNA, 122 bp, Homo sapiens
tccacaggtcccaggaccacccatcggatcagggatcactccagactcctctcctagaggcgctgccaccctggaagcacatctggcactcagatcatgttcagtcagaaaaacgaagccac

SEQ ID NO: 392418 - DNA, 122 bp, Homo sapiens
ccaaagtctttgacttggaccaggtgaggaagcgcctcggaacaggactctcccccacttcggtggtgctcctgcaggaactggaacgcttcaacaagcttgtggtccggatgacgaagtct

SEQ ID NO: 392419 - DNA, 122 bp, Homo sapiens
ctactggtttcagctgattcaatgggcaaacgcgacacgtccgcatgtcagagaactgcacggtgattttgccctttggggtgatgcgagtcacagtgccttctccaaactcatcgtgcata

SEQ ID NO: 392420 - DNA, 122 bp, Homo sapiens
gtggctgggggagtgggacccagcctcctgccctcccccagctcaccagtgccctcgttgcgggagtgcagcaactccatgagtggggccgaggccccctctgcatcaatggcgtcggccgc

SEQ ID NO: 392421 - DNA, 122 bp, Homo sapiens
catggaacctggtattcaccaggtgccagcaaaagtcatcgtgaacaatgcatattcaaacggaccttaatgtgctttcagctggtacccacagactctaagatgggcacatattaaaaagg

SEQ ID NO: 392422 - DNA, 122 bp, Homo sapiens
cagggactgtaagaacgcatacacacacccctgcacacccacttgtcttccctggaatgacgtaggaagcatgcatctgagcttcttcaagttccagccaccccttcagctgtttgaaactg

SEQ ID NO: 392423 - DNA, 122 bp, Homo sapiens
ggggccgcgggggctgggcgggccggagtgcgcggtagagggggcggcgcggccggggtgcgcggtagagggggcggagcggccggggtgcgcggtaaagatggggcggcgcggccggggct

SEQ ID NO: 392424 - DNA, 122 bp, Homo sapiens
gaggcgttccgggctcgccagccgtgccacccagccctgccccaggactagccgacccctcgcgcagtccggggagccactccccccaactcacgccccgctactccagccgcagctcggct

SEQ ID NO: 392425 - DNA, 122 bp, Homo sapiens
gttgccaggtgaaaggatggataattttcttgcatgcccgtcgcatgccagggcctttcgcgtgccagtgcgctggggctttagaacagccctgaaacgtgttcatgtgccggcgtggaatg

SEQ ID NO: 392426 - DNA, 122 bp, Homo sapiens
acattttactccaaactgttgaagacagtgctttctcgttcacagaagaggcttttctagcggcacgaaagaatttggaagcggcagtgttacggtaaaaaaccgacaaggtgcctgatgaa

SEQ ID NO: 392427 - DNA, 122 bp, Homo sapiens
ctccccaggcagaaggccatgtctgggcttgcctggggttagtggttcctatgcagggcccgttctgtcccatactgggactcctcctcttttgaattgctgcttcctccagtcagtttccc

SEQ ID NO: 392428 - DNA, 122 bp, Homo sapiens
cacacacctgcacacacatgtgctcacgtgtagacacccacatacctgtacatgcactcacgtgctcacatgtagacacccacacacatgcacacacacctgcacattcacatgctcacgtg

SEQ ID NO: 392429 - DNA, 122 bp, Homo sapiens
ctggaaacgtcagtgtcagtgaaaaccgtgccagtgacacacccgtagtttttacccgcacggttgttggcactcacctgtgggggtgctgttcatgctggcggggctcccatcactgtggc

SEQ ID NO: 392430 - DNA, 122 bp, Homo sapiens
ctacaatgtcaaattctggggaaaaaaaaggacctgcatcgtgcaaactcctattgtgtccgagcctgctcctgtgtcaatctccagtgtggcatccatgctccttacggcagtaatgtgcc

SEQ ID NO: 392431 - DNA, 122 bp, Homo sapiens
ctacgcctgcccacgtttggagggatgctccgccctatcccgccccgtcccgcccttccccgccccaccccaggctgggacccggggagcctatgcctgctgtggctccgcttcgtcccgcc

SEQ ID NO: 392432 - DNA, 122 bp, Homo sapiens
aagtgcttaggattacaggcgggagccaccgcgcctggccaaggcggccttcttaagaagcgcgcgtaaaaccccaacttcctgctctggcgctgcggccgctggggatctgagtgggctcc

SEQ ID NO: 392433 - DNA, 122 bp, Homo sapiens
ttacaagcgctctttaaacacgccttaaactacttatttaatcctccacactcagggaggcgcaatttattctcgagttgcgagtgaggaaattctggctcgtggcttcgattccttcatcc

SEQ ID NO: 392434 - DNA, 122 bp, Homo sapiens
tgaagtggaaagcccagaaaggtcatacagctattaagtagggaatcgaagactccagtccgggctgtcttaccctatgcccttgaatctttctgttgcagtctgacttagctgcccaactt

SEQ ID NO: 392435 - DNA, 122 bp, Homo sapiens
gtttgaaggtgctggcgcggcgctgttggccagagatctctatcaaccagggtcatctgccggcaatgccatagaggcggtcccgggggcgggccttcttgggtcacgtggacggcctcgcc

SEQ ID NO: 392436 - DNA, 122 bp, Homo sapiens
ggtggatgatgggggtgtgcggggagcggggtagggcagccaccatgcggggagcctcggcggggcgtggggcttcaggaaggcgtggggcttcggcggggtgcgggccctcagcagcgtgc

SEQ ID NO: 392437 - DNA, 122 bp, Homo sapiens
ttacaggggcaatgaactcagatgcaaatcctaactcctgaaatagtctccacaaatgggcgttgggcttgaaactttcatgccattggttggaatgacaactcagcagccagctctcccct

SEQ ID NO: 392438 - DNA, 122 bp, Homo sapiens
tccatcagccccctgcccacctcgggaccccgcccacatactcaccatttcccagcttcccgggtgtccaggctgcttagctatggatctcctgatacctgcaggtcagagggcaagaggct

SEQ ID NO: 392439 - DNA, 122 bp, Homo sapiens
gttgtcctgtgcttaacttgaagcagatgtgccctctgtgaaccggggaatggggacggccgacacagggccactgcgtgcaacagcgccgggccagggctaaggaacaggcagagccggcg

SEQ ID NO: 392440 - DNA, 122 bp, Homo sapiens
actttagaacacatgttgagatggtgacatttcccagcctgcctgcccctctgcccaccccggtcacattgccctgagcttctttccatgacagcagctccgacgagccggcaggaaactca

SEQ ID NO: 392441 - DNA, 122 bp, Homo sapiens
cgcccggtagagtgtgatgaacttggatgccagccttgtccgcgggaccacgtacttctccgtaaattcacccttgtccagttgctgtctaccttctgccatcagaacgcagttaatgaacg

SEQ ID NO: 392442 - DNA, 122 bp, Homo sapiens
aggtttatatacactaaggagcaagattaccttgattgcttgtgtgcccgagggtggggtcgggagagaaaagaaaaagcaacagcagcagaatagcagaggcaagaagtttagggcttcag

SEQ ID NO: 392443 - DNA, 122 bp, Homo sapiens
gaccgcgactacagcgtttaataatgggtcctcaggcaaaaactccacggatgggaaccccgcgcctctgaagctgcctaacgaggcggtctcctggtggcgcctgccccgccaaaggagca

SEQ ID NO: 392444 - DNA, 122 bp, Homo sapiens
cgacagctttcgccgcagctgggtccccgggcgctggcggctgcggcccccagatacgggcggaggctgcaatatgcacatgcggccacagtgtggctccaggggcccgccgcgggacacgc

SEQ ID NO: 392445 - DNA, 122 bp, Homo sapiens
ctgtactagtagtaacagctcacatttatgtagcacctattctttgccagtcccgttgtacgttgttttaatcagttccaacaccctatgaggtatgtgttgttatttctgttttacagatg

SEQ ID NO: 392446 - DNA, 122 bp, Homo sapiens
ggccgtggtgtggaatagagactgggctttagtcgcaaccttgggaaagtgtatcagcctcggccttaatgtccttgtctgtgggatgagaatttcaacactgcccttgcaggagaatagtt

SEQ ID NO: 392447 - DNA, 122 bp, Homo sapiens
gagaatgtgtaaatgtacggagacgcccttccggagggtataaagtctttgctctctcttcgctctacgaaccaatcccatcactgctttggtgcgtgcaccactttttaaagccatcgtct

SEQ ID NO: 392448 - DNA, 122 bp, Homo sapiens
acggagaattaccccctaccccagccaaaatgattggacgcacaatccagttctgaccaacgagaagagtgtttatttgctgggggcatctgagacagcagaggtggtacacagagaagatg

SEQ ID NO: 392449 - DNA, 122 bp, Homo sapiens
tgggcctataaagaaacctccaccacctacaaaagtagaagagctgcctcccaagcccctcgaacagggggatgaaacccccaaacccccaaagccagacccactcaagataaccaagggga

SEQ ID NO: 392450 - DNA, 122 bp, Homo sapiens
acggcgcagcgccgaggcttcatccatcggccggtgcagggtccgggcagggagcactgtcgaccagggtccgaccctgggagagtccagaggtggcgcctctggcagggacagaggagggg

SEQ ID NO: 392451 - DNA, 122 bp, Homo sapiens
ctctgtgggccaaaagaatgaggtcactgtcaccaatgaagtcaccactgcatgattcatcggacatcagttccccactgggaatgctatgacattcccagagcttctcctactcttagctc

SEQ ID NO: 392452 - DNA, 122 bp, Homo sapiens
acagcctactgttgactggaagccttcctgataatttaaccagtaaaataaacacattttcgaacagcctactgttgactggaagccttcctgataatttaaccagtaaattaacacatttt

SEQ ID NO: 392453 - DNA, 122 bp, Homo sapiens
tgtgcacaccagctggctctctgacttcctgctcctctccataaagttcctttgctatgacgtggccacaggcagccttctgtgggtcccctggctttctccacatgctttgtttcagaagg

SEQ ID NO: 392454 - DNA, 122 bp, Homo sapiens
acagaaaaactcaacctcaaagttttagtccaggtgtctgacttcaggatggatgctcttcgcagacctcccaacaacaatgttgcctgaccttctggcaagtttccaagagtgccaggacc

SEQ ID NO: 392455 - DNA, 122 bp, Homo sapiens
acagggccaggaagtcgatgtccttcttcctccgccttttcttctggggcatcattctgtcggctgccttctcccagcgctcgcaggctcactgtgccgcctcctcacacctgcgggaacct

SEQ ID NO: 392456 - DNA, 122 bp, Homo sapiens
catttggatgaggcacttcacttctcaggttcacggtcatttgatcccctctgctctgaccgctgtcccccctctctgctgtaacttcatttgcagccaccccttggcctctccgctccacc

SEQ ID NO: 392457 - DNA, 122 bp, Homo sapiens
ctaattgcctgaaccattgcctgagcttttttcctgattgtgcttcttggctccaatcaacgcctcacattgctgacaaagatgactttttaaaatacagagctcatcactgcacccttgca

SEQ ID NO: 392458 - DNA, 122 bp, Homo sapiens
attctgaaaaggttgacaaccacttctttgttttactcagcagtctggggaaagctgctgcgcattacacgatcatgagcaaaattatacctattaggctctgatatgagtattggaatatc

SEQ ID NO: 392459 - DNA, 122 bp, Homo sapiens
tcatcaaatcctcacaatagccctgtaaagtaggtccaggtaggtcccagtaggtccgagcgtcacccccatttcacggacgagaaaacagaagcaaagaaacataactgcttaagggcacc

SEQ ID NO: 392460 - DNA, 122 bp, Homo sapiens
aggctcctgcgtttttgaaagcctttgcacctcgtttggggattcctggagggaggcctgcgctcattcatgggctggaactgagggaaattgttgggggactggtatcgtgtgtgaagaca

SEQ ID NO: 392461 - DNA, 122 bp, Homo sapiens
gcgtggccccggggtagccactgcagtcgtggccagggccgcaggccccgctgtgcagcgcgttcagctttgacatccaggacttggggaaggagctgaggaagtagacaggaagttgtagg

SEQ ID NO: 392462 - DNA, 122 bp, Homo sapiens
caggcgaccgcgtgtgctcccagacaccctggagagccatctcccggggtcacggcgcgccgcctgggccctactgggcctcctcagctctgagggaaatgcccgtgaaggtggggcaggtg

SEQ ID NO: 392463 - DNA, 122 bp, Homo sapiens
atgggcctctttgtacgcaggtgaagtagatttggcaatcacaacagaccctttgtgtgacgattgtgatgataagcacctgtcgttctccacttgcctgctgtttgccgctggagggagcg

SEQ ID NO: 392464 - DNA, 122 bp, Homo sapiens
ggtgagaggcgggcaggaggggaggagtagggaggcgagagcagcgggcgggaggcgccacggcctctcagacgctggcgcccgcagccgagaagccagagagaaagttcccggggagagct

SEQ ID NO: 392465 - DNA, 122 bp, Homo sapiens
cgcaggcgtggtgcagaggaccaacctgggcatcctgcgggcgctggtgtgccaggtgaccgccagccggccggggcgggacggagggccgcgggcgcgcggcggccgagcctcctgcgggg

SEQ ID NO: 392466 - DNA, 122 bp, Homo sapiens
agggctctgccctccaccctccctacccttctggcctcgctgtccctggggcaagaaccccggtgagcgaggtctggaacccataggcatcagttgcctttgccccaggcgcccagagccgg

SEQ ID NO: 392467 - DNA, 122 bp, Homo sapiens
gggacagatatgcactcaaataattaaaatatatcctgataagaatatagcataggtacgcgcgaagaacttggcaatcgaaattttgttgttcaggctgggcgaggtgtctcatgtctgta

SEQ ID NO: 392468 - DNA, 122 bp, Homo sapiens
tgcctatgccatagaggtaggcccaccagtcttcactgttccttgtaagccagccctagccgcagctaaacacaaggcagaatataaacccaagcagagccaatcaaatctccattttccca

SEQ ID NO: 392469 - DNA, 122 bp, Homo sapiens
ttcttatagttctggggattagaaagtcccagaccaaggcaccagcaatttggtgtctgacgagagccatctcttgtttcatagacagcaatgccttctcactttattctcatatgattgaa

SEQ ID NO: 392470 - DNA, 122 bp, Homo sapiens
aagaggcagaatctatgatgggaagggctctaggtgagcaactctcttcccaggctaactcggtccctgaagctcctttccagattacacctttcatcttgggagcttttcactttctgatt

SEQ ID NO: 392471 - DNA, 122 bp, Homo sapiens
gggcgtcgggccgagtccggctgcagttgaggtactggtcgaactcggtgaggtccacgtcggcccacagatcggcggcgggccccagcggctcggcgctctccagcggcggggcctcgggc

SEQ ID NO: 392472 - DNA, 122 bp, Homo sapiens
gtggctggggagtcacctgagtctcatatacgccctcgatgtctggcgctgacagctcagcgttgatctcgttgatgtgttcctggtacatgtcctctggcactgaatactcatagagattg

SEQ ID NO: 392473 - DNA, 122 bp, Homo sapiens
gaatcaactgctgacagattattgattttgccaataaaccatcagtgtttttctaatcttcgtgagcattttctcgaaaagcacaccacacactaaccccttaatatttttctacaaagcct

SEQ ID NO: 392474 - DNA, 122 bp, Homo sapiens
cgactgctagcggtactagtccagttactgggcactagccatactaaccagtccagttgccgggcactagcagtactagtccaagtgccaggtatcagtggtactaatcagtccagttgcca

SEQ ID NO: 392475 - DNA, 122 bp, Homo sapiens
aagggcgcgttcccggctgcacgcccccgccgccccgtcgggaacgcgcagccccgggcccgaggtgccagcggccacgcccccaggagcccagggccctccatctgctcccatagcgaaaa

SEQ ID NO: 392476 - DNA, 122 bp, Homo sapiens
cctcctagcagaacgcagatgtcttttattacccctttcaccatcattcccctcttccctcgtcctgcaggactcatgtggccttgggaggcccaggtattcctctgccctctccctcactc

SEQ ID NO: 392477 - DNA, 122 bp, Homo sapiens
cccagcctgcgcgcagcggagcggttggcgttgccggagcggttgccggagccctgcagccgccgtagcctgggccagccccggccctaagtaccctcccggccccgccccacgtgaccacc

SEQ ID NO: 392478 - DNA, 122 bp, Homo sapiens
gctcaggtaagtcgttcgggtaagggcgggcggcagtaaggagcgtgggcagcagcagggcgtggtctgcttgagagggcaggaactgtgccacttgccgcaaacatgaccgcgtgccgcta

SEQ ID NO: 392479 - DNA, 122 bp, Homo sapiens
gtggtcacctgggaacatgttacaaatgcagattcccaggcaccattgaccaccctgccccgcctcaccccacaactgagggatgggctctagcagtctgtgttttaataagccctccaggt

SEQ ID NO: 392480 - DNA, 122 bp, Homo sapiens
tgctctgcaagcgagagggttcaccagagggagcttgggtgcaggttcacccgctgaaggcgctgataagtcctgtgctgaggagctgacttgcccttgtttacttacaaagtgcattgtag

SEQ ID NO: 392481 - DNA, 122 bp, Homo sapiens
ctcataccctagcccgtgcttaccctaattccctgttctcctgcctcaccaccagaggcccgggttgtctgcacagtctcattttccacgttattcctgtaatgaacccgtcctcccacccc

SEQ ID NO: 392482 - DNA, 122 bp, Homo sapiens
cactttgaggagcaacaagacttagatgaatccagtcactcaaaacacatcccctggctacgtcccatatgctacgcaccttgctgatgcttgatatatagttggttaagcacaaaatagtt

SEQ ID NO: 392483 - DNA, 122 bp, Homo sapiens
agccggaggagggagggggcgcagtcggagggaaaggaagtgagaggagcagggggccgacgggtggatccccaggcattagtgacacagtcttcaaatcgcttcttttcctccccacggct

SEQ ID NO: 392484 - DNA, 122 bp, Homo sapiens
ccgcaaacgtctggccgcggctcttgagctcttctattaagtttcggtttctgaagcttacgtttagtttcgatttcttaagtttcagtttctgagcgctcggcatctgattcaatctccag

SEQ ID NO: 392485 - DNA, 122 bp, Homo sapiens
cctctgcttccaggttcaaccgattcttgtggctcagcctcccacagctgggattacaggcgtgtgccaccacacctggctaatttttgtatttttagtagagatggggtttcactatgttg

SEQ ID NO: 392486 - DNA, 122 bp, Homo sapiens
tgtacggtcctgaccctaggacacagctgcatgtcctcacctcggtgttcaaagctgcaccggccaccattcaaccctccgacgccctgccctttggcttccccgttccatccggtcctgtc

SEQ ID NO: 392487 - DNA, 122 bp, Homo sapiens
tgagggcggggcctcacgaaggcaacccttcgcgcaacctatcagaatcccccctagcaacgctgtgccccgcccatatgggtccggcctcccagcctccctaagcccttccccactgggct

SEQ ID NO: 392488 - DNA, 122 bp, Homo sapiens
gggagtcggggagagctggctgggagaagagctactgaagccccagggtgccaccctccccgagattccagaagagcaaaggggccggggatgaccccatcgccttctaagcccaacagggg

SEQ ID NO: 392489 - DNA, 122 bp, Homo sapiens
ttttccctgaccaaccatttagttctctctcggtagcaggagtgttttcctcagctaggtcgaggagacacaaacagacctcgtcacgcacacatctcagcacacaggcatatagtctcaaa

SEQ ID NO: 392490 - DNA, 122 bp, Homo sapiens
tcagtggggggtgctgcgtatcccctttcactggggtggcttcttcactgaggagagtcgcgcctcagaggaactgaggtcctgcctgtgttcgacctggtggggggcactaagagcccctg

SEQ ID NO: 392491 - DNA, 122 bp, Homo sapiens
acgccgacatcgcccagctcgttgctgcgcaggttgagctctgccagtgcagggttgactcgaagtgcagagctgatgtccttgcaccgtgcttccgtgaggccacagtcgtccagcctgtg

SEQ ID NO: 392492 - DNA, 122 bp, Homo sapiens
ataggagaaaaagaatattacagttgaaataggcttcattttcttcctagtctctttacccgccttctgtctgtagaggcagctgccattcagaaactcatgcatatccttccgttccatgc

SEQ ID NO: 392493 - DNA, 122 bp, Homo sapiens
ctgtggaagaccgtgtactgcgtgtcgtgcggggggatcgagtacttcccattgactattcgaagtttcgctccatcctcaaaagggtgctgccggaagcacagcaggtacaagatgcagcc

SEQ ID NO: 392494 - DNA, 122 bp, Homo sapiens
ccccggccatctccctgggcgggctgctctccattccctagacaggaaaattgaggctcacgagggcccggggattacccaaggcgcaaagggtttatgaggtgcaaggggcctggagccca

SEQ ID NO: 392495 - DNA, 122 bp, Homo sapiens
aatcccggccctggagattatatatccgccttcgcatcagcggagcagggacgctgggagcgcgcgcggcccgccggctagtcagtcccctgacccggaaccgcactggtgccgccgctagc

SEQ ID NO: 392496 - DNA, 122 bp, Homo sapiens
agcactcagttggggatgccagatatctgggatctggttcccaggctgcatctaactagccgcgtgtccctggacaaatcacctaacctctctaatcctgtttctacctaggtaaacatggg

SEQ ID NO: 392497 - DNA, 122 bp, Homo sapiens
tcaaccttggtccaatcaactgaagcctggaaggcagagcctggaactgtagcacaaatacggctgccacacagaagccttgagtgtgaaaggaggaggctctctaaagaaagggattgctg

SEQ ID NO: 392498 - DNA, 122 bp, Homo sapiens
aaatcgcatttatggagcccctgcagagtgcagaactaggcttcccccccccccgccccccgccggtgttctcatttagttgccacacactccttggagaggtatcatagatgtcatgtata

SEQ ID NO: 392499 - DNA, 122 bp, Homo sapiens
tgaggtcaagaaactgactgtcactcctacatttgtgattaatgatgctcccgctggtgacgtatttctaaccacagtctctggagagcagcaagactcagttgccttgtggtgtgttgagt

SEQ ID NO: 392500 - DNA, 122 bp, Homo sapiens
gctgcatggcgtttttgtggcaggagcaggcaacacagccgcgagctgattgcagaaattcgagtcgtaattatggaattcaaattccctcaactctcacccaccttcggattccttctcta

SEQ ID NO: 392501 - DNA, 122 bp, Homo sapiens
caggaaaccccatgaccttgggagctgccaggagcagcctctctccagctgggcatcatgcgggcaccgtcaggggggatggggtgtgtttcagaggaaaagcatcagggctgtggaagaat

SEQ ID NO: 392502 - DNA, 122 bp, Homo sapiens
aggagaaagtggacatcctctcaaggaaactttaatcctgcccccaaaggattaaaatcccgtaacaaatatttgtttataacacatcttgacaagatcaaaacattctggtagggcaaata

SEQ ID NO: 392503 - DNA, 122 bp, Homo sapiens
aggtcagctcgcagggactcccttgcaagaagaccccggactctgccaaattttccctgccgggtttccggcttctcctcgggtgccagcagtttcctttacttttttgaaataacactccc

SEQ ID NO: 392504 - DNA, 122 bp, Homo sapiens
gccagggctgtggccggcaaggggctcaggaggtgagtcccttgcccacacctccaaccccgctggcccggtttataacatggacagccctgccctctagtgtctgcaaccgggagccctaa

SEQ ID NO: 392505 - DNA, 122 bp, Homo sapiens
cacgggacaccgaggcatgatgaggacgcagaacagcagaagcgcgccctgcttcccgggcgccagtgctcggggccagcggcgtgtacccggcgggcccggccgggagcgggctggcgatc

SEQ ID NO: 392506 - DNA, 122 bp, Homo sapiens
cctgctgccgggggcgcctggaggcaatgccagctccaggacagaggctcaggtgcccaacgggcaaggcagcccagggggctgtgtctgttcaagtcaggcttccccggcccctcgcgcag

SEQ ID NO: 392507 - DNA, 122 bp, Homo sapiens
taggtaatggccagggaggtaaatcaagtcctgggagaagctgaggactgaccgcagacccgcccagaccctttcccgcggggcccacagcagctaccccagggcagccaggttcaccgggc

SEQ ID NO: 392508 - DNA, 122 bp, Homo sapiens
ccagtggttgcgtggtggggaattctcctgggatcgagtggcctgagactgggcactggccggggtaaccagggtccagggctgtgttggatggtggccctgctgggaacctgtggttcctg

SEQ ID NO: 392509 - DNA, 122 bp, Homo sapiens
aatcccgtgcggcgcgcacaggcaggaggttgcagttgggcgctcagcagctgtggcagccggttgaggtctggcagtagcgttgggctgaagcagcggagttcgccatggtaaggcccggg

SEQ ID NO: 392510 - DNA, 122 bp, Homo sapiens
ggtttcccctggaagcaaaggtaccttaaaatttagttttcagaggttaaatctagaaggcgggcatatgctggaaagctcacctacacgaggctttctcacacggggattccccctttggg

SEQ ID NO: 392511 - DNA, 122 bp, Homo sapiens
tggggcttgtgtcaagtcaagtggttacagccaagaggaaaagcagaagttccattcagccgtcccagtgtatagtcggggtttcttgcgctcctttcaatatgttgcagctgcgaaattgt

SEQ ID NO: 392512 - DNA, 122 bp, Homo sapiens
gtttcctcagatagccatcgtctcaattttttaagaaaaaaaaatactcccctaaagaagcggctactgtagcatctcttgggaaggctttcctgcatttcttgctgtggaccaagaagggt

SEQ ID NO: 392513 - DNA, 122 bp, Homo sapiens
aagttgggaccggaactcatttggctacaacgcatggcttctgtcaactaagctgaaagccgtatgtttctcactgggaagcaagcaaccaagacccggccctttttcccactctcttctct

SEQ ID NO: 392514 - DNA, 122 bp, Homo sapiens
ccatggagactgcggaatggaaaagcgttcggtttcttgtttcctagccgcgaatggggtcgtggttccttcgacctcgcctggggagaaaggggacggagggcttcgggctatacttgggc

SEQ ID NO: 392515 - DNA, 122 bp, Homo sapiens
ccagcgatgtgtttttggtctttcccatgtctttttgtagtctgctaagatgaatggtgacgtttgacaagagaaacacagcacaatgatgttgtaagtgaatgcttttgtcggatgattga

SEQ ID NO: 392516 - DNA, 122 bp, Homo sapiens
agaagtgtgggatacggaagatcgggggccacgatgcatcaattacagtgggtctcttttcgtccccaggtatggcccactaccacaagtcccctttccctacctgtcttgtgcaactgtca

SEQ ID NO: 392517 - DNA, 122 bp, Homo sapiens
tcctaaaccaaggtatacaagttaatcaagccccttcctcagggccgagagaattttgagcgttagccgtctctttggctgccggcttaaataaaggactcaattcgtttcagagtgtggcg

SEQ ID NO: 392518 - DNA, 122 bp, Homo sapiens
tgttccagaagcagatggcaatgttgcaaaagtagacaccatagcacatgctcaaacatccgtggtgcataagcagccaccacaggagtctgagcatttgaccacgatgcacacacagaaga

SEQ ID NO: 392519 - DNA, 122 bp, Homo sapiens
ttggccctctggaaaatttttctttctcctgagaggttttccaatctagtagaaaatagacgcagagtttggcttgcactgattgcggcattagaagcggccctgtacattttaatgtggaa

SEQ ID NO: 392520 - DNA, 122 bp, Homo sapiens
tgccaaaaatattctctattacaacttttttaaattctttaattaaggcattggtcccaacggtgcacatagattaagggattttgcttccttctgaactagatcatttgttagaggcttca

SEQ ID NO: 392521 - DNA, 122 bp, Homo sapiens
gctttcaaaatcgccatcagcacagccccctcctccgacagcccgcctgccactctcccccgggagggctgctagcaggcacaagggagccacacttttcatgctgagcgcattaaagtgcc

SEQ ID NO: 392522 - DNA, 122 bp, Homo sapiens
gcgggagcgctcttgtcacgttatcttcccaggcgctgctggagaagaccctgcacaccgcgcatgtgtgagtgtgtgctgtgtaaaataagtcgtgaacatttctgtcttttaaaactgtg

SEQ ID NO: 392523 - DNA, 122 bp, Homo sapiens
ggcgggaggaagatggagaggcgggtgggagcctcacctttggactctatcgccacagcccggtctagccgctacgcccgagctcaagtctgactcgaaactccgctgggtgcctgagagga

SEQ ID NO: 392524 - DNA, 122 bp, Homo sapiens
gcggcccctctatggatctcaggaatacgccctccacctgtgagtttgggtgggggcagccgtgggtacacctgcactgtttcccctccctgtttgtcagtggggggtctctatagtgcaca

SEQ ID NO: 392525 - DNA, 122 bp, Homo sapiens
cttcactctattttctcacctcacagatgagatacagagtgtttaacaagtgtgtggaagcgttaactatgattcatcaagatgcttatgaaactgctcggagaagagcaattgccacttgt

SEQ ID NO: 392526 - DNA, 122 bp, Homo sapiens
ccaggtcatcgcccagcccatctaactggcctctccttttgtcatttctttccatggcagcgtttattactttcctgcttaaaactagtggcttcccctgctgcaggatcaaatccaaatcc

SEQ ID NO: 392527 - DNA, 122 bp, Homo sapiens
ggtggaggtggcagaggcggaggggcctatctctcccttctcctgagtccaggccttgggcggagtccccctacaccgactctgcgctgggccacgggattcgcttcagccagcgggacaat

SEQ ID NO: 392528 - DNA, 122 bp, Homo sapiens
cagagctcaccagagtaccacctgtcattttcaaaagcaaagtcagttttgccaaccagccgtgaatgacaaataaagctttatatgaaacacaaggacatattatgtgctattgtgagttc

SEQ ID NO: 392529 - DNA, 122 bp, Homo sapiens
cgtggatggggaggctgattggtaggcaggcctttaggcaaaggggctgccagggggctgcgccccgggcgctgcggacgtccctgcctctggtacctggcggcagcgcaggctcgggtgtt

SEQ ID NO: 392530 - DNA, 122 bp, Homo sapiens
tcctcaagtgttcatgcttttaaaaatggaaacaaaactctaacaaccgtcaaacagcaacgattgtcagaacctagaaaaggcctcttaaatttgcagtgttaaccaagcctgatgtggtt

SEQ ID NO: 392531 - DNA, 122 bp, Homo sapiens
gggtgttgcaggcttgcaggggacggggtagggggtggttgtgccaggctgcgaggggcccgggtcatggggttgctaactctgggaggagatgcgcccaagcttcccacctggagcgtaga

SEQ ID NO: 392532 - DNA, 122 bp, Homo sapiens
gtgtgtctgtattaggtgtggtagtgttaacccctgccagccaccaaggaccagagctggcgtgaagtagaagggaaaatagaaagcttgtccaatggttgtacgctcccagcttcctcttg

SEQ ID NO: 392533 - DNA, 122 bp, Homo sapiens
tcccggtaaaaaaaaaagttcacattggctcctgggcccagggacaggccccgccggaggcgccactcagtagaagcgcttgttccgctcctgccgcttctggaacaccacggcccccacca

SEQ ID NO: 392534 - DNA, 122 bp, Homo sapiens
gtcctggtgctcgatgagcttccagaatatcgtggcactgagccatcctggcaggcccttcgccgctcaggaggcctcggcacttgcttggttacagaggagtccagtgggctgtgggtgtc

SEQ ID NO: 392535 - DNA, 122 bp, Homo sapiens
cctgagctgagagagaactggctcgctgttgaagcagggccacgcatttgattgacagttcgtttgttggaggggcgtggtcacgctcggaaactccgccgtgacgttgcaaaagctggaat

SEQ ID NO: 392536 - DNA, 122 bp, Homo sapiens
gaaaactgtaagttgttcttttaaaattgtaaggattcagaggtttctcagtttacgcagcgcagagtaattaaaacaattgttgagtcgaaaacctatgttcaagtcttggttccgctata

SEQ ID NO: 392537 - DNA, 122 bp, Homo sapiens
cattttgaccaaccttcttctaacaaggtgctcattcctactatgaatccagaataaacacgccaagataacagctaaatcagcaagggttcctgtattaccaatatagaatactaacaatt

SEQ ID NO: 392538 - DNA, 122 bp, Homo sapiens
gcgcggcgacccgggcgggcggcgatgcgctgtccagggtagccgggtccctctgcccggcgctatctcggcgcccgcgccggttacccccacccacacccacgcccggcgcgcgcacaccc

SEQ ID NO: 392539 - DNA, 122 bp, Homo sapiens
cgtgtcctggagcggtgacaggctgcccggtgccgtgtcctggagcggtgacaggctgcccggtgctttggggaggactgcttgtgccctgggatctgaatctgttctcactgagggccagg

SEQ ID NO: 392540 - DNA, 122 bp, Homo sapiens
cgggctggccctgagacatgaacagaaaatcttttcaacccatgcggggttggaaacaggcgaatgtaatctggtgcctgagttgagacacaggcattgataaatactagaaatggcccttg

SEQ ID NO: 392541 - DNA, 122 bp, Homo sapiens
agccctctctaggaggagcacaaatgcctattcctggcagcctgagcatgtcgtcttaggcgtcctctcgtgacctgtggtctggtgttttgcacaatcttcatcaccactccttctagaag

SEQ ID NO: 392542 - DNA, 122 bp, Homo sapiens
gagtgtagctgtcctcctagaactctgcctaattcaaactctgtaggttaataataatctcgagtaacagaagataaaggctgaaactcacttttactacctagaggtggcaaaaagtaaat

SEQ ID NO: 392543 - DNA, 122 bp, Homo sapiens
aactgccctgggacacatctctagttgcagttacgaccctgagctgtggccatgtatccacggctccccaccagatggagctccctggccctgggtgtgaatgagtgagtgaatgggtatga

SEQ ID NO: 392544 - DNA, 122 bp, Homo sapiens
tcctgtagggcccacacgagaaatttcaccaactgcactatctttaaattccaacatacacgggtggtcctgccctggataaaactcaggaagcaaaatcaaccttcgagagaggtgaggta

SEQ ID NO: 392545 - DNA, 122 bp, Homo sapiens
actgagttttcctttaggaaaactcccgagggccaaactggaaacataagagtgactgctcggtgggatggatttcacaggaaccgtcatgcttgttcctccctctcccctgtaacctcact

SEQ ID NO: 392546 - DNA, 122 bp, Homo sapiens
tcccaccagagctatccttgctaatgtccttatttaggaaggtgtcttagttgtcaagttcgatggacttcttgtgtcatacctcatcctattagcctctctggtattcacctcctttgaca

SEQ ID NO: 392547 - DNA, 122 bp, Homo sapiens
cccccggttctctgagttacttcagggctcgagttcgagccagtacaactgttacgtcaccggaatccagccaatcgcagacgacagaaggagggcgttgtttggtctttcagcacaccaat

SEQ ID NO: 392548 - DNA, 122 bp, Homo sapiens
ctgtggcgcggggaaggcggcttgtcttgccctctcagggcgctgggtgtttccaaagggcggtacccgccctcctgcgccagctggggcgggaagggaggctgggtgggggctggcgggag

SEQ ID NO: 392549 - DNA, 122 bp, Homo sapiens
agcccgtgctggtcaccagcatcaaggtcaatggctcccttgggctggagctgcagtagccgtacctgttctctgctgtgggccgtgggcgccccgccagctacctgtgggatctgggggac

SEQ ID NO: 392550 - DNA, 122 bp, Homo sapiens
cacactgccagttgctcctcacctgaggggagaggctcggtgacaggggcaggaaagggacgacttgggagctactggacagagctggcactggactgagcccacggagcaggctgtctgca

SEQ ID NO: 392551 - DNA, 122 bp, Homo sapiens
cacgctcagctgtggacgggaagggttgtgaatattggggcatttcctctttccctcccccgtcctaactcccacctacacctctgcctccactgccccttatcccctctccctgtcttctg

SEQ ID NO: 392552 - DNA, 122 bp, Homo sapiens
cagggacactcacaaacgggatgctcagcagcacgatgtggaggagaccgatggccagcacgtaggagagccagatgccacggctgttcatcacccgcgtgttggggttcacctcgctgtgc

SEQ ID NO: 392553 - DNA, 122 bp, Homo sapiens
ctgctggtcctgggacacatttgacaaccattgctccaaagttctgtggttgccatggtgcgccactgctaccagcaggtatgttagagtagaaaaagaggttgaaaaccaaattctagact

SEQ ID NO: 392554 - DNA, 122 bp, Homo sapiens
ggttcctgcaccccacacccggctcctcctcacgacactgtggcccgcgctggccttccacgcatactcccagccgcgtccctgccctgctcaagccttctgcacctgcctttccctgctga

SEQ ID NO: 392555 - DNA, 122 bp, Homo sapiens
ggcgcttgagcagcgagcgctgcttccgccacaggcccgggttcagccgccgccggcgcgcgctgttcagctgcatccgctgctccgaggacatgtccagtagctggtccaggtccacgccg

SEQ ID NO: 392556 - DNA, 122 bp, Homo sapiens
ggaggccactatggccattcccagggtgaccagtgctggctccaagtctctgtaaccatgcgcatgtagttagttgtatgtagggagattggtaggtgcatatgtgttgtccttatgtgtgt

SEQ ID NO: 392557 - DNA, 122 bp, Homo sapiens
gtgggctcgcacctcctgcagctgagcgcgcagctcctccagggcgagctgcgtcgacgtcgcctgcacctgcgcctgcaactcctcgagcgccagccccaagtggcccacctcgccccgca

SEQ ID NO: 392558 - DNA, 122 bp, Homo sapiens
gttgtgacggaagctccctgggcggggcggggctacaagtgcggtgggcgggggcgggggcgggggcgggggcggggggaggtgcacaactgtaggccgggttctcaagctcgcccttagca

SEQ ID NO: 392559 - DNA, 122 bp, Homo sapiens
gcaacgcctaccgcacccggaaggctcaaggaggcgccctgggcagggaacttccggttgcggggaagggcggcgtcctctcctagggacttgtcgcacgcggcttctcgtcgcgttccgtc

SEQ ID NO: 392560 - DNA, 122 bp, Homo sapiens
acagctggtctgctttttgtacttttcttcccaaagaagtgctttcctttatgaattgtccggggcagctatcattgatcacatcagtaatgtcccatagcaacagttgtgtggtttttttt

SEQ ID NO: 392561 - DNA, 122 bp, Homo sapiens
acaagacagcatgatacatagtaaaataatgttccaggttaaccaggaaagaagcaagtgcgactgtgcctttggttactatgtcttttccaactgatgacatgaactatactgtatatttt

SEQ ID NO: 392562 - DNA, 122 bp, Homo sapiens
tcacaccacctcgagatggagagggcagttcagagtgacctccagcgaatctgccctctccgtgtcgtctgcaggggattagtggggagtaaggggatagagaattatccaggagtccttca

SEQ ID NO: 392563 - DNA, 122 bp, Homo sapiens
tagtgggtgtagacaccatagggtcatgaaatagaagggaggatgttggaggagagcagccgggatctgtcagagattgaatagcaggctgaaatcaggagcaaggaggggcaggagaaaca

SEQ ID NO: 392564 - DNA, 122 bp, Homo sapiens
aaagattcaaatatgattcatctcaaagcagtctctctggaaaattatgcaaatattcagcgatgttatagttgattaaaggagttttatatcttttactcttttcaaagtgcctagagggc

SEQ ID NO: 392565 - DNA, 122 bp, Homo sapiens
ggggctcccgcccccaaccccagggggcgacagggggtggggacccccggggcaagggttcgcgctgggggcccccattcaactacggtccgcgcgctgcgtccccctcctcagccccaggg

SEQ ID NO: 392566 - DNA, 122 bp, Homo sapiens
gaacttaaccttggtcatctcagtttgaaatacaaatggcagcatggagagcaggctgcccgctttttggttggacatttctttcactcttgagtttgaggtacagcaaatttcccaaatca

SEQ ID NO: 392567 - DNA, 122 bp, Homo sapiens
gaaacagttgatatccctcccttagcaaacaggttcatctccagaactatcaggactacccggtttttaaatttccatttgataatatttctacactccccatacaactccacctactctaa

SEQ ID NO: 392568 - DNA, 122 bp, Homo sapiens
aagcagaagtggccccccaggacgtggttttgtaactgggggagggcttctcgctccctgcggcccctctgtttgtcatggcccttgggcccacaccatggccttcttctctggtaagaaca

SEQ ID NO: 392569 - DNA, 122 bp, Homo sapiens
ctttgggcggcaggtgcgggcggccgctcaccttgggcagctcgcgcagctggttggcgtcgagcagcagctcctccaggctgcggctgtagcggtagatctcctccggcacggcctgcagc

SEQ ID NO: 392570 - DNA, 122 bp, Homo sapiens
tgcagatcttcggggactattaccacttctggcatcgaggagtgacgaagcggtccctgtcgcctcaccgcccgcggcacagccggctgcagagggagcctcaagtgagtgtggccccagcc

SEQ ID NO: 392571 - DNA, 122 bp, Homo sapiens
gcttgcggtacgccttcttgataccctcggacgaggcctaccggggtactcccagcacctcgtagtagtccactatgctggactgccaaagagcctgcggggcactggcacagcgagcggca

SEQ ID NO: 392572 - DNA, 122 bp, Homo sapiens
gagacggacaggaacgggcagcagcctgtgctggtaagcgccggggaggtggccacagcccgcaaggctgtggagcccacgccaaagcctctgacccctgcaatcctgcaccgtccacccag

SEQ ID NO: 392573 - DNA, 122 bp, Homo sapiens
tggttaaatttatcaggcatttattaatgtaattttcaatgaagagagatttggtagccacggaggagttttatacccacaccgacatttataggtatgctacaattttgaaagtatttctt

SEQ ID NO: 392574 - DNA, 122 bp, Homo sapiens
ggtggggcgctccttggggggttcagatgggagttgaggcccaagcgagtgtctgtgcctcggttttgatccagcgtgcccatgtcatgtgaatattttaaaacctgtgatcagaatggggg

SEQ ID NO: 392575 - DNA, 122 bp, Homo sapiens
aacgcggacagagatggcacctgagcgtccctgggagaacctgggcgacaggccagagaccgaaagaaatggaggcacgaaaagaagcttcgagaaactgagggactgaaagacgagggtgt

SEQ ID NO: 392576 - DNA, 122 bp, Homo sapiens
gcccaggcaggggccttactagtaagcacgttttgggaagtcctcagggcacgcaggcaccgtgacctcacacactagtgcgctggagtgtgtcattagcatctggaatctctccccaggga

SEQ ID NO: 392577 - DNA, 122 bp, Homo sapiens
gcctctttccagcagccattgtagtgtatgcgctgcccctgcagcccaacttgcagctgccgccgccgccgccgccgccgccgccgacgtcgcgcccaccgctgcctccccctgcctgttcg

SEQ ID NO: 392578 - DNA, 122 bp, Homo sapiens
ctcaagtattcacttcttcaatcaatattgtcaggcactatgcagggcaaagctgacccacgatggtggtagaattctctgtcccagacatacaggatggggattgagaattgaaacatgga

SEQ ID NO: 392579 - DNA, 122 bp, Homo sapiens
ggcaaagctagagaaagctctagagtctcaaggtagcttaaaacacaagggaacacacaccgaagccataactgaggctcctcctggctgtgctctattcctttctctcatactcctgctcc

SEQ ID NO: 392580 - DNA, 122 bp, Homo sapiens
attctacatttagtattaaaaaggcagtatcaccaaacaaattgaaggcaactttgcagacgttgagcaaaacctacttaaacaaccacccccaactacagaaaactctccccctctcccca

SEQ ID NO: 392581 - DNA, 122 bp, Homo sapiens
acctttggcttctacgtaggacaaggttatggacttttgatcatttgatatatactggaacgtcttcaaaagagtgctaagtaatacaatattttaagaatagaaatcaatagtaagaaggc

SEQ ID NO: 392582 - DNA, 122 bp, Homo sapiens
cgcgcaaagaggcggtaacgcggcagcgacccttctagggaccagacgttcctttggggtcgcgaggaggacgcgcaggccctgcctgaggcactgacgcagcgggggcgaccgggcgggct

SEQ ID NO: 392583 - DNA, 122 bp, Homo sapiens
tgtcccgaagggaaaacactgtgcgtgtgataagttgcacacctcccaacacacactcctcgttttacaaaaatcagcagctgagggcagaggacaaggagggctggccagtgcacaaactg

SEQ ID NO: 392584 - DNA, 122 bp, Homo sapiens
tggtaggcggcgagatgagcttggagcgcacaaaagggtccttcagcatctccctgtgggcggaggtgtaagtagtgggtggcgaagctccaccctcccttcgacccgtccacaagcggagg

SEQ ID NO: 392585 - DNA, 122 bp, Homo sapiens
tttcatcctccgccccaccctccactgcagcgtgttgctctatgagagatctgctctgcacgcacaaagtggggggaactttggaagagtctcttgaaagtagtacagtaaaaagtgagttg

SEQ ID NO: 392586 - DNA, 122 bp, Homo sapiens
ctgccagagcaggctccacttcctgagcagtgccctggggtaaagcaagaggctgcactgcgaagaggggagaggagcaggaaaggagaggaaaagacaagcttgcaggaggaggtaggaag

SEQ ID NO: 392587 - DNA, 122 bp, Homo sapiens
agcccgagggctccgcggggaactacgggtattcttggaagcactttacgtcagttgcgacgatgggtgtattttgcggtctgtacaagaaaaacaaagtacggagcgagcgtagagttctc

SEQ ID NO: 392588 - DNA, 122 bp, Homo sapiens
tggcgtgcgccgctcggcccgagccccgcccccgcctcccccgccccgcctcccgccctccgccccgagccccaccccccgaaggccgcgccccaccgcacctccgcgcacggccaatggcg

SEQ ID NO: 392589 - DNA, 122 bp, Homo sapiens
aagatcaacattgtgagtttacttggcctccccgtctagcaacactgccataaatttcttcggcttcttagttgggaatttaaaaggcctatagtcttggcaaggtttatataacaatgttt

SEQ ID NO: 392590 - DNA, 122 bp, Homo sapiens
cacctgtacccccacctcgcccatttggccgcgtgcactgagtgtcactttgctgcagctcgtttctttccaataaaagtttctgtgacttagtgtggacctgatgcggtgtgggggtgggg

SEQ ID NO: 392591 - DNA, 122 bp, Homo sapiens
gcggggaggggcccccaagggctggggactggcagaattgctcaaaatggcagcactctccgcacgcaagatcgctcacttacccagggagaccgagggaggtcggggccggcgaacgggcg

SEQ ID NO: 392592 - DNA, 122 bp, Homo sapiens
accacggacgattggaacttccagaggatgagctccatgatccagagcatgagctgggaacgcagttgcactggggggtcttgcccccaccactttgtcaccatgtggattcgagaagtcac

SEQ ID NO: 392593 - DNA, 122 bp, Homo sapiens
ggcaaggggtcagtgtgggaggggccagtgtgaggcaaggggctcacgcccacctctcagcgtgggaggggccggtgtgaggcaaggggtcacgctgacctctctctgcgtgggaggggcca

SEQ ID NO: 392594 - DNA, 122 bp, Homo sapiens
ttattggcctgcagccctgctctccccacgtctggtgatctgtaaagagggcttgttctgcgtgggtgggacctgctctagatccatcttggaaaatgagctcatgccgttggtgtaaccac

SEQ ID NO: 392595 - DNA, 122 bp, Homo sapiens
cgtgggagcctgcgccgggcgtgaccatgtgctgtgtgtgctcagattgtgcggcaggaccgcagcatggagcagatcgtgttcccagtgcccggcatctgccagttcctgacggaggaaac

SEQ ID NO: 392596 - DNA, 122 bp, Homo sapiens
gacctcggtggccccgctgagcatcgccaacggcacgacccccgccagcacctcggaggacgccatcaagagcatcctggagcaggcacgccgtgagatgcaggcgcaacagcaggcgctgc

SEQ ID NO: 392597 - DNA, 122 bp, Homo sapiens
cgcgggtccttgtgtaggcgagctcatatactacgatggggcaggggcgcgacggtctggcggctccggggcattgtctaagcgggacggggcggggcttcttcgggccacgcccattccgc

SEQ ID NO: 392598 - DNA, 122 bp, Homo sapiens
agcaccatttcctcaaatctagttcaggttagccaacgcggacagcaacgctcccttcaacgctcctcctccccctagaacggaaaagacggaggagatccagttcgggctgacagtgagag

SEQ ID NO: 392599 - DNA, 122 bp, Homo sapiens
gaggaggccagtagggctacagtagggtgagcgggcgacagatgagaggaggagaggcgccgggccagccaggaccctgtggtcacggtgagtgacaactcggactttgactctgggtaagc

SEQ ID NO: 392600 - DNA, 122 bp, Homo sapiens
cgggcggggtcggtactggcctcgcgatccgcagctcccttcgggctgctccggcagcggcggatccacttcccgaacaaacagccggaactgacagaaacacctccctccgctccccctcc

SEQ ID NO: 392601 - DNA, 122 bp, Homo sapiens
acatatatatatatacacatctggtctcataattagcccaaatgagaactgggatgtgatcgcatctaactttccaaaaccatctccctgtcattcctataacctcccctttccatacttcc

SEQ ID NO: 392602 - DNA, 122 bp, Homo sapiens
ggggcggggcatcttgacttccggggcacgtcggctccaccccacttgggtgacgtctgacgtctgacgtctaacaactttggtgcttggggaagcagttaactatttgaaacccttaggcc

SEQ ID NO: 392603 - DNA, 122 bp, Homo sapiens
agaaatgttgtattttgttttagactcttttgttgctttaaaaagtagtttccagtgtaacgcttggcgtcggagttggtgctgggctgactttaattgctgctttgtctctttcaggaagt

SEQ ID NO: 392604 - DNA, 122 bp, Homo sapiens
gcatctgattcaggtggatttttttttttttttcctcccaaagcaagtagatggaaaaagcggtcaactctacccttgtcggagcataatgcaaatctaagtctgtggaccttgtatcataa

SEQ ID NO: 392605 - DNA, 122 bp, Homo sapiens
agccgggaccgaaccgtcccgggcccgtatccgcgcagcctgcaccccgcgctgagctggcgcccgaccgagccgcccacattccgaagtattcggagacccccacctagccggcccgagct

SEQ ID NO: 392606 - DNA, 122 bp, Homo sapiens
gctaagaacaccacaagagaacacaaatatgctgaggaggcaacgctaagtgaaaaccggcgggtggcagactgcagacactgtcaacccggcatgtgccagacacaggagactttccaata

SEQ ID NO: 392607 - DNA, 122 bp, Homo sapiens
gcggggcctctgggttcttcctcgtggcagggatgctgcgctcctgagcgcgagggtcaccgcggttgaccgctgtgtgtttttctttctgagctgtaacttctatgcgacagccttggccc

SEQ ID NO: 392608 - DNA, 122 bp, Homo sapiens
cactttgattctttcagagcctttgtgtgacctgtgaagtcttgttagttgctgttccaccgcaatgtggtggggaactatgtgataattggctaaaagccactgaaaaagcataaagtgtc

SEQ ID NO: 392609 - DNA, 122 bp, Homo sapiens
ggttctgtttttgttctaccccaggcagccaaagtgcccagggctctgatgtgtctctcacggcttgtaaaggtgagaccctggggaggctgatgtgtgtgggttgttggggtaacagtgga

SEQ ID NO: 392610 - DNA, 122 bp, Homo sapiens
gggacctgaatgcaacaagttagccatttgaaaatatagaaggaagtaattgtaggtaaacggaagaagagtgcaaatatcctaagtggggaaggagctgggtgcacctgagaaacagaaag

SEQ ID NO: 392611 - DNA, 122 bp, Homo sapiens
cccaacacacacacacacacacccataacgaacacacacgtacagcagggaacacccacccgcaggcagcccctgaaggtgccgggttctgctctccgcgactaagagccaccggtgagaga

SEQ ID NO: 392612 - DNA, 122 bp, Homo sapiens
agaggtggagcctacagaggcaggccggccttcttgagctgtggtgggctccacctggttcgagcttcccggctgctttgtttacctaagcgagcctgggcaatggcgggcgcccctccccc

SEQ ID NO: 392613 - DNA, 122 bp, Homo sapiens
ttgcggccgcgacgaaaggcgcaggcgtcaggagggtgctgcccgctggagtctgcgcggcgtgaaagggagggaggaaaaggcatggtcagatacccacccatgcagacccaggccttgca

SEQ ID NO: 392614 - DNA, 122 bp, Homo sapiens
gtcagggtagtgggcgttgcgtgaggcgggtaaatgttcgcggaagcggcaaagacgacacggccttgtgggatggcggagtttaaggagaagcctgaggccccgactgagcagctggatgt

SEQ ID NO: 392615 - DNA, 122 bp, Homo sapiens
gggcgaatttgattggggggcggggtgattgttacagcctcaacaggaagctcccggctccgggacagcaggccgggcactgcggcgtggcggcccaggtgatgccggtggcggttgcgggc

SEQ ID NO: 392616 - DNA, 122 bp, Homo sapiens
agggagcagggcagggcagggccgggcggggagggccgcgcggggcggggcggggcggggcgcctcaggcgctggccgcccgcaggggcctcgccatcactcccgggctcgccgcgagcagc

SEQ ID NO: 392617 - DNA, 122 bp, Homo sapiens
atttaataaggtcaagacaaacctaaacactgtacatcagacagcacggtgcacttctcacggaacattaagattttacaagggtgcagggcagtcattttccctaatcagtctaaagtcaa

SEQ ID NO: 392618 - DNA, 122 bp, Homo sapiens
cagctgtggttaggtggttgacctggctttggcttgcttttaaatatgaacccttatgcacgtatttgaaaaataatgtctgcttgtttactttctttcttaaaggctgaaactgttacaca

SEQ ID NO: 392619 - DNA, 122 bp, Homo sapiens
gtcaggctttctcccaaaaaatatgtgtttaaaacagattcctattttaaatgccaaggacgccagggtaagttgtttttttttttttttttttcaaatggaaatacatcttccttcaaatc

SEQ ID NO: 392620 - DNA, 122 bp, Homo sapiens
cgtgccacccggcggcggccgagtagagggggcgagagttctcaccccacagccttcgaccggagtccgcctccgcccaagcccctgcggttctgacctgagccttcagcccgcagcgcgcc

SEQ ID NO: 392621 - DNA, 122 bp, Homo sapiens
caggtcagcagttagagctgagtgtctgccacagagacctagagctacagggtgaaggaacgtgctggggagcaggggagagggtgaagcggatgttgggtgctcagccatgccccacactc

SEQ ID NO: 392622 - DNA, 122 bp, Homo sapiens
gtaacagacgggcttgcaatgcttttacaataagctgcacctcaagccctcctagaaagacgggtgtgaggaacacatgagggcacacaggacttcctgggcagcccgagggttgggaagca

SEQ ID NO: 392623 - DNA, 122 bp, Homo sapiens
agggcacccaaaagcagcagagcctcctcacctcgtggctccttggcccgcggaggctcccgcttgcgccgtttccgagacggcttcacccatgggctgtcttttcgccatttcttcttggc

SEQ ID NO: 392624 - DNA, 122 bp, Homo sapiens
gctcacacacgtgacgccaagccaaagatcaacacaggagacctcatcccgtgtggccgccggcgtgaggttcaagaacagacggaatcacaacccaccccatggccatcggggcaggacgg

SEQ ID NO: 392625 - DNA, 122 bp, Homo sapiens
cggccgggaggagtctcctttgctcttgtctactgctggagctgctaataaagtttcattcgaatacttgagctgccgcgccctgcgtttccctcatgagcttcttccgcccgcaacacgag

SEQ ID NO: 392626 - DNA, 122 bp, Homo sapiens
ttttgctttattcagcctttattcaagatggagtcactctggtttggactcctctgacagcgggagtgaagtagaagtgatagggtttctttacagttcttatatccaactatttgatttag

SEQ ID NO: 392627 - DNA, 122 bp, Homo sapiens
acttctgcgaactggcagcccttggtgagcccatggccttctgagggccagtgtcagaagcgcccttcacttgagcagcatcagagggcctgggctgacctcacaaaggggccatgagtgtg

SEQ ID NO: 392628 - DNA, 122 bp, Homo sapiens
tgcactcctcaacccttgggcggtcatgggactgggcgctgcccagcagggggcagcccccgtcgaggaagctcgggccaagcggaagcccaccaggagggggtggggggtggggctcgggc

SEQ ID NO: 392629 - DNA, 122 bp, Homo sapiens
acagcacctttccatgtcatggaaacatgcccatgcctatataaagtgaagcacactttccgcatagccctgcaatcaccccacaggagaaaaccgtccctcttgccttgcccatcctatgg

SEQ ID NO: 392630 - DNA, 122 bp, Homo sapiens
gacgaagcgagccccctggtggaagccagcagaaccaggtgcgtggcggcggaggcggggcggcccgctgggaaaccgaggaggggtcggattagttgaggggtggggtggggatgttcttt

SEQ ID NO: 392631 - DNA, 122 bp, Homo sapiens
aaggaggcccaagaccgcggcaactactgctctggcttctgatcctcgcagcctgggagacgggtagtggccagctccactactccgtccccgaggaagcaaaacacggcaccttcgtgggc

SEQ ID NO: 392632 - DNA, 122 bp, Homo sapiens
aacgctggccctccaagacaggccagagcggccctatctggcctgcgtggcgcagtacagcgctagagcggccggcgggaggagtagagtcgtcggggccggagcccggcaggagccgggct

SEQ ID NO: 392633 - DNA, 122 bp, Homo sapiens
actatctatgaggcgctttcgtggcaaggagtgattctctccagtaggcaatcctaagaacgagcgcagtgcttggcgcacagtaaatgctccatggaccatttatgaaattaagtctaagt

SEQ ID NO: 392634 - DNA, 122 bp, Homo sapiens
agtaggctgtgccgatggcagcagcgccacgtggtatctgtgcgctggcgaggagaggagcgctttccatttggaggcagtgtgagcacacgctggagtgcagcgttccaaagtccgcccga

SEQ ID NO: 392635 - DNA, 122 bp, Homo sapiens
gggttgtccgggcgtcgggggagcggggagctcagactgtttttagactgacttggaatccggcccagagcttgatgcccggttcaaagcattccctcctgagtggacattacaagacctgc

SEQ ID NO: 392636 - DNA, 122 bp, Homo sapiens
aattgagtgatggagacctcctgacctttggccctgaagggcccccaggaaccagcccctcggagttctacttcatgttccaacaagtacgagtcaagcctcaggactttgctgccattacc

SEQ ID NO: 392637 - DNA, 122 bp, Homo sapiens
cgggcaggaagcggagttagtcgccatctttgagtggggcagacgtgggccgcttttgctcgcggtcacttcatcttaagttgtatatatgtgcagagcgcggcgcgggtggtcacctccgc

SEQ ID NO: 392638 - DNA, 122 bp, Homo sapiens
gtgagccaccatgcctggcttcctttactttcttaataaacttgctttcactatgcactgcggacttgccctgaattctttcttgtgcgagatccaagaaccctcccttggggtctggatcg

SEQ ID NO: 392639 - DNA, 122 bp, Homo sapiens
ctgcttccagcagcccctggcagccccactcaccctcgccctcttcgtccaggcctcggtcggtcctgtcgtccctgctgggcaggctgagccctgcaaggagggatttcagcatcaccagg

SEQ ID NO: 392640 - DNA, 122 bp, Homo sapiens
tatggggcaaggaccccgccactgagcttgctattggctaagagagcagggttggccttgcgttcgcctgagcaagggagtagacagcacagcggcagcggagggagtctatgcgagctgga

SEQ ID NO: 392641 - DNA, 122 bp, Homo sapiens
gagaggagccctggagggcaccgggatcccacccagcgcagaacgcactggccagcgggccgcttggcaagcgccatgggccgctggcgaccctcctcagctctgcattagtgagaggttat

SEQ ID NO: 392642 - DNA, 122 bp, Homo sapiens
cgactagcaggacttgtgctctaggcggctcttggtcacgtgacggccacgtcaccagtgcgctctggcccccaatttccactcccacaagcagtgcggcaggcgccagcctgccttgtatc

SEQ ID NO: 392643 - DNA, 122 bp, Homo sapiens
taaaaattagtgaaaatgcagccactgagatgcggttccctctaccccacgcctgggatccggatatcgggaagaactctctgcagagctacgagctcagcccgaacactcacttctccctc

SEQ ID NO: 392644 - DNA, 122 bp, Homo sapiens
ttttcctgaaatgttgcaaagagggcaccttctgagtgggcaccatgaaatactccatagcgatcggcccccctcctctgcacgagccaggtcccgcgatcagccggagaatgcaagatgga

SEQ ID NO: 392645 - DNA, 122 bp, Homo sapiens
ttgagcataaggctaatatccagatctgtctgtttaaatggtccccccacccccgcctcccgtaagtcagtaagtttgtattcaaattttacatagtttaagctcactgatctttggattag

SEQ ID NO: 392646 - DNA, 122 bp, Homo sapiens
cagtatggtaatccaggcacaataaggcctcacacacaatggacacatatttttcttcagcgatgtcagaagggaagcgctttgtactgaaacgtgtttccgaaagagaaaccaaatcgaga

SEQ ID NO: 392647 - DNA, 122 bp, Homo sapiens
gtggccaccgctccacatggccccctttggattttcctaaggagtcttaatgattaaccccgtgccacaatcagctccgctattggtcacactggcccagaggggcacgtgactgggaaggg

SEQ ID NO: 392648 - DNA, 122 bp, Homo sapiens
ctgttcacttagagggtaagaatttttgatgagaatgtttaaccatttgattcagatgaccgtactgggggcatataaaattttcttgagaagtggcaaataccttgtttctgttgcaataa

SEQ ID NO: 392649 - DNA, 122 bp, Homo sapiens
tgggctatgcggcccaggctgctgtcagtgatctgcttgcagaggctcaggttgagagcgcgcagggagccgatctcctgcacaaacgcgtggcccagcccgttgtcggtgaggttgtagca

SEQ ID NO: 392650 - DNA, 122 bp, Homo sapiens
atagaagagtgattacttttgatgtctgtaagcctaaagctggggtcgttctcagtagaccgccaagctactggcttctccctctatccctccctgccttcccacgcggaaaaggtttgtat

SEQ ID NO: 392651 - DNA, 122 bp, Homo sapiens
gggtggaggggtttggggtcagacccacctgggtttacatgctcagtggctgtttgacttcgggcaccatacctagtttctgttatctcaccccgttcctctcccaggctatggggagccct

SEQ ID NO: 392652 - DNA, 122 bp, Homo sapiens
cgcctgcgcagcaaagggagcctccggggggcgcccgagaccttggtgtcgctcgggggccgctggtagccgcgcccgctgcccctcgcccggtgactcagccggtacctctggcggggcca

SEQ ID NO: 392653 - DNA, 122 bp, Homo sapiens
ggggggcggtggtgccaccgaggcacgtcccacctttgccaacgccggagcctcggggtccggacttgccttgagtgaccacgaggaagcagaaaagtgagcacttacctgggcaggggaga

SEQ ID NO: 392654 - DNA, 122 bp, Homo sapiens
aggggggcggctggcgggagggtgcgccatgaaaacaagggctggaaaagcgccgggaaccgcctggaccctttctggccgtgtgagtgtgtgtggagtgtgtgtgtgtgtgtgtgtgtgtg

SEQ ID NO: 392655 - DNA, 122 bp, Homo sapiens
tgaaagtcgggaaatgaaatgtttacaccatcggctgtaaaagtcttagtgctggctgggcgaggtggctcaggcctgtaatcccaattctttgggaggccgagatgggaggattgcttgtg

SEQ ID NO: 392656 - DNA, 122 bp, Homo sapiens
gatgggatgatgctgaggagccgggcttcggcatttccttattgtgcattatttccaatccgttgttttaccctggaaagggtcaactgaaagaactggccattgtctttgtaggtattaag

SEQ ID NO: 392657 - DNA, 122 bp, Homo sapiens
gttggtgctggacagtgccctggaccgcgagagcgtgtcggcctatgagttggtggtaaccgcgcgggacgggggctcgccttcgctgtgggccaccgccagcttgtctgtggaggtggccg

SEQ ID NO: 392658 - DNA, 122 bp, Homo sapiens
ccccgtgattcccgccgcccaataggatcgcgccctgtaggacgctcccttgagccttggcggtggcagccttttagtctgttccggtcttccccactggttctcttgccccttgatcctga

SEQ ID NO: 392659 - DNA, 122 bp, Homo sapiens
agtgtcccctcggagaggccgcatcccagggaggggccatacccaggaggctgtcggccccgctgacaggcggcgtgtggctggagacgccgccgtacgtggctccgggggctgaggagaag

SEQ ID NO: 392660 - DNA, 122 bp, Homo sapiens
taactaacaataataataatcataatcatagcaagggcgctgatgggcgggctcggagcacgcctgattctggttcccaccaggctgcccaggctcctgatgacgcatcagaaacatccccc

SEQ ID NO: 392661 - DNA, 122 bp, Homo sapiens
tggtgggaagggctgatgccgcatactcggattgctgggttctctggccgcccttgcgcccgccctcgcgcatgggatcacctcgccgggatgagtaaaccctgccctggcgcagggaggtt

SEQ ID NO: 392662 - DNA, 122 bp, Homo sapiens
atgtaactgcaaatcattctgccttttagtgttttttccctaaatctgcaaaatgggaaccggagtaagtgttctatttcatggtcttgtgaagctaaaaggaaataataggtagtaactct

SEQ ID NO: 392663 - DNA, 122 bp, Homo sapiens
acagatgctgggagctgcagcagctactagcagtaagagaaggccagggaaatcaggtggcgcctatcgttggagtccgttaattgcagccaaaaacaactgaaatgattaggtggttgagg

SEQ ID NO: 392664 - DNA, 122 bp, Homo sapiens
cgcagttgactcagagcctccctgggcccaggtgtctcctgatagcagaactgcctgaagcgctgacgagagagttccctggtataagacaaattcctacgtagggctgattcctgatccca

SEQ ID NO: 392665 - DNA, 122 bp, Homo sapiens
caggacatggcacgcgctcggtctcggtccgggcctgtcactcaggacacggcgtgcactcggtctcggtccggtcctgtctttcaggacatggcacgcactcggtctcagtccgggcttgt

SEQ ID NO: 392666 - DNA, 122 bp, Homo sapiens
tgactacggttactccgattgctcccgaggctgctgctcctcttttgatccataggcttgcgatgctgtgcatcttctatagtcacgtgaggcgtctctactttttctactcgtgttctgtg

SEQ ID NO: 392667 - DNA, 122 bp, Homo sapiens
gaaagtgcgacttagagcatttcagttaattccttaaagtcacccaacagcccaggctgtcgaattccagcaaaagtctctttctgcctctgccctgccacgctactggcacagaagagctg

SEQ ID NO: 392668 - DNA, 122 bp, Homo sapiens
caaagctgtgaggaaatcccacccccgccccacgtcccctctaccttggcattcctggagcgctgctgcaatgtcatcagcactgagcacgtccgtgatgctcattttctacctactcacac

SEQ ID NO: 392669 - DNA, 122 bp, Homo sapiens
ttcccattggcggaatgggcccgggccccgccacgagtggagaggccgggcaaggaggatcgcgggaggcatggatgcgggggtgctgtgtcagggggagggtcggggaaagcgggcggggg

SEQ ID NO: 392670 - DNA, 122 bp, Homo sapiens
tcctccatgctccctgccggagcagccaacagagtgagagcgcattttggaaagattggccggatgccgggcggcgacagggaaaagcgcccgacgcctggctttggggtggggggtgtggg

SEQ ID NO: 392671 - DNA, 122 bp, Homo sapiens
gtggcggccgtgcgccagggccgccccgcgcaggtccacgctactttcgggccggctacccgctggtccctgacaatgagggaggaaactgaggccacggtgttgtttccttcactgcttcc

SEQ ID NO: 392672 - DNA, 122 bp, Homo sapiens
ctcaggtgatctgcctgcctcagcctgccaaagtgctgggattacaggtgtcagtgactgcgcacggcctcgcataggaatttttaagtctaaatattttcttatggctatgataagggaag

SEQ ID NO: 392673 - DNA, 122 bp, Homo sapiens
ctctcctctttgaaagcacccttgaccctgaacgattttgcatgtctgtaatttgaatgtcgtgtggttacaggacccggtcagcccaaggagcaggggtccagcagctctgcggaggcatc

SEQ ID NO: 392674 - DNA, 122 bp, Homo sapiens
tgaacccaggaggcggagcttgcaatgagccgagattgcgccactgcactccagcctgggcgacagagtgagactgcgtctccaaaaaaaagaaagaaagaaaagaaaatacttatacatag

SEQ ID NO: 392675 - DNA, 122 bp, Homo sapiens
tggacacatcgcggagggaggagctctgggcctgcgcccgcaccctggccttgcagtgcgcgatgaaggaccctcagaactgcgccttgcctgccctgaccctgtgcgagaagaaccactcg

SEQ ID NO: 392676 - DNA, 122 bp, Homo sapiens
tccacgaacacccagagagccagtgccaggacttcagggtcagacttcgtaaagcccaggcgtcgctgggccggcccggaacagctcagagctgcgggtcctatggtcccgcgccctcacgc

SEQ ID NO: 392677 - DNA, 122 bp, Homo sapiens
cctggcaggtaaagagaggacccgcgcaggctgggagctcccactcctcctccagcgtcacgctcgccctccgccgctgcctcgcgtccgggtctgtttatatagcgtctggaggccgggag

SEQ ID NO: 392678 - DNA, 122 bp, Homo sapiens
gtcggtgcgggcggaaccttttcttcagaagacctgggtttggccatttccctcagcaaacgcggccaggcccttgccagacccgctccggtgaacccgacgcgaaaccgggcccccgcgct

SEQ ID NO: 392679 - DNA, 122 bp, Homo sapiens
gcagaaagatcacagaatctgaactgaaaacacagtgtgtcccctgcacccgttcctcggcggagctgcttgctgggggcctttaagcctctcgccttcgccatccagcccttttctaagct

SEQ ID NO: 392680 - DNA, 122 bp, Homo sapiens
gtctgccccgccggacgggagcacgccttacccacgggtgtgccctgctggatgggaacacgccgtaggatgggagcatgctgtaccccagagcagctgggaggctgagccacagacgcagg

SEQ ID NO: 392681 - DNA, 122 bp, Homo sapiens
attcttactagaaaagaaaccccggccctttagctcatcaccctctgctctggctttccccgagttggtacagagctgatgccgttggtatttttaagaaataatcttgagtcagaaggaat

SEQ ID NO: 392682 - DNA, 122 bp, Homo sapiens
ggcgctcccgccccgcccccaaggggctgccccgccccgccccgccccgccgcctcctaccggggaccggagcttccccagttggggtcctaggggacttattccacgcttcagcggaccag

SEQ ID NO: 392683 - DNA, 122 bp, Homo sapiens
gcaaaatccaaaacttgccctttgcctctcgcaacataaatatgtacagttcagaatgatcgctgatacaaaacatgccaaggacaggggcgctgagggtggagggagagagggcgctttaa

SEQ ID NO: 392684 - DNA, 122 bp, Homo sapiens
tggagaagagccgctgtggccgcgcacttgggacagggaaagagaaccgggaggctcgaccggtgggaatccagctgctctgctcagtgttccgttcaataaactagcattgttgcttcgca

SEQ ID NO: 392685 - DNA, 122 bp, Homo sapiens
tgccgcccagatttgaattctagctttgccacacactcgcagtgaggggataactctaggcgagtgtccagtttgtagataaagcccttactgaggtgtacgaggtgtacggcacatagtga

SEQ ID NO: 392686 - DNA, 122 bp, Homo sapiens
caggctctggtgggtacgagggcggccgggggtggggagcaccaggagccaaccagctcccgcgcagggccctggaggcggcaagggcctggccttgtggttctgtggttgagggaccaggc

SEQ ID NO: 392687 - DNA, 122 bp, Homo sapiens
ctgtagaagctaagtgcccacatagcctgagacaattctcttcccctacgggagggcgagcgaacggtggacgacgaaataaaggggtaaggttatgcgctcctgatccctttccctaaata

SEQ ID NO: 392688 - DNA, 122 bp, Homo sapiens
acacaatttagcccgattcccacgaataaacagaagaaagggcagacaagtttgtaccgacggaggaaggcactgggaccccgcttcagtcgggcacgagtttcccccagagaggggaggag

SEQ ID NO: 392689 - DNA, 122 bp, Homo sapiens
gagcgcacggcaacgcggaatccagcctaagtttggagggctgcgggtccggaagggcagcgcccaagtctccaggagcccgcgcggcctggaaagaggggaccggggagaggcaggcggcg

SEQ ID NO: 392690 - DNA, 122 bp, Homo sapiens
ttttcctggtaatcctctccatccggtctttcgctttctgacactcctcacagtcctcgtcgacctttaggcccagtttgcgggctgcgtgcgccatgtcctccacagatacccgcctgcag

SEQ ID NO: 392691 - DNA, 122 bp, Homo sapiens
ctcgaagaagtggatgtgccatgactcctctttcatcttctccttggcctgagggaaaagcgcatcagggagcctgggggccgaagcgcatctgagtgccgaggcctaggccaccgcggaag

SEQ ID NO: 392692 - DNA, 122 bp, Homo sapiens
ccccaaaggagagtgagggcagctgggggttcaatcacatagaacataaacctagccatgcgtaagcctcccggaacagaggctctcctgattcacacctcagagctccctgctggctgcag

SEQ ID NO: 392693 - DNA, 122 bp, Homo sapiens
cccttcctaaagccacccccggcagcagcccgccccgagcgcgccgcctgtttattcagccgggagtccggcacgcgccaggcgcacgcactgcaacaacaaacccagctgaatggagagtt

SEQ ID NO: 392694 - DNA, 122 bp, Homo sapiens
tgattgcaattgcaaattaagaaaatggatgagagaaaataattattttcttccattctccgaataaggcatgaggttaagcatatgagagaacaaaataaaccaattccagcatgtaaatg

SEQ ID NO: 392695 - DNA, 122 bp, Homo sapiens
ggcgcggggagggggcggaacgcccgcgctgagcagccaataggggtgctaggggcggggcgtgcggaccgcgggccaatgggggcgcggggcccgggtgcgccgcggcgctgggggcggca

SEQ ID NO: 392696 - DNA, 122 bp, Homo sapiens
acggggtctcggccgggcagaggcgctcctcatataccagatggggcggcggggcagaggcgctccccacatctcagacgatgggcggccgggcagagacgctcctcacttcctagatgtga

SEQ ID NO: 392697 - DNA, 122 bp, Homo sapiens
ccgattttatttgcatgcagtggactaggcactgaggaatgcaggcatgctttgaggctccgtcatgaagggcgagccagaagggcctatggagaacaattaatatgtttcccctcacagat

SEQ ID NO: 392698 - DNA, 122 bp, Homo sapiens
cagtgcttttccatacaatgtctggaatctatagataacataaccggttaggtcaggggtcgatctttaactaccagacccagggtgtggcaccagactgtctgccagtggatttcatttct

SEQ ID NO: 392699 - DNA, 122 bp, Homo sapiens
tttccctggttcaagagattcttctgcctcagcctcccgagtagctgggattacggtgcccgccaccatgcccggctaggcccaccatgttttgtaacggtctgcagattagataaagacag

SEQ ID NO: 392700 - DNA, 122 bp, Homo sapiens
gcagcagctgcaacatctcaccggggaaattattttatttaacgtgagtgagatgtgggccggagaaggtagctgaagctatttataaaacgttgtgtaccttcttccgagctctctcccct

SEQ ID NO: 392701 - DNA, 122 bp, Homo sapiens
aacgtcatcagtcgggaggacgacagctacgcacgcgcggggcacctcctctgtctcgcgcgctaactttgcagccccgccagccaatcaaaattagcgtcggagcccgagtgccgaggact

SEQ ID NO: 392702 - DNA, 122 bp, Homo sapiens
tggggcagcccggaggcagagagaccgagagtgcggggcgggcgagggacgccagggccgcgtcaccccagcccgttcctagctccgctcccggcagggggcgccctggcctcgtggcacga

SEQ ID NO: 392703 - DNA, 122 bp, Homo sapiens
tacttgttgaagtggaactccttctccagttccgtgagctgcttggtagtgaagttggtgcgcaccgcgttgggttgacccaggtagccgtactctccaactttccctggggcaaagtggga

SEQ ID NO: 392704 - DNA, 122 bp, Homo sapiens
ggactttgagaaaggaggaggcttgtcaggggcagttctcaagctgtggcccatgaacctcgggggtccctgagaccttttcagggatccatgagggcctccctttcccaactacatgattt

SEQ ID NO: 392705 - DNA, 122 bp, Homo sapiens
gcagagagagaagctagagaccaaaagatgagacgggaacagctgcaaatttcgagagctcgtaagattatgtatgactggagcacaacgacaaccaaggtaggtacaaccatggaagaaca

SEQ ID NO: 392706 - DNA, 122 bp, Homo sapiens
attttgttttagtttctgaattttgctagataatggtttttcatgtatacctggcactcacgtattgaatattctctccctaagtgattccaacaaaaataaaacaaatttaatactgtgtt

SEQ ID NO: 392707 - DNA, 122 bp, Homo sapiens
ccccccatgggcacagggtgcagagatgcagccccctagctctgcctcacactctggccccgtccaacccacgtcacacacacatgaggatctggttgtaaagagaaaggggagggtttttc

SEQ ID NO: 392708 - DNA, 122 bp, Homo sapiens
taggaggaaggtctaaatggtcagtggtctttgatgaagctaacatattttttaacttttcgctgagatataacattgatgtaacattgatgcagcttgatgtatttgtttgcttttgagat

SEQ ID NO: 392709 - DNA, 122 bp, Homo sapiens
ccttcgagaaatctcgtctcgaccaagagctgaagctgatcggtgagtggccaaggcttccgggaagtggttcggcttccgggaggcggttagcacgtggatgaaggtgcccatgtactcta

SEQ ID NO: 392710 - DNA, 122 bp, Homo sapiens
cacccccatcgactccagtagaatttaattcttgggctttggtcagaatgatcaggaaagcgacattcctttctgctagcactaatagctttaagaatgcacaggccaggagttgctgtgct

SEQ ID NO: 392711 - DNA, 122 bp, Homo sapiens
tggatgaggtggagagtgggaagcaggagcccagccagctgcgcctgcgctgcaggagggcgggggctctggttgtaaaacacacttcctgctgcgaaagacccacatgctacaagacgggc

SEQ ID NO: 392712 - DNA, 122 bp, Homo sapiens
cgccacacaggctgctgagcctttccaagcgaaatgccccacgtgcgccaacggccacctcggccgtcgccccacgcttggcccgcagccagaggaagcccagcaacttctgctctttctta

SEQ ID NO: 392713 - DNA, 122 bp, Homo sapiens
ccaaattcacctccctagtaagggttagagcaaagatttaaatccagtccggctccagagcgcctgtttttcactattacgctgtattgtctcttattgtaaatcaattatacctggaaata

SEQ ID NO: 392714 - DNA, 122 bp, Homo sapiens
aattgtatcaaatctcaagttgttttgttttgttttgttttgttttttgagacagagtctcgctctgtcgcccaagctgaagtgcagtcgtgtgatctcccctcactgcaagctccacctcc

SEQ ID NO: 392715 - DNA, 122 bp, Homo sapiens
aggctgtcctccgtgttcctgcgggtgaggacgaacgtgggcgtgcgggtgctctacgaccgtgaagggctccgactgtacctgcaagtggaccagcgatgggtggaggataccgtgggcct

SEQ ID NO: 392716 - DNA, 122 bp, Homo sapiens
accttttatttgtttgtatatttctttcttcctttccttctttatttctagaagcatgttcgttttaaaatataaattatgaatattaaaaatcttcttttctctgtctttgattactatta

SEQ ID NO: 392717 - DNA, 122 bp, Homo sapiens
cggcctgggtgcaggcagcccagcgcccccaccccagccccggctcacctgttccggggtcgccccgcagatcttcaacttgatgaagttcgacagctatgcgcgcttcgtcaagtccccgc

SEQ ID NO: 392718 - DNA, 122 bp, Homo sapiens
cttctgaagggtacttctcctagcccaggggcagaaagatccagtcttttggggcagctgcggaagaaaggagagcagtcctgtagctcatgaagacattacgaagcacaaagaactgcaca

SEQ ID NO: 392719 - DNA, 122 bp, Homo sapiens
gcaagagctggtaaagtatttccttggtggtcaaattctggagggctaaatgtgtgtgtgcgtgaatgatcacaaacgacccttcttgcggtgtggttcgtgtggatggtgacaagtcctac

SEQ ID NO: 392720 - DNA, 122 bp, Homo sapiens
ataaaagttattggaaactttacatttgcagcatggtctctgcacactgccgagctgccacggctctcaacaaggcctcattcacggccctaggcagctcacttgcctgcccccagcccctg

SEQ ID NO: 392721 - DNA, 122 bp, Homo sapiens
cttttcctctttgaaataaattcccatttggaacatcagcatacagtttgaacatttattcgcctcctgagcttgtacaacagtcgtgggagttgctgcagaagcaagcgaaaagccagatg

SEQ ID NO: 392722 - DNA, 122 bp, Homo sapiens
ccccggggtctcggcggccggcggctccccgcggcactggctccctcttgtggctctctgcggtcactgcacacccgctgaacggcagtctcttccagcgggccccggcctggggagaacaa

SEQ ID NO: 392723 - DNA, 122 bp, Homo sapiens
ccgctgttctttgcaacctgcaggggccggtgtatgtccggcgaggagccggggccgctgcgggtgcgtgcaacccccgaaggagacaatccctccacctcggggcgaacccgggggctgca

SEQ ID NO: 392724 - DNA, 122 bp, Homo sapiens
ttcggaaacgaccagtcaggaaagagtgggcaaacaggaacagaagctctcactccgtcacggattctacgtaaaaccggcagctcggttttccggctttaaacggtctttggcttgaaggt

SEQ ID NO: 392725 - DNA, 122 bp, Homo sapiens
caccccattacatcacacttggctgtttgcactccttgatcctacttacctgcctatccccggaggcctttgagtctaaaattcctggtctcttttcaccactctacttacccctacaactg

SEQ ID NO: 392726 - DNA, 122 bp, Homo sapiens
ccacgagccatggctgcattaggcaaggaaaagaggacctttgtcttccggtgcacatagcgaaagtttcttaatagcaatttggttgcccaggttctgtgatacctggaaggaagggagtg

SEQ ID NO: 392727 - DNA, 122 bp, Homo sapiens
ctcgatctcctgacctcgtgatccacctgcctcggcctcccaaagtgctgggattacaggcgtgagccaccgcgcctggctgggtgactccattttgatttgtagcgttgtctgttgagacc

SEQ ID NO: 392728 - DNA, 122 bp, Homo sapiens
cgggaacattctattgtgtttcctcctcccgggttctctcccaccccccgccaagttatgcgctcacccagctcaccaaggaacaggcgagtgggtaggaaagatctttcgggaagacacat

SEQ ID NO: 392729 - DNA, 122 bp, Homo sapiens
gggaacaagccctaccgcacattacatggaagcgagtgtgctcagaaatgcaggttctcccgaggggcagccctcagtcacaagccagactagtcacgcacccccggctgtgggtggcttcc

SEQ ID NO: 392730 - DNA, 122 bp, Homo sapiens
cgaagcccgcgctggggctgggctctggccggatcgcaggctgggcggtctttgaccccccgcgcctcccgcccacagccggagcccggcagctggaagcacccgctaccccggggagcgtc

SEQ ID NO: 392731 - DNA, 122 bp, Homo sapiens
tattaggtcccgcgccggcagccgggccgcagacacgaagcctcccgggtggcttacagacgctgccagcatcgccgccgccaggtgagtgcccccgaccctgctgccgcccgctgctccgc

SEQ ID NO: 392732 - DNA, 122 bp, Homo sapiens
catatcttaaatgtcacctttatcgggaacaccttccctgaaacgtccctgccaaaattgcgaaccaccacctgccaccaactctgacatgtctgtcaagtgtcacccatgatcacactggg

SEQ ID NO: 392733 - DNA, 122 bp, Homo sapiens
ccacaggatgggagtaatggctttcagatgaagaacatagccactgctaacagggtggcccgctggggatgcaggggaggtcctgaatcacatcctgccttctgatctgcaggtgcctccca

SEQ ID NO: 392734 - DNA, 122 bp, Homo sapiens
agtctcaaaacctcagctgatctgggattatttcccctcttacctccctaaatgaaaatccgtcatttactgtaagtaaattcttaaataactaagtaaattctttttaatgtctcttttgt

SEQ ID NO: 392735 - DNA, 122 bp, Homo sapiens
ctcaagtcttcgtgcttctccctcattggccaccgagtcagcgggaggtggggctgctgccgtcgccatcttgttgaggggcgcggccggcttggtgcggacatgtttatgaggggcaacct

SEQ ID NO: 392736 - DNA, 122 bp, Homo sapiens
tgtctgttatttctctggtgtcccacgaggtgccacatgtacagcccagcatgggagtcccgggcgcctttgatcaccagctgtgccacgcctccctgaacctggagctgccagccgtcccg

SEQ ID NO: 392737 - DNA, 122 bp, Homo sapiens
atttgtagaatcagaattgggagagtgctgagtggtcattggtgtaagttgccatgaagtcggttgtctttctgtaatgtctctcatacatggtagctgtctagcttctgtttcatgactcc

SEQ ID NO: 392738 - DNA, 122 bp, Homo sapiens
gctccactcaagactagtccacgaacgagacccgccttttctacacaggatccaaggtcacgagaagcagccagagtgccccgcctccgccggctctggtctgccattcgccagtgcaggga

SEQ ID NO: 392739 - DNA, 122 bp, Homo sapiens
tgccttggtgtctttgtgcagagcacacaggacttgttgactgatggataagctggacttcggttctaccacccctttacccaagaactcttgtaaacatagaacctgaacaagtatatgca

SEQ ID NO: 392740 - DNA, 122 bp, Homo sapiens
aggagcccaaggtgccagccggccacggcaagacagggcccgccagctgtttggaagaggcggcaacaatgagtcaccgcgcacacgggccgtgccggggccgggccggggcgttgtctggg

SEQ ID NO: 392741 - DNA, 122 bp, Homo sapiens
ttgactttggctttgaaaggaggcccaaggcatgaaatgcagtgaggagcttcgcccctgcgacgttgctctctggaggacacctcattgctccagggacagaccttgctcctggtgccagg

SEQ ID NO: 392742 - DNA, 122 bp, Homo sapiens
attttaatattgagagtaaacaggaagaccaggtagaagtatttgaactgaattctgaaacgtacagagaacttaaattggatgagaatgtttgagaaccatggatggttcagggtccattt

SEQ ID NO: 392743 - DNA, 122 bp, Homo sapiens
tttcctttatcttcccaccccgccacgtgaaaccacagacacctgtggagagtgaagccacggagcccatgacaaacgcccggccagaggccagagcaagcagcaggtacgggagcggggca

SEQ ID NO: 392744 - DNA, 122 bp, Homo sapiens
aacctaagggtaagtacaagtggaaatacattaccttgtttgttaacaattcaatcaatacgaccttggtgtacagtggggggctatagggtcatgattcagcttgtggaaaacaaatgaaa

SEQ ID NO: 392745 - DNA, 122 bp, Homo sapiens
tcacacgccatttttctgcggtggtgtccatgataagagccgagattgcaggggcctgcacgccgtcctgaagtcgcgttctgtcttttagccgtgtgctcctgcaccaaataccgccttca

SEQ ID NO: 392746 - DNA, 122 bp, Homo sapiens
gaactaggtgatctgcctacctcagccttccaaagtgctgggattacaggcataagccaccgcacctggccaagccgaaagctttctagggtaggctttaatgtttaggtctttacaccacc

SEQ ID NO: 392747 - DNA, 122 bp, Homo sapiens
agggcgacaggtggagagggacagctacggctgcgggctccaattcaggccgaggtctttcggtgactggagaaggtggagacagagcaacattcagaagttttgtgaggcgtgtgtgtgtt

SEQ ID NO: 392748 - DNA, 122 bp, Homo sapiens
gttttagatattaacctggctgcagagccaaaagtgaaccgaggaaaagcaggtgtgaaacgatctgcagcggagatgtacggctcctcttttgacttggattgtgactttcaacgggacta

SEQ ID NO: 392749 - DNA, 122 bp, Homo sapiens
gaggttgcagtgagccgagattgtgccaccgcactcagcctgagctacagagggagactccgtctcaaaaaaaaaaaaaaaaaaagaaaagaaaaagaaaagaaaaaaaaagaaagaaagaa

SEQ ID NO: 392750 - DNA, 122 bp, Homo sapiens
gggtggggtgggagtagccataaaatgcctaaaactgaccagtgcagagtaacagggaaccggactccaacaaattaacagtgccacgtgccggtcacacttgtgcacagaggcaaccaacc

SEQ ID NO: 392751 - DNA, 122 bp, Homo sapiens
tcagcgttttcatctcggcctactacctatatggctggaagcgaggcctggagccctcggcggatgcccccgagcctgactgcggggacccgccgcctgtggcccccagtcgcctgctgcca

SEQ ID NO: 392752 - DNA, 122 bp, Homo sapiens
tctcagaaccagacacctctatgtcttatctctaagagctccagacatagagacggcaagcggacaggtgggcgagtgctcagcaccagtgacattgtgaggtcatgacacccatcacaatg

SEQ ID NO: 392753 - DNA, 122 bp, Homo sapiens
gaacctaggcagagacagtgtagataataggcccagaggttctcaaggtgggtaatgccccggagacctgctgagaagtagaaggacctgagttcagatttggggctgaccctaagactagc

SEQ ID NO: 392754 - DNA, 122 bp, Homo sapiens
ggccgcagagacagagcccgcaccctggctgtctgtggtgcctgggccccagctcccgcccgccacccgccctgttgagtgcggcctccagactcgagtccagaatctgtttctgtcaagtc

SEQ ID NO: 392755 - DNA, 122 bp, Homo sapiens
cccccattccggaactcccagctccacgcggctggggtcgagctggggcccgcgggcaggcgccctgagcacccgcgtgacggtacctgtggtggcagcacctcccaagctgcggcggcggc

SEQ ID NO: 392756 - DNA, 122 bp, Homo sapiens
cttgagccctggactcaagcaatcttcccatctcagcaccccaagtagttgggaggcacacgccaccacgcctggctaatttttaaattttctgtagagatggggtctcactgtgttgccca

SEQ ID NO: 392757 - DNA, 122 bp, Homo sapiens
cctgccagccacaatcacccaatctgtgttaccaccagacagaaactcacttattgccttcgtgaagaagtgggttattctttgtcgtctgccatctgtgtggtctttgcagtctcccgtat

SEQ ID NO: 392758 - DNA, 122 bp, Homo sapiens
ccactttcaagccggaaatagtcctgggtaaatcctcaaactggattgagaaactgccttcgaacttggcacattttcccctgattttttttttttttttttttttttttttttgtgagaag

SEQ ID NO: 392759 - DNA, 122 bp, Homo sapiens
cggagtcaccagacctggagtttgagtatgctgacacagacaagtgggctgcagagctctcgggtaacgcacagacctttgtgttatttgggggtggttttttccttattggtctttaataa

SEQ ID NO: 392760 - DNA, 122 bp, Homo sapiens
caactcccacccatgccgttttcttgactcccacctggagtttctgggtccgggcccggccgtccacctgcacactctgaggctcccctgaaaacgttggggatcgagggttacccagggaa

SEQ ID NO: 392761 - DNA, 122 bp, Homo sapiens
tccatgaccccgtaggcataagtgttcccactacccgtggagaacatatttcctgagagccgagtcccatgttcatccacgtagtagagtccaggaccctataagatgaaagatttcaggct

SEQ ID NO: 392762 - DNA, 122 bp, Homo sapiens
aagccatgtttattagaatctacatttctctcgcgccccaataactagaggtgtgttttgcgggcagggggctttcagcaccttttgatctctcaaggccaccgcgactgattgacggttcc

SEQ ID NO: 392763 - DNA, 122 bp, Homo sapiens
aaccccgatgtgcgtgggctggtgaatgcaggcccagcgcggagtgcgcacagcccggaacggcattcagccaagaaaagacccacagccgggaacagcatattcagccaagaaaagaaagg

SEQ ID NO: 392764 - DNA, 122 bp, Homo sapiens
aaaaaaaaaaaaaaaaagaataagcaaatcatgcaaatcatcctgttctaaactctgaaccgctgcttccaagaccgtccctgcccttgccctggccgcctctctccttgttaactgggctc

SEQ ID NO: 392765 - DNA, 122 bp, Homo sapiens
ctgagtcgcgtgccctgagtccacagcaggctcttccctgtgcggagcctgggtggggtgcggctgtcaggggagcggctggggaaggagcagactcagctcgctggggcagggactgtggc

SEQ ID NO: 392766 - DNA, 122 bp, Homo sapiens
tgggactccgggttcttccattctcggggtttcttcgggacctgaggcttcttagagatccgagacttctttaagatgtaagcattttttggtctctgaggacggagctcccgattcttctt

SEQ ID NO: 392767 - DNA, 122 bp, Homo sapiens
gagactgaacagcttgctaaggtcttggggctggtcagtagaggaggcaggtctaaaacacggtttcattccaaacctcatgtgattctgagggccagttgcccaggaatttgcacttctca

SEQ ID NO: 392768 - DNA, 122 bp, Homo sapiens
ctgcacctccagagaagctctgcttgggccaaggccccattcctggatgcaccgcttcgccgcatataaaaagcaaacaaaccaaaccaaaaaacaaatcaacaaaactggaaatgacatgc

SEQ ID NO: 392769 - DNA, 122 bp, Homo sapiens
agggggcggctgccgggcagagggtctcctcccttctcagacggggcggccgggcagagacgctcctcacctcccagacagggtcacagccgggcagaggcacccctcacatcccagacggg

SEQ ID NO: 392770 - DNA, 122 bp, Homo sapiens
attcccatgcacttcctctgttttcaagtaagcatagttaacctctgactgtttatgttccggtgacagcattgaggatcaggaatgctgccggccatgggctccagccgtcggcacagaac

SEQ ID NO: 392771 - DNA, 122 bp, Homo sapiens
atgttctgaaattaacatttatcatttttgaatgatggaaaatatattttacaggagcaccgttggagtctttcacttaacactgcctcccaaccaggccagtggtcatgtaaattaagtca

SEQ ID NO: 392772 - DNA, 122 bp, Homo sapiens
cgaggaacagcgagcccccggacgctgactgcaggacgtcccagtttgtgcccgggtctccgtccctccccgtacggggctcgtacccccgggcctgggtctgacccacagggcgctgaggc

SEQ ID NO: 392773 - DNA, 122 bp, Homo sapiens
agctggcaggatcctgctcagcgtggggactgtgcggggggccgtcctgtgccactgtcccgcctgccctggccgcgcagccgcacactcacccgctgtgtcgaaggccttgcaggtgccct

SEQ ID NO: 392774 - DNA, 122 bp, Homo sapiens
agagcgctacgtcgccggcgggcagcagcagcgcctacaaactggaggcggcggcgcaggcgcacggcaaggccaagccgctgagccgctctctcaaagagttcccgcgtgcgccgccagcc

SEQ ID NO: 392775 - DNA, 122 bp, Homo sapiens
ctgttctaggcactgggatacagcagtggacaaaaaactgtccatacctcccggagctctcgtttcagcggaggaaggcagacaataaacaaaatttagtagtgtgtcagagggtggtacat

SEQ ID NO: 392776 - DNA, 122 bp, Homo sapiens
ggtgcctgagcaccctggttccccgggtgcacaaggcccctaaatccacaatgtaccccacgggacagcaggcagaaagacctccaggtacacagcgcacacccaggcacattcacacagac

SEQ ID NO: 392777 - DNA, 122 bp, Homo sapiens
tagaccctccccaagaccttgggaatccaggccgcctagatccccaggcagaaaagccagcgtcctgacatcttattcaaatctttcctgcggctgttctctcagcttctctctactatccc

SEQ ID NO: 392778 - DNA, 122 bp, Homo sapiens
ttgtctagcagccctctccccgctgccctgtcctggccgaggcaaaggccgcgtgcgctccgcgtctgccaggctttagggctgcgcggacactgggtgggtggtgggccgaggcgaccgga

SEQ ID NO: 392779 - DNA, 122 bp, Homo sapiens
gggtttccagacaggcgcgctggcggatcaccttgaagtcaaattccatcctatggcggccggcagaagtgggcccccggcacctccttgtaagaaaacactctcttccgcagacgccggtg

SEQ ID NO: 392780 - DNA, 122 bp, Homo sapiens
aatggctgcgtaatggcggatggccatttccttgactaggatgagacattgcctactctgcgtggctgctgtgagcgtgaaatgggatcatgtgcggaacagccacgcatggtccgtgaaat

SEQ ID NO: 392781 - DNA, 122 bp, Homo sapiens
ttggcggcggtaggcatggcggcggtgggcatggcatggaggcggtgggcatggcggccgcggggcctgtcgctgtccggagtgactaagggacgctgaatgattgctgtgtagaggagggg

SEQ ID NO: 392782 - DNA, 122 bp, Homo sapiens
gaaagcagtagagtcatgtgtgaaaccaatgtagtaattaggtggaagatgatagccgctcggatcagattggtgatcagtggctggattgcggacatgctgatactttaaaggtagagcca

SEQ ID NO: 392783 - DNA, 122 bp, Homo sapiens
taagcacttccgggatggatctttcgtggtgtggaggccagtctcacaccctcccacccccgccaacgtgtgcggtaacctagttctatactgactgagatccggctggagaccaagtcgca

SEQ ID NO: 392784 - DNA, 122 bp, Homo sapiens
gcgcacagcgccgggccgcacacctccgggctctgggcggagcgcctcgggcgttgtaggcgggaccggaccctctggcccgcccctccgtgtcccttctggtcgccagtggacgccgacgt

SEQ ID NO: 392785 - DNA, 122 bp, Homo sapiens
acaactgcactgtaaggactcagagccacacagaacttctgagaggggctgttagcattgcgcagcatcttcagttctccagtaaatgatattgcgttcgtgcctcagctttaagcacaagt

SEQ ID NO: 392786 - DNA, 122 bp, Homo sapiens
cctccgcgacaccgcgagccccaccctaggctcttcaggccctaccgtcggccggcaggccgttcgccccgcccacagatcgctcccgctacttctaggtcctccgccggatttccagcgcc

SEQ ID NO: 392787 - DNA, 122 bp, Homo sapiens
ttagccatcaaatactttctttctcgggagttttttttttttttaattcaaataccttaacgacttggcaattgcattttgatcagatttagttggcgccccagcccggagcgggagccggg

SEQ ID NO: 392788 - DNA, 122 bp, Homo sapiens
gctttggcccaaatgtcaatctttgctaaagaaatatgtctgtggacattacagaggaatcgtgccgttcttaaatctacttacaccctgcttctgcaaatgcttacgtatctgacttgttt

SEQ ID NO: 392789 - DNA, 122 bp, Homo sapiens
tttgtcttacgaggcttccggaacacggcccagaattacagagaaaacacactgcgcacgcgcactctctcgtcaccgctgtgcggcttctgtttggttggccagttcgtcccaatttccga

SEQ ID NO: 392790 - DNA, 122 bp, Homo sapiens
gcatatctcctgcttcacacgtgtgggaccctccctgaggtttacaccccagagaacagtcgccggctctttcccaaagcggtggtgaggctttgcaccctcaggacagcggacgagagttc

SEQ ID NO: 392791 - DNA, 122 bp, Homo sapiens
agcagggtctaagtattccgtctgcaaaactggcaggccaccaacggccgcgtcccagggcggcctgaaggatgctgataaccgggagccccgccctgggttcggctatcccgggcaccccg

SEQ ID NO: 392792 - DNA, 122 bp, Homo sapiens
tttacctgggccatttctcaggattgtgtatgcaggaagccatcttcagggatgaggtaacgtatctctatcccctgacaacaatcaggcttgctaaaaaagtggtcaatccccatagttca

SEQ ID NO: 392793 - DNA, 122 bp, Homo sapiens
aggtaggctgggctaagcttatgatactgggtaggttgggtgtattaaatgcatttttgacgtaaagtattttcaacttacgatgagtttaatcaggacattgttctaagtgagctgagaag

SEQ ID NO: 392794 - DNA, 122 bp, Homo sapiens
tccgcgttcccagcgccgggaagtgcgcaacccgagttcagcagttgatccagtcggcgccgaggtgctcagatggattagtgagacgaccaattagagttgcacactgcgccgaggaggcg

SEQ ID NO: 392795 - DNA, 122 bp, Homo sapiens
ccccatcaggcctgctggagagggggcaatcccgcctccagggcggcgtcggacgcctcccgaatcgcagtcagtctccctaaggccctctcagaccaagctctaagcgccctcagcactct

SEQ ID NO: 392796 - DNA, 122 bp, Homo sapiens
cctccaagctggccgcccatcgcctatgtcacgaccccccaaccgcgcccggcagccaggcgactgcctggcaccgatgctccagctgcggccaggcctttggccagagacgcttactgctc

SEQ ID NO: 392797 - DNA, 122 bp, Homo sapiens
gctcgcgggtgcggagcgggtggcgggggacccacggggcagtgagaggggcagcctccgcgtcgggccagggtcacatcaagtttggcgggtgcggaaggtggggagggggtgcggcgggg

SEQ ID NO: 392798 - DNA, 122 bp, Homo sapiens
tgggcccaggcatcagcgcttttcaagctccccaggtgattccaatgtgcacccaaggtacgaaccattggttcagcggctccgctgagcctggtaactctcatctgatgggaaaaggtccc

SEQ ID NO: 392799 - DNA, 122 bp, Homo sapiens
tccgatgagtggaggaacaccaaggttcttggtcctcatgccagcttagacaaaacgacacggacatacgtggagcggttttaaggagcccagagtttagtaggcaagatagaagtgggaag

SEQ ID NO: 392800 - DNA, 122 bp, Homo sapiens
acatcataaccgatttcaaatggtgctagacaaaaacagactctgaacaccaggagaaatcggtcagcctgtgtaagagatgggccagtggtgctcccagggtctgcacctcgacagtccag

SEQ ID NO: 392801 - DNA, 122 bp, Homo sapiens
gctgctggcactgggggttttagacctggcttagcccttgttagcctctggttagtgcctcgttaaagatctggtttagagttcggtgcctgtaagccttgcccccaaaacccgggctgagg

SEQ ID NO: 392802 - DNA, 122 bp, Homo sapiens
agcagcaacaagtatttctcccacatcctttgggatgaaaagttagttgtcctaagtcaccgtatgcaaccacactttgttttttcaagccagcatgagatatgccgctatccttaaaatgg

SEQ ID NO: 392803 - DNA, 122 bp, Homo sapiens
tttgatcaccacgtccagagggcggtatgcgacacacgggccaaatatcgagagggacgacggcctcgtgctgtgaaggtaaagtgattttggtttcattcgctctcctcggtagctttatg

SEQ ID NO: 392804 - DNA, 122 bp, Homo sapiens
atagcaagagttaaaacagggaacacgcgaaggccgcaagaggcggagaccacaaggtggcgccagatccccatcttggaagcagggaggcggcgctggccggcctgagcccgagagatcag

SEQ ID NO: 392805 - DNA, 122 bp, Homo sapiens
gaactggaattgttgctggaggaattctgtctaggaggtggattcctgaatgcactaggacgcagctcgcaagagctttgatctagagttcttttttaacccctaagtaaagttcaaaactt

SEQ ID NO: 392806 - DNA, 122 bp, Homo sapiens
gttccgccgtctggctcccctccctcgcgtccaccggctgtcccaggactcgcggttccgcgttcctgtcgcagtccagacccttccctggaggcccctgctcccaggactctcccaggcgc

SEQ ID NO: 392807 - DNA, 122 bp, Homo sapiens
cactttcagccatttttggtttctcttcctcatcttctttgttctttgatattgcagtctcggccagtctttattgtctgtgcaattagaatgctttttatttgtaccattcttataccatc

SEQ ID NO: 392808 - DNA, 122 bp, Homo sapiens
tgaaggcctagctacgctgttatttattgtatacaaggcaagggggcatggtaaggagtgcgagtcatgtccaatgataggtaagggcacgcgagtcatgcatccactgtacagggggccct

SEQ ID NO: 392809 - DNA, 122 bp, Homo sapiens
tcagttcctggattcagggccgaccaaggcgcggtgccgggagcagacatccgcagctgccgctccagggagtttcacatggagcaagggtgccatctagcggctgctctgcgaaaaggcgc

SEQ ID NO: 392810 - DNA, 122 bp, Homo sapiens
gcctgtccagggagggcctcgaatgccagctgagtccagactatactgtgtattatagaccgcgtgtaggaaacaggttttaggtgatgtttatccatgataagccagttgtacacaggtgt

SEQ ID NO: 392811 - DNA, 122 bp, Homo sapiens
cagtgggacacgcaacactgttcccaagatgttagcaggggaaagagtcggacgaaatggcgaagtgtttggcacaaagaagaccaacaaatgacacaccaagccagtaaagacacctccgt

SEQ ID NO: 392812 - DNA, 122 bp, Homo sapiens
aactgtttgcaagatgtgctgcctgagagcagcagaaaactagaggccgactgggtttcccgtctttgtgtcagaccccttggggccagcacttcctccatggaagtcaaggttgttgaaga

SEQ ID NO: 392813 - DNA, 122 bp, Homo sapiens
ccggcagctaaaggcgaaagctcggagctcagactggccatgtttgagtcatggctcagtcgctaggtgtcccggacgcctgcatgagtgagatacggaagtgacagtagggcctcccttgc

SEQ ID NO: 392814 - DNA, 122 bp, Homo sapiens
ctcgatgttctgtgtacagacaatgatgtatgaagacgtgccttatatcttggtgttgtccgcttactactggaaggcatacctagaacacttccttattcacaaaatacgtcatttatgtt

SEQ ID NO: 392815 - DNA, 122 bp, Homo sapiens
tgcgttgttaggggtttcttaaactgagttggtagaaatgcgaagcgtcagggttcccgccggcttcgagcctttcttggcgtatttgtatcttgagctgatttctgcgtcagcccacatct

SEQ ID NO: 392816 - DNA, 122 bp, Homo sapiens
gtcttactgtgtcatccaggctggagtgcagttgcacatctcggctcactgcagcctccacgtagctgggattaccaccatgtgccaccaagcccagctaatttttgtgtttttagtagaga

SEQ ID NO: 392817 - DNA, 122 bp, Homo sapiens
gatggcgcctacttcggcactggtttccctcacatgctcttcatggtgcatcccgagtaccggcccaagagacctgccaaccagtttgtgcccaggtagggagcagggagagtcattaaggg

SEQ ID NO: 392818 - DNA, 122 bp, Homo sapiens
atagagtgggaggtgagccacgctgcccagtgcctactacgtgccaggcccagtgctctgcgctccctcaatatctcactcgcggctcacgaacaacccgcatgcatgcattattttccttt

SEQ ID NO: 392819 - DNA, 122 bp, Homo sapiens
aacagttaaaggcatttcacaacagcgatttaggtctgcaagcagtttatggagtaccaacgactcttatatgtattaactcattttttaaaagccagccctgtcagtaaaatattttttgg

SEQ ID NO: 392820 - DNA, 122 bp, Homo sapiens
gactggggccggagacgtccgtccgaggagacctttcagagtgtcagcctactactgtcccgccgaagccaccaaccgaagttccaagactgctggctgcagattgcatgcgcttgagggca

SEQ ID NO: 392821 - DNA, 122 bp, Homo sapiens
ctagtccagataatgttttttaaagcagcttgatttggaagcgtgtgtaattctgaaatacgaacaagcagaacttttccagggggtcaaatgcatataggaacaaccaggatttctcattg

SEQ ID NO: 392822 - DNA, 122 bp, Homo sapiens
gagtcggctgtggacctttgtctgtgttcgctgcctcagcctgactgccattgtctttgtcgatctccggacttatttctccttgagccacggatacagcttttttctgactttgcacctct

SEQ ID NO: 392823 - DNA, 122 bp, Homo sapiens
cctttacggacgcggcacctgcgacagggatgcgcgaggagtcagggggcctcgccggatcgaacctaagctggggaagagtatttcttgtatttttaggagaaattctcagcctcggggaa

SEQ ID NO: 392824 - DNA, 122 bp, Homo sapiens
cacacgggcacacgtcgacaggccatccagggcagaacaacatggacgccgaggagaattcggttggaggagagtcccattgctgggtggtctgactccaggggaagaccaccttcccatcc

SEQ ID NO: 392825 - DNA, 122 bp, Homo sapiens
gatcttgtccaatcctagagtgagcccaaactcaggggcggagtttcatgatcccggaaccggtggtagtgtttgggtttgaggagagcacgacccagccctctggggtggggtctagcggg

SEQ ID NO: 392826 - DNA, 122 bp, Homo sapiens
acctcctggtggtgagccagtctgcattcccacgccatcccaaagccctttcatcttccccgtgcattgtagatggaaggagcacccatgccattcacatctagactttgagttccctgcat

SEQ ID NO: 392827 - DNA, 122 bp, Homo sapiens
ccaatagtctaaagtatattctatcataatctacctgactgctacagttcaggagagacacggtaacctctgtcttatcatttgaccttctcactctggagacagacataagttgataccca

SEQ ID NO: 392828 - DNA, 122 bp, Homo sapiens
cttcagcctgacagctgctccggcctcccgcccacatacccgctctcgccgcgggctggacgacgggaacgaggctcaaggctgattggctctgacgcctgctcatgtagccacactttccg

SEQ ID NO: 392829 - DNA, 122 bp, Homo sapiens
gccatggtgcagggcaagtctagcagagaaagccagtgttcttcagttactgcagctcggcgaagaatcccactgcagggcactagggaggccggtcctgcagaggtcagcagtaggagtga

SEQ ID NO: 392830 - DNA, 122 bp, Homo sapiens
ctttaccaggtttctaagcaaaaatttctaaaaatgattaattgttctgacagaattaggcgtagttctttatcaacatttatggattccatgccacaagtagtatgcgcttaagtgcagag

SEQ ID NO: 392831 - DNA, 122 bp, Homo sapiens
cacctttccacagcttccagagctaaagtaacaactgagctgtatcagcagaaagactgacgtccatttcagagacatcctggtcttatgcaatgcttcttttccagttgttgtttctttct

SEQ ID NO: 392832 - DNA, 122 bp, Homo sapiens
aaagcccgaatccccgtggaattcattccgaggctgattgcaatcacttggagtcgggcgcgtcctacctaaaccaggcagtttatggcaaatacctgccttgaccgtgcttaaattagtga

SEQ ID NO: 392833 - DNA, 122 bp, Homo sapiens
aatttaggacaacacctctttgttaagacacatggaagagatgaaggttctaacaaaactcggatggaggatcaccgatttcaaagcttccgtggtctcccagtcgcttctaacaatcactc

SEQ ID NO: 392834 - DNA, 122 bp, Homo sapiens
gaagtttggattgaacactaagaacttttaacttttcgaagatgagaataagagaaagatcgtcaaaggagactaagcagcagtagccagcaagataggagcaaaggaggagggtgtgatgt

SEQ ID NO: 392835 - DNA, 122 bp, Homo sapiens
ccggggctccgcccaccatgatgtctgctccgccccctcctcgtgttgctggtggtcctccggggctccgcccccacatgatgagtgcctcctgcagccctcagccgtccctgtgactcctg

SEQ ID NO: 392836 - DNA, 122 bp, Homo sapiens
tccccgggtcttcagggccaggggtgtggccaaaggactcaggggatgaagccagggtcccggtgacctgagccttcccctaggcacaccccctgggactcccactccctccccacctctgc

SEQ ID NO: 392837 - DNA, 122 bp, Homo sapiens
aacccgacagcgaggacctacacacaaaagtgctcccggccttaccaaacaacgcagacccggggtcacgcctcgtcctgtttcaacaacaacacccaagggcttccctggagcccagggcg

SEQ ID NO: 392838 - DNA, 122 bp, Homo sapiens
cagattccctctttggccttctgccaccacactctccaccctgtggtcttgttccgtccccgcccccatctagccccacctttgagaactgggggcagagcgaggctccaggttctgggctc

SEQ ID NO: 392839 - DNA, 122 bp, Homo sapiens
gaggccaagctcagccaaactttatccgagcaacaatgccaattaatctggcgcttgtcgcggctactccctcagggcaggtgtgagggtcagcgaccaagctccatcctgagtggcactga

SEQ ID NO: 392840 - DNA, 122 bp, Homo sapiens
cagggcacagagggtgcaagagggcgttgccttcaggtgctggagcaactggtccgctcgcgtctcaggttcagcaccgacagcacagtggacagtaccagctcctttcacctccagtttgt

SEQ ID NO: 392841 - DNA, 122 bp, Homo sapiens
gtcttggggcatctaggctttccagttggttgtgatgaaaagtgagtacactgggccgggcgcagtggctcacgcctgtaatcccagcactctgggaggccgaggcgggcggatcacgaggt

SEQ ID NO: 392842 - DNA, 122 bp, Homo sapiens
ctcgcgcatttcctccgccatgcgcgccagacggagcctacggggaggcacagcgtgagacgcccctgccctggaggccccgcccctgccctggaggccccgcccctgccctggaggccccg

SEQ ID NO: 392843 - DNA, 122 bp, Homo sapiens
agatttgcagtgtgttccggacatacagtgtgacatttctgtggtaaggcttctggtcagcggaagattgatgatgtattttaacccctgatgactaggaaacctctctcccttgggagact

SEQ ID NO: 392844 - DNA, 122 bp, Homo sapiens
tgggccagcggctgtggagggtgtgctgggtcccccagtggtgccggcccacaggcactgcgctcgatttctcaccgggccttagctgtctccctgcggtgcagggcttgggacctgcagcc

SEQ ID NO: 392845 - DNA, 122 bp, Homo sapiens
tccccaggcgtggctacagttggtgaagaatctttccatgccgctggagctcatctgctccgatgagcacatgcaaggcagcgggagcctggcccaggctgtcatcagggaagtcaggtgag

SEQ ID NO: 392846 - DNA, 122 bp, Homo sapiens
ccactgtcatcacagacatcctttgtagtaatgtattgttactgttgagtcagtgtggggcgtgaggagatcagagatttaagctaacgcactgcttttactacctgtgacttattgggcat

SEQ ID NO: 392847 - DNA, 122 bp, Homo sapiens
ccaacccttccagtgccccccagagccttccctttccagggaagcagccccactcaccctcgcctgctgcaggatcgcctgggcctgagcctcctgggccgccaccacagggcccttgtcac

SEQ ID NO: 392848 - DNA, 122 bp, Homo sapiens
cctcgggttcccttcccagccacccactcagtgagggcttcagcacgtggctgtgtggggcggcgggtttcctctccgccccggcagctctgcagagggtggttttcgccctctcttctccc

SEQ ID NO: 392849 - DNA, 122 bp, Homo sapiens
gagagccacggggagattcctggactgcggaggagccgggcgagcggggggagcacgacccgggtggactcagactctgcccagccttcaatcccctaggggaggaccggcgtcgggaaagt

SEQ ID NO: 392850 - DNA, 122 bp, Homo sapiens
aatgctactgcccatgctggcaaaaatgcgcacagtctggtaggggctatagacatataacgagtcaaacattccacaaagtagtaatgtttccacagatgaccctgggtggtccaggagca

SEQ ID NO: 392851 - DNA, 122 bp, Homo sapiens
ggtgggcggggcacgcgcggggcctggccaatggcggcggggcggtggaggttgagctgccgtgggtagggttagtgtgagaggtgcggcgggggaggtaatgatgatggtggcggaggaga

SEQ ID NO: 392852 - DNA, 122 bp, Homo sapiens
aaccttggtctctacttcgcgtcccaactgtgcttatgagtctagtcatttttgttggaacgcgatagatttcccaagctccggagtggggccctgaccagggaggaagtgtccgctttaag

SEQ ID NO: 392853 - DNA, 122 bp, Homo sapiens
ccacaaagtggatttttatttcgcttgagctattcagattgactttctacacagcctgaacggctgctgaataatcacaggcaaaattttccactggtaccgcactgtgtagacacacgtgt

SEQ ID NO: 392854 - DNA, 122 bp, Homo sapiens
cagctccttggacctgcagcagagacacaaaccaagaaacagaaatcccgggaacagacacggaccacaagcgcttcctcccacagccctgaaaccatcagagaatctcaaggttggaagag

SEQ ID NO: 392855 - DNA, 122 bp, Homo sapiens
gcgcggcagcctccagcagccgcagccccgtgccctcctccaccatgctgcggtccagcgcgtccttataggagatcttgagcttggtcttagggcaggtgaggtacttggagtaggcgccc

SEQ ID NO: 392856 - DNA, 122 bp, Homo sapiens
agggggccggggagacagacagcgaacaggggtgaagccggggccggacggagcgcgcagcggacaatactgggttcaaaggggagagataaggcgcagactagaaacgctaggctggaccc

SEQ ID NO: 392857 - DNA, 122 bp, Homo sapiens
cagtggagaaacaagaggctctgaggttaactaacttgtccaagtcccataaccagtaagcgacatcacttagatgtgaagccaggcagtctggcaccagagaccaaattcttagactctgc

SEQ ID NO: 392858 - DNA, 122 bp, Homo sapiens
atccatccatcccttagcctaagggttgatcagaaggcccctggatctggagccctgagccggaagctatggtatagacacagcaaacacaacacaccatgtgcttgaaacaaaagctaatg

SEQ ID NO: 392859 - DNA, 122 bp, Homo sapiens
ctgcctctcaaaggcctgcacgggcctggccttggccttggcctcacagtggactctccacgcccagctagctctcgcctcactgcggcctcccccgtccaaagctcctgcctttcggccac

SEQ ID NO: 392860 - DNA, 122 bp, Homo sapiens
agtagtgtcttcctacctatctccagatacatgtcaaaaaaagaaaggtgtttgtgcttccgttttgtttctgctcagtaatatagtcaagcaagtttgttccaggtgacccattgagctgt

SEQ ID NO: 392861 - DNA, 122 bp, Homo sapiens
ttctttaacaatgaaaccctgactggaaactgcttctactgttcctttaattagccttaacgatgttttcacccacaagtgtgggaaaccagatccttagccacctacctgctccttagctc

SEQ ID NO: 392862 - DNA, 122 bp, Homo sapiens
ccgggcatcctcccgccccaggctgcaccttctgtgggactggcccccgcaggcacctcccgggcaccctcccgccccaggctgcagcttctgtgggactgagccccgcaggcacctccccg

SEQ ID NO: 392863 - DNA, 122 bp, Homo sapiens
tagctttcttattttaaatgtcagcagtactcctgctgacagacaggacttattgctcctcgattgtcgtgatgtttgtattgtgcaaataacaccaatagcaaagccttgcactaagcatg

SEQ ID NO: 392864 - DNA, 122 bp, Homo sapiens
cacatgggtgaggatgggggatggtaggaggaggtgcaaaaattcaaaatggacttggcccgttacacatctgcccagagtagtttcatcttacatggcctaagggactctcaaggaacaag

SEQ ID NO: 392865 - DNA, 122 bp, Homo sapiens
ctgccactgacagaagatgtgagctgtgtctaagtccagtcttgtgcccagccgtgtctgcgccttcactctttggaactctgcatacaacatcttagcaccatcttcctgcagctcttcct

SEQ ID NO: 392866 - DNA, 122 bp, Homo sapiens
caattttatcgtgacctctaggtgagaaaatggctagcaacaatcattggtttcagagttcgcaggtccccagctttgcccagatgctgaaaaagaacctgccagttcaaccagcgacaaag

SEQ ID NO: 392867 - DNA, 122 bp, Homo sapiens
ctgttgctgggcaggtttggcgtttgccctgagcctgagaaccaatcgcaggtggaggtgcggtcgcagcccctcgcagggctccccggcttcagcaccccctttctctttctgcccgccca

SEQ ID NO: 392868 - DNA, 122 bp, Homo sapiens
aggctggccgggagagggtgagtgcccgccccagctgggcagccgcgcaggggagctggtcgggcagggccggtggcttttgtctccccttcccctccctgaaggctgacaggccccggtcc

SEQ ID NO: 392869 - DNA, 122 bp, Homo sapiens
aaagacccagtcttcgtcgtaaggcaggtggccaagacccaggcaaagtttccagacggccgtccctgtggccaacctggtctccttcctgactgcgccgctgtaaacgttgctaggggaca

SEQ ID NO: 392870 - DNA, 122 bp, Homo sapiens
ccccacatttcctggcccgcactcattgcctgggggctcagcggaagtcgcttgggggtgcgggggggtggagggtgcggtagggatggagcctcgcccagtgctttcgcctcctcagcgtg

SEQ ID NO: 392871 - DNA, 122 bp, Homo sapiens
aatgaagcactgtcatgtcaagtgtgaagcctggctgccccagtgggcttctgtctgtttcgggtagaaagattcttatttaaaaattggttcttgcttaattggctggtatcagaaagtga

SEQ ID NO: 392872 - DNA, 122 bp, Homo sapiens
aggcagccgcaggcgcgggcgggcggtgggggccggggcaggaggaggggtctcggggcccggcggcccgtcattggttaatattttattctgttgacatgttttcttactgctgaggcttc

SEQ ID NO: 392873 - DNA, 122 bp, Homo sapiens
tccagcaacgcctgggtccctacccccgggtcccaccggtcgtcccggagtttgttcattcgggagaaccgtgacaggtcaccctggccgccccagctggccctaaccgccgggaacccagg

SEQ ID NO: 392874 - DNA, 122 bp, Homo sapiens
ggaggcaactggtataaaagctggactatgtctccctctagagggtcaaccggattagaacgctttactagatgtaacagaccagtttctctccataaagaaaaagaaaaaaatatctggtt

SEQ ID NO: 392875 - DNA, 122 bp, Homo sapiens
gacctgagaggctgaaggaggatccgaaaggctgatacagcggggctgaggggggatccgcggggttggcgggggctgagaaatgaccctgtagttcacagcaaaatggagtaatttatgtc

SEQ ID NO: 392876 - DNA, 122 bp, Homo sapiens
gtttcactcgcctgctccctggccctggcttcctccttcttaaggggccacgatgggacccgagtcctttcaaaaaactaggcagttcccgctgctccaagcagaaagtcctatgagcctaa

SEQ ID NO: 392877 - DNA, 122 bp, Homo sapiens
ctgggagatggcttagctttgcataggacaaaattctaatctagtttcgcgcagttcttacgaatttgttacaatgagacgggccaagctatacagcccattgcgatgaataagtaactttt

SEQ ID NO: 392878 - DNA, 122 bp, Homo sapiens
agggacgcaagttccttcgcggagccagaaggaatccgtcgagaagcgggacctcaagctcgcggcccaaaagcgcggccccgccacgacgcctgctagctggccccacttcggcgcgcgcc

SEQ ID NO: 392879 - DNA, 122 bp, Homo sapiens
gcacctaaatcttacaggctcagtgcctgcacagggagacgggtccgcagcccagggtcccgggcagctttcgggcttgggggtggattgacacacagcccgatggtattcacacccattcc

SEQ ID NO: 392880 - DNA, 122 bp, Homo sapiens
cattcattccacttcatactctggcttctccaccttctggcttcaagacagtttgtccctcggctagggcagagaggttcatatgggcacttgggctcggtgcaccttgggctctgggggtc

SEQ ID NO: 392881 - DNA, 122 bp, Homo sapiens
ggggccgccgggctctttgttttcctttctcacccgggtcggggccagaggcctgcagagcgcatgctctggggcagttcgcggcccggcggggagcgccggagttccttgtggccgacgtg

SEQ ID NO: 392882 - DNA, 122 bp, Homo sapiens
tcaaaatatttttgccaatgctacaagatggaaatgttttgtaaagtgtaaaatgctattcgaatgaagggaggacatctgtattcctcaaacagaaagcaaaacatttacccacagcttgc

SEQ ID NO: 392883 - DNA, 122 bp, Homo sapiens
ctccacctctgggttgccctggcatagtcaactggccagcctaagtctgtggggattttacgttccagaccattacccaggctatgagagctttagagctcacgtctctgccattgatgagc

SEQ ID NO: 392884 - DNA, 122 bp, Homo sapiens
tcgagcgagcccagaagcacctggtgggatacgcagctgtgccccaggcatttctacccacgggctccggccagagaggctcgcgctaggcgggctgggcccgcgggacgaatcctcacctc

SEQ ID NO: 392885 - DNA, 122 bp, Homo sapiens
cttggacagtgggagatgcggctttccatgaacagccccagtgtgtggtccggcgagtggcgaggcagctctgtggtggccaggaccaaacccagggtcttgctgttctaccaccctccacc

SEQ ID NO: 392886 - DNA, 122 bp, Homo sapiens
cttgcgcccaggctccaggcccctcacagtgaccttgctctcctggcccccaacacgcaccgcctggggccgcccgtccctgtccttgtactgcacggtgaaggagtcaaagcggccctggg

SEQ ID NO: 392887 - DNA, 122 bp, Homo sapiens
gatggcgcttcatcgtgagtgagatagtgagtgagagatagaggaggccgggcagatacacggcgccccattgtgagcctgtgattgagtgagtgagtgagatcctgagtgagatcatgagt

SEQ ID NO: 392888 - DNA, 122 bp, Homo sapiens
gctgtgtgtggggcttgcgggacagctacagttccgggtgggcgtgggcttggcgggcaccgcactcggagcggcctgccggccctaccggccccgggcagtgaggggcttagcacccaggc

SEQ ID NO: 392889 - DNA, 122 bp, Homo sapiens
ttcttgaggcctggggggatctgcaggcccaagtatcctccgaggaactgctgcttaacccgagtgcttgtcgagcctcagcagccacagacgagacattagcgttacaacccacactgatc

SEQ ID NO: 392890 - DNA, 122 bp, Homo sapiens
aggatttggtgccagggagatgactaaggtctgacgcaatcaccacacgcatgtgggactcgtgagataaacagatctggagggggaaccagtgctccaggcttgaccttggggtgcctccc

SEQ ID NO: 392891 - DNA, 122 bp, Homo sapiens
cacagtcggattcgctgccgcagcagccgccacccccaggagccgccgggaccctcgcgtcgtcgccgccgcggcccagatccccacaccatgccgtcggagaagaccttcaagcagcggcg

SEQ ID NO: 392892 - DNA, 122 bp, Homo sapiens
ttcagcaggcccagcacaaagagcagcaggttgggaacacagccccatgggaattctgtgcgctcctcattgaggcccagatgtttccccatgataaagagggagggaagcagtgggcccct

SEQ ID NO: 392893 - DNA, 122 bp, Homo sapiens
ggcggaggcggggccaggcgggggcggggccaagggccgcagagcctggcgcggagccggcgagattttggtggggtctcacctgttgcgtgactcccccacagtccggccgcgggagtccg

SEQ ID NO: 392894 - DNA, 122 bp, Homo sapiens
ctaggagggaaggatgcagtgtcaagactgcgccagctagggtggcggcgccgagggccacgcggggagggcggcgcgtgcacacccacacgtgctcgctcacccgcacacctgcaccgcca

SEQ ID NO: 392895 - DNA, 122 bp, Homo sapiens
gtgtgcggtcgcggctgaagggacgcggcctcggccgccacgtccctggcccacctgaggcgcgggcccacctggggccgcctcaggctgccagaggtccttctagtgaccgtctctcgtcc

SEQ ID NO: 392896 - DNA, 122 bp, Homo sapiens
gcattagctaaagagacacctacaggactgactgaggaggcagcctgtgatgaaggtcaacgtacctttggtagttcagcccacaagacacaaactgatagtgaggttcaagaatccacagc

SEQ ID NO: 392897 - DNA, 122 bp, Homo sapiens
actatgcaaaaatgtgccaccagtcataagctggcatctttctccccatcttctgacttacgcatattcaaacaaggttagtttcaggatggtctatttctgtagcctccctccctctgcct

SEQ ID NO: 392898 - DNA, 122 bp, Homo sapiens
cagtgtagcctggaaaacaaaagttagcaggcaactgcagtacaatattttaagtttacccggcacagtagaaggccatatatgaaggacacccaactcgttctttagagattggtgaagtc

SEQ ID NO: 392899 - DNA, 122 bp, Homo sapiens
cagaaaggggcaagggatgaggaaaaggtgtatctattatggaccaggcactgaggacgtcgtctttcatcctgtcatcaaccctgattaggaggtaggaacatcccatcttacagataagc

SEQ ID NO: 392900 - DNA, 122 bp, Homo sapiens
tttcaggtcttaggattaatgacagagtacaatctttttataaatggtcacctttttcttcggagtacttgtaaggttactgttactccaaaatgtttgtacctactatgtgcaagcaaggc

SEQ ID NO: 392901 - DNA, 122 bp, Homo sapiens
cgccaccgcgtgatactgcgcacgcccacagctcccgtcccgccctcgcgcctgcgggtacggacagcgcatgagcttatgttgagggcggagcccagaccagcccttcgtcctatcctgcc

SEQ ID NO: 392902 - DNA, 122 bp, Homo sapiens
gaggctgaggtaggatgatggcttgagcccaggagttcgagaccagcctgggcaacacagcgagatctcttgggggtaaaacaaaaagaaaaaaaaaagttcatacttctccaataaataaa

SEQ ID NO: 392903 - DNA, 122 bp, Homo sapiens
gtcaatcccagcaacctggagacaagggatttccaaaccctagaggaaaaaaaacagaaacggttagctacactcagagcgaagagaaggctggtgtgggtgagtcatacggtcttttccac

SEQ ID NO: 392904 - DNA, 122 bp, Homo sapiens
gcacggtgggcggagtcgggcgccgccggcctgggatccggaagtcggagcctagctgcgcgagagtttctgctcgctcaaccgagttgtcgtgttgccctcgcttctcagatccccgccgg

SEQ ID NO: 392905 - DNA, 122 bp, Homo sapiens
tgacctctgccctttgcccgaccccgtaaccagagacgccactcctgccctccctaacgacgcgggcctttcagacgcctacgcgggtcgcccacctgactgcccgaaatcaccccgcccac

SEQ ID NO: 392906 - DNA, 122 bp, Homo sapiens
tttagggaagggagtgactgagattattttagtcagaggaactggttctctgcttagcctcgatatttcataaaaagctcattgcagcaaaattttcatttggcagcatctgcggtgctatc

SEQ ID NO: 392907 - DNA, 122 bp, Homo sapiens
cgtcagcaggggcggcggcgggtgggaaatggcggagtgtccagcctccatctttggcaccgagaaagtcaactgttcatttgatttcaaaattggagcatgtcttcatggagacaggtgct

SEQ ID NO: 392908 - DNA, 122 bp, Homo sapiens
cctaaattgaagtttagcaatatgacattcttggtgacagtggaatctttgtctcttcaccgtgttaacataatctatctattttcttattttcccctctggtctatgcttctgcttccttc

SEQ ID NO: 392909 - DNA, 122 bp, Homo sapiens
tgatggtgaccaagacagcgctgactcccgtgatggtggatttcacatccaaccggaccacgtggggaccccattttccctacccaagcagccccctgagccatttttgagtgggcctagcc

SEQ ID NO: 392910 - DNA, 122 bp, Homo sapiens
ccaggaatagctattaaaattgaaaacgcgtgtgacctttgacccagcaatctttcctctcggaatcttccagaagtaaaaggaacagtaaataagttatgtgtgaaagtgttactggggga

SEQ ID NO: 392911 - DNA, 122 bp, Homo sapiens
ctccgggatccctgggccgcaggcctccctctgagccgggtggcatttgagctgggcaggcgctcgaccactgatttctcccccaagagaaaatccctcacatctcctcggcagggagcaca

SEQ ID NO: 392912 - DNA, 122 bp, Homo sapiens
tcgtttttaagaggagggatctgaagcccagctaggcttctaattccagacagagccctacggagcccagttctctggaggctttcctggggcttttttcactaggccaggttgggtgggtc

SEQ ID NO: 392913 - DNA, 122 bp, Homo sapiens
gaaagatgcttgttactcttgaatcagacttttgtgggtaaataggcttggtgccgggcacggattcaatgcatcactgtgaacataacagcatcacgcgactgcccacagacatttcccag

SEQ ID NO: 392914 - DNA, 122 bp, Homo sapiens
acggtcttgagttttccaggccctctgtgggtgtcgccgttgccgtgatagtctcacacacgcgggggtgtggatctcgttcgttttcatgtagaaaacgagagcgaaactgcagagaaaag

SEQ ID NO: 392915 - DNA, 122 bp, Homo sapiens
ccctaggtctccgcccctcggatcccacggggtcccttgcggccctcccactcctcgcaccgttggatcgctttgctcacggcgctatctctcgataaagttgttgttgcggcttccgccgc

SEQ ID NO: 392916 - DNA, 122 bp, Homo sapiens
gaatatattgcgcagctgttgctcatcccctgtaaattgtacccttctctacgtaagaagcgaggaggtcaggcatctgcaagtacagctgggagaaagctatcacaacccacagcatctaa

SEQ ID NO: 392917 - DNA, 122 bp, Homo sapiens
gtggttgtgcaggcctgatcagtaacactggtttcagaagtggcctgtgagcaatgcacccgctgcggtggggatgtgttgctagggacggtcgggagagcctctgaaggaattgtgtttgt

SEQ ID NO: 392918 - DNA, 122 bp, Homo sapiens
aggccctgccccccatccccacccattccacatacccagccgcccgcaggccctgcctcccgtccccacccgtcccacatgctcggccccccgtcgccctgggcccccttccccagatgccc

SEQ ID NO: 392919 - DNA, 122 bp, Homo sapiens
tacaagctgtggggaactgtgtgggcctgcagattgctcagggctcccctaacagccccacgctgtacgctgtgtgccttgtgctcacagagcatcaaaagatgctcacagagttcaaaaga

SEQ ID NO: 392920 - DNA, 122 bp, Homo sapiens
acggcctcctttgtgcctctgaatcgaaggcaattaggcgctgcttatctgggcattagccgtgtatgcaaaccgggctcccgccccctcctcctgggcttataaacgccgccgcctggcga

SEQ ID NO: 392921 - DNA, 122 bp, Homo sapiens
gtcctccggctcgggggcgtccagaccctgggtgttgacatacaggtgctcctcgtggtccggggggccccgggcgtccgcctgcacgtagccgtcccccggtggagctggggagtgtaaag

SEQ ID NO: 392922 - DNA, 122 bp, Homo sapiens
gtacaggcagcccctcctgaactccccacggcacagccaagaccaggctgcaacttctgacggaactgtcctgaagctttagagaccacatgaggggcatctagaggggacagggctctcgg

SEQ ID NO: 392923 - DNA, 122 bp, Homo sapiens
cctatagcaaggggcggccacgtagcaggggcagaacctggggtgggcctggagctgtggcggccgagtgtgggagtgggtcccagagtgtgcactccctggccccctggccaccctgggga

SEQ ID NO: 392924 - DNA, 122 bp, Homo sapiens
tttggccctgtgttgggcgcctattgggcccttgtcaggtttttgttgccaggaggctcgcgccccgatcttcgggatggtgcccgtggcatcttctgctcggtgctccctagggctggacg

SEQ ID NO: 392925 - DNA, 122 bp, Homo sapiens
agggaggggggtgcaatgaggaatgtttctggtctgaaaagaataaagtgggtttgaaagcggattctcagcctcgctgctgttgggccacccgcctctgactggggttgggggacacccat

SEQ ID NO: 392926 - DNA, 122 bp, Homo sapiens
tagtgctttcactgagaagtttttaattacaataaggttcaagctgtcaattttttctttcgcaaagtgtgcctctatatgacccaaggtcacatagattttctcctgtggtttttttctag

SEQ ID NO: 392927 - DNA, 122 bp, Homo sapiens
gcggcggcggcggcggcggcggcggcgggcggacgacggctcggttcacatcgggagagccgggttagaaagaaggagactccagagaaaatatcttcatcagtgccttttgacatccaaaa

SEQ ID NO: 392928 - DNA, 122 bp, Homo sapiens
ttagccaaaggcagtgggctagtttagacggcctttcattcccggcagcgcctgtgggtgcgtgtgacctgggacagaggggcaaaggaacctggcagagcgagcttgggatgccgcggccc

SEQ ID NO: 392929 - DNA, 122 bp, Homo sapiens
gccttacagaattgcgcttgggtagtcattttgccctccacgcttacttatgtcctgtggcgtcttggctggaatcggggctctacccacgactccccagcctcgatgcctgggcccccctc

SEQ ID NO: 392930 - DNA, 122 bp, Homo sapiens
ggggagaacacccgctaagccctgtagagctggaccttacagcccagggagctcatttctcgctgcctcagtgtctctctgtgtaaatgggctatcaataggagtgaccccatggcatgact

SEQ ID NO: 392931 - DNA, 122 bp, Homo sapiens
gcaagatgggccgagagataggggaggggcaggaggcggagcccaagttgcgcatggaagcgggggtggggtaaaataatcaagtttatagaccgccctctttaaagttactaatgagcttg

SEQ ID NO: 392932 - DNA, 122 bp, Homo sapiens
aaagcaaaactaagccagtaatgatggagatgtccctgtttccatatgcacactgacaggcgaggagctgcctaggaaatgctttttgattgatgaacagaggagggtctacacacattaaa

SEQ ID NO: 392933 - DNA, 122 bp, Homo sapiens
gaatgttgagcaggaacactgcagaggaaggatgcagacatatggaaatgcacatgcagacgactctagggcagcagttgtttgaggtttgaaaaactgaaagaccattgtgactagacagc

SEQ ID NO: 392934 - DNA, 122 bp, Homo sapiens
tcctgtgtttacttctggatgctgttgatccaggaaatgtacttagaaaattcattttaacggaaatagtcataagcgtcttggtaatttcatgaagctacagtgagtaaattgcctgagaa

SEQ ID NO: 392935 - DNA, 122 bp, Homo sapiens
ccgccgcctcggcgcttgcagaacccagaagtgaacagcaggcgacccggaaggtttgcgcgcggctccgcagcgagccagagccggagcccgagcccggagcctgtgccggagccccagcc

SEQ ID NO: 392936 - DNA, 122 bp, Homo sapiens
gccactcggatcttctgaggctgggaggagctgtgccgggcagcgctgggtcccctgtgtcgccaggacgactctgtggtcccccgccccgcctccaggccccgtcaggcactgcaagcccg

SEQ ID NO: 392937 - DNA, 122 bp, Homo sapiens
ggagtagaagaaggctggtattaacctccattttacaatgaggaaacggagtcccaaagacgttcagtcatcttcctgatattcacacacttacaccctggtcaggccggcgccatatgtgt

SEQ ID NO: 392938 - DNA, 122 bp, Homo sapiens
gcctgccttctgacttttctgtggtccctgatacctatttccacttcagcttgatggcagcgttttgtgcactgtctgcatgacattgcttgtgaagggcagcgctaacactgccagtgcct

SEQ ID NO: 392939 - DNA, 122 bp, Homo sapiens
caataagaagtatttccagcaaaatacttacactttcttattgatattgaaagcctcatccgttgtcgtactttctgtgtattataatacttatcaggcttagagagtggaataaaaggatc

SEQ ID NO: 392940 - DNA, 122 bp, Homo sapiens
caaactcctgggctccagtgatcctcctgcctcagcctcccagagtgctggaattatagacgtgaactactacaaaagtttgcatttctgtcaaaacccacataatgctgatgctgctggtc

SEQ ID NO: 392941 - DNA, 122 bp, Homo sapiens
cctatgaggtcaagatctatgtgaagcaccgacatatttaaggttgtccacaggcatggccggggtggggtggctcagagggccaggagggagcaccagtggtggaggtggaccagccatgc

SEQ ID NO: 392942 - DNA, 122 bp, Homo sapiens
acatgggccagaggcgccccagaatccagtgggccgggcattccagcctggtccgggggccgctctgccacacaagtttatgccaccacctctgaacacttgggaggcatgtgggctgggct

SEQ ID NO: 392943 - DNA, 122 bp, Homo sapiens
gaggcaggtggatcacgaggtcaagagttcaagaccagcctggccaagatgttgaagccccgtctctactagaaatacaaaatttagccacgcatggtggtgggtgcctgtaatcccagcta

SEQ ID NO: 392944 - DNA, 122 bp, Homo sapiens
gctgctggcacatatgctgagaaaaaacagtctggggaccaaccttccctgtgagactgccgcaagttcatctttcattagaagtgtgactaagaaacaggaggccgagcgtggtggctcac

SEQ ID NO: 392945 - DNA, 122 bp, Homo sapiens
cgagagaattttgagcgttagccgtctctttggctgccggcttaaataaaggactcaattcgtttcagagtgtggcgtcttctctaactcgcctgggtacaacaacaggaaactgcccaccg

SEQ ID NO: 392946 - DNA, 122 bp, Homo sapiens
aacttcccctcctgcagggatgaggctgaggtggagttacccccttcctgaagccagctgcgggagcggctcggaggggaccccgtggcccggttgtcataacaactcagcgggcgcctcgg

SEQ ID NO: 392947 - DNA, 122 bp, Homo sapiens
cagggccctccaagctcctcctgcccgggccggcaggtgagctggaggctccgggacaggcggcgccctccgccctgcacacacctagggccctgctgtgactgccccctggccagacccag

SEQ ID NO: 392948 - DNA, 122 bp, Homo sapiens
cttactcacctttgggccctgcatttttaaccttcttgtcaaatttgtttcttctagaatcgaggccatcaagctacagatggtcttaaaaatggaaccccaaatgagttcaactaacaact

SEQ ID NO: 392949 - DNA, 122 bp, Homo sapiens
gagcctcgggcagaagatgacaggccagccgtggggcaaggaggccgcggaaacgcggaacggcttcggggagacggaagcgcccaatgagattcaccctgcagcccgggtccagcccacct

SEQ ID NO: 392950 - DNA, 122 bp, Homo sapiens
gtggagagatcataaggcgtctccaaggaatgaaaaacgtctgtaacatggtgacgaccccgttcctgcgaagcttcctgcgaagcttaacctggcccaatatgcaagagacctgagagctt

SEQ ID NO: 392951 - DNA, 122 bp, Homo sapiens
tgaacagttctatattgaaatagacagaggcagcagggccaagggcgagcgcagggccagcggggtgcagccccctttcctgctgtccttctggccaaggagcatgggccagactccaaagc

SEQ ID NO: 392952 - DNA, 122 bp, Homo sapiens
ccatttttcttccccagaagagacagaaggagaagacaccacatgtcgatgtgggagccacgcagcagccacctgtatgtgtgtaccagtttgcgtgtttgtgagtggttacgtgtgggcgt

SEQ ID NO: 392953 - DNA, 122 bp, Homo sapiens
gttttatgatggtttgcttgagtatacgtgtgtgtttgtacatgtgtatgaattagactacgtgacagtgtgcatagttgtgtggagttatttaaggcagtgtaggtctgtgaatacaggca

SEQ ID NO: 392954 - DNA, 122 bp, Homo sapiens
gggcacgctctccgacctgctgcgcaaccccaagccgtggagcaagctcaaatccggccgcgagaccttccgcaggatgtggaagtggctgcaggagccagagttccagcgcatgtcggcgc

SEQ ID NO: 392955 - DNA, 122 bp, Homo sapiens
ggatgaatggggagcacagacacctgcctcgaagtgtctcttcactttcactcacaaagccgtcgggtcagtaaccagaagccgaggggcggatgcggcccccgccctgtggcactttctca

SEQ ID NO: 392956 - DNA, 122 bp, Homo sapiens
ccagtaaagcgattaaatggtcaattactgcattcattaagaagaaacaattctgctatccgtgccatgtattgttttatgttaattgcctttgtaaaggattcttaggctgctagtcagca

SEQ ID NO: 392957 - DNA, 122 bp, Homo sapiens
tgaatgtggcctcacattcctgcagctggcctcagtgtcccctgcaggagggtggcccggcgcggggatcccaacccagccctgccctgagggacacatccccgttcctccagacccgcgcc

SEQ ID NO: 392958 - DNA, 122 bp, Homo sapiens
gccgttgcattcgtcctccaggggtggtcttggttttctttcctctcccagtctgcaacgcggggcccaggagacgccctgaggatcccgcggggctcctgcattgctccggggctctttgc

SEQ ID NO: 392959 - DNA, 122 bp, Homo sapiens
cagcctgcgggcgggagtctccttgtttaccaaagcagagggcgtgtgggaggcgggggccgtcgctcgctcccgcctcctcggaaaccttgtccccacaaccgctgcgtgttaaaaaggac

SEQ ID NO: 392960 - DNA, 122 bp, Homo sapiens
tttatctctgggctctggaaagattgagtctgtgtctgtaaataaatgaccattttcccccgccacatgcagttgaaagggatgagtctgagctgagccaagcagagaagagagctgtgtag

SEQ ID NO: 392961 - DNA, 122 bp, Homo sapiens
tcccaggcgggcggcaggatccaattagtccgtgtaaaatgagaggcatctggcttctcccgggcaccccgcagcctgccccgcctcttagtggctaaaggcagggagcccctgagtcccag

SEQ ID NO: 392962 - DNA, 122 bp, Homo sapiens
cggccaggaagcgcagggcgctggggtgctgtgccagggagcgcaggccctggatccagccgctgcgcacggtggggacggcccaggttgctcggccgaggggtcctggctccccaaagagc

SEQ ID NO: 392963 - DNA, 122 bp, Homo sapiens
gtagaagaacccgacaagggcgggtgctggatcgcggggaagggtttccaaggcagtcaccgcagaccgcccgggagcggggaacggccgccatctgctggcggctgcgctcactgcacgcc

SEQ ID NO: 392964 - DNA, 122 bp, Homo sapiens
cgcggacgccgcctccgccccggccccccggccccggccgcgctctcgccgtcccggccccgcagtttctaaagttgcccccgccctcagcccgagcagaaataaaaaagagcggaaagctc

SEQ ID NO: 392965 - DNA, 122 bp, Homo sapiens
ggagcttccccagttggggtcctaggggacttattccacgcttcagcggaccagcctccccgcgctcccggagaagggggtcggcgacgcggaggcggggtgggggccgtaggggatggaac

SEQ ID NO: 392966 - DNA, 122 bp, Homo sapiens
gattttgaaaagatgagcataattacactgtacatactattttggattcttttgccacttcggatatactttttttcatataatgacttgtctgggtaaagtgtcacacaggtatgtggcct

SEQ ID NO: 392967 - DNA, 122 bp, Homo sapiens
atgtggccagggattggctgtggagtgtgactcacggcgcgcgatgacggtggggtccgccgcgatcgcggaatggatggaaatggaggagggaaggggtgggggccacgggttgggcttga

SEQ ID NO: 392968 - DNA, 122 bp, Homo sapiens
gttagtggagagccactttgacgtggaatgatcctaatagatatagccagaccggttttgcggaaacgctttgtgctgagaaccgcaagctggtgcaccctgtgtcatatctgcccccagcc

SEQ ID NO: 392969 - DNA, 122 bp, Homo sapiens
agctggtagtggagtaattagttttccagatgggatgaatccgtgtttcccaggtgagcacggtgtctgcaaaatcatcacaactagcaacacctagttcgcccttggacattctgactcag

SEQ ID NO: 392970 - DNA, 122 bp, Homo sapiens
cagtcctggcaaacctagaaggcgggaataaccctggtgacgggcggggccgggctccggcgctaactgcatccactaggtttggtcaacacagagccgcgccaactctctgaggctgcgcc

SEQ ID NO: 392971 - DNA, 122 bp, Homo sapiens
aggggtcagggagttccctttctgagtcaaagaaaggggtgacggacgcacctggaaaatcgggtcactcccacccaaatactgtgcttttcctgcgggcttaaaaaacggcgcaccacgag

SEQ ID NO: 392972 - DNA, 122 bp, Homo sapiens
ccttgctatattctttgtagttactcatgaaggaatgtctgttacttactccaaactccacgctcctaaattccagacacccaagagcaaaaatagaatcgaagaagatgaagcaaaacaag

SEQ ID NO: 392973 - DNA, 122 bp, Homo sapiens
ggaagcaatgactcaaagcggcagagaggtcggggctgctgggcacgccctccaccactgcgcccgctcccagcctggtccagtccccacagctgggctggaggggccgtgccccaccatct

SEQ ID NO: 392974 - DNA, 122 bp, Homo sapiens
gcgagggagggtcctggctgtcacagttggacgcgcgaacggcagcgtctgggcgacaggcgatgtcccagccactgaaaccgtatttgggggcactttcaaaatagatcaggagaaaataa

SEQ ID NO: 392975 - DNA, 122 bp, Homo sapiens
gtgtgtgagtgtggagactgggaggatgctgccatccctaccctgactttgcatgatggtcgtagggggggatgggtagtgggggtatcagacgtcttccagtcctggggagggagttgagg

SEQ ID NO: 392976 - DNA, 122 bp, Homo sapiens
ttctcagtgcagtttttttctacccactttaaacctccagattctaaatatcaggaaagacgctgtgggaaaatagcaggccaaaagttcttagtaaactgcagccagggagactcagacta

SEQ ID NO: 392977 - DNA, 122 bp, Homo sapiens
gcgcaaggagcagatactgaacggggttcgtgcccataacccttctcgtctctctcccatcggtcccgttctgaaaggcgccccacccaggttcccaagccttactgggacagtcccccagc

SEQ ID NO: 392978 - DNA, 122 bp, Homo sapiens
atgcctgtaacaccctgggaacaaatccgaacgttccttctaaaccaacgcaggccgactcgaggctctggctgtcaggggaacctcagcagaactgaagaagctttgctttgtttccacgg

SEQ ID NO: 392979 - DNA, 122 bp, Homo sapiens
gcgtggggggcctctgggcaggtgtttcagtgcctcgtgctgcagataggctggtgtcttcgcttgttgtttgttttttaaccgtaagcaggaaaccactcctctccgggagagagagcttt

SEQ ID NO: 392980 - DNA, 122 bp, Homo sapiens
gcgcgttacgatgcttatctgcatgcggtaagccgattggtgtgctttaagctgttcagacgttgattggcccaaagcatcgtgaatattcatgacagcagccacaaaggccggcgccgggt

SEQ ID NO: 392981 - DNA, 122 bp, Homo sapiens
ggggtgggatcaggggggcgcctggggatatgagacagccagaccttgaagctaggccagcgtgggtggggagggagcgagggaggagatgacagccagccctggggtcgaggggcagcccc

SEQ ID NO: 392982 - DNA, 122 bp, Homo sapiens
gtttgaggctgcaacgagccatgatcatgctattgtacttcagcctgggaaaaaaaactgcggctatgaacatgagtgtgcaaatatctcttcaagactcggctttcaatgtttttgatata

SEQ ID NO: 392983 - DNA, 122 bp, Homo sapiens
tctttcctttagggctcgcttttaacagtgagtgttgttgtggcaactaaaataaggagccggccagtgctcctagggaggaaaacctcggcaactccgcaggtgcaggcaccggccacaga

SEQ ID NO: 392984 - DNA, 122 bp, Homo sapiens
ccccacccattcgtgcacaggttatgattccactgacaaccaggccgggccagcgtggggcggaggtcctagagccagcaggccccacctgggtatcatctatgcagccaggagatgcccaa

SEQ ID NO: 392985 - DNA, 122 bp, Homo sapiens
gcaggttatgctgggtcctgcagggaataagaattgtaagcactgcgagggctggaagcacgtcttgcttaattattgatttatccttggaatagcagagaatatttcttaaatgaatgcat

SEQ ID NO: 392986 - DNA, 122 bp, Homo sapiens
caacctcacagtccagtggttaggaacagcccctggggccgcatcctagccaaggggcctcgtaagtttcctagcctcttggagccttgtaagtttcctagcctctaggagcctcagtctgc

SEQ ID NO: 392987 - DNA, 122 bp, Homo sapiens
ggagcttcctgagtccaggatgactcaggccctgccatactcgggttactccagcttaaccgccctgaaatggccttgcagccccactgaccacaccgttcctccccagctttccagtggcc

SEQ ID NO: 392988 - DNA, 122 bp, Homo sapiens
ctgtgaacttctgttttctacaaatcatcaaaatttttaagtcttatttgccttaccccacgctttgctagtgttctgggttgaggcggatttgtttcatcacaaagaacctatagagacat

SEQ ID NO: 392989 - DNA, 122 bp, Homo sapiens
gaaaagagggacggggccagaggcccgagttccagggagttgctgattccagtggagaaccgagacaccgcgtcctttctaattaataagcacgccaccccctacctccaaccccccccccc

SEQ ID NO: 392990 - DNA, 122 bp, Homo sapiens
cccatggttccgtctactaggcctggaagctcggcctcaccctcgtgaaatcccgggagccggtgtctcactgtcaccagaccgacccagccgcggctcacacatccgttctcagccctgct

SEQ ID NO: 392991 - DNA, 122 bp, Homo sapiens
cggcggtcaccgtgtcacctccgggtggcctcgtgccacgcagttagggccctcggaacacggggttaaggcaggaattccacttctagaaaagcctcctgcagctgcgctcccacaagtgc

SEQ ID NO: 392992 - DNA, 122 bp, Homo sapiens
cctttcctagtcaaagaaagtggtgacagacagcacctggaaaatcgggtcactcccacccgaaaacttcgcttttccgacgggcttaaaaaacagcgcaccaggagattatatcccgcacc

SEQ ID NO: 392993 - DNA, 122 bp, Homo sapiens
attgttgtttatttgcatgctgggcagtgtttccatcatggtctatatttccttggacaacgccctcaaattcctagtgaagttagttttaggacttctgtaatttgctctagccctcactt

SEQ ID NO: 392994 - DNA, 122 bp, Homo sapiens
cttgctcatcttcatcggagtctctgagcatcgcagctgccaggcagccaagcattgtgtcgcaactctgcagaagtgccacacacacagtgattaataccctatctcctagcaagtaatta

SEQ ID NO: 392995 - DNA, 122 bp, Homo sapiens
gtaaacactgggactcagagaatgacccagaagcagggcagcagttctgccctgcccacgcggaactcttcagtgatgataccacactcaaggaagggcaggggagcaaatgccagcattcc

SEQ ID NO: 392996 - DNA, 122 bp, Homo sapiens
gtttcagcgagtgagtgggctccgtgcccagctgaagtctgggaggggcacttttccaggcggtcgcggctccccctggcggcggatgtgcctcgctggaggggcgcagtcaggcgttctcc

SEQ ID NO: 392997 - DNA, 122 bp, Homo sapiens
gccccccccgagttggtagagaagtcgtctgtccccgggcttgcctgctggtctctaggccgcgccgcaccccgccccggcctgacggagccggctggtggggaggagcctgaggcccgtgg

SEQ ID NO: 392998 - DNA, 122 bp, Homo sapiens
tctgttccaagcctcaaagctatagagatgcttggtgctgcccttgggaacctatagtggcggaggaggcagactctacactgagcccctctgtgcatatggagtggcttccagggctgggc

SEQ ID NO: 392999 - DNA, 122 bp, Homo sapiens
cagcgaaaccgaggcctccggagagcctagtagagagtgtgggcagtgagcgcttgtagccgctagagggagcgctgggcacagtgcacgagagacaataaaggctgattatcccctcaatg

SEQ ID NO: 393000 - DNA, 122 bp, Homo sapiens
gtctcacgtcttccagccgtgcagacctcagcactgtttgccccaggactgcagctcgctcgtcttctaagccagcacttctcaagtggggtccccatgttgttagtaatatgggttctcag

SEQ ID NO: 393001 - DNA, 122 bp, Homo sapiens
cgttgattggcgggcccgaggggagccaatcggaaactgatgatgtgtggtgttggcaagcggattgcgtgagagcgggcaggggtcgcgggagcgcgatcgccgccgcggcggccggcagc

SEQ ID NO: 393002 - DNA, 122 bp, Homo sapiens
gactcataccggggagaagccctatgagtgcagtgaatgtgggaaggccttctgtgagagcgcagcgctgattcaccactatgtcatccacactggagagaagccctttgagtgcctcgagt

SEQ ID NO: 393003 - DNA, 122 bp, Homo sapiens
tggagtccggctgggttcagaagtctaagggggcagtattatttcaaaaattctgagatacgggtagccacagacaggatcccactgcctagatggagagcccctcaatcctaccctaggaa

SEQ ID NO: 393004 - DNA, 122 bp, Homo sapiens
aagtaacacaaggcacagtagccatctttttcattatgttgcaacactgatcacgtgcctcgataaaatggctgattcaacaagatgatggcaacacgaaggggagactttggattgtctat

SEQ ID NO: 393005 - DNA, 122 bp, Homo sapiens
catcgaggagccggggcaccctggcttggtcaccgcccccgtgcaagttaagtgcgggggcgatgctgggggtcttgactctgggattaagtgtccctgcaggtggcatgctcaggataaag

SEQ ID NO: 393006 - DNA, 122 bp, Homo sapiens
ttgggtctgcaagtgtatccagagccagtgagtcagcactgccatgagctcctgggcttccggttcattgggtttgaatgttgggccctctaatttaggtttgcctcttgttcttgccagga

SEQ ID NO: 393007 - DNA, 122 bp, Homo sapiens
gggctgcgcatggcgcttgcgggccacctggagttccgggtgggcgtgggcttggcagcccgcactcggagcggctggccggccctcccggcctgggcagtgaggggcttagcacccgggcc

SEQ ID NO: 393008 - DNA, 122 bp, Homo sapiens
ccaatgctcacaatcactccttttgccatttattcattgcaagaaatgtgccatagagtacgaggctgagcaagcagggggacatacgtggcccatcatcactttttgtagataaagtttta

SEQ ID NO: 393009 - DNA, 122 bp, Homo sapiens
ttgcgtcccaagggctctcaagtccggaccctgttctcctgctagcaagtcccattaagccgccgggcgcttgtgttttctcggcttctttagttccactcgctcgcggcactctggtaact

SEQ ID NO: 393010 - DNA, 122 bp, Homo sapiens
ctggctagacaccacagccctgcggccctgcagcccagccacgtctttttagcttcacctcgacggccttgctcttgacctgaaatcaccatcaccttaatgggctagaaaaggtggggttt

SEQ ID NO: 393011 - DNA, 122 bp, Homo sapiens
catttaatgaaagcatcaaaagacaacggcagtattagaaaattatctctcggccagctgcggtggcttacgcctgtaatcccagcactctggcaggccgaggcaggcggatcacgagctca

SEQ ID NO: 393012 - DNA, 122 bp, Homo sapiens
tccggcttttgtcccggcccagccggacttttccccgcccccatcggctcgcggcgagaacggccccgcgattggccacacgcgttccctagcctgagcgccagggctcctcccaattcgct

SEQ ID NO: 393013 - DNA, 122 bp, Homo sapiens
cacggcgcgtgcagctgctgtgcaaggagccactgcctcagcctcaaggttatcccgctgcgggccgccgcaatccctccgccgccccgccctctgcccaatcccggctccgggcgacccgg

SEQ ID NO: 393014 - DNA, 122 bp, Homo sapiens
ttctggaccgatccaaccagcgaagtcgaatttggctcgtgtccttctctcccttttttgcgaagctgcagacactgcttgctggccctccggctctgccgggacttccctggttctaggtg

SEQ ID NO: 393015 - DNA, 122 bp, Homo sapiens
ctgtgtcccctctcaccaaagtccagtagctgcttcatggacagcggggacgggctgtagcgcgagaaatgctccacctctcggggcaccaggccggcgccgttgagcgagccagcgctgcg

SEQ ID NO: 393016 - DNA, 122 bp, Homo sapiens
tgagacttcactagaattaccagcagaaaaaagattttatcgttggagtaatttgagaatcgatttctctgcctgagctcagtggagccagaaaggagacaaaggagagcttgtgatctgat

SEQ ID NO: 393017 - DNA, 122 bp, Homo sapiens
tcgccgcggggggcggctgggggccccagacccgggcaggtcgctccttgccgccgggcgcgctggccttctcagcacggccttgtccagcagtacccgcagcagtcagcaagaacgccaga

SEQ ID NO: 393018 - DNA, 122 bp, Homo sapiens
ctgcaggcccggcctcagctcgtgcagctgcaccagcgcgttcttgggcgccaccgaccacgacagcttcttccagaccagctgcagtttgcacaagtggcccccattcccctcctccagcg

SEQ ID NO: 393019 - DNA, 122 bp, Homo sapiens
cgcggggcaggggcagaccgtgacggggtacacggtgccagactgggagatggaagcaggcggcagtcacacggcttgggcctggccgcgaataccccgggcgaccgtgtacacttaccgtc

SEQ ID NO: 393020 - DNA, 122 bp, Homo sapiens
cagaccacgggagaggcactgagaaagccacgcactctaagaaggggatctggtgtccaacgctagacagaaaaccaccgtggaatccgtttggcctcgcccactcagagaagcctggggag

SEQ ID NO: 393021 - DNA, 122 bp, Homo sapiens
gggcagcagggccgcggccatggggagcttgaaggaggagctgctcaaagccatctggcacgccttcaccgcactcgaccaggaccacagcggcaaggtctccaagtcccagctcaaggtgg

SEQ ID NO: 393022 - DNA, 122 bp, Homo sapiens
atagattagaaagtgataacattgtggagaaaaacaaagcagagtaaagtagagtagaaacgtgggaatggcgtagagggatggttattacttgatatagtgtgatcaagaaaggctctatt

SEQ ID NO: 393023 - DNA, 122 bp, Homo sapiens
ccctcacctttcatgttgtgggttctgggagcccagagggcagccatagtgtgccgactccgtggaggaagtaaagaaacagacccgcttcttgccgcagccccaccagcctaaggtgttct

SEQ ID NO: 393024 - DNA, 122 bp, Homo sapiens
tttgctgtggactggggtgggtggtggttctttggggcctctgtccccagaagttttcagcgcctcctcctggggagggatgcaaggactcgggatggaagccaagtggacggggcctagga

SEQ ID NO: 393025 - DNA, 122 bp, Homo sapiens
aggggttgagtcatctcagctgttgtattttgtatggggttattcataaaagcactgtagcgggttggctaccctctattgccttcctatcatacgccaggcactctgctgcattctttgac

SEQ ID NO: 393026 - DNA, 122 bp, Homo sapiens
ttgctgaggtgaaggcacagtgcaggccgcacaccaagtgtatggtctgaatgaggacaccgggctcaggatatgagtgttgtccacaggaccggggagggctgaattgctatgcaattcgg

SEQ ID NO: 393027 - DNA, 122 bp, Homo sapiens
ggtcacgccccctcgagcgcgggtggaggactgcggactgcaaacgtctcggccaatagtcgagcccgacaccagtccgcgggagggggcggaaccgagatagactcggcccccagctcatg

SEQ ID NO: 393028 - DNA, 122 bp, Homo sapiens
tcaaatggatgtttctgctgagccaggagcacacactgggccagcaaagcccacgccaagcgaaaggagagcctgggcctatgggatacagagttctctttgaataaactacctgccccatc

SEQ ID NO: 393029 - DNA, 122 bp, Homo sapiens
ctctcacggaggacctgcgctgtcgcgcgaggggtctgggagatggggtgagtgccacggcgcaggggttatggacctgcgagaagattttctggaaagggccctgtggcaggctggtgggt

SEQ ID NO: 393030 - DNA, 122 bp, Homo sapiens
gggcaccccccagagatagaattccagggccattgtctgtgcagccacagagcaaacactcggcctttgttcccgggaccctgcgggaggggggcctcgggatgcccattccgccagtgtgg

SEQ ID NO: 393031 - DNA, 122 bp, Homo sapiens
gcctctcaagggagatggggtgagcatagccacctccactggagcccgaaaatccccggccgagataccgccactaaaaaggtacacatgcgtcaaagcctctcggagccatttccgctaac

SEQ ID NO: 393032 - DNA, 122 bp, Homo sapiens
tctccaggccctgaatttactccattcagcctctccgggcccagctgttcctcccagctgcgtctccagacccgactgctgcctcccaacaacctctttggattcagttcctgcccagctcc

SEQ ID NO: 393033 - DNA, 122 bp, Homo sapiens
gtgggtctgtgtgtgtgcgtggagagtccaagcacatcactaaatcctcactgcttagaacgccagaaaaagaaaagcaaaatcacctgacggacgctctcagccctttcaaatccctttct

SEQ ID NO: 393034 - DNA, 122 bp, Homo sapiens
cttagagtttgagcttgtagagagaagggtctagaatagggattcccaacccccgggctgcggactggtgttggtccatggcctcttacgaacagggctgcatggcaggaggtgagcagcag

SEQ ID NO: 393035 - DNA, 122 bp, Homo sapiens
aatggtcacagttttatgaccctaatgatacctagatgtctcagggatccctgaaaggtccgtggtaaggcctgatacttttagactcaaaaatcccaaagccctgcaccactgcagtcaag

SEQ ID NO: 393036 - DNA, 122 bp, Homo sapiens
atcacctgcatggcacatggtaagtaactacatcataagtggtaccttctattgctgctgcggctgcacgactactactcctgttaccaccaccaccaccaccatcgccaccaccatcatca

SEQ ID NO: 393037 - DNA, 122 bp, Homo sapiens
cgcccagggggtgggcgtcttgccccgggcgtcgagagtttggggccgtcccgtacgcggcgcgccgcaacccagtccccgcgaccacagcagcctgctccccaccgcgcttgcagagcccg

SEQ ID NO: 393038 - DNA, 122 bp, Homo sapiens
agttctaatttcccgcacttaaagtcctgggctatccttgtgttgcaaggatcttagaatcgaaatggagggatttgacaactttacctaaccaaatctaaaattttgcttttattatttac

SEQ ID NO: 393039 - DNA, 122 bp, Homo sapiens
tgatgagaacacatggacacatggtggggaacaatacacactggggcctgttgcagggtgcggagtgggagggagagcatcgggaagaatagctaatgcatgctgggcttaatacctagggg

SEQ ID NO: 393040 - DNA, 122 bp, Homo sapiens
gtagctgcctgaaggggcggggccattctctcagatataaggcttggaagccagcagctgcgactcccgagacccccccaccagaaggccatggtctccccacggatgtccgggctcctctc

SEQ ID NO: 393041 - DNA, 122 bp, Homo sapiens
gctccgccgccagcttcgccttgaaatcataatccattgtctgcttcccccatagaggcacgggacgcgggggccgccgccgctcagtccctcctcctcctccccccgcgaccgccgctcca

SEQ ID NO: 393042 - DNA, 122 bp, Homo sapiens
aagaagtggtgattttcaagaactttattattaaataatgacaactatcgttatcattcacgctatacatcctatatacaatgtgctccaaaaaagagctccaggctgggcatagtgactca

SEQ ID NO: 393043 - DNA, 122 bp, Homo sapiens
caacagagtgagactctatctcaaaaaaaaaaaaaaaaaaaaaatgttatttagttacagcgtaccagttagccagttagctcctaaactatttgaaaagcttgttcttttaagtacttttt

SEQ ID NO: 393044 - DNA, 122 bp, Homo sapiens
ccgcggagccccagccagaaccgggtgaggcttatccccgctgtctttccagtccagggccgccgagagtgggggtggctgggagcagcgcagcctccggaggaggaggcggaggcggaggc

SEQ ID NO: 393045 - DNA, 122 bp, Homo sapiens
acctagcagaaacacttccacagagcaaaagttataatacagaaagtgatgaaaggaggacgcaggctctcaatgacgtcaggtattcccgggacccgcccaccgtgggcgttttccaccta

SEQ ID NO: 393046 - DNA, 122 bp, Homo sapiens
ggaaggaacgcattcttcagcctaaaagacctaacagtaggacacggacataaccactcccggccaaaaagaacacagagcaacacaacgtcttggctaacgaaaactcaaagcctcaattc

SEQ ID NO: 393047 - DNA, 122 bp, Homo sapiens
tcgtctcaaaacaaaaaaggcgttttacagtcaggcaaaccctgcctctgcccagtccagcgcccgcctcgccctcctgcgccggtcgctgctgacccggggctccacccacgtgcggtccc

SEQ ID NO: 393048 - DNA, 122 bp, Homo sapiens
tgacctcatgatctgcccgcctcagcctcctaaagtgttgggattacgggcgtgagccaccgtgcctggcttgtttctgggtaacttttaagtaaaatcatttgtggaaactaaaggagaaa

SEQ ID NO: 393049 - DNA, 122 bp, Homo sapiens
gagtttgcatggagactgtaatttcattctgtgagtgtaagatcacgtccgcgttcctagcgaccggttttgtgatgtgggcagtgccgtgctggtaaatgctctgtgaggaaggaacgatg

SEQ ID NO: 393050 - DNA, 122 bp, Homo sapiens
acccccggatgcgcagagtatgcagagtcacccaggacagagcggggagcctcagctcctcgtccccgggctgcactggacacctggctcttttttactcagctccagaagcaccgcggggg

SEQ ID NO: 393051 - DNA, 122 bp, Homo sapiens
ccaaagtggggaacagctaccctcattgtacgcctcgccctgccggtggcgctctccccccgcctgcgttcggtctgaaagtgtgaaaattacaaatcccaagaaactgcaatcagaagtct

SEQ ID NO: 393052 - DNA, 122 bp, Homo sapiens
ctgcgtccccgccccaagccccgcgcgcctggcaatcgcgtgcccaccgccggagcgcggcgtccccgtgcagtcctggcaacctgtcaccgaggaggacgtgactcggagctgcctccgct

SEQ ID NO: 393053 - DNA, 122 bp, Homo sapiens
gcgctgactggggctcccgctcgccctgtggagccggcccgggtctccctgccgttcggccggcccagcctttcatcctgacgcgcggggcctcccacccagcgggactcccgcgtgggccg

SEQ ID NO: 393054 - DNA, 122 bp, Homo sapiens
aggaaatagttctttctgcccttcttgaccctggtttcctatttcataatacatgatttgcgtcattcatctgggactcttaagtctctgtagagtgtgtatgactgtcacctaacttttgt

SEQ ID NO: 393055 - DNA, 122 bp, Homo sapiens
ctgcagcgacgaggatggcactggatggcttagagaaactagcaccacaacctctcctgccgccgccttgcagtgaaagagagagagaaaagccccccgccggaaccggaaatacccgctcg

SEQ ID NO: 393056 - DNA, 122 bp, Homo sapiens
gccaaagccccaggacattcacccgatcaccccgacgcgggtggcgagggtcccgccgagcgccaggtctaagagacactttttcccgagtccactgacggcttctgaacccctgctccggc

SEQ ID NO: 393057 - DNA, 122 bp, Homo sapiens
atcatcaggagggcacgagagggagagaaggaagtgcacgttccgagaactgctccggcacgccaggcagggcaccgaggatacatggcagcctgtggaccccacctcggcctctgctccag

SEQ ID NO: 393058 - DNA, 122 bp, Homo sapiens
actgccgcgcctgcgcagaacctcccggcggacaagaagctgggaggcgcgcagaaccatcgtcagtccccgaggctctctgcagtccgcgtgagtcctggccaaggtctggcctcggaagc

SEQ ID NO: 393059 - DNA, 122 bp, Homo sapiens
ctagcccagagcggggccagcggccggctcctacccacacttgctggcaggaagactggacgcactgcgggacatggtgatgtcctgggttggggctgaggaaggcctatgcgcggagggtg

SEQ ID NO: 393060 - DNA, 122 bp, Homo sapiens
agttgcccttgggaagggtgtgtgtgtgtgtgtgtgtgtgtgtgtgtgtgtgtgcgcgcgcgcatgtgtgtgtgtgtatgtagtgagtgaatagctctcttcaagtatctgaagagcatctt

SEQ ID NO: 393061 - DNA, 122 bp, Homo sapiens
gcagcaagggaaaaacctccgggtccctaaagagatccttgagctgctggattacctggccgtggacccagctgccatgcagacctcttgtttggtggataataatctccccactgtttaaa

SEQ ID NO: 393062 - DNA, 122 bp, Homo sapiens
ggttagggcaggccagaactacaagtgaaattcaagactccatgacttccagcctctcctcgatgtcctttcccaaactcctgggtgacatgacagccattctgaaaagttgttcactaact

SEQ ID NO: 393063 - DNA, 122 bp, Homo sapiens
tgcgcagcccccacgcggtgtgtggccgcgattgtcttttacaccactttctcccggtgtcgtgagccggccttggagggttagttgctcacttgttttcctaaattggataagttccaagg

SEQ ID NO: 393064 - DNA, 122 bp, Homo sapiens
tgctgaagaaggcaggtgcttcctttcttgttgtgcatgaaggagctggaggcgggacaccgaggaaggcgactcagtgtcactgtccgtcatgggtgtgtgagcccacggctgaatcatca

SEQ ID NO: 393065 - DNA, 122 bp, Homo sapiens
cccgcagtcctttcccgctccgcgatgaacaaagccgcagtttcacgcggccgcgggagacggttcttaaataatggaacaggacataagtgcttcccagagcaaccgggagatttattgat

SEQ ID NO: 393066 - DNA, 122 bp, Homo sapiens
gttgactgacacatagtgcttggtgaggtcacgctggcgctgaatactttttgtataaaccgacgaacagctgatgaccgcatgaatgctcacacaaggggaaagggcgccaagccaaggag

SEQ ID NO: 393067 - DNA, 122 bp, Homo sapiens
gagtgccgctctgataatcggatgcgaacgtgaaccttgacctcgtgtcaaaggagaggacgcaataagctggatgaaagatacaggattcaggccttcaaactttacaccaattagacagg

SEQ ID NO: 393068 - DNA, 122 bp, Homo sapiens
agaggcagaaatgtaaatgtggagccaaacaataacagggctgccgggcctctcagattgcgacggtcctcctcggcctggcgggcaaacccctggtttagcacttctcacttccacgactg

SEQ ID NO: 393069 - DNA, 122 bp, Homo sapiens
ggttacagcccccatgggccgctcctgctcctgctccgcggccccacctccgcctcctcccgcccttggctgcccctcccaggctcggcctccccgcgccggttcacgctcacatttgggct

SEQ ID NO: 393070 - DNA, 122 bp, Homo sapiens
aagtaaataaaaatataactaaaaacaaaatggcaggggagggggaaggtaagtctgttgcgatgtgcccggttctaaggacaggtcttggcaggaaaacgtcaagtctccagaatcattcc

SEQ ID NO: 393071 - DNA, 122 bp, Homo sapiens
ctgctcctcctcacagctttagatggaggcgatcccatccgaaagggcgcagttcccattcgtgtggtggtcctcgatgtaaatgatcacatcccaatgtttacacagtccgtatatcgcgt

SEQ ID NO: 393072 - DNA, 122 bp, Homo sapiens
atcccatatttaagaggggatagcatgtgacttgtcagatctgtagctgcttaacagaatcgctgtagaatatttcccaacgaagggtgtatccaaggcttattattgggggataattcgtc

SEQ ID NO: 393073 - DNA, 122 bp, Homo sapiens
gccagatcgttcgatgcgcacacggggcgctatacctgcaacccctccccaactcctactcgtcctgccacccactctggggacccctctcctctctcaggcagccagttgcttcctgcttt

SEQ ID NO: 393074 - DNA, 122 bp, Homo sapiens
agagcgcctgctgtggagaaacaggctgggtccttcctgactgtgctgcgcgctcctcaccgcgtctttacggggagtgccgcccttcctcccatggctgcaccaggctgagtggctgcaaa

SEQ ID NO: 393075 - DNA, 122 bp, Homo sapiens
gtccgccggcggggaccgggcgtcccgcgtgtttcccgctgctggtgaccccaacgtgcccgcgtcgcggccttgccggccctactgggccctgcacaacgtttttaaaccgagggttttat

SEQ ID NO: 393076 - DNA, 122 bp, Homo sapiens
tccgcactcacccgtgaccacggccgtgcggccccgcaggttgcccatgccgccgcacggcggggccttcaccaggttgtagtagacaagcacgtaagcgcccagcagcaaccccgcgccca

SEQ ID NO: 393077 - DNA, 122 bp, Homo sapiens
tggaagctttgtaccgtcactctgttcaataaagcctacagctttttttttctctaggtccgatccgtgtctctctctcaacacgggctgccgccacaccaaatctttggcatggctaaggc

SEQ ID NO: 393078 - DNA, 122 bp, Homo sapiens
ccatggaggccggccacgtgtgaggctgggaggaagagttctgcattctccgggacccgacggtgctttgcacacacggtcatcagggatgttggtgctgtgtgtgtatacttgtgtatcta

SEQ ID NO: 393079 - DNA, 122 bp, Homo sapiens
agaaccgtcgcagtcctgaccgcggccgccgccgccgttctatctgatctccaggagcgccggctccagactgcctggagcgctgaaagagttaatcaggaacgcctccccgctgtggtttt

SEQ ID NO: 393080 - DNA, 122 bp, Homo sapiens
ggtcgggccggggggtcggacgcgtggctgccggcggacactcaccgatcttgatcttcacgctctggaagacccggagcccctcgtcctccaccgccatgctgcgcgtccgcgcccgccga

SEQ ID NO: 393081 - DNA, 122 bp, Homo sapiens
tgcagggttgatcatgaaggattgtgaggaagagaaatcctcccaatgggcagcttcaagcgatacagcagttgttcattttgcctggatggagagatgactacagatgtagatttacattg

SEQ ID NO: 393082 - DNA, 122 bp, Homo sapiens
ggggcccagcctgtcctgggcggcgctctgcggggagggggtgaggggagtggccggggccggggccccccctaaccactgcctcgctcaggctgccgatcggctcgttctctctgcgttgg

SEQ ID NO: 393083 - DNA, 122 bp, Homo sapiens
tcccaccagcctccgccgcaccgagctccctgtgtagccggggagatccacaaacaccctcgtgactcatcccaggtttgatgtgctaagtgccaaaactgaagtttaaacaaagggcacct

SEQ ID NO: 393084 - DNA, 122 bp, Homo sapiens
taaacagagcttggcagggctggaggctttcttccttttaaaaagtgccattctgaacaacgatacaaagtgaaaaaataaattttttaaaaaagaaagggaaaaactacaatttgaccatt

SEQ ID NO: 393085 - DNA, 122 bp, Homo sapiens
atgaatcataataaaatagcctctaaacagtttctaagcgggagcctccgtggaactcagcgctccgctcctcccagttcctaagagtaagtgatcctcttggcttttatttctttctcttt

SEQ ID NO: 393086 - DNA, 122 bp, Homo sapiens
agcattacgaatgcttccagctgggtatcattagcagttctattctgaagaataattattcgtgacccttggtggacctaaggcctggctgagtgtggctcagatctggggcacagtgctta

SEQ ID NO: 393087 - DNA, 122 bp, Homo sapiens
atgtctatcgaatacctcctccttgtggagcctggtaccaagcacagcctcaaactatctcgacggtcaggcccctttcccaggtggtgccgtggtggccgtggggtgaggaaaatatgtac

SEQ ID NO: 393088 - DNA, 122 bp, Homo sapiens
ccacattaataactacccccaagaggttgcagcgcaaccactactggaacgtgaagtccccggcacgccccaacaacaggaccattggccacgcccctaggggcggggcactgcatggaaag

SEQ ID NO: 393089 - DNA, 122 bp, Homo sapiens
acatcgcaatgccttaaggagcagtattgctgccagcatgtcccatcttcagccctaaggcggttttcccctgtctcagtagatggagtatacaatcgggctttacaccaagacattccatt

SEQ ID NO: 393090 - DNA, 122 bp, Homo sapiens
cagggtcctcctggatgagtgagacaagggcagttcaggaggtcacccaataactgaggtcgcagcaacacgaaggagccagggagcaggggcggccttcccttctccactccaggcggctc

SEQ ID NO: 393091 - DNA, 122 bp, Homo sapiens
ttgcccacaggactgtgacactgcagtagctgggaaagtgggctagaacccgagcttacacgaacctgacgagcagcatcagggttgatgtcaggttagtgacagctgccgtcacctcacag

SEQ ID NO: 393092 - DNA, 122 bp, Homo sapiens
cccaccctcagctcctttcctctgtccccaggttgtagctgccatcagatgccggagactcgcccttcaataaaaaatctcttctagctgatcagtgggctccacgtgtggcttgtgtgcct

SEQ ID NO: 393093 - DNA, 122 bp, Homo sapiens
gcgctggcggaagagaggctcagcgcagggggcgcagagccggcgctggccaatatgcgccgcatgtgatacctttgagggcgcggcgggggagggtagcgtcaaatttcaaaaaaaaaaaa

SEQ ID NO: 393094 - DNA, 122 bp, Homo sapiens
gtgacagacgccgtttttctcctgaacttgctggggggactgttgagtttgcgaatggggcgtctgacagctggagggggtggaaggaaggtctggggatgctggttctgtttgccatttcc

SEQ ID NO: 393095 - DNA, 122 bp, Homo sapiens
tgaagcctttgaccttggaagagctgcgtactagtgaagtagagggagggggagggagaacggaatgaggaattccttgctgtaatatattcgggtaaaaatggggctgtcatcttgagcta

SEQ ID NO: 393096 - DNA, 122 bp, Homo sapiens
aggcaccttagactgggcagcttagaaacaacattgctatctcgtggtcctgggagtctgcgctcggggtggcagcgtggtcgggctctggaaaaggccttcttcccggttgcccaagacca

SEQ ID NO: 393097 - DNA, 122 bp, Homo sapiens
ctctctttttgtggaatctgcaagtggatatttgtctagctttgaggatttcgttggaaacgggattacatataaaaagcagacagcagcattcccagaatcttgtttgtgatgtttgcatt

SEQ ID NO: 393098 - DNA, 122 bp, Homo sapiens
gtcaagcaatgggaggagtcgtgagaacctggatgacagcgggctgagccaccggcttggcgcggcggccaaactggtgggacagtgtctccaggtagtgaggcccaacctctttaaaacaa

SEQ ID NO: 393099 - DNA, 122 bp, Homo sapiens
cctggggacctaagatcagtgcctgagatattttgcaggccctgaactccatggatcagccggcaccacctggactggtgatctggctcaactagttctgccatcccacccaggaacagaag

SEQ ID NO: 393100 - DNA, 122 bp, Homo sapiens
gggggcggggtgcagcggagccgcccgcccccgcgccggtctggggcccacctccctccccgcccccgacccctgccctcgggcctccccccggggaggggctgctccctggcacccggcag

SEQ ID NO: 393101 - DNA, 122 bp, Homo sapiens
gcatctgtggtggttcgtctggcagaaagttttcctggagaacatttttttgatagaagccgaaggggaagctgaaaatccaggataagacttggagctcttcgctctctttgtaacaaatt

SEQ ID NO: 393102 - DNA, 122 bp, Homo sapiens
tgattcaaattcaagaagcatatgttggccacaatgcattcaaggtggtaccacctgtaacgctggcacatgatcctctcaccaaccctttcctttgcaaaataggggagtgatgtcctgca

SEQ ID NO: 393103 - DNA, 122 bp, Homo sapiens
ttcccctttccaagtaggcggccgagccaaagtctatcagcttgattgtgaagtcctcggcgatcacgatgttctcatccttgatgtcacggtggatgatgtccttcaagcgcaggtatccc

SEQ ID NO: 393104 - DNA, 122 bp, Homo sapiens
attgcaagttttctaaatagtgcatccttgtggtctacatgtgagttactaatatggaaacggggggccgggtgtgatggctcacacctgtaatcccagcactttgggaggccaaggcgggt

SEQ ID NO: 393105 - DNA, 122 bp, Homo sapiens
cccaccaggggtcagacaggggcgggcggggagccaaatgccctcgaaggggaacagcggcgccaacagtgacagtagtgaatggacccgaaagggagacaagccaactctttcgtgggggg

SEQ ID NO: 393106 - DNA, 122 bp, Homo sapiens
ctgagttgagacctggtgtagggaggaatctacttccgccagaagttgaagccaatctagcgtttgggctatttccgcccttgtttcctctactccgaagtgcgcttcctagcggtcaggag

SEQ ID NO: 393107 - DNA, 122 bp, Homo sapiens
ctccacccgtttcccccaggcagggggaagccccgagaagccgccgcgccgggctgagatcgggccccaggctctccgcggagccgtctccaacccctgcaggccgacctgggcagccaggc

SEQ ID NO: 393108 - DNA, 122 bp, Homo sapiens
tcacccagtcgcacaaaattcccatctgctcctgtacgcacaatgaatgtacaatgcacacgtgcacacaaatgtcctacagtggaaagctcagccttcatactccatccccagaagcactc

SEQ ID NO: 393109 - DNA, 122 bp, Homo sapiens
tttctttaaacaacaaacagagaagcctggccgctgcgcccccacagtgagcgagcagggcgcgggctgcgggagtggggggcacgcagggcaccccgcgagcggcctcgcgaccaggtact

SEQ ID NO: 393110 - DNA, 122 bp, Homo sapiens
gaccgcccccacaggtggccgggccgggtcctcatcgctggtggggctccaggctgggaacgggggtcgaggccgatgcgctgcgggcagcggccgccgggggcgctgcgggggccgcggtt

SEQ ID NO: 393111 - DNA, 122 bp, Homo sapiens
ggggtgggggtgcgcctatggagatccaggggcgtagtgagaaggcagtggggtctcgctcgcctacgtgcggctgccgaggcggggctgacagcaagttctaaagaggggcagctaattta

SEQ ID NO: 393112 - DNA, 122 bp, Homo sapiens
cgacatagtgctagtgtctccgccgctgccgccgagactacacccgccgctgccgcgaaccgaaactagcagcaaagtaatccccgccgctgccgcgcgcccgctctacctcgcgaagcaca

SEQ ID NO: 393113 - DNA, 122 bp, Homo sapiens
cggagaaggtggcttaatgagaggccgcgggagggtgggtgccggcacgtcgctaaactccgcctgcaatccttcgggttggctgccagccagggcacggttccgagccggccggggctgac

SEQ ID NO: 393114 - DNA, 122 bp, Homo sapiens
tttccatatcttggccatggtgaataatgttgcagctaacatgggagtgcaggtatctcacggagtttcacttcctctggatctatagccagaaatgggattggtggatcctaatgtagctc

SEQ ID NO: 393115 - DNA, 122 bp, Homo sapiens
atctttgctttgatttttaaatatgattccaagcaggcagataatgttgtgacccaattacggggtattttggaagtagtaggcacccaacttgggagtggagctggtgggtgtaaagggaa

SEQ ID NO: 393116 - DNA, 122 bp, Homo sapiens
acagtgtgttgattcctccaaaaattaaaaaatgaattaccagctaggtgtggtggctcacgcctgtaatcccagcacttcgggaggcttaggcaggcagatcacgaggtcaggagattgag

SEQ ID NO: 393117 - DNA, 122 bp, Homo sapiens
aacacagggtaggacttcaaaacaccagcgtgagcgaggcaggcacacacggactcgcggcggtctgtttgcaacagcgctgggaatgcacattggaaaatcacatcttgcatgctgaaaac

SEQ ID NO: 393118 - DNA, 122 bp, Homo sapiens
ccaaggttagggcgcggtagacttgacccgctttcctcaaactctgttaatgccagaacccggataatctcaacttggtaaagatggcaggaagcctagcaaaaagctggaggacgtcggga

SEQ ID NO: 393119 - DNA, 122 bp, Homo sapiens
actgaggcatagaagggcatcagtcctaggcaccactgaaggccaggtcccccatctaaccgcccctctccctctctctgtcccatgctgcagggcggcatgaaggctgtggtctggactga

SEQ ID NO: 393120 - DNA, 122 bp, Homo sapiens
agcgagaaaggggagccggcgcagctcgctgccctgttccagaactcagaatttgagaggcgagagttcggtaagccgtgcgaccagacgaccgaggacgcgcgcagagaaacccccgccgt

SEQ ID NO: 393121 - DNA, 122 bp, Homo sapiens
acctgttcctggggaaaccagaataaaggctcttgctcccgctgtcccgactgaccctgccgctcccccatgtggcctggcatggtggagcacacactctcctgtcctgggaactgtctcag

SEQ ID NO: 393122 - DNA, 122 bp, Homo sapiens
gttgcccaggcatgcagtggtgcaatgtagccacaatctcttgggctcaagcagtcctctcgcataagcctccccagtagctgggactacaggtgcacacaccacagccacctaatttttaa

SEQ ID NO: 393123 - DNA, 122 bp, Homo sapiens
acatgattctcaaataaattctcatctgaaaagaaggctaccaagcatgttgtgaggtatcgctttagcttagtctttgtgctctgcctggctcagttgtcctgcagaacaacgacagtcca

SEQ ID NO: 393124 - DNA, 122 bp, Homo sapiens
gggggcgggggcgctgcagaatccagcgtcctcccaagtcctcctgtgggaagacagcagcgctgctactggtggagaggggctgcgagagggaggcgcggagggaccccttggctctccgc

SEQ ID NO: 393125 - DNA, 122 bp, Homo sapiens
tgaaatgtaaatgtgtcaggtgcagctccccattgcggtggccctcggtgacaagatatacggctgtcccttcacagccccaagctgagttcacgcagcccggaggatgctatcgctggaca

SEQ ID NO: 393126 - DNA, 122 bp, Homo sapiens
caagcccaaccggcttgtgccgcttgccgaattgtaaatctcagcaaaacccaaacacaccggaactccagccgtttcctgggagcgaggaagcgggagtaatgctaaaaggggaaaagaag

SEQ ID NO: 393127 - DNA, 122 bp, Homo sapiens
accatggaatcagcctgcaatcatcttgaaaggggaaaggagccaggggttagcagtcaccgttcatatagtccagtgcagatcagcccaagggcgagcccatttgtttgtgcttctctctc

SEQ ID NO: 393128 - DNA, 122 bp, Homo sapiens
gccccggtgctaagtccctcattgcccggggccagcacggccagccgtctgctccgactgcgtggcccaccaagcccatgcccacacggaactccagctggcccgcaagcgccgcacgcagg

SEQ ID NO: 393129 - DNA, 122 bp, Homo sapiens
ctgcacaccccagcctcttggactatgtggaacacaactgctaaagcgcctgctctgtgccgggctctgggctctgggctcagcccctgccctggaggacagacagcccctgagagccggag

SEQ ID NO: 393130 - DNA, 122 bp, Homo sapiens
tgactacacttctgcccagtgctgtgcccccctctgactcaggcaaggcaccaccctgaacgccccaccctgtcccatagaggccacaaactgctctgcagagccagggtctccaggaatgg

SEQ ID NO: 393131 - DNA, 122 bp, Homo sapiens
gagttcatggccttgagttcactcctgtcctgaatttctcccagtgcaggtccagaagggcgagatgtggcagaaaggagaatgtgggaatgtgtgagtatcccacagccagctcacagtgc

SEQ ID NO: 393132 - DNA, 122 bp, Homo sapiens
gcggacgattctggaatcaacggagatacaagaaagaatgctaatgtcctccaaaacccgcgcagagcgagatggaggcaacgagaggcagcctagaacgtctccaacttttgcgaaacaca

SEQ ID NO: 393133 - DNA, 122 bp, Homo sapiens
gaaaaagatggataatgaccaactgagaataactttcaacaaacaattactgagtacccgcgttgttctggttgtgtgtgcagaaaatagatgagctgtagcgacctgttccctgccctccc

SEQ ID NO: 393134 - DNA, 122 bp, Homo sapiens
tgaggaggtgacttctaaagcagaggaaattccttgaacaaatgtttagtgttggaaaagcgagtcctgcttctggaatagtgagaaagcctctttacctgaagcacagtgtaaagtttaaa

SEQ ID NO: 393135 - DNA, 122 bp, Homo sapiens
ttgggtgggttggtgtccatggcttggtaaacatttccaagaagtaaacaaacctatcagcggccaagctgcttgtcacctgtgagtgcttccaaggaaccggatgtgggctcccccaccct

SEQ ID NO: 393136 - DNA, 122 bp, Homo sapiens
ctgcggacgcccccttctcccagtccgtgtttgtttccggaatttcaataaagctcgattcggctcgaagaagaccccgttcttccgggaaaatggcgactcccgctcgtgccccggagtca

SEQ ID NO: 393137 - DNA, 122 bp, Homo sapiens
actcagccactagcagttgggacggaagatgggattaagacaccgaccaatcaggactatcggcaggacgttaccagggagaccaggcacaccttgtttgttaccaacctatcaacaatgac

SEQ ID NO: 393138 - DNA, 122 bp, Homo sapiens
cgacctttcccaccgccccaccagccagtgccgcagctcacgggcccttcctgccgtgagcgtccactcagtgctggcctttctgctgctcccagtctcggcttttatggccactgcacacg

SEQ ID NO: 393139 - DNA, 122 bp, Homo sapiens
cgggctgcacttgtagcggttctgttgccaatgccattcagaccccagtccgggattccgcgctcggggtgcgagaggccgctcccggggaggggcgggacccgggcggggcgggaggggcg

SEQ ID NO: 393140 - DNA, 122 bp, Homo sapiens
atgagtccagaatgttaaacatgatttcctttggtgccgttttccattagctcctcctcccgcagggcgtggagagcagccggttactcgagggtagggcgtctagagcagccggttacgcg

SEQ ID NO: 393141 - DNA, 122 bp, Homo sapiens
acctcgtgatccgcccgcctcagcctcccaaagtgctgggattacaggtgtgagccaacgcgccaggccgtgcatttctaaactaataaaaatgtatagtagtgggaaggaggggcgaggaa

SEQ ID NO: 393142 - DNA, 122 bp, Homo sapiens
cgagtctggaggacccagagaagcggtagtgaaagtctcttcccgccacccgactgaggacgaagtgtcttgcaacagtgcggcagtccttccactttgcctcacacctcttctgattggct

SEQ ID NO: 393143 - DNA, 122 bp, Homo sapiens
ggcaccgacagtagcctcatgagccagtgctgtcacgaggaggcctgcgagagggccccgcgtccaatgggaagcgagtgcccacgcggaagtgggctcagggcacctggggccacaagcca

SEQ ID NO: 393144 - DNA, 122 bp, Homo sapiens
gcttggaactctcctcagacctcagttcttgaagctgcagagctgccggaggagtatcagcgatgcttggggctgcactgctaggttcaccccctcgacctggagtccagctatgccaggtg

SEQ ID NO: 393145 - DNA, 122 bp, Homo sapiens
cccggtatcgcttatagtagtcgagtgctccatatgcatcgttgtaatacatggattccccgtagcccatggtgtaaggtgttcgaactgctccatattgttcattatactgctcagtaaag

SEQ ID NO: 393146 - DNA, 122 bp, Homo sapiens
cataatcagagcggactctatagtcttttcattcaatattcctgcaattagataaccaatcgcagcctagaaacaacctccaaggagacccagtgacattgctcccatagttgatgcaacaa

SEQ ID NO: 393147 - DNA, 122 bp, Homo sapiens
ggaaaggcaggcacgcagccaacagcaggtcagccagggccaggttgagcaggtagacagcgtacggcttccacaccctgacccggaacaggaaggtccacagcgccaccgcgttgcccagc

SEQ ID NO: 393148 - DNA, 122 bp, Homo sapiens
cactgcctggctttgcccctggggacagaaacatgcagggccaaatagggccccaacacccgggtccagctgcagcctggttccctcttaaagacccctggggctgaaccccacatactctg

SEQ ID NO: 393149 - DNA, 122 bp, Homo sapiens
ggggctgcagggagggcttgggctgcagttccgcctgggctgctgcagctggggcgcgtacgtacatccgtgtgcccctgggagtgtgagtgaggggcgcctgtgggtgggggagccatatc

SEQ ID NO: 393150 - DNA, 122 bp, Homo sapiens
gggaagccgcgcaggggccactagggaggggctctggcggggtcgcaggggcgtggtctgcgggcgtgggggcgggacctcggggcctcgggggcggggcctgagggcgcgcgcacgcgtcc

SEQ ID NO: 393151 - DNA, 122 bp, Homo sapiens
aagtaagcttaaactcacaaatcacagcaatacaaataaattcctctcaagaaaatcttccgaaaaatcaaatccatacaagaaaggccatttttctaacaattcactttaaaaattcttct

SEQ ID NO: 393152 - DNA, 122 bp, Homo sapiens
ggacacatggctggctcgggtggctggccgacctctggctcattcccagctggttcctcacgtccaggagggggcgaaacttactgggaggtttttcagatgtttctgagaccagtctcgcc

SEQ ID NO: 393153 - DNA, 122 bp, Homo sapiens
agcagccctgccggaagtcaggattggaaggctgaagggctttactagcgccctgagagccgcgcgttccgaatgggtgcggatgggggacctggctcatcagggagggattaacgcggctc

SEQ ID NO: 393154 - DNA, 122 bp, Homo sapiens
ctattaagttcaaaaatgtggacagggctaagtagagctatgccgcaggtgaaaagcattcggattagtgagctctagagccagagaggctgtgtttgaatcccagctctgctacccatatc

SEQ ID NO: 393155 - DNA, 122 bp, Homo sapiens
atcaaaagaaagacaaacgctcatgtaaaaatccacacctagaggctctcaggcacagagcgatcacaggagaggcagagtgtgcaaacaagctttcattaagagacctgtcagctctgttt

SEQ ID NO: 393156 - DNA, 122 bp, Homo sapiens
agaaattgtatggttaaataaaacctagagtcaaatgatactcattgaacacatacaggtcgcccattcatttcttcaccaaaaaattagcctgaccctaggctaggtgcttgaggatgaga

SEQ ID NO: 393157 - DNA, 122 bp, Homo sapiens
agagagtagatttaatcatttattaagatgtgttcgaactgtaacatgagaggtttacagcggttaatattttggtctctctctaggaaaggatcactgtggtttttccactccctgtttcc

SEQ ID NO: 393158 - DNA, 122 bp, Homo sapiens
cgggagggccgagctgacggttgcccaagggccagattttaaatttacaggcccggcccccgaaccgccgaagcgcgctgcctgctccccattggcccatggtagtcacgtggaggcgccgg

SEQ ID NO: 393159 - DNA, 122 bp, Homo sapiens
gcgcgcagagacgccgggtcctcgcggagcacggccggggcgcggcggcggcggtggcagcgggagcccagggaccgctccatcactggcagccatggagcccgagcattttcctccctcag

SEQ ID NO: 393160 - DNA, 122 bp, Homo sapiens
gacatatacctgagccaggatctcggggctcacctggcgggaggtggcttggatcagaggcggtggcagcggcggcggcggcgtccagccagagccctgtggaagcggcggcgacacttggg

SEQ ID NO: 393161 - DNA, 122 bp, Homo sapiens
cttactccagcctttctccaaaccctcttaattctagagcagttgaagacatctcttcatcgaggactaacccctacagttatgcaatgagtactgaagaagccagatttcttacctaccat

SEQ ID NO: 393162 - DNA, 122 bp, Homo sapiens
ttccgtagcaccgcacaagagggcgggccatttagcgtcacaagcagtggtttctggtgacgtcacgggaggacgaccccggtggtctggagggtggcagggatcaggttctgtctgagccc

SEQ ID NO: 393163 - DNA, 122 bp, Homo sapiens
ctgacaatcttgtaggccgatttccgtaacacctgggcggtcagggcaacacaatgggcacgggaaggtggggtgacaggtgcggggtggtggggtgacgggcacagaaaggtgtgacgggc

SEQ ID NO: 393164 - DNA, 122 bp, Homo sapiens
gagaagattctgagagccagaaggcaggaatggatttggttttgagcagggacgtggaaacgtggagaccaggtgaggtctcattattttggggcgaaaatgtgggttgctattaatactcc

SEQ ID NO: 393165 - DNA, 122 bp, Homo sapiens
gtgcagggaacatagtgttaatgttccaggttacgttcactgctgctctctgcactttctcgttccgttagatctgatcctcgtttcctgtggtgaagtagcgtgcagaatcgtaagataaa

SEQ ID NO: 393166 - DNA, 122 bp, Homo sapiens
ccacagcccggcacctgtcatccccaccacactgcaaactctccgaggccaacagccagtcgactgggttggctgctggtggggacgcataataggcattcaggaaatactgaatgaatgac

SEQ ID NO: 393167 - DNA, 122 bp, Homo sapiens
gaggaaaaaaaaaaaaaagaaaaagaaaaaagctctcgtgcctcttagaacctccataaccgccagattgaaaactgactgtccaagactgcctaaatcctacttctggatgactctccagt

SEQ ID NO: 393168 - DNA, 122 bp, Homo sapiens
aatacttgtgtttttaacagcccttcccctggacggtgcggccatgagggcctcatgttacggcattgccttttctttctgtggatccagtatcttcctcggctttttagggagcaggaaaa

SEQ ID NO: 393169 - DNA, 122 bp, Homo sapiens
agcccaggctcttccaggagcctgctccacccctgtggctgtggaggagttcagcaggcccggagcccttcacacccacttctgattagatcagactctgcctctgagatgctgggaggccc

SEQ ID NO: 393170 - DNA, 122 bp, Homo sapiens
ctgtgactgtgtcaagggaagccacgactctgaccatagtcttctctcagcttccactgccgtctccacaggtgggcttcactttcgtggaatccttgggctgccgagttacaccttaggaa

SEQ ID NO: 393171 - DNA, 122 bp, Homo sapiens
agagccgtaagactcctcacactgtgacctggccacatcctacatacatgtcagcttgcacgccatctacttaactgtcatgcacttgatagcaaatgagcttttgccctttctgctgcctt

SEQ ID NO: 393172 - DNA, 122 bp, Homo sapiens
accatggtgaaattgctgccggcccaggaggcagccaagatctaccataccaactatgtgcggaactcgcgagccgtgggcgtgatgtggggtaccctcaccatctgcttctccgtactggt

SEQ ID NO: 393173 - DNA, 122 bp, Homo sapiens
cggtcagagcctggaggaacccgcaccaggatcgtagggcatgacgggccgggggcgggacgaggattgacgagccgggaacagggcggggcttgagggggcgggagggtggggcgaggcat

SEQ ID NO: 393174 - DNA, 122 bp, Homo sapiens
gtgcctggacccagagtggtggggaaggggggtatgctcataccttgcaggttgacgccccggggcaccacgccctgaagctccactgtgggcaggtcatcttccgctgcattagagttatt

SEQ ID NO: 393175 - DNA, 122 bp, Homo sapiens
gtcgccgcagcctttctggtcagtttcgctgggttttgtcagttccgtttgagaccgaggcgcacggactagcggccgccagcacctcacaggtggaggacacctcttgcgccccaaggtca

SEQ ID NO: 393176 - DNA, 122 bp, Homo sapiens
acctccccaacccgagcctctcttgggcagtgggtcctggggtcacacgggccgccagtgcgccttccttgctctggcccatctctgctttgttcagagtcaggttctgtggaggaaggctg

SEQ ID NO: 393177 - DNA, 122 bp, Homo sapiens
tcccggcctcactcgagcaggccccgccctcccagaggcagttagtccaagtcacgtgatcgtcgactcagctgaccctgcgggaccggaaaaagaaattcccgggccctggcttcttggcg

SEQ ID NO: 393178 - DNA, 122 bp, Homo sapiens
cctgaaggaaattttagaagaaaggagtgacaagtgacattaactaagagagaaaagagtcgtcaatcttgggagtggtaatcagatcatgttgagttaacacatggaaattgataagtaga

SEQ ID NO: 393179 - DNA, 122 bp, Homo sapiens
ctggcccacaggaggttgctaacacctctagttaacatggtggccaacacggtggccgggcgcggtggctctcgccttcaatcctagcactttgggaggccatggtgggtgggtcacttgag

SEQ ID NO: 393180 - DNA, 122 bp, Homo sapiens
acgctgacgccgtgcgcggggcgggggccggcgagcatgcgcagtgtggtgtggacagggcgtggttggcaagcatgcgcaatgtgggccgggcggggctggcgagcatgcgcagtatgggg

SEQ ID NO: 393181 - DNA, 122 bp, Homo sapiens
ggcgttcccttaaactctccgccctcctcctcgcggctcagccttctaggagtttgcgtgcgtttatggcctgtgcaaaggggttgcagaaatattacccttttgctccttttttcccatgt

SEQ ID NO: 393182 - DNA, 122 bp, Homo sapiens
aaaaaccgggtgcgcctgcgcgttgcagattagttgaaaacgctcagggtttgtgaggggcggggtcacgtatgcgcgtcattggacgggtcggtgggagggagggtggagatgggtagggt

SEQ ID NO: 393183 - DNA, 122 bp, Homo sapiens
ggcctctgggcttcagtttctcgggcttccaggcgggtcccggggcggctaggaaggagccgcccagagagggaggcgcgcccgcgctgctcgcaagcagaaccttggaggcggcggctccg

SEQ ID NO: 393184 - DNA, 122 bp, Homo sapiens
ggaaggacggaaacccctgagggcttttgggggcggtgggtactaatagaacccagtgtccggggtgcgccggggaggctgcgagcgcggcgggagtggggcgctggagggtgaggacgcgg

SEQ ID NO: 393185 - DNA, 122 bp, Homo sapiens
cttgttgtttacgaggaggtgcggcagcccccgcaactgggagctggtggaaagcttgggcggtagcggggtctttattgccccgggaggcgcagcgtgggaagtggctggcatcccagtaa

SEQ ID NO: 393186 - DNA, 122 bp, Homo sapiens
ggcctccagcagcatgaccgcctgtggcctggctcgggacgccccgaggaagcagcccggcggtcagtccagcacagccagcgctgggcccccgtcctgacctgagcggttaccaccagccc

SEQ ID NO: 393187 - DNA, 122 bp, Homo sapiens
ctgcctcctcttactaaagaaagtggacatcagagaggaagcatttgcaaagtctgatgacggctcacatggactaatgcagaagtgaacccgcagggctgacggacgcctcagggttctcg

SEQ ID NO: 393188 - DNA, 122 bp, Homo sapiens
aacaggggcaaaaagttcttggtggcctctggagccatcacctcctggttcagggccacccggtctttcttccaggctgccgacttcctgagaaaacatgggcccacaagccctcatggtca

SEQ ID NO: 393189 - DNA, 122 bp, Homo sapiens
gccatggtgggagccacaagtgggaagccatagggacagggaacagttgctcacacccagcgaccatgtggtaaactcctttccccacctctcctggctggtattcgtggtggtgatggatt

SEQ ID NO: 393190 - DNA, 122 bp, Homo sapiens
ttgtaagtgacctcgtttattacattttgttatagcaacctgaacagactaagaaaatgtcgattaaaagaagaactcatttaagcaagagatgagaaacattgacaaaaacataaaaaagg

SEQ ID NO: 393191 - DNA, 122 bp, Homo sapiens
tccagcgtcttctagagagcttagtgtatacagatgagggtgtccgctgctgctttccttcggaatccagtgcttccacagagattagcctgtagcttatatttgacattcttcactgtctg

SEQ ID NO: 393192 - DNA, 122 bp, Homo sapiens
agcccagggccctgctgtcaccaaggaacgccctccacacccctcagtgacggcacagcccggaagcaacaaaacacggcgctccaaacatgaagttgctcctggccataatgtgccttttc

SEQ ID NO: 393193 - DNA, 122 bp, Homo sapiens
aaaacaatttcattcttgtgttctattattttcactgtgctgtgttttgttttattcatacgaatgttgttttaagggggaagaatcatctaatgacctctaattatctggtagagtcaatc

SEQ ID NO: 393194 - DNA, 122 bp, Homo sapiens
gggtaaatctggctcagaggtttgctgtcttgacagctgccctcaagggggctcccctcccgccccagcatcacccatgggactcgctctccctgtctcgctccactcgaaggaaacacaga

SEQ ID NO: 393195 - DNA, 122 bp, Homo sapiens
ctgccgcgccaggaaggagggcgatctggagtgtttagaatacaatagagcccaagtaagcgttgaggttaagtgccttcaaagggaagtaagaagattccaagtcaatgttgaaatacaca

SEQ ID NO: 393196 - DNA, 122 bp, Homo sapiens
aaggacgagcccaagctgcgctggttcctggagcagctgggcggtgaggtgggcactcagcgcaagaagatgcggctggccaacgaggaggagatcgaccgcgccgtgtacgcctggttcct

SEQ ID NO: 393197 - DNA, 122 bp, Homo sapiens
tgactccaccaagtactacgaggcctgcgtgaacgacgcgtgtgcctgcgactcgggtggcgactgcgagtgtttctgcacggctgtggctgcctacgcccaggcctgccacgacgcgggcc

SEQ ID NO: 393198 - DNA, 122 bp, Homo sapiens
cccgcccccaacttcccgcacaagccttgggccgggccccccgcgccccctccccgctcgcggtctcttaggaaactgcgaccttaatggttgctaaggagcaggggaggtccttcccgtcg

SEQ ID NO: 393199 - DNA, 122 bp, Homo sapiens
agacaaagcccttctggtctgcagaacgcactccggcaagcccaccgggagaaccaaagccgcctcctcgcccctgtggggaaaatggcgctcgtcaccccggctccctcccgggtaatcac

SEQ ID NO: 393200 - DNA, 122 bp, Homo sapiens
tctgcaacaaaaccaaggacaatattttaaaccaggggtcctaacccccaggccatggaccgggaccggtatcagtccgtggcctgttaggaaccaggctgcacagcaggaggtgagtggtg

SEQ ID NO: 393201 - DNA, 122 bp, Homo sapiens
gattggcccgtggcagccacctgaccgaacggaccaataggaggcgttctcccaggaatgcggcccgcgtgtggccgggagcggaagcccgacctgagtgcggcagggcccagaggctgtgc

SEQ ID NO: 393202 - DNA, 122 bp, Homo sapiens
gcaggcagcagcgtgggaactacattacccagaagacactgcgggcgacacaggcagcaacgtgagaactacattacccagaagacactgcgggggcagggcagcgagtgtagccattggtc

SEQ ID NO: 393203 - DNA, 122 bp, Homo sapiens
gtcttgcatctttgatgccagctcagccacagtagggtagggtggtacccgttagagccacgaggccctcttcccaggccctcattcctggacgatacttctagacatacccagggccagaa

SEQ ID NO: 393204 - DNA, 122 bp, Homo sapiens
taacttttagtttattcctccctcaggaacgaagtattgggacaatgtgaacgtagtcgccgccgattcccaccgcacttcaaagatgtgggaacgccaagatccgcggaagtaaccacgcc

SEQ ID NO: 393205 - DNA, 122 bp, Homo sapiens
gccatgagggtgggagccggcctgggcagctccaactccagagaagggtacagctgaccccggctgccctcctgccagcttagcccccttggaacctaacagataaacagggttttgttttt

SEQ ID NO: 393206 - DNA, 122 bp, Homo sapiens
cctgtctcaaataaataaatgaataaatagggcggaaagcaccaatattgtaattgcctccgtccccaggtgggagctcctcaagggccctccccaggaagtgttcctctggatgacctacc

SEQ ID NO: 393207 - DNA, 122 bp, Homo sapiens
tgattaaaacaacaaaattaaaaactcctcctcctcatgacatggtgatttactttggcacggcctacgtggctctcacaagggactttgctaacttcgtcctccaagaccagctcgcactt

SEQ ID NO: 393208 - DNA, 122 bp, Homo sapiens
gcccaccgccaaccccacgcgccctcgcccggacacgcgtccccgcagccctggagcgctcgcacccactcacaagccctcgtgcccagcccccgtgcctcaggagcccacacacactccga

SEQ ID NO: 393209 - DNA, 122 bp, Homo sapiens
aatgattccttatttatcctcggccttattttgaagcagtaactcctcatgttgaatcaccgattttcaaaaacaaaacatttatttagtgcagtaaaccaataacaaacaactttcttctt

SEQ ID NO: 393210 - DNA, 122 bp, Homo sapiens
tggtgtcagaaagacacagcatctgagctctgtcagatgacagggaggtgtcgggaccagcgcccacgtggccagcatgtgacagggaggggctcccgcggtgctgtaggtcaggaggggtc

SEQ ID NO: 393211 - DNA, 122 bp, Homo sapiens
ccggttaaccgtgaggcagttctgtcggacggggatggggttgtagagtgccatggtccgcgctctctgcgccattgactgcttgtacatcctttgcgccccgggctgcccgccctgccggc

SEQ ID NO: 393212 - DNA, 122 bp, Homo sapiens
cggaagaatgcggcttctgtcaccgatcataatgggatattaaacagcaagactggggcgcgttctggtggagatggagctgccaagagagacgctaagtgggaaatgacgatttggatctc

SEQ ID NO: 393213 - DNA, 122 bp, Homo sapiens
ctcactctacggtgctttctcccctgttggtgctgagggcttttgagactacctgccccgcgctccctaagtccgagggaccgaggcgaggacctgtcccgctgagctggcacgacccacgc

SEQ ID NO: 393214 - DNA, 122 bp, Homo sapiens
tgctgtatctccacagagggtaaaaactaggtcagccacacaggcagtcagctgcatctacgtgaccaacccccagtaaaaactctgaatgccgaggctcaggtgagcttccctgggtggca

SEQ ID NO: 393215 - DNA, 122 bp, Homo sapiens
taaagtcaaagcaggagagtaattatgaatagcgcagcgggattctcacacctagaccgtcgcgagcgggttctcaagttaggggagagtttcgagaagcagccgcgctgcgccttccacac

SEQ ID NO: 393216 - DNA, 122 bp, Homo sapiens
ccggggcggggctggcgagcggcgcgggagcgtggctggggttcccgaggtgggagatatcgtcgggctgtgccaccggttcgtgcagaagttccagcgagggtgtccgtgtgttcctgaga

SEQ ID NO: 393217 - DNA, 122 bp, Homo sapiens
ctgcccccccccatcccacgctccgacgaacaaaggaggcaccggcctgcgcccccgcttcgcccccagcccgggaacctccaagcacccaccgactcggcgactccgcctacgaagaacag

SEQ ID NO: 393218 - DNA, 122 bp, Homo sapiens
gcgccccggggaacaagcggcccggggacgcgaagctgccgccgctgccactggcgccgccgcccaggccgctcagcgcctcatcgccgtagaagggtgtttccatcctccgcctcccccgc

SEQ ID NO: 393219 - DNA, 122 bp, Homo sapiens
ggcctcccaaagtgctgggattacaggcatcagccaccatgcctggtgccattagagtttcgagcaaagaaatggcacaatctaaggtgttttatatatgtgtgtgtgtgagtatggctgct

SEQ ID NO: 393220 - DNA, 122 bp, Homo sapiens
actctccacattttcagtctgctcaattcccagagctgggctctcaggcgcactcacccacgttgaactggggctcagcctgtttgaaagttctgccctgacatttgtgtcacactaaacct

SEQ ID NO: 393221 - DNA, 122 bp, Homo sapiens
ccgaagccaggggtgagaaggaccccaggggatctttgcctgattcctggctgcctcccacggctgtccttggacactggcggccccttgctctgacctgatctctggtggtgtctgcagga

SEQ ID NO: 393222 - DNA, 122 bp, Homo sapiens
ccttaggggccaagctcaagttccaccttctgaggaagcccagtacttcaggcctgtgaacgctgtcagtctcttgtgtcttaaatgtcgtcttaacacactcattcttttatctgtttcat

SEQ ID NO: 393223 - DNA, 122 bp, Homo sapiens
tgtgcggaacattgttttaactttggcttaggtagtaatctggttttcaggtatccttcacgtagcaaattgttgttgcttctcagtattaaaacttgtctgtaataagttgcccgacccca

SEQ ID NO: 393224 - DNA, 122 bp, Homo sapiens
aggacacgagaggccaggacgccatcggcgaggttggacaggagccagaggcggatggagcgcggcagaggcgcccccactgtctcccgtgccactggctcctgcagctgcccctttaagga

SEQ ID NO: 393225 - DNA, 122 bp, Homo sapiens
taacagttttggtcagttttttcttaagacatgtggatctttgaatcacatccaggacaacgcacccatcaagaaaagcctttaacaagtttgagtcaggaattaaaaaagaggaaggaagg

SEQ ID NO: 393226 - DNA, 122 bp, Homo sapiens
ctttctgtcgggccacactttcccaagtctttgcactggctgtagggtgggctttatcctcgggacgtcctcctccccaagtccagcctgcagctggaagtcttcactgatctccatctctc

SEQ ID NO: 393227 - DNA, 122 bp, Homo sapiens
gagcagacactctcatctcctgctccggttccctagggctctgtccctgggggccatcagcgctggctgcgcacctccctggccccacggccctgctgggcttctccggcctcccctcaggt

SEQ ID NO: 393228 - DNA, 122 bp, Homo sapiens
acaagatggcgaggaggcaccgacacacacaacaagggaaggagccgcgctgcccccggccgccgcccccgctactacaccggggccacagccaaagcccggaccggagcccccgcccgcag

SEQ ID NO: 393229 - DNA, 122 bp, Homo sapiens
gggtgcagcctgcctggtgggagggttgcactgttaaagcgaaggctgcagcggcggacccggctcaggggcagagaagcgtccgtgtggtacaaccctgtgggtggggccacccatctgca

SEQ ID NO: 393230 - DNA, 122 bp, Homo sapiens
tctgcttgcctatataaaaagatgagatttcttcctgtccttttcatctcaatagtggatcgcttgtgaagtgcatcaaggtctgatttagcttattcagtaataaaactgctttctttttt

SEQ ID NO: 393231 - DNA, 122 bp, Homo sapiens
gaaaggagatcttgagttctccagcacggagactctttacaattatttctccgcgggatccgctgacagccaacgtctttcttacttcctgatcggacaggaagtaggtttcagttgctgtg

SEQ ID NO: 393232 - DNA, 122 bp, Homo sapiens
ctacatctatggagaaagtttccctgcccagtaaagtcttgcttgtcatactttaacaagcgtcatatgaatatatatatacacattaaaaaaattttttttttcctttaccaatctcccca

SEQ ID NO: 393233 - DNA, 122 bp, Homo sapiens
tggaacgccggggagtcggggcaggttctgagcaggaactggcggtggctgtggaacacacgtgtgagctacaagcctggccgggccgcccccgctgcgcgccccccggaggacgtggccgc

SEQ ID NO: 393234 - DNA, 122 bp, Homo sapiens
tctcaggtaaagtgtgggtgtcttcctcctacctggaaaccccttcttcaggtggacagccgtcttgctgatggtgccaagcccgctttcccaaaccaacagacccaaagtttccccggagc

SEQ ID NO: 393235 - DNA, 122 bp, Homo sapiens
ggggacaaggacagctgagcaggcagcttctcaccaagaatagccatgctgggtcaccttcgacctggggacccttctctgggctctaagcacagagggcaggtagaaacagaccttagctg

SEQ ID NO: 393236 - DNA, 122 bp, Homo sapiens
gagatgtaccgcagccgaatggcgcagtatgagaccccgagatctcttctcgttttagatcgcgagccccctccccttgcagtcagacctcccgttaatttcgttcccagtgtgcctttagt

SEQ ID NO: 393237 - DNA, 122 bp, Homo sapiens
ggcttcctggtcctgcccactctctaagacctaagatgcagggtctaagtgtctcacctgcgtggcggcggccctgtagttctgacttccagcgtgaggtagccaccgccaggcctccgggg

SEQ ID NO: 393238 - DNA, 122 bp, Homo sapiens
ctccgcccccgacctttgggagcgcgcgcccctcactggtgttccggcatgtggaggtggcggaggccggaacgcgtggcctcgcgcgtttgaggggtgggggtgggaatgcgccttttcaa

SEQ ID NO: 393239 - DNA, 122 bp, Homo sapiens
gtctcattatacagtttacttaaccagatttttacaatggtgccatggtgtaggcaatcccggattaagaggtcccttttacaaataaggaaatagactttaagatggctgccagtaagtgg

SEQ ID NO: 393240 - DNA, 122 bp, Homo sapiens
ggtaaaatgaggatccttccccacaaacattgctattattcagctcatttcaaaggattccgctgctgccatttgtgagagccgctggaggctgagtgaaagtcattttgaaagactgatcc

SEQ ID NO: 393241 - DNA, 122 bp, Homo sapiens
gcgccgccgcccgctggcgcggagagggcacgagcgaacaaggcgcctttgagaatccaccgcccccccttcctcctccggccggccccgcccccagcctggcacaccctctccccccctcc

SEQ ID NO: 393242 - DNA, 122 bp, Homo sapiens
cccggaatagcttcactttctggcacacgaaatgcttcttcttggtcttggtcttgctggcgctgagcggcgccaccgccaccgccgtggtgctggtgcagttggacgacatgcccggggcg

SEQ ID NO: 393243 - DNA, 122 bp, Homo sapiens
ttttattgttttatgtctctgcaggtctcgtgtttctctcttccaatcggttgtctttatcgtggacactgaggtgttctctgccttgactaaagatgagtgacgtgaatccaccctctgac

SEQ ID NO: 393244 - DNA, 122 bp, Homo sapiens
gggatgggtaggtgaggatcccgagactgagtgagcttctgcgcgcggtgcttttgggaacgcgggactggcaacctgcggcgccaggagctgggccgaggcgcggcggcgcggctgcgggc

SEQ ID NO: 393245 - DNA, 122 bp, Homo sapiens
aggatgtcatgagaaaggcacttcccctagtgatattcttccccaaaattcataagaaaacgttagtcaatctcaaactgaaagacatcctacagtatacctgaccataacttttaaaagtg

SEQ ID NO: 393246 - DNA, 122 bp, Homo sapiens
gggagcaacagcatccttggctcccggcgcgagcgctccgcgcccagcgagcgcaaagagcgcaaaggccacctgcccggctgggggagcaggcccagcaccaccgccccgatttacccaga

SEQ ID NO: 393247 - DNA, 122 bp, Homo sapiens
cgccccccccatcacccccgtaccccaggagctgtgcctagtccaggagaggctggggggcgccccatggaggtgagacgcggagacacctgcccgcgccctcacccctcaggcctgaggga

SEQ ID NO: 393248 - DNA, 122 bp, Homo sapiens
attcatttgtgaaacatatttgagatagaaccccctcatgttaaggcagcttggcgaggacgcatgacatctgtgtcacgcattgaaactggagtggcgcaggggaccctcctgagggggtg

SEQ ID NO: 393249 - DNA, 122 bp, Homo sapiens
tcctggcctagtaccctaaaactataaccgagaatacctatcattgggcagcctaggaaacgcgactgggacttttagtaggggcccctcaccgctctgaagcactcacacttgagtcaggg

SEQ ID NO: 393250 - DNA, 122 bp, Homo sapiens
aaggcgtctcggcctcgctccccgggcgggaactggggatggatcccaaagcctgcgtcccgatcccttcggtaggagtaggttcctgcaatggttgaaaagtaaggagcccaggggaatgg

SEQ ID NO: 393251 - DNA, 122 bp, Homo sapiens
ttagaaacttcaactgcagaaaatgtaccacaatgaatgaatgagatgcacagttgcttacgtgggcccctcaaaattgctggcaatctcagataatttcacctagtgaacgccccaaaata

SEQ ID NO: 393252 - DNA, 122 bp, Homo sapiens
cgaggaggtgcgcggtgctgagaggccgtgggagcgaccatagagaacgcgcgggcggagcgagcggccggatgcggtcaccatagagacgggtgactgacaggcagcggaagaggaagctg

SEQ ID NO: 393253 - DNA, 122 bp, Homo sapiens
cagggtgccaagcagggagaagaccaccgtcatctcccgcccccagccctcttcgccgagcgcaaccgggtgccagctgcagcagcttaggcacgttccgataaagtaaggtggggtaagcc

SEQ ID NO: 393254 - DNA, 122 bp, Homo sapiens
cccagcaagcagagcaaaaagagttcgcccatggatcgaaacagtgacgagtatcggcaacgccgagagaggaacaacatggctgtgaaaaagagccggttgaaaagcaagcagaaagcaca

SEQ ID NO: 393255 - DNA, 122 bp, Homo sapiens
ctgctagtttgctaatgctgccaggaagctctcctcccagttttctagctgccgttccagcgagcagagagagagcctcggtggtaataagcctcgcacagaacacagcactaattctaacg

SEQ ID NO: 393256 - DNA, 122 bp, Homo sapiens
tgctggcatagaggacaagttaaaaagtttctggactcaaagggtgctcctccaaagctccgggcctccgggctacccctacttgaagccgctatgcccctctcctgtgcccgaggtggccg

SEQ ID NO: 393257 - DNA, 122 bp, Homo sapiens
cttcaaagcccttggcgatcccagttctgttccccgagggggctggcgaggtgggcggggcgggcaggcgagactaggtctttccctgtttggcctccgtagccggcgccggcgggtcgttc

SEQ ID NO: 393258 - DNA, 122 bp, Homo sapiens
tagaacagtcttctttcccagagaacagagacgggaatctccaagttcctgcctattccacgtctaagtaataaaaccaaattagagcatgcctgccactagacttacaatgccagtccttc

SEQ ID NO: 393259 - DNA, 122 bp, Homo sapiens
agtaaccagccgctagcccccttttccacgactcatttcttaatctctgcctgaggctgccgcacctggatggaacgcgcatgcgcaaggctgtctctcgcagccccgccttccctcagctt

SEQ ID NO: 393260 - DNA, 122 bp, Homo sapiens
cattcacattacacatctggacaattctcaagtgcgcccacacacttcagagatcttgaccgagacttcgaaaaccttcatatttgaaattcccttttccttaagttactcagagcacctgc

SEQ ID NO: 393261 - DNA, 122 bp, Homo sapiens
cgccccatccgccacctgggagcgtcccacacgcccgggcccttgaggatgtcccctcggcgatgtgcctgaccgggcgctccccgcccgccaacctccaacctccaacctccgccctccac

SEQ ID NO: 393262 - DNA, 122 bp, Homo sapiens
gaagcgggcaatttcagtgtgagactgagccgcgagactgagctgcggctccgagcgctgcgcggcggctcctcccgcccagggtcagcgccccggcgcgcgcacgcgcacccccgccgccc

SEQ ID NO: 393263 - DNA, 122 bp, Homo sapiens
ggcggcggggcgcgcggcacccgaggttgaaaggacggtagcagatgttgcagtccagctcgccccgctccggaagagagggtaccctcaccaagagctgcatcgtgcccgccgcggactcg

SEQ ID NO: 393264 - DNA, 122 bp, Homo sapiens
ggtaggaatgggccggcgattgggaccagctgggccccaccacggccacgccaggcaaagcgccagcagccctgcactccacgctggccaagaaggccttccacgcagaatgacaagactgc

SEQ ID NO: 393265 - DNA, 122 bp, Homo sapiens
cacggtcaggagccccgtctggtcttctgcagactgggcgtccagggctgcgttttttctcggttctctagccattctgacccaaggcagtactcgggtctcactctagttgcgacctgtat

SEQ ID NO: 393266 - DNA, 122 bp, Homo sapiens
ggtgcgctggcatttaatagaggaacgcaaagaagcgcacgttcgcgcagctcccgaggccggctctgtaaggccaggcctcccaggcaggcgttatcgggcccacttacagacgaggacgc

SEQ ID NO: 393267 - DNA, 122 bp, Homo sapiens
gccaatggggaacacttgtggaagaacagaggtgggatgtgaggttggggtccttattcccgtagctcctcattgtaggctggctgcatcctcacttgagggccaccgctcctgccaggtgg

SEQ ID NO: 393268 - DNA, 122 bp, Homo sapiens
gtaaagggaggaggtactataaaacaaaaggggttagacacccatcaggcagctgcgacccggtggtaaacatgagcgtctcctgtgctcccaccgcctgcgttcttcccggccgcgtccac

SEQ ID NO: 393269 - DNA, 122 bp, Homo sapiens
cagatcacatgccaagaacacaatgctcactgtggtgcctggcagacggtccacaaccagcgggtgcgttcagcttgaatggaccggggtcccacagtgtttgtgccacaagtcaatggcct

SEQ ID NO: 393270 - DNA, 122 bp, Homo sapiens
aaacaggtagacattgacaaaccttaacccccctgctccaaccaaggggttacattaagacgatactggtgggacatcttcagtcacctattttacaatcttgaagttatccacaaggcatg

SEQ ID NO: 393271 - DNA, 122 bp, Homo sapiens
gagttctcttctctctaggaaaaccatcaggttacacagtgtttgtagttccgaacgtcacgggcggttatgagggacagttgatgtgtcccaccagcagcaagactgtgaattgtacatga

SEQ ID NO: 393272 - DNA, 122 bp, Homo sapiens
atctgcattttatcaaggtttcctggcgcatatttgaagttgcgaagctccacccggcagcgcatgggtagctgcaaggggtggctgctcagtggacgccgggttgagggacagaaggaaag

SEQ ID NO: 393273 - DNA, 122 bp, Homo sapiens
aaatcaaaattccacgcaggggccttggttccagagctccctttccaggaggctgttgcgcgggctggccaccaggtggcactgttgcatagcaaaaggaacgcggctccgcgctggagaac

SEQ ID NO: 393274 - DNA, 122 bp, Homo sapiens
cacctttgtccatgaaggatacatggggatcatagggatgcaccatgaagggaggggaaacggagacctggaggtgaatattttcaaatgagaaggctgggagggaagcagctagaaggtca

SEQ ID NO: 393275 - DNA, 122 bp, Homo sapiens
ggccactccccctgagtgaacttgggctcctcttagcattggcaggccggtataaacccccggctgggatggagctaaggcctgatgctgccttaagccttatgaggtcgccacggaaccgc

SEQ ID NO: 393276 - DNA, 122 bp, Homo sapiens
gatacaagcataaggcggccaccttgtgttttctcacgaaactaaaactggacttattcacgtttctactagttttcaagaaaaacaagggacagaaaaacatcactgttttttaaatgcac

SEQ ID NO: 393277 - DNA, 122 bp, Homo sapiens
agacaaaggcagggaggccaacccagcagcttcagtcctcactcccttctaaggattgaacgttgtcaagccctagctcaggaggaggggtgacagcctttcagaatgcccatcttgcccta

SEQ ID NO: 393278 - DNA, 122 bp, Homo sapiens
ttgatgaacatctaggtatcactgtggatctgggctccaaggagggtgaggcaaggggggcgcctaaggtacaaaatttaaggagacactgactctcagatgtcaatcctgtgcttgtacta

SEQ ID NO: 393279 - DNA, 122 bp, Homo sapiens
caccctccccggctctctcctctacagtcactattcttgcttttccctccactggctggacgtgctcctttttcagcccctctgcatttgctttcgcctctgcctggaatggtagtccccaa

SEQ ID NO: 393280 - DNA, 122 bp, Homo sapiens
gatcttgttcagggcgtggtggggatggaccacccggaaatacctgtctaccgccaccaccgtgaggaagatgatgctgccctggcggttcatagccaacatgaagagcatcagccggcaag

SEQ ID NO: 393281 - DNA, 122 bp, Homo sapiens
gccctgcccgggggcggcccccccagccccatggaggtctcccggaggaaggcgccgccgcgccccccgcgccccgcagcgccactgcccctgctcgcctatctgctggcactggcggctcc

SEQ ID NO: 393282 - DNA, 122 bp, Homo sapiens
cgcggctggggtcggtgggtccttgctagagccttcgggccaaggtcgctgagttacagccgccagccggtagaggcagccccgcgcccaccctctgggccgagcgggctgcgggaaggcac

SEQ ID NO: 393283 - DNA, 122 bp, Homo sapiens
gggcccggggcattgtttgcagcttcacgacagggcccggagcctggtggtgcccgcctacgcctaccggaaacttcaccccatccaaaggccgatcccctctgccttctgcttcctcagcc

SEQ ID NO: 393284 - DNA, 122 bp, Homo sapiens
cagcctcccaggagagctggctcaggctttctggtgccttcccagaggggtggggttgtgcgagttttgaagagaatcttacagaccctttgacagatgagactgggaaaggctaaacatgt

SEQ ID NO: 393285 - DNA, 122 bp, Homo sapiens
tttagagagtcattaacgagaactgaacactagggggacccagtttccttacttatgcaacggcggctggcccagctgtacgctacgatcgccctcacttaggacacatgcaatataaacac

SEQ ID NO: 393286 - DNA, 122 bp, Homo sapiens
tctcattggccaggcttggtaagccacgcctcttgcgtcatggcgcgagccctcctactccggcttccattggtgttttagactagccccgcctccccgccccggactcaggtggtgtgcgc

SEQ ID NO: 393287 - DNA, 122 bp, Homo sapiens
gatgtctggacattgtcaccaagacacttgttcttgaaaagacaccggggcgaagaggaacgtggtggggttgcagtggtgatttgtttatttattcgcttgccggagttttgctgtctgtt

SEQ ID NO: 393288 - DNA, 122 bp, Homo sapiens
acatcgcgaagcccctgttcgtactgagaccccgcccgggatcacgcgcacaggccagggcgcaccaggccttggagaagctaccggcacagcccattccttgggcgagttgcttcgcctct

SEQ ID NO: 393289 - DNA, 122 bp, Homo sapiens
tttgtaccgtgaaaagcattcctcagttgtggcttaatgccagttacgacgctgcctttccggcctgctccagcaagtagctactggttcacgtgcagtttggggctgtgaaacctaggcag

SEQ ID NO: 393290 - DNA, 122 bp, Homo sapiens
tcatggtggccctttgggagcctctctccccagggctgatgctgggtgcccctgccccagcgaggtgtgtgtgggtgatatctgtaaagtgcattgtcttcagttgtaggtggggtaggtgt

SEQ ID NO: 393291 - DNA, 122 bp, Homo sapiens
ttctgcacaggcgcgttaatgatggaggcgggcgtggaaggaagtgacgcaacgtagaggcgggaaccagctggttgttagggcaactgacctctgcgacctaatggaggccggaaatcggg

SEQ ID NO: 393292 - DNA, 122 bp, Homo sapiens
agggtgatttacccacaaatgtcctccccttggagccctgtgggcctgtttacaggagggcggaggctgccttggggcacagaggcagggccgtgagtcaccccatgaagtgggccagcttc

SEQ ID NO: 393293 - DNA, 122 bp, Homo sapiens
aaaacgatgttgttttcagcagatggtgctgagacatctggatatccacatgccaaagaacgaggttgagcccctcttttacaccatgtagattgattacctaaaaattgatcatagaccta

SEQ ID NO: 393294 - DNA, 122 bp, Homo sapiens
gaggaaggtttctttttttactcaccgccatcctccgctcccagtcgtgggtagacccggcgctggggctgggggaccctgagcaggttcctcacctgcaccgaccctcatctttaaagttg

SEQ ID NO: 393295 - DNA, 122 bp, Homo sapiens
gagcgggcgcgtgagcacatcagggcgcccgtgacagagcgagcttaacggattaataagcgcagccaggtacccgcgcgaggcacttgctggcaatggcgggaggcggacgtggggggtca

SEQ ID NO: 393296 - DNA, 122 bp, Homo sapiens
caaagaacatgtgagtcttgtgaacaaggaatgttgttttgttcagcgctaccaagagcgcggcaaccgagaaaacacggagtcgcccctagtggcgaaagtgcggatgcgaaaccgctggc

SEQ ID NO: 393297 - DNA, 122 bp, Homo sapiens
agaccaaaaaggtgagggctgcttccctaaccagacggggagcccagatagaaatggcagcgtaggaaatgactctgtatcttctcttgctccaggtgctgctcttctgaggtgaatttttg

SEQ ID NO: 393298 - DNA, 122 bp, Homo sapiens
ggagggcagaggctgctggggagctctggagggtctcctgtcagcaggtgagtcctgcttcgcccggggcccccagttgaagctccccttccccatctcccagacaggccttgggcacctcc

SEQ ID NO: 393299 - DNA, 122 bp, Homo sapiens
cgcatctcgttatttaatccttcactgcaaccttaacagtcaggtcactttactggtacccgttttatggatgaggaaaccgaggcccagaagcaacatgctagtaaatgacaagatttgaa

SEQ ID NO: 393300 - DNA, 122 bp, Homo sapiens
ccgtgccggaagctgcggaggagacgaccggcgccctagtgccagagcgcccggcgtacccggtgggactccccctacagcgccatctgctgttcggagcctggccagctgccaaggcggct

SEQ ID NO: 393301 - DNA, 122 bp, Homo sapiens
cagagcgcggctgttcctggcgagtcacgctgactcagcacattgcctctgcctccccgccgcgcccgcactccctggcccgccagccaacagcgccccacgagagccgcagcccccagcct

SEQ ID NO: 393302 - DNA, 122 bp, Homo sapiens
acagccgcctggtgtggatcctcggcagagggggcagccaccgccggcagaggagggtggcggggctgttggcggccacgctgctcaacttccttgtctgctttgggccctacaacgtgtcc

SEQ ID NO: 393303 - DNA, 122 bp, Homo sapiens
cccggttggtgagggagggagtcccaacccagggttatgggtggctggacacacaacacccgacactggacagataagactgacagcagttcagctgcatgtactcacggcctgaggcagga

SEQ ID NO: 393304 - DNA, 122 bp, Homo sapiens
gacgtatctatccccatccaactgcagacattgatttaaaaaggcaaattcccagtttcccgcattatgtacttcccccacctgactaccacactaccacatcctatcctgaactaactctg

SEQ ID NO: 393305 - DNA, 122 bp, Homo sapiens
cgcctcgggccgggccgagaatgttgacagatgcagagctgggctgggataggccggccgcgctagtaacaatttagaagcccgagcttagcaacagcacgtggtggcccggcccccgcgct

SEQ ID NO: 393306 - DNA, 122 bp, Homo sapiens
ttgtctaagaccaccgaagttgtccaaaggcctgataagtcacaaagaacgtttttagagcgcctccaggaggcttatcggatttacaccccttttgacccggcagctcccgaaaatagccg

SEQ ID NO: 393307 - DNA, 122 bp, Homo sapiens
tcccactcccgaagtggttacaccccaagtactgacgttttaagggacaagtttgacatccgcaaccccatgctttcacaggagaacacaatggcccttgaaaaagtgagaactgacccaca

SEQ ID NO: 393308 - DNA, 122 bp, Homo sapiens
gttccctcccgagcccagccaacagcaggaacctgtacggaagacgggaagggcccggtacgcgccgtttgcaaaccccgcagaaaccagcggcgccaccagaaggttccgtctgtggagaa

SEQ ID NO: 393309 - DNA, 122 bp, Homo sapiens
ctggaaaggaggacgtcagtgccgtcgaggagctcttcagcgctggtctgtactgtggggcgttttcgcctggcgtggggggctcttgggttctttctggtcttactgaagtggaatggcgc

SEQ ID NO: 393310 - DNA, 122 bp, Homo sapiens
acaatgggcccctgatggaaggtaagcccggctagcctctaagggctgtgccggctcccacgaacttccaaggccgaggacggtgccgagacccaacttccggtctcaagaaaacttggtga

SEQ ID NO: 393311 - DNA, 122 bp, Homo sapiens
gcttgcttggcctgcgcacccggacctagaagccgggacgagccggggcagagccaggcgcgcggaagtctgaaggtgccctccagacacggccccgatgactgaactacagcaagatgtgg

SEQ ID NO: 393312 - DNA, 122 bp, Homo sapiens
caaataggtgtgatttgaaatctaatgatcaaacagaacacaaggccctctctgtgtctgcgtaaccgacctgcccggcacaccggccctctctgtgtacgagtaacccacctgcccggcac

SEQ ID NO: 393313 - DNA, 122 bp, Homo sapiens
tgcgctcctcggaataatctccaacagcgtgcctagaagcacagctgcttttgtttcgggcgtcggtgcttcccagaatcccggtgcccggacccagccgccgaaccgaccccgccccgccg

SEQ ID NO: 393314 - DNA, 122 bp, Homo sapiens
tacgggccggggaaactcgagctggctttgcctcctacctttttgcagtccacccctctgcgctccagacagacataggaaccctcgccctccttggtagtacatcggaggcagcaccctcg

SEQ ID NO: 393315 - DNA, 122 bp, Homo sapiens
cgtgccgggcaggaccacgggccccgcgccaccatgccccggcagctccctcggcactcgcgggaccccaaggcgggctgctgcggcttccccaaacccaccgccaccccaccctgtctgac

SEQ ID NO: 393316 - DNA, 122 bp, Homo sapiens
tccaaacagtttagaatccagcttgttcttaatgccacagtcaagagaagatccataacccgccttggtcatctgcccttctgtgttcacaaccgttcagggcacaagttcttcggtctaac

SEQ ID NO: 393317 - DNA, 122 bp, Homo sapiens
cacgtgcgtgtgccgggtcgtgtgtttccgtgtgtgtgtgcacaagcacagacacgtgcacgtgtggagcatcccatctctgcatggggcacgcttgtgagtgtgcacccacatacacagag

SEQ ID NO: 393318 - DNA, 122 bp, Homo sapiens
tggccaaaaccttcagtttttaatgagaatttggccttcagttgattttctagctctgatcgcctggtgacctgataaatatcgaaagcctgttatgttttttttgttgttgtttttttttt

SEQ ID NO: 393319 - DNA, 122 bp, Homo sapiens
aggtgggcgtcgtacgtcgttacgcagcgcggttgctgggcacctcgactatcacctgaccgtagtaatatctcccgctacgcgcgttgtgaccaatgctgcatacaggagatgagggagga

SEQ ID NO: 393320 - DNA, 122 bp, Homo sapiens
tgatagatcctttcgtaacaccaagtattgtaccaggacctgcggctccgccccagaggccgccatcttcctgaccacccgaaaggccggacctactccccggtgcatcttgggatcagggc

SEQ ID NO: 393321 - DNA, 122 bp, Homo sapiens
ggtctgctggccttggaggccaagctcttctcccatcatccctggggggccctggggaggcgggcctggccacgtagatcctgagcagcagtgccctccaggatcctgaagcagtacagcca

SEQ ID NO: 393322 - DNA, 122 bp, Homo sapiens
cggaactctggggccacgtctccagcgccgcattcggcggcacacggaggcctgagaaggcgggaggggtcagtctctggcttcgagtagcagcaataccaggacaaccatagctgagtcat

SEQ ID NO: 393323 - DNA, 122 bp, Homo sapiens
caggactcattaaaaggctccccttaggggcccacctgtcctccctagggcctagcgggacgcggctgcggtcagaggagcaggaggaggtcccccgacatgcctgaggcaaaaccaggtgg

SEQ ID NO: 393324 - DNA, 122 bp, Homo sapiens
gagacgccggcggcgccgccacaggactgcgttctggaggccgagccggaacccgtgcggcggcgctgggaagagactgtgcccctgcagctcccctgtcaccggctccaaggagcgtcggg

SEQ ID NO: 393325 - DNA, 122 bp, Homo sapiens
ggtgctaggtctgcaaagggcagtgttcaaaatcaagccactgcgtggtgaaactagcaccgcaaaaccccaaatgctttgggtgttggttttacaaaggatttacactatgtcgtgggcat

SEQ ID NO: 393326 - DNA, 122 bp, Homo sapiens
cggacgaagcgaggagggaccgccgaggtgcgcgtctgtgcggctcagcctggcgggggacgcggggagaatgtggactgggtagagatgaacgagacttttctcagatgttggatatttgc

SEQ ID NO: 393327 - DNA, 122 bp, Homo sapiens
aatccagttatttgtgagtgggagatgtactatatcattaggtgtcattttcaccgaatacgttattatcagcaggtaataagaaatgtgcatcattacaaattctcatctggtattttgtg

SEQ ID NO: 393328 - DNA, 122 bp, Homo sapiens
ggcggcgcctcgcggggagggtcctccgtgctgggggcgaggccacccgaggcagctccccgcccgcccccaaccccgccccgctctcggagcctataaagggaggcgacccgcggcccgcc

SEQ ID NO: 393329 - DNA, 122 bp, Homo sapiens
cttctgtttcagagtcactagcaggactcttctggagctcctcaatctcagaatcactggcgggatgcttcccaacatcttcgttttctgagtcacttgcatgcccattaagaagttcctca

SEQ ID NO: 393330 - DNA, 122 bp, Homo sapiens
acccgcctccgcctcccaaagtgccgggattacaggcatgagccaccgcgcccggccctgcgcgtttttgtttgcataaacttaaaacgggaagaaatgtcaaaacacggtaacggaaatga

SEQ ID NO: 393331 - DNA, 122 bp, Homo sapiens
ccatttctctcgttcttttattcagctttctctctttctctcccttttgtgaatgggccgcggtgtctttgttctgtagagaagcgcccgtgtcgctgacttttgtgaaccagagaaggatc

SEQ ID NO: 393332 - DNA, 122 bp, Homo sapiens
tgaacctcctaagtgacaacttccgcatcatgagttccaaatggggcgaggtgagagggccggccacaatctctcccttgtgcgtccagccttatgccaaatcccgagtacacagacgtacc

SEQ ID NO: 393333 - DNA, 122 bp, Homo sapiens
tggtgcaggatgagcagtttggtctggggcttctcgctgttgaggtgcagttggcacatgcgccccagctccttaaaggcctcgttgatgtcacggacccgcagccgctcccgggcgttatt

SEQ ID NO: 393334 - DNA, 122 bp, Homo sapiens
aaaaagaaaaaaatagagcgagagtgcaccgggaggctgcagccccgggctggggaagcgcgggcggagggaagccaggtagagttgctcccggacaccctcctccgtacgcacacccactt

SEQ ID NO: 393335 - DNA, 122 bp, Homo sapiens
aggtatggttcacagcagttagaatgcagcctgttgtatttccaagaccatctgctgcagcgaatcatgtaaacagtttccaaaagacggaaagagagagaaagatgatagatattaaagtc

SEQ ID NO: 393336 - DNA, 122 bp, Homo sapiens
cagcagctgtcacgcatccttggagataagaccgagagggcgctagaaaggcccaaaaggcgtccccagaagagctctcctgttaggatggggacccatcagaccccgccccgccctgccca

SEQ ID NO: 393337 - DNA, 122 bp, Homo sapiens
tacagccaaactgccggctctcatcggctgtgggagcaggaggcccccaggggtaaatcccggagcctcgtctctgaagcctggcgcttgtgtctcagaaggtgcgggacccacagggacac

SEQ ID NO: 393338 - DNA, 122 bp, Homo sapiens
gaaggctcctgggcctttctggctctgggaatgaagcgtggaaaaccctccttaggcgggcgcagtgcttcaagtagccaagctctgacttccgagggaagaaaggaggccatgggcctctg

SEQ ID NO: 393339 - DNA, 122 bp, Homo sapiens
aattcaagaacaaagtaaaagccaccataagtcacatatattctttactatcatcatcttcgccacagaacttttgcacttgatctttcttttatttttctgataatttgtgtctgttcctc

SEQ ID NO: 393340 - DNA, 122 bp, Homo sapiens
tagaggtttatatggcaagggagaaatgtgactacatgtgagaaaacaggaattagtgagcggtaaggatgaggacttgttcaacaggcagcaggtggctggttaggcaatcatgatgggtg

SEQ ID NO: 393341 - DNA, 122 bp, Homo sapiens
ttgcagaggccactttcccgagggagctggttgcaagggcccggcgggatgggacctgggcggggcctcagagccgaggctcccgcgccggccgtggatttccaaccaagctgtgtggactg

SEQ ID NO: 393342 - DNA, 122 bp, Homo sapiens
cctgcaattcaccagccatcactgcctcaaggccacaaatctttgcaaagctttgaattccgcctgatccaaccttaatgcccccatttattaaggacaatatttaaaactcggcaagccag

SEQ ID NO: 393343 - DNA, 122 bp, Homo sapiens
tgttttccagcaacgtgaacggaactagaggttgttatcttaagggagatgactcagagacgaaaagccaaacgccccatgttctcactggtccataggagataaacacggaggggcggggc

SEQ ID NO: 393344 - DNA, 122 bp, Homo sapiens
catggaggaacaggcccacgatgacggtcagggtgtacatgcccagctgaccccccaggacggccatgtcttccatctccagaatcttcccagcaatcaggaacaggatgcccacaggtgca

SEQ ID NO: 393345 - DNA, 122 bp, Homo sapiens
tggcggggttcgggggctgggaccctgagccaggccccgcggggctggggtcgtgaagttcgcggccattgaccgctgcccgcgcgttgggaccccgtgcgtcgggcgtcgggacgcggggc

SEQ ID NO: 393346 - DNA, 122 bp, Homo sapiens
tgccagggcgacgagtgcacctctcgattggagacagggcattccgtggcgctccccaaacggtgacaaacggtgataggacagggacaggccaactgaacctcgcagagaaagcactgggc

SEQ ID NO: 393347 - DNA, 122 bp, Homo sapiens
ttttcaaaaggggctgaataaaggaagttgctggccaagatttattgatgcagatcaggtcggtgtttagctgttgccacaaacctctctaactaatgagcacagcatgaaatgcctggtga

SEQ ID NO: 393348 - DNA, 122 bp, Homo sapiens
tagagatgaactccagaaaggaacagcgacttgctgaaagtcacagggcaaaatgtggcgcgtctgtagtcaataaataatatatattgagtgcctgctcaaaatagacaaaattcctgtcc

SEQ ID NO: 393349 - DNA, 122 bp, Homo sapiens
aacccagggacactctctatggtgtctgggaatttggcatcccaaggcacagaacccgggcgtcccttaccagcggcacaggagcagttggggtccattgcaacccgaggcgagactagagt

SEQ ID NO: 393350 - DNA, 122 bp, Homo sapiens
cgcctgcccgatgcccattccgattacgcacgctattcgggctcctataatgattacctgcgggcggctcagatgcactctggctaccagcgccgcatgtagggccatcctgggatggggca

SEQ ID NO: 393351 - DNA, 122 bp, Homo sapiens
gaggaagctcccgcacccagggtttcccctggcgagtgaccgagcccctctgaccaaacgcgcgctcaggcgccttatggatcacacggttccaatggcccgggagacaagcaaacgtgcca

SEQ ID NO: 393352 - DNA, 122 bp, Homo sapiens
ccaccgcccaccgtgtgctcaggaggcgccccgcaacatggtgcaccccaatgtgatctgcgatggctgcaatgggcctgtggtaggaacccgctacaagtgcagcgtctgcccagactacg

SEQ ID NO: 393353 - DNA, 122 bp, Homo sapiens
gcgggggagctgactctgaggacaggaggaaaggccgggagagccgtgcgggcttgaaggcgacttagcgccacctttccgtctgctggtcgggccggccttccccagccctctggggctgg

SEQ ID NO: 393354 - DNA, 122 bp, Homo sapiens
ctggcccctcttgatcccgacaaagttgggcaggggcctctgctgggcaccgtgaaagtgcggggaccatcagtgcccacctccgcctggcaggtccggggagcagacagaaagacagacag

SEQ ID NO: 393355 - DNA, 122 bp, Homo sapiens
ggtttagagcctgcttggccacctcatgtcgtctgacttctgctctcactgcagctacaacgaactgcctctgggcatgcatgttgcccagacctgtcttgccaggctaacaaccacctctg

SEQ ID NO: 393356 - DNA, 122 bp, Homo sapiens
ggcgccacgcggaggtgcagctgcacctcggggatggggcggccaaggagccgagaggctcggcgtccaccagccggggctccctactcacgctgcactgcgaggaggcggcggcggcagcg

SEQ ID NO: 393357 - DNA, 122 bp, Homo sapiens
tgaatataaatggtgcacataagttcacaaacccaattacacagcacaaaatgatatccacgtggcttgacagctgttcatattagaaaaatctagggattctaatggactacatattggag

SEQ ID NO: 393358 - DNA, 122 bp, Homo sapiens
gtgctggcagatgccagttacctgatggccatggagaagagcaaggcgactccggccgcccgcgccagcaagaggaccgtcctgcccgatcccaggtaccagctgccccggcccgcgctggt

SEQ ID NO: 393359 - DNA, 122 bp, Homo sapiens
acccccgcgcctgttattaataacccagcgcctggaggcgaaagccccggtgggcgcagccgcaaagcccgcacgcggaataaataacaatgtcattaaatcgcgcccgagcgccagttcgg

SEQ ID NO: 393360 - DNA, 122 bp, Homo sapiens
cgcaggtggtaaaatccgggtaggaacaccagaatgccaatgatcagcactggaacggcccggtctgccccctggtggcagaaggaggcaaacacattagtaccgtaagagttacacatttt

SEQ ID NO: 393361 - DNA, 122 bp, Homo sapiens
gcgcgcggcgggcgcgagtcatcaattatgcaaggactcgggcggtgcggggggcgggcgcggggagcgctccaagatggcgcccaccgcagtcccgcccgccgcatcctcggcgcctttgc

SEQ ID NO: 393362 - DNA, 122 bp, Homo sapiens
ctaggctgggaattggtttcttccgtagggctttgctcacaaccgcgagtggggcggtgacgctcaagaccggtatctaggctatgttttctgttttctttatatatatgtatatataaaat

SEQ ID NO: 393363 - DNA, 122 bp, Homo sapiens
cttctctttctaacaccagtgcacacccgaggacctggggctcaaggatctctgacactgcggcaaacttcgagtatcagactcaacacgttccggtccggaggtgggcaagccctttagag

SEQ ID NO: 393364 - DNA, 122 bp, Homo sapiens
cccaagcagggctgggacgccactgataccatcgacgtacaacacgccgcaagcagccctcgaggaatggaaaactctcagactgctgtgtccacacgggttaataaaaatgctgaccccag

SEQ ID NO: 393365 - DNA, 122 bp, Homo sapiens
ctgggcatgaatattcatcgggggcgtggccccgccagcgcgcagggctccaagcagctgcgactagcggaaagcgcgcgccagctgcacgcagggaaacagttctcattttgtgtgctcgg

SEQ ID NO: 393366 - DNA, 122 bp, Homo sapiens
tgaacgaagagtaggggcgaggttcgcgtaggggcggagccctcaggggctgtcagagggcggagtttatgcccctgccccagagaaatacgcatcaggaggaagactgtttaaaagcaggc

SEQ ID NO: 393367 - DNA, 122 bp, Homo sapiens
ccaggcctgcgttagcatctgcagctgtgcttcttcaggccgccgcaacaccagccttcccgcactgctccaagacactgagcctggtgcatgctcaggaaattcaacaatttcaaaacatt

SEQ ID NO: 393368 - DNA, 122 bp, Homo sapiens
ccgcgcacccagttgccgcgtcgctgccactgctggccgggaccctgctgctgctgggggcgtccgctgctccctgagtgccccactccggagttatcctgctccccacctccgggcgtcct

SEQ ID NO: 393369 - DNA, 122 bp, Homo sapiens
acaacgaacagcgctcccacagtcctcttcgcctcccagagcccgggagtgaccctttttcgaccaagtgtctttgtaaagtgctgtctgttacactgaaaattcagttgtctttttggggg

SEQ ID NO: 393370 - DNA, 122 bp, Homo sapiens
ctaatgaatgacagccagacaatatctccaagtaatcagaataagagacattattgtatgcgctttaattatgaatggaggattatgaatatacagaggaaattattatttctgtgtgggaa

SEQ ID NO: 393371 - DNA, 122 bp, Homo sapiens
ccagcagcagggcaggaggcagcctgagagtcggcagccccgccttggagtctgagcactcgcgcccatccgtcaaccttgcagagcattgcaactttatgcctacgcataaaaactggagg

SEQ ID NO: 393372 - DNA, 122 bp, Homo sapiens
ggacttgtaaaagccccagatattattttctgccaaattctcctgaaaaccccaaattcacgggcggctgctggctacatcccatcgtcccatccctcgcaccgcccccacgctttctggcg

SEQ ID NO: 393373 - DNA, 122 bp, Homo sapiens
gccctcactcccagacctaactctcaccagtgcttgagtgcagccggaagtggccgtccccgccagatgccagccgataggacacgcgtgcagcctcgcccagatccgggtcccgggctacc

SEQ ID NO: 393374 - DNA, 122 bp, Homo sapiens
ctgttattttggtgcaaatttagctcattacaccatcaatctgattggaactgtgataggcgggtagccattagaaatcagcaaaattgttacattgatgaatttgttatcatcctgtgcca

SEQ ID NO: 393375 - DNA, 122 bp, Homo sapiens
cttgggactttacacatgggaaatgaatgatcaacttttccttcctaggtcatctcccatcggaataacagactttccgctctatagaagacaaaggacttgcttttctccagaaaaatatc

SEQ ID NO: 393376 - DNA, 122 bp, Homo sapiens
ttatccccaaagtcattccgaagattcatgggtaagggctttcagcggcctcctattccccgcagatgccagcctgcctggtggaacgcggcgctgctcctgcaggagtggacggcgttcca

SEQ ID NO: 393377 - DNA, 122 bp, Homo sapiens
tctcggcccagctcgccccttaaatagcctggctggctggagtcagcctaatttgtatgtcgacaacaccttttagatcccttgaggcctcttgggttcttcatgtaggaaattaccatgca

SEQ ID NO: 393378 - DNA, 122 bp, Homo sapiens
taattgctcaccacccactacaagctcagtgcgttagtaagaaagcggcttctcaggcctcgctggcttcctaggacaggaaatgcccgtggtggaggttgttctgcaggtcaaggttcgct

SEQ ID NO: 393379 - DNA, 122 bp, Homo sapiens
acagcctcgacttacctcctccacatattccgggcccaccggctgcgcatcagagcagcccgcgggagcttcctttgagcctccttgggtaggtgctccgggaccctctaatttaggttggg

SEQ ID NO: 393380 - DNA, 122 bp, Homo sapiens
ggaggcatggctttggaagacgtgagttcagtttaggacacaggaaaccataggtatctacgggactccaggaggggagggctggggcggggtgacagaggatgaacgtccccctcccacgc

SEQ ID NO: 393381 - DNA, 122 bp, Homo sapiens
tcccgggcattctgttgctagaggggctgtccgcttttctttgtggtgctctgcacaactcggtaagacccctcgtattgttatcttacccttccttgggaaaagccattttgcatcgattt

SEQ ID NO: 393382 - DNA, 122 bp, Homo sapiens
cctcaaccaccgccctcgggaaagtcctcgactgcctatcaaaaaacatttggcctgggacgtccgctggctgcactatcccttacagaatcagcaagggtgaaaagccaggaaagagatgc

SEQ ID NO: 393383 - DNA, 122 bp, Homo sapiens
aatgagaaataacagtttatcttgtctattactgagtatcaatgaaagcaataaggtgaacggaaaagtccatgaaaactccattttcagaataatgaggagacagatttaattcacagatc

SEQ ID NO: 393384 - DNA, 122 bp, Homo sapiens
gtctgcgagcggacactgccaccctccggccgcgcgcgggactgcaccggccccaccgcccggctctcccgcccgctcgctgcccgccaatgttcgctttgcgcccttcgctcaatgtgcgt

SEQ ID NO: 393385 - DNA, 122 bp, Homo sapiens
ctctccatactctgttctctagcggagaaccatgacaccactctaaatccagcctcaggtcgtcttaggctctctttcctgggtgacccaacactggaaatgaactttaccctctgaaagac

SEQ ID NO: 393386 - DNA, 122 bp, Homo sapiens
taaacgcggcatcgcagctggactacatttcccagaaaccattgaggctcttgctcctcccggcctaagggctctgactgcgagggaatgctgggaaatggagtctgggagcaggatacggg

SEQ ID NO: 393387 - DNA, 122 bp, Homo sapiens
gcacgcccacgttcatagcggccaagagacggcagcaactcaggtgtctgttggcagaggcgtggataaaccaaatgtggtccacccatacaacagaatattattcagccttaaaaaggaag

SEQ ID NO: 393388 - DNA, 122 bp, Homo sapiens
tcagcctcaccaacgtctgctcgttctcgctcttgagcgtctccaactgcgcgaaggtgtcgccctgggccaggaaccgccgcaccaacgactgcgggccacccagccccagtcagagccag

SEQ ID NO: 393389 - DNA, 122 bp, Homo sapiens
aagccagagcagttagcaaactctcccccagacagggcgactcggctgacgtttttgacccggccaggaggcaaagaccaaaacgtcagagcagtagccctgttactgaggagcgtcggcag

SEQ ID NO: 393390 - DNA, 122 bp, Homo sapiens
atatatgaagttactgaattcatttaatgttcttcataggtttttaacaagttaatcaggcgctacaaatacctggagaaaggttttgaagatgaagtaaaaaaggtatgagtaataatgta

SEQ ID NO: 393391 - DNA, 122 bp, Homo sapiens
agagtccttgctgggggttcggggagcgcttggaccccggcttctgggacgcgtcaggtacgtctccgagtccggcgtcgccggccagcgctgcctgggttcactcgggggcccgagctgag

SEQ ID NO: 393392 - DNA, 122 bp, Homo sapiens
ggagaacggcggtgcccttgagcacgtggagaactgcagtgccctttagtacatggagaacggcggtgcccttgagcacctggagaacggcagtgcccgtgagcacctggagaacagcggtg

SEQ ID NO: 393393 - DNA, 122 bp, Homo sapiens
ggtacagttgcacacagtggatcacacagatccgaagtctgaggcacagggcgcggtccgcgagtgggagcggctgcttgtgggcagggtggacgcggggccacgtcttggccggcgttttg

SEQ ID NO: 393394 - DNA, 122 bp, Homo sapiens
ccaccttgtacctgctggggatgctgggtgagtacccctcccaggtgtcctgcgaacacccgggctcgctccagtgcaaggaaggagttcccagttttacccaaggctgactctgggatcca

SEQ ID NO: 393395 - DNA, 122 bp, Homo sapiens
tgtctcaggttgagtgtccttttggggcggtttttccagagtccgtttctcatttgctttcgcccttcgaggagtatgatttccactatcctttctgtcccgatcaccccctcacccctgtt

SEQ ID NO: 393396 - DNA, 122 bp, Homo sapiens
accttgaaattctagtgtgaaaaagtgacctctgaagtctcacgcactcaactcgtttgacgaactcgtttgacgtgttctctcttgccctttgttgtctgttgtcttgagtctcatagaat

SEQ ID NO: 393397 - DNA, 122 bp, Homo sapiens
cccagaactgggctaccgtcgcgccccacccggcgaccgccgcccaccattcccggagcccgaccccaacccagctaccgtgcgcgggtcgtacccacccctcagcgctgcggccgccacgc

SEQ ID NO: 393398 - DNA, 122 bp, Homo sapiens
cgtgagcgcgttcgcgttcgaggtcccggctctaaggtgggggctgcacctccccctgcacgagcaggtgtgtaggattcaagagccagcgcaccacactgttctttctttctcacttctcc

SEQ ID NO: 393399 - DNA, 122 bp, Homo sapiens
gctttgctcttgtcccaccagtggactgcagccatgggaagtgacctgaagcagtggagccgaggaacagaatcagggcggtgagcaagatgccagctaggggctgaaagttgccagggcta

SEQ ID NO: 393400 - DNA, 122 bp, Homo sapiens
actcagggtccacgtgcggcgggtagtagccaaacttgatgaagatagggatggggaccccgaacttgaaccactctacgacatagggtgggggctgtcccgtcactgggtggatcacgtcg

SEQ ID NO: 393401 - DNA, 122 bp, Homo sapiens
gcgacttttttcccctgtcgccgcaggtttctcctgccccggcttcttgcccccaccgcccgagctttttgcccccaccgccgcggctatttgcggctatttgcacctgccaccgcggagtt

SEQ ID NO: 393402 - DNA, 122 bp, Homo sapiens
atagtaaaggtggctgtgatctggggagggccagaaactggagaggaatccaaggagaggcgatgcccacccgtgtgcctcctccaggaggcactttccaggttcccactacctggcctccc

SEQ ID NO: 393403 - DNA, 122 bp, Homo sapiens
ctctagaatttgtactaaaggtgggtggaaattccactcttagatccaggcaccctcaggcgtcagccctgagccctgtgctttgcaaacttctcaagctattattatgtaaaaatagatat

SEQ ID NO: 393404 - DNA, 122 bp, Homo sapiens
ccgcctcatcgactcagaatttgagaattggaaggcgccagaggcttcagtttacagatgcgaacattgaaatctggagagggcaggtgacttgtccagggtcacatagctaataggaggca

SEQ ID NO: 393405 - DNA, 122 bp, Homo sapiens
aagactctgtctcaaaacaaaaaaccaacatagttgcacatgctcagtaagggggatccacgcaagggtctgatagcatccacacccgctccaaccgtctattaatagacagtggtcaaggt

SEQ ID NO: 393406 - DNA, 122 bp, Homo sapiens
cctcctcctgggcgcaccctccctctcccatccttcagcctctgaagtcctgcccagctccggttcctgtttctgttaggacgaggcccttcagatcctctccagcaggtggactctgtcct

SEQ ID NO: 393407 - DNA, 122 bp, Homo sapiens
ctccgcatcagatcccaatgtaagagtgattccttcatctcaggggctacctcttgagcccgagttagctgggcagcctcaatcctcaggatgatggctttcactgatgtgggagtcaccaa

SEQ ID NO: 393408 - DNA, 122 bp, Homo sapiens
acttttctttagctctctcttattcttctcatgcaaagtatttaatgaaaatcatgtcagcgatttcattgatatttcacagcttttccctcagcagttagaagagatctggcacatagtag

SEQ ID NO: 393409 - DNA, 122 bp, Homo sapiens
cagtgccggagacatgaaatgctcccccaggttggagaaaccatcagaacactgggggctcggatgactgagtccttcagaataaaatgggctgaggaagcaggattcctgggttaaagccc

SEQ ID NO: 393410 - DNA, 122 bp, Homo sapiens
ggaggggggctgcctttccctgcaataccccgggaccgtcggtaaagcaggctttgtcatcgtctgcgttttcgccgcggcgctgtcctgtctcagctcctcctgactcagctgaagggggc

SEQ ID NO: 393411 - DNA, 122 bp, Homo sapiens
atgatgctcaggtaacgaacaacccctgcaactcagtggcttaaaggtccatttctcaagcgaattactgtggctgcagggagctttggcagtactccaccagttttcttcactccaggctg

SEQ ID NO: 393412 - DNA, 122 bp, Homo sapiens
agaaagatcaagaggcagagaagtagaaccagtttcatcatcgtactcaacttcttctgccgataggcatccaggctcattgaaatgtttcccccctcctcccatcctcctttctttctgtt

SEQ ID NO: 393413 - DNA, 122 bp, Homo sapiens
tcccccgccgcccccgccccgcccggccagctcgccaccctattggatccctcacggctccggctccacggccatgatgggcttggctcaatttagttttaaaaagcattggccactcggat

SEQ ID NO: 393414 - DNA, 122 bp, Homo sapiens
ggcgggacagagccgaccaatcaggcggctcggcagcggggcagaggtcagggggcgggccgaggggaagccaatgacaggctccaattggaggccggaccctggacctttccgggtctgag

SEQ ID NO: 393415 - DNA, 122 bp, Homo sapiens
aaaagggaaagtgcactgttgaaaggaaatttagggagagcctttgcaagccaccaaggacgttgcaaaattacacttataaatgggcatcagaggttctattaaccagtgggagcttcccc

SEQ ID NO: 393416 - DNA, 122 bp, Homo sapiens
aagtcagtgaatattagacagaggagggtttatggtgcgagattctccactctgggacaccggaagctctgaagacttcggaccagagcagcccttccgtgatggtgctggatcgacccctg

SEQ ID NO: 393417 - DNA, 122 bp, Homo sapiens
gggaagcagggagtgtctaggtccctcacccactcaggacgccaagcacaaggttgaggacgaagaaggacccaaagatgacaaggctcacaaagtacacccagggcagttcataccccatg

SEQ ID NO: 393418 - DNA, 122 bp, Homo sapiens
cacctgggctgagtctttttcccaccatcgcagggcgggaaccagcggagggggctggctcggatggggagaaaagcaactggagggcgccgaggggaagagggagcccggatctgtcaggg

SEQ ID NO: 393419 - DNA, 122 bp, Homo sapiens
gttcgtgttttaagagatgtgggaacggagcagagtggaacctgttgtttgtcactgtaacgtttctctgggttggctgcatcctagacagaattgagagaaccgggccatgagttcggagt

SEQ ID NO: 393420 - DNA, 122 bp, Homo sapiens
gttgtcttgtttactggtgaaaacaccgaggctcctcgggtgtgctggggctgacctggacgcatgctctggtctggctctaacgacccacagtgggaacctcatgcagacaacgccccagc

SEQ ID NO: 393421 - DNA, 122 bp, Homo sapiens
acaaaggttcaacacaagtgtgcatgggtgtgtgggtgcgcgtggatgcatgtgggtgcgcgtgggtgcatgtgggtgcgcgtgggaaggcagtactgaccacatgtgcgcttcatacccat

SEQ ID NO: 393422 - DNA, 122 bp, Homo sapiens
atggcaaccccaggcactttccaaggcaggcgggaatgagtgaaccgggccagcgggggccgaacatctgccgtgcccatcagggatccggctccgctacagctcctcactgccacgtgaga

SEQ ID NO: 393423 - DNA, 122 bp, Homo sapiens
aaaaaaaaaaaaaaaaaaaccctgtcattaaagatgagttccttctccagctcaggactgcgagtctaccttccgggtgtccgccgccagctcccggagtagcaggcctggggccaggattc

SEQ ID NO: 393424 - DNA, 122 bp, Homo sapiens
ctggatcaggacccctttccggtaacactgctacactagtgctgaagagacattgtccctcgttcatggaatttgcagtctaatggcagagagatggacaatctaatcttgtatcttgtata

SEQ ID NO: 393425 - DNA, 122 bp, Homo sapiens
tgaggagcgtctctgcccggccacccatcgtctgagatgtggggagcgcctctgccccgccgccccgtctgggatgtgaggaacgcctcagcccagccgcgaccctgtctgggaggtgagga

SEQ ID NO: 393426 - DNA, 122 bp, Homo sapiens
ggtgatccacccgcctccgcctccctaagtactgggattacaagtgtgagctaccacacccggcctgttagtaaatattttatcttctagttgaagcacagagagaagttgccaactcagaa

SEQ ID NO: 393427 - DNA, 122 bp, Homo sapiens
agtcccctctgtggccagagaaagaggctgggaggcgtcccgggggcctctgaggctgggcgatttggggtgccagagaccgctaaagcagcggcccactgcccaatttatgtgtgcgctaa

SEQ ID NO: 393428 - DNA, 122 bp, Homo sapiens
ttctgaggcaacgaatcactggcacggaagcttttcctggcgcgtttccagagaaccatgcgaactacaatgtccctcaccagaattcaacgtggcagagtccctgcatctgctccctgcct

SEQ ID NO: 393429 - DNA, 122 bp, Homo sapiens
atcctggcatctctacttctgaagatgccattccttttcctcagagggaatgggcttctccgcctccctctccaataggtgtggcaatcagctgtcttccagttccctttcactgcatcagc

SEQ ID NO: 393430 - DNA, 122 bp, Homo sapiens
aaaaggagctactactactcaattcaattctgactgactgatgctctgtgggaattcaagcgcaaggtgaccaatcttatgttttgcaagtgatgtcggaaactgggattttatgtaaaatc

SEQ ID NO: 393431 - DNA, 122 bp, Homo sapiens
atggctcagcaatgcagtaaggcccccgccccagctgtctttctgccccgctccatgtggcgatgatgcttgggctagctcccttcatggctgcaagacagctggagcttggcccacagtgg

SEQ ID NO: 393432 - DNA, 122 bp, Homo sapiens
gggctgcgggatctggggtttattttagtccggcgccaggtttacgacagactcggggggcggagcaacatcccaaacgagcaaacaatggtcattgacatctttttctctcgcccccccaa

SEQ ID NO: 393433 - DNA, 122 bp, Homo sapiens
ccgaatgaaggaggtcccattcctgacttgcaggagatccttgggactcacagttagacccggtaggatcatgttaccaataagatttttctgtggcacctcaaggtgaagttctttgagta

SEQ ID NO: 393434 - DNA, 122 bp, Homo sapiens
aagccgactcaccaggttctccaaggcagatcggtgcttaggtaccaggagtttaggagtcgtgcagcagaaaacctctttatagggcctgctacccctcccagcagaaagtgtaactgcca

SEQ ID NO: 393435 - DNA, 122 bp, Homo sapiens
atgcggccgctgagctgagcacgaccctctgccctcgccgtgaggtgatgctgagggaaccgccagcggcccggcccctctgccaagggcgaatttccgcgggccggcagcgagccaggcgc

SEQ ID NO: 393436 - DNA, 122 bp, Homo sapiens
cgagggcagcaccgcagcctctgccccagccccggccacccagggatcgatcggtacagtcgaggaagaccacccggcattctctgcccactttgccttccaggaaatgggcttttcaggaa

SEQ ID NO: 393437 - DNA, 122 bp, Homo sapiens
gcccatgtgttgagggtgacaaggaatgatttctttcatctaaccagagttcaacaaatgcgtcttgatcttcaaagaaaacacctgagagtccacaacaagggccataggatgaatgggaa

SEQ ID NO: 393438 - DNA, 122 bp, Homo sapiens
ggcttatctgtattttaaaaggaagccggacctatagtttacgtcagttctttgaccattcgttggagctccggttttcagcctctttccgggctacctggtagcaatttgaggctctgtca

SEQ ID NO: 393439 - DNA, 122 bp, Homo sapiens
ccagaagtaccctttcgaccaccctgctgtgacatctgccccacacctccaccagaccctcggctcctccagggcaaggcttttgccagagttcctttgaatatagctccaattcagcccct

SEQ ID NO: 393440 - DNA, 122 bp, Homo sapiens
gtgtggagatgcccgtgtgcctggggcgtggcctcctggagggaaccagtgcggagatgtcggtgtgcctggggcgtggcctcccggagggagtcagtgtggagatgtcggtgtgcctgggg

SEQ ID NO: 393441 - DNA, 122 bp, Homo sapiens
ttaatttatttattgagagagagggtctcactttgtcacccaggctggagtacagtgacacgatcacgagtcactgaagtctcaactgcctgtgctgaagtgatcctcccacctcagcctcc

SEQ ID NO: 393442 - DNA, 122 bp, Homo sapiens
gttaagtggagaactaatctccctttcttccactcatcccaattcccacaagagaggccacgtgtgtggtttccagatggcaaagtctcaccctgccctacagcaagaggggacccctgggg

SEQ ID NO: 393443 - DNA, 122 bp, Homo sapiens
gtgatggggactctccgctcttcgttgcgccccgcgggtggctgctctgcacctggtggacgccttccctgaagttcttgttcccttgaatacactcagggccaagcagattttcctccagg

SEQ ID NO: 393444 - DNA, 122 bp, Homo sapiens
gaagcctcctttctgccatggtctggcacatggaggtttactgaatacttgatgagtgaacggatgacagataggagaagatgaggatgacatgtggaagtgttctggccactcaggagata

SEQ ID NO: 393445 - DNA, 122 bp, Homo sapiens
ccccgtgctcagccccggtgcgcgctggtctgcaggagggtttcaccagactgctgaagccggggacagaagtgtcacgcagtttaccggaaagctagttactcaacggaaagcaccatctt

SEQ ID NO: 393446 - DNA, 122 bp, Homo sapiens
tcagtacctggaagattccataaagtcggggtgcttgagggcgtagggccgagaccgtcgcgggtactgaggcgcctccgtcgtctctcccactcgccgcccgctttccaagacatatgtcc

SEQ ID NO: 393447 - DNA, 122 bp, Homo sapiens
gcagccccctacagaccccgctgcgagtactggacctggccaactgtgccctgaaccacacggacatggccttcttggcagactgtgcccacgctgcccacctggaggtgctggacctcagt

SEQ ID NO: 393448 - DNA, 122 bp, Homo sapiens
ctcacagatccatctgtgcagaaacaacaactcaaactccaaacaccaggggagggaccacgtaattcccctggcttcagtgctgtaaacaataggcataaggacagatttctaaaccccaa

SEQ ID NO: 393449 - DNA, 122 bp, Homo sapiens
agatgtctgacagctaattcaggggaattactgctggaaacaacagtgcaggatgattaacggcaaaattctgcctccctctcttttttcttcaccaagagatgaaagcagaagtcttgctt

SEQ ID NO: 393450 - DNA, 122 bp, Homo sapiens
gagctggggtgtgggcgaggttcaggagggggttcctgggtgtcgcggaggggccggggacgggagagctttgtctgtggccttccatgcataggtgttttggaattctggatcccagttct

SEQ ID NO: 393451 - DNA, 122 bp, Homo sapiens
ctttagggatgagtcttaaccattcaaccacttccctgtctcaaggcagactcaccccgacgtattcggtcatcctgactcccataagccagggctccaggtcaatcctgaatccagcctcc

SEQ ID NO: 393452 - DNA, 122 bp, Homo sapiens
ggagtggagagtaagaaggcaggtccccggattgacaaaacaatctgggagaagtgcatgcgtgctttgcacgtccggcggagcgggagagcccgctcaacagcctagcggtagactcgggg

SEQ ID NO: 393453 - DNA, 122 bp, Homo sapiens
gggaacctgagggccagaggtgcgcaaaggggcccagcaaggacaccaaaacaagcaacacgcagcattgtgtcaaattagccctgccaggaaacagagaagaataaaggtggtctttactc

SEQ ID NO: 393454 - DNA, 122 bp, Homo sapiens
aagaagaaataagctaaagcactggccagccaccaaaggccaagtgtgagctagtgtgtccgtccagactccctgggagctgtgacccaggggcctttgggctcactcacaagctcctcccc

SEQ ID NO: 393455 - DNA, 122 bp, Homo sapiens
cgaacttctgacgtcaagtgatccacccgactcggcctctcaaagtgctgggattacaggcgtgggccgccgcacccggccatttgcttttgattttactggctcataggtggaagggactt

SEQ ID NO: 393456 - DNA, 122 bp, Homo sapiens
aaagggagcaggcgcagggggactggaaaggcagcatgcgctcgccaggagcaacctcggcgcccagggtctgaggctgcagccccagttcgccattgtgagccgccgccgggggagtccgc

SEQ ID NO: 393457 - DNA, 122 bp, Homo sapiens
tggagaagtcttcacactgctctttgtggaaggacggcctcccttcccgtgggcaaaccccggggctggagccctcccagctgcccagtggcttttgtgtgtgtgcagctttcagctcctgt

SEQ ID NO: 393458 - DNA, 122 bp, Homo sapiens
gcagccaccaccttcggctccggctgcagccgcgggagggcagcctcccccgcccacagccgcgctattgtacgccgcccggcaggcctgaccgcctagttcactggctcccctactcctcc

SEQ ID NO: 393459 - DNA, 122 bp, Homo sapiens
tattaataatatttatgaaaacaccaaaatacctagcacccaataaggtaaaattctcaacgttttcctccaaccaaaaaatatcaggcatgcaaaaaaaaaataggaaatatgacatagag

SEQ ID NO: 393460 - DNA, 122 bp, Homo sapiens
caggagccccctccagggagctctgggagcctctgtttacttggagacccatggaccctccgggggtcaaagatgagaggtcacccatggccaacaggcagcaaagctgggcaaattttctg

SEQ ID NO: 393461 - DNA, 122 bp, Homo sapiens
ggttgcggccacgctcgggaccgggccctgccagctccgggcccgcacgtgggcgaaccgcggccaccgtgagcccggcctcgcgacctccctccggggcccccatgatcgggggtgcgtgg

SEQ ID NO: 393462 - DNA, 122 bp, Homo sapiens
ccccaactttgcgcttgaagagacgaacagaaatgacattgggctggatttgctgaacaccgaacatgtgatcctccatggtaactagcttccgaggggtcctgtctgaagacctcacaatg

SEQ ID NO: 393463 - DNA, 122 bp, Homo sapiens
ttcggttgctcactgccctgagccgagctctgccctcctcctaggctaccagttagggatcggcagggaccacttcctgactaaggagctgcagcgatacatcgaagggctcaagaagcgcc

SEQ ID NO: 393464 - DNA, 122 bp, Homo sapiens
cccgcgatgcctccgggaggcacggccgccctctgctggacacgccgaggaggcgctccacgccagggtctcaacatcctcctgagaacagcccagcaatggggcaaataaacatcaaggac

SEQ ID NO: 393465 - DNA, 122 bp, Homo sapiens
ttcgcctcactttcctgggagaatggcgcaggagccccaagaaagccgggggggggtctccgaggtcggtcctccactcgatgctcctccgaagtagctgcgtgtccatcgggcgccggcag

SEQ ID NO: 393466 - DNA, 122 bp, Homo sapiens
attttcatgtgatgattcacactggcgtatcaggtctaaattgaaagtctgtatttgtatcgccttgtctctgtgtaagtgaggtacttttaactagtttgacatttatccttttagtcttt

SEQ ID NO: 393467 - DNA, 122 bp, Homo sapiens
cgatgacaccgccccgcggccacgtctagtccccgcggtcccgcccagaggcggccgcgccgactccgcccccgccgccatcttaggtgtgggcaactctggcttgggttggactagggaag

SEQ ID NO: 393468 - DNA, 122 bp, Homo sapiens
aggtcctaggtaggctctgaagaaagggaaatggccatactgactcatcagaagtctcagcgttcggttaaagtttaaggaagtccatttaccagagatgcgccagcctccaagctttaaag

SEQ ID NO: 393469 - DNA, 122 bp, Homo sapiens
cccaggccagttaggggtgtgggcctgcacggcagacagttatccctttctagtctggctcgtgggactctagagggagtcagtctgcaacagtaagtggtgagttcttctgtccagcgtca

SEQ ID NO: 393470 - DNA, 122 bp, Homo sapiens
actcatccctctgccagggactttgggtgcagggcttcatcaagccccagggccgcgtgccggatggtcaaggagggtgtgcaggtgaagtgggcacgtcttggcacagggcaccggggttt

SEQ ID NO: 393471 - DNA, 122 bp, Homo sapiens
ttggcgccccgggtcaggctgcgaggccgcaattatagtgggatggggcggccgcccacgcgccgcttggcggttcttacgagaactttgtttgtgacggcagtggtgatgtaaaatggggc

SEQ ID NO: 393472 - DNA, 122 bp, Homo sapiens
ccctcctgctccgtccccgcccctgtcctcgggcccggccagcgccgcggcctctggctccgcctccacacgggcccgcaagcaggcaccgcccccgactctgcccccagccccggctcggg

SEQ ID NO: 393473 - DNA, 122 bp, Homo sapiens
ctcgcctccaaaacccgaaaactgaggccctgggagccaggctgagagactcacaggtcccgccacagccccgccctctgtcggttctaaagggtaaagtctctctgccccgcccctacctc

SEQ ID NO: 393474 - DNA, 122 bp, Homo sapiens
ccggccgggccgggccgggccgggcggaaacaaaccgcggggtggggagcgaggtcaccacggggttgcttggtgacttctccggactggactccccggtgagcagcccctggcaccgaggc

SEQ ID NO: 393475 - DNA, 122 bp, Homo sapiens
gccttcgtccaggagcgctgccgctgacccaggctcaggagctgggggcccctgcacagacgcccaggtctcgggacaggcggcgactgcactcacggaagtacgctgagctctcccctgta

SEQ ID NO: 393476 - DNA, 122 bp, Homo sapiens
tcttggtgtttgcttctttcatttgttttactcattgctttgtttattcctggtagtgttcgactacagttatagagattacattctgtcctggtatggaaacctcagcagagatgagggac

SEQ ID NO: 393477 - DNA, 122 bp, Homo sapiens
aagctgagaggacccctgtcagccatcctcagaggatgcctgcgtttccaggcatggatccggcagtgctaaaggtaccagacctctcaccaagagtcacctggtgggcatgatcctcaacc

SEQ ID NO: 393478 - DNA, 122 bp, Homo sapiens
ggtctcacgtgagtacagactggagcctcctcaggaaggctggcccgcgctccaggcctgcgtggtcacgccgcgtcactacagttaacagctgggtgacacatattcttgcacagttctaa

SEQ ID NO: 393479 - DNA, 122 bp, Homo sapiens
gctgggagcggacgaagcgcgaagctggggtgggtacgcgtttggcccgggtttggatctcggaggggcaggcttgggggtgaggagactgactctggggccgggcatcgcgtggcagctcc

SEQ ID NO: 393480 - DNA, 122 bp, Homo sapiens
tcccgcacccacaagccccttgggctccaatcccttgaaacgtcggttaaccgcgtagggcgacccctagggattccactctttgaaatccccgtaagccccccgccaggtggccctgctcc

SEQ ID NO: 393481 - DNA, 122 bp, Homo sapiens
atattgactggggcggggtgaagggatgtgccacagctgtctgggataccatgctgcagacgaaagggaattaaggtggagggggtgtgctggccagctctgaggctctgctgccttgttcc

SEQ ID NO: 393482 - DNA, 122 bp, Homo sapiens
tgagaatgctgttattggggttgtgtgtgagtgcccgtcagccagtgatgcctcgggccacgctgtggggccacctcagtcctgcctgggtcctggtgccttggaccccacgtgcttgtggc

SEQ ID NO: 393483 - DNA, 122 bp, Homo sapiens
cagcctcactactctctgagaggtgggattttaacatgcaaaggcccactaacccgatcacgtctcacaacttcagctgattaatactttgttaaaacctagaccacgaaaacagacagagc

SEQ ID NO: 393484 - DNA, 122 bp, Homo sapiens
gttgggaggccaaggcttgcagatctcttgagggtcaggagttcaagacaaaattagccacgtgtggtggcgcatgcttgaaattccaactgcttgggaggctgaggcgggaggatcacttg

SEQ ID NO: 393485 - DNA, 122 bp, Homo sapiens
ctgcaggcctctctagcccttgcccaagctaaggtcccattgaaaccgggagcatctgggcgaacggggactccaagggacgggtgatagggttctttgttgagaagcagccgagcctgatg

SEQ ID NO: 393486 - DNA, 122 bp, Homo sapiens
gctggctgcagggggtatgggcagttggcacacatggactacgatgtccacatatgtgcccgtgagcctctgcttgggggaggagggctctgtgggagggaagatgagagggaaggctgagc

SEQ ID NO: 393487 - DNA, 122 bp, Homo sapiens
gccgtacttccagtcccttctcagagcctggtgttgtggctctcaagccctcccacatttcgggaactcagaaacgccgcccttttcctgaaatggaccctccgagtacgcgcaaccccttc

SEQ ID NO: 393488 - DNA, 122 bp, Homo sapiens
gacaactccaggggcgggtggggtcagaagctctggtgagacctcatggtcctccgtggccgcttagtccctcatcgtaggggaaggggttaagtaggaggggtgcccccaggtccggatgc

SEQ ID NO: 393489 - DNA, 122 bp, Homo sapiens
taccttcacaatgtgccccgtgttctgaatatatacctgctgtcagattctgtctattcacgaatagcaatgcttcacattctatggccataagaagatttattttaaaacaatagagaaag

SEQ ID NO: 393490 - DNA, 122 bp, Homo sapiens
ctgccccggagatgaatcatccctttgtccagcgtgtccacacggtacatgctccaggcccgttagttacttagtagccatctcagtttttcggatgacgtcgaggtatggcagggtttgtg

SEQ ID NO: 393491 - DNA, 122 bp, Homo sapiens
cgggtttggcggcgcggagaaagcgccggaaaacacagcagcgctccgtgacgtcacttccgcctccagcctcaaacctggaggagcgctcgggaactgcaacctcagccgagctgaacaac

SEQ ID NO: 393492 - DNA, 122 bp, Homo sapiens
ggagaggcgggactaggggtaccgaggggggcgcgtcgctgggggtccccgcgaagttggcgcccacgcgcgctggggcgggtctcgaacgccggcacttgcgcggggcgcggccggcaatc

SEQ ID NO: 393493 - DNA, 122 bp, Homo sapiens
ggttggttggcagcactgtgtaattaaataggcttttgtggattggcctggggacttagccgccgtatataaatgttattcgagtgactgtacagcattgtttccatgcagaaaagccctcg

SEQ ID NO: 393494 - DNA, 122 bp, Homo sapiens
acttttaaaaaattaagtttatactcacatctctgttacctcccacaacaataactagatcgtgagctccttgggaaaaagtctgggtctcgggggccaaatttttttccagtgcctcatgt

SEQ ID NO: 393495 - DNA, 122 bp, Homo sapiens
gaaacacagaacagtcagtgacgcgcactgtccccctcccccacacccacccgctctttccgccccccaccccagccaccctagcagggcacccgaaccgctcaggctgaacttagttccac

SEQ ID NO: 393496 - DNA, 122 bp, Homo sapiens
ctcgatttcatgacctcatgatccactcgcctctgcttcccaaagtgctaggattacaggcgtgagccacggtgcccagctcacctactggttttaaagagggaactctgggggcagtgtgg

SEQ ID NO: 393497 - DNA, 122 bp, Homo sapiens
gggacttccagcgcctggcctggacagccgagtgtcatcggacttcctgagaaatacaaccggaagcaaattgcaaaccccgttacaaaatccgaatcattgagagaagggcagtaggggag

SEQ ID NO: 393498 - DNA, 122 bp, Homo sapiens
aagcaagaaccaggccaggagccccagggagctgccgctctgggacgccatggatactgccggcgacctcagcctccgtcgtggcgccgcctcgcagcggtttccacgccggccatgggttc

SEQ ID NO: 393499 - DNA, 122 bp, Homo sapiens
gctcctgacgcctctatgcctgtgcaaagcaacctgctctctgctgcatggtcttgacgccgccctgcggcctgtgtctcaccctggtgtctagaagaaagcagcgtgggcagcagtgggga

SEQ ID NO: 393500 - DNA, 122 bp, Homo sapiens
ccagcccacccctgtggccccaagaaggctctgcgacaaaatatccatgagtgccgcccacgaaggcattaaaaccaacgaccttctcaaaacttaagctgtcacaggacatttcaaagggt

SEQ ID NO: 393501 - DNA, 122 bp, Homo sapiens
ctccctccccctctcttccccacctctcctcacccgcccccccaaaagcggcccctgggccgcagggacccccccagacattttttccaattgtcgggaatgatagaggaggatctggggat

SEQ ID NO: 393502 - DNA, 122 bp, Homo sapiens
cggcccgatgcacgtcactctagggttctcagctgagttcgcccgcctagttctttggttcgcgtctccgcccgtgttgttttctgggtttccttctcgcccgcctacctcgctccctgctg

SEQ ID NO: 393503 - DNA, 122 bp, Homo sapiens
atcgggtctatgggagaattgggcacctttcagcctcacgggggaagctgtaagggtgggcgcccttccccccctctacacaagcgcactcttaggatgtgggacgggcggcagaggagagc

SEQ ID NO: 393504 - DNA, 122 bp, Homo sapiens
gccgcggagcccgacgggagttgtagtccaggtccgcgaggtcgcgggccgaggaccaggcgcgggagcgggagcgggcgactggccgggccctcccggtctcggcagccacttctagctcc

SEQ ID NO: 393505 - DNA, 122 bp, Homo sapiens
gttcgctgggattgcatctttcgtttcattaacctttatagaagtgcagggtggggctttcgctgatataggacatctctgaagactctagtttcctgtccatgggaaaaaagtctggttgc

SEQ ID NO: 393506 - DNA, 122 bp, Homo sapiens
aggccaggaggcccttgttggatgctctggcgggcggcactgggacacggccattgcacccggccctggacacagggcggccaccgcatccggccctggacacagggtggccagggacttgg

SEQ ID NO: 393507 - DNA, 122 bp, Homo sapiens
gctttattttcttcataacactcactttctgctgtcttcttgctaatttgtctctgtctccgccacagaatataagctctctgagagcagagaccttgtctgccatgttgatcactagctgc

SEQ ID NO: 393508 - DNA, 122 bp, Homo sapiens
tctgccccagctgtcacttagcacagaacactcaccttcactgcagcggggccacaggcgcgcccgagcagtggaagtgcacgttctgccacttgccgtcgcggcggtgccacacgcgggtc

SEQ ID NO: 393509 - DNA, 122 bp, Homo sapiens
agtaccccaggggactcctacaatttcctcagtctccagggagatgcctcctgaatgaaacgatctaagaaaagaaacatacacaaatacacactccttcctgttctctctcaagcaccaga

SEQ ID NO: 393510 - DNA, 122 bp, Homo sapiens
gacttgcattttataacatgtcaaaaatctgatttatatggctgcagtgtgcagtgtgggcgaggtcacgccagaccaaggtgtgcacagaggtcaggcactggccacgggagccacccctt

SEQ ID NO: 393511 - DNA, 122 bp, Homo sapiens
ctccccctcttggttgcctgtcactgtttcttcctgcatcccgtggggtttcttcgctctcgtcaccttctgggagaagaaccctggggaagaagccaaatgcggatggacagcaggataca

SEQ ID NO: 393512 - DNA, 122 bp, Homo sapiens
tttgttgcctaggttccaattctggtaccctggttcctgaccctgccagagttctggttccggaaggccccccacaggtgccttgggcctagctctcacctgggcccagggcaacactgaag

SEQ ID NO: 393513 - DNA, 122 bp, Homo sapiens
cggattgaactcttcatcttttcgtgtcggcgtcctgcacagggccatcccatcactaagcgcgccacaaactcagcccagtattgacgcccacgagtcgcttgtaaagaccgtctgtgacg

SEQ ID NO: 393514 - DNA, 122 bp, Homo sapiens
ttaatcagctagcaagagcaaatagctgtgtattcttgtcagttctcttgacctgagggtcggggagacataaaactgtggtccctgtatagtctctagactgtttccccacagcctttgaa

SEQ ID NO: 393515 - DNA, 122 bp, Homo sapiens
ggtcaccttcgagtcagtcggcagctccctgggcctcactctgaagagcctgcgggagcacgaacacttccccactgagttgtctgtctgtggcctctgggaggctgtctcctttctggcag

SEQ ID NO: 393516 - DNA, 122 bp, Homo sapiens
gagaaaggaatttgtccagagcatcaggaaagcagccagaggaagtccccagggaccaggcgtggggccctaagccacactgcagctgcagggaggagagtgagcccagcttgtgctgctgc

SEQ ID NO: 393517 - DNA, 122 bp, Homo sapiens
gcgctcgggcgcggccggttgggggcacggcctagctccgggtgcgggcggggctggaggcggggccggccaccgcccggttcccgccctcgctctcctcccccagcgatcaggccccgccc

SEQ ID NO: 393518 - DNA, 122 bp, Homo sapiens
aactgaggagtgtctctgcccgaccgccaccccgtctgggaggtgaggaccgtctctgcccggctgccctgcctgagaagtcaggagctcctccgcatggccgccgccacatctgagaagtg

SEQ ID NO: 393519 - DNA, 122 bp, Homo sapiens
accgcggctgcgggctgcgcttgcgggccagctggagatacgggtgggcgtgggcttggccggccctgcactcggagcagccggccagccctgccggcgccgggcaatgaggggcttagcac

SEQ ID NO: 393520 - DNA, 122 bp, Homo sapiens
aaggtctgcagcttcactcctgtaagccaccgagactgcgaacactccagaaagaatgaacgcctccagacgcgcttccttaagacttgtaacactcctcgcgaggatctccaggttccctc

SEQ ID NO: 393521 - DNA, 122 bp, Homo sapiens
taaccacgtagtccttcgccgcattggggcaaaataatcccttcatttttgtgaaggtaccgtggaaaatatttcatttttcttctcaccggagcaattgtaaatgctatgcggtaagagga

SEQ ID NO: 393522 - DNA, 122 bp, Homo sapiens
caaggtctcagctggaaataaggatcttacttggaactagagcgaaagccacctttgttacgccttagcaaacaacgtggctgcattctgtccatgccctagagataccacgccagggtgtc

SEQ ID NO: 393523 - DNA, 122 bp, Homo sapiens
ctaacgtccagatcagtggagagaaacgcagatttaggaccctgaggagtctttttcacccgtttcccgtcactcgctcaggcgcgccgagggcagtccttgtggggtcctcgtggccagcc

SEQ ID NO: 393524 - DNA, 122 bp, Homo sapiens
agcagcccggtgcgcggggcgcgcctgccggacgccatcttcgcctccgagcccccgggccgccgcgctcgccctgtcccgctttgcccagcccgctccgaccaagcgcccagggcagaggg

SEQ ID NO: 393525 - DNA, 122 bp, Homo sapiens
tgcctcaccagttctaacggaaatgggtcgaatggccagaaccaaggtcctctccccacccgctaatctctctgactgagttcccaggctctgtgagcagcatcgccacctacctgggagct

SEQ ID NO: 393526 - DNA, 122 bp, Homo sapiens
gggcctggcctgccgggttctcctgggggccctcttggacctggtggtccagggggcccccgcaggcctgctttcccgcgccggcccacctctcccttggcgcctggcgggaaggggggcac

SEQ ID NO: 393527 - DNA, 122 bp, Homo sapiens
caaagcaatttttaaaaacttttccaaagtccaaatagcagcaggttctggcttgctgggcgcaaagcttctacctcccagtgcgccccagcccgcaatggatagccgggcctgtccggggc

SEQ ID NO: 393528 - DNA, 122 bp, Homo sapiens
ctggagggcatgctgctagccaagtctacaggggtttcactttctatcttcaggcctccacgaggctcttcagcagctgccttctcagcctttttgggttgttttttgcctacagttcttct

SEQ ID NO: 393529 - DNA, 122 bp, Homo sapiens
caccatactatcccagacccactcagcccctggcacccactgatttgttttctatctctacggatttgctatttgggacatttaaatggaatcatatgactatgtggtcttttgtgactggc

SEQ ID NO: 393530 - DNA, 122 bp, Homo sapiens
tgtaccctctccgagtggtcggtgtgagtctcagtctgcagtcttcggatggaccctttccgagtggtcggtgtgagtctcagtctgcagtcttctgatgtaccctttccgagtggtcggtg

SEQ ID NO: 393531 - DNA, 122 bp, Homo sapiens
gtgcaggctcgggctggggagcgggcctgcggctgcccagctgctaaaggacttcctactcgtgcaccgccgccggctccagggcaaaccccacgccatttagaaatgctggaagtttctgt

SEQ ID NO: 393532 - DNA, 122 bp, Homo sapiens
gagagctggctggaagacacgtaccccctgaagaccgagagagaggccgtccgggtactgcgtagcagttacatcagactgagacacgtcctgtttacaggagactataaaacccctgcccc

SEQ ID NO: 393533 - DNA, 122 bp, Homo sapiens
ggcccagctgtggccgtcagcggctgtagctttgactttttctttgtacttcttggagcacgtaaatctgttacaatgaacatgtcatttttatagtcttgtaatttttagaataattgttt

SEQ ID NO: 393534 - DNA, 122 bp, Homo sapiens
tggcaggcggcgcaccctttgttgatgccaagcggtctcgaggcgcgtttatgcgtgtctcgtgttcccaggctggggtcggactgtccccaagcctttggggtcgtgccaggagcctcttt

SEQ ID NO: 393535 - DNA, 122 bp, Homo sapiens
ggagcaaagacgtttcccgccggcgggagctgtggctgtgattgagagaggggttagaggcgggtcccagcgctgccgcaccatggcggaccagctttatctggaaaatatagacgagttcg

SEQ ID NO: 393536 - DNA, 122 bp, Homo sapiens
cccgcccgggaccgcccagaggtcccggactaggggcggactaggggccgctctgcctcccgccccctagtggttgtggccgctctgtcaccacggctcccggggcctctgtcggctccact

SEQ ID NO: 393537 - DNA, 122 bp, Homo sapiens
cctattgtaaccttagggattcagttctggcctagggtgcaaaatggaaggaatccccaacgcaaagcagaataaggagacttgcaatagttaagcgcattttatttcaatagtgttaacaa

SEQ ID NO: 393538 - DNA, 122 bp, Homo sapiens
cttggggggacagacgctggccagcgagagtctgaatggcagtgccttgtggggtgcaggcgtcactgccagcagaaaaatcagcaagatgtttggaaggtgacaccctctgaagagtctgg

SEQ ID NO: 393539 - DNA, 122 bp, Homo sapiens
gtttgaaaattgtatttttgtatgtggcatggcagaatgaaaattagatctagctaatctcggtagatgtcattacaacctggaaaataaatcaccctaagtgacacaaattgaagcatgta

SEQ ID NO: 393540 - DNA, 122 bp, Homo sapiens
tccctgcgtccccttagcttttccctggtcactgtctgggtcccacccgtcagtgctggacgcacgggaaccagcatgagccgggcgggcacgcagctgctggtgaacaggtcccaggggct

SEQ ID NO: 393541 - DNA, 122 bp, Homo sapiens
ggatgtctacaaccttgagaatttcacatgcaggtgggaattttcccatgtgggaattcacgtgagttctcagaaggccagcagatcaccctcagctgccatccctacaaataaagttcagg

SEQ ID NO: 393542 - DNA, 122 bp, Homo sapiens
aagcccgacagtgccctgagcaggtgccggggagtctcacaaagcacagaatccgggtcccggagtccccagagtccagcttcttgccagggaaatctctttggagattgctgagtgctttt

SEQ ID NO: 393543 - DNA, 122 bp, Homo sapiens
tcttaaaataatgtgggtggctcttaaaagagcctttgggttctttccaaattggcctcccggaaagctctttacttcttagatgtggcctttctaacattaacttcatgatgttgggtcaa

SEQ ID NO: 393544 - DNA, 122 bp, Homo sapiens
tgacagtggaaggcaaagggtaagaaagcaccttcttcacaaggtggcaggagagagaagcgcaaaggaggaacttccagacacttataaaaccatcagctctcatgagaactcactatgat

SEQ ID NO: 393545 - DNA, 122 bp, Homo sapiens
atggtgactgctgtgtgcacacaggcccgcgtggtgtcgcagagcacacggcgttgtgtgcgtggcacgtgttgttacgctgtgacttttttacacttaatttcccatctaatactggagac

SEQ ID NO: 393546 - DNA, 122 bp, Homo sapiens
tagttgacacacatctgctggcacacaccggcaatctggcactcatctgtgtccacacagcggtgcggatcatcctccgctggccggaaacccaggcgacagtggcagctgtagccttgtgg

SEQ ID NO: 393547 - DNA, 122 bp, Homo sapiens
cgagcccacggagcccacgaggccgtgctcgggggtgggattgggggatccggacctagacggtcgtgcgcggggcgggggtgggctctggccctgactcctgcgcccggtgtgggaaggtg

SEQ ID NO: 393548 - DNA, 122 bp, Homo sapiens
tttccctggggatggagctgggtgccggtgcaggcatcggaggagcggtgccggggaacccgcctcctcacctcttgcccctagcacggggcggtgactccagagctgggagcctggcagcg

SEQ ID NO: 393549 - DNA, 122 bp, Homo sapiens
gaaatattactaagcttttgtttaaattttttccagttctagcttttcagagtaagttaccgtttatagcatgtaagttatgcttctgggtcagtggttaatatatgtgggtttcctgaatg

SEQ ID NO: 393550 - DNA, 122 bp, Homo sapiens
cagaggaggaagtaacagcttggtttgtcacaaacagaactatctgtattcttactacctcggaatatcctagaaggagttattaattcactgcaaagggaaactgtaatccatatgttagg

SEQ ID NO: 393551 - DNA, 122 bp, Homo sapiens
tcccttaaaaatgtgaaaactattcttagctcacaagttgtgtgaaaacagtctgtagttcggatttggcctgtggcccatagtttaccagaccctaatctcagtagaccggttaggtctgt

SEQ ID NO: 393552 - DNA, 122 bp, Homo sapiens
tcttttacaatggaggatactgaggtccagataagttcagtaacttgccaaccagtaaagcggtcatgtccacacccaaatatctgacttataaactatttctttccaccgtattacacaac

SEQ ID NO: 393553 - DNA, 122 bp, Homo sapiens
cctgggcgataagagcaaaactccgtctcaaaacaaacaaaatcccagcgtagtggctcccgcctgtaatcccagctactcaggagactagcctgggcaacacagggagaacctgtctctta

SEQ ID NO: 393554 - DNA, 122 bp, Homo sapiens
gccatcggcggggcagtcgcgggatgcgcccgggagccacagcctgaggtgggtgagccccgccgggccgggcgggccgcggcgagtcggggaaggggacgcgggggcgcggggcctggccc

SEQ ID NO: 393555 - DNA, 122 bp, Homo sapiens
gcagctctcccccatagctgaattcctctcttttgggtatttgcccagaagtgggattgccgggctgtatggggctctatttttagttttggagggacctccagactgttctcccagcggtg

SEQ ID NO: 393556 - DNA, 122 bp, Homo sapiens
cccccacgtgggcctcggccacaactgccccccgatactcacgctttgtccaccagctcgcgcaccttccacatgttcaacatcgtgccccgcgcgggacggtccgccgcctccctctcctg

SEQ ID NO: 393557 - DNA, 122 bp, Homo sapiens
ggggtccctgggaccccctccccacagggttatggagcgagtgcagctgtgactacactgcgcaaaaggcgggggtggggggcgcaaatcaaaaagcaaactttgccgcgcgggtggagacc

SEQ ID NO: 393558 - DNA, 122 bp, Homo sapiens
tagaacagaggaaaacaaaagttggagactccatatccttcatctcagtaaggtcatggacgtcccctcagggctctctggagaaagtccattgtcaacatacttgtgtactgtcagtggga

SEQ ID NO: 393559 - DNA, 122 bp, Homo sapiens
gagcaacacagagaactagtaagatgatgattgtgtatctgcaggcagataaaagcgttacggataaaaacaacaacaaagaaaacaatttggcagatgggggaggcaaagattttccccca

SEQ ID NO: 393560 - DNA, 122 bp, Homo sapiens
ggcggatcacgccccccacggcgcccgtcagccccttctgctcatggccccgcgatgccacgtcacagatggtctgagctgtatccaagatgccctgtggaagccagaggtcagggcggggt

SEQ ID NO: 393561 - DNA, 122 bp, Homo sapiens
cagcgagggagggcagcgggggaagcgggcgggaggggaccgcgggggcccggcgggaggcgcggagatgcagactggacagcggggagcgcagaaacttcccagccccaggacgaagccca

SEQ ID NO: 393562 - DNA, 122 bp, Homo sapiens
gtgagactccatctcaaaacaaaacaaaacaacaaaacaaacaaaaaccacggtatatagcggcacatgacatgattctaaattgatatagccaaatattcttgtcttaagtcattctcttg

SEQ ID NO: 393563 - DNA, 122 bp, Homo sapiens
tgtcttcactctccaagaactcattaaatcctttcttgatgctattttcattctgtggttcgaatatcagagtaaggagtgccataaaattgtccccagcaggagatttctttcgtgaatcc

SEQ ID NO: 393564 - DNA, 122 bp, Homo sapiens
cccaaagttgaatttgttcagtggaaaagaaagtaagcttgcttctgtttccgcagctgccgtttgactctggggatacagtcccgcccaaatgcaggtcttgcaacctgctcgggaggtgg

SEQ ID NO: 393565 - DNA, 122 bp, Homo sapiens
gtctatctaggccggcctccgagggcatggagggagtgggtgcggttgtgaaatgtagtgcgctcaatagtttcctggtgaagtttattttaaaatccgcaccgaagaggaagacgaggacc

SEQ ID NO: 393566 - DNA, 122 bp, Homo sapiens
atatttagctccgaagggatttggaggggttcaggtgggtatgattcatagtatcaattgcggaattcactgtgcttgtaggaaatagtattctgatcttatctgtgaagcttgggcaacat

SEQ ID NO: 393567 - DNA, 122 bp, Homo sapiens
tttctgagtcttccacgcggtgggggcgaaggaggatggagctagaacgaagcctcagcgcgtgccccgcacaaacatggcagcattcccagcagccctaaaccgcccgacgcgagcgcgcg

SEQ ID NO: 393568 - DNA, 122 bp, Homo sapiens
ccagtcacctgacaggtgggttgactgttcttccctcaaggcctccctgcctgtgttccacgtcgcaactcgaagggcggcttggcagttcctgctgacatccccgcccggcccagctttgg

SEQ ID NO: 393569 - DNA, 122 bp, Homo sapiens
ccatctaggcaggctacctgagctctctgtgctcccagagtgggtgcctcacgcccggggcgccccgtggagtctccgcgggccccgcccctgctccgcccttccgccaccatccattcctc

SEQ ID NO: 393570 - DNA, 122 bp, Homo sapiens
agatcaggggtactctctgagccctgttcccacaggtggaggggaatggccccctgggggcgctggaagggtgaaacagccacgctccctgcaggatcccagtgacagcatcccctgcctcc

SEQ ID NO: 393571 - DNA, 122 bp, Homo sapiens
cctcccctggaatccttggagagggagcaggtgctgggatccctcccctgccctccctcccgtcacccgcctccaggctgcctggggcttcacccggagcctcctgaccactcccgaaggct

SEQ ID NO: 393572 - DNA, 122 bp, Homo sapiens
ataagtgtccaggtttttaacctgatagtgactgaagatccgaagtcatttccctcctttcggctatcaagaagttaactcatacattcattcattcatttacttgttaacttagtcaacaa

SEQ ID NO: 393573 - DNA, 122 bp, Homo sapiens
atgaatactgcaggcctttcaaagtgaagtgttcatatgtgtattttaggtctagggcttcgccaagtgcagaaagacttggctccctgaggttattttcctatccaggggtttttcaaact

SEQ ID NO: 393574 - DNA, 122 bp, Homo sapiens
caggggcatctcggttccggggccaggctgggggggatgagggatgaggggtgagggggacgcttaccacaggcaggcccgacctactcggtagttctcaggagagacgtgcgagaccgaca

SEQ ID NO: 393575 - DNA, 122 bp, Homo sapiens
gaagtccttggggatctgcatggtattttgtggccaatgtgctgacatttccagagtgagcgtataatctttctaggtggagtggccaacgcttgtaaacaaaggggaggggcaacagaggg

SEQ ID NO: 393576 - DNA, 122 bp, Homo sapiens
ggttcctggtgttggaacagaatcagcataagactttgggcttctctaagaccttctttccgttcagtgaggaatttgtattaggtgctgcactcacagtgccctgctgttcagaaacgtga

SEQ ID NO: 393577 - DNA, 122 bp, Homo sapiens
acagacctgttgggacggattttcgctacttgtctatgaaactgacgaaccatcccaaaacggcgggtgccgactacacccccagagccaagagctgtggcgtccccggacccgctggcgtg

SEQ ID NO: 393578 - DNA, 122 bp, Homo sapiens
tgcggggcagccacccgcggacgcaccgagcccggggggcgtggccgcccgctgagccggcgagggctcgggcagccctgacgtcacaaccgcacccgcgcaccctccaccgcgaggtattt

SEQ ID NO: 393579 - DNA, 122 bp, Homo sapiens
caaagtgggcgtggccggacatgtttctcttgacctatcttccacatcatcaagctgttacgggcgaaaccttggtctgaaacatgcggccagagaaataaatctcaggatccggcaggtgt

SEQ ID NO: 393580 - DNA, 122 bp, Homo sapiens
cgcgggcgccatcttggctgcagcatcacctaagagactcggtggagggcgggggcggggcggctccaggcggggccggcacgaggcggggcggggccaacgccggctctgggcgggctctg

SEQ ID NO: 393581 - DNA, 122 bp, Homo sapiens
cacaaacagtactccgtggtattcgactatgaggtttactcaaaatgtcggtttgtgtcccgatattaaaagggagctctctccaagatccaagggtgggctccttactagatctttagact

SEQ ID NO: 393582 - DNA, 122 bp, Homo sapiens
tcccccaccctctgcagtctacgctcgccctggagggggtgcttcctgggctggggcccccgctggggatggcagcagcagcggcggggcccgggcttgggggctccctcgggggcgcactg

SEQ ID NO: 393583 - DNA, 122 bp, Homo sapiens
acaacgggggtcccgggaggcgacagcgggggcgacaatgggggtcccgggaggcgacagcggggggcggcagcgggggtcccgggaggcgacagcgggggcgacaatgggggtgtcctccc

SEQ ID NO: 393584 - DNA, 122 bp, Homo sapiens
agagggcctgagggcagtggcaactcgcattgcattggagggaggccttggcagggcccacggggagaggctagagagcctcccaggtgcggggcaaggcatgggctatgcttgggggcaga

SEQ ID NO: 393585 - DNA, 122 bp, Homo sapiens
aatttcaacacgtctgggtgatggatagagacgaagggccgcggcgggtgccccggcctgcgcgctcgcggccgggtgcgcgccccccgccctcccgggcctccgcaggcgccggacgcccc

SEQ ID NO: 393586 - DNA, 122 bp, Homo sapiens
caggcaacgacccccagctctttgctacagggatcgggagaggactaccctggggctgggcggggagggggatgttgggaacaggaattggagatggaatttctgcgcccgcagagcaggga

SEQ ID NO: 393587 - DNA, 122 bp, Homo sapiens
ctggagcaggataaggagggtaagggcggacgaagacgtaccgacactgactgtgagcagcgcttccaccagcccgtagctactggaaggtacacacggcggccttacggtgcccagcagcg

SEQ ID NO: 393588 - DNA, 122 bp, Homo sapiens
ctcaggctcgcgtaagggatcccaggtctccgaatttccgacgtgggtgcctcaggctcgcgtaagggatcccaggtctccgaatttccatttccgacgtggggtgcctcaggctcgtgtaa

SEQ ID NO: 393589 - DNA, 122 bp, Homo sapiens
ggcgctggtcccatgctcagggagcctttgggtcgcggccagggccccgcagattggcggcggcgggcaggacgccggaccgggacactctgcgtgcgctgcaccggccggggccgccgcag

SEQ ID NO: 393590 - DNA, 122 bp, Homo sapiens
ttaagaacagcctgggtaatatggccaaaccctgtttctacaaaacaaacaaacaatgtgcgcctgtagttccagctactggtgggggagggggtacagctgagatggggggatcacttgag

SEQ ID NO: 393591 - DNA, 122 bp, Homo sapiens
cgcgacagtccacttgagggcgctgtggcaacagctagcgccgggaggcaggaagccgatcgggggcggggatcgaaggcctcagacgtcgacgccggcgtgggcgcgagcacggtgcactc

SEQ ID NO: 393592 - DNA, 122 bp, Homo sapiens
ctgtggcactggacgcgcgggggatgcggggttgttcccagagtagccgctaaggggagccggacgctagaccgccctcccgcgttcccatgacaacgacaccggcgggcgcgtagcctgga

SEQ ID NO: 393593 - DNA, 122 bp, Homo sapiens
tttttgtttgtttttggagacagggtctcactccttcacccaggctggagtccgatggcacgaacttggctcactacaacccccatctcccaggttcaagcaactcctatgcctcagccttc

SEQ ID NO: 393594 - DNA, 122 bp, Homo sapiens
gcgccgcccgggctcccgtggatcgggctggtccttcccagagttaaagctcctcccagtcgctccggagcccgcggggaccaagagcgcgggggcagggagaggtacgcggtcttcgcctc

SEQ ID NO: 393595 - DNA, 122 bp, Homo sapiens
ctggggaagcaagagctgcactgatctcatccccatttctttggtccatttccagggtctcggcctatagtagcccctccccactactttgtccttggccaaagagggcaccgtgcactagg

SEQ ID NO: 393596 - DNA, 122 bp, Homo sapiens
tgggggggggggcgagggcggcgccgagtcaactttccctcttaagccccgaaggaatgtcggcggatttcctgaaacccgaccctggccgcccgccggccctcccgcccctcacctggacc

SEQ ID NO: 393597 - DNA, 122 bp, Homo sapiens
gtgaacgggacccccggctccaactatagaggggcgagggaggcgtctaatacgagccagcggaagtccccacagtgaagacgctcatccccggagaactgggaagggaccctgggatttcc

SEQ ID NO: 393598 - DNA, 122 bp, Homo sapiens
tccaggacttccaggttcaggaaaggtgtgatccaggacacccaccttgtccatgaaggccgcgaacctgctgttgagggacttgatctgctccttctcctcctgcttcacgcactgtgcgt

SEQ ID NO: 393599 - DNA, 122 bp, Homo sapiens
gccaagccgttggagaggcagaaacagtgggtcccgagcccgcaggagaagttcccatcccgcccctctagccctcgggcgttggcagtggagtaacaaagacgctgccgcgccgttgaccc

SEQ ID NO: 393600 - DNA, 122 bp, Homo sapiens
aattactaaaactgcaccctgggcactctcccaccccaacaaaaagcaaatcaaatataacggtaccacataaggttcattaacctgtggaaatgagcagcttgtgtatgatacaatttagg

SEQ ID NO: 393601 - DNA, 122 bp, Homo sapiens
gcgctttcccgccacaggctttactgcagatggtgcgtgacgagagccaccagatcctggcgctgtcagaaggccttgcacccccaagcggcgagccacacccaccccggaaggaagacgag

SEQ ID NO: 393602 - DNA, 122 bp, Homo sapiens
gtgtcacagaggccaaaaggagaatcccaaggggcgagtggccatgggtatgcaggctgccgaaataaagtaagatcacagtggagaagtttcccatggatgtagaggagggagagcattaa

SEQ ID NO: 393603 - DNA, 122 bp, Homo sapiens
acatcatcaaatgtgaggacgtggagcaacaggaactctcattcgttgctagtgggaatgcgaaaagctgctgccactttggaaggtagtttggcaatttctttcaaaactaaacaccctct

SEQ ID NO: 393604 - DNA, 122 bp, Homo sapiens
ttttgatgattaagttcataaatactacaatacatatgacactttaccttaaaaaatacccgaagtttgtagaaacagacgtcagaaatgatgcagctgtgagttattgcgatgtggttgca

SEQ ID NO: 393605 - DNA, 122 bp, Homo sapiens
cagtccctcgaggggctccagtctggaggtgagacttccatgggcatagagtcccagtcccgggtgagacctgctttgatgggggccatagaggtgcagcaaggaggccctgctgcaggcca

SEQ ID NO: 393606 - DNA, 122 bp, Homo sapiens
aagcatgttcaacctgctatgaactttgaaaaactcagcacagacagtggcagttaggaccgagggcaagatatacccaatcacataaccatggtgataggagcatcatcaacgtctcaggg

SEQ ID NO: 393607 - DNA, 122 bp, Homo sapiens
ggtgaaccccccgcctaccctcccctccgagtctcgcacacactggcgctgggtgacagccgacttcaggaagcagcgggagaatggcaacagtgccatcagatccacaaacctgtgagcca

SEQ ID NO: 393608 - DNA, 122 bp, Homo sapiens
ggggcctggaggtgagcgcgaggcgccgggtggcttgggacgggcccttccgaggggagccgagaggaggtccttctgccctgcccccaggagcaaaacctgggcatcttctcctggaaacg

SEQ ID NO: 393609 - DNA, 122 bp, Homo sapiens
cagtgctcccccgacacaccccactttcttttcctgccactccagactccttcccggcagcgggcctccagaaccccttgttggtaaaggcgaggtgctgtggggatgcaggatatggaatt

SEQ ID NO: 393610 - DNA, 122 bp, Homo sapiens
atatagcttgagtcaatgagggaggtttacgaaaaggtttcagaggtggagagacccaggcgattgcagctagcgtggaagagtgttgaagcagagacaggaataccaggaacctttccaga

SEQ ID NO: 393611 - DNA, 122 bp, Homo sapiens
gaggtgagccaccgcgcccggcctctttctgtttttaaacaaaacttccattacaaacatcggaggctgcaaggcacaaactggggcaggagtatgcacagtcgcccaggatgacaagtggc

SEQ ID NO: 393612 - DNA, 122 bp, Homo sapiens
ggaagagcccccaggaaacaccattccgtccatcacatccctgtgcccctttcatcttgacggacccaccctagcactggccctggagacacatgaaagcacgcctcagatgcctgctcctg

SEQ ID NO: 393613 - DNA, 122 bp, Homo sapiens
gcggatgtcaccctcatgacagcggagtctggtcccagcaggcacaggcagggaatttggcgatgggtgagctttatgtatatctgaacaaggcacatgcctcttcgtgtgtgtgtgtgtgt

SEQ ID NO: 393614 - DNA, 122 bp, Homo sapiens
tgaaacatcccaacgacgaagggcgggggacatttcaaccagtttgatgtttatgaggaacgcttacaagatcgcttcttgtaggcgttctcaaggttctgtcctagggtgtttctctttgt

SEQ ID NO: 393615 - DNA, 122 bp, Homo sapiens
agagaagggaagccaggagctccaagtcaaacagcaggcagcacccgtgccgggggttagcgtcccggctgcgctcccgctcccatgccctccctcggggccgagctctgcttctgagggcg

SEQ ID NO: 393616 - DNA, 122 bp, Homo sapiens
tgcgcgttgtcctgctgtctgagcttgtgcagaggactctccagatgaaggctcaggggtcgatccagcttgagaccccctcgctcccccgcacagtcagaccttaggattggaggctttta

SEQ ID NO: 393617 - DNA, 122 bp, Homo sapiens
atcaggaaaaggccgctatggcgaagtgtggcggggcttgtggcacggtgagagtgtggccgtcaagatcttctcctcgagggatgaacagtcctggttccgggagactgagatctataaca

SEQ ID NO: 393618 - DNA, 122 bp, Homo sapiens
gaagggaagcgaagggttggagtttcgtttcgtgggaaccatagagaagggccagcctcccggcttcctagagaggctgtagggaccgacggccggccagctaatgcttccgtcttggccac

SEQ ID NO: 393619 - DNA, 122 bp, Homo sapiens
ggcactggcagttaccggaggatatgggctccatgactcagtcttcttttatttacccagcgtgttggagatcaagtcacaattggtgaatcaaaagcggtgaatttttagcaaatgcaatt

SEQ ID NO: 393620 - DNA, 122 bp, Homo sapiens
ggacggcgggagccatctgggccagcgcgggggccggggaagttcaaggcccgggcactgcgcagcgccgagggggatgacccgccgtctccggggcgccagcgccggctagttgctcaacc

SEQ ID NO: 393621 - DNA, 122 bp, Homo sapiens
gcgcccctgtctctgttgctgagttgctgtcaccttgagttggctctgactgtcccgtggcgaaggccatcccaaacagcacatttgcagtatgtgctcggagagtgggatacataagaaac

SEQ ID NO: 393622 - DNA, 122 bp, Homo sapiens
gagcgaaagaacaaaacctccaaagtccagaagaggacccgagtgcattgtggctgcttgcgcagctggcctgcttttattcccctatctggccccacccacatcctgctgattggtccatt

SEQ ID NO: 393623 - DNA, 122 bp, Homo sapiens
agcatcccgtggtcacctcccgcccattccggttccctcctttccagctccactgccctccgcaccctctgctctgccccggacctcaaggtctgttgatcaggagaaagcctgtttaatta

SEQ ID NO: 393624 - DNA, 122 bp, Homo sapiens
ccagggaccatgtggggaggaggccatggcatggagggtctggtcttgctgctgcatggacgctagtcccaccccagagtgcctcccaagaaagggcacctaggatggtctccccaggcatg

SEQ ID NO: 393625 - DNA, 122 bp, Homo sapiens
acttccggcgcgggcctagacgatttctccccctcccccgccctccgccttcccaccccccgcccttccactatggccgcttctgtgtggtgtggggagacgctggtcctccccgtcctccc

SEQ ID NO: 393626 - DNA, 122 bp, Homo sapiens
ggagacacacacctcacggaggtagcccccgccagcacgtcccagtggttagggactgtgcgtgctggtccagctctccatgtcttccaggccgcgcgaccgtgagcaagtcactgatcctc

SEQ ID NO: 393627 - DNA, 122 bp, Homo sapiens
accctgcagccggctctccgggtgtgtgctccttgtgacttcttggatggtatccatggccggaaattcaggacttgaataagaaagaaatgctggaaaagtaaaagctgtggcagccactg

SEQ ID NO: 393628 - DNA, 122 bp, Homo sapiens
gcgccgcctgccgccgagagggggcagcagccgcctgcaggaccagcgcccagtgcccagcgcccagccgggcccgcctgcaacggaacatcttttgcttttggaaacaaaacaagcggttc

SEQ ID NO: 393629 - DNA, 122 bp, Homo sapiens
attgtctctacccttccgggaggaaaggggaaggcacgaatgacccacgtgttcagaccccgagcgcgcccttcaccttggcccagggagaagggcgcttcccccataccgtgctgcagcgt

SEQ ID NO: 393630 - DNA, 122 bp, Homo sapiens
tagagacaatcaggtcaccaccgccctcacaagagaaaagcttcttacttccgagcagaacggttcagctgggaagagaggaagcagggagagaatctatgctttagtcgtcactgctctgg

SEQ ID NO: 393631 - DNA, 122 bp, Homo sapiens
gaagagagaggatccgcagaagctgggaaattcctcccgcagcctaggcggagactgagccgcggctcaggttgagacagtgggcaggggcagggggcggcgctcccggcccatcccttagc

SEQ ID NO: 393632 - DNA, 122 bp, Homo sapiens
atgtggacttcttggctgtatctttgctttttgggacttctgaaattaaaaatgtttccacgaatgtctgaagtcatatgaatgaatgtttaatatacataacagtttgaaggataatttca

SEQ ID NO: 393633 - DNA, 122 bp, Homo sapiens
atgctggaatttgtagtttttgtcggtcgctctaatggggcggattcgcgaagactaggacgtcttgggcttctggccgcaagtcccgtctctggaataaccttttctagtcctggagaaag

SEQ ID NO: 393634 - DNA, 122 bp, Homo sapiens
ctccataaaatattaattgtgagccttcacaaatacaaagatctgtctgctttttaatggcgtgggttgtggtctctccagataaatagttgaaggttttctgttgagggaccaagatgaca

SEQ ID NO: 393635 - DNA, 122 bp, Homo sapiens
aggaccgagtggaaacagtgaatcagcctgtttcagcagaacctgtttcctcagccctcccgactggagcagaggtggcaacgtcccaaagaggcagccccatcggtccttccaggacagct

SEQ ID NO: 393636 - DNA, 122 bp, Homo sapiens
actattgaaatggaccaatgaaagcgctcgcggccttgacgtcattcaaggcgacagggtcgcaggcgagtgaagggtaaaccaaaggaaactgagcaggggcggggcaggagggagaaaca

SEQ ID NO: 393637 - DNA, 122 bp, Homo sapiens
ttgaagatctttactgaagcagtttcctctgagaagcagcttgtctccatcattaagccccggaaagcagatgagactgcagttcctccgggctagctgtctcagtggtcacttcgccccca

SEQ ID NO: 393638 - DNA, 122 bp, Homo sapiens
gtcaaaggagccgctctaggcttttgggaggccgtctgcattgcgtggggaaggcttggacgacgcaatcgcctcgccggcccccggggtggttagcgcttccggggtcgaagggtgcgcgg

SEQ ID NO: 393639 - DNA, 122 bp, Homo sapiens
aatgcctcccatccgagaggggaacgtcttcataccctggtaacacctctgcgctgttggcgtagccctcaatacaattgagttccacctcatttctgggataagcagctgacccaatcaac

SEQ ID NO: 393640 - DNA, 122 bp, Homo sapiens
tgactcagcgcttcgcggccggcggcctagaggaggcgggaggcgggagtctacgggtctcggaggccctggggctccgccctcgggaatgtcactccactctcgctccgccctacgcctct

SEQ ID NO: 393641 - DNA, 122 bp, Homo sapiens
tttgcttggatagggggttggcttctcaatagaggtggtgtcatgttgtgctgggaagatcgggacaatgattccaatggcacagtaccagggacccactgagatcctacttgacaggtcca

SEQ ID NO: 393642 - DNA, 122 bp, Homo sapiens
aggttttaaagcatttgaaatcagctgcccttggcagcccatctttcccaaggagccccacggtgcatacacctaactgcgaccattcagttgcccttgtcctctccctaaaataaatccca

SEQ ID NO: 393643 - DNA, 122 bp, Homo sapiens
tttttttgagatggagtttcactcttgttgcccccaggatggagtgcaatgttgcaatctcgactcaccataacctctgtctcccaggttcaagcgattctcctgcctcagcctccggagta

SEQ ID NO: 393644 - DNA, 122 bp, Homo sapiens
caagatggatgatattgtggttgtagctcagggctcccaggcctcacggaacgtcagcaacgatcccgatgtcatcaagttgcaagagattccaaccttccagccccttttgaaaggtaaag

SEQ ID NO: 393645 - DNA, 122 bp, Homo sapiens
tcgacagacagacagacctggggcggacgcactgcccacggtcccctggtgcccgaattccgaaaatatcagaggcctaagcccaagagctcctggaacacccatcccagagagggacagtg

SEQ ID NO: 393646 - DNA, 122 bp, Homo sapiens
tacctggtgacgcacaagcagagcctggaggacatgctggagaagcacgcgacgctggcgcgcgagggccgcctgtgcaagcgcgaggtgcagctgcgcctgtcctacgtgtacgactggtc

SEQ ID NO: 393647 - DNA, 122 bp, Homo sapiens
gctgtcagccacgaaccgatggtgctgcgggagcgcgcgagagggagtcaatggcatgcacgctccagggcccgccccgccctgctcccttaggcagcgcctcctcaactgccctcagtttc

SEQ ID NO: 393648 - DNA, 122 bp, Homo sapiens
taatacacatttgactgatctgataaacacacacaaaaattactggcaagaagtatgccacgtccaaattacccagttcaggtgaattactaccaaaaaatagaaaatgtaaaaatttagaa

SEQ ID NO: 393649 - DNA, 122 bp, Homo sapiens
taaacttctctgatcccacttaaaagaggaaattaataactacttctttaaatgacaggccggcccagactatggtgattttaaacaatttctgtatatcctaggaagcaccgactggctct

SEQ ID NO: 393650 - DNA, 122 bp, Homo sapiens
ttcattcacaggaagtatgtcctgggcctctaccatgttccagcacctgtgcaggcctcacgtgtgcaccccacagtccaccagggagagagtttaatgggggtggatttcccttcccacta

SEQ ID NO: 393651 - DNA, 122 bp, Homo sapiens
tgaagaccttagcgactggactatttccttgctgccttccttcataggactgagaaaccacggagagcacaacatagataatgctctgctgggcagaagaatcccaaagcaagggaaggcaa

SEQ ID NO: 393652 - DNA, 122 bp, Homo sapiens
ttaaattttggtgtttataaacatagtgaaacactcccttttctcttcacagaatttaaccgtatgttaagtcatcgtatttatttgtgtgtcaatcatcctctactaggaggaaagctctt

SEQ ID NO: 393653 - DNA, 122 bp, Homo sapiens
ttgaaaacattatgttaagtaaaaggtgttggctgatgctacacttgtgcattacatcaacgtaccctaacaaaggaattggccaacggttggtgtcagtatcgcttaaataccatgtaaac

SEQ ID NO: 393654 - DNA, 122 bp, Homo sapiens
gccacccctgtgacagactggtagatagactacatcagacccttgccagtaatcttgagacgaaagtatgcactaacatgtgtatacactgccatgggattgttgcaagctttcccttgtaa

SEQ ID NO: 393655 - DNA, 122 bp, Homo sapiens
tccctctactgtggtcagagccgtgccccttgcaggtgggtagcgctgagagcagagcagcgcccgcgggactggcctgaggatcccgcaggcaggagggaccccgcgggcctttccctacc

SEQ ID NO: 393656 - DNA, 122 bp, Homo sapiens
agtacccggggctgtcacacggcgagctgagccctgggccggcgggtgaggttccccaagcggcgatgcccctggctccctgttccgccattgcgagccgttagggccaagctggagggagg

SEQ ID NO: 393657 - DNA, 122 bp, Homo sapiens
aagactctgtcaaaaaaaaaaaaaaaaaaaaaaaaatggagggagggagggagggacggacggacggaaggaaaaaagaaaagaatgagcacacattaattcctgggagtcttgcattttaa

SEQ ID NO: 393658 - DNA, 122 bp, Homo sapiens
atgacattgatagaaatccctgttctcctggagttgatgctcctgttgaggaaagacagacgttcaacgagataaagagggaaaaagtataggctgtcagagggagcacattctatgcagaa

SEQ ID NO: 393659 - DNA, 122 bp, Homo sapiens
tgagtaaatcttcaaaggcctcccgaggtgctccggctgcaggataacccctcagcttagcgcacaaggcaaggcccaccctgccctctccggccacaacctaattttccagcctcaccctc

SEQ ID NO: 393660 - DNA, 122 bp, Homo sapiens
aagccgactcagcctgaggggagccacgcgggttcgcggtcaccggtgcgctgcgggccccggaggtttctgcccttggtgtcccctacctggcagctggccctgcttctgtgatcctactg

SEQ ID NO: 393661 - DNA, 122 bp, Homo sapiens
cgggaggtaccgggcagggggctagggccgggccgaccctgtgagccgctcagccccgggcgcccccgccctcctcggaagtgactcgtcctcagggagagtccggcgcccgccctgccggc

SEQ ID NO: 393662 - DNA, 122 bp, Homo sapiens
gagacgctgggccacacggagcaaagcactcaggggttcaagcagcatcagacttccccgcgaggttcctccactgcctttgtcacccgccagtgtgaagtctccaaccctccccgtgtgca

SEQ ID NO: 393663 - DNA, 122 bp, Homo sapiens
aggtgaacgtaaagccggcgagatctccgtgctccgggtacccacagatactgtccgcgccgcccgcgccgacttcctgcctagctaaggcgagccccacccacttcccgcctccggggcac

SEQ ID NO: 393664 - DNA, 122 bp, Homo sapiens
gcggcccgggcgggcgctccccactctgcttctagccagcgagactccgagctctctgctcgttccgcgcccttcccggtgcgaagcccccatacaacgccccgcagagaaatcccttcccc

SEQ ID NO: 393665 - DNA, 122 bp, Homo sapiens
agcccttgggggggggtaaatggatgcagagcaggcttctaaggtgcagtccccctccttcgtgtgggtgagtgatgtcacttgcaggacaggctgtttgggttcccccagtcctaggtctt

SEQ ID NO: 393666 - DNA, 122 bp, Homo sapiens
agcagcgcggccagcgtctatgcaggcgctgggggctctggttcccggatctccgtgtcccgctccaccagcttcaggggcggcatggggtccgggggcctggccaccgggatagccggggg

SEQ ID NO: 393667 - DNA, 122 bp, Homo sapiens
ctcaacagccccctccttcccctccttcctctccttcctctccttcccccctccctgcgccgctccagagcgcaacaaccattttcccagccaggagcacaccgtgtccacgcgccacagcg

SEQ ID NO: 393668 - DNA, 122 bp, Homo sapiens
caaagacacaaaatgcctgactgcttccttgttgcaagtcagaaacaagagtgtactgtgcgtctttccccagctctgcccatcactgttccttatagcgtcagggctgcactgggaggagg

SEQ ID NO: 393669 - DNA, 122 bp, Homo sapiens
catgcggaggcataggacctgggtgacctgcaaagagtaaaagaaaagttagtaagggcacgggacaaggggtgtgcctacaggaagctgtaagaacatgataagtgcagatgagggaggtg

SEQ ID NO: 393670 - DNA, 122 bp, Homo sapiens
atttgcctggggatatgcatctttggcatttttccaagggttcatcaggatggagatatccggtgcaccatgagttctgtttccttaatcaacaccgttgtaacttgcccatccagttttgt

SEQ ID NO: 393671 - DNA, 122 bp, Homo sapiens
caggaatgttcagctgctgaacagtgatctagagccacaacggtgcagagctgtacttgacgagaacactcaggaagctctcatgctgtgagtgtcatttctgggaaagcagagaatctttc

SEQ ID NO: 393672 - DNA, 122 bp, Homo sapiens
ccccgcccacgcccgccccgcgcacctgccgggtccgcacctgccatttgcccgactggccgcgcacccagctggcccgcccctgcccgacacgaccgctgcccgccccttgccttcctgac

SEQ ID NO: 393673 - DNA, 122 bp, Homo sapiens
cattggaacaaaatatttgttacaatcatataggagattaatacttcgatactttccttccgaactctgaagtttcaaatagtacttcatttttctttttcagtttcaaaacatgcttacct

SEQ ID NO: 393674 - DNA, 122 bp, Homo sapiens
gagactttagcattggaaaaggcagattaaaacttgaacgttaggttgtttgcatctttacggctatgttaagcattgtgtccaactaagccatccgtctttagtaatgttaatatttgatt

SEQ ID NO: 393675 - DNA, 122 bp, Homo sapiens
agtttgtgagctcaggagaagcgctccgagctcggcatctggagcagttcaaggcagcagcgagcaagtccaaagacgcaggagggagggtggggtggaggagtagagagaaaacagaagcc

SEQ ID NO: 393676 - DNA, 122 bp, Homo sapiens
ccggggtccctgtttgaggagacagtcgtcgtcctcgggattcctgtttgaggagacagccgtcgtcctcggggttcctgtttgaggagacagccgtcgtccccggggtccctgtttgagga

SEQ ID NO: 393677 - DNA, 122 bp, Homo sapiens
cctggaggggcctgtacctcagaccctggcaacgaggcacgctggggcacgctggcctttcgttgtggtgtagaaaatttttcatttggaattccattttaaaaataagtatagggttattt

SEQ ID NO: 393678 - DNA, 122 bp, Homo sapiens
ttatctcctgtgattcaatggtggaagtaataatattagcagttaaaattttctaagacacgatcaggaaaaggagacttcggtcgttctgcttcttgttaagaacagctggcaatttaaaa

SEQ ID NO: 393679 - DNA, 122 bp, Homo sapiens
ttcctgggtggggtttgtgaagtcgtggcccgttagcaggaagcctaacagtcgccccgacgctagtgagggacccaatctgagtccccggccagccgaatccaagccgtgtgtactgcgtg

SEQ ID NO: 393680 - DNA, 122 bp, Homo sapiens
ttaggccccagaaagttgctctaatggatagtccatttttctaacaacctgccaggcagacggggacttgagtcttctcagctccctcccatgggccctattcttcctccttccagcctagg

SEQ ID NO: 393681 - DNA, 122 bp, Homo sapiens
tgagcccctgaaacagatgctccagagccttctgagggatgaccctatccccacaggggacgttccaggccaggggcagagccccacctatggcaggacagtgggaaccttcatctccaagg

SEQ ID NO: 393682 - DNA, 122 bp, Homo sapiens
cactggctctggaagcttctgcagacagacaagagccctccttaccttccatgaagagtccgtacacgtaggagccctctcgcggaggagcggtcatgtcctctcggtttttcttggtcacc

SEQ ID NO: 393683 - DNA, 122 bp, Homo sapiens
tcctcctggatgctgcctcttgtggggccctcactccagctgggcatgctgaggtccacacggttgtggcatgcaggaaccttttccaacccctcacagctctgctgggaagcaaagctcag

SEQ ID NO: 393684 - DNA, 122 bp, Homo sapiens
tgtgtaagaaaaacagggtgtgtgagtgtgtgtgtgcgcgcacaccagcaatcagtgtggcgaggccagaggctttcatcactgaaacactgagttcctgtttataaacatttgctcactgt

SEQ ID NO: 393685 - DNA, 122 bp, Homo sapiens
agtgtcctcacagacctctggaaacattcagtggaaaggactggcgtgtttggcttgctgcggtgtttggttgagttaaccatgacattccagaaggactcctgccgtagactttgcgtcct

SEQ ID NO: 393686 - DNA, 122 bp, Homo sapiens
ccctcccaaggcacgtggcatcaatcttgtgtcggtggcaggcagccctcatgtgccagacgccaaatgctcgctgactcgcagatgagccatccccagggcctcctccctgcatgacagga

SEQ ID NO: 393687 - DNA, 122 bp, Homo sapiens
aaggatccttgtgttatctctttgtatttctgtggttatatcagttgacatttgctttagcgtattatttgctgttgtttactatatcagaaaagagtctgtagtaataaactttcttttac

SEQ ID NO: 393688 - DNA, 122 bp, Homo sapiens
aggcacccagacagctgcaccagtgcccacaggaagcagtagctgctggccctgtggctccgtccatgggttgattactgctgccctacacaggagggcatgcccatcatctttccatctta

SEQ ID NO: 393689 - DNA, 122 bp, Homo sapiens
agtcccgaagacgatctgaaccaaggagcccagcgccctctagcgggagacaagctgcttcgcggccctggtctccggtcagaggcactgggctggggctgagcactccgaggcggaaacca

SEQ ID NO: 393690 - DNA, 122 bp, Homo sapiens
tcgtctaggatgactagtcaatgcatctagtcaatgctagcagctactatcattattattcgcactctacacagccagtgtggggattaatggcatgatgtgctttgagagggaaatttctc

SEQ ID NO: 393691 - DNA, 122 bp, Homo sapiens
cagacctctccgggcacgtccctccccgacgcgtcgccgggctgcgctggagccgctcaccgtccgggtccttctcgtggtagcagtggtagttgcactccacctccatgttctccaaaaag

SEQ ID NO: 393692 - DNA, 122 bp, Homo sapiens
gaccgtcttctttctggagctcatcgaacaggaaacccaggccgaggtcgccggtgtcttcgtggccggatctgggctggaacgccacctgggagcgtggtcgacgaagccgtgcgtctccg

SEQ ID NO: 393693 - DNA, 122 bp, Homo sapiens
cgggggcggcagcggctccgggggctcgggttcgggtggcctgattgggctcatgaaggacgccttccagccgcaccaccaccaccaccaccacctcagcccccacccgccggggacggtgg

SEQ ID NO: 393694 - DNA, 122 bp, Homo sapiens
cgaggggcaagctgacagttaccgagtttcctgatgagccctgccaggaccatctcgtcccgtcaatctgcagccgccggagaattaaactgccgcgccactgcgtccagccacaattaatg

SEQ ID NO: 393695 - DNA, 122 bp, Homo sapiens
ccggaagtcgccaccgaggaacccgacgagcttttgtttttcaggatccccttgatgggccggtgcgaggaggtggaggctgacattttgcggagagaagggctgcgagagagttgggccgc

SEQ ID NO: 393696 - DNA, 122 bp, Homo sapiens
tagtggttccaccaattcaattttaagactactaacagaattttataatataaacgcctacgatacgacagcatacataagaaaaatattttttaaagttttagtaattcaaaccaaaacat

SEQ ID NO: 393697 - DNA, 122 bp, Homo sapiens
tttgttttttggttgagggcaaaggatttaatgcatttaagttaactgtgcacatgaggacgattcttcagagtatggggtgctaagaattgtggaaccaggtgttgggttctgagttcaaa

SEQ ID NO: 393698 - DNA, 122 bp, Homo sapiens
agctctttgctagtgttattattctgctgtagaaagtatccttgaactggaaaccgtccacgatcgagtatcgaggcattcaacactatcaattcctgggtgactttttgaaaaagtagtat

SEQ ID NO: 393699 - DNA, 122 bp, Homo sapiens
gttggtcgggctagccaccagctgggggtgtcatagtgactgtggttagtttgtttcaaacggggtaacctccaccattatgtgattttacctatgtttgcttcccaattaatgaataacaa

SEQ ID NO: 393700 - DNA, 122 bp, Homo sapiens
ccgggccgcgggctgcgggctccgagcggcgccaacatggctgccgcgaggaggaggccccggcctggccgcacgtgtatgatgacaactcggtaatgctgcatactcccgagtgcgcggtg

SEQ ID NO: 393701 - DNA, 122 bp, Homo sapiens
cgccccggcagcctcctgccttccgcccgccgcccttccgcccccacccccggcgctctccgccccagcccccaacgagccgccttccccggctgctccactaggtgtggcggcggcggcgg

SEQ ID NO: 393702 - DNA, 122 bp, Homo sapiens
gctgggtctcgagagtcttcatttcagaagttcaagggtgaagcgctcgctcctagttcacggaacacacattaagaggcttccgcttttgctaatgggttgtgtccattatcctttcgtag

SEQ ID NO: 393703 - DNA, 122 bp, Homo sapiens
agccttacctttgccctccttggtcttggccttgcggataggcacaggctggggcacctgcggggggctgacggctagcggaggggagatggtgaccgtctctacagccgcagccaccgccg

SEQ ID NO: 393704 - DNA, 122 bp, Homo sapiens
tcggtgcccagcacagtgcgtggcacagtcggtgctcagggagcgatagctagatgaaaccgtacttttcgggatcctagtccatccaaagcagccgccttcggggcaggtgtggggaggag

SEQ ID NO: 393705 - DNA, 122 bp, Homo sapiens
tccatggccctaaaggagctgcattggtaggatgcactttaagcagcttcccaagggattcggctgcggggtccacggtctacactgggcaggactgcgtctctgctctcctcccggccagc

SEQ ID NO: 393706 - DNA, 122 bp, Homo sapiens
ggaatacaaatagacagcattcttctttatttcttttgctttagtagcaattacctcttccgtaaaaactccaaatgccattcaaaatatttcccctcaaatagatacgtaggaagaaagtc

SEQ ID NO: 393707 - DNA, 122 bp, Homo sapiens
ctccaggaggtgctccttctgcttgaagtagatgctgcactcgatgcatgggaacacggccggctcctcgtcctcgtcctcatctgggctggccaccccttcggccacctcctccagcagct

SEQ ID NO: 393708 - DNA, 122 bp, Homo sapiens
ctggaaggaggaggtggtgaccgtggagacgtggcaggagggctcactcaaagcctcctgcgtaagtgaccatgcccgggcaaggggagggggtgctgggccttagggggctgtgactagga

SEQ ID NO: 393709 - DNA, 122 bp, Homo sapiens
ggccctttgtcctccagtggctggtaggcagtggctgggaggcagcggcccaattagtgtcgtgcggcccgtggcgaggcgaggtccggggagcgagcgagcaagcaaggcgggaggggtgg

SEQ ID NO: 393710 - DNA, 122 bp, Homo sapiens
atcagaccttctccccttagggggctaaaggtcaaacagagtttgagtgtcctggccgggcgcagtgccttatgcctgtggcttacgctttttatgaccccttcacccatccaatagcagga

SEQ ID NO: 393711 - DNA, 122 bp, Homo sapiens
cacctcgccggcttcatgaacgtgccccgggagaccccgacgccctgaagccggcgcggccgccccaccgccccaccgccccaccgccccaccgccgtctgcgcgaacgccgggcctccccc

SEQ ID NO: 393712 - DNA, 122 bp, Homo sapiens
gctgtcggggagggtctccggctccagggctccggcctctgaagttcccaatttaaatggcgggcttggtagtctgaagagtttgtactccttcccggaaaacgtgatttaaaagacacagg

SEQ ID NO: 393713 - DNA, 122 bp, Homo sapiens
ccagggctcgccagccccggcacacttggcggcagcgcccgagcagcgtgcgcggggggacgtggctcagcaccaccagaagcagctctgggggtagttggctcaggtccagcgcctcttcg

SEQ ID NO: 393714 - DNA, 122 bp, Homo sapiens
accaagccttgcaaagaaataattataaaacagttacagacatttgtacaaagtgcgtaacgagcactgggaaaggaaatttttaaagggctatttgctcatttgttttcatataagtgata

SEQ ID NO: 393715 - DNA, 122 bp, Homo sapiens
cgggggcaatccctgcaggttctcgggtgccgcgccagggtctgctggtctgaatttgggcggggttccaaggggagagagtgagtgactggtcttccctcttccctcccccacctgcactt

SEQ ID NO: 393716 - DNA, 122 bp, Homo sapiens
gcaagagggaaggtaggattggagcaggagtggagcaggtgcaagagtccctcctttcatcgcagcctgatgtcattcctctgatctctgtctctccagggttctcttctacctccactata

SEQ ID NO: 393717 - DNA, 122 bp, Homo sapiens
accgcagggcgccccgccgcacggatcgagaaccttggggctccctggaaacttgccacccgctgccgccaaggccggaactcctcggagcccctagcaacggagcccctagcaacggagcc

SEQ ID NO: 393718 - DNA, 122 bp, Homo sapiens
tttgctttttcccagggcactcttccacgccttgtagaccatgtctggcatcaccctgttcgaaggaataaattcaaatacctgattgaccatcccgtctccctcacaggagctggaaggta

SEQ ID NO: 393719 - DNA, 122 bp, Homo sapiens
acaggcatgggccaccacgcccagctaatttttgtatttttagtagagacggggtttcaccgtgttggccaggatagtgtcaacctcttgacctcgtgatccacccaccttggcctctcaaa

SEQ ID NO: 393720 - DNA, 122 bp, Homo sapiens
tggcatcgtgtctagttccctcacacatggcgtcgtgtctagttccctctcacatgttgccgtgtctagttctctatcacacatagcgtcatgtctagttctctctcacacagagcatcatg

SEQ ID NO: 393721 - DNA, 122 bp, Homo sapiens
ggcgctgcccccggctgacctggctgtgtcgggagatgcccctcaccctcgcatccaccccggcttcccagcacccactgctggtcctcaggacccgaccctgtcccctctgccttccctgt

SEQ ID NO: 393722 - DNA, 122 bp, Homo sapiens
gagctcaggtcccttcctaacccagtccagaagccgtgggcaagttgttgtcgtgccccacgcttgagagaagtaatggggatgcagactgtttacatgccacggaggtgagagagagggtg

SEQ ID NO: 393723 - DNA, 122 bp, Homo sapiens
tctgtgtggtcaatgccaccctcctggtcactgtgacctcccaaacctcggtgcccagcccggacctctcggactgccaaggagggggctcagtgtggtcactgccccctggagggacacca

SEQ ID NO: 393724 - DNA, 122 bp, Homo sapiens
caccaccaccaccaccacagcggccgccgcctttgcagctaccgccacggctgcgccggccgcctgccccgccccttggagcccagcccattggcctggcccgcgctcccggggggcggggt

SEQ ID NO: 393725 - DNA, 122 bp, Homo sapiens
cccaggcaggcaggcgcgctcgggcgaggtaggagcgatgtggcctgggaacgcctggcgcgccgcactcttctgggtgccccgcggccgccgcgcacagtcagcgctggcccagctgcgtg

SEQ ID NO: 393726 - DNA, 122 bp, Homo sapiens
gatggccctcgggcgtcacaccagcggctttccgcacagcccaagggactggggtcgcgccggctcccgcccccaccccttgctgcagaggggcagccgcctgcagaaaatcagcagaggta

SEQ ID NO: 393727 - DNA, 122 bp, Homo sapiens
cagaaaaataaagcccattgccatatagggtgccagctttctggggcaccttaaaattttcggagagctactcatgattcccttcaaatctcatatataatgttctttttatagtctctggg

SEQ ID NO: 393728 - DNA, 122 bp, Homo sapiens
acccacacttccttaggcagatgctaagtaaaagattaataatctgaagtccaaccaggccgactcatttccctcctcttctttttggaagctgaccttttagaagcattctattcatttgt

SEQ ID NO: 393729 - DNA, 122 bp, Homo sapiens
gccagcggagccggcggcggcgagtagggggcaattcgaaggagacgcgcagcttacacccgcggcgggtggagggagcaatgtgacgaaaccattgagcttgaccgaccttccctcatgga

SEQ ID NO: 393730 - DNA, 122 bp, Homo sapiens
ggcgagccgggaacaatgcccaaattttggggaacgcaaggcagagttctttctgccttgcgggcttagcgaatgggtgtcctggaggaggggaccccggggactccgttaatgtgggaacc

SEQ ID NO: 393731 - DNA, 122 bp, Homo sapiens
cccagcaccccttctcacttaaggggtgctcctcttcctcagagaccagaaacagccaatcgtgggagagactcccgcgcttgcgggctccacccggggcggcggggcagggcgggggtgcc

SEQ ID NO: 393732 - DNA, 122 bp, Homo sapiens
ttctgagtggatgcaatcaatgtggaagaaacacaaacatcttgctaagcaagaaccaaacgtttcaagtacttttttttaacgacaagtgattcaaacaagaaataaaaataaaagaaaga

SEQ ID NO: 393733 - DNA, 122 bp, Homo sapiens
tcaaccagtcgccttggctaagacccccgggtgtcccccatcttttaacactgaggacaacgacagttcagcaaggtggcagcacaggtggagaccctgggacctggccaccccctgccttt

SEQ ID NO: 393734 - DNA, 122 bp, Homo sapiens
ccccaaccccaggccctcatcacctaatactgtttgtataaccggatactttgtatacttcggacatcacctaatactctgtgtatacagctgctagagtcttcttgtaaaatcctggttgc

SEQ ID NO: 393735 - DNA, 122 bp, Homo sapiens
cgactttcaagcttgcacagataagccccatccaatcccaggtgtatcagctgctgcactcgaagtctcctcatcaccatgctcgtcaccagtgtttcctcagaaagcactcaagctgcctt

SEQ ID NO: 393736 - DNA, 122 bp, Homo sapiens
tcctcgcacctgaggctgcctgtgcagggcccccggctggtgcccctctcctctgaagctcgggggtcgccacagcctggcaccctcatcgggcctgttacgcacgttctggtctctccgtg

SEQ ID NO: 393737 - DNA, 122 bp, Homo sapiens
tgctgcctgaagtctccagcctgccccactgcccaggcttggcccacccaccgtggtgcccgccccgcctcccttagggcgcatgtctgttcccaccagagggcgctcctggacagacactc

SEQ ID NO: 393738 - DNA, 122 bp, Homo sapiens
tctgaaagttccattccgtttgcatccttatcattttcaactgtgacattctctcaagtccggatcccacttctgggaccccctgaaaagcatcagggctgaatcagaagggaggacagctg

SEQ ID NO: 393739 - DNA, 122 bp, Homo sapiens
gggccttgtgtaggccatgttcctcgggcagctgccccgggccggagctgggcactccagcggccctggcgcgtggctcctgcatagctagcccaagccaataaagggctgtgatgagtggc

SEQ ID NO: 393740 - DNA, 122 bp, Homo sapiens
gaggtctgttacaactcagaattgtttgggaaatactgctttaggctctttcactagtaacgtggattgctctgggccaattaaaatgagctccacataaagatatttagctatcctgacct

SEQ ID NO: 393741 - DNA, 122 bp, Homo sapiens
tgtttatagaaatggacagcccggcagtgcatgaaagtggctgcctggccaaagtctggccgggctgcttagtggtactctgggggttggacccagtaggattcttggacttggcgcggagt

SEQ ID NO: 393742 - DNA, 122 bp, Homo sapiens
tataataaaaggaatctagagagggtgttgcagggtgggaggcactggctggctgtttggcggtactcatggaatctaaggaagccttggaatgtttctgtgtgtgtgtaaaattctcccaa

SEQ ID NO: 393743 - DNA, 122 bp, Homo sapiens
agccccaatccgaagcttctcccttagtcagggattggggcgctgggttcctggtgtcaccgccgggcggcgaccccaccacaatctccccaaagcgccgaagcatgtcagcccgaagatct

SEQ ID NO: 393744 - DNA, 122 bp, Homo sapiens
tggcaaggcccaggttggcaacgctcagcttttcagcaggactcagatccagggggagttcgtgagaagggcaggggttgggccgaatccactcctcgtgccggctcctctccacgcctgcc

SEQ ID NO: 393745 - DNA, 122 bp, Homo sapiens
tgcgatccagggcaggaggcccagccggcagagcgggtgcgggacgtgggaccggcgaaccgcgtactcacgtccaagtagccattgtggttcaggaatttgaggaggatcatgcagctgtg

SEQ ID NO: 393746 - DNA, 122 bp, Homo sapiens
aattgctgactcgccaaaaggccagtccaatcatagatgtgtgcataagaaaagacctcacgagtcccttcatgtctacccttcaacataaacatcacagtgtctcaaaatagccagaactg

SEQ ID NO: 393747 - DNA, 122 bp, Homo sapiens
ttttcttaagaaagctctgctgttgagatcgtccaaagctgggggctgggagggggggcacgaacttcgtggggcaccatccctccgaagagagcaagatcagagacacccgcccagctctc

SEQ ID NO: 393748 - DNA, 122 bp, Homo sapiens
gactgaatctgacgaaagtgtggatttcagttaataacaatgtgttaattaatactggtccgttaaaccagcagtcctcaacctttttggcaccagggactggtgacaatttttccatgggc

SEQ ID NO: 393749 - DNA, 122 bp, Homo sapiens
cagagacagccaagggggtggtgccagcagggccctggtgccatccgaattggtgtcctccgggctcaaactgggacatgtggtctgacaaccaaggactatttaaatcctggctgtggctg

SEQ ID NO: 393750 - DNA, 122 bp, Homo sapiens
agacactgagccctgttctcctgtctggccccatgaccagtcgtataccatcatgtcacccgctgtgctcaaatctgagctccagagccctacccatcctagttctgctctcccaccggcta

SEQ ID NO: 393751 - DNA, 122 bp, Homo sapiens
ccagctgtaacgtggtggccatccctgggaatgcaagcatggatgcagtctgcacgtccacgtcccccacccggagtatggccccaggggcagtacacttaccccagccagtgtccacacga

SEQ ID NO: 393752 - DNA, 122 bp, Homo sapiens
atccgacagaatccaagccaatctcgtaatgtttacttccggcttttcgcctaattccggcggccactgcggtaacttccggatgaccggcacatgcgcactaatttcctggcggggccggg

SEQ ID NO: 393753 - DNA, 122 bp, Homo sapiens
accctggaaggcagggctctttgcaatctccggggatttcgacccagagcccttcagggacgtggcagggctgctcctgcctcagggccgttgtcctcgtgctcctcaccccgcctggaata

SEQ ID NO: 393754 - DNA, 122 bp, Homo sapiens
tcattaagctcaagtgagataaagcatgtcaaagtcatccgaaaagttgaaaagtactgacgtaagaacttattattagtagtattatcgccatcactgagtgaatgatcattaattttagt

SEQ ID NO: 393755 - DNA, 122 bp, Homo sapiens
caggtagttcttgaactcagaacttaaatcctgcacgtggcactccaccactgactggaccgagctggcatatgttgtttctttgtgtttctacatcaaaatgttcgtctaagatttgaact

SEQ ID NO: 393756 - DNA, 122 bp, Homo sapiens
ccagccactacctgggtggcccacatcattctctgagattgaagggctgctctgctgagccggggaggtcaggggagccttctgggggagccatggcttgatgtggtcctgtgaggcctggg

SEQ ID NO: 393757 - DNA, 122 bp, Homo sapiens
ggtacccagggtgtccctgggtaccgaggaacctctcggtcaggaggaggccaagccagacgtccagctcaggggcacttggccatgctgaggactgcgcacctgggccacgtggtccgtgg

SEQ ID NO: 393758 - DNA, 122 bp, Homo sapiens
cgccctcgcccactgccccgccttctccacgccccgcccctccccgccccgcgcctgccgcgcattgcagacgcccagcggcgccaagaacccggccaagctgacttggcgactcctcgcag

SEQ ID NO: 393759 - DNA, 122 bp, Homo sapiens
ctcccagacggcttccaaagcggcgctggcaggggaggggaagggctctggggaaaccttcgcagagccactaatatcttcctgaagaccctattcagcggatttgccatccccacgcgctg

SEQ ID NO: 393760 - DNA, 122 bp, Homo sapiens
tcctgaagaggccctgcctgagctgccccctggggagccggagttccgttgccctgaacgcgtgatggatctcggcctgtctgaggaccacttctcccgccctgtgctgcggcaggtgatcg

SEQ ID NO: 393761 - DNA, 122 bp, Homo sapiens
gagggagtaggattaaatgagtcttgattatcacttctagtgctattatttagtatcattcggagctaatacagtttaaagccattctggctaagatttaaaaatggtcgttttccacagat

SEQ ID NO: 393762 - DNA, 122 bp, Homo sapiens
gtgatggtcgcgaaacaggcgcgctttctcagactccccgcgactagggaggaagggtcccgcgcgggttgcccttttaagccgcagcttcctgcttgcccggctgtcccctcccctcgggc

SEQ ID NO: 393763 - DNA, 122 bp, Homo sapiens
aagatgagtaagccatcagagagcttacaatcaagaaatggtattgtattcagcccctatcgcatgctttgtacaaagcaggtacacacaaaaaaatctcatgggaagcctgcagaaattac

SEQ ID NO: 393764 - DNA, 122 bp, Homo sapiens
taacttcgtgatccgcctgcctcagcctcccaaagtgctgggattacaggcgtaagccaccgtgcctggctgaactttttagtatggaaactatcaaacatatacaaaagtagacagaacag

SEQ ID NO: 393765 - DNA, 122 bp, Homo sapiens
gcagggtgcctgtgtctctcgtggacagcccccacaagtgaaaacggggccgcagcgtggcgtgggcagacggcaggaactcagggtgacattgaggcaggcagaggggagaagagataaga

SEQ ID NO: 393766 - DNA, 122 bp, Homo sapiens
ccatctcaactacaagaggctttcctctttgactaatccacctcagcacagacgctttaccggtgtcaggctaggggacagtcaggtcttttttatcccacaaggccatatttcagagtatc

SEQ ID NO: 393767 - DNA, 122 bp, Homo sapiens
ccatgtcttttgtataccattttatcctcagagtctaatacagttcttggcacatagaaacggccagatatttggtaggtgactaaactatactgcagtgtgttgagaagtgaacagaagat

SEQ ID NO: 393768 - DNA, 122 bp, Homo sapiens
tggtcgccgacaggaccctgggctcccgggtactgggtggcgccattttttcagcctgcacggctcgtctcgcgagagcttgtcggccgaggagacgggacgcgtgcgcaccacgcatgcgc

SEQ ID NO: 393769 - DNA, 122 bp, Homo sapiens
ggacttgcagagtgtcaagaatggcatgcccggggtgggtctccttgcccgccacgccaccgccaccaagggtgtcccggccaccaacccagcccctgggaagggcactgggagtggcctca

SEQ ID NO: 393770 - DNA, 122 bp, Homo sapiens
cctgtctctatcattctttgagcacctccttgtgttttgaacaagccgctcctgactcatcgttgaccttccctccccttcccacaatgagccatttctcctaggagctctgactcctttta

SEQ ID NO: 393771 - DNA, 122 bp, Homo sapiens
ggagaggtctagggagaggctaacacccattaaaccttttagggaacacccttcatttttcgatctttgctgagtgtctatctagcctcagatttataagtctgggtgtggaatgggaggtg

SEQ ID NO: 393772 - DNA, 122 bp, Homo sapiens
aattgaaaactaagagtttatggctgataaaaagaagtgtaattcaacaattctgtctttcgtggataatggatgggagagggagtcaaactctgcacatatcagctttctggtgtgtgata

SEQ ID NO: 393773 - DNA, 122 bp, Homo sapiens
cgctcttgggcctcctcggctcccttcctccttccttgcggtcttcatgcacagctgcctcggtcccccgcttctggaattcacagcccagatgtggataggctttaccccactcatcctta

SEQ ID NO: 393774 - DNA, 122 bp, Homo sapiens
gggaggcgacaagatgttctccctcaagaagtggaacgcggtggccatgtggagctgggacgtggagtgcgatacgtgcgccatctgcagggtccaggtgatgggtaagcgctgcacgcgag

SEQ ID NO: 393775 - DNA, 122 bp, Homo sapiens
agggagcatgagtgggtcgatgggggtcacatggatactcggacctccagggggagcagccgttgaggggagggccttagctggagcatggttggtgggtgggggggtgtcacccattcatg

SEQ ID NO: 393776 - DNA, 122 bp, Homo sapiens
gggtcagcgggctgttgactccccgcctgggtgaaaccggagcttccgagtcacgtggcgcgcgaagacaaacctggctgctcagggtttcccggagctttctcccagcttcccggcgattc

SEQ ID NO: 393777 - DNA, 122 bp, Homo sapiens
cctgcgcctccgacgggcatttgtctggctgcgtccgggctcgggacgatcctgggtcctcgctggcgctgcggccctgcccggcggcttcgtgacctccggcggcgaatccccgggctcgc

SEQ ID NO: 393778 - DNA, 122 bp, Homo sapiens
attctaaataatctaaaacatacctcaagactatgacttactgattcatagtaaactatacgtagtaaaatgcatgccaattccatcttttattctgtcaaatttactgtgttccagaatgc

SEQ ID NO: 393779 - DNA, 122 bp, Homo sapiens
tataatataccttattttaaagtttcctcattgtaccctttcctgctgcctctatacacccgctgccccaactccttacacaaagcgatgctagtccactacctccaggaagcctttcctgg

SEQ ID NO: 393780 - DNA, 122 bp, Homo sapiens
agcaattaggaaagaatcctgggatctattagcttaagcttgtaagtgagcaagtttatacgcacacagtgaataaagatagctgtctttcagtgtggcttaatacttgtagttactggtgg

SEQ ID NO: 393781 - DNA, 122 bp, Homo sapiens
cctgtgtccgactctccgatctccgactctcggatctccgacaccaaagcacccaggcctcgagcagatctttccgctactcgggagtaaaatcttcccgccagccagctgagagcatccac

SEQ ID NO: 393782 - DNA, 122 bp, Homo sapiens
cgtgtcactgactttatatcacttcctctcactcttttctccccatgcagaggaggcgatcggaccctcctgaaactgcatactgtgtataagggtccttgcacacacagttcatttccgtg

SEQ ID NO: 393783 - DNA, 122 bp, Homo sapiens
tcccaggccatgttcacaaatgggtaggctgccaggaaagctctgtaaaatcgtttccagcgggaagaagggggatgaatagaatattcatcctcttctctcaggctagaaaccagcttctc

SEQ ID NO: 393784 - DNA, 122 bp, Homo sapiens
cctggcggcggtggggctagaggccgggggccgcgggtcgtagctataagcagcttcccgcgcagcctcctgcggacttggacttggcccgggtcacacacgcccagggccccacacgccca

SEQ ID NO: 393785 - DNA, 122 bp, Homo sapiens
tgactcagtccctgtttctatcatcatccctggacagcaacaaacagaactatgtatcatcgcatacaaagtacaatcagagaaatatggttggccaaagagctctgtgctttagaatttga

SEQ ID NO: 393786 - DNA, 122 bp, Homo sapiens
ttctgaggttggccttgtaaggtaaggtgttcactggaagtatagggaaggtggcaatagcgacagataaacaagaaggctgatgagatgccagtgaagatgttatggacccgcagagctga

SEQ ID NO: 393787 - DNA, 122 bp, Homo sapiens
agagacctgacatggttcccttttgggaccagcacagagttcatgacttgtgcaaagtcacgcagctgatcggtgcctcgaactccttgtccagggctctgccccttgctcctcagagctcc

SEQ ID NO: 393788 - DNA, 122 bp, Homo sapiens
gcgcgcggggcccccggggtgtgattagcaggcgccgcgagccgggaggaccccccagcccgccctggcagccagcaccctctccacacccgcccagagtggccgcttttgaccgccgtccc

SEQ ID NO: 393789 - DNA, 122 bp, Homo sapiens
ggaagtttcagtctgattcattctgtgtagaccttcatgggctcctgtgaggtaccctgtcgggcacacagacagcgatccccctgagcaatgcatagtgtgcttctgccgacccctcctga

SEQ ID NO: 393790 - DNA, 122 bp, Homo sapiens
tcccaactgaggctccgaggtgcaggagctccgtcctgtctgtaaaactccctcagttttcggctctgggtttggtgggggttgttcctcccacctccaacctagaaagagaagccagagga

SEQ ID NO: 393791 - DNA, 122 bp, Homo sapiens
ccccagcgtgatcggccctgcggtgctctttgtctgttctcggggccaagggcagggcggcgcttttcgaggaaaagctagacccccgggtctctctgcgccgaaccaaaagccgcttttgg

SEQ ID NO: 393792 - DNA, 122 bp, Homo sapiens
cgactctccagctctctcttctccaagcaaggtactccaccaaagtatagctgttgacatcggagagacttgtgcccatgagactttcaacatcagggtgtggcttgaaggccagagttagc

SEQ ID NO: 393793 - DNA, 122 bp, Homo sapiens
agccagccctaccacttcatacagtatcacattgagcgagttagttaatccccgtgccttcgtttgctgttctgaaggaaaataaaagcaaaaacttcctaatagaatgttttgagagaaaa

SEQ ID NO: 393794 - DNA, 122 bp, Homo sapiens
gggaccctccacccggcggctggcggctcgtgaccccgccccctcggcccgctctgggcccgcctcccgccggctggctccacccacaatagcgtccctagcgcgatggcgtatcggcgcag

SEQ ID NO: 393795 - DNA, 122 bp, Homo sapiens
gctgtgcccagggcctgggggatgatcgtttcttcttccgcagaggctgtggtttgcatacgaaagcagctgtggttcatgaccatagcattaatgagttaaaatccatgattaatagttct

SEQ ID NO: 393796 - DNA, 122 bp, Homo sapiens
gctttcccagccggggacacctagggttacctgactggcctctgctgcctgcctccatcccgggccattttgcactgagtggtcggggattttgactgctccccttacccttgcttttagaa

SEQ ID NO: 393797 - DNA, 122 bp, Homo sapiens
acacatatacacaaagtgtctggcatacaggtgctcagccaacctcaagtccagctatgtcgttctccaagaactcaggtgagggaaagaacccactcccacccaccccgcccccaccccta

SEQ ID NO: 393798 - DNA, 122 bp, Homo sapiens
attatcagttatctattgccacagtggtaaccacaagaaacaaccacaaacctctgtgcacgtaaccaccaccactggcgcctgctcaccgtcgaggtggtgttggggcagggctgctctct

SEQ ID NO: 393799 - DNA, 122 bp, Homo sapiens
tacagcccaaaggaacagctgtcccgatcctcagggtggcctcaaacacaaactcgggtgcgttggctccgctgctggcgccgccaaagctgcgctgcggggctgcgcgcgcgcgaagcaag

SEQ ID NO: 393800 - DNA, 122 bp, Homo sapiens
agagatgaaaaagagtcgtgttcaagctcgtggattccgtctcaacatgtataaaacaatcgtcgagcaaaccctcactgagcagcactcgcactgtcccagacaccgtgctggttgcagtg

SEQ ID NO: 393801 - DNA, 122 bp, Homo sapiens
cctcttaatttgtccatctgcctataatttcttcctccttttgtctgttcaccttaaagccgtctgaatgaacttgtcaaaatgcaaacctggtcatgttattcccttttatgtccttaatt

SEQ ID NO: 393802 - DNA, 122 bp, Homo sapiens
aagataaagacacagggaagcgggactaattgggaaaacctgcagacatttgttttaatgcgtaatctgctaaataactacgggggtgggggtggggaaggaagagatccaaggaggcagaa

SEQ ID NO: 393803 - DNA, 122 bp, Homo sapiens
gaattatatctccataaaggtgttaataaagaaaacattcaggccgggtgtggcggctcacgcctggaatcctatcactttggctgaggtgggaggataacttgagcccaggagttcgagac

SEQ ID NO: 393804 - DNA, 122 bp, Homo sapiens
gatcgacacctgctgccgaagttgctgctgagagttaggcacatgtcacatactcacccccgcccgggtagcggggaaccggagattagggtgatagcggaagatcggtcttgggggtcaca

SEQ ID NO: 393805 - DNA, 122 bp, Homo sapiens
ggcagggtctgctggcagaaggttgtgctgggccgggcccaccttccccggctagagggccgagctgggcgccgcagaccccgcgtacccaggccgcccggtactgcccggagcggagaccg

SEQ ID NO: 393806 - DNA, 122 bp, Homo sapiens
gctcttcagcccccgcagccctccaccaggagcccagggtgggggccccagggaccccgacgggcactccatgtccctgcccctgctgcagggtctatcctcagagttcgacagtgacgact

SEQ ID NO: 393807 - DNA, 122 bp, Homo sapiens
tgcgctctcacttcttcccacattcaagaatggggtcccaaacgagagattcgacgtaaacgtccgctcccaactaagttctcaggcgctgacaacgacaagaattcctcacacaaacgtag

SEQ ID NO: 393808 - DNA, 122 bp, Homo sapiens
tgttaacagtacagttgagagagttggtgtcttttgttgaggtgcgaggacccgaggcggcgaccctcgcctttattcggagaagcccacttccacccacagagttggggtagtcctccgaa

SEQ ID NO: 393809 - DNA, 122 bp, Homo sapiens
tcagatctccacctcccaagcagcgttgcccggacgcgccgctcggggcccagagcgctgcgtgcacgcagcctctagcaaccacttaccgcgtgtgtgcgcatgtgtgtacgtgtgtgtgc

SEQ ID NO: 393810 - DNA, 122 bp, Homo sapiens
gataagtggtcagggtgcagtggctcaggcctgtaacccaacccttgaggaagccgagcccgaaggattgcttgagcccaggagtttcagaccagcctgggcaagtgagaccccatctctac

SEQ ID NO: 393811 - DNA, 122 bp, Homo sapiens
cactaatgaggaacagactttacctgttgtcttgggttccaaagacatttttcagtccaccgagggcatttacagcaggaaaaatttcattcttgtttggaaattctctttggaacatctta

SEQ ID NO: 393812 - DNA, 122 bp, Homo sapiens
gtaggtgttgcggatcgctgatccgcacgctcctgctactgactcaccgctgttcgccctcgccgaggaaccagtcgctcaggaagccgcgcagcagccatggcttttaaggataccggaaa

SEQ ID NO: 393813 - DNA, 122 bp, Homo sapiens
cggagctgtgcaccggcctgtgtactgtaagccggcccgggtcgtaaaagtgtcagcacgcgatatatttcttgcaggggatcctctctggctcttgccagcgcctctcccccgtggctggc

SEQ ID NO: 393814 - DNA, 122 bp, Homo sapiens
acgtgaggcccccgcgaccagggctctcagggagacagtcaggggggtggccagacagagcgggagcagcagtgtccccacaaatcccagcagccctcttagctttagcagcccccacagcc

SEQ ID NO: 393815 - DNA, 122 bp, Homo sapiens
gcgcggccgccccgggttagacacgcgtctgtttgcttgcagatgtgcacacactgtctccggcttcttctgtggcttggtagaagccccagctttttaacttattaagcacagctcttccc

SEQ ID NO: 393816 - DNA, 122 bp, Homo sapiens
aagtctttcttaattcctgtactcctggtagaattgactcctccttcctctgccttgcctcgctacgctaagcagattttatcattgcccatttaattgtatgtatttgttaattttcctcc

SEQ ID NO: 393817 - DNA, 122 bp, Homo sapiens
tgataaagccagaggctcttcagaggcgccatcttggatttcgccagcttcagctggtttcgtcctaagaaggaacttcgaaacacaggcattctttttcctgaaaataagcagagttacag

SEQ ID NO: 393818 - DNA, 122 bp, Homo sapiens
cccacgcactcctccgtgttcacatggtaggaactcccacaggcaaaagcctttccgatgcgctctgcagccgcgggatcactcgggtgtttgaacgctcgcgcgctcctcccattggagct

SEQ ID NO: 393819 - DNA, 122 bp, Homo sapiens
cacatggggaggcacagggctagtggggaggcagagagagtaggggtgggggaatgtgggcgaaaggctttattgtggttcttgcaggaaggaaaggcaagacaaggtaagtgggcttaaga

SEQ ID NO: 393820 - DNA, 122 bp, Homo sapiens
aattccagtgggcacagacgttactaaaaagcacgagttcggactagaagcagcctcgtccgtgagctacgacgttttcacgccttcccacgcagcagttctccatggaaatgtgtttactt

SEQ ID NO: 393821 - DNA, 122 bp, Homo sapiens
actcttggtgttcgcagacctaacagtgagggacttactgttagcaagctcaaagatcttcgctatcatgcaatttgcaactttgctgaggcatgagtttaaatttcaggtgatataaagtt

SEQ ID NO: 393822 - DNA, 122 bp, Homo sapiens
gggaggacccccccaatgaggctcaggaatttggggtgcaaggcccgctgcggggaggcgcggggggcggggctgcggccgggcctggagcctctcgcgctctcccccctccccggctcctg

SEQ ID NO: 393823 - DNA, 122 bp, Homo sapiens
ccgccccactcacctccgcagttcatcaacttgcgcacgttggtggtggacatgatgcggcggctccgcaggaagtccgcgatctggccgccgatgggcacgatgatggtcatgaccaggtg

SEQ ID NO: 393824 - DNA, 122 bp, Homo sapiens
cttgtcatcctcttaggttcttagcatcatcttattctagctactggaatgaaaagagagcgtgggggaggcagtacacctgcttcttaaaagccccggccaagaatggcatacctcattgg

SEQ ID NO: 393825 - DNA, 122 bp, Homo sapiens
aggggagtggaatgtggaaagcagccaggagcttagaatccgaaggctgaagtcatacaacgggatggggaggggaacatagaaggcggccacctggctgatattagaggaaaacagctgcg

SEQ ID NO: 393826 - DNA, 122 bp, Homo sapiens
gcctcccaaagtgctgggattacaggcatgagccaccgcacctggccctgatccctgcttcgagtctcacactttgtgtatggctcctgtgtccacatgaatgttcacacatttgaatacct

SEQ ID NO: 393827 - DNA, 122 bp, Homo sapiens
gagttcatcctccaaattatttgatttgtgcagacaaatgaaacaggtttaattcaaatacgatggctctctacctaagcattgctaaatgaactgaaaatcaatgtgccaattacttctgc

SEQ ID NO: 393828 - DNA, 122 bp, Homo sapiens
tgataaaaacattactagcttctgattattctcttgaaaactctctttctacactaattacgtaatttgagacagaatgaacaagtgactgtatctgggaggcttcctacaattagagaaga

SEQ ID NO: 393829 - DNA, 122 bp, Homo sapiens
gtactctgcaggctgagatgaaaagattgcttgagccctggagttgaaactgcaatgacccgtgttcacaccattgcactctaaactgggcaacagagcgagacttgtccaaaaaaaaaaaa

SEQ ID NO: 393830 - DNA, 122 bp, Homo sapiens
ggaaggaggcaggcgaagcctcagcgaaggcacggggcgggtgcaggaaaaaagctcaggcgtctggcctggatcgctcgttcttatctagcagatagatctcgctgtctctccctctctaa

SEQ ID NO: 393831 - DNA, 122 bp, Homo sapiens
gaggggggccctacctggccaggtgcgcggggtctcggcacaggggcagcaggagccgaccgccgcccagcggcctcgcggtccggtcggtccggcagccactccctgccgcggcccgcccg

SEQ ID NO: 393832 - DNA, 122 bp, Homo sapiens
cacattagtcccagagccaagcaagaaagcacgtggggtatttgggtacctgaaatgggccggtttggccaaattaagtgatgtaggtatgatccaggcctcaaagccacaataacggtttt

SEQ ID NO: 393833 - DNA, 122 bp, Homo sapiens
tgtcgggccacactttcccaagtctttgcactggctgtagggtgggctttatcctcgggacgtcctcctccccaagtccagcctgcagctggaagtcttcactgatctccatctctcctccc

SEQ ID NO: 393834 - DNA, 122 bp, Homo sapiens
tgcgtccctaaactcccgggggaattagacttgtgggaatgttctggggaaactcctgcgcggtgaattgctgggggctccgcccccccgataggtggaccgcgattggtctttgaagaccc

SEQ ID NO: 393835 - DNA, 122 bp, Homo sapiens
aggtgtccacgagccttgcccccatacagtacctccggaggcaatgtagaatccgctgggcgcatacttggccaccaccacctgatgggcgtgctctgtgtagatgtcagcaagggctgggt

SEQ ID NO: 393836 - DNA, 122 bp, Homo sapiens
gtcccgtgcctgtgcccggcgcgacgcgatctccctgctagtcgggctccgcgtgctccccgcgcttcccgcagcctccgcgcagcccgcagcgccctccagccccgcctcgcggccgcggg

SEQ ID NO: 393837 - DNA, 122 bp, Homo sapiens
gagacggtttggcggtgagtcctgggccaggcgcagctgaaaggcccgcaacccgggaaacgtcaaaacaaacagaaggacttgggattccggagcagtcgcccctatcgctgctcctgcag

SEQ ID NO: 393838 - DNA, 122 bp, Homo sapiens
ttgccaaacttgccatgtccagagcgcggaggcagcctgggccacgcgctcaccgcagcccgggcacctcgcgctcctccgctttgttgtgttccgccgccagtccccctgcgcctgcctgc

SEQ ID NO: 393839 - DNA, 122 bp, Homo sapiens
atgcgaatacagcaagcacagccttaatccactggagtctaaagtgggataaacccagggcgctggccatggcagaagtatatttgggactccaccgatggatgtactgttctaagttgaac

SEQ ID NO: 393840 - DNA, 122 bp, Homo sapiens
ctgccgttcctcccagcccagcgcgtccagggagcgcacgaccccggggaagcacctcagcgccacgccattctcccgctgcttcacctgtggagagtgccagatgccaggcctgagtgaag

SEQ ID NO: 393841 - DNA, 122 bp, Homo sapiens
tacaatccacgagaggcggcgccctccgccctccggtcttcagcccggcccctggccccgcggcatttggccacgaatcttaacgcacagcctcctcccgggaagcgaccatgcccgcccgc

SEQ ID NO: 393842 - DNA, 122 bp, Homo sapiens
acccatttcgcagatgggcaaatccacaagccaagtcgtgccgcccagaagaggcagaaccgggatttgaacctaggtttctcattctgcacctgaagaaataaatgtctggtccatgcgtg

SEQ ID NO: 393843 - DNA, 122 bp, Homo sapiens
ccacttggggaagagctgctaactttacttttccgctgctgttggttccggttcaaagctcggtttgggaagtaagaggaggactcggagactttgaccagagcactccaggccaaagtttt

SEQ ID NO: 393844 - DNA, 122 bp, Homo sapiens
acctcaggtgatccgcccgccttggcctcccaaaatgctgggattacaggcgagagccaccgcccccggccagagcactgttttcaaactgtatgttgtaccccactaattggtcacagtat

SEQ ID NO: 393845 - DNA, 122 bp, Homo sapiens
ttgtattttcccggattatccgcccgctcccgtgacctgcttcgagaacgggaagaactccggctccgagacttgtgtggcttctgggggtacttgcagtccttggacttccgggagccccg

SEQ ID NO: 393846 - DNA, 122 bp, Homo sapiens
tgaacatacactccctttcccttgggtcattaaaataatctttttataggtggtattttgcgatgatttctgtgtctggagtcttctcggtcacgttttctgttatatttgcctatgtagct

SEQ ID NO: 393847 - DNA, 122 bp, Homo sapiens
ttgcggatttcagaactgtggataagagatcgtggggttgcaaaacccccatttcacagacgatgctgctctccggggaggctgcgaggttacctgctgctgcccgcccgcgcctcccgggc

SEQ ID NO: 393848 - DNA, 122 bp, Homo sapiens
caactgaggaagcaaagtttaaattctactcacgtttgatttccaccttggtcccttggccgaacgtccaccacagtgagagctctccattgtcttgctgaacaaaaacccttctcaccaaa

SEQ ID NO: 393849 - DNA, 122 bp, Homo sapiens
ccctcagcatatggcctctggcaggatgcccccctgcagcgcctcctcccacccaggccccgggtgccctgtagccaggtgtgcccagggctgaccctgccatcctggccaacgtggtgaaa

SEQ ID NO: 393850 - DNA, 122 bp, Homo sapiens
ctagctgactattaaaacttatttttttgcatgagcaatgtgcacttaccaacgtccttccgaatcctatagagaagaagatgtccttgtttggttcccacaagaagccattcctctggaaa

SEQ ID NO: 393851 - DNA, 122 bp, Homo sapiens
acgcgggcggcctgcaccgctcccctcccagaggctccaggcggggagttcccgggtaggcgggccaggagaggcagagagggaaagggcagaaccagatcccccatcacagcaggcttttg

SEQ ID NO: 393852 - DNA, 122 bp, Homo sapiens
gcctctccgagggcagcagtgcagcccgtggggcggagcccgggcccaaattggagcctccgcgttgcgctttcaggataaacacagctgttttgaccacactttatcccaagggaacgcct

SEQ ID NO: 393853 - DNA, 122 bp, Homo sapiens
tttccgagggtgccttgttttagtgggacttttatcaaagtgtttatctccagtcgtagacgatgttattttacagtccactgcagtactctggtgaagtaaaataaaacatgaaaataaat

SEQ ID NO: 393854 - DNA, 122 bp, Homo sapiens
gtgtacagcctggatgctgcagtgtggtttaaaatgatctacagattttttcttttccttcgatgttctgttgctgtctttctattgttagctattatctgtgcctcatgcatgcttttgcc

SEQ ID NO: 393855 - DNA, 122 bp, Homo sapiens
ggaaatgcagagtgtttccaaggcatgcatcatgcagatgctgcagaagtagcttctacccgctgctcaccgctcccatcctcgagtcccgcacactgcccggccgagcactcagctgtcgg

SEQ ID NO: 393856 - DNA, 122 bp, Homo sapiens
tgcaggaaagtggactatagtttgaagctattctacccccatcatacctttagcatttagcgatcctccctggtcctcattctttcccatgaactcctgtgaagatctatagactagtttat

SEQ ID NO: 393857 - DNA, 122 bp, Homo sapiens
tggcacctaatggcttacaactgtaataaatttcctgaaattggacctcagagggagactcgggtgcacactccccctgaggagtgtgggcagccctctccccagctcggtgcacaccaggc

SEQ ID NO: 393858 - DNA, 122 bp, Homo sapiens
ccgccttccgcccgcgccttcagtccgcgcggcgacagcgcccgcccgcgcctgccccggcgtgctgccccgcggcttggccccgctcggccccaggtcgtgccttccctccccggcggagg

SEQ ID NO: 393859 - DNA, 122 bp, Homo sapiens
atccacaacgcagggcgataggcgccccccgcgacgcggggagtcatgtcacccccctctcgccccctggatatgacgatccacatcgcaggagtgtgaggcaccccccgcgatgcggggag

SEQ ID NO: 393860 - DNA, 122 bp, Homo sapiens
agaagaccgatcactccatcacctacaaaacctcccactacaccaacggggcccctctggcggtggagcccaccctaaccattaagctagagcaagaccgtggctcgcactgctgagggccg

SEQ ID NO: 393861 - DNA, 122 bp, Homo sapiens
ctggtacagagagggaacccgggtttttaaccctaaccatgcactgaatagtttaacgctcggtgcttagtttcctgtaccacaaagcaaaccaaaagacagattagcattgaatctaacag

SEQ ID NO: 393862 - DNA, 122 bp, Homo sapiens
cgcccctcccggcacagaaactcggggtctcggccaagggtgggcctcacggaggggcgacgacgctcacctctcctctgcaagatcccgcggaacgccacctcgtagttgtgtctgcacac

SEQ ID NO: 393863 - DNA, 122 bp, Homo sapiens
ccctcgcccaggtagcctccaggccccgccctcacccaggtagcccccaggccccaccctcgcccaggtaggccccgccctcgcccacgtagccctcaggccccaccctcgcccagggagcc

SEQ ID NO: 393864 - DNA, 122 bp, Homo sapiens
cagggtaatcagtcccttagtgggagattcccttccctgggtgacagggccctgccttcccgggagcagagaagaaaaagattggggaggagaacaagaagcaagagtgtcggtcgctgtct

SEQ ID NO: 393865 - DNA, 122 bp, Homo sapiens
gacaagcacggagactgtgagtagggggccagccttccagatccagtgtcctccccacctcgggagtaactgggaagtccctgatcccagataggaagtggatacttccctgtaggaagagg

SEQ ID NO: 393866 - DNA, 122 bp, Homo sapiens
cattcagttccagaagcccagcagataggtgggcctataggacccgcaggatctgcaggacgctctccgagagctggagcaagagcgccaagggcggggacggaatgtgggtttaagggaaa

SEQ ID NO: 393867 - DNA, 122 bp, Homo sapiens
ttggcgaggtctatgggtgccggaaggctgacacaggcaagatgtgagcaccctgctcggcgcggtgggatacctcggggagccgggctcctgggggaccctgacaggccgggttccacaca

SEQ ID NO: 393868 - DNA, 122 bp, Homo sapiens
gcggcgcgcgtggacctgcagaagaaggcgcaggcgctgcaggaggagtgcggctacctgcggcgccaccaccaggaagaggtgggcgagctgctcggccagatccagggctccggcgccgc

SEQ ID NO: 393869 - DNA, 122 bp, Homo sapiens
agccctgtgttaatcacttgtcatggtgtactttaatttttacttgcctgtttctctttacggtactttgacttcaaagggtggggctgcaaattagtcatctccttagagtccagccttgt

SEQ ID NO: 393870 - DNA, 122 bp, Homo sapiens
atgcaagaccacttgcatcagcagcgtgtgtcagcaagatagcagaagcaggaagagagccggccagaagacacttaccctggctggaagagatgtacccctgaagatcaagaaataggcca

SEQ ID NO: 393871 - DNA, 122 bp, Homo sapiens
tcctccctccagtgagactcctcagagcctggaaaattcaggctcactccagtgcctttacgtttcctgtgcacacatttcctgcctgtgtgcttctggacttaggcagaagcagaatccta

SEQ ID NO: 393872 - DNA, 122 bp, Homo sapiens
cggacccacacatggtaggaacgtgagggggcgggcctgttccggcgcctctgggccaatcgccaggtggaaggcactcagccaatggcagaggggctctggggccctgtgggcggggacta

SEQ ID NO: 393873 - DNA, 122 bp, Homo sapiens
cggactagggcggattcgcaggaaaggagattgccctctagaggctgtcttagcccaaagcgcaacctgttgtctaggcttggcctgccaatttgaccagcagggactgatgtgaaagactt

SEQ ID NO: 393874 - DNA, 122 bp, Homo sapiens
ttgagacaagcgtgaccaatgtggtgaaaccctgtctctactaaaaatacaaaaattagccgggcatgctcgtgcacacctatagtcccaactactcagcagggtgaggcaggagaacctct

SEQ ID NO: 393875 - DNA, 122 bp, Homo sapiens
ggtgacccactgccaatcagcccactttgtgaccagcccacctcccatgggaatcttgtccgttggtggtgagtgctcttacagcctctaagtgttcaaaccatgcctttcttaagtaaacg

SEQ ID NO: 393876 - DNA, 122 bp, Homo sapiens
atagaatagtaaggtgcctcagaaaacacacacaaattttatccaggtctggagacatgacggcaaagacttggcaggaatacatccaccttctccttatcccatctagaaggcagaaaggg

SEQ ID NO: 393877 - DNA, 122 bp, Homo sapiens
attggcctgctggtgccaggccaccattggtccggacgtcctgggaggcgggccaaggctcggatcctagttttgattggccgttgtgcaaaccacgtagtggggacgccctctgattggat

SEQ ID NO: 393878 - DNA, 122 bp, Homo sapiens
taagtgattaggatcagaggaatctctgtttccaagagaagggggactgcatggccagaccgtgggctcgggccccagtctcctgatctccgccaagcccagggccccaggaagcggcccca

SEQ ID NO: 393879 - DNA, 122 bp, Homo sapiens
cctccacagcgcagcataatatccatgtgaaccggttagtgctgttagcattagaaatgccggattcttaatgcttagagctgaaagcgaccgtcctcagggccagcgctgtcacctcacac

SEQ ID NO: 393880 - DNA, 122 bp, Homo sapiens
gctggggtgggtgtcccaagacctggtccctggtctttgtatgtgatccagaaaaacctccgaggcttccctggcctttagtttctcttctgtacagaggaggcaacaataaacacttggag

SEQ ID NO: 393881 - DNA, 122 bp, Homo sapiens
accgaagctaggaatagacgcgctgagggctaggagggctccgaccggacggaaggatgccgcatcgcgggtcgctgcccggagctgtgcgagttcggtgctcagccccaacggcgctttag

SEQ ID NO: 393882 - DNA, 122 bp, Homo sapiens
tgtcagctgattggatggtgcccacccactttgggtgacggaggatcttccttattgagtcgactgattcaaatgtcaaatctcttctggaaacactttcacagacatgtgcagaaataata

SEQ ID NO: 393883 - DNA, 122 bp, Homo sapiens
caatcggaggcttgaaagtagaggtgtcccgcctcgagccaaacggaccaataggaagtgcgggcggcgtgtttgaaagcgaggccaaagtgggtgggagcgcgtgctgttgggagttgctt

SEQ ID NO: 393884 - DNA, 122 bp, Homo sapiens
ggcgagcagggcggtcctcgcaacccgccggggctctgggaagctggagaccaacgcgggcggaggagcacgagcctgtttgttgctagaaaggggctccaagtccgctgcatgttcgtggc

SEQ ID NO: 393885 - DNA, 122 bp, Homo sapiens
gaactaccggattcgaagggaggatggactccagggacctgaatttggagggaggaagagcggagggcctaaaatctgatcccacccgaggaaaaagctgggagtccggctttgcgggttcc

SEQ ID NO: 393886 - DNA, 122 bp, Homo sapiens
cgaccccactgcaaaaggatatggctttgttcatgcgtatcactactcgaagccgggactcgttggtgggcggggctagtctggctccggccgctgcgtggagggatccggagcgggagagg

SEQ ID NO: 393887 - DNA, 122 bp, Homo sapiens
tggacttttggagtgattcagaaagaagggtaatgtcaaatgagtcattttcctctactccggtctcagtcttagctcttggccaagataacacatcctgacttgccttcataaaagctgaa

SEQ ID NO: 393888 - DNA, 122 bp, Homo sapiens
agatccagagcgcagccgcgttctctgaccctcccggctccattcccggggggttacattcgactccatctgcaaacactgcagtggaaactaatggtcagtcgattgcgatttgcatctca

SEQ ID NO: 393889 - DNA, 122 bp, Homo sapiens
gcacctacccgcagagcactccccaccaccccgccaccaccgacgagccggcgcgaagtccgtacctcgatgtccgccgagtccttactgagcacaggggccatggcagtgcctacagtctc

SEQ ID NO: 393890 - DNA, 122 bp, Homo sapiens
gctgtaaggcgaacagatcatttattttgctctcaagatttggtctaattatgtcaacaccgacgctacgacgagtggggcggcgctgtggctttggagaggatgcgcgcaccggcccagcg

SEQ ID NO: 393891 - DNA, 122 bp, Homo sapiens
taaaattgacaagacctcagggataagggaggtgtcaagggcgagtcctgtggtttctggcgataccattccctggagtttcgtgcactggaggaaatagttcggtaagtgagaactcaaag

SEQ ID NO: 393892 - DNA, 122 bp, Homo sapiens
ctgagaccattggttcctttgcacctgtgtagtatcctcagggagggttcccagggcgctcgtctggtgttgcccctctttgaggcacctcactcattgaccattaagcaagcatcgagtgg

SEQ ID NO: 393893 - DNA, 122 bp, Homo sapiens
tggacggctgcaccgcccagcgcacaggcatgaagtatcggtaagggccgggcaggggggcggtggggtgggaagtctgatttcagccatataaatatgtataaaagggctgggcacggtgg

SEQ ID NO: 393894 - DNA, 122 bp, Homo sapiens
ggctgcgcaggggctgccatggcagcactcttccctccactccagtggaaactaaaggaccgctctgggcagcggcaaccctggtccacttcccttaagttactgccggggcgcttaactcc

SEQ ID NO: 393895 - DNA, 122 bp, Homo sapiens
taattgaatgcagtgaaatatctttctatgttttaatgctagttaccagctgagctaaggcgaggcccagcgtaaactgatgccctctgtgataaacgcaggtggggaaataggctttgttt

SEQ ID NO: 393896 - DNA, 122 bp, Homo sapiens
tccgctgggtctgggcacccagcttcccggcctgcaagggcctgtccaaaggacgccgaccgatcctgtgggcctcttcgagcgggacccccaccgtgcctcccctccagcctttcgtcggc

SEQ ID NO: 393897 - DNA, 122 bp, Homo sapiens
tacgctgtgtgcagaagagtccagtccagccaggggtgcagtggcaggccccgtcctcggcgctgcagctcgccccgttgtggcagctgcatgcgtggaagcaggcggggccccagaacccg

SEQ ID NO: 393898 - DNA, 122 bp, Homo sapiens
aaacaatggccgcagcccggctggaccgaaacggaagtcccaggtcttggagtagacactcgcagtgtttccatggatacgggaggggcggggcgggaagagagagcgcgggaaaacgtgac

SEQ ID NO: 393899 - DNA, 122 bp, Homo sapiens
ggtttctccatgttggtcagcctggtgttgaactcccgacttaaggtgatccgcttgcttcggccccccaaagtgctgggattacaggcttgagccaccgcgcccagctaagattaatcttt

SEQ ID NO: 393900 - DNA, 122 bp, Homo sapiens
cttacagacatttagcccttgctttttctactaaggccaataatgaaatatagctccaatcgtctatatataaacacacagacacacattagacctcaaagaattgaatttatttttatggg

SEQ ID NO: 393901 - DNA, 122 bp, Homo sapiens
acccgagagaaccccatggctgtgctcagaggctggccgggaaggtaggcgaggccaccccgatgggagtgctggggccggccactccccagtccccacggcctggctgcttttgcggtcgc

SEQ ID NO: 393902 - DNA, 122 bp, Homo sapiens
gggccaccctcaggggccaacctggagcccaggacaggcctctaccaggactgcctttcccgacctcctgcagccttgagggaaagaggaggggctgggccagctggggcgtcctggagttg

SEQ ID NO: 393903 - DNA, 122 bp, Homo sapiens
aatgagttatttgcttgggatgaaattaagccgagacagcgtgagcttggaaaatactgccgtgcaggctctccccggttcttcatccttctcagcggctgctttctataaatagagccgtg

SEQ ID NO: 393904 - DNA, 122 bp, Homo sapiens
cctctctggaaagcacgtggaaacgctgaagggaggagtgagagggcaggcagcctgccgcggggaggaaagggttaagcctgatttcttttaattgaactccagaactggtggccccaggc

SEQ ID NO: 393905 - DNA, 122 bp, Homo sapiens
cacgtgctggcccatgggcgacgcgcggcttctccagggaggcggccctgggcgcgggggcgggcgggcaaagctggctcagtccatcgtggtccctttgaagagctccaccagctccttgt

SEQ ID NO: 393906 - DNA, 122 bp, Homo sapiens
gaaatgcgctgacccgggctcatggtggagggtctgcagaacactggtggccaaggaagccggtcagaggggccaagagcagtgtccatcctcaggcctcagtggctgggcactccgagggc

SEQ ID NO: 393907 - DNA, 122 bp, Homo sapiens
ctctggcggatcacaggacacacgtgctctggcggatctcacaggacacacgtgctctggcggatctcacaggacacacgtgctctggcggatcacacaggacacacgtgctctggcggatc

SEQ ID NO: 393908 - DNA, 122 bp, Homo sapiens
ttcagctgggatgacctcatcctctctagattttggtggcgttcccattttccacatctccgcctttatccaaggaattcccttctgactgtcttttctctaaaggtcgccccacccgcgtc

SEQ ID NO: 393909 - DNA, 122 bp, Homo sapiens
ggtttcaccattttggccaggctggtctcgaactcctgacctcaagtgatccatccgccgcggcctcccaaactgctggaattacaggtgggagccaccgcgcccggccggaatcagttttt

SEQ ID NO: 393910 - DNA, 122 bp, Homo sapiens
cccaccgcagccttacctgttgtgaactgagtggtggcagaatcgctctcgttggtccctcggacggcactgactgacacctcgtatcgggagccaggccgcagggcctgcactgagtattg

SEQ ID NO: 393911 - DNA, 122 bp, Homo sapiens
cttgacgggcgtggtgcagacgtcggtgcagcgaaagctgaggagccgtgggcgttcacccgggtgccggtgtttctaaatcgcgggctgcgacctgcatactcaggtgccagctgggagca

SEQ ID NO: 393912 - DNA, 122 bp, Homo sapiens
cttgcttttagcgactgattctaaaccaagccaacagttcacattctaagcatagtgctgcgtgtctttcatgtatttaagatatcttttaaaaatatacaagtctaagatatttagatcag

SEQ ID NO: 393913 - DNA, 122 bp, Homo sapiens
ttaaactcatatattgggattttcaccaaaataatgcttttgaaaaaaagaaaaaaaaaacggatatattgagaatcaaagtagaagttttaggaatgcaaaataagtcatcttgcatacag

SEQ ID NO: 393914 - DNA, 122 bp, Homo sapiens
actctaacattcaaggaaggaggagaacaggatgagctgagaggttagtgcaggccttcacgaggagatctgcttgcagcctcattaagttttgagtgggaggagaagagtactaataaatc

SEQ ID NO: 393915 - DNA, 122 bp, Homo sapiens
ggaaactttgcttcttgttataatctgcctgtctttgggcggcagcagctgtcatgggaccgggtgggcggggagaggcttgcaagctgactccttgcggtgaaacgcgacttggaagggac

SEQ ID NO: 393916 - DNA, 122 bp, Homo sapiens
aagggacaacactaagcaaaaaacatgcattttttaaaatgcacagattttcttcactgccgtttttgttatcattcctatgaattagtgatgccgaatttcattttctcatctgctgaaga

SEQ ID NO: 393917 - DNA, 122 bp, Homo sapiens
acagacctcagaactttttggttttcatgttagcatcagccgaggcgtttactgtgcccacgcatagtggggagtggcgggggacggagggagggaagcagagcctgctccctgggttaggt

SEQ ID NO: 393918 - DNA, 122 bp, Homo sapiens
aacccacagcctgagttcccggagctgctaactccctctcctgccacagaggcgtggaaacgccgtggggtcggagtagcttccactaggagccccgcggtccccagcgcccaggagaggag

SEQ ID NO: 393919 - DNA, 122 bp, Homo sapiens
ctggctaatttttgtatttttagtagacacaggggttcactatgttggccaaaagaccatcgaacccagcttacactcacacctagtccacaaatgtgcctgtgtccctgcacccttgctac

SEQ ID NO: 393920 - DNA, 122 bp, Homo sapiens
cagtagcctgctgccgcttgttttccttcggagcgttctcatctgtcttgttgatggcagcgttaatgagcccttgctggatgcacctgaagcagcagctaggcaacaggcgctggggagca

SEQ ID NO: 393921 - DNA, 122 bp, Homo sapiens
cagcggcggcggctggaacaatcactcggccaagggcgacagccaactgctgtgagtgcacggggagaggcccaggcagcggcggcggcggcggctctcgggttgcggtgaagaatgtcagc

SEQ ID NO: 393922 - DNA, 122 bp, Homo sapiens
taactcattaagcggacctagaaaatctgctcctgcctgcctttctggagttgggacagtcgatggtgagggtgggactatgtccatgtgccgtttggattgaatgcttcgtgtttctttct

SEQ ID NO: 393923 - DNA, 122 bp, Homo sapiens
acacaaacggaatgcctgcctttctggtggagatgcttatgttgcagctaacaaagagaacgaattcttttataaatgaagtttaggatcacagggtttccactacccttctggttatgttt

SEQ ID NO: 393924 - DNA, 122 bp, Homo sapiens
gacggctggtgcccgtgcttgaggcgtcaggccagctcgcggtgccagcactgccaggctcggctggccacaggaaactgtcccaccgattcctgctgtttgttttttcttaaggcattgtt

SEQ ID NO: 393925 - DNA, 122 bp, Homo sapiens
ggggcctgtccgctccacacgggcgtcccccacctccaaagagcgccccttccctccctccggctctcactagctccgcagccccgtctatttttagctcgtgcccaccccctggaccctgg

SEQ ID NO: 393926 - DNA, 122 bp, Homo sapiens
tcactcagttcacttattcaacattaatattttaaaccatttatgttcaaagccccgtggcgagtccccaggccatccctcactcgttgacctcctccatcacctcaatgcctttaccttgc

SEQ ID NO: 393927 - DNA, 122 bp, Homo sapiens
ctgggagaagcgtttctgttcgcggaacctgaacttcaggttcggagacgaggaggtggccgtcccccgtcccgcccccaacccgatgagggcgttgtcagccagggggcctgccaggtgtt

SEQ ID NO: 393928 - DNA, 122 bp, Homo sapiens
gtgatagtatctaaggcatgtagtgtgaaaagggctaaggcttaggtaaatagagtgttccggaaatgcatggagataatgtagctaaataacttcaaggactcagatgctagactaagagg

SEQ ID NO: 393929 - DNA, 122 bp, Homo sapiens
tgcacgtatcagctggagcagaatcctggcttccttccggatgggcctggggtccatgcccgcgctcactgccaagatctttctggcccctacggacacgagtttgcgacctctgagtcact

SEQ ID NO: 393930 - DNA, 122 bp, Homo sapiens
cattgtaagcgctcggtaaagttctaaccagtgtatgaaggcaggacagcgaagtggtcccggctacctgggttccagtctcagctcgccctgcgacttgttaactctgaacttaagttacc

SEQ ID NO: 393931 - DNA, 122 bp, Homo sapiens
ggttctgctgaaagactccaaggctgtggttggaactatcctaggaatgcaggccagaaacgcttctacagtgaccaacaaaacaatgaaacacatatcaaaagggacgggactgggaaccg

SEQ ID NO: 393932 - DNA, 122 bp, Homo sapiens
ctctgcggaatcctgcagctgctccaggtgaagacgcccccaaatccacactcgcgcagacgtcgcctggcacggaccctacccccttcggtccgtcggcggttctcttgggtcgtccttcc

SEQ ID NO: 393933 - DNA, 122 bp, Homo sapiens
ggatgctcttcttcttgctcttcacagtactgcttcctttttattcttcaattgaagtgccgtctcctcagggaagcctcccctgactgccacatctaagaaggtctccttattctcggtct

SEQ ID NO: 393934 - DNA, 122 bp, Homo sapiens
tagccccttagattcggccaagattgtcttattggtaacgtcagtttttgaatatcgtgacgccctgagagttatttttgtgttgtggtgaattgtgggttctgcaactcgaagtaggtgat

SEQ ID NO: 393935 - DNA, 122 bp, Homo sapiens
cgggcgaatatcaagtacttactgtgtgcttgcccctccactctggggaggctgggggtccgggagtgaagggggcagcgagaccgcgggctgctccacgctcaccgtcgtgtccatggaga

SEQ ID NO: 393936 - DNA, 122 bp, Homo sapiens
atcggggacacgtttgtaactgatctaccacagaggggagcccccctttgagaaagtgctcggtgggccttggtgcttacgcagccacggaccaacctgctagatggggccttcagtagggt

SEQ ID NO: 393937 - DNA, 122 bp, Homo sapiens
gggctgctcccatggctgtcagacacataaatgatgggttccttggcccctgtttcttcccgtctctcccaatctccctttcctttaccccaatccagctttggcctcccgagctatctcat

SEQ ID NO: 393938 - DNA, 122 bp, Homo sapiens
gacagggcgaagcgcctgggctcaggacaggggtgggggggcccgggtcagtgttgggtgcggctccgtgccgaacccccaccaggtgccgcacacaccagaaggtgccagacgagcccaac

SEQ ID NO: 393939 - DNA, 122 bp, Homo sapiens
agcgaatcaattaattctctgtatcaggagggatctggtacaccgagatactaatgactccgcgtccttctccaaaggcagccccacagaaggcgggcgccacgttaagctgtgctgctgtc

SEQ ID NO: 393940 - DNA, 122 bp, Homo sapiens
gctcggcctcaaggcgtgagtcaccaagggcaagtcccgtgacttggtcctcagggtctccggcctcggcacattaatcttcagacccggctttttcgacgccgagctgccgcccagcccca

SEQ ID NO: 393941 - DNA, 122 bp, Homo sapiens
tctaactcccagcgtggacttgcctcctttcctgggggtgactgaatgcccagccagggacgcgacgtctctggccagcagaaatacggcctcctccccgccgactgggcaaagggggacct

SEQ ID NO: 393942 - DNA, 122 bp, Homo sapiens
aaatagcacgacggccgggtccccgaagtcctgggtccccagggacagtcaggtctctcccgcccacaaaccgaaacccctgggagtgcccagaccccagggtcacagcccacccggggaat

SEQ ID NO: 393943 - DNA, 122 bp, Homo sapiens
cttttgtaattattggggggtgtggggaagagtggtcttgagggggtaataaacctccttcgggacacacttcggcatctgagtcactgggcctctgccccgctccccggcacgtcaggaga

SEQ ID NO: 393944 - DNA, 122 bp, Homo sapiens
tgcgcctggacagtgagctccgccttggcttcacgctgtcgatctcgctggtgtccaccacggcctcgttgatggtgatgagcttcgtgatgtgctcgatcacctgcgtccggggtacagac

SEQ ID NO: 393945 - DNA, 122 bp, Homo sapiens
agggagccgggcctagggtctgttcctgggaaggatctgttccgtggggcccgctggagccgcgttttcaatatgcaaagtgccggtgctgtgcagacctcggtggtggtggttttgcatgc

SEQ ID NO: 393946 - DNA, 122 bp, Homo sapiens
ccgggcggggcgcctgcggcccctgctcctccgcggccgctccgcccagccccgcccggccgtgcttcctgcctccggcctcgaccgccacctgcccacggcctccctgctggcctgcggta

SEQ ID NO: 393947 - DNA, 122 bp, Homo sapiens
tggccacactggccttgccttgagccaaggagtctccggggccgggcctcgcgttggctccgggccaccctcagacctgattttgcccctgcagtcgcccctgtgctcctcctggagtccca

SEQ ID NO: 393948 - DNA, 122 bp, Homo sapiens
gtaattccagaactttgggaggtcaaggtgggaggagcgcctgggcccaggggttcaagacgagcctgggcaacatagtgagacctgtctctataaaatatttttaaaaattagctgggcgc

SEQ ID NO: 393949 - DNA, 122 bp, Homo sapiens
tactcgggaggctgaggcaggagaatggcgtgaacccgggaggcagagcttgcagtgagccgagattgtgccactgcactacacggagcaagagtccgtctcaaaaaaaaaaaaaaaaagct

SEQ ID NO: 393950 - DNA, 122 bp, Homo sapiens
tacacaacataaaatttaccaccagagccctttttcagtgtgctgttcagcggcactgagcgcttcacactggtgcagccgtccacaccatcgtctctggaacgttctcagcttcccgagaa

SEQ ID NO: 393951 - DNA, 122 bp, Homo sapiens
ttcaatagctgtgtgatcttgggcgaagtatttaacttttcttggtctactttattttcacgtaaaatgcagaagtcagaaaagacaacttctaaggtgcagctttaagagttcctacatct

SEQ ID NO: 393952 - DNA, 122 bp, Homo sapiens
gggcagacttgggcaaacttcttgaaaagttgccttctactttcaggcctcctctctctgcgtctccgcccctgcaggagaacccaaatgctcagcttcatgctgacaccaccttctctcta

SEQ ID NO: 393953 - DNA, 122 bp, Homo sapiens
gtgaaagcaatgtgacttcctgtttgctcagaaaggggaaaaatacagggcttggcctcccggggtcttcagatatcagaggcttccaggagcacttggtcacggtctctgaatctctggaa

SEQ ID NO: 393954 - DNA, 122 bp, Homo sapiens
atgtaatttaaaactatatatgggtgtcttaggcggcatcggtcccaactctaaagtacgcgttagacgggcctgggccagaagtgggccatggagacctcgggacccgcagggctgccgcc

SEQ ID NO: 393955 - DNA, 122 bp, Homo sapiens
ctttggaacgccttctggttctactgcgcatgtgtcagtgtcagaccaatcggaatgcaccgtgaggtacctctccaccaatcagaggtcacattacctaaacttctgcctcaactccgccc

SEQ ID NO: 393956 - DNA, 122 bp, Homo sapiens
caactggttctctttttcagcaaccacagaagacaactgcaatgggacatgccataccagcgccaagtaggtagccctgggccacctctggggacagtgtaaaggggattttttcccaatat

SEQ ID NO: 393957 - DNA, 122 bp, Homo sapiens
ccaatttccttcagtgactctcaggcaaggaacatggctgtctccttgggagtgtctctacgggagccgccatcttggaagggcggtcatttctgccgcggagcccgcggtcccctactcga

SEQ ID NO: 393958 - DNA, 122 bp, Homo sapiens
acttggcctctgcctgcccatttcctgctctagagcctgggaacagtagtgcctgccaaccgagaagagtgaacggggtcctggcgcgtgatgccccgtcctgggcactgagaagagtgaac

SEQ ID NO: 393959 - DNA, 122 bp, Homo sapiens
ggcgctttcggggtgatgtcatggctttcactctgacgtcaccttgggcatatgacgtcacgcgcagccaccacgcccagaggccagggccctcgcgccaaaaccgaggactttcggtggag

SEQ ID NO: 393960 - DNA, 122 bp, Homo sapiens
tgatgcgcccctgggttaagccttaggaagtttgcgatggagacacccgtgagctgtgggcgcggggcctgaggcaaaaaaaatggatttgtgccgcgggcggtagagcttcgggctgttcc

SEQ ID NO: 393961 - DNA, 122 bp, Homo sapiens
atccacgacattatatcatctctgcgagccctttccagctctcaaggtacaataattccacgaatctttgttcttcaaaccaggaggttttctggaaaccttcttaaacaaccaggacagga

SEQ ID NO: 393962 - DNA, 122 bp, Homo sapiens
gtggactctggaactccctgtgcctagcagcgtggctccaggacacgggccctatgtcttcgcttccctccctgctcagggcagacccgcagcagtgtccagccgaggagcgagcagccgtg

SEQ ID NO: 393963 - DNA, 122 bp, Homo sapiens
gaggtcccattgttctggttcgcatctgcctctcctgcaaacaacaatgagatatgaatacgggcctgtgcaaagctgagcaccggacaaagcagctttctctgaggggtcttgacctagct

SEQ ID NO: 393964 - DNA, 122 bp, Homo sapiens
aagttctgttcttttgacattggccaaatgcgtaagtccctggtttcttgggctcaatcacggtccaaggttagtaagaaggccaacaatgttgtgagcaggattcaatttctacagggtca

SEQ ID NO: 393965 - DNA, 122 bp, Homo sapiens
cggtttcaaccagccctgcccccacctcgggatgcgcggcctggcacactcaccatttttcggcttccgggatgtcgtggagtcttagctctggatctcacagcatctgcaagtcagagggc

SEQ ID NO: 393966 - DNA, 122 bp, Homo sapiens
atatagtagatacttgatgaacaatggctggagtgatcacagtaaggattaaattgtagacgtgaagtgcctgacacatagtatgcactcaataagtgtgggttttctctcatttctcctcc

SEQ ID NO: 393967 - DNA, 122 bp, Homo sapiens
gatatccagtctagctcagcacccggcatgggaaggcccgtcctctcccaactaccctgccgtatcagtgtctttacaatcagctcactggctacgtgtggctctgtttctggaccctattg

SEQ ID NO: 393968 - DNA, 122 bp, Homo sapiens
ggcccgggcagcccgctgtgtggcaccgtctggaggagctctacacgaagaagtgagcgccgagcagacgggccctgggccccggcgatagagggagacggagggggcaggcgggcggagga

SEQ ID NO: 393969 - DNA, 122 bp, Homo sapiens
cgtgtccctgtccccctttcgtcgccagctgaggtgcaggtcttgctcaagaaggcgcttcgacctgaaagcaggcctttcaggtactgtgcagaggggccactgcctgtggctcgcagatt

SEQ ID NO: 393970 - DNA, 122 bp, Homo sapiens
gctgggcttcaggagactcgagctctactttttaaaaaccagcgacttacagaccctgggcgagttcgtcgccctctctgggcttgttccccacatgtaaaaggtaggtcatgatggccgtg

SEQ ID NO: 393971 - DNA, 122 bp, Homo sapiens
ggttgagagcagcgggcgccgttaaagagctgcagagtcacgtctgtgcaaagagaagaacgactctcgacctcctggatccagtcaccaccacggtcccaacacagcgctccaaggactcc

SEQ ID NO: 393972 - DNA, 122 bp, Homo sapiens
gccagagttttgggaagaattggccacctggtaaaataagtactgacccaacgacatcttcgcctactctttataataaagggaagtaaaatcacaggtaaataagatgggggcgttgccgc

SEQ ID NO: 393973 - DNA, 122 bp, Homo sapiens
tgctttgcgcagggaaggggactgaaccgttgaagagagatcagatcaactggggaaaggcgtaggtagctcagtgaccggggacctgttaaaacatgaaaaggccctgcttccctactgtc

SEQ ID NO: 393974 - DNA, 122 bp, Homo sapiens
gtcgcggaccctgaggcaggatccacgtggtccctgcgggcccagtgagtgacatcaccgcgacgctgcgcatggagcaagctctacacccgggagatggccacggtgcgcatgcagcaagg

SEQ ID NO: 393975 - DNA, 122 bp, Homo sapiens
cttgaatgatctgaatccccttcacagacaaataaggaaaatctgtcaaaagtgccattccgctggtgggaagtcctggaagacggttttctcgcgccctcgttctccctccaggtccgtcc

SEQ ID NO: 393976 - DNA, 122 bp, Homo sapiens
cccacattcctaagctaatattttcggcgcagcatcattcctgggtaaagaaatatttgtcgtgcaaaggagaggattggctttattaccatttagggagtcgtttgcaaaagacaacttgt

SEQ ID NO: 393977 - DNA, 122 bp, Homo sapiens
ccgctggcctccccctccctcaccccgccctgctccaccacctgcggggccggggggcggcgaggaacccgaccggccctgctacgcttgcgcccaccttccagatgtggaggcgcgtgctc

SEQ ID NO: 393978 - DNA, 122 bp, Homo sapiens
atgcacagttaattaactcttatgaaagttgtattgctctttaatttcataacacaaatccgtcctgaatttcttcagttagtgcatgtgagtttcaactttcttccctttactaattgtcc

SEQ ID NO: 393979 - DNA, 122 bp, Homo sapiens
gcccagagttacttattcctcccggtgggtttgtggtctcgctggtcttaggagtgaagccgcagacattcctagtgagtattacagctcataagcgcagtgctgacccaaagaacaagcag

SEQ ID NO: 393980 - DNA, 122 bp, Homo sapiens
agattaatgaccttcggattcttctttctgctctattgtttactttctgtgcagcgtacgcgtcctttttcctaagagcgccctaaacaagaattgaaaatgaagcaattcctggctaaaat

SEQ ID NO: 393981 - DNA, 122 bp, Homo sapiens
tcccagtgtgccaggcccacgggtgcgtgcgcggggcaggggccagggtggggcgggggccgggggccaggcagggcaggctcctttccgtgaggccacactgcttgtcctgatattcattg

SEQ ID NO: 393982 - DNA, 122 bp, Homo sapiens
attttttttctggaagtacccttcttctccacggtggaggatttaaggctgggctccaatcgaggcggaggctgcagggcccgcggggcgccccccgcccggcgcacgcctgcccggagccc

SEQ ID NO: 393983 - DNA, 122 bp, Homo sapiens
tctccaagtgacacaaccaaaaggaaacttaaaagaggggttcaacacgtactgattcctcggtcaccctgggaaagttgctatctctaattaaagggcttagattttattatgtatgtagg

SEQ ID NO: 393984 - DNA, 122 bp, Homo sapiens
cagctgcgtcccggggccctgaccgagccacacagagaagcaggtccacgaacgagtgtgcggcggggatggggtctctctccagcagacaggccacgcggggactcagccgcacccacagg

SEQ ID NO: 393985 - DNA, 122 bp, Homo sapiens
acggaagtagaggatgcaagcaccgagccccggggcccccagcattggcggggaggagctcgcggtgcgggagaagcaggggaccgcgcatcctggagaccaggtggagccagtgcgcccgg

SEQ ID NO: 393986 - DNA, 122 bp, Homo sapiens
gatccaaccgagccggtgggaggtgcccgcatgcgcctgacgcaggaagaaaaagaaagacgcagaaagctgaacctgtgcctctactgtggaacaggaggtcactacgctgacaattgtcc

SEQ ID NO: 393987 - DNA, 122 bp, Homo sapiens
cagaatacccctgtggcagtggcacagctcagagtgtcccatagacactgattttggccacggagatgctctctgtgtagtggttccggcctttctcatacaggacgtagagctggggggcc

SEQ ID NO: 393988 - DNA, 122 bp, Homo sapiens
cggcggcggcggcggcggcgggcggcggcggcggcgggaggcggcaggtggcgggaggggcggccgctgtccccgctgtccccattcctgtcacccgccccgtgtccctttcagatttttgg

SEQ ID NO: 393989 - DNA, 122 bp, Homo sapiens
ccaccctatgtggccgccagtccccggaccacagttactgggggctgcgaagtggctgtacgcgtagacaccgacctccgtagcagccctcgcgaagcccggatgcggggcgaccccgcgcg

SEQ ID NO: 393990 - DNA, 122 bp, Homo sapiens
cacagcgccgccgccgagccatgagagccttccggatgctgctctactcaaaaagcacctcgctgacattccactggaagctttgggggcgccaccggggccggcggcggggcctcgcacac

SEQ ID NO: 393991 - DNA, 122 bp, Homo sapiens
ttattggaggctggctcctctgaaggaggggccgggtgtctgtggccaaggcaaggggcacgcaccttgtcataccagcaccggatgctgagctggccgcacaggcagttggagctagagca

SEQ ID NO: 393992 - DNA, 122 bp, Homo sapiens
aaaagatgccagatgtttttttacagttgcataaaatgccattgtatagatgtactgtcacggccctttgtaagtgtggaactaatttatgatgtaatgagataataatgaataattaattg

SEQ ID NO: 393993 - DNA, 122 bp, Homo sapiens
accatcctggctaacacggtgaaaccctgtctttactaaaatacaaaaaaagtagcccgacgtagtggcgggcacctgttgtcccagctactcaggaggctgaggcaggagaatggcgtgaa

SEQ ID NO: 393994 - DNA, 122 bp, Homo sapiens
tttccactagaactgggaggcagcagtgcacagtgtagctgattgtactgcggcctgccccgagggccctgtcttatgctccacctcggaggccagcaggaatttcagtatttctgtgaaaa

SEQ ID NO: 393995 - DNA, 122 bp, Homo sapiens
gcgtgcggtagcccttgcccttgatgagctgggtttgcagttactttcctgtcctgatgacgtgtctgctttgtgttcacattttagcaatcatctggggggctaaatgtgacaaaccgaga

SEQ ID NO: 393996 - DNA, 122 bp, Homo sapiens
gatggagacgaaagctggatgcagcgggaggtctggatgtctgtcttccgctacctcagccgcagagaactttgtgaatgtatgcgagtgtgcaagacgtggtataaatggtgagcagggat

SEQ ID NO: 393997 - DNA, 122 bp, Homo sapiens
cagccacacccaacatggaggcttctcgtcttcccactggccggggaaggcgagcttccacgcaacctctcggcgggccccggctataggcggagaggcggcggaaggcgggacctaaaggg

SEQ ID NO: 393998 - DNA, 122 bp, Homo sapiens
ggacctggtgtgcaacgccgagtgggtgagcacaaaagaacggcagcagatgcggctcatcgtggacgtgctcagccgcctgccccaccactcctcggccgtcatcaccgccgctagcacgc

SEQ ID NO: 393999 - DNA, 122 bp, Homo sapiens
tcaattagatgttacgctgaactgtccccagtctaaattttctcatcagctcttcttagccgcagttttctcatctctaaaatgctgaattatgaatagtgctcactctgtagggttgtaaa

SEQ ID NO: 394000 - DNA, 122 bp, Homo sapiens
ggatattaaaaccttgtctagataacataaatacaataatcttacaagttacactggggccggcgtggtggctctcccctgcaatcccagcactttgggtgaccaaggcaggcggatcacct

SEQ ID NO: 394001 - DNA, 122 bp, Homo sapiens
tttgttgccttcaagagccagataaggaagacaatcactcgcccgccgatgatttggaaacgaggaaatcctatccagaccaaaggagtatctcccagccaagtcctgcaaatacagacaga

SEQ ID NO: 394002 - DNA, 122 bp, Homo sapiens
ggccagtctctttgtctggtcatgacctggttggtggccctagcttgtgccgagtggtcccggagtggcccagggggttgtgtgtggggagccagcgtgggcagcggaggtgctccctgggg

SEQ ID NO: 394003 - DNA, 122 bp, Homo sapiens
ttccttgaaacttcacacctactgtgaagtggtatttttaggtcctttatagttcttgaacgtcaagcaatgaaggctcagagaaatgaagctgtgtgctcaggatcacacgacaggcaaga

SEQ ID NO: 394004 - DNA, 122 bp, Homo sapiens
aagaaacacttccaaacccatggctctggccccctcctcaggccccctcctcggctacctcggccctggggactgggtcccccaccccaccgttgcgccagatgtggctgcaggggaggggt

SEQ ID NO: 394005 - DNA, 122 bp, Homo sapiens
acccctgcagctcttaattcattttgtgcggtggggctgatctcaccagtgagagtccaccgcagggcacacgccagctctcttgatgcccagagaggagcaaaagaggacctgctgtttaa

SEQ ID NO: 394006 - DNA, 122 bp, Homo sapiens
ccacgcccggggccgtggcccccacatcactgtgcagctccccggccccagccgcgcctccggggaagcccgtttttaacctttcatccattgggactcaaaactgtgagacgcgttcgcca

SEQ ID NO: 394007 - DNA, 122 bp, Homo sapiens
tgtcccggaaacgtgagtgtgtgtctgtgtgtgagtgtgtgtaatagcacagtaggcgggcgcagcacctgacctttatgtaagctcccacccacgaagcctcacccctcaaaatgctccct

SEQ ID NO: 394008 - DNA, 122 bp, Homo sapiens
ccacagtaatggctgccaagcagtgcttaccttgagagagggaatagcaggaaagccacacgacgagccttctaggatactggggatattctctctatagatctggatgtgtatatgatgtg

SEQ ID NO: 394009 - DNA, 122 bp, Homo sapiens
ccacctttgccctcatttccgcctccgcatgcagccttgggaactgcagggctgggaacccggagaaggcggccgggctctgggggagctcagaggtggccttccctgccaggaacacaggc

SEQ ID NO: 394010 - DNA, 122 bp, Homo sapiens
acacacacacacacacacacacacacaaaatatcccaaggggccagttctaagcaaggggcgttcaaaccccactaggagacggagagtagcaccgcggcatggggggtcgctcggggagga

SEQ ID NO: 394011 - DNA, 122 bp, Homo sapiens
tgcaaatgtgtgcgccttaggcgtaatggatggtggtgcagcagtgggttaaagttaacacgagacagtgatgcaatcacagaatccaaattgagtgcaggtcgctttaagaaaggagtagc

SEQ ID NO: 394012 - DNA, 122 bp, Homo sapiens
aaacattccactggatggggctggaggcacagggtgaggggcagcagctctactttgagccgtaaagtgctaagtgggagtttcgtttgccaagaaggggccttcctgcacaaggtggaagg

SEQ ID NO: 394013 - DNA, 122 bp, Homo sapiens
ctaaatgtggacacccgagagtaagctcccaccactaggcgtccagctgtaacagcttgccggtattcctagctaaacaaggtgcagcccggggtcactcgtacttgaggtggtcggcaaat

SEQ ID NO: 394014 - DNA, 122 bp, Homo sapiens
tccacttaggaaagccggggcggcttggcaatgggcatcctcggccctcaatccaaggtccgcaccttcccgtacgccggcgcgccgaggcaaagggccgccgggacgcgagcccacgcggt

SEQ ID NO: 394015 - DNA, 122 bp, Homo sapiens
aagccatgtagacagtatctagtaagttatcagacacaatttaaggagacatatccttttcgttctagaagctcatagaatttgtatagattccttagtaatatgatatttgaaggtgacag

SEQ ID NO: 394016 - DNA, 122 bp, Homo sapiens
ccacacagctgccggccgctagagccaagactgaaatccagaaccttagcctgaccaaaccgggagttcgtgaaagcacaaagccttctgtgggaaggagaagggaaatgaaagctaatatt

SEQ ID NO: 394017 - DNA, 122 bp, Homo sapiens
ggattgggctaagaaaatgattagctagctagaaagagtcatagaatacgcacgctgggacgtcagaaatgtcgaagtggggtaatttgtacaaaataaaaaatattgattttactcgtgca

SEQ ID NO: 394018 - DNA, 122 bp, Homo sapiens
gcacggccgtggggttctggcagtggtcgcagcctttggcgcaggcaggcagcgcatccccgaagtacttggcaatggcggcatggcggcacctggagcaggcagcaccgcagaggtgaggg

SEQ ID NO: 394019 - DNA, 122 bp, Homo sapiens
ctggccgccgggccaggaagctgtgagccagcagcgcctccttggtgtgctcgtcctgcgcgcgcagggccagggcgctgagcagctccgagttgttggacgtactgcgatagtacagcatg

SEQ ID NO: 394020 - DNA, 122 bp, Homo sapiens
aactttaaaacttccttcttcgacatctttgtgagtggccttggctgatcctggggaccccggaggcagagagggagcagggaaatgacttctgctgggttctcttttggcagcatatatcc

SEQ ID NO: 394021 - DNA, 122 bp, Homo sapiens
atagctgagatttctattttctatgtgagttcccccagatgactgtttcaaactctgtcgcgggtgtgtgccaatcctcttcccataccaacactgttactatctcttggtttcatctgcct

SEQ ID NO: 394022 - DNA, 122 bp, Homo sapiens
ctccagaggaaatcaaagctggcgagagccacgcggatgttcagaagaagtctcttatcccggcagcctttcacaggctgtggggcctcgtgccctctgccccccgacgccgtgagaggccg

SEQ ID NO: 394023 - DNA, 122 bp, Homo sapiens
catgcacaattgggaaaatctgaggatgaatggttgtcagagaccttcccagattccgcccgggccgaggcagcggtggacctggtggttctcgcggcctctcaccaccgccgcgcacatcc

SEQ ID NO: 394024 - DNA, 122 bp, Homo sapiens
gactcaccctcgagaccaacgcagaggcccaagatgacagcaggacatgccgaaccctaacggaagtgatccagatttgcctcagcaaagcagagaaacacgaagccagagcttcccaggtc

SEQ ID NO: 394025 - DNA, 122 bp, Homo sapiens
ttctgaaataaacaagattaccaaacaaataagcaattacagccttcagcgaacataaatcgcataaaaaagaagggggagaatttgatttacagagttactcttattataatattcaaatg

SEQ ID NO: 394026 - DNA, 122 bp, Homo sapiens
aggaccccgcgggagctcagcgagggggcgggcggccacggagtgaggccggggcggggtcgggcgcggggcggacgtggggaggggttggccggggccagaagcagggtgcagggcaggcg

SEQ ID NO: 394027 - DNA, 122 bp, Homo sapiens
tttatcagtctactagattcttgattgtctgacattcattaacagagcaaccgtaacacccgcaagaggaagcggctgtggcacctgtcccctgaacgacgctgggcgctcctgcactctac

SEQ ID NO: 394028 - DNA, 122 bp, Homo sapiens
aggcatttagtctacgttggaggtaaacaaatacgggtcctgcttaggagaaaagaaaaacgtcttacagccagtgtctaaactccaaacaacggaatgtatcaatgagaccttgtatatgg

SEQ ID NO: 394029 - DNA, 122 bp, Homo sapiens
gtcttcatgctgctgaccaacagcttcccagcgatggcaatggtgggacaggggtcattccgtggagagtcggggcgggtgctgtgttttcagaggtcacagccgccaccgccctgctccga

SEQ ID NO: 394030 - DNA, 122 bp, Homo sapiens
gccgagggggaaaggtgcgggtgtggacacctgtgaaggagcagcacgaatcgaatcggccgtagaggctgcagacgcggccgcgaaaccaccggccacgccgggcaagggacccagcactg

SEQ ID NO: 394031 - DNA, 122 bp, Homo sapiens
tttcagctgacagcctggatggccaggcctgtagcccattgtacctttctgcccaaggggcgatgtagccctgtgcactggctgttcagagatagtggtagatccatgtttatttttcctgg

SEQ ID NO: 394032 - DNA, 122 bp, Homo sapiens
aggcaacggtgcggcaggcgccggggttttctgaaacagaaacgtttaggggtggggaaacgtgttccgaggaactctcgttttgaagtgcgacatacacctgtcttgccctgttccaagat

SEQ ID NO: 394033 - DNA, 122 bp, Homo sapiens
gcccatagccagctggctgtatttcctggggtgaggatccagaagtatgcatggaaacaccgtgcacgcacctgctcggaagggccagcaggcgacgcctaaaacttctccatcctccctgt

SEQ ID NO: 394034 - DNA, 122 bp, Homo sapiens
ggctggcctcactggatctggctacgtctggttcatggtggggccccagctggctggaggcgggggctctggggcccctggtgagccccctcttctgccaggaggcgcccccctgcctgccg

SEQ ID NO: 394035 - DNA, 122 bp, Homo sapiens
cctgcttctagcttctctttttagcttctctaggttcgcgtcatcggctttccttttttccgaggttgaatccccagttacaagaagccgagaggtcttcttgtcataaaattaacttccct

SEQ ID NO: 394036 - DNA, 122 bp, Homo sapiens
aaggaagggggacagaacaggaatggccatcccggagctgggactggctgtcgctgggcccgaggttttcaagggttccggagcgcggcctccgtggctgggcctcagagactaacagactc

SEQ ID NO: 394037 - DNA, 122 bp, Homo sapiens
acgcatccagcccctctacctccggcctccggcggactctatggtcgcgagcggtctgggcgcgaccccgcctggccccacgcctagcctgctcgcgttcattcattcattattcattcagg

SEQ ID NO: 394038 - DNA, 122 bp, Homo sapiens
gtggggtcagtaaagggccggcccaaggtgcatcttttaggtcctgatgctaggagcagccgtccctgcccctatattcctctcactgggtaggtttgctcgggagtggctacctcccaggc

SEQ ID NO: 394039 - DNA, 122 bp, Homo sapiens
actaaggattctccagccctggctgagtatttgagggcgtggggcagctcctctatccttcgtgcctggggtctgtgcgcttgggtccaccgaggcaggacccccgggaacatcccgagtac

SEQ ID NO: 394040 - DNA, 122 bp, Homo sapiens
gactcctgaaaagtaaagacctgaaggagttggagagtgagccatatgagcacctgggtgcgtgttcttagcagagaacagttaagtgtgaagaccctggcacgtttgaggaatgacaagca

SEQ ID NO: 394041 - DNA, 122 bp, Homo sapiens
caggagcgcacaggaaatggcaggcttgagcacaccaggcaatttgctgaatttcagggccggcggcgcgattgtttgcggagctcaaccctgaccgcgcaggctggggagggggaacgtgg

SEQ ID NO: 394042 - DNA, 122 bp, Homo sapiens
gggaggcggggccagttagggtgagggtccctgggatcgacgggtcaggtcttgggctaacgtaggcactctcgcagttcctccgccttcaggaaggtctttttagcagaggccttacgggt

SEQ ID NO: 394043 - DNA, 122 bp, Homo sapiens
agagaagtggaaatgaaaaccaccctgaggcagtggaagcaattgaaggcccaccactgacgcgtggacagatcggccgcactccatccgtccagtggcgtaagactcagccataaagaggg

SEQ ID NO: 394044 - DNA, 122 bp, Homo sapiens
ctccccccaccgacccgctgctcacctggcttcatggcacccatgacggcacgggagctccgcagcactgcctcatagacggccttctggtctgcagtgaacttgccgttggcgggaaagga

SEQ ID NO: 394045 - DNA, 122 bp, Homo sapiens
ttgtaccctgactggcataaactggccactttcctccatcctggcataaaatggaggcaccgcgttgcctcgaaaacaaatcctcagaaacgattttaaaaagcattactgacaatttcttg

SEQ ID NO: 394046 - DNA, 122 bp, Homo sapiens
gggtaagccaaaggcatggcagatggtacacggaaatatcaccttcttaagaaacgttaacgatgaggggcaggccgcctgcatgagaattcctcagtcataggcaaccagatgggaggtgg

SEQ ID NO: 394047 - DNA, 122 bp, Homo sapiens
gtgaatattacttccaaaaaggagaaattacggagaaagaaatacattggcgtcttgagccggggatccagcagggtgaggatgatgatgattaagttccccatcaggctcaaggtgtagtt

SEQ ID NO: 394048 - DNA, 122 bp, Homo sapiens
actgtgccggagtccctgggggaggtgctggcgcgggatgaggacgggccaccctggcaccggaaggccagcagagggcactgtccgccagggctgggcaggctcaggtggcaaggacggag

SEQ ID NO: 394049 - DNA, 122 bp, Homo sapiens
tctgggtggattccagggctaaagcttggagagcaacaaatacagttcatgtgagagaagcgtcttgcaatgcagttactgtaactccaacatagttgctttggacctgtctatctttctta

SEQ ID NO: 394050 - DNA, 122 bp, Homo sapiens
aggtagacagaacaatggtgtttctctctgagcctatgaaatagaacaggtacccaaaaacgtgcaccaagataccaccacatgttgtgccgatggaaaccacatttactttgctggataca

SEQ ID NO: 394051 - DNA, 122 bp, Homo sapiens
gcccatcacccccctctccccctcccagttgacagacttcctgccacaatctccgcctcccgctgcagaagcagatgcaacacccagggccagacaacagacgtccggtgttccagcctgct

SEQ ID NO: 394052 - DNA, 122 bp, Homo sapiens
gccagcattcaaacatgatgctttcctctgcggcctggaagacaaccatacttgccttctcggggtcaaaacagcctcagagcctcccagaagccagctcttgggtttctgtcccgccccct

SEQ ID NO: 394053 - DNA, 122 bp, Homo sapiens
gatacaagggaggtccccgtttacataggtgaagattccacaattgcccgcgagtcgtaccgggatcgccgagacaaggtggcagcaggtgcttcggaaagcacacggtcaaatgagaggac

SEQ ID NO: 394054 - DNA, 122 bp, Homo sapiens
aaggaatagttcctccaggtgaaaaccgataataaggccctaatagtcactgaccgtgctcggcagaccccagcgctgatctaagcgctggcgtgtatgaactcatcgcaccctcccaacca

SEQ ID NO: 394055 - DNA, 122 bp, Homo sapiens
atggtggtgacggccatgacgggcttcaccaggcagaactgcagagtggcctgggggcgacggcacccggtgggcctggggccaggtcccccaggggcccaggaatggggattggggcagcc

SEQ ID NO: 394056 - DNA, 122 bp, Homo sapiens
cccgggagaggacgctcaccttgacaaagatctcgggccagttctcgtcctcctcgtaggcggccatgaggaggttacaggccagcacagacaccaggctgttccccttggccttgaagttg

SEQ ID NO: 394057 - DNA, 122 bp, Homo sapiens
gtaatccaagcactttgggaggctgaagtaaaagatcacttgagcccaggagtttgagaccggtgtgggaaatatagtgggaccccatctctaccaagtcaatagaaataaagaaatacaca

SEQ ID NO: 394058 - DNA, 122 bp, Homo sapiens
gaaatgatttgaagaggtgcgtccggaacgagggaaacttacgacttttgctaacgatcgcggcgtgctgtgtatctcctgtgccagttctgtctccccaagaccccaccccaagatgggcc

SEQ ID NO: 394059 - DNA, 122 bp, Homo sapiens
gtgcacctggatgtgaaagccgggaaggcctccctcactcccacacagagcccgtggattcgtctgctctctgggtgctgggttatctccttggctctgtgaaaaggtctctgcactgtccc

SEQ ID NO: 394060 - DNA, 122 bp, Homo sapiens
gaatgactggagggcgtctggggcccacacctgcctggctctgtgtcctcatgacagggtcgtgcggcccaagcttcatgggtgcgcaaggcacagcagtgaccacgtagcccttcctgggc

SEQ ID NO: 394061 - DNA, 122 bp, Homo sapiens
ccgggagaggcctggatctgggcctgagcagagccgctgcggaccagacacaagtggccacggcagccaaaccagattcccggatcccggccgacggccttggaatccgggtcacagagcct

SEQ ID NO: 394062 - DNA, 122 bp, Homo sapiens
agtttaacaatccagcgacggctgctctcagcaggggttcccagtgccagctgtgccacacgccaggcagcggaaaagcaaattagccctggaggtcttcgctcagtggcgggtgcgaggaa

SEQ ID NO: 394063 - DNA, 122 bp, Homo sapiens
cttttgtaggtcgggaggatctgagtacgggtgcgggcctgaccgtgggggcgccgaggtcgcagtctaaaacttagtagggcctcgatttccgggcgcgcttccgggccccggctggtggt

SEQ ID NO: 394064 - DNA, 122 bp, Homo sapiens
tcggccgctggggtttcctcccagctcctccgttccagcttctgcctccaacgtggtggccggcggcctcggggcagcccactgccccccacactggcacctccagcagctccagccttgcg

SEQ ID NO: 394065 - DNA, 122 bp, Homo sapiens
aggtggacctgggtggagctaggtctaccccctacctttcttgggctcccttttcttatccgggttcacgaactcagcttccatcactaaacttgctgtgtgaccctgagcaagacactcaa

SEQ ID NO: 394066 - DNA, 122 bp, Homo sapiens
tccacagtctgatggtgaagacattgctttgctctggacagcatagccagccagcttgggcgaatgtattgataagagtatcaagtgtcagcagtgaaaggaatatttggaattgcttcgtt

SEQ ID NO: 394067 - DNA, 122 bp, Homo sapiens
ccggcaacaaaggtatccaggttccctcatcaaaattgagtagaagactggcatgacccacggagagaaggaagagcagtgtggtgtggcagcccacctgagagccacacagggaagtgtaa

SEQ ID NO: 394068 - DNA, 122 bp, Homo sapiens
cagcctcctgtcggctgaaacgcgcggccacacgagagctcggctgcgttccgggactggcgtaattggcaggctccaggcaagagcgctcatgctgactggcgcctttgctgggacttgaa

SEQ ID NO: 394069 - DNA, 122 bp, Homo sapiens
ccggaggggtggggggtaccaggtccgcaccacgcactcaatgcaggtcagcgcccaccccggagtgagaaataaaagtagccgtcatccttgcacgtgggccctgggtggcggcgtgcagc

SEQ ID NO: 394070 - DNA, 122 bp, Homo sapiens
aaaacaccgggccggttgtattggaaacataataataattatttcctggaccctcctgctcgatcttacaaagggcccagtcaaatcctgcctgagttacccccattcattcttcattcatc

SEQ ID NO: 394071 - DNA, 122 bp, Homo sapiens
atcttttctttcaccagaggtctggcgccacaacaggcggtgctgtgggcaaagaggcagcgctttgccgcccgccctggcgatgctaagctctcgcgccgccgggccctccccttctgcga

SEQ ID NO: 394072 - DNA, 122 bp, Homo sapiens
ttactcttgtataatatgttgttcattatctccccagttagaaattgggaggtctccatgcgggtagaaattttggctacttttgtttattgtatctccagttctaacaacagcacctagca

SEQ ID NO: 394073 - DNA, 122 bp, Homo sapiens
ggacatatgtgtcacctgggctgctttggagatctcaggactgtgacaggacagtgacaccggcctgcaaccatagaccaccagtgtgcacttataacctgggctcagacagatatgctgac

SEQ ID NO: 394074 - DNA, 122 bp, Homo sapiens
gcagccgggcctagccagagcagtgacaaacgcatgcacacatgggttcacccacatacacgtgcatgcttacatgcacaaacactgcacacacgcacgttgacacttcaaggggtggaggg

SEQ ID NO: 394075 - DNA, 122 bp, Homo sapiens
aaaaatggggtatgacccgacttcctcgggctcttgctggagactggtttgtccatcctgcgcatgagcacctctcctgggtttggggcacctgctcccaccttggttttaatcccaccccc

SEQ ID NO: 394076 - DNA, 122 bp, Homo sapiens
agcggcctacgttgtggcggttccctggtgaatgcgccctggggttgaggcgtctgcgggcgttcggacgatgccgtgacgcggcacggcgacactgttggcaatatgagcgcacccctgta

SEQ ID NO: 394077 - DNA, 122 bp, Homo sapiens
gtcgtcaccaggatggggagcaggtggtggtgaccacatggagcagtcacacctgagagacgaaggaagccgtggcgtgaatccagccacccttttctccctcagccttttttttttttttt

SEQ ID NO: 394078 - DNA, 122 bp, Homo sapiens
ggggaaatagccactacagtccggagtctccccactccctccccaggcccacttccccgacgaagtttcactccattgttcctgggcatctccaggggtgtctagtttgaacaagaaaagga

SEQ ID NO: 394079 - DNA, 122 bp, Homo sapiens
gctcgcctgggcagtctggctcccgctttgcgcgggaaaaaataataataataaaaatatcgaaaaagggaataaaagtaaactggctgcggcgcaggaaagggctctgccgggcgccggac

SEQ ID NO: 394080 - DNA, 122 bp, Homo sapiens
cttccgagctgatgggtggctggccccaaagtcccgacaaggtccccgaagttggagggccgggggtcccgcccgctctgcaacgcgcaaggcgacccctgttccgggcccgaacgggtcac

SEQ ID NO: 394081 - DNA, 122 bp, Homo sapiens
tgggcgatttcctggggggagtggcttaagccgcttccccaccggccagttggctgtagacggtccatgctcaatggtcctctacagatatgaaactggttctggagtgagacgagctcggc

SEQ ID NO: 394082 - DNA, 122 bp, Homo sapiens
cttaaccaatctcttctgattccgaatcggcaagctcagttgtccgggttttgcctccagcgcctgcaggggccctcccacgccaggacagccacctggccaccactgaggcagcggggcct

SEQ ID NO: 394083 - DNA, 122 bp, Homo sapiens
ccggggcaggggaccggggatgcggggcagggacacggcccacacttgctgtgcacgcaccgccctcccccaaacactttgcaaagaggtcaccgcactggctgcgagcgcgccctgagccc

SEQ ID NO: 394084 - DNA, 122 bp, Homo sapiens
ccattaccgtcatcacacgccccccacccaacccggcgggcccaccctctgcacccacggcgaaagcactctttctaaaccacgccccggatgtcccgcctccagcggctcggaggtcttca

SEQ ID NO: 394085 - DNA, 122 bp, Homo sapiens
ccaatctgcctacggcggcggacgcgactctcgacggcctccgaggagacggtgcagaaccgggtgagaagctgctcgccatgtctaccccagttccaggcttcctaggtttcccctagtcc

SEQ ID NO: 394086 - DNA, 122 bp, Homo sapiens
tggctggctcacgtcatcactgcgggatccaagacacatttaagggacaagtcggttgagcgggtcggggcgtgtggggcccgcggctggcttgacttctgctttcccccaacatcaacttg

SEQ ID NO: 394087 - DNA, 122 bp, Homo sapiens
tgggggacagaggtggagcattgaagggacccattgggcagcattgtcctctgatgcccccgatgctggagctgtattgggggaatgactgtcatcaccgtcctctgagttacttaattcat

SEQ ID NO: 394088 - DNA, 122 bp, Homo sapiens
cactgtgggaccgggcgcgtgggcgggaagtgccgagcggctggggaccggctctagggacggttccctccttagggctatctctcacaggagggcctgtgcatgcctgtgtgtgtgtgtgt

SEQ ID NO: 394089 - DNA, 122 bp, Homo sapiens
aggaagagtatctcttctgcagcaaaatcggcatcttggagtggattccagttatacatgcgtaaataatcccattgattcacatttttgagaggatggcttctttcaggtctgaaaaagac

SEQ ID NO: 394090 - DNA, 122 bp, Homo sapiens
tgcccccacgcctcctgccaaggccgagccacacacccgctccacctgcatttcctctaccgactcgccagcccaaatgccgctcttcactctggcctcgctgagcggctgcccgaggagga

SEQ ID NO: 394091 - DNA, 122 bp, Homo sapiens
agcagctcaggaagacgagccacaacagaactgtgggagcatctagcttcttctggagagcgggagggccggagggagggtcttgcagccctgcagacagtgaggggctgggggagtgactc

SEQ ID NO: 394092 - DNA, 122 bp, Homo sapiens
gggtgcggcggaagcagggaagccgcgaaccggccttctggctggccacagcgccctgcacggacgatcagtgaatggagattactcaagtatttatcgagaacttgcagtgggctaggcac

SEQ ID NO: 394093 - DNA, 122 bp, Homo sapiens
gcaacggcagcggcaagaagtgggttcggaagccggctctctcctgccccagcctcgggccgccttgccccagctctcgggccttgacccccggagggactaccactcggtccgccggccgg

SEQ ID NO: 394094 - DNA, 122 bp, Homo sapiens
ctccagccggcggctttgctgagatctgggatgagtcatccaccagatagttcaggcttccgcccagacgtcagctccagcgtgtgtacatcactgcagacagccactctccatcccattct

SEQ ID NO: 394095 - DNA, 122 bp, Homo sapiens
ggagaatcaacttcaaggacttttgccggggggtgttcgccatgaaaggtgaggtcttcccgggaggctttcccaggcgctctccggtcctgcccagctggggaagctggtgtgactggggg

SEQ ID NO: 394096 - DNA, 122 bp, Homo sapiens
agtgcgcggaacatcctgaaggagtaccgggaccacccgaccctgtgcatctccctgtaccgctactggaggcactccccaaacgtcaactgcctgctccagtaagtgacaggctgaggcca

SEQ ID NO: 394097 - DNA, 122 bp, Homo sapiens
cccgctgtgcaccgatgcccgaatcctatcctcctggaactttatcttgcttattccatgcgcctccagtctgtcttctcggcgtcttcatttcttcactctgtctgagttctagggggttt

SEQ ID NO: 394098 - DNA, 122 bp, Homo sapiens
tcacttagaaaacttatcagcgagcgaggaatggagttgtttacaaaaccaagcccttgacgtcttcctggacctcaacctcatctcatcagctccccctacggagtggggcggaggcggcg

SEQ ID NO: 394099 - DNA, 122 bp, Homo sapiens
accccacccccgcagctcctcctcctccggacaacctgcagccccgcccctgcaggtgaacggcggcccagtccctgcaggtgacccgcggaccctccccgcccgtcctactaccgtcatag

SEQ ID NO: 394100 - DNA, 122 bp, Homo sapiens
tcttttcctgttttcacattaataggagctgtagtctggaagataaagagcctttggtaccgcaagccctgtcatctgtgagtgtggcacagtgaaggcctggagagtcatgacctaggccc

SEQ ID NO: 394101 - DNA, 122 bp, Homo sapiens
gcatctccactcaggggccaggacgcctcgctgaggcctcacctatgcagaagcatgtgccgagagatgtgcttcacctctttttaaagccgggacacggcggccttttagagatttcaaac

SEQ ID NO: 394102 - DNA, 122 bp, Homo sapiens
ttgatcttctgcaacatagcaactgcactgacagagaaaaacctgaaaagtcaagttccacgctttttgtcaagtaagttttatacacaccacaaactatcaccatatatgtaacatgtgaa

SEQ ID NO: 394103 - DNA, 122 bp, Homo sapiens
tgtcaatgtggcagatgagggtgttgggctggcccagctccacaggctccttgggaaacacggtcacctcagggggatctggaaggagacagcaccaggttaggcccctcttctgggatgaa

SEQ ID NO: 394104 - DNA, 122 bp, Homo sapiens
agtgagactcgcatttattcagtaaagattaattgacaaagacttgagtcaacaccactacggggtaactgacattgtggacttcctgagtagaaagcagttaagcacctgcggtacatcaa

SEQ ID NO: 394105 - DNA, 122 bp, Homo sapiens
agaacctcctcatgtggcatctttacttattctcttcttggaaaatccatgtgacctccccgcgcttaaagtgtttccacgttacaggcgacttaaaggcagccctggagcctgacgtataa

SEQ ID NO: 394106 - DNA, 122 bp, Homo sapiens
tccaatcgctagtgactcctggagtctctggcccaatgagcagcctatggaggcggggtccgggtgcacacccggaagtgggtgcgggccagccggctcgcccgggggccatggcagcagcg

SEQ ID NO: 394107 - DNA, 122 bp, Homo sapiens
ccagtgccaactccagggattccccagcaccgcccggagtgacactggcagcctttcttgcgttccctttaagggagctgctggaacctgcatcctggcgacagtgctgggcgtggcagaca

SEQ ID NO: 394108 - DNA, 122 bp, Homo sapiens
ccgcgctgagccttgggcgcgccccctgctgcccgcggccggagccgttcgccacacccccgtgtttatgtcggtccacgggggttgcctgtccctttaattggcatgtaccaagtccttcc

SEQ ID NO: 394109 - DNA, 122 bp, Homo sapiens
cttaaaagaaaatttgtcttgaccactagtctgggagaaaccgggtgctccttcccacggcgtgggccctgagtggagggatagcggaagcagctgcacggtgcaggaggcgctatctgccc

SEQ ID NO: 394110 - DNA, 122 bp, Homo sapiens
gctgtttcagggaaaacaatctcaaaccactgattctgactggagaaaactcagattcaacgaccccaagcagggcttccttcccctcaccaggtgaaggactcagaacaaaccaaaaagca

SEQ ID NO: 394111 - DNA, 122 bp, Homo sapiens
gccccaggggacccgagccgcccgcgctgtctcgaacgggtccgccggccgcgccgcctgcgagccagtctgacagcgcgctgcacacctccgcaccccacttccggcgcacttccgtaccc

SEQ ID NO: 394112 - DNA, 122 bp, Homo sapiens
aggtcgcccactctcgtcccaagggccgggtgccacaggggcctacgatgccggcgaggccggggctgacagctcccgagataacagtcctgccgctgacctggggcccacccggcccccgg

SEQ ID NO: 394113 - DNA, 122 bp, Homo sapiens
ctttgggttagttttgaattgggctcaggaggaggctaaagacatccaattctgcgggaacgcagccctgcgggacctgaaaaggcgagactaagtcaccagccaagctgcctagaggcaat

SEQ ID NO: 394114 - DNA, 122 bp, Homo sapiens
ggctcccagctcaattctctcccagaactgccccctcactatcctccagtgcacatcccacgcgcgcatcagctgtgactaaggttcctctggccagttaggccaggagaagggaagaggaa

SEQ ID NO: 394115 - DNA, 122 bp, Homo sapiens
tgttaaccgtttccagaggagtgataagtcagcttgatgctgaagtgtgtctgcagatcccgcttcactgccaactccacctctctcttcctttcaatgaagaactccacggagcagctggt

SEQ ID NO: 394116 - DNA, 122 bp, Homo sapiens
ggcggcccagcagggcagggccgggcacctggcaggtggggtcatccccacagggcaccccggccgagggcagagctggttccgccgcagggtcgatcctgggctctgggctgtgcacacgt

SEQ ID NO: 394117 - DNA, 122 bp, Homo sapiens
ggctcttcttggaacctggggtgctgctcggctccagggctaagggggtactggggacctcgtctgttgggttcccctcctccagggtagcggctctgtctgcaaaacaaaacagatgagaa

SEQ ID NO: 394118 - DNA, 122 bp, Homo sapiens
agaggtgggggttgggcaggggcgcagggctgaccccctcacccggtctaagcacagggtcgcagttccagtttacaaacctaaaacaagaaaaccaaaaccagggaacaaaacaacaaaac

SEQ ID NO: 394119 - DNA, 122 bp, Homo sapiens
tgcaccctggcatctcctgtgctggagccatgtgttccccggaaccccccctccccccgccgcccctgctgttctctcaaagaactcacttctgggttagtctggtcatgcttctaaaccct

SEQ ID NO: 394120 - DNA, 122 bp, Homo sapiens
ctcgggaggctgaggcagaagaacggcttgaacctggcagaggttgcagtgagctgagaccgcaccactgccttctagcctaggcaacctgggtgagactccatctcaaaaaaaaagaaaaa

SEQ ID NO: 394121 - DNA, 122 bp, Homo sapiens
gtccttgagtccccttgttggctttccccatgcagacccctcatgatggggaaaactctacggagcggagcggccccctctgcctggtacgggcctgccatcagagctcgcgcagatccccg

SEQ ID NO: 394122 - DNA, 122 bp, Homo sapiens
agattatgaaggcatctcaggccctggagccagagccagtcaggggttaaagtgaaagcccgtatttccgcccagaagctggggttggggagaggatgtggattttttgttttaccctttct

SEQ ID NO: 394123 - DNA, 122 bp, Homo sapiens
cggagggagcaggccagcgggcggcaggcggaccccagccagagagcgagtgtgaggagacgagggaggagcaccgggaaggcttggggcccgggcggcccgggcggcccgggggtgtgtga

SEQ ID NO: 394124 - DNA, 122 bp, Homo sapiens
caggctggagtgcaatggtatgatctcggctcattgcaatttctgctttctgggttcaagcgattcttgtgtccagcctcccacgtagctgggattataggcacacaccaccatgcctggca

SEQ ID NO: 394125 - DNA, 122 bp, Homo sapiens
aagggaggggggctaccttcatcttcatccagtcctcctggaaggggatcctgtctgcgtcgtccgtggagttgagatgtctgctcctgaactcgtctcccacctcccgcaggtgcctggca

SEQ ID NO: 394126 - DNA, 122 bp, Homo sapiens
ggtatgtctccctaacatctcctctgttgccttgtaaagcaaatagaatgcattctgaagcgtttgtattttttttaacacacaatcacagggtctgtttatctctgccctcaccttaccac

SEQ ID NO: 394127 - DNA, 122 bp, Homo sapiens
gtggcgacagtggcgcgggcgcagtgagcgcgtccgagaacagaatgggacgaaacggggcgcttagaggcccgggaatctgtgggtcttttaggcggagaggggcgaaggaggttattcgt

SEQ ID NO: 394128 - DNA, 122 bp, Homo sapiens
gcccccacggggttccagcaccctgtccggaaagccttcgcctccctctactgtgtcaagcgtgacagcggcttggaaagctccgtccttcgcagacacactggcggcctgtgtcctgtgcg

SEQ ID NO: 394129 - DNA, 122 bp, Homo sapiens
gcaaaatatttggaaagcttgtcataactccggtccctctgggatggactgatcgtgcttcgtgttcctaggcaatgctgaaggcatacagtacaaacaaggctgagggtcccagtggccct

SEQ ID NO: 394130 - DNA, 122 bp, Homo sapiens
aataccacagactgggtggcttaagcaacagccatgtattatgcctccagttctggaggccggaaatccaacatcaagatgtcaggattggtttcctctgtggcctctctccttggcttgta

SEQ ID NO: 394131 - DNA, 122 bp, Homo sapiens
ctgatcaccaggccacctgtccgcccagaccccttatgcctcccgtgggctcccttccctcggagtgtttccatgcgtttcaaaaatgatttggccctagccctcgtgggcttctcattctt

SEQ ID NO: 394132 - DNA, 122 bp, Homo sapiens
aacagatacttacaaaagagagtgccacagcatgaggtgtctgcttctctgagtgtttcccgggggtagttgctgacctccagatgcccagctcatctctctaattcccaacctgcagcagt

SEQ ID NO: 394133 - DNA, 122 bp, Homo sapiens
tttcaccctaagaccctctctgggtgctcccctctccacatagaagtgggctcccggaggcggtgaccactgctttacagccgcatccgcaccggtgccacgcagaaatactgcgcgatctg

SEQ ID NO: 394134 - DNA, 122 bp, Homo sapiens
ggtgtgtcgggggtgggcacggacccctgaacatcctctagcctctgaatccagcaaggccgcgctcatatcagctctcctgcggttaaacggtggccccggggctctgtggctggaggctg

SEQ ID NO: 394135 - DNA, 122 bp, Homo sapiens
atcccgagaaggcacagcagatgcgcttccaggtgctcacatccttccagctcccaaatgcgccgctattcctcagacgcccgcgcctcaggctcttctcttgtcccttagaccctctttct

SEQ ID NO: 394136 - DNA, 122 bp, Homo sapiens
tgcaaccccatggccggcttcggacccccttctgcgtcatgcaaccccatggccaggctccgaccccactgcataccatgcaaccccgtggctgggtttggaccccctctgcgtcatgcaac

SEQ ID NO: 394137 - DNA, 122 bp, Homo sapiens
ttcgtcactgcagacatcactgcagacacagagacggccattagagctcaccaccccgggcgttcgtcactgcagacatcactgcagacacagagaaggccattagagctcaccaccccggg

SEQ ID NO: 394138 - DNA, 122 bp, Homo sapiens
tgaggccaacggtgcagccgaagtgggaggcgaggtccccaatgagggcggtgagcaggccgatgaccaggatggagacaccaaagcaggcccagccgtggcagtactcggtggggggcaca

SEQ ID NO: 394139 - DNA, 122 bp, Homo sapiens
accgcctccggggcggagctccagggctcctggtgcagggccggccgaactgagacggggcgcggcggggtcggcagggggcgctgccgggccccgcgagctccccggtggcgggtgcgcgc

SEQ ID NO: 394140 - DNA, 122 bp, Homo sapiens
ttaagtctcaaagaccaagtcctcagggaagagccacctagagaggtgaaacattagggacggaaaggctggagcgcgactgggttcctccaatttgctgcgacaagtttggctttccaaat

SEQ ID NO: 394141 - DNA, 122 bp, Homo sapiens
cccggctaggacccacctgctgcaggtactggttaatggtaatgtgcgccatgggagcgccgccgaacggagagcgccaccccctacgcctcaagcgggccagctggcgtcacttccggccc

SEQ ID NO: 394142 - DNA, 122 bp, Homo sapiens
caagaaatgaagagacggtttgagaagacgtaggcggtgggggaacggaaagaggaatcgcgaaactaatattgtccttccaaggacaccgtagggcggatctcgcagctacggcgttcttt

SEQ ID NO: 394143 - DNA, 122 bp, Homo sapiens
cctcctcctttttgcgctcaatgtgctctagagtgtgctgcaccaggtagcccaccgccccgtgctgccccgggtctagggtttggatgtgctggaggatgtcaagcaccttcaaaacaaga

SEQ ID NO: 394144 - DNA, 122 bp, Homo sapiens
cctcagggatgcaggaataggccttctagcacagcagctagtaggctcccccaggccatccgctggcgtgtggaggtgcaggacctgggggaggcagtcctcaccccagctaggccaagggg

SEQ ID NO: 394145 - DNA, 122 bp, Homo sapiens
ctctggtccgccctcactcaagatggctaccagcaagaatggtgcaatggcgtgacagctcggccctggttgccaaggagatgcgagtaccggaaatgcggaattcggggagagcgcgcatg

SEQ ID NO: 394146 - DNA, 122 bp, Homo sapiens
aaaaaaaaaagcgtcaaagttcacaagggaaagtctggtctctgaaggcaaagtcacctgcgacatgtcccttacccccggcatcagcccctcttcccctgggtgggctttgccgccctgcc

SEQ ID NO: 394147 - DNA, 122 bp, Homo sapiens
agagaagattggaatctactttgcttggctgggctattacactcagatgcttctcctggccgcagttgtaggagtggcttgctttctctatggatatcttaatcaagataactgtacatgga

SEQ ID NO: 394148 - DNA, 122 bp, Homo sapiens
cggcagccgccctgctgcgtcgctggtggtcgggagacggagaagaacgggtgtcgcgggcgaaggagttcccaggacaccccctcgggtgtctgcgccggaactccgagggttccccggag

SEQ ID NO: 394149 - DNA, 122 bp, Homo sapiens
acaagaccctggcccggtggagatgagaccctggcctggtgggcttcaggccccaccctgcggcgcaccctccagctggggaagtccatggggtgtgtgggatccatgcgatgacagttgta

SEQ ID NO: 394150 - DNA, 122 bp, Homo sapiens
actgcgcatggaggacctccccagcggaagcggaagtggccgccggcaactccgcccttccggctggccccgctcagtcacccgcagcaggcgtgcagtttcccggctctccgcgcggccgg

SEQ ID NO: 394151 - DNA, 122 bp, Homo sapiens
aggagtgctcccaaactgacaggtggtcaggagcactcccagactgacaggcagacggggcgctcccaggctgacaggtagtcaggagtgctcccaggctggcaccggtggataggagtgct

SEQ ID NO: 394152 - DNA, 122 bp, Homo sapiens
cgactccacgtgccggttgcagcgccacagcgggatgcacttgagcatggtgcgggtgggcggcgcgggctccggcggcggcgctcggcgggctcggggccggggggcggggctcagtccgc

SEQ ID NO: 394153 - DNA, 122 bp, Homo sapiens
gagtttgacactcaaaactctcatgtgcatattaatagatattaataatgcttcttcctccgtgtcctctggacatgtcttctctgtctccatattcacttcaaaaatgaagagccaggagc

SEQ ID NO: 394154 - DNA, 122 bp, Homo sapiens
gaaggagatgaagcctgaaagcactgggaggacaccccagcataggggaacacagagacacgtgaagccagggagaaaaccagtagtacagataagaaatggaagaaagcaatgacaggaag

SEQ ID NO: 394155 - DNA, 122 bp, Homo sapiens
aggcgatccgcccgcctcggcctcccaaagtgctgggattacacgcgtgacccaccgcgccgggccaaagtctggctagtttttaaattttttgtagagacaagagtttcgctatgttgccc

SEQ ID NO: 394156 - DNA, 122 bp, Homo sapiens
caaaaatggtctatggtacatgcaaggtaacaataaccccaactgaagcaactataaaatcggctgtgccacgtccctgtgcaaccgtcagataaaatgcaggcagccggccccacgcctta

SEQ ID NO: 394157 - DNA, 122 bp, Homo sapiens
cttggcagcgatgcggccggggcagggcgggtagcagaaaaggcagcagagctcactcagcgacagcccgttcatggcaggcgcctcccgggccgggcctccaccggggcccccgccaacaa

SEQ ID NO: 394158 - DNA, 122 bp, Homo sapiens
cgcgggtgatccccccgcctcgttctcccaaagtgccgggattacaggtgtgagccaccgcgcccggccagtaaatagttttgaagttttatttaatcccagcactttgggaggccgaggca

SEQ ID NO: 394159 - DNA, 122 bp, Homo sapiens
cactgtagttcctgctacagacaaaactgactctactctaattacctctgagatcaccagcgattgtgatcaagcagagaatatgggcagaccacaactcagcagaaaaacacctaagtttt

SEQ ID NO: 394160 - DNA, 122 bp, Homo sapiens
agtttaataccagcctggggcaacatggtgaaactccgtgtctacaaaaaattagctaggcgtgatggcgtgcacctatacctcctactcgggaatcatctgagccggggaagtcaaagtca

SEQ ID NO: 394161 - DNA, 122 bp, Homo sapiens
cggtgcctaggaactgggtattggttatccaggattccctgcctatggtgcccagtataacgctttgcacataagaagctcaaaatatttttggataaaactaggaacaaaataaaggataa

SEQ ID NO: 394162 - DNA, 122 bp, Homo sapiens
tttaaaccacccgaactaatcattcgaactgcttccaagtcctttaaaggagaatcctagcgagggtccgtaacacttccccttaccctctgcctgggttcaaacttcaactcccagggttc

SEQ ID NO: 394163 - DNA, 122 bp, Homo sapiens
agactaacagggaatgatgttcattaccaaagtaggtgctccccctagtgtagcacagaacgcggcgctgttctcactattgaattggaataatatttttagtatcaaaattaattctagaa

SEQ ID NO: 394164 - DNA, 122 bp, Homo sapiens
gcgtgaagcccctgggatgggagaaggctcctccccacactgccccagcagacagagttccgttatcccagccgcagctgaagctgctcggccccgcccccagcacacaggtcccacttatt

SEQ ID NO: 394165 - DNA, 122 bp, Homo sapiens
ttcacgggaggcgggcagaggactgctcggatcgcttcgtcaaacactgtcttgatgcctcgctgtgtgagcgccgagcgctccaggtattttacagcaccaatctccttagccatggctag

SEQ ID NO: 394166 - DNA, 122 bp, Homo sapiens
cgttttgttttggcgatggaaatgtgaggtcagaggtcggcgctgtcagtttcacagcaccgatcagcctcacacatgggatgggatagcgtccagcctctccctgggaggtattcagtttg

SEQ ID NO: 394167 - DNA, 122 bp, Homo sapiens
ggccaatagttgtataatcttagaattgctgcctacccagttccttcttattcttgttcccgccttcagaaagttatgtaagacacttattttaccctcgggcttctcttgattgtatttgg

SEQ ID NO: 394168 - DNA, 122 bp, Homo sapiens
ggtgcgcccggggggctctcatgtgaagggtaccaggcttgagggcgcccctgcggggggcgcagaggcaccgagcttgagggtgcgcctcgggggtctgcggggggaaggcaccggacttg

SEQ ID NO: 394169 - DNA, 122 bp, Homo sapiens
tcaaatgaaaacttgcgtggacaaagtaaaagagacaaggaagacttcatttaaggctatcgcagtagggtagataggccagaactcagtctgagctcaagtctactgaaacaaagggctgg

SEQ ID NO: 394170 - DNA, 122 bp, Homo sapiens
ctgtattacatctgattgtagaagctactagtacttttcaaaatcctgtttttaagcacacgggaatgcacttgcatgtggccaagtgtggccaatgagagagtcaatgagactaggtcgga

SEQ ID NO: 394171 - DNA, 122 bp, Homo sapiens
atccgcccgcctcaggctcccaaagtgctgggactacaggcttgaaccactgcgcctggccgcagccttttaaactaatctgccaaatggttttcttaaggttattcagttacttgcattca

SEQ ID NO: 394172 - DNA, 122 bp, Homo sapiens
gagcccgggctgcggcctggcattcgcagtgcaggtgtcaagcgccgcagacttgctgctcgcgcggtggggcggaggctccctgtggcacctgccccgctgtccgctcttcgctttttccc

SEQ ID NO: 394173 - DNA, 122 bp, Homo sapiens
aaagtgacatgcctgtaaatgaggtgatatgtgggaaagtgctcactgagctcaatgccacgtacatgatatacactcagtaaacaccagttttcttgaatctttcttttcctcatatattt

SEQ ID NO: 394174 - DNA, 122 bp, Homo sapiens
cagtaggaagaaaaaaaacatgctaatcgacggagataaaagtggaaattctaagactgtcgatctacatgatttctctggcggcttttcattggcaacagagtgtctaatgttcagggaca

SEQ ID NO: 394175 - DNA, 122 bp, Homo sapiens
gggggagtaaaaaaggtaaagaaactgtggaaagggaaggtcacaatttcagaacttatgcgtatttcaatattcactttttgagagagtgtagacagagttggcttcctgggatatttgga

SEQ ID NO: 394176 - DNA, 122 bp, Homo sapiens
gagagtgttttaatgtggaggaatgaccctaatgatagaagttttaataagtcaaatgagcggaaaggcaagacaatataacaaaaagagcaccagttttggcatagcaggcactcaataaa

SEQ ID NO: 394177 - DNA, 122 bp, Homo sapiens
tgctgggattacagacatgagccaccatgcccggcagggaccccgttttgtctatgtccccgtttatgcacagtatgtctggccctggattcaagaccggtgaggttcagaagttacacgat

SEQ ID NO: 394178 - DNA, 122 bp, Homo sapiens
aaattactttacatgaagattctgagatgtgacttgctctcccctaaggtatgaagtttccgactttgaaaaaatactgacctaaacgctggctgtaggtgggcatcatcagaccctgttca

SEQ ID NO: 394179 - DNA, 122 bp, Homo sapiens
cgggacgcggaccgccaggtgagcagagccgcgcgccccgcgtcccctgcgcgccgcccgcgcggccccgacccggcttccgctgcccaggctccggctcccgctctctggccggcggggcg

SEQ ID NO: 394180 - DNA, 122 bp, Homo sapiens
catagtgatgctgctgatgaccgtggtggggttcctgggcaacactgtggtctgcatcatcgtgtaccagaggccggctatgcgctcggccatcaacctgctgctggccaccctggccttct

SEQ ID NO: 394181 - DNA, 122 bp, Homo sapiens
tgggagaccttcaggagctcctacgtcctctaagaggcttggcgtagtccggcgaggtctcgggggtgcgcggacaccagcctcctcagcctcaggtctggaatccggcgggatgggggact

SEQ ID NO: 394182 - DNA, 122 bp, Homo sapiens
taggaagtgacccatgtggaaatgcgtggtcagctcggtgtgcgtggtcagctcggtttccgtggtcagctcggtgtgcgtggtcagctcggtttccgtggtcagctcggtgtgcgtggtcg

SEQ ID NO: 394183 - DNA, 122 bp, Homo sapiens
ggttcaagatgagtcatgcgtgaccaatcccctccccgccaagggagagcaagacacacacgacgaggcagagacccagagagagagacacacacacagacacagagacacacagaaactca

SEQ ID NO: 394184 - DNA, 122 bp, Homo sapiens
ctcaggatccattcgcgccaacaacttctcccgcgaagtgcaagaaggcgaagacagtggcgcgcggtgatgacgtcaggaggcgcgagctttgcttccgtcccgcccagaggcgggaggtg

SEQ ID NO: 394185 - DNA, 122 bp, Homo sapiens
atactccaaaaaaaaaaaaaacaatgtgcctgatccttgggtccccatttgttgctggaccgtttgacttatttgtcaatgtttttatttatctctttggacctcggactttggactgattt

SEQ ID NO: 394186 - DNA, 122 bp, Homo sapiens
tgggtgggctaagggcatctgggcggagccggcagaggatggggcgagcggctgggggtgcgtctggctttccccgaaccccggcgcccggcccgcgcacttcctgtccaccgctcttccca

SEQ ID NO: 394187 - DNA, 122 bp, Homo sapiens
tccagcttcctcaataggaatggaagccaaactccgaactgatgactcctttgaggaagtcgagagctgtaaggaaagccaggaacaggggcaagggagagatgcatcccaaatgatcctgt

SEQ ID NO: 394188 - DNA, 122 bp, Homo sapiens
caaggaaaagcacaaatggagaggatggggcaggaactgtatcccgagtcagagcttaaacgtcgggccagtgtcataatggaagacggatcaggatgtccaagcaagagccttttccaaac

SEQ ID NO: 394189 - DNA, 122 bp, Homo sapiens
aaccatgggaaaagtgtagtaacaagctaggcagcactgtccctcatggctcccctggctcggggaaagaggtcccctggcctcttgaacttcctgggtaagcaactccccacccttcttct

SEQ ID NO: 394190 - DNA, 122 bp, Homo sapiens
aatcctcctacatcagcctcccaagtagctgggaccacaggtgcatgccaccatgcccggcgagtttaattgtattttttgcagagttggagtctcacatgttgcccaggccagtcttgaga

SEQ ID NO: 394191 - DNA, 122 bp, Homo sapiens
tttggaacatcagaaaaacaagtagtgacatcgtgaagtgccctagcctgttgtgacacacggtgtggggatgaacacgccgccctagcccgtgacacacggcgtggggatgaacacgccac

SEQ ID NO: 394192 - DNA, 122 bp, Homo sapiens
tgcctactagcggtgggccctggagcacatccttctgtccctctcctcctccacccaacccggccttctgtcatgaagtgtttcccaggctgctgtggctggaacctgcaaatgcaaaataa

SEQ ID NO: 394193 - DNA, 122 bp, Homo sapiens
tgcatgtgtatgtgtgcgcgcgtgtgtccgcacttggggcggggctggaagccccggccccgccccggccccgcccccggcccggccgagctggtatttttccacccagcaggatgggtgat

SEQ ID NO: 394194 - DNA, 122 bp, Homo sapiens
aaatacttgctttgcaaacaccacctccagccagctgtttgcttggagctgacagggacacgcttaggggcagcctcccagctgccgagtggccacttggagctgggaggaaagggttaaag

SEQ ID NO: 394195 - DNA, 122 bp, Homo sapiens
ttgtggtcctaaatcccaaaattcagagaatcccatcattccattgcaagccctacccctcgtctctggtccccatcccgagactctgggaggcaagccctacccctcatctctggtcccca

SEQ ID NO: 394196 - DNA, 122 bp, Homo sapiens
gacggagcgcacctgggtcagcccacttccggggagggaggcagaggaacccctccccgccgctcacccctaagcccagccctcggctcccacccttgtgtacctgggccgaaccattcacc

SEQ ID NO: 394197 - DNA, 122 bp, Homo sapiens
tgcggtggggccttttgacgggggctacaggagaaaggtcaagggtcacagcaggggccacgtccacggggtcagcaactgcttcacgttagacatggccctttgcttactaccatgagcgc

SEQ ID NO: 394198 - DNA, 122 bp, Homo sapiens
tgtggcaggccctgtcctccccggatgccccccccagacaccctggccctcaccgtgccccgtgacacaggcacctccaccccaacacccgtcaggagcgccctgactcttctgactctcca

SEQ ID NO: 394199 - DNA, 122 bp, Homo sapiens
gcaccgcgcctgggtacacttgagcttccggaggacgccgggaattgtagtcctggcgggcgtgggcccttgaggtgtgctgggagctgtggtccgggtcggcgggcgcgcaagttggctag

SEQ ID NO: 394200 - DNA, 122 bp, Homo sapiens
tggctgcccacacagagctccaggaatagcgggtggggaaaatgtacggcactcacctctcgttcaaccttggcaaatcccaactggatctggggactcttggtccatggcgagttggcata

SEQ ID NO: 394201 - DNA, 122 bp, Homo sapiens
cgctagcggtgttggcgcggagtggaccccggctgcggcccctgggtgagtctgggtttccgttagcctcgcaggggtgtcccttcgagggtcgttagcgagcctccgctttcccacgatct

SEQ ID NO: 394202 - DNA, 122 bp, Homo sapiens
ttcttccttctggtgggcttcgtggtctcgctggctcaggagtgaagccacggaccttcgcggcgagtgttacagctcctaaggcggcgcatctggagttgttcgttcctcccggtgggttc

SEQ ID NO: 394203 - DNA, 122 bp, Homo sapiens
tgtgcccagcctgaatctcagttttatcaagtgtaagatgagtgtggtaataacacctttcggaattgttctaactattaaaacgggtgtatttgaagtgttttgcatgatatctagcacat

SEQ ID NO: 394204 - DNA, 122 bp, Homo sapiens
ccctccctccccgacctccgtttttttcctcttccacctcctcctatcccaccttcctctcgctggatcccagctacagttggctccggataggacgcttggctggagccagaggacgaggt

SEQ ID NO: 394205 - DNA, 122 bp, Homo sapiens
gtgcgggaggatcacggactgaccccggcactggccccacatgtacacgtgcccaccctgcgtcttggccgcagacgtgtgtgtggagtgacaggctgcaatctcgataatcctaaattcac

SEQ ID NO: 394206 - DNA, 122 bp, Homo sapiens
aggtgtaatcctagacttcaatcatcaagttgaagactatgatggttgcatttttcagtgcggcattggaaagggaaaagatttatatagggttgccatctgcagttacaattgaaattctt

SEQ ID NO: 394207 - DNA, 122 bp, Homo sapiens
tttcccaagttaattatacttgctcagaaagccaagtgattcattttgttccaaggcaggcgtccatgcaattaatttcgttgatgaaataggttttcttctgcaaaactctgcttctaaac

SEQ ID NO: 394208 - DNA, 122 bp, Homo sapiens
aaggccagtccctccctaagcctaatggccggagaaggtggccccgctctgggttgtcgccgctgaagggagtgacgtttctctcggcgcccgcccctcgggcggcccggcggaaagctagt

SEQ ID NO: 394209 - DNA, 122 bp, Homo sapiens
aagggacaattctatgacctggtgactaactggacttgagttagggaccaagaggaggctcgcgaggtgtcagggcttcttgcacagccagttggctgcaccacagcccatttcccaggaca

SEQ ID NO: 394210 - DNA, 122 bp, Homo sapiens
gaattccatctcatccatgccctcgcccgtgtaccagtggaggaaggccttgcgcctgaacgttgctgtaaactgctctgagacccgcttgagttcctggacggctgtgttgttcccagtga

SEQ ID NO: 394211 - DNA, 122 bp, Homo sapiens
gaggaaccagagctgtgaatgacggccaagggccgtgggggaagaaatactggatcaaaacgggaaagctctgaattgggaaaaaggagaaacgcatgagttccttagttcccatctattgc

SEQ ID NO: 394212 - DNA, 122 bp, Homo sapiens
gctggggttgcccaactaatcagagctgtctgctcactattcaacccatgactcagatctcgtcagccaggactaagctaaactccatgaggccaacagcatctgtagtggggccacctttt

SEQ ID NO: 394213 - DNA, 122 bp, Homo sapiens
gcatacttaacctcccctcaggaggaggacttccaggtgacgctcccggaggacgtaggccgagtgctgctgctgcgcgtgcacaaggcgcccccagtgctgcccctgctggggcccctggc

SEQ ID NO: 394214 - DNA, 122 bp, Homo sapiens
gtctaaatgacaccagtgtcccagttttgtgctgacagtccacagcaggcaatgtttctgcgactgcaaacctgaaggcgacgaggagtttctactttcttgatcagcatgaaggggcagag

SEQ ID NO: 394215 - DNA, 122 bp, Homo sapiens
ctcccctacccttaggtaggcccttagactccggcctttgagtccgcttctgcgcagggccggggctggaggcggggcgaaggggcggggccgcaggcgaacgcaagtcccgcttcgctctc

SEQ ID NO: 394216 - DNA, 122 bp, Homo sapiens
tttttcccttagccctgcacagaggcaggctttgaggacctaggggcagggcagctggggcggggtggggtgggggtgttgagaggttttgcgtgttctttttaccccctttccccccactg

SEQ ID NO: 394217 - DNA, 122 bp, Homo sapiens
cgggcccgcccggcgcaagtgcgcgtcgcgacttccgcctcagcgcggcgccggctagagcggtggccctgatagaggccgctctaccatgagccgaccgctcgaaggtccgcgcggccacg

SEQ ID NO: 394218 - DNA, 122 bp, Homo sapiens
ttttgtttgttcgaaagtcttctccagggcgaagatctgctgtccggaaaaagtgggtctcgtgtgttttctcttcccgtctttgtccaacaaaatggatccttgatctgtgagaaccaata

SEQ ID NO: 394219 - DNA, 122 bp, Homo sapiens
tgtgccctgcagtgctgataaggattatcgtagcaaggtgctcttctgggacaacgcgtacgagttcaacctcagcgctctgaagtaagtgtccacagctgggactggcaccgtcttgtggg

SEQ ID NO: 394220 - DNA, 122 bp, Homo sapiens
tcttaaacaaacctcttttaaaacaaactattttagcatccctaaaattaggacagtagccgtgagttaaataaaacagcaagtggaagacacaggtgtgaatacagaaatagtagaatttg

SEQ ID NO: 394221 - DNA, 122 bp, Homo sapiens
atatggttgaggcttaatataataacaaaagacttactcctatcactcaagaagtttcaacggttttacagtctctctgccaggaacctgggacctagatcaaacatatattttttatttta

SEQ ID NO: 394222 - DNA, 122 bp, Homo sapiens
cggatggtgcatgcgacgagaggggagggggcagacgcggttcagacggcaagtccccatcgaaggaggaaagaaaagttgcaagaacggatgggtcaaagggcagaaaagaaaaaaactga

SEQ ID NO: 394223 - DNA, 122 bp, Homo sapiens
tcctgaagaacaattctgctgtggctcttctctgctcaataaccttcactggctccccatcgcccacctagcatatctacttcctcagcctggaatctgatccccaccccatcccgccagct

SEQ ID NO: 394224 - DNA, 122 bp, Homo sapiens
accctcctgaacgccaaactgggagaagaggatgacacacaccctctcctccaaacagagcgaagacaaaacctgggagaagggaaggcaaacagtcccgtttcatggcaacatcaaatgag

SEQ ID NO: 394225 - DNA, 122 bp, Homo sapiens
agctttgtggaactccgggcgatgcatcccctcaccggaagagctttgtggaactccgggcgatgcttcccctacaaggaagagctttctggaactcggcaatgcatcccctcaccggaaga

SEQ ID NO: 394226 - DNA, 122 bp, Homo sapiens
caccctcagcctgggatgcaacgggcactgatgcctctgagccccaggctcaaaaccaggcgcaagaagccgcgatgagattgagatgtggtcctgacctcatggacagtgcattttgctca

SEQ ID NO: 394227 - DNA, 122 bp, Homo sapiens
gtgaccaagtaagactgtaaaatctgggagggcacagactctatatgttttccacttcgccgtctccccagggtttagcacagtacctggcacacacaatgaagcagcacaataaagctcca

SEQ ID NO: 394228 - DNA, 122 bp, Homo sapiens
atggccacagaggaggtggcaaaccttagaccttggttagatttgaaccaaggccctcctcggcctcccaaagtgctgggattacaggcgtgagccactgcccagctgaaaattgatacatt

SEQ ID NO: 394229 - DNA, 122 bp, Homo sapiens
cggggcaccgacactcacggagtcactccaacttctctgggtgctccgtggagcgaagagcgctctaggacaagcaagggtaaacagggatgagtgtgggtgggcccactcggaccccaccc

SEQ ID NO: 394230 - DNA, 122 bp, Homo sapiens
agctgaacctcaacaacgagtggacgctggacaagctccggcagcggctcaccaagaacgcgcaggacaagctggagctgcacctgttcatgctcagtggcatccctgacactgtgtttgac

SEQ ID NO: 394231 - DNA, 122 bp, Homo sapiens
ggtgcgcaggtccctccccgggttcctcacagggtgagtactatggggtcacaaccttcccggatgtcgcctattgattgttggttagaggctttaggtgtttctttagggttgtcttgctg

SEQ ID NO: 394232 - DNA, 122 bp, Homo sapiens
atcacagtcgctgcccgacttgcacctacatccgcaacaaagggtggacatgcagcctgccgcccttcctcctttctcagctccctccaacataggcagccatctgggaggggtggagaagc

SEQ ID NO: 394233 - DNA, 122 bp, Homo sapiens
ggcccacgcacagactgacagaatgaacctgcagaccctgcgcggctactacaaccagagcgaggccagtgagtaactccggcccagggagcagatcacgacccccacctccatgccccacg

SEQ ID NO: 394234 - DNA, 122 bp, Homo sapiens
cacagggcctggaagcgtagttctcagcccttgcagcccaagactgggcgaaggggacaccggggtggaaatggcaccctgtggtagccagcggcggccctatcactgtgctggttctgtga

SEQ ID NO: 394235 - DNA, 122 bp, Homo sapiens
tatgagctgtaacactcatagcgaaggtctgcggcttcattcctgaagccagcgagaccacgaacccactgggaagaacaaacaattccagacgggaggaacgaatagctttggacgcgcca

SEQ ID NO: 394236 - DNA, 122 bp, Homo sapiens
agcgttttagtctgttctgctaacaatcggtgtttctcagtgccaaccagtcacagcacgcgcggcgcccagcccctggtttctaaaccccattctgtcgtcccgggacgaatgtcttggga

SEQ ID NO: 394237 - DNA, 122 bp, Homo sapiens
gtccgaacctcggcaggaggctggcagcggcgtggggacccagagggcaggggcggtctgcggggcggccctgggactccctccctccctctcctgctgcggccgccctgggatatgggggc

SEQ ID NO: 394238 - DNA, 122 bp, Homo sapiens
ttgatttttgctcatatggcatctcctcagaaaggcttgtatgatttctgtctcaaatagcgttctccatcattcttgattcttgtcacacttgattttcatcactttttcacatattatgt

SEQ ID NO: 394239 - DNA, 122 bp, Homo sapiens
agagaaagaaaaccaaaagaagtcccgctacagtgacctgcaacgcgcgcacgctcgccgcggcggtcacttatagagcctgcctggaaggcacgcctctttattcaaaatggcccgcctcg

SEQ ID NO: 394240 - DNA, 122 bp, Homo sapiens
cccctgtaatctcagcactttgggaggctgaggcaggcagatcacctgaggtcgggagttcgagaccagcctgcccaagatggcgaaaacccatctctacgaaaaatacaaaaaaaattagc

SEQ ID NO: 394241 - DNA, 122 bp, Homo sapiens
aacaattaggcaaatccccaaggaccaactgaccggtgacgggagctgcaaaggagacagcggagaggaggggctccagggaggcagagcccagggccagctggagcagagggctggcactg

SEQ ID NO: 394242 - DNA, 122 bp, Homo sapiens
tttccacccaggggggctatcggtcttactttaaaaagacaaaaacacaaattacggtgacgcaaaagaaatataaaaacaggagtcagaggacctagatttgattgtcaacccatgtgacc

SEQ ID NO: 394243 - DNA, 122 bp, Homo sapiens
gtgccttcagtctcttgcctgggcacctgggtcatcctccacccacagctgacttcacaccgtgctcttccttgagcatgtctcaggtttccgggaagctgatgtttttgggagtgcagaag

SEQ ID NO: 394244 - DNA, 122 bp, Homo sapiens
ctccagcgcgcggggaccaggattgaccggtcaggaggccgcctccccttggtccctgctcgccggtcttctccgaggcttcttccccggctccggcctgggcgtcgggaggcctccctgga

SEQ ID NO: 394245 - DNA, 122 bp, Homo sapiens
catgatctgcccgcctcggcctcccaaagtgctgggattaaaggcgtgagccaccgcacccggcctggacctgagattttatttaggtggctctttcagtggccaggctgagcaaagctgtc

SEQ ID NO: 394246 - DNA, 122 bp, Homo sapiens
ccatcaggtgagcagggcggtgggcgcggccgcggtcccccacgtgcccgcccgagccgccgcccacctgcccgcctttcgccctgcaggcgctgctgacgctgccgctcctcttcctgggg

SEQ ID NO: 394247 - DNA, 122 bp, Homo sapiens
tgcagacgagtcagcttcatatgttattttctagcatcacggatatacgatagggagtcccggcattgtcttgtgtcacccaaagaccctctcttagaagtgtggatttctcccgagcagcc

SEQ ID NO: 394248 - DNA, 122 bp, Homo sapiens
cagcgggaaggaagctaagatcctacagcacttcggagacgggctctgccggatgctggacgagcggctgcagcggcaccgaacatcgggcggtgagcgcctcggaaaggggtcggtgatcc

SEQ ID NO: 394249 - DNA, 122 bp, Homo sapiens
agagtccagactcttgtgaccctgcaaatgctgggaaagaggatttacagcgaggttgggcggggctgatgttacataagaaagcagccactgagccacgcacactgccagatgccaggtca

SEQ ID NO: 394250 - DNA, 122 bp, Homo sapiens
gctcccccaggagcggctcctcagggggctccggggcctccgtgctgggttctgtgggggcgggagtttcttcctctgcagctgagaagaggggacagagaaggtgaggcagcttccctggg

SEQ ID NO: 394251 - DNA, 122 bp, Homo sapiens
atgtgtgagcctgcactgccgccgcgcggccacttccgattccacaactacaaccaattccgtgccatccaggcggtgagaccgaaggagaagcctccagaaatacccatgtgctatgcaag

SEQ ID NO: 394252 - DNA, 122 bp, Homo sapiens
gcttccctttccctcccctgggagccgcaggcaaaacgcggcaagtggattcagagtttgcgggcccgggtgccggccgagcatgcgcagtggcgcgagcgcagcggctacgcgggcgcgga

SEQ ID NO: 394253 - DNA, 122 bp, Homo sapiens
tctgctgacccctggtggtggggtcggcccaggctgggacctagcccggcccccctcggccgctgctgaccgccatcccccacaccgccttctggagcccgcagagggaggcaggggcgtcc

SEQ ID NO: 394254 - DNA, 122 bp, Homo sapiens
ccaagcaacgtaattcctgttttcatgggtcctgtagatgtttgagtcaggaaggtaaggcggggagtgactgaataaactctgccttttaaattgagcatctgggccgggcatggtggctc

SEQ ID NO: 394255 - DNA, 122 bp, Homo sapiens
acacacgttcttaagtgtttcccaacatacttcatatctacaaataaagataagctaggtcggccaaagaacaattttaataaggacttactattgagtgccaggcattgagctggacatta

SEQ ID NO: 394256 - DNA, 122 bp, Homo sapiens
cggaaggcggtggtctggtgtccgggagtagcggttaccagccagagaaagcctcccgggcgtgccgcgtggctctgagcccgtttagcggaagctgccagggataagggtagggggcgggg

SEQ ID NO: 394257 - DNA, 122 bp, Homo sapiens
tgagcagattgacgtgcaaatggggcggggcctagcgtgtgcatccagtaggggcgggagcggcgcgggggccgactccgcctctcgtccgcctcctgtccgcctcggggaggcggggcccc

SEQ ID NO: 394258 - DNA, 122 bp, Homo sapiens
caaagaggaggccaggctggagcgggccgagaaatccctggagaaggacgccgccttgttcgacgagttcgtcagggagaatgactgcagctccgtgcaggccatgagagcgtgagcctgcg

SEQ ID NO: 394259 - DNA, 122 bp, Homo sapiens
gcacctgcctctctctgctcagatacagaaggtggtcatggcactaggagactacatgggcgcctcctgtcacgcctgtatcgggggcaccaacgtgcgtgctgaggtgcagaaactgcaga

SEQ ID NO: 394260 - DNA, 122 bp, Homo sapiens
gtgagactctgtctcaaaaaaaaaaaaaaaaaaaaaaaaggcagagtggcagaccaaaaacgagccatatgtcaatctggagtaggagtgaccaatgtcagagtggaaaatgagggctgatg

SEQ ID NO: 394261 - DNA, 122 bp, Homo sapiens
ggttacagccgctttcccctttcaagcatggtgcctcagctgcagggactccctccaccacgggacctaactagtgatgggcaccctagcagcagccaggaggcacaagccaaagagagaag

SEQ ID NO: 394262 - DNA, 122 bp, Homo sapiens
ctaggcagaaggaagctggcctgagccaatcacacgatgacctctccaacgcaacggccacgcccagtgtccgaaagaaggccggcagcttttctcgccgccttatcaagcgcttttccttc

SEQ ID NO: 394263 - DNA, 122 bp, Homo sapiens
gctgctaggctccgtgacatccggcagtctgagggcggcgggattcgggatgacttcgggcgggtgagtgtccccggggcagagcagagcgagaggtgaaacttcgggagcagggagcgccg

SEQ ID NO: 394264 - DNA, 122 bp, Homo sapiens
aatggtgcgtcccgccgcagggcgtacgcacagagaaggaagtgttcaagtcttccagtgcggagaaaagagactaggactcgcccctcgacgtctcgcggaaggtacctggctccccggtg

SEQ ID NO: 394265 - DNA, 122 bp, Homo sapiens
aaaggatgtctctaaatgtctgttcaatatggaacaaagccagtgggtgctccagccttacgaaaaagacacagatgctaaaggctttctttcatcaacagcctcacacccccaaagatcat

SEQ ID NO: 394266 - DNA, 122 bp, Homo sapiens
tccttcagacaagcccccctcctacggcccccggcccctttttaaggtgcttctaactggcggcaaatcagcacactgatacaaagtgaacaccccgcgaggaagcggagcctgcagtccac

SEQ ID NO: 394267 - DNA, 122 bp, Homo sapiens
gcgcacgcgcagaaggctggctggggtgacgcggcgccgggcttgggcttctgtattccgcgtgtctggaggaaggtccggaggtgggcgggagccctgcggggatttcctcttcccccagg

SEQ ID NO: 394268 - DNA, 122 bp, Homo sapiens
ggaaaaaaaaaagcgcagtatttccagcaccaaatagaatttttttttccctatcctcttcgcaccactcctgattcatatcatttataaacacactggcaattatttcttatttctttttc

SEQ ID NO: 394269 - DNA, 122 bp, Homo sapiens
cctctcactccctcactcccttctcttggcagcctcagccctgaccctgtggaagcatttcgcgatggacagactcacaacctgaacctaggagtgccccattcttttgtaatttaaatggc

SEQ ID NO: 394270 - DNA, 122 bp, Homo sapiens
atgtcagcttcttctggttcccaaggggaccttcactggtgccattcctgctctctggaacgccgctagctcctaccccttcccatgcttctgacaactcctctgtaaaaatgtcacatcct

SEQ ID NO: 394271 - DNA, 122 bp, Homo sapiens
agggcagccctgtggcagccagccctgctgaggggtcagtttgtagtggcctaggagaggcgttcaactcttagacctaggatgtggcagcagcaacaaggccagaggcagctcaactgagg

SEQ ID NO: 394272 - DNA, 122 bp, Homo sapiens
ggacaacatagtgagactctctacaaaaaatacaaaatttagccactggatgtggtggcacgtgcccgtagctccagctacttggaaggcgagaagggaggagcgcttgagcccaggagttc

SEQ ID NO: 394273 - DNA, 122 bp, Homo sapiens
ccaggcccctttgcctccacgaggggagtgagcagctgcccccggtgtggccatgagtcccgcagggaggaaccctggctcacgtgctgggagcacagcgtcgtgtcgaaaacagtttgcac

SEQ ID NO: 394274 - DNA, 122 bp, Homo sapiens
gatgttgacttcagttcttattgggggagcaagaggttatgacatttgtctttaaatattcgaagtatctttataagcaagagggattagatttactctttgctaccatgttaaaaatggtt

SEQ ID NO: 394275 - DNA, 122 bp, Homo sapiens
gaatatgtattttatttgcctccagaaaggggatgttaatgctcagagggcccatgggtgcgtaacatttcagaggaaacagcttgtaatgactcagcactgtcaggtacctactttgtcgc

SEQ ID NO: 394276 - DNA, 122 bp, Homo sapiens
atgtcaagaggagtgcagcctctcacaaaagctgaacaattcctaggctcctgcgcactgcgggttgtaaccacggcccgggcagctcctctgagcctgagtgcagccccttccctgtctgt

SEQ ID NO: 394277 - DNA, 122 bp, Homo sapiens
gacgagaagagtgacagacaggctccataaccagtagacgtagaaggcagaactgagtggcgggtacggcacccgatggctattcgagctctcgatctcggagactggagcgggccattcag

SEQ ID NO: 394278 - DNA, 122 bp, Homo sapiens
cgccaagccgtggctcccctgctcccttttaccctcccttagcagccccctgccgggccacgttggctcagaaatccattttctacgcctccgagttgcctttctcagcgtagtcacagcaa

SEQ ID NO: 394279 - DNA, 122 bp, Homo sapiens
tgtgctttattatcgttggtggtggtagtggtgtttagaacgcatccctcagtcagacagcgaggtaggacttctccgtttattaaatcctgaccttttttttccatgtaaaacctgcacgt

SEQ ID NO: 394280 - DNA, 122 bp, Homo sapiens
cagcccgccatgcctgagcctcccaccccctccatgggctccggtgcggcccgagcctcgcggacgagcaccaccccctgctccaggcgccccgtcccatcgaccacccaagggctaaggaa

SEQ ID NO: 394281 - DNA, 122 bp, Homo sapiens
cttggggtggtttgcgaacagagtgaccagccgtttggtaaaagttaaataacgaactttcgttaaaggagctagtcatccaggtcgggtcttgaaggatggtcgatttctccaggaatgag

SEQ ID NO: 394282 - DNA, 122 bp, Homo sapiens
cttctctaattttcttcatgttgaccctagaaaatccaactgaatggtatctctttggcacgttcaacttggtctcctattttcaataactgttgaaaaacatttgtgtacacttgttgact

SEQ ID NO: 394283 - DNA, 122 bp, Homo sapiens
gctgccaggaactcagtgagcctcagaggtatgatgatccagtgtgtagctcctgcatgtcgttgtgtgtcactgggtccaatgcttagaagggctaacattttttgactgctttgtgccag

SEQ ID NO: 394284 - DNA, 122 bp, Homo sapiens
gtgtgcatttgtgtggtgtgcatttgtgtggtgtgtatatgtggcatgtgaacacgtgtgcgatgtgaggagagagggagtgagacattcacggagcacgcctgtctctcctggctgtggat

SEQ ID NO: 394285 - DNA, 122 bp, Homo sapiens
aagcctgttacaatgacagaatgttgcaaggttggctaatcagctaagacaggaactagccgtttttcttcttttgtggttttcctgttgtcctagactttctggctccaggagaccttctg

SEQ ID NO: 394286 - DNA, 122 bp, Homo sapiens
tgaggggtctgcgctgggctttccggtggcttcgcccggaacgcgcgcttgttcctgaggcggtgcctgcctgtgtcgtcgtccctgtttgttcttcaaacgtcaggatttctccgtgtttc

SEQ ID NO: 394287 - DNA, 122 bp, Homo sapiens
cggcggcggcgatgcggggctgctggaggcggagaggcacggaggagccgctggggctgccgccacggccgcccggaggtgagcgggcgcggggccactgtcgccgccgcgcagtcccgcgg

SEQ ID NO: 394288 - DNA, 122 bp, Homo sapiens
ctgggatgccctctgccgaggtggagtccgccctgcaaggccctggcgggaagggccagacggatggagaggggcacacctcccgtctgtcagtctttctttcagcatggaaggagcaccca

SEQ ID NO: 394289 - DNA, 122 bp, Homo sapiens
tgccacagacaacccgcaggggacactgatgaggcttcgcgaggcaggcgcagggggtctcgctgggcctgctctaggtctgaaaggaaacgacaccccaaactttaggggctttgcacaca

SEQ ID NO: 394290 - DNA, 122 bp, Homo sapiens
gcccagccttgtgggtgtcccgaggtggtgtcgtgagtcctgttcacacgctacaggcctcgagtctttgagatttccaccgcaggctcacagcgcgttcatgtcggtgcctcttcatcagc

SEQ ID NO: 394291 - DNA, 122 bp, Homo sapiens
ttctgactcacagtcccctgctgagtcatctcctgggccttctctttcactgtctgcacccgctcctggggatgttcccaaagacacatgtgttcaatcacccataagcagtttcccatgca

SEQ ID NO: 394292 - DNA, 122 bp, Homo sapiens
gtgtcccagcagctttcgccttggcaggtgggagcatgacctatcgtgtgcagttcctggcgggctatacatagccagtcaaagcttcttacaagagaaacctctttcacaccctccacggg

SEQ ID NO: 394293 - DNA, 122 bp, Homo sapiens
ggacacagcacgtttgggagcctctctttccactgtaggctcgtaactgcagactactcccgaacaacaagaccacggcggctgctccatcattttgccagcttctatgtttccatatttta

SEQ ID NO: 394294 - DNA, 122 bp, Homo sapiens
ccagttttctgcgccgtttccacatgagcgcggagcgcactgtttcccatcctagcgccgcggctcaggtccctgcgggaaggaagcgctgctgtcaccgcccagtccacccggtcggcctc

SEQ ID NO: 394295 - DNA, 122 bp, Homo sapiens
caaaaccaaaaggcccttaagcccactgccaggcacgtatcaaactgacaatcgtgcaatcgtgattttaagccaaagtcaatgtaaatttttaaaacacaaaacaaatggcaagccggaac

SEQ ID NO: 394296 - DNA, 122 bp, Homo sapiens
ccagccaggctgcggcagcggtggtggcggatggctgtgtctctgtctctgtcggggtgtcggtgccaagggggcgacgggatttgggggtgtcctagccccggccgatggaggggaggtgg

SEQ ID NO: 394297 - DNA, 122 bp, Homo sapiens
tgtgtaactgcacctgctccggcaactttcatgactcagcacagaggaagaagccgagcgcgattctccaacacactggggtacgtactggctggcctaagtcctgggtcgtccaagagcaa

SEQ ID NO: 394298 - DNA, 122 bp, Homo sapiens
cagaaaaatcaaaataacattgactcttccaaccactgacatgttgtttaataatctaagcggcagtcctggaggctaccagacttactgagttctacctgagaaacagccaagcaaagtgt

SEQ ID NO: 394299 - DNA, 122 bp, Homo sapiens
cacatgggaggtgctggcctggccctgcaggtgaccagcgtagaggcagtggggccgggccgccctctgccaggccaggccctcccgtgtccagtactccacggagacgtgccctgccagta

SEQ ID NO: 394300 - DNA, 122 bp, Homo sapiens
attggaggtggggccaatgtgggccccgcccccaaccattgtgtcggagagggaagtggacgagctcctcggtaagaaccaatgaggatgtggtatgcaaataagcaagtggaggccgccag

SEQ ID NO: 394301 - DNA, 122 bp, Homo sapiens
ccgatgagctatgctcgcttgggagacccatcctccttgaaggtgagtgaaatctcaacacgagtatggttctgagagtagctctgtaactctgaggatggtctctggagaccatgactgtg

SEQ ID NO: 394302 - DNA, 122 bp, Homo sapiens
attccagatgtttgacagttgttggccccaaagttaagcgcgatttgtacggcctttacacgctccccacctccgtgaggcatcgtcagccccgggggcgacctggctgacggtgcggactt

SEQ ID NO: 394303 - DNA, 122 bp, Homo sapiens
acgtgtggcccttgtcctgccaccacccccaccaccacccccccttcacactgctcttgccgcatttctgtggccattgaagatgtctgtcgtcggagtcatactacattggacttagtagt

SEQ ID NO: 394304 - DNA, 122 bp, Homo sapiens
agctgtaccagctcatactctgaagccactgcagagtcacgattgtttttcttaaggacacgactgatgacacttggagccttgtcctggcttgtcacctggcagaacaggagaccaaaaga

SEQ ID NO: 394305 - DNA, 122 bp, Homo sapiens
aggatactcttacttgctgcatatttcatgtgctgattttgaggacttcttctcttcagtcggcaacaaataatctcaccaacattttcctatgtattttcaagtcattaggaatggcatat

SEQ ID NO: 394306 - DNA, 122 bp, Homo sapiens
ggcttccaaggcgcttggctcctagctctacacttcctttacacaggttcccgtttcggacgtggtctcttggtccagtcagtgccgccacgttcagacagcattttccactaacctcaggg

SEQ ID NO: 394307 - DNA, 122 bp, Homo sapiens
aactgccaggcggaagtggcgtcggagccccaggcatccgcagcatagccagtatcgccccgagacccctgcacggagcgagaacatctgctgccaccgccctcccactgccctcccgaggg

SEQ ID NO: 394308 - DNA, 122 bp, Homo sapiens
tttttacagttagaccaagcgtcactgtggactagccccatttcaagtgccctgtggccacgagtggctgctggtggctgtggtactgcatagcccagccattagggtgtgtgggaggatgc

SEQ ID NO: 394309 - DNA, 122 bp, Homo sapiens
tctaaactaggatggcgccagagtcccctaacaccaaattccagagtcctaaaaactttccgtttttagagaatatgatttccttgccaacaccaaaaatgtttccctaaagaaaaatgagg

SEQ ID NO: 394310 - DNA, 122 bp, Homo sapiens
tgttaacatttctaatctccagatcccaccaatcggtgctagctcaatgccctacagtttcgacccagagcatctatatcccagccctctaaagacagaattaagccaaccagtcctgagga

SEQ ID NO: 394311 - DNA, 122 bp, Homo sapiens
ggagtcggagggtcgcgtccgcaagatgtcctttgcaggccgttgcgtcctgagagccaccgagtctggatctctggatctctggatgcattttgcacagatgtcacctccctgatgcccta

SEQ ID NO: 394312 - DNA, 122 bp, Homo sapiens
ttcccattccagactctacctggtgaaatcttgttcatctctcaaaactcatttcaaaaccgacttcctccatgggaactcaaaggccttaaattttctttcaagcatatcctagcatatta

SEQ ID NO: 394313 - DNA, 122 bp, Homo sapiens
tctcctctcgcatcaaccacctccaccgccaccacttacaaaacaataccagcaacagtacgcaggcttcccaacaaaaatagaaagttatcccgtctccgggtcggggtccaagccggcgc

SEQ ID NO: 394314 - DNA, 122 bp, Homo sapiens
gctttctggtggcaaggaagcaccaccttggtgatactccagtgtcactccacctcttcgcggccccctccaggaaccgcctcccccgccagccaagactccattgaccatcatctgggctg

SEQ ID NO: 394315 - DNA, 122 bp, Homo sapiens
aggatggagggcctgtgggcacggagcttttccgagtgcctcccgtctccactgccgccacgtggcagagttctgctccccaccaacctgggcccagcctctgggctgaggcaaagacctct

SEQ ID NO: 394316 - DNA, 122 bp, Homo sapiens
gctcccaacttacactcttttctatagctgtactccgcgcgatcttttagaaaccagaggcgaagcaagccttctctcagctaccaagcacggagcccggacagtgaaatgagctgtgcctt

SEQ ID NO: 394317 - DNA, 122 bp, Homo sapiens
ggggcgctgggggcggcaaggggtcccagatcccaggccacgaactgttttccttttccccgggcaagagccccgctcccttcaactgacagaaattcactggggcaggggggcgagtgggg

SEQ ID NO: 394318 - DNA, 122 bp, Homo sapiens
caacgaacaccccatggccagtctcagaccaacaacaaccatgaccattattaactcgtgcgtgctaaataccagggagtgtgctgggtgctttctatgcatcatcatttcaccctcctaat

SEQ ID NO: 394319 - DNA, 122 bp, Homo sapiens
gccgcctcccgctgcctcagttcctcgggggacccctgctcctcaccacacaggctcgagcgtttccaggtcaagggtaacggagcgtggaccaagtcccgcgtctcctcccgggtgcgggg

SEQ ID NO: 394320 - DNA, 122 bp, Homo sapiens
aagagagcccaccaaacttcggctccgcagcagagatacagccaaggactccagggcagtcgcgggtaaagccaccaccactctctgccgggaaccagcgacgggggaaggccccgcctctc

SEQ ID NO: 394321 - DNA, 122 bp, Homo sapiens
acccagtgctcttgtctgtctctcccctaaccaccccctcccgcctgtccttgtcctcgccggcctttgtccccaggcgggccaggctgtgctggccttccagcggtaccagattggcgccg

SEQ ID NO: 394322 - DNA, 122 bp, Homo sapiens
gccactgggtgcgcagcagagcaggatgtgctgtgtgtgtgttgcgggagaggctgggggcgggtaatgtgatggcatcggcatcattctccagtcaatgaccctcaaaagaatcactggag

SEQ ID NO: 394323 - DNA, 122 bp, Homo sapiens
ctcccagggtgtggccggcctgccaggactgcgctgggcaggcgggccctggagggaagtcgggcgctctgggctcaggctggccaactgggtgctgaacggacagctcccaagccccgggc

SEQ ID NO: 394324 - DNA, 122 bp, Homo sapiens
gcatagtctccggcacccttggccgcatgcttgtcagaggtgggccccgggaaacacactcgctgcccctccaacaagcgtccctcgctccccattggccccccggtccccgccccccaccg

SEQ ID NO: 394325 - DNA, 122 bp, Homo sapiens
ctggacacattttggcaaccacgaagggaccatcgcctattgccaagtggtgagtaccaccggaaccctttcacttgctattctgtcctatttttccttagaatgtgggggctgaataccgg

SEQ ID NO: 394326 - DNA, 122 bp, Homo sapiens
tgtcctcatggcttcctgattgacactgctctgtcttctcttgcagagttggatctgtagcggtcctttggagagtgtgtgtggcgggagagtgaaaccttgggggaaaatgctaggagatt

SEQ ID NO: 394327 - DNA, 122 bp, Homo sapiens
ggctcatgaaaatattcgtgcagtttattgagtagtttgggatcgacttgggggtgcgcccggcctttggactcatgtaagcagcggtcccggccgctgtcccgcaggcagtaaaagccctt

SEQ ID NO: 394328 - DNA, 122 bp, Homo sapiens
ctgtcctcgcgcctgcagaagtggttctacgagcggtttggggagtacgtggaggacttccggttccagcccgaggagaacactgtggagacagaggaacccctgagcgcccgcaggtaggg

SEQ ID NO: 394329 - DNA, 122 bp, Homo sapiens
gtgagctcgaggaacccaaaccttagaaaagactgcagcttcagcgaacacttctatatccgtcttttgagcaaagaacacaggtaacccaagttaggttttcttacctactggaacagtga

SEQ ID NO: 394330 - DNA, 122 bp, Homo sapiens
tgttatccaaacaaaccagttttggttaattggactacaaagtgttcaaattaaacccaacgactgctttcgcggaggcagaagcgtgtaatgattaagaccacataaacaacagagtgtca

SEQ ID NO: 394331 - DNA, 122 bp, Homo sapiens
gagagagggggcgtgtgaggcaaggcccaagcctgctctccggcacctcccacgtgctggcggctgtggttttcagatatcaaaatgagctccggcttttaattgtctgtctccctgggccc

SEQ ID NO: 394332 - DNA, 122 bp, Homo sapiens
gcaggcgtggccgactgactcctattgttagagccgagggagacgcgttgtgggagggtgcgcagcaagccagagaggacgcgaggggcagggcctcaagcagggaaaaggcggagtcaggg

SEQ ID NO: 394333 - DNA, 122 bp, Homo sapiens
ctttaaaagttgcctggcagaactacatcctgctttccaggttagcagcctggctgacctcgggaatgttagacaagattcacccccgatgccttgctctctgatttatttcttgctgttgc

SEQ ID NO: 394334 - DNA, 122 bp, Homo sapiens
gaggggcgctgggaaactccacacccaacagccgaccaccgctgcaggagccgccgctgccgcctgtccggccgatcgacgcctttatagggttttcaacccccgccccctaacccgccggc

SEQ ID NO: 394335 - DNA, 122 bp, Homo sapiens
ctgagtgttcccgggtcatgtcagttcccaatgaacacttcctggcctccattctcactacgcagctccctcttcctcgcacaaatcctgttgcttctcattcaacactctctgccttcctc

SEQ ID NO: 394336 - DNA, 122 bp, Homo sapiens
gcatggggcagtcttgagttctgaatgcggactgcctggattctaacgagctgctgcaagcggaaccctgcgggtgagggaccggccttgccaagtgcatgggcgctggtggggcttactgc

SEQ ID NO: 394337 - DNA, 122 bp, Homo sapiens
ggctgcagatctgaaggctcggctattgaagcagagggggacgaggaacagcgtgcggggcggccagcaccgcagtggaaaggcacagcgctgctaacgggtaattattagaattaagaaat

SEQ ID NO: 394338 - DNA, 122 bp, Homo sapiens
ctggagtcacatgacccgggctggtcacgtgggccgtgggtttcccaatgcctttacaagcgaaggtcggaataaccacggctgagaaagacactctagtggctaaaccttcgctgctgcag

SEQ ID NO: 394339 - DNA, 122 bp, Homo sapiens
gcccgtctccgtagtccgctagccccaccagctcatcctcctcctcctcctcctccgcgtcgtcctcgtcctgcggctgcggcttccccagcacctggctcatcgtgcccaccggccggccg

SEQ ID NO: 394340 - DNA, 122 bp, Homo sapiens
gcttgaaagaataactccaagaagtgcaggactcctatctggtcattttggttgtctcgacgcaggaaagtggaaaatgcatttttctcagctcacctcataggtttaaccacagttcagga

SEQ ID NO: 394341 - DNA, 122 bp, Homo sapiens
cagcaagtaggacacaaatgttcggcattccgttaatacataaagccttcaaagcaggggcgacgcgaggggcactctctacagaaagtattctttcaccgccgcccccctccccaggtcga

SEQ ID NO: 394342 - DNA, 122 bp, Homo sapiens
aagggaagggcggaatgcctttaaggccggaaacacgtcggaggcggaaaaccctgggcccgcctggcctgggcgcagatcccaggcccgcggtgcatggcggcctccagctggcctaggcc

SEQ ID NO: 394343 - DNA, 122 bp, Homo sapiens
ctgcggacgctgcaggtctgtcatgtacccatttggcagattggccataaagttgctgtccgacaggcggcgccgcaggtagttcatggctgcgacttggggcagggggtcctaggggtggt

SEQ ID NO: 394344 - DNA, 122 bp, Homo sapiens
tgtggctacaggctgttcttgccagctcaggcgtcaactcgtggaaaccggttaatgacccgaggggacagcggattctcgcctaagcaagatcccgcagatgggagggcgtaggaagaggt

SEQ ID NO: 394345 - DNA, 122 bp, Homo sapiens
ggaagtctttcctgttatcacagtcaccgctgttgctatggttaatgacagcgctgacgtcgccatgtcacccccagcccttatgggaaacaaggactccagcccacagccgggcaaactca

SEQ ID NO: 394346 - DNA, 122 bp, Homo sapiens
ggcaattagaaaatgattagtatccttatcaggagcaatttcagagaatgtttgggtggacgtctaactacagtggagtcaaacgtgaatcaacggtgaaaaaaggacaatagccaatgtgt

SEQ ID NO: 394347 - DNA, 122 bp, Homo sapiens
cctggtgctcctgcttcagaaggactgcctgctgtcctccagtcagctgaaggccaagggcgaactgagcttcgagcgcgacatgctgctggtgggctgcagcagtggccgcatgcactacg

SEQ ID NO: 394348 - DNA, 122 bp, Homo sapiens
aaaaagaaagtggtttcatgttcctagaaatcactttgtatttgatcttagttcattccccgttaaagtaagaaacaagacacaggaaaaaataaaggcagacacaggagttagtattcaat

SEQ ID NO: 394349 - DNA, 122 bp, Homo sapiens
aaaactgcgataacacgaccccccgagaagagacgagaccaacacgctgagactgtggggcgtcagcaaacctccaagtgcacggcggactgagttgtacttcgcagctctctggacattaa

SEQ ID NO: 394350 - DNA, 122 bp, Homo sapiens
ggcggccgctcggcgcgcggtggcggctggtggcgaggaaaaaatgggccattgcccgagcgatcagtccatataaggctgggctccactcacgaacctggggaggcggggagagggggaga

SEQ ID NO: 394351 - DNA, 122 bp, Homo sapiens
ggccctagctcgtcggctgtgtattggggcgcgtggaggctgcagtcacggtggcgcccgcggggacggaggagggaatgagtgaagaggagcaaggctccggcactaccacgggctgcggg

SEQ ID NO: 394352 - DNA, 122 bp, Homo sapiens
ctggatatcgtcagtgagtccccagcggttgtgcaggcaccgggagctggggcagcggggcgggaaggagtgtggccggaaggcctccccgcaccttccccagcaggcctggatggcagatc

SEQ ID NO: 394353 - DNA, 122 bp, Homo sapiens
tagctgtggcccctgtgctgggtagccatacagaagtgcttaatcaatgggcattgcatacggggagacccagcccctgccctcagggatctcactatctcagaggagactcttggacagac

SEQ ID NO: 394354 - DNA, 122 bp, Homo sapiens
gggctttcctggctccagccatgctgtgtggtcagcttgcaggtggaggccagggacccacggaaactgggtcagcagcaccctggacctggccccttgtgtggctctccttccttcccctg

SEQ ID NO: 394355 - DNA, 122 bp, Homo sapiens
ctccgccgctcccactcacgcatggtgtaaacttttgaccctccaactttgcgacccctccggcaataacactggcctcaccacccagggtctcattctgctacgcgccggccgcagaaacc

SEQ ID NO: 394356 - DNA, 122 bp, Homo sapiens
cgggcctaggaaatgccgcactacaacttccgtcgggctccgcggcaggtcccggaagtgcgcctcagaggcccttctttcgcatacggccgcgcccactactgctcagagattctaggaaa

SEQ ID NO: 394357 - DNA, 122 bp, Homo sapiens
acagactctggaatcaaattgcctaaggatgattcccgcctctgctacttaccagctaggcgtgactttgtgtcttaccgctctgtgcatcagtttcagcatctataaaatggagacaataa

SEQ ID NO: 394358 - DNA, 122 bp, Homo sapiens
ccgagcacgacgtccctcccccgaccccctcccggcgcccggcgtccggcctgccgctcccgctgctgcgcgccccccttccgaaggcaaagcaggagcccgccttattatcataatgtatt

SEQ ID NO: 394359 - DNA, 122 bp, Homo sapiens
acgcccctgcccattggcctccccgagacccgctggcagaactttccatactattggctgcgaaacctgccactcatatgcgactccacctctcctaccggcacaggaaaggggtttcctcc

SEQ ID NO: 394360 - DNA, 122 bp, Homo sapiens
accaggattgagtcattcgtctcttcctaaaaccaagagctggcaagggaactggaatttcgatgactggcttggatgattcagaatttaatcctgagtcatgtgaggtcagggtagacacc

SEQ ID NO: 394361 - DNA, 122 bp, Homo sapiens
gagtggatgctggcaccagtgccatgctgggatctgcaggcagcttcagccacagccttccggggctgatttctgggcatggaagtgagaaccaaaagctggggcagggagcaccctggagg

SEQ ID NO: 394362 - DNA, 122 bp, Homo sapiens
aggtgggtctgaatctagcaccatgacggaactagagacagccatgggcatgatcatagacgtcttttcccgatattcgggcagcgagggcagcacgcagaccctgaccaagggggagctca

SEQ ID NO: 394363 - DNA, 122 bp, Homo sapiens
aggggctcctcacgtcccagatgatgggcggccaggcagagatgctccaaacttcccagacggggtggcggccgggcagaggctgcaatctcggcactttgggaggccaaggcaggcggctg

SEQ ID NO: 394364 - DNA, 122 bp, Homo sapiens
ggcgcgggggcggaaagccgcaggtcgggctctcacctgaccgtggctcgttcctagaagcgcagtttcctagtcgctgcctgtagggtccacactcggacagtaaatttgtgttcatcgcc

SEQ ID NO: 394365 - DNA, 122 bp, Homo sapiens
ttatccccatccaccactgatgtggtgttgctctctgtcacctccaggacagtgtcctctcgctctacaagagaagcaaaagagcacggttctcagactgaatgagttagattgctcatccc

SEQ ID NO: 394366 - DNA, 122 bp, Homo sapiens
acctggatcagcattggggacctggattagccctggggacctgcattagtgctggggactcgcatcggcattgggtgtctttttgttgcttcctcaagtcctagttttgactctggatgaag

SEQ ID NO: 394367 - DNA, 122 bp, Homo sapiens
gaggccgaggcgggcggatttcctgaggtcaggagttggagaacagcctggccaagatagcgaaaccccgtctctactaaaaatacaaaaattagccgggcgttgtggtgcgcgcctgtagt

SEQ ID NO: 394368 - DNA, 122 bp, Homo sapiens
aaaatgaaccgagagaatcggatccgggaactgacctccaattttaatttcacctgagagcgcggcctctcctcctcccttcccgctccttcctctccccgcccctcctccctttgtgcctg

SEQ ID NO: 394369 - DNA, 122 bp, Homo sapiens
gcccatcaccgccgcccccagacccactggttggtttgcgcgcccatctccaagggaagacgttagcaacccgaacgaagctaccttcccgagtccggctccctccacccacctggaatgac

SEQ ID NO: 394370 - DNA, 122 bp, Homo sapiens
aggctgctgagccttgtccaggacggtctacaccgccccacgtccaagatgagttcacagcgcccaagacctgttcaatttaagatgatgtaaactgcattgcccttcttagacacgcagca

SEQ ID NO: 394371 - DNA, 122 bp, Homo sapiens
gccggggcgtcggagcctccgcgttgtagttgggagaggttcgaacggggccccagctggcgaaagggaaaacggacccggacccggacccgtggagcctgctcgaaagccgggtgctgggg

SEQ ID NO: 394372 - DNA, 122 bp, Homo sapiens
caaagccagggggcccagaggagcaatagccctgggccacaagcgtgggtaggcctttcacgtattccgtctgcacaggcaaccaaggccagtagaaagctatggctgcaaaaccctggggt

SEQ ID NO: 394373 - DNA, 122 bp, Homo sapiens
gaaaatagcggggtcaacaggcagaggagcatcaaaaacctacgtttatatgcctgcgtgcgtgtaggagagaaggtagcaatgctagagggggaagggaagaaagaagagaggagaaacac

SEQ ID NO: 394374 - DNA, 122 bp, Homo sapiens
gagtagaactctccctggactagggtttgagcctctgcttcagcttctggcgcctcttctcgacctggggggaaacccagtagggttccatcgcgaaattaaacccgcccccaacacacaca

SEQ ID NO: 394375 - DNA, 122 bp, Homo sapiens
aagaagatgttttgagaagtcagtgtttccgagaaactttaagcttctaaagatggaaaacgagacagtcagtgaactgaaccaaacacagcttcagccacgagcagtggtggccttagaat

SEQ ID NO: 394376 - DNA, 122 bp, Homo sapiens
ccccccagttcctatctttcctggtccccaaagatctcatttccccagaacacttgctagcgtgccctcctgcgggcgtcctccgtggctctcactctgtccatcctcctgtctccccgagt

SEQ ID NO: 394377 - DNA, 122 bp, Homo sapiens
tccgggcgagttgcgacattttcagtgcttcctgagaagagtttcgcgcagttggagctacgggtacagcagtggtccgaaactagtggaagaccactagaacgcggagaatcagaaaatta

SEQ ID NO: 394378 - DNA, 122 bp, Homo sapiens
tactcgccctacacggtggcagggaaactgaggcacgggctggggagacgggcccagcagcgcagggctgccggggcccccgcgccccgctttccccttcagccccagcgtggagggagcgg

SEQ ID NO: 394379 - DNA, 122 bp, Homo sapiens
gcagactgggatcctcaccagacagaggagctccaaacctgcccatctcatcccatgcaccgacggtgcctggcctggctccaaactcccaaaaggaactattttacagggaccaaaaaggg

SEQ ID NO: 394380 - DNA, 122 bp, Homo sapiens
cagttcccaggcaatgctgggaacacatattgaagacaaagctgaaaaaccttactctaccgttactccctctgtgaaaaactctcctgcaaagctgatctacacaaagcgtcctctttcta

SEQ ID NO: 394381 - DNA, 122 bp, Homo sapiens
cttctaaccgaatgaatcgcaaccgagtagggaactttatgcatgattcataagtaggcgcggcccgcttgcatccgggtttctgggggtggggcccaaggttttgttccggccccaggctc

SEQ ID NO: 394382 - DNA, 122 bp, Homo sapiens
ggccgtccagcatgccctcgtaccagttctcatcgatctggttggtcagcgtgatgacgtcgccctcatggaagcccagctccccgtcgttctcgggctcgaagtcgtacagcgccttgcag

SEQ ID NO: 394383 - DNA, 122 bp, Homo sapiens
cctgcaggtaagggtcgggtggcatgcggggcaaggtagcgcagccgggtgggggtgccccggcagcagggccgggaggggcgtggtgggggggcctcggcagcgtggcagaggaggaggga

SEQ ID NO: 394384 - DNA, 122 bp, Homo sapiens
atatctgcctctaggtcctaatttcctttataaggacaccagtcattttggatccaggctcgccctaatgacttcattttaatttttgtttcctctgtggagagcttatttgtaaataaaaa

SEQ ID NO: 394385 - DNA, 122 bp, Homo sapiens
ccctgggccctcccgagtgactggcgttaacctccaacggagagacgctcaccccgtttacgacggagccctttgttttacaccactcagcagaggtgccttggccatactgaagatttaac

SEQ ID NO: 394386 - DNA, 122 bp, Homo sapiens
aaagccgcacaaaaaataagcaaaagcgtcccaggagtgcactctgacagctgtgcacgacgcaagccttgaggacttgatcttcccaagcgaaattgtgggcaagagaattcacgtgaact

SEQ ID NO: 394387 - DNA, 122 bp, Homo sapiens
ccgcaagatttcttaagtaaaacacacacaaaacctaaccataggccgggtgcagtggctcgtatctgtaatcccagcacttcaggaggcttaagtgtgaggattgcatgagcccaggagtt

SEQ ID NO: 394388 - DNA, 122 bp, Homo sapiens
tggtgaagtagaacaccatgatcccgggagcggtgcggtgactccaccgcggagcagcagcgctcaactcacgaagctcaggataccagactcgcggcggccgcctggcccccggaactcct

SEQ ID NO: 394389 - DNA, 122 bp, Homo sapiens
ggttgccgcggcagactcccacccaccgaaacgcagccctggaagctgattgggtgtggtcgccgtggccggacgccgctcgggggacgtgggaggggaggcgggaaacagcttagtgggtg

SEQ ID NO: 394390 - DNA, 122 bp, Homo sapiens
ggcactctccaaggggagagaaactcctaggccagcgactcaccctgcccgcagccaggacgtgaggcccctaagctgcccgtttgattttctcagggacaatgtggagtggtcggaagagc

SEQ ID NO: 394391 - DNA, 122 bp, Homo sapiens
gctccccaggtccgcctcggaacccctgcaaccctcattgagaacgccagtgtttaacagcgagtcgtttccatagcaaccgacagggtgtcacagacacaggattatgacttcacggcgtg

SEQ ID NO: 394392 - DNA, 122 bp, Homo sapiens
aaatccggagccctcctaactattcgcaaagtacccacatcgccgtctccccttcctccccgttttaagcagtgcgcatgctcctaaatacgcttccccgtgggggacgtaggcggggccat

SEQ ID NO: 394393 - DNA, 122 bp, Homo sapiens
tcctcacttcctagatgggatggcggccgggaagaggcgcttctcacttcccagactgggcggccgggcagaggggcttctcacatcccagacgatgggcggccaggcagagatgctcctca

SEQ ID NO: 394394 - DNA, 122 bp, Homo sapiens
accggacgctcttcgggaaagttcccaaggtcccagaggcccactcataagctctgcggccgtcgacgcccaaagccccgcgtattgcagccgcagtcgtgcgcgggctagttgtaagcacg

SEQ ID NO: 394395 - DNA, 122 bp, Homo sapiens
agcccctgactgccgcagcccccacagagcccgccgcgcaccccacgtcccccacgccagcgcccagccatggaggccatcaagaagaaaatgcagatgctgaagttggacaaggagaatgc

SEQ ID NO: 394396 - DNA, 122 bp, Homo sapiens
tataatttatatttctcctaaaaggcaagtaatgaggaaattaactcatgctcctagcttcgctaggaatgtgatagagaatttcccctgtaggttcttcgtatggtgcgctccgctggatc

SEQ ID NO: 394397 - DNA, 122 bp, Homo sapiens
cagtgtacagttcagcagtgttaactatattcgcattgttgtgcaaaatatgtgcattttcggttgccttttagtacaagttgggagaaaacgaaggggaaaaaaattgggaaactcactct

SEQ ID NO: 394398 - DNA, 122 bp, Homo sapiens
gggccccgcggggcccgtccgctcctccagccgctgcctcccgggcggcgctcgccggcacggcggcaaagactctgtttttgtttttgagagggagagtttcgctcttgttgcccaagctg

SEQ ID NO: 394399 - DNA, 122 bp, Homo sapiens
ttttcctgcaactagactgtcccttctgggagtgatgggagacagtgacagatcatcaggcgttagattttcataaggcgcacacaacctcgatcccttacatgcgcagttcacaatacagt

SEQ ID NO: 394400 - DNA, 122 bp, Homo sapiens
tgtgagtgcctagcctccaggtgggggctcctgccctcctccaacaacccaggacacccacgcctcacccctcggtgcctgggcccagccccgtgcccctccgtctgcctccgcacggctgg

SEQ ID NO: 394401 - DNA, 122 bp, Homo sapiens
actggaattcttctttgatgcggtcgcagatctccaagatcgagaacttgaagggctggccggactggagcggggtctggggggggtgtgggggaaacgtcagggtctgagttcccggacac

SEQ ID NO: 394402 - DNA, 122 bp, Homo sapiens
cacccgcccgccaccgccttctgtgagggcccgggtagtctagcaaccgaaagcaggaagcggagaaagggcggggcggtcgggcgcttccggggagctaggcctcgcccccaaggagggag

SEQ ID NO: 394403 - DNA, 122 bp, Homo sapiens
cttgcttgagcttttcaggggcatctgtctgtgggagcttccctcctcccttggcttctgcggggcaccttctcgtcctcctctgttctctcacctgccttcttcacacacagtggctgcca

SEQ ID NO: 394404 - DNA, 122 bp, Homo sapiens
gctaaaaattctacaaaaaaactagcaacaaaagccttgaatgtctcaacatatttcatccgtctcatctcagaggtttcaccaacacccaaatgtccagctgtttacatgtgcaatttatg

SEQ ID NO: 394405 - DNA, 122 bp, Homo sapiens
atactaacattcttctgcattgaaaaaatataacctataagatgaacattgtaggccgggcgcagtggctcacgcctgtaatcccaacactttgggagtctgaggcggatggatcacctgag

SEQ ID NO: 394406 - DNA, 122 bp, Homo sapiens
gggtgtggcggggaaggcggtaagggcacagtctggagagctcaaagcccccccaaggaccgagccccgccccccaagcgggagggcgagcgagtgatggcggcggctgtggctgtggcgtg

SEQ ID NO: 394407 - DNA, 122 bp, Homo sapiens
caagcctcccttccctgcgcccatccccgaggaggagcgtcgtggtcaattttaaaaatacgaactcaagagcagagttgtgtgaggacacacacttcgaatcgtgatgcatctgcagtccg

SEQ ID NO: 394408 - DNA, 122 bp, Homo sapiens
tttcggcagctcggaccaactgtgctagcgatgcacttagcaattatctgctggctccgacgccccgccctctgctcttgcgattggctctccagtcccgggcaggactgcattggtttcag

SEQ ID NO: 394409 - DNA, 122 bp, Homo sapiens
gatgcaatattgtcattgttttcaggtgacggttttatgaggcctccttgtgcatgtggccgtgagctaggttctaataatataacattgccaatgtagcatttaggaataatagcagttcc

SEQ ID NO: 394410 - DNA, 122 bp, Homo sapiens
actgaggagagcagacagggagagagggagagtggccccagacggtccaccaccctgcgccggacatggggcagatgtaaggataaaactgtcagcagtgaaaacacaaagagaaatattgc

SEQ ID NO: 394411 - DNA, 122 bp, Homo sapiens
gcaggggcggggactggagcctgctgcccttggtcgcctagactggatagtgggggtgggcggaaggcaacgcaccatccctctcccccaggccccaggacctgcagggccaatggcctggt

SEQ ID NO: 394412 - DNA, 122 bp, Homo sapiens
cacaattctgtcaggtccaatgcaaaattcaccctctccaaaaactcttccccaacttaccgcaccctgctatggttctgcccttttatgccgtcagtatattctctgtgatctcaacaggt

SEQ ID NO: 394413 - DNA, 122 bp, Homo sapiens
ggactggccgccgccatctgtgggcgtcgcatgtctatacagagactgctccagactggccgccgccatctgtgggtgtcgcatgtctatgtagtgactgctccagacaggctgctgccgcc

SEQ ID NO: 394414 - DNA, 122 bp, Homo sapiens
ctggctgatttttgtatttttatcagagacggagtttcaccttgttggccaggctggtcccgaactcctgacctcgtgatctgcccacctcggcctcccaaagtgctgggattacaggcgtg

SEQ ID NO: 394415 - DNA, 122 bp, Homo sapiens
cgcggggcggacgcgctgcacctcgccgtagcgcacaccagggggcagcgtggagctgcacgaggcccagggcctgggacagacccaggacaccgatctggggaccccgcacagacctctgt

SEQ ID NO: 394416 - DNA, 122 bp, Homo sapiens
gagcctctgctggccagtaacttctggcggctgcctggaaattgcctgcagccggtttaccgctcggattagtttagaaagccaaggggtctgcggtccaaataggggcgggctagataatt

SEQ ID NO: 394417 - DNA, 122 bp, Homo sapiens
tctccccgcctggtgcaattggtccgtttgtttgaatatgaatacacttgttttcggctccgccggtgggtcccggctcctctccccggcgcagggcccccgagcccgggctctggcgctcg

SEQ ID NO: 394418 - DNA, 122 bp, Homo sapiens
ggtgagtagggagctggagagaagtttggtgcatgtgctgggagaatggggggcagaaaacgctcaatttccaacatgggggaaattcaacaagacgccataggctagggcgtatctaagtt

SEQ ID NO: 394419 - DNA, 122 bp, Homo sapiens
aacagcccactccctcggagctgggggtccacacgcacaggggctgcagtgggaagggggcgaggtcttcctcatagagaaggcaaccttggagcagggctggaaggaagcaggagaggccc

SEQ ID NO: 394420 - DNA, 122 bp, Homo sapiens
cagcctgagtgacagagtgacgtgtcaaaaaaaaaaaagagatgaggtcttggccgggagcggttgttaagagatggggtcttggccaggcacggtggctcacgcctataatcctagaactt

SEQ ID NO: 394421 - DNA, 122 bp, Homo sapiens
acgtggcaggatccacttttacttttccagacaagggccgacggttgtgacctggcttctcgtgaagtgactcctggcgacagcagcggagaggactaccgaagcttgcagtcgcggtttga

SEQ ID NO: 394422 - DNA, 122 bp, Homo sapiens
ggctccgtttttatgaagcacttccttctgttggcgctttgggaatattcattcttggctcgcaccgcgcacggttgacagttgggctgggaaatgtacccgcggcttaattagggcatcgc

SEQ ID NO: 394423 - DNA, 122 bp, Homo sapiens
gggattcatttctagaagagttaaaggtttggcccggatccacttggatcacaccaaacacgacttccatcatattctgaaagatgataatgcagagagtctataagcataaaactggaatt

SEQ ID NO: 394424 - DNA, 122 bp, Homo sapiens
gagccagactgctgaaatatccaattctgatgctcttttggcaggcttcaggagcacacacgtagatacaagaaagaatacattgatttcaaaacatgctacatctgtgttgggtgataagc

SEQ ID NO: 394425 - DNA, 122 bp, Homo sapiens
accgcgagcggcggctgagttaccagagcctctgcctcttcctctgtctcctgtgggcagcgctcaggaccaccctcttctccgccgccttctcgctcagcggctccctgcccttgctccgg

SEQ ID NO: 394426 - DNA, 122 bp, Homo sapiens
ttttggtcatgctccaaaggccacactcaccatcacgacacggtgtggcctcggccagtgcggggaacgtggcctgcatcagcaaacgctcagaggtgaggtctggtcatgctccaaaggcc

SEQ ID NO: 394427 - DNA, 122 bp, Homo sapiens
tcccgctgcgtgcaccaagtgctttgaaagtttttcgcggattaaaacgaataaaaacctcgtcgaaaggcaaagaaggcagggttgaaaagtactcagctcgacaccggagaaaaaagaaa

SEQ ID NO: 394428 - DNA, 122 bp, Homo sapiens
aggcacgaataatcctaaacctgagcatgattgcttacgtttgaaaaaggacatctaggccgggtgcagtgactcacacctgtggtcccagcactttgggaggctgaggtgggaggattgct

SEQ ID NO: 394429 - DNA, 122 bp, Homo sapiens
ggccgccaagcccccgcccacccggaactcttgaaggcctgtgagcgccaccagaagccccggctcccgcaggcgcctctcgctccacacctccacgcaagcagagggagtcggctccagcc

SEQ ID NO: 394430 - DNA, 122 bp, Homo sapiens
ggagcagagcttccgggctgcgctcttcgttgcccagtttccgctcagtggtcgcgtctccgccccccacccaccagtcccgctgcattctcggccgggctctaggcgccatggctccccgc

SEQ ID NO: 394431 - DNA, 122 bp, Homo sapiens
ccttccgcttcgggctcgctgacttccggcttagggccgagggtggggaactgccgggcgcggaagcgatgggcatatctgtggcttattttcagcactgtcgcgcagacagtggcgcgatc

SEQ ID NO: 394432 - DNA, 122 bp, Homo sapiens
cctcgcctccgccggcgactcccgcgaagtccccacccccagaggcgtcgggcgcggcggcgccgcccgccctcggcctggagcgctttcctggggcgtcacccaaccacctgacccggtcg

SEQ ID NO: 394433 - DNA, 122 bp, Homo sapiens
tgtggcctctggcccctctcctgtccacctgccttccggaagcccgaagtcccctctccccgactgcgctgtgctgtgtgccttgcaagagtgacttaccacatgaggtaaatcctactggg

SEQ ID NO: 394434 - DNA, 122 bp, Homo sapiens
gtggatttggacatttttgtccagtccccagaggtgacagtgtggcctctatggctgccccgtgctctgtgaccggcgcatattcaccacgggtgagcccctcgagctgggccctggggaga

SEQ ID NO: 394435 - DNA, 122 bp, Homo sapiens
gcgccgggcctgctcctcccgggcctttgcttaactcggggctgcacgatggctcagtgccgggacctggagaatcaccaccacgagaagctcctggagatctctatcagcaccctggagaa

SEQ ID NO: 394436 - DNA, 122 bp, Homo sapiens
gaaggaggaaaagtggggctgcctcgtcggagagcgcaactctggagctgcctgcaaagacgctgcgggggaaaatgctaagggctccctgatccttggtaaatcgtgtttggagaggcatg

SEQ ID NO: 394437 - DNA, 122 bp, Homo sapiens
ctggccacgtgcttgtcgtgggccaccctggccagagtctcagtgccagtaaggtagaaacgataccagccaccccggagaaagagccaacaaacgcaggctggacagcaaaacctgggggg

SEQ ID NO: 394438 - DNA, 122 bp, Homo sapiens
aaggggacggtggcctggggacccccgcgcccgcagcacgtgcaccgagcctggagcgcccgctttacagatcttgtcgctccacccctaaaacaaaggccccggggccccatctgtgccgg

SEQ ID NO: 394439 - DNA, 122 bp, Homo sapiens
tccaccccggatcgcctttccggcgtcctctccccagcgccccttcctgcgaaccttaaccggacaaccccagtccagctcccccaacccaccgcggcgcccagtgcccggggatccctgcc

SEQ ID NO: 394440 - DNA, 122 bp, Homo sapiens
ggaatttaatccatgagaaggttaggacatctagtgaccaaatggccatagaattggccccgggtctcactgtgagacgcatcccatagtggcttcaggtaagtaaataaataacacaattc

SEQ ID NO: 394441 - DNA, 122 bp, Homo sapiens
ctaggtggcacgttccttaaaagcgaaaggaccaggagtttcttcctgcctcgtctcttccggatccctcctgcaccgcccacagcctgcagatttgagcgccatctccaggccccgcccac

SEQ ID NO: 394442 - DNA, 122 bp, Homo sapiens
aggcagggactgtgcgactccacccaacacaaagactcaacgagtatgcacgtgactacacgtgagtgtggagggcttggccacagccctgtcttcatgacagcacagcacaaggctgatgg

SEQ ID NO: 394443 - DNA, 122 bp, Homo sapiens
acctgactgaacatctcggcagatttcctattgccacctcagtctgcctgtggctgttgccgtctgtctccagtctcagtcaaagagcaaggcacccagcccaggacagctcaacagaccca

SEQ ID NO: 394444 - DNA, 122 bp, Homo sapiens
gctgcgcgtggtgacgcgggaggcatcaggaccctagagccggggctgcgcgtggtgacgcgggaggcatcagggcccatagaactggggctttgtgctttttccggtaaagagctccaggg

SEQ ID NO: 394445 - DNA, 122 bp, Homo sapiens
ccccgcgccgctgcgggtcctccgagaccccggactgtcctgagctgcttcgagggcgggcgagaccctgtctgttcaaaagagaccctcgagaccctcgacattctgctcacttcttttcg

SEQ ID NO: 394446 - DNA, 122 bp, Homo sapiens
ctctgtgccccgcctttgtttggctctcaaaattgtgctgtgccctctcatctccaacagcgttacgctgattttcgagcttttcctggctccccctggctctttgctgtcgtcactcggtt

SEQ ID NO: 394447 - DNA, 122 bp, Homo sapiens
cttgacatgatcaccctaaatactgcctccttaagatgtctccagtcgactgggtgtggtcgctcatgcctgtgatcccagcactttgggaggccgaggcaggcagatcacaaggtcaggag

SEQ ID NO: 394448 - DNA, 122 bp, Homo sapiens
tttccccccacccccggggagaagctgcaaccagttttacaggacactcctggccttgcccgagatcaatgaccccattcagagagggttgatggcacaacgcggcaatgccggcagccaag

SEQ ID NO: 394449 - DNA, 122 bp, Homo sapiens
acattcctataaaattagcttactcactgaatttttaaaaaggagaacaaagccaaaggacgccattggcctctgggggcgtatgtgtgtgaacaagctgatgctgtgtagaaatgatgtgt

SEQ ID NO: 394450 - DNA, 122 bp, Homo sapiens
cctcggcagaaatgccaacactcgtctctgagatttccatggatctagaagaaagtgggacgataggtctggaggggaaaagcgtattaaatacttgaggatcttcctcaaattcagagaag

SEQ ID NO: 394451 - DNA, 122 bp, Homo sapiens
gcaatatacaaattaaaggatgggggttttttcccattcattcaataaatcgttagtgaacgccttctggatacatgacagctaggccagggaatgagcctgcaaagacgaggaagatgtct

SEQ ID NO: 394452 - DNA, 122 bp, Homo sapiens
gaggtcttccactgactgctagagcctcgagtcggcctgcgttggtttagaaggaacgttcggatttgttcccagggtgttacagcccagctgatttttgtatttttgttttgttttgtttt

SEQ ID NO: 394453 - DNA, 122 bp, Homo sapiens
cactgccacaagctgcaattatcaacaagctctaggcccaaagccacatggcagaaagcacgtctagcaaagcagtggggattgtgcccgggccaaacacacaggaaccaggagtggacctg

SEQ ID NO: 394454 - DNA, 122 bp, Homo sapiens
ccaccccagaaactatttcattggcgccacctctagcccacacttcccctcttccgcatgcgcacaaggagcagaagccgaccagctcgtcacgtcgccttccccgcccctaaatttccagt

SEQ ID NO: 394455 - DNA, 122 bp, Homo sapiens
tagacaggctgcagcaaatcagagttgagggttattgagtctttaagataaagttagagacgggtgaggacattgagggtctttaccagaaaatgatgttaatgatgactcatgggatttaa

SEQ ID NO: 394456 - DNA, 122 bp, Homo sapiens
gaccgccgggcagcggcggtgcagaggcggcggctgcagacggagcgcggtgttgggggccgagtccccgcgtcccctcctacccaccctcgcgccagcaggaccctctgcgttccggtctt

SEQ ID NO: 394457 - DNA, 122 bp, Homo sapiens
tttataggtggaggaacattgctttgtaagtaagctcccagccttgcagtggcttgaccacgaacttgtgccgctgcctcctccccagttgccccagaccggttcctctggaggtgccttat

SEQ ID NO: 394458 - DNA, 122 bp, Homo sapiens
ttagctgatgctccaagatgaactgcgtatagcgattcagtcactgaaagagacagatgacgacactacccatagagtcgaccggacgcaggttaataaggaaaccctttgtgaggtggagg

SEQ ID NO: 394459 - DNA, 122 bp, Homo sapiens
ctaaaagctagatggaattctatttgaaatcactcagccataaaaaacacacctgagggccgggcacggtggctcatgcctgtaatcccagcactttaggaggccgaggcaggtggatcatg

SEQ ID NO: 394460 - DNA, 122 bp, Homo sapiens
cgacgggatttccggacgcgcccaggagtctgctttggatgtcgtcggggtgtgcctgagcgcctgctgggactgccatcctctcctccggctcgagctctgtgttactcgggccggtgctc

SEQ ID NO: 394461 - DNA, 122 bp, Homo sapiens
ttgtatgacagagattaacaccagtacccatcccacaggcttgctgtgaggacagactaacgcctcaacagggcttgtggaagtgcgtggctctatattcccttccgcgccgaccccgggaa

SEQ ID NO: 394462 - DNA, 122 bp, Homo sapiens
gtgaagggtgggggttaatcagggtgttctccaaacaaaggctcatgagagcggcagggacgccactcccagactcacatctgtgctgttttgagtgcagcatgatggaaatggcatggtgt

SEQ ID NO: 394463 - DNA, 122 bp, Homo sapiens
agggaaggaaaatgcaggggaaagggctcacccctcgaccccaggtaaaattagaaggaacgtgtggcaacccaggtgcagctttggtcgctcgctcaaggactttgctagtcactaccatt

SEQ ID NO: 394464 - DNA, 122 bp, Homo sapiens
ggagcttctcattgcacgcggagattattattgcatcgggttccaagccaatgggaagcccgggggaggggtttggcatgaggaagcgttggttacagcagctgattggctgcagccaagac

SEQ ID NO: 394465 - DNA, 122 bp, Homo sapiens
tgtagaattacagctgctagaagttgcacggagaggaacctgttccgtgaaacatgattccggaggcaaagcagggaggctagtcctcagtgagggctgtgttgtcatggtaaccacgtact

SEQ ID NO: 394466 - DNA, 122 bp, Homo sapiens
acaccacgggcccaaatgggaagtctgagacgtgcctccgttttgtacatccgcccaacgcgagcagccctggcaggctcaccgaggggagattctgggaaggaatctggcctgacctctga

SEQ ID NO: 394467 - DNA, 122 bp, Homo sapiens
tcaaggcatccactgtccctcgtgcctgcatccttctctctaatgtttactgctccagctcgcctctctctgcctggtaaccaccttttttatttcaccccctctccctgcaccagtgtgca

SEQ ID NO: 394468 - DNA, 122 bp, Homo sapiens
cgcgcgggccccgccccctccatcactagccaatccccgtgcttgtgacatatgggcttgcggccccgcccgctcccatcgcgagaccggttcccaccgccctgactcccgggcgggccccg

SEQ ID NO: 394469 - DNA, 122 bp, Homo sapiens
gctgccgctcctcctcccagacgcagagcgccgctctgccccgccccccgcgcaggctgccgtccctacatccgggtaccgactccagccgcctagacgctggcactatggtcatggcggag

SEQ ID NO: 394470 - DNA, 122 bp, Homo sapiens
acctccacctcccagccgcctgccttggcctcccaaagtgccgagattgcagcctctgcccggccaccaccccgtctgggaagcgaggagcccctctgcccagccgcccagtctgggaagtg

SEQ ID NO: 394471 - DNA, 122 bp, Homo sapiens
tgggacgcatccccgggggatgctcctccaaagcttttatcgggcgagcgcagtggctcacgcctgtaattcctgcactttgggaggctaaggtaggtaaatagcttgagtctgctgggaat

SEQ ID NO: 394472 - DNA, 122 bp, Homo sapiens
aggagagatacaaaatgaaatgaacgcccaggtgtcagggagctgagccttacagtaccccgcccccaatccatccttctaagtcccgggcctccgcggtaaaataggggtgatggggatag

SEQ ID NO: 394473 - DNA, 122 bp, Homo sapiens
agagtcctcgggacaccgcagcgctttccggtggcgcaccttgggtccttgggtgaggaacgacggcccgctcgccctcctttgcttctaccctagtgactggatccggaaagaaaaggacc

SEQ ID NO: 394474 - DNA, 122 bp, Homo sapiens
tcaaaatcggcgttcaatctgccgattttggctttcacttgaaagaccactaagcaaccacgggccggccccgaggctgaccgagggctgctctgtggggagggagggtgcaggcaccggca

SEQ ID NO: 394475 - DNA, 122 bp, Homo sapiens
agcctggggcctgcgctcgccggccggctccgcaagccgcgtcccagcgccccgcgactgcgtcaccggccccccgcacgtaaccacagctgcctccgcccgcctcgggcccgggcggacgt

SEQ ID NO: 394476 - DNA, 122 bp, Homo sapiens
gcagagtgttgagcggctcgttgagctgcacaggcattgacaccttggacaggtctttgccgatgttgttgcgcagaatgttccacaggctcacgtcagccccaggcccgctggccgccggc

SEQ ID NO: 394477 - DNA, 122 bp, Homo sapiens
ctcagcacagacccggagagcattgcgagggcggagctgagttctcctctgcacacacttcggagatacagcgaaggcagagcaatgttctcctcagcagagacccgggcgggcgggccggt

SEQ ID NO: 394478 - DNA, 122 bp, Homo sapiens
atttctgtgcaaacaaaaggtgtgcctggcagccatttctccatggagttgctaagtggccggaaaacaagcctgagggaggaggcaggagttggagttaccttaggcccctgattcactgc

SEQ ID NO: 394479 - DNA, 122 bp, Homo sapiens
ggccactgaggagaagcctgtggtgggaaaaagcctcttgaagcaggactggggctagagcgcctggaactcgaagatgctgacagcctcctctgaagaaagcccccaagacactagtggtg

SEQ ID NO: 394480 - DNA, 122 bp, Homo sapiens
aaatttaccttacagtatctgtctcatggacagggcagataaatgagtgacttatttgatcggaatgtccgagctgaatgcatacatgtaatcttgagtgaaaacctagaattagttggttt

SEQ ID NO: 394481 - DNA, 122 bp, Homo sapiens
ggaggatttctctctagctcgactcactctggactgactcgctccctggctttctcagttcgttttgggagataacttgttttgctccaagccgcatccgttgaccccttacagtcggatgg

SEQ ID NO: 394482 - DNA, 122 bp, Homo sapiens
atggtgcgttttggctgctactttctttttcagtctttcggtgcggagaaggggaggaggcgggcagaggtctgaaaaaatcgaatgccttatggaaaggaactgcaagggttcctttgggg

SEQ ID NO: 394483 - DNA, 122 bp, Homo sapiens
tgtgtttccggctgcctcttcccgttgaccccctcctcccccaacacctgtcccctctcccgcccaccctcattccacagccctgtagacaggaggggcagatgcacgtcccagtcagaggg

SEQ ID NO: 394484 - DNA, 122 bp, Homo sapiens
cttggcctcatgggagacgtctcctccacgtgcactgctgccctcggaggctgtgaaaagcgaggtgtgggaacctgagctgtaacccctctgccgtggtcggcattttaacccaacctcaa

SEQ ID NO: 394485 - DNA, 122 bp, Homo sapiens
tttgcacctggagaggccgccgagaggccagagctgggcctggggaggcagacttgaggacgacttgggccaacagaggccaccgggaggcaggagctgtccttggacaggcctacttgatg

SEQ ID NO: 394486 - DNA, 122 bp, Homo sapiens
aaattaatttataaaattctttgttccctttatttcccacaaaaacacccgcagcaaaaacgctgggattcatctgggccctctgaaaaccgtgtttccgacgcaaccgcccattagaaaaa

SEQ ID NO: 394487 - DNA, 122 bp, Homo sapiens
aggagacctgtgtgcagccttcatgacgggtgtgtgcccagggggagcgggtgtgtttcccggggggagcgggtgtctgcctggggggagcgggtgtgtgtccgggggagcgggtgtgtttc

SEQ ID NO: 394488 - DNA, 122 bp, Homo sapiens
agttggatatttttttttcttaagttgccgcaattcgaacccattatttcgggggagatgcgcgctatactggcgtgtgagcgagcgcgggtgtgtgtgtgcgtgcacagtgtctgcggggc

SEQ ID NO: 394489 - DNA, 122 bp, Homo sapiens
cttagtgcctacatctgacttggactgaaatataggtgagagacaagattgtctcatatccggggaaatcataacctatgactaggacgggaagaggaagcactgcctttacttcagtggga

SEQ ID NO: 394490 - DNA, 122 bp, Homo sapiens
acgggctgacttttgcagggtgacctgaaggcgtatctgcgcagcgagcaggagcacatgcggggggactcacagaccatgctgctgcagaggatggcgtgcgaggtcgccgcggggctggc

SEQ ID NO: 394491 - DNA, 122 bp, Homo sapiens
ttaactgcttgctgatggattgactggctgtgagggtgagtggcaagaaggaatcgaagacgagttagggtggatggcgatgccatttgctgagacaactgggaaagaaaaagatttgggaa

SEQ ID NO: 394492 - DNA, 122 bp, Homo sapiens
gcgttagcttaagaagcaccaggctgcctcccccagcatcttcaactaccctgtttgcagcgagtctgattgttccaggcacagctcacgtcactggctgcaaagaggaaaaaaatgcaatc

SEQ ID NO: 394493 - DNA, 122 bp, Homo sapiens
gaccatggacatcagcattagtggcagcaacaggaggagggaagagattagaactttcatcgcaactgtcggtgcagctgtaagttgcttgaagaatataatggaaggttccctgctggagg

SEQ ID NO: 394494 - DNA, 122 bp, Homo sapiens
cgccaatagtcaacatggggccgcagcgcaggcgcagagggaaggtagccttgccggtgacgtcactgctccaggccagatggcgtgcccaccgtgtccttttgctgctggggctgcgtcgc

SEQ ID NO: 394495 - DNA, 122 bp, Homo sapiens
cagcacctcacagagaacaagaagaacctcttgcgcggtaggtttggcttgcaaacaagccgttccacgctggaaggctgtgtcaaccgatgatgtggaagaataatcatccctccttgctg

SEQ ID NO: 394496 - DNA, 122 bp, Homo sapiens
tgacacacacaaagcccagagctcggacggcaccgcgaggaggctgggattcacgtcaggcggcacttggtgggcagttacaagaaaggacggcagccaagccagtgcctcctgtgctccgg

SEQ ID NO: 394497 - DNA, 122 bp, Homo sapiens
gcacctgctcggccccccgagctcccggtgggcgctgtggagtgtgggcggcgaagtccacgtggcactgcagatccccttcaatgtgtcctcactggtggccatgtactccaccgccctgc

SEQ ID NO: 394498 - DNA, 122 bp, Homo sapiens
gcagcacctgaaatgatctgtcttaggtatgtgtgtgcttgttcattgttttgtcttctccgtgaaaatctaagctcctagaaactttgtgagggaggcaatgggtctgttttgtttacctc

SEQ ID NO: 394499 - DNA, 122 bp, Homo sapiens
ccggctccgtgcgctgggagcgcgccgcagccgcaggagcccgtggagttgtgagggggtcgcccacccggagcccgggtcgccggcttgcagcagccccggagcagccgggctgggcgaga

SEQ ID NO: 394500 - DNA, 122 bp, Homo sapiens
ccctccctttgcctgagttcactaccacctgattggtttgtgtgactactgaaattagtgcgtgaagcgttagctcgaggaatgccagctgctcccccaattccatttcttaaccttcccaa

SEQ ID NO: 394501 - DNA, 122 bp, Homo sapiens
gcgccccttcagcgcaaggagcgggctgggcctttaccccgatccttaccccccgccctccgctggtagcatcaaactggcctggtggcacctaagtaagggggcagagagtaaacggcccc

SEQ ID NO: 394502 - DNA, 122 bp, Homo sapiens
ggcttttataaccccctgcagagacgtcactgggaaggggcagtacctgggctgcgtactcgccagtcccggtgcgcagcgcggcagctgcgccagctgttgacaactgtctcattccaccg

SEQ ID NO: 394503 - DNA, 122 bp, Homo sapiens
ttactgctgaagacactagagccagagaggaaatcctaatcctagagcccaggcaagagccgcagatttgaattaagttggtggcagcaaaggcagggaccatgatgttttacctgcaccaa

SEQ ID NO: 394504 - DNA, 122 bp, Homo sapiens
aggccctgctgaactcagagcccccatgaggatagaggctataacgtaacagacatgaaacgtcctgaaagctccacgtgcaaagtgagttgcttatgcctgcgtaaacttcttgttcttca

SEQ ID NO: 394505 - DNA, 122 bp, Homo sapiens
taggcacctggacacatatgcgtgtgcacgcacgcaaggccgcgcacgctgggctctggccggcacggccctcacgtgccctcacgcacgtatgccccgcatgggttcccccagcgagctat

SEQ ID NO: 394506 - DNA, 122 bp, Homo sapiens
atttttaagctactacctagaaaaagtaatggctctctctgataacaacatcacgtggtacgagaactgacatgacattgtttttaggatgaagcaaatctggcagacaggtttttatatga

SEQ ID NO: 394507 - DNA, 122 bp, Homo sapiens
actccaccaagaaggcgcttttgcacattgttttaatgcttaacgccttcaggatgccagcgtgacggaagcaagtaaccaccaaggcatcaccactggcgctaaacttctcacttccggag

SEQ ID NO: 394508 - DNA, 122 bp, Homo sapiens
acgggttaatccaaggctggcagaggcgctggggaatgggatctgtggcccctgggggagcgtgccagggcctgctataatgggggtgctgagtgcagggctgggacaggcggggctgcggc

SEQ ID NO: 394509 - DNA, 122 bp, Homo sapiens
tggatcgcgaatctgcgttcgcgcatgcgtggtcctagagctacggtgacacttcgcgtgcggtgtaggcgcatcttcgctctgttggccgtggctttagtaagcacacacctgcctgctac

SEQ ID NO: 394510 - DNA, 122 bp, Homo sapiens
tggtgaaggaggagaagcgctacgcggacgcccagctgtcctgccagggccgcgggggcacgctgagcatgcccaaggacgaggctgccaatggcctgatggccgcatacctggcgcaagcc

SEQ ID NO: 394511 - DNA, 122 bp, Homo sapiens
tggccagctccacagcagagcagtttgccaggccacgtgccacctgcttcctgtggctcacggccttctggctggcaagcccctgtgggccaggaagctcagacctaacctgctgtggcagg

SEQ ID NO: 394512 - DNA, 122 bp, Homo sapiens
agcgggaggggggcgtggggaaatgtgccgaggggcccgggctggctgggccagtcccagcggcgcagccacccatgcgcgcgcgctcgcaagaccaccagcgcccagagccccagtctgag

SEQ ID NO: 394513 - DNA, 122 bp, Homo sapiens
tttgttaaaagaaaatagactttacctttagaaccatgtgtttttaggtctgttttctatcgctcatacaaagaacaggagtctaaaaaaggatttgatcaagaagaagtttttgagaagcc

SEQ ID NO: 394514 - DNA, 122 bp, Homo sapiens
ccggcctcggcaacaaattaagacccctcctctgccaaaaaattttaaaaacagccggggcgtggtggtgcacgcctatagtcccagccactggggaggctgagcgggaagactgcttaagt

SEQ ID NO: 394515 - DNA, 122 bp, Homo sapiens
tcactcacttccacgagaggaatgaaggccgcgctctcaacctcttgccgcggaagtgcccgggagagcagggagctctggaactacatttcccagcatccccgggaggaacggaagccgct

SEQ ID NO: 394516 - DNA, 122 bp, Homo sapiens
ggaggggcccggctacagaactacttcccctggaattccccacccggtggattagacacccgtgggtccggcttgccgcgctgagccggagctctccagcagggattattcttagcaatgcg

SEQ ID NO: 394517 - DNA, 122 bp, Homo sapiens
cgctttgggttcgcagctgcccaccccaccaggctgtgaggcccaaacagcaacaagatgcgcatttcacaaacgccgccgcaaatacacacatcccgccctcaaattcactttcccttatt

SEQ ID NO: 394518 - DNA, 122 bp, Homo sapiens
ctggaggaacaggtgccgggctgagcgctcactcgcagactagcgcgtgcgagggctcctcgctctgctttcgaaagtccctgggccgtgggagtttcccaggagcctctccgacgcgcgca

SEQ ID NO: 394519 - DNA, 122 bp, Homo sapiens
gccgctcacccacagccgcaccgcggatccagctccggtccttgttcccggggcggctaccgacaacccctatttccgggtccagccgcttctggcgtccccgcgtccggtgtgccagcgtc

SEQ ID NO: 394520 - DNA, 122 bp, Homo sapiens
gaagacatctccaacacaggatggctgacagcactggagatgttcacaccagatactgaccggggcagtgactctcaaagtggagagagaagagatgatgggtagggagaagtgcaccaaat

SEQ ID NO: 394521 - DNA, 122 bp, Homo sapiens
ggaggatcctgtcactgtcagctcccccaggagcggctcctcgggggactccggggcctccgtgcccagttctgtggggctgggggtctcgtccacatcctcctgaggagctgagagaagag

SEQ ID NO: 394522 - DNA, 122 bp, Homo sapiens
tgtagttcctgagtggggagacgggctacaaaggattctgaagtagattggcttttatttcgtggctggtgatccaaactgagtattcctcataagagtcttaaggggatggtgtgtttacc

SEQ ID NO: 394523 - DNA, 122 bp, Homo sapiens
ctctcatggctgtggaggggcgtggagggggcggtccccatggccagaacctggccgtggcgggtggaggacttgaggccggctcagtggtcagcgctgctgcttgttcccctacacagagg

SEQ ID NO: 394524 - DNA, 122 bp, Homo sapiens
cagagccgcgtcccaagcacccggccccgccgcgcggaagcggatccgtagcctcctccgcgccccaccccctccgggggccttgccagcccagagccctggagacccactccgccaccgct

SEQ ID NO: 394525 - DNA, 122 bp, Homo sapiens
gggctggcactgctgtcaccgccgcttcccgagaacgaatctgagcctgattctgaacgccgccgtttcccactccgacgcagaagattcatggcaaactcttctcggccgatcagggcaag

SEQ ID NO: 394526 - DNA, 122 bp, Homo sapiens
ggagccccctattaaaggtaagcagcccccaacccacctttgacacggaagagtgactagcggggaaaataaccccagcgggccgcctaggggtgggtgacccgcgatctccacgcccaggt

SEQ ID NO: 394527 - DNA, 122 bp, Homo sapiens
cggtgctcgttgagccaggccttcagcgtgctggtgctctccctggtggcgttcttgggacgggacgggtccccgaactggtactggccatacgggtagaaggcggggtgcgggtgcggaaa

SEQ ID NO: 394528 - DNA, 122 bp, Homo sapiens
tgtagaaaatcaaagctaaacccctcagttatctcgaactcatgcaacatgaattctcatcgattatcttgttttatcaataaggaaagaaatgggatcttgttatgcaggagtaatccgtt

SEQ ID NO: 394529 - DNA, 122 bp, Homo sapiens
caaatcgtctttccgaccactcgctcctttgtaaaccaaaccgaggcttccatgaggttgcgggtgatgcagatgctttgaaaatcacgtttctgtagcaactgctggctgcctgcgttttc

SEQ ID NO: 394530 - DNA, 122 bp, Homo sapiens
tttttgattcacacttagacctcaagcgttcctcactcatggcagctattcactttgtgtcgatttatgtctctcctagagttctgtatgcttcttcagggcagataaatagtttaatcatc

SEQ ID NO: 394531 - DNA, 122 bp, Homo sapiens
gagtggaaggtgaaagctgcgaagagtcccaactggagatgcaggtggcagcggagatggcgagaataggagagtccgaccggagatgcaggtggcagcggagatggcgagaataggagagt

SEQ ID NO: 394532 - DNA, 122 bp, Homo sapiens
agggagaccccaggcccctcaggccctttcccgcatctgaaggggccagggcagggcgtccggcagatgaagctgccccttaaagccaggtctgggccggtttacagggaagcactgctcac

SEQ ID NO: 394533 - DNA, 122 bp, Homo sapiens
cgtggggaggccggcaggaagggcctcgagcccagtgcggacctttcttcagcctctgtgcgaccgagccgcgcgccaggctcctgtgcgaggaggacgcgctgactccctccgacctgggc

SEQ ID NO: 394534 - DNA, 122 bp, Homo sapiens
ctgacaccacctgtccctgagtgtctgtggcacagccaagctgacagcccagtcactgcccgcagcccggccacccccacggcactgcccgtcactgcccgcggcccggctgcccccacggc

SEQ ID NO: 394535 - DNA, 122 bp, Homo sapiens
taaaaacctgcagcccggaaagggaaggaaactgcctctcctcggtcgtccctggtcactcggttccaaggtcagtggagacgcaccatggcccctggacaaagcccgccctattgtgactc

SEQ ID NO: 394536 - DNA, 122 bp, Homo sapiens
atttggagtaggccccggccccctgcttctgagacctccctacccccgatgtgctcatctcgagaagcgagtccctggagccccccattttggtgtgtgggcccccggctcgtggaggctcg

SEQ ID NO: 394537 - DNA, 122 bp, Homo sapiens
acgctggccctttaagactccagtgcggaggtgggcccgggattggacttgcggacggggcgggaaggtgtggtccacctttctcggtgccggtgcctcgtttcgggctcgaagagccccag

SEQ ID NO: 394538 - DNA, 122 bp, Homo sapiens
gctgctcagagaatcgctgtcaagaggagggaaagttaaacaaacacaccctggcctgggcggccggcccatctcggcgcctccatctcggcgcctccgcacaggcatgatcagagtcggca

SEQ ID NO: 394539 - DNA, 122 bp, Homo sapiens
tccaaggagcagagcttcaaggggcagaattcagccccagtccaaaaggcggtgtcctggcgagagcagggagtggaaaccactatcttgacgggagggagaaaaagaaaaggatttggacc

SEQ ID NO: 394540 - DNA, 122 bp, Homo sapiens
ggggccagggatgtgaacaaacctcatctaagctggctgccgggtcctaatgggcaggtccggtccgccctctaggagaggtgctgtccggtgaggcataaaatcccgggattctggctgga

SEQ ID NO: 394541 - DNA, 122 bp, Homo sapiens
ctgtaaacatcttttatttaatgacctctgagacaccccctacccttatcctgggtccctcggggcagaggccagtgaatcgtaaacgtccggagccctggaatgcggcccaagcgaaaagg

SEQ ID NO: 394542 - DNA, 122 bp, Homo sapiens
aaaacctcaaaagcaaattggaaagatgtctgtggcatatatagctaacaattactgcttcgtacccagattatataaagaaagcattccaatgagtcaataaaaaaggtaaacaaacaatc

SEQ ID NO: 394543 - DNA, 122 bp, Homo sapiens
ttcagagtcctttggtgtttattgagtgcccttgggcagatgcgggaacaggtgcttctgcgcgtggttcagatggaaccgctatagtctgcagataactgagcacgaagctgagggtggtc

SEQ ID NO: 394544 - DNA, 122 bp, Homo sapiens
gcggcgcgccaaggcggggctggagcacctgcgggctctccaggaaggcctgggaaaaggcggctcttacctacacatcacttcgtgcgtcaggagaactcggcacatttccggattcttat

SEQ ID NO: 394545 - DNA, 122 bp, Homo sapiens
ttctccacgtctcctcttttgattgtcacttccattcagtgctacttctgcttaaaaccacgggagccttgtgcaactctatcaaagcacttgtgcatttgctaggctttacttaagatggg

SEQ ID NO: 394546 - DNA, 122 bp, Homo sapiens
gacaacgttctctacctccaccatgagcacctcagccgggagctcaggggtgggctccatcgccagctccgccgggtgcctggcgctcagctcgtcctccgcctccttcttgccccgctttg

SEQ ID NO: 394547 - DNA, 122 bp, Homo sapiens
agaggcagaaccgaggctcggcttccacttggagtctcccaggtgagctccagcctgcgacgtcggcaggggcgaggccccacttccgcgcctgcgcgccagcctcccgccccgccccagcc

SEQ ID NO: 394548 - DNA, 122 bp, Homo sapiens
cgccgaactgagcacccccgacgggagcgtggcagacggggagatcctggacaacaagaacggcacctatgagtttttgtacactgtccagaaggaaggggactttaccctgtctctgagac

SEQ ID NO: 394549 - DNA, 122 bp, Homo sapiens
tctagagccttctagcaccctggactcatagccaatgatgggcaacaacaagaacgacgacgaaccctgggctcggaactcgcccaggccccgcccctcacagccccgccccgtcctcggcc

SEQ ID NO: 394550 - DNA, 122 bp, Homo sapiens
taccatacccagcaaggacaattttaaaacactgtccccagtcgtgctctggtgcagtgccgggtttggcaatgacatctggcagccaatcggggagcccagcatgtccctgctgctgccag

SEQ ID NO: 394551 - DNA, 122 bp, Homo sapiens
cggcgtcgggccgggctctgcgtccaagcgaggctgtcacctcgctgggcccagccccgccgccttttctagccccggctgacgtgcacgccccgccccgactccggcaccgcgggggcgcc

SEQ ID NO: 394552 - DNA, 122 bp, Homo sapiens
tagacacaactaggacaaccaccagacacctcaacaaaagccagaggttcaaattgataacgtagtgtcctttccaacaggtcagatcagattttagtgttaaaagatttcttgctttttcc

SEQ ID NO: 394553 - DNA, 122 bp, Homo sapiens
gatctcaccgggaggtccagggtcgctgagcatctgccatggtcctggctgttggctaggcgcccgggtgacagaggacagagaggctgggcgatggcattcacagaggttggttgagggct

SEQ ID NO: 394554 - DNA, 122 bp, Homo sapiens
tctcgctctgttccaggggctcagtgacagctgccttcctgagccgcttcggttacctttcgcacccacgagacgaaagcttccgagagcgggagagagaacaagaaatggcccgcccactc

SEQ ID NO: 394555 - DNA, 122 bp, Homo sapiens
ggggttgctgggcccactctgtgacgctcagaagatagcatcccctcctaaggaacttgccgcctctcagttgatctccccagggagagtgtggcagagggacaggattcggggcctcctgt

SEQ ID NO: 394556 - DNA, 122 bp, Homo sapiens
ctgctttccggccatcttcagcagagccattcaccaggaaacgactagaaggtgggcctgcgcccctcagatatcccggggccggcaacgagccgggcagggacgccgaaggaaggccgtga

SEQ ID NO: 394557 - DNA, 122 bp, Homo sapiens
acagcctgtcctgccaagtacataaagtcaatcttggacactcatgttttgctaggaaagcgaaattctttaggttttcaaattgccaacgagatacacccaatgttctcatgtattttgta

SEQ ID NO: 394558 - DNA, 122 bp, Homo sapiens
gggctgctgagcgggttcccccctcctgctgtcctcgggactcgggcgcgggaccacgaccgccgcggctcaggaggcttcgccagtgaaaggacaaattggacctgtcccgaaagacaatt

SEQ ID NO: 394559 - DNA, 122 bp, Homo sapiens
ttttatttgagatggagtctcgctccattgcccaggctgccagtgcagtggcacaattctcggctcatggcaacctccacctcccaggttcaagtgattctcctgcctcagcctcccaagta

SEQ ID NO: 394560 - DNA, 122 bp, Homo sapiens
ccaggggtggggaagcctcggcagggggcggcatgtgagcgccagaaggcagggatttcacggaaatgaaagtggaagcaaacagcctgcgagcagagcctcctgaggtgtatttcgggtct

SEQ ID NO: 394561 - DNA, 122 bp, Homo sapiens
atgtggcccggaagcgggctgccggctccgtgtgattgtcagccgtaaagagcaggtgagcgggtgtgagtgccaggcggcgtggggggtcctgagtctcgatgacctggaaggctctcagc

SEQ ID NO: 394562 - DNA, 122 bp, Homo sapiens
cccgcggaggaagaggggctgcagccgggcggctgccgggggcggcgggaaggaaccggacgcggaggagaccgagcgagggtggccgagcgccgggcgcattgtcctccgaggggctctgg

SEQ ID NO: 394563 - DNA, 122 bp, Homo sapiens
accttaagggttaatatttttactctttagaatgtattgaccctatggtaagcggattcccgagggagggattggtaggaggggcgtgggcgaaaggcatcgcccagtggtggtgcctacga

SEQ ID NO: 394564 - DNA, 122 bp, Homo sapiens
ccagctgagagcgtttctcggcgaagagccggagcgacgcgctgtcctgggtgcagagcgcgtgctcaacaaatatgggtgatgaagggtcacgtagcctcatagcacgcggttctatttta

SEQ ID NO: 394565 - DNA, 122 bp, Homo sapiens
tgcaccagctgctggaagcgctgcttttgagtctctacctcaatgaaaatgctgcaactgcgggtccactgcacccaaacccgccgcagaggaagagcaggaggaatccatcccaggacaac

SEQ ID NO: 394566 - DNA, 122 bp, Homo sapiens
tccagggttaggcaggcaggcagtgcccagacaccaggacagctgccctctggggggctgcgttgtgtggccacctctctccaacgcagtggcctcctgtccggcaggctcctccctgcagg

SEQ ID NO: 394567 - DNA, 122 bp, Homo sapiens
atcttcttctctgcggaagcccctctttttccaacattatgtcatacaactcaattgacacggtcccccgcctacagacatgccggtgtattcagcagagacgtgagactttgctcagccac

SEQ ID NO: 394568 - DNA, 122 bp, Homo sapiens
aagggaggtagttatcttcataatcacctccttctaacctcacacctgtacattttatcacgtagattccagtttttaaaaaagttggattttagtttctattgttttccatttcgtctttg

SEQ ID NO: 394569 - DNA, 122 bp, Homo sapiens
gatccgcatggcggaggcccacgcgcgcatccatctgcgggactatgtgatcgaagacgacgtcaacatggccatccgcgtgatgctggagagcttcatagacacacagaagttcagcgtca

SEQ ID NO: 394570 - DNA, 122 bp, Homo sapiens
gaatcttctgagagcctggcaatcctatagccatacctctctgaggtcttgccacaccaccgtcttccccatctccaagttggccatggatatcttctctcaaggctttctagggtggttct

SEQ ID NO: 394571 - DNA, 122 bp, Homo sapiens
aacagaaatttgtttctcacagtctggaggctggaagtccaagacagagtccaagactctcgccagcagcgagagtttgattgtgaggcttctcctcttggcttgtaggtggctgccatctc

SEQ ID NO: 394572 - DNA, 122 bp, Homo sapiens
agaaaccacacatgcacctataaacataggaatatattttgggggtcactgatcccaggtcgcaaactctttcatgaacaggaaccaagaggctgcggatggacccagtaaccatcagacag

SEQ ID NO: 394573 - DNA, 122 bp, Homo sapiens
ttcctttcagtcccagctgctcgagaagggagggcgctgggaaaggaaacagagcggaatcgcccacattagcctcgctcttcggtgacccggcgcctctgggcttgtgtgagcgtctcctt

SEQ ID NO: 394574 - DNA, 122 bp, Homo sapiens
ctccccgcccggcccggtgctgggggtcgcactgtccctggggacggcgggggcctaagccgcgcccttggcccggacgggaaggcccgaacctactctgctggggacctgggcaggcggcc

SEQ ID NO: 394575 - DNA, 122 bp, Homo sapiens
ctcactgagctttgcaagcaggcagctctgcagcttcaccactctgggaacagggactgacggctgatgtggaatcttcaacattcatagggaagaggggcctgatgcctcagctcacagag

SEQ ID NO: 394576 - DNA, 122 bp, Homo sapiens
ccatgacccgctcagaactgatgagatcaagggaatgttcaagcgaaaagccgagcaggacggaccttccaagatgtgcctaaaggaccagaagagggactcagggcagactggaggcagca

SEQ ID NO: 394577 - DNA, 122 bp, Homo sapiens
gcgcacccctcttttccccgcctgccccgcgtccccggctgccaggcccgtagatgcgcgcggggcgacagggctcccatgctgccctgagtgcataaagagctgggcagccaagtttacac

SEQ ID NO: 394578 - DNA, 122 bp, Homo sapiens
aactcagtcccgtcccttttgttgacaggttgccaggatacatccaggcaacaaagactgcggttcctgttactcagcagcctcaaaaactcacaccagctcctgcaaggaatgtgaatctt

SEQ ID NO: 394579 - DNA, 122 bp, Homo sapiens
aaccctcaggacagaaatcatgacctaatgggtgatttctatcccttaatgtctctgattcgctgggtgttttaatagctccctcatatttaagtagatgaccaacggtctattttttttta

SEQ ID NO: 394580 - DNA, 122 bp, Homo sapiens
ccgctgcgcgcgcagtttcccacaaacccggaagcggatcgcgtggagtgaaggtcacgccgcggcgcgtgagtttccctttgtgtaaattaatctgcgcttcccaactcccccgcgcttct

SEQ ID NO: 394581 - DNA, 122 bp, Homo sapiens
cacagcgccgccggtgcacctgctcctaggcttgctcggttcaggggtatgggccagttccgcccccggcttggccactgcagcgaagttgccctagggtcggcgctgccaggacgcaagcg

SEQ ID NO: 394582 - DNA, 122 bp, Homo sapiens
aggaaaccagagctccaaccgactctctttgctacctgtgctattggagtttaccaaggacgttgttctgtttatattatatccagagactatagcctggaggtctgtgtggcattccatca

SEQ ID NO: 394583 - DNA, 122 bp, Homo sapiens
agagatcctttacatttttgtattctgagtgtctggaacacaacacgtagtcagtaaagacgtgttattgcaaatgtccacacatcttgtgtctggctcagaatatggtgttttaggccggg

SEQ ID NO: 394584 - DNA, 122 bp, Homo sapiens
aaacagcttcagaatcaacacaagacagagggtacacagcctgctctaataggtcagtcccgcaattgcataaggtttaactcttaaagtaaatcattcaataccacttgacgatctgtggg

SEQ ID NO: 394585 - DNA, 122 bp, Homo sapiens
acccctggctgtcatcggggaggccgagtcctgctacctgtcctgagtgacaaggcgggacgacaaatgcaaactcagagctggcactcagcgacaacacagacctgccacccgcctgccag

SEQ ID NO: 394586 - DNA, 122 bp, Homo sapiens
cgcctgtcttccaggagggcttcagggaattgcgaaccctctcctacatcggggtggctgcgcctgaccacaggaattaaaggctggactcgcctgtcttaccaagttgtcaggtcgaggaa

SEQ ID NO: 394587 - DNA, 122 bp, Homo sapiens
atcccagggcctctccgtctggccccaccctcgcccctccaggggatccacaagttgaatcgcagctctccagggttaattgccctggccgggagccagactcctcaccgccgccccgttcc

SEQ ID NO: 394588 - DNA, 122 bp, Homo sapiens
cgccccggctcgccccgccccggtctcggccacgccctcaggacacgccccctcggggctcgccccgcccctgcccttaaaggtacagctcccggggagcttcgtagggtcttcccactctc

SEQ ID NO: 394589 - DNA, 122 bp, Homo sapiens
tgaatctgctaagcagcagttcccaggccccatctggtgctagaggatgagggcctcacccgtctggggtcgcggctgtcttgaggaccagggcgattaatagtgtcggtagtgttagaccg

SEQ ID NO: 394590 - DNA, 122 bp, Homo sapiens
cctgggatccagaggggagggacagagctgaatgcctcacctggggtcatcctggacaaccgtgctctgggcaaagctaaggaaggcggcacagaagttcatgcacacagagggattccagc

SEQ ID NO: 394591 - DNA, 122 bp, Homo sapiens
gcaaagttggcctcaaacttgaacaaagctgcaggctccagcgtctttctgggagctccgcgggggcagcaggcaggccccagcctctgaactcagctggcttgagaagctcagcccaaccc

SEQ ID NO: 394592 - DNA, 122 bp, Homo sapiens
atacgctgccatttcctctgctaatctctcattgttcgggggtctggccaagtgccacaacggaaaagttgccatgcttgttgatttttacatgcatgccttccacacagtaattattactt

SEQ ID NO: 394593 - DNA, 122 bp, Homo sapiens
gtgaggtgccaggaggacagtccttagtgaaatgtcctctacagaatttgctagtaaaggcgctgttgttataattagctggatttccctggtagtttacagactgcctcttctgcgcactg

SEQ ID NO: 394594 - DNA, 122 bp, Homo sapiens
agcgtggagcgtggagcatggagcatggagcgtggagcatggagcatggcctgcagcccccggggagcgccggcagcctggaaccagcaggcttcgctcgtctcttcccacccccgtgcact

SEQ ID NO: 394595 - DNA, 122 bp, Homo sapiens
cgtctcctcctcagtcatagagcaattgtttttcgtccgtttggtaggtaaaacccccatcgaaaccctcatccgggatatgttactgtccggcagcagttttaactggccgtatatggcaa

SEQ ID NO: 394596 - DNA, 122 bp, Homo sapiens
tcaagctcacagcatccagagtcgaatcacagcagacaagaccctccatggccaccaacccggggaagaagggataaagaatgtcacagagggtcctgcattccacagcagatggtacagag

SEQ ID NO: 394597 - DNA, 122 bp, Homo sapiens
ccggaccgcccactacgcctgatgccgggatgggagtcccaagcggggactgagtggggtcgcgttgtgtgctctttccacttcgccccacaccccactccttcaagttcccaaaagttgct

SEQ ID NO: 394598 - DNA, 122 bp, Homo sapiens
gctcccccaggctcccttggtggcactcgtgggaagatgacctttcgggccctgcagccgcgcagggtgaatcccggggaggcttccggggatgcttggtgcgggtagcctgagtgcagcgc

SEQ ID NO: 394599 - DNA, 122 bp, Homo sapiens
tgtgtcaccgctcggccgcaggctgtgtgaggtcacgggcgacgctcgggtcacgtgtggcggctcctgttcacagtgccgtgtgtgataaactgggactttctggtgaggggagactggcg

SEQ ID NO: 394600 - DNA, 122 bp, Homo sapiens
aggcgggcggcccttctgcgccctgccaaccctattaagtagttttcagacgtgctgcgtcgcccagaaagcccacatttggcccctggttttcctgcaggtcagcaagggtggctgggatt

SEQ ID NO: 394601 - DNA, 122 bp, Homo sapiens
ttcgatctcctgacctcgtgatccacccgcctcagcctcccaaagtgctgggattataggcgtgagccacggctcccggccggtacttactactttcgaacacgatttcatgaattacctga

SEQ ID NO: 394602 - DNA, 122 bp, Homo sapiens
ggtgcgtcggggcagggaaggccgggcgtggccctagacagggcacaggggcatgaaaggcgctggggaggaacaggaccagcctcggcaagtgggagttgatgcgagtgacccgggccctt

SEQ ID NO: 394603 - DNA, 122 bp, Homo sapiens
acctcaggtgatccgcctgccttggcctctcaaagtgctgggattacaggcatgagctaccgtgcctggcatggacattcattctttggaactcaacctaccttagcttggtctacttcacc

SEQ ID NO: 394604 - DNA, 122 bp, Homo sapiens
cataagagagcagaagaaaaaaataactaggaacaggaaaagtgaagtgcataaatcatacgttgagtgttgacaagctgaggacttgaggactcaggcaagctggagtgagggaggagggg

SEQ ID NO: 394605 - DNA, 122 bp, Homo sapiens
aaggacactccttaggggaccctgtcccataaagtcaaattatgcgggatgagtcagtgacgcaggagctaaaaacagtgtccctttaaaaatgtgcatgcctttgaaatggaataagtaaa

SEQ ID NO: 394606 - DNA, 122 bp, Homo sapiens
acatttagaaaatgcaagaaataaaatttagaaaattaaaattccccttattctacataccgggacatgacttgaatttttattatccccaacaaagggaagagagcatttttttgggacga

SEQ ID NO: 394607 - DNA, 122 bp, Homo sapiens
aagcctgcctccacctggcccgacctcccatgtaaccccccttcccatggtcctgcctcccggtaaccgtgcctccccagggccctgccttccaggcaaccccgcctccccatggccttgcc

SEQ ID NO: 394608 - DNA, 122 bp, Homo sapiens
tccgctttcccatttcttgggcagcaattcctgtcacaactccttccgccgagcccagcacgtgtttgagtaacttagtcatctcggggctatatccatttggacaagcacataccatccag

SEQ ID NO: 394609 - DNA, 122 bp, Homo sapiens
ttcagtgagggaaaagtaaagagtccaaagctttgtagattttaatactggtaaacagaacgtgaagtgaaacctttatgtgcaaagttgaacatcagacatgcacaaagagacctctagtg

SEQ ID NO: 394610 - DNA, 122 bp, Homo sapiens
tttgaatgctctttgattctctctctccattattccagtgttcccctttggttggcggggcggggggtgcatcaatggatgatgagcagggtcagcagaggcctcctgtgttctgagggggc

SEQ ID NO: 394611 - DNA, 122 bp, Homo sapiens
gccctgaggagagcaattagggtctgaagtctctgctgaccccttagcggtggctttgctcgcctccctgcaaccccgttccgtgggcctgcggccggcctgccccgctctggccgcccagg

SEQ ID NO: 394612 - DNA, 122 bp, Homo sapiens
aggatgggcaccggcggggagggctggggggcccgggctgggggggacccggggcaccgacgccaggactgggagacccgaggcagcacctacttcgtcaccacgctgatcttcacaccgaa

SEQ ID NO: 394613 - DNA, 122 bp, Homo sapiens
gagggggccccggggctcgggctggagggcgctgggggcctcgagggtctctggtactggcgccggggcacaatccagagccctgcgcgccgcccgggctgcggaggccccgatctgagcgc

SEQ ID NO: 394614 - DNA, 122 bp, Homo sapiens
agcgtgctgggccggaagctttggccaagccaggccgttaatatcaacatgctcatcaaccgggctagttccagaacagattctagcaagagaggccgcctgcagggcacagtccatactgg

SEQ ID NO: 394615 - DNA, 122 bp, Homo sapiens
ctccgcgttctttcttctgccggcgagccaggtaatggtaacagagcgaaactccccagtcggaacttctgggttgcagcagcctcgccccccctccccgcagcccgccgcccgctggtccg

SEQ ID NO: 394616 - DNA, 122 bp, Homo sapiens
acaattcaaataagatcatccttccaaatatactctgtaagtgaggcgaaggtcgctgcacgcttgagtgcacgtctttccgcataggtaggacgctcaagtcttaccgggaggctctccta

SEQ ID NO: 394617 - DNA, 122 bp, Homo sapiens
ggatccaccctctaattacagctttcccagcggagaaggctccagatccaatgaggagggcgagagagggaggcagagggtccaaatttcctgctccatttgctgagctccccaaagaaggg

SEQ ID NO: 394618 - DNA, 122 bp, Homo sapiens
cgcgggcaggggcgcgggctccgcgccggggctttttgactccctccccacggccctccgcgggagcttcgcagcccagtttacagatgaagaaactgatccccggagacgttaactgtaag

SEQ ID NO: 394619 - DNA, 122 bp, Homo sapiens
gggggccccccctctctcttctttctctcctcccttctttactaggcagggtccaggtttcgtcacagtctcctctgtccaatccctgtgcctggcgccgggcgcggctaccaatcagacgg

SEQ ID NO: 394620 - DNA, 122 bp, Homo sapiens
acacctgggctcctgggcccttacccaggtcaatgtcggtgaagccctccgcggtgatggcgtctgcagtgtttttgtcgatgttctccaggcacaggctggccagctgcggttcatcgaag

SEQ ID NO: 394621 - DNA, 122 bp, Homo sapiens
gcatacctacatgtgcacagtgaaggccaaactctttcagtttcttgtggttaactcttgcgctaacacccaggaagtcaaaagcactgtcactgctttccaagaatgtgtatagttctgct

SEQ ID NO: 394622 - DNA, 122 bp, Homo sapiens
cgacccgttttttgtgtgcccgggtgcggggtgccgggacacggcgttgaaggcgctgagcggagggatctcagggcgagctcgagcggcgacggcgcgctctgtgattgcaccgcgagcgc

SEQ ID NO: 394623 - DNA, 122 bp, Homo sapiens
ggctaacgctgctgtctgtcttcgggcggcggcctctgggaaatgtagttccggagaacacggagtccttctggggctaggttttccgcttccggtgctcagtggctagccgaatagccgtg

SEQ ID NO: 394624 - DNA, 122 bp, Homo sapiens
gatttgtgataagatgtctgcatttccagggactcatctgaggctaagctgcccatagttcggggagacccacagggaaaacaaaacaagaaacagagaacttggaaacggacgctgattac

SEQ ID NO: 394625 - DNA, 122 bp, Homo sapiens
ggagactccaaccttcaccctccctggcccccggtcccacttcccgccgtctcccggcgccgccacttcaggtagcccactcggcccggcctctccccgcgcccggaccaccccccacgggg

SEQ ID NO: 394626 - DNA, 122 bp, Homo sapiens
ctcgcttgccatcggttctgagtggctcaacctgggtgactgcaatggaccgagagggtccgggtcgtccccaacccgcaaaggcatccaggaagccacccggggaccctgctcagagcaag

SEQ ID NO: 394627 - DNA, 122 bp, Homo sapiens
cagttcttactgagcagatccacacatggatcccaggcacgagttgggaagtctgttccacgtccagctgaaggtgtgaatgactgcagtcaagccaactaaatgattggagactgatctta

SEQ ID NO: 394628 - DNA, 122 bp, Homo sapiens
ccagcgggcacactctgaggtcgggctgagagcagcactcccttgcccaggcggagggaccgcaggtagcaggacactctcgtgggaatcctaaggacgccagagcacaccgctccggggca

SEQ ID NO: 394629 - DNA, 122 bp, Homo sapiens
tgcccgttctcttcctctcattggatccaagcatttcacctggaagtgcgggagtccgggcggctgcggccctccatctttggtttgtcctcacagaagtcttttgtgaatcaacatttgtg

SEQ ID NO: 394630 - DNA, 122 bp, Homo sapiens
tgagctccgattcgaaggtgtggggcacccaggagcggtagcggcacctgtagttgccggcgtgctggggccccacgaagatcagctcgaggttcgccgcggccccgggggtgcggaccgtc

SEQ ID NO: 394631 - DNA, 122 bp, Homo sapiens
gatttcaaccacagatgactttcggggaaagttctctcctgggggtttctgtttctaccccgccgcgtcctctccgagttctgcgcgctcctcccagggcgcccgctgtccccgagctctgg

SEQ ID NO: 394632 - DNA, 122 bp, Homo sapiens
gtagagcctgtagcccctgcgagagcagagccgggtggtgcactgcacagaaggtcaccgcgggaggccaaatccccggggaggggaaaggacctgggcgtcgggaagcccgtctcctttgg

SEQ ID NO: 394633 - DNA, 122 bp, Homo sapiens
gcaatcaatgccccgtgctaccaagtctggtccattcgtaattgcaacggctgtctcggacgtttttcctgttcccttagcggtcggtctctttaatattttgtgaccaggaccatcccaac

SEQ ID NO: 394634 - DNA, 122 bp, Homo sapiens
tgtccatttttatatataggtttaacaaagtatagatagctgggtagaaatatgattgagcgaaaatgctaatagactctttggggaaacccagcaagattcttcttggcctccctgagcat

SEQ ID NO: 394635 - DNA, 122 bp, Homo sapiens
acacacacggctcccaggtgagctccgtccccgccccgcccagccaccaaggtcaccttccgaaggaaccatgagagcctgtgaggctctgcctcagaatcccttgttgcctcctaactttt

SEQ ID NO: 394636 - DNA, 122 bp, Homo sapiens
tcagggcattttgtatgttcagacatgtgtttgtcatacttttctcgatttttaaaaccacgatcacaggtatcacaaaaaaagtgaaaaactggttcctttcttttcttttttttctgttt

SEQ ID NO: 394637 - DNA, 122 bp, Homo sapiens
agctcaaatcctacctgcatggccgagctcaccggggtgcgtctaagtagctcgcctttgcggcccacccaaaatatctggataatggttaccccgtcctcagtgcgttggacttgcataga

SEQ ID NO: 394638 - DNA, 122 bp, Homo sapiens
cacccacgcgtaccgccccgttcccccaccgtttccgacccggcagcttctggaaaacagcgcccttgatcctcccgggcaggaagaagggccaaggaaggggttagaagggaaagagttag

SEQ ID NO: 394639 - DNA, 122 bp, Homo sapiens
actcctagttcctgcccataacataatgcaaacctgttcaaaaacctattccctggatgtcgatatgaaactcgagttttaatcttaagtggtctagaataaaacctgcttgtccctatttc

SEQ ID NO: 394640 - DNA, 122 bp, Homo sapiens
ctggcttccacaaaatgatatgaggacttggggggaagagaaatgagttttgtctggcctcggtggaaccttctcaagggagccttggtggcaagttatatttctttggaagtcgacttgac

SEQ ID NO: 394641 - DNA, 122 bp, Homo sapiens
ccgcggtttgcgggaagcaacaggagcacagcccagaggcgctaggtctggctgggagctcgcgctgccgactccccggcgtgcggcgtcggggaacctctaggagccttggattcttcagc

SEQ ID NO: 394642 - DNA, 122 bp, Homo sapiens
tcctcgtgcatcctgtcgtcttgtcttctccgtaagcagccctgtgctgtgagcctgctccgcaggatttagtctatgtgaaggaaattgaaaatgaacattaacagattttgttcttactc

SEQ ID NO: 394643 - DNA, 122 bp, Homo sapiens
ggcagtcaccaaaacagacaagtacagtcacatcttacataacaatattttggtcacctacggacggcatgtacaatggtggtcccataagactgtaatggagctgaaaaattcctatagcc

SEQ ID NO: 394644 - DNA, 122 bp, Homo sapiens
cgagccggctcgtgggcgtggtcaggtgcgtgggcggggactactgggcggggctcggcgcgggggcggggcctggcgggagtagtctcggggtcggggcggggcccggcgggcggggctcg

SEQ ID NO: 394645 - DNA, 122 bp, Homo sapiens
cgcatgttggaaaggatgatgcggcgggacatgcggctctctgaggctgagctgcgtagccgctcaaagttcttgttcatgcggtactggcggaaggctgtctggatggtcctggcagccct

SEQ ID NO: 394646 - DNA, 122 bp, Homo sapiens
ctcttttccagctcatgcccaggtggaatcatgctgaatgagacaggccagggttaccagcgctttctcctctacagtgagtagggatacaaggcaggaagggttggagggaaacaagggag

SEQ ID NO: 394647 - DNA, 122 bp, Homo sapiens
acacatgggggaaacacagcgtggaggaaacagacactatccagagagaaaactttaacacgtaacagcatagcagctagcacttccttaacacttggcgcgtgacgacaatcacagaggcg

SEQ ID NO: 394648 - DNA, 122 bp, Homo sapiens
catgagagcccacggcactcaccaaacagcgagcaccctggaccctcggtgagaagtgagcgcactgtggcccccagccccccatgagcctaggcgtgagtggggagcaccgggcaagccac

SEQ ID NO: 394649 - DNA, 122 bp, Homo sapiens
acaatcatgttctgctttttgatgattagcaacactaaaaatcatgaatttctacctcctcgtagatcaatagaggtataaaggtaaattctgccgggaaagaaatgagtaatagtaaatta

SEQ ID NO: 394650 - DNA, 122 bp, Homo sapiens
ggcttgaaactctgcatttctaacaggctcctggtgccactgatgctgttggtccaagggcgcaatttaaattgcaagagtaagtttagcttacaagttctggagtcagtcacactttggaa

SEQ ID NO: 394651 - DNA, 122 bp, Homo sapiens
gctcctcaataacaaactccgatcccaggatctcgaggtctgggcagcaggcagaagtcacggctctgctctggccatgtcctcttgctggccatgatacttaacagctggtgcctgtgatg

SEQ ID NO: 394652 - DNA, 122 bp, Homo sapiens
gaggccctcaaggggagttgaacagggctgcggccgccgcgccccgggcggcgacgtcaccgcccttgctggtgattggccgcctcgcgccgcgcgcccttcaaaccttttctccccgtggc

SEQ ID NO: 394653 - DNA, 122 bp, Homo sapiens
gcccctggacttcgacgctcctcccgcgcccccggggctggggaaggcgcagtcgttccccggattccaggcacgcagatccggcagggccatcgccgtccccctgctcttgccgcagcccc

SEQ ID NO: 394654 - DNA, 122 bp, Homo sapiens
ccttttgccaggaattaaacaaacggcgcgacccccacgatgagcgggtggagcggaccgcggcgagagcagagcttctggcactcactacattcagaactttccttaaaagccgaggaaag

SEQ ID NO: 394655 - DNA, 122 bp, Homo sapiens
cagcacctgtcaggctttagacagacactccccagaatccagcgacataagtagggcctccgtatagtgggttctcatcaccacagacatccaagtagaagtaaaggacttctaaggtcctc

SEQ ID NO: 394656 - DNA, 122 bp, Homo sapiens
gtcagaagcactggaaccggctggctgtttcggtgcctgcaggatcaaactctattcactcgcacccactgcgttccacccaccgtgagagggagtgcgcaggtgagtgggtgcaggagcca

SEQ ID NO: 394657 - DNA, 122 bp, Homo sapiens
ccgcctagcgcttcctcctccctgcaggcgagccggggaatccccggcagcaccgatatccgcagagcccaagaagtgggcctctctgccccgcccccccggctcgccgagggctacgcggc

SEQ ID NO: 394658 - DNA, 122 bp, Homo sapiens
atcagaatgaggcagtaaactcagaaagagtccttgaagcccagctgtgggtgaagggcccgggacgtgctgtctcatagctgtgagccacctcctaggagacaaaccaggtctctgtgccg

SEQ ID NO: 394659 - DNA, 122 bp, Homo sapiens
tcatggagtttatatgctaacacatatgcataaacaaacacatataaaaatccagaaagtcgttactgctgtgaagacaaacaacacagagtaagcagatactgatgttgggttgttgcctt

SEQ ID NO: 394660 - DNA, 122 bp, Homo sapiens
gaagaagcataaacccttaattctcagcccagatctctagaaagaataagaggattccaacgtgttatttggtctgtggtcaatttgtcacccaatacagcagactaaagtcaatcaagaag

SEQ ID NO: 394661 - DNA, 122 bp, Homo sapiens
tgtgcgccgaagcttctggcctctcatggctggggctgggctcagtgtcctaaccctgcacggtgccctcatggtcgccttcaagccctgcacgctccgtgctccacaggctctgaggggtc

SEQ ID NO: 394662 - DNA, 122 bp, Homo sapiens
aatttctaggtcattacctactttgccaaattagattgctttcagaaatacctcttaagtcgtaggtgatttctgtggcaccagtggatttcataggttaatttgacctatgaaatcctata

SEQ ID NO: 394663 - DNA, 122 bp, Homo sapiens
tgtttaaaaagacgccgctcacacacctcttaagaatcagagcacagtgaggaagaggagcgaggaagcactaggatcgcagcgctactcccagaccacgtcagtgcccagagggcgccctc

SEQ ID NO: 394664 - DNA, 122 bp, Homo sapiens
gcgtggggagggcgagtgctggtaaatctctgcacctcaccctgatctcctccaagtattcgggggtgagggcaggggaggggggctaagccgctctgaaacggaagaagttggccagcagc

SEQ ID NO: 394665 - DNA, 122 bp, Homo sapiens
tgcagagagaagagcaaccaagtgggcagagcgtgggtcgccggagagcaatctccgctccgctcccctcccctcccctagcccccagtgccttcctccgcccctcgcctccgtcagtctgc

SEQ ID NO: 394666 - DNA, 122 bp, Homo sapiens
cgctctgccttttccattgcaaacaatgcctagattacacgttgagccaatgggatcagacggggctcaatgctcacactccaccggcattgcttcattatttttgacataacccgtgcact

SEQ ID NO: 394667 - DNA, 122 bp, Homo sapiens
tcttaaggagtgggagggtctgagaaggacccttcaccccaaactcaggggttaagagagcgccccctgcccttttagttgggcagagatatgcctgggtttgggaatgaacaacggtgatc

SEQ ID NO: 394668 - DNA, 122 bp, Homo sapiens
gtactacagtctctaactgctggcctcaagcaatcctcccacctcagtctcctgaatagccgggactacagacgtacaccacggtgctcagctgtactgcttttaattttcaacttttcgta

SEQ ID NO: 394669 - DNA, 122 bp, Homo sapiens
acaatgcagcctgtggagcttctcaaccagtcagactccaggcctcactcctaattgcaccgagttccctccaaacactgggatcaggaaattcacagaacaggagggctgacactacatca

SEQ ID NO: 394670 - DNA, 122 bp, Homo sapiens
aaaatacttcatgaaaggcagtgtattctgaaaaagccttcaaataaaggtattgcaacacgatttatacattgcataaaatctgtctttgaaaataaagtttcaagagcgcttgtcttgtg

SEQ ID NO: 394671 - DNA, 122 bp, Homo sapiens
attttttctgagagcttaagctgagagcacagcctccccaggagattagcggcagagatccgcgcgctgggagaaaggctagccccagggcgccctaacttccaactccgggagcaatccaa

SEQ ID NO: 394672 - DNA, 122 bp, Homo sapiens
ttctcactgtgagagcgaggccaccagtgtccctcagacccaagtaaggcctgctcagaacgcctgttgactcagtgagcccctgcccaggcacagctgggtgtccccacggctctgcctcc

SEQ ID NO: 394673 - DNA, 122 bp, Homo sapiens
cagatttattaaaggtcgactgtttagcagaacaacgtagattttttacaacgctttccccgtctctgctttgaagcctgccaggctgcagctggggatccaggagggaaagcccgcaggcg

SEQ ID NO: 394674 - DNA, 122 bp, Homo sapiens
ttttcatgaacagaggtacagctcagggagtgtggctaaatcagtcccagtctccagctccgcgtgaacctgggatccagacatctcctggatatctggcgctctctgagatccagccctcg

SEQ ID NO: 394675 - DNA, 122 bp, Homo sapiens
ggccggacaagatggttcccgatcgtcagaattcctgtccgcgccttgcgtcagccccgccgaaaggatcgccccccctagtcaaaccgctcgcgccccagaggcctcatggagtcccgcct

SEQ ID NO: 394676 - DNA, 122 bp, Homo sapiens
ttggctgacgtggaagggggtggggtaacgaccgaagccacagccacctagcacctacggcgactcagagaggacatgctttctttgtgcagcgcttgcgcgctgcaagtatatcctatttt

SEQ ID NO: 394677 - DNA, 122 bp, Homo sapiens
gtcgaacactacccgctctcacattaacccgaccaagtcttccggagtttccctggcacccgcgcaggccctaacactagctgtctctgcttctgtatgtctcttcaaggagtcattactcc

SEQ ID NO: 394678 - DNA, 122 bp, Homo sapiens
acacccagtagcacacaccccctatgacatggccccttccccgtgaagctcacagcctaacgtgttgaggcagctgaaccccacgtgattcccagcccagccaaactgtctcctactatcca

SEQ ID NO: 394679 - DNA, 122 bp, Homo sapiens
aggccgctttgtgaggtcctcctctgcgcagcacgccccccacccctctcttggtgccgccgcagctactccctagggggctttgctcttggtggtacgcacccgagaccttcttattcccc

SEQ ID NO: 394680 - DNA, 122 bp, Homo sapiens
ccaagcctccctaactctgcaaagcagccggagcaacagagagcagcgggcggcgggcggcggccgccgcagtcctcccggctttctaggtgcgcggggctgtcgtgttccagtccctgtgt

SEQ ID NO: 394681 - DNA, 122 bp, Homo sapiens
gtgagagctgccagaggtctgggctccagcccctgggtgacattaaacttttctgaatttcggtttttccctgtaaattggggaaaattacttgccccagcttcaacactgcctcccctcca

SEQ ID NO: 394682 - DNA, 122 bp, Homo sapiens
tgggtgcaagatggagagtgctcagagataatgacaggggcctggtcctgcagggccttacgtagaaagtcaaggaatttattctctgagcaattgaaaatcatcccgaaagatctgcattt

SEQ ID NO: 394683 - DNA, 122 bp, Homo sapiens
ttctgccttctcctcctgctcctggacccccacagccctgagacggggtgtcctcctctacgcaggtttgagtacaagctcagcttcaaaggcccaaggctggcattgcctggggctggaat

SEQ ID NO: 394684 - DNA, 122 bp, Homo sapiens
caccacaagtgaggaggcggtgttggcccagttggagggcaggtagggcaggtctgcgcccgactccagcgacagctcggcgcccccgcagcagttctcatagtaggggtcgctcttgtcat

SEQ ID NO: 394685 - DNA, 122 bp, Homo sapiens
gttagtctaagttctgttttctcccctgtttatgttaagaatgcccatgttgtatgcctccgtgaccttatttttaatttgatgtagagtaaattttcctgtgggaaacttttatatcacct

SEQ ID NO: 394686 - DNA, 122 bp, Homo sapiens
gtagacaaagtcaaaccactacagtcagaccggagcctggggtcgggccctccttacctgcgtgctgctctcgggccccgccccgctccgccccggagggatcctcaggccgggcccagacc

SEQ ID NO: 394687 - DNA, 122 bp, Homo sapiens
ctgatgagctcagccccataaagaatgtcgaggaggctttgcgcctctgcaggtgactctcgggcccaagcaaccttctggaaaacgggttaataaataaatcaataaagaaccttcaagtt

SEQ ID NO: 394688 - DNA, 122 bp, Homo sapiens
cttatttatcttgcaacaatatctgtaaaccatttgccagattgagtggtccaaagtcttcggagaagttctcatattcgagttcattatctatgctgaaataatgtacatttgatgcactc

SEQ ID NO: 394689 - DNA, 122 bp, Homo sapiens
gaaggcctggaggggcccggggacccgtgccacgcagtgagtggcggcaggacacgagcccgggggcgcagcttcctggacactctgcccccagacactggctgccacgcgggacggtgacc

SEQ ID NO: 394690 - DNA, 122 bp, Homo sapiens
acacccagcatttcaccaaatggattctataaaacagtagttctgaaagatgttattaggcgtttccaggcccagtcactatgagaacatgatatgttagatgcttctcttgcagattgcca

SEQ ID NO: 394691 - DNA, 122 bp, Homo sapiens
caacttggagtatgatggtacctgtctcacgggttgccatggggttcacacaagctaacccggtactcactagggccaagcacatagtaactgctcagtaaatggcatcatcggcggtgtcc

SEQ ID NO: 394692 - DNA, 122 bp, Homo sapiens
gaactccaccaaccaacgggagcattcgctcccgcgcagaagggacagccaatcagagtgcgcagccttgcatgacgtcactggctgccgggcagactccccttcagtccgccgcccaaagg

SEQ ID NO: 394693 - DNA, 122 bp, Homo sapiens
attggtctagcagagagacgactaatgaggtctcaattgtgtgggcgggacttctggcggcgccctcatggttgcgttagcatggctacctagggatctgttcactgatttagagggtccca

SEQ ID NO: 394694 - DNA, 122 bp, Homo sapiens
gctccttaaccttaagttacttgcaagaggagcctgtggccctcgcgactgttaagtgcacgctcagcctcaccctgctggggaaacgacggttcctcgtaaccgcacgcatacgttccttt

SEQ ID NO: 394695 - DNA, 122 bp, Homo sapiens
tattcctctccctctgaagaccacctcaaagctcaactttatcacctccacgcatgagaccgccggcggctgaactaaaatctcaccatcccaattccagtttctgggaattgtcacctcca

SEQ ID NO: 394696 - DNA, 122 bp, Homo sapiens
cccgccttccccgcagccctgtgaatgctcagccttgtgaatgctcatcccgccgctgttcgctctcccgcggttgctgcttgcatagggtttcagatccggaaatttgaggatgcgaaacg

SEQ ID NO: 394697 - DNA, 122 bp, Homo sapiens
accagcctcagtggctgcggaacaccctctccgtccaaacccaaacagaaacccacctggcggtgtgaagtttgtgattatgaaaccaatgtcgccaggaacctccgaattcatatgaccag

SEQ ID NO: 394698 - DNA, 122 bp, Homo sapiens
gggtccctgtttgaggagacagccgtcgtccccggggtccctgtttgaggagacagtcgtcgtcctcgggattcctgtttgaggagacagccgtcgtcctcggggttcctgtttgaggagac

SEQ ID NO: 394699 - DNA, 122 bp, Homo sapiens
ggcgccgagcacgcgtggtggcggccgcaggcccggggctcctgcgagagcgaacgccagcgacacacacgcagctcctgttgtgtcgccgctgccgcctaggcagggccgcagacagcagc

SEQ ID NO: 394700 - DNA, 122 bp, Homo sapiens
cacagtcacgagacagaagaggaggcacgaaaaaccaccccgacacccagcttttcctgacgggaactaaatacaatgcgtatcggactcgagaaattccgaggaatggaaaggaaaatcgc

SEQ ID NO: 394701 - DNA, 122 bp, Homo sapiens
gtcttcaacaggcgggggccctgacccccaccctgggcacaatggagcagggtccagctccgaaccgctcccgcggcagcttccagaataaagaggccgagctaggttaagactctttctca

SEQ ID NO: 394702 - DNA, 122 bp, Homo sapiens
gggggacacttaacaggtatggagggcggagcagagccccgcagtcactggcctgacttccggaacgaaccgtcgccagcaagcacagcagtaggaccagggggatgcaagagcgggggcgg

SEQ ID NO: 394703 - DNA, 122 bp, Homo sapiens
cctccacccatcctcttcagcccgttaccgagcgagagacaaacgcagggattgaatgcacgcaactgggtgggtgggtgcttggggcaggtctgttctttattaaaccaggccaattctgc

SEQ ID NO: 394704 - DNA, 122 bp, Homo sapiens
cccttagtcttccatccggttgagtgttcctactgccacagtgagagtatgatgggatttcgctaccgatgccaacagtgtcacaattaccagctctgtcaggactgcttctggaggggaca

SEQ ID NO: 394705 - DNA, 122 bp, Homo sapiens
gcattaaaggaagtccgcaaagccttcctggccttcttatcagggatggctttgggaaggcgtgggttggcagcaaggcctctagggggccaccctggagttaggcttagggacgagggggt

SEQ ID NO: 394706 - DNA, 122 bp, Homo sapiens
ggcgccccgcaggcgcgtttgcattccttcgccgggcaggggcgacaacacccgaggccgcgcccctccagctcggccctgccacctcattgtcttgcctacttcttgggccgccctgtggc

SEQ ID NO: 394707 - DNA, 122 bp, Homo sapiens
cttgcaatagacgggcagttttccccatcccgggtcgacttgagggggcgggattctggacgccagagttggcaaacccctgacctatgatggacgtattctctagccaattactagacggt

SEQ ID NO: 394708 - DNA, 122 bp, Homo sapiens
aaatatcatttcttatttcttaaacaccctaccaataattaatctttcctataagaataacgttggcctgttggccgggcatcatggcagcaggtgcctatagtcccagctactcagaggct

SEQ ID NO: 394709 - DNA, 122 bp, Homo sapiens
gaagccgaggaccccgcggcttcttcaccgtctcgccacggtcttgggtctgatgcgccgcgtgctcctccggctggcgtctgcacacgtctctgcatctgcgtgtacgtgggagtatgaac

SEQ ID NO: 394710 - DNA, 122 bp, Homo sapiens
acatgcctacagaagcaggtgtagctgttcagtccccatgtctgccactggccatgaggtcgaagttgacatttatcgctctcttcttccaccgctcattgcataatcccgttgacctctgc

SEQ ID NO: 394711 - DNA, 122 bp, Homo sapiens
aaaactacgaacctagtacccgttccccttagcgaatgtttcccccagagcactcagtcgcggtgtaacgccctgtacaatttactgatttatgttgctgcttattggctgcctcccttccg

SEQ ID NO: 394712 - DNA, 122 bp, Homo sapiens
ggcggcgcctggcgcgtctggaatgcggggcctccctccgcccctctccccacgccgcctcgccccgctcccgctagggcttcttagagaagcccgaccccccaccacctctgccctgcacc

SEQ ID NO: 394713 - DNA, 122 bp, Homo sapiens
cttccctccgtgaccagggcgggtcttgtctgcagagcgtggggcgtggagcatggggctcgcagcccagagtagtgcccgcccgtgctcgcccgtcgggaggcgctgttggggtggggtct

SEQ ID NO: 394714 - DNA, 122 bp, Homo sapiens
ttaagccacccagcctatggtattgtttgttatagcagcacaaatggactaaggcactcacggagtctgcagcttcacatggcttgatgatggggaaacatgggctggattccagattccac

SEQ ID NO: 394715 - DNA, 122 bp, Homo sapiens
acattctagggtttggaaaattgactgttacctagtttttttgaaaatgtcacctgtgggcgtgggttctgttatgttggttttggtgctggctttttgttgttcgtttttgcccttctggt

SEQ ID NO: 394716 - DNA, 122 bp, Homo sapiens
ttggcacccgttctcagatgatgagctgggggtatgtgcacagctgcccctgaaggttttcgtggtagtggtgatctggaaggggtggatgctcacattcttatcctgagactcctcctgtt

SEQ ID NO: 394717 - DNA, 122 bp, Homo sapiens
ggatggggtctagcccgctctgtcgtcccccctagttcccttaggaggatgcactttcggcggggtccgcctgcccatctacttgtctttgatgctgaccagagccgaccgcggtgccgccc

SEQ ID NO: 394718 - DNA, 122 bp, Homo sapiens
ttccagctcgcggggccttttccagttggatgacagtcacgaaacctgttcctccaaatccgctttcctggagaggagagaaagcacccagggagaaaaagaagaacgcgatgaggaagcaa

SEQ ID NO: 394719 - DNA, 122 bp, Homo sapiens
agggctcctccgcctgcacagaagacaacataaccatatgactttaaaaagccaccaaatcgctctgaactaaagcttcatcatctgcaaaacagggatagttttgtattttattaaatcta

SEQ ID NO: 394720 - DNA, 122 bp, Homo sapiens
gaacgtgatgaggagatgccactgggggtgcagaaagctccccatccccctgggaagaggcgtcagcgtgccctcagggtagtcaggtcctgagctttggactcctcgcttggttaaaggca

SEQ ID NO: 394721 - DNA, 122 bp, Homo sapiens
gttggcctcctcaacacaaggcagacccctttatttcactcattaaacattgactgagcacgtactgtgtgcactatagtctgaaagtcctagtctgaaagggcagggcaggccccagtgag

SEQ ID NO: 394722 - DNA, 122 bp, Homo sapiens
tggtctcgggtaggcggaaagccctgccccgcccctcctcccgcctccacccgggaacctcgatgacgcccacagatgtttatcctggtgctttagcattttctgccttctggtccagtcgt

SEQ ID NO: 394723 - DNA, 122 bp, Homo sapiens
cctcaccacagccctgtgacgtgccaatcaggctgcggttgccacagcaacagtttggcgcgaaggctgggggctgacgtcagggagtggccgtgagggaccccaaagccaggtctggaaaa

SEQ ID NO: 394724 - DNA, 122 bp, Homo sapiens
tcctctcggggcataaagacaaagaaggcaataaggagactttgctcctcagaggccacccgtggcttcccatgggtgtctcacacaggggagaccaactcaactggcacctagaactctct

SEQ ID NO: 394725 - DNA, 122 bp, Homo sapiens
ccgtttactcccacatccgcagagtaaatccccacgggcagtgcgccgggtgctggggaccggcagtctccactttggggagaggcagagcaacaacgcctgaccccaggagtttggagctg

SEQ ID NO: 394726 - DNA, 122 bp, Homo sapiens
aactgcctattccacatctttgcttggatgcctcataggcatctcaaacacgacacatatcgagattaagacctcttgatctttcctcccaaatctgctccatctctagtcttccccatttc

SEQ ID NO: 394727 - DNA, 122 bp, Homo sapiens
gccggccggctatttttggcatcttggcagctgagcccccctcggcatccccccaggccccgtggcccaaaccaggttgtgcgtctcctcacggttcccactggccttcgatcctcatttgc

SEQ ID NO: 394728 - DNA, 122 bp, Homo sapiens
gctggcagttatgtgctcagcgacggctttctggggcatgcagaggccccaggttgtcgccgtacccccaccattcccccgggagtggcgcagtctgggcgggggcggtctaggagacgggg

SEQ ID NO: 394729 - DNA, 122 bp, Homo sapiens
caaagtctcttttcagggcaaacatagatgctcacaggaaatgcctccatgccccgcagtcgggcaagcttccaagcaagcaagccgcttttaagagtcaggaagaggctgggtggctcacg

SEQ ID NO: 394730 - DNA, 122 bp, Homo sapiens
ggtttatctattaaaagtccacttctctattttgtccgcactaggggtaaattccttcctcgtgtacatggctttcaaagatcgcttccagctaacggattgccaggtaagaaagtcggctt

SEQ ID NO: 394731 - DNA, 122 bp, Homo sapiens
cccacgcggcgagttgatctggccaacggaccagcagtggaggcgctcggaatcccgcggcgctggagcccggataacgccgcggagtgattgacccgcccaccctggaggctcctcccatc

SEQ ID NO: 394732 - DNA, 122 bp, Homo sapiens
cgctgcccatctctcggcttctgtttccttccacgctgtagttgagagtagcgcttaagacgacagagcccacagcctagctcagtttcattacggtgtggcctctttgtgcctcagccccg

SEQ ID NO: 394733 - DNA, 122 bp, Homo sapiens
accttcctgaaactccagatgtatgatttgtatacctaagcatatagtgcagtctccacccgcgttttctttttccttcaccacaatgagttgggtagcaggagagaaggatataaaggcag

SEQ ID NO: 394734 - DNA, 122 bp, Homo sapiens
tcctcggctggcttccttcccccggccccgggcagcgccgcggatcctgagaccccgccgcgggctgtgtgctgctcagcgcccatcctctgcgcgcgcaacgctacttccgggcgagctct

SEQ ID NO: 394735 - DNA, 122 bp, Homo sapiens
ggggaggtggtgcagggacctccctccccagggggcctcccagagaagtccgggacgccacgtgctccgacccctgccttgggggtgaggccccttagggagccaccagtgcagtctccccc

SEQ ID NO: 394736 - DNA, 122 bp, Homo sapiens
ccagtatttcagcccagcctcggtgtccagcagcccggcccgcgcgctcctgctggtcggcgtcgtcctcctggcctactggttcttgtccctgaccctgggcttcactttcagcgtcctgc

SEQ ID NO: 394737 - DNA, 122 bp, Homo sapiens
tggaggagctccgctcctcggcctgcccatccccaggtcgcggccctttggcccgcgcggcgtctccaagcgactggggaactcagaggaggccagcactcaaactcctgctttccaaagga

SEQ ID NO: 394738 - DNA, 122 bp, Homo sapiens
ggtattgctgtattacatatcttgacacttgaaggcccctttaagtctatcagctttaatcgcatatgaaatattatcacaggcagccaaggctgtatagaattattaaaatgctttcacaa

SEQ ID NO: 394739 - DNA, 122 bp, Homo sapiens
gagagtcccagcgctctcccggtatccaggcgtcccggcgtcccggcgctacgaggccaccggctgcgggtctgagcctgtcgctttccggctgcccgactttaactcacaccgaagcctgg

SEQ ID NO: 394740 - DNA, 122 bp, Homo sapiens
ggtcttatgaattaatgactaagccaacggaaccaaatgcaggaaatactaaaaacttaccggtaaaagtattaacacaaatgtgcattactactaagtatttcatttagcttgaaaaaaaa

SEQ ID NO: 394741 - DNA, 122 bp, Homo sapiens
ttcacatacatatataactagatagattgcttggtgactattcttccttcacccttcacccgtccccctatcatctaaaggccagtaacaaaaatagtcttcatacatcctgacccctgatg

SEQ ID NO: 394742 - DNA, 122 bp, Homo sapiens
gaagaaagactgttatacttttaaatcccagttacagtttttttgttttgttttcatttgcgtacttgagacatgggaatgggtgaagagctctcattagaaagaggaattcaaaatttgag

SEQ ID NO: 394743 - DNA, 122 bp, Homo sapiens
cttggcggtggagccatggtcggccaactgagcgagggggccattgcggtgaggaggtgccgggggctgggccggcggtccggggtggctgcggccccgagcctcgcggagtagagaggggg

SEQ ID NO: 394744 - DNA, 122 bp, Homo sapiens
acagctggaaaacaacacaaaaaatttttatcttgtgttgaaaataactactaccctgaccgtgaccccagggcttcctctgagtaaggagagacctcctagactccttagcatccagattc

SEQ ID NO: 394745 - DNA, 122 bp, Homo sapiens
caagatgagatgtaggtgggaacacagaaccaaaccattcaacttccatgggctaaatgccgaattactaaatccaagaattactacaccattactaaggtgcagggtaaaagcccctgaga

SEQ ID NO: 394746 - DNA, 122 bp, Homo sapiens
gtgtggattattttgaaaatgcctcctgcgtgttgagtttgcattggagaaccccgaagacgcgcaaactagtcctagcgtgagtgagcagcaagcagtggtacttccttgtgaatcggggt

SEQ ID NO: 394747 - DNA, 122 bp, Homo sapiens
ggctggcgagtgtgtcgcacggatcctagccggggaattctggaggatgtactcggtttccgttagaacaggttgcctcgcagtcacctggagggggcggcctgggagagggaacagctgcg

SEQ ID NO: 394748 - DNA, 122 bp, Homo sapiens
agaacagcacatgcacaagtgctgctgtatgatgaagtcattccaatcccagggcaccaacgtcctgccttacagcaattcaggtaaacacatcccagggttttggaaatgattagattaga

SEQ ID NO: 394749 - DNA, 122 bp, Homo sapiens
ctctctcggcccatttacacctatgaagtggtggggcgggctcgagagagcaaatgaaggcgcgcggcacaaagcctggtgcacagaaggcgcttcatattgtcattctaaggacaccccgc

SEQ ID NO: 394750 - DNA, 122 bp, Homo sapiens
gttacccttcaggtgattagaattcaagcaatttaggcttttttcctttgtacttttcaacgttttttgaatatttttctgtgagcaggtatcatttcacaaaaataaagcatttatctaaa

SEQ ID NO: 394751 - DNA, 122 bp, Homo sapiens
ttggacactcagctgggtcagcccagaggctgggtcctgaggttggtctcagggcagctccgggagactccacgtgtcccttctgcaggatgcttccctctcctcgaggcccatcagtgtgg

SEQ ID NO: 394752 - DNA, 122 bp, Homo sapiens
tctaggaaaatgggaggtcctcgcctctctgtggtttgctgactcagggcggctggcaggcggcgagggcaaggagcgcgatcgctgacgcggcactcggggatctttcgctgcgggggctg

SEQ ID NO: 394753 - DNA, 122 bp, Homo sapiens
aacaccccaccttccactcggctcacttaaggcaggcagcccagcccctggcagcacccacgatgcgggacctgcctctcaccagcctggccctagtgctgtctgccctgggggctctgctg

SEQ ID NO: 394754 - DNA, 122 bp, Homo sapiens
ggttcaaacgatcctcccatctcagcctctcaagtagctgggaccacaggtgcataccaccgcataaataagtgatatagaaaatcagtacatgtaatgtgctgtttgtcagggaacttgta

SEQ ID NO: 394755 - DNA, 122 bp, Homo sapiens
tgagagcaggtcgctgggtttcaggctgagtgcatctagtaatgcgtccacaatgtgacccgaggcaagtcacttcagctctcctggcctcagcacaatgagccggctgggcaagctgaacg

SEQ ID NO: 394756 - DNA, 122 bp, Homo sapiens
agaactcccaaaccatgttcctttcttccaatttgtcttagggtggtgggctaggacagccgggtgaggtatgttatcttgggccaaatggatgactgtgtggtggggaggtgggggaaggt

SEQ ID NO: 394757 - DNA, 122 bp, Homo sapiens
ccccaagcctctagtgttcaccataaagagctcagtcagcccatcacccttgggtgacagcgagcactgtgaggggtaaagaaggcagtctttaatatgctcattatttatagggaagaaag

SEQ ID NO: 394758 - DNA, 122 bp, Homo sapiens
gtgcggcgcttctcccaggccccaccttccatccagtgccctggaccctcggctgggtagcgccaccagagcgaccaaacgtcccgcgccttccaggccgcactccagagccaaaagagctc

SEQ ID NO: 394759 - DNA, 122 bp, Homo sapiens
gcccgatcaatccattaccatttattccctctctgtacctggtgggagaaagcgcggcaacgacaccgcctcagcagctctcactcaagggcgtggggtggggggcagggtagagcactgcc

SEQ ID NO: 394760 - DNA, 122 bp, Homo sapiens
cgtagaccgtctgctgggggcgccggcaccatttggagtacgtgaggtatacgggtagggcgcggccaggtcgggcgtctgttaggaaaaagactttttatttttatgtttattttttaaga

SEQ ID NO: 394761 - DNA, 122 bp, Homo sapiens
cttccctgttttcaagctacaggagcgcaatctttccagagcattgagtggctagaggaacgggcttacgctaggcaggcgctggcatcttagacaatacctgacatctttgcgggagctct

SEQ ID NO: 394762 - DNA, 122 bp, Homo sapiens
tcggccgcctgagctgaggggctccgagcgcgacaatggcggctgccggggaagcggtaacggatcccgatttgaaaaggccccgagcgctcagtaacccggatctcgcgagaaccggtcga

SEQ ID NO: 394763 - DNA, 122 bp, Homo sapiens
cccccttcccggctccagcgccgccacgccggccacgccccgccccgccgcccgctgacgcgctgcattattcatgagacgcggctggccacgccccccgagtccgaccaaaccaacagtcg

SEQ ID NO: 394764 - DNA, 122 bp, Homo sapiens
ggctcagaccatggaggcgctgccctggccacgttgaggcgcctcctacgctgacgcctgcgaggatgctgggcacctgctctcagcccgcaccacatgctgctgcaaaatgaccagacacc

SEQ ID NO: 394765 - DNA, 122 bp, Homo sapiens
tcctggcttcccttgctccaggagatgcttgggaggcacccgtttcaggccaggaagctccgtaaaggctcccgggaccggcagaagcccccgcgcccccgcctgcaccccgcgcacctgct

SEQ ID NO: 394766 - DNA, 122 bp, Homo sapiens
atgattaagagggtcacgccctctaccactccaacctctctaatcagtctctttctgctccgtctgctgtacatgcacctgctcaggtgagacctcaaggaaaaataatcctgtgggtccac

SEQ ID NO: 394767 - DNA, 122 bp, Homo sapiens
ctttggaaagctcccattcctcttcatgatgcttggcttgacgtgggctattgtgagggacgcaggctgctcatcggaggaagatgcttccagattggtctcctccccgggaggagggggag

SEQ ID NO: 394768 - DNA, 122 bp, Homo sapiens
ggtggtgggcagggcaaagtctgtcgtccaggcctcgagttcctgcaaggacacacgagccgctaggaggagaggacatagaatgacatgggaacgaccgggccttggccgttctgagcagg

SEQ ID NO: 394769 - DNA, 122 bp, Homo sapiens
acctttgccgcctgtacccgcctccccgacctgcaacccagccccacggacaatccagatcgagttcccacagcatagctcgtctctgctggaatctctgaaccgccacaggctagagggaa

SEQ ID NO: 394770 - DNA, 122 bp, Homo sapiens
caacgggtacaaagaaccccactggctaaggccgacctaccagggcttgggggaggggagcggaagactgaggtcgaaacgacctgtccagcagaaaactatccccaagcatattccaacca

SEQ ID NO: 394771 - DNA, 122 bp, Homo sapiens
ggagccagcgagtagacactccccgcctctaccccaccctctccatctccccactccgggcgagcctggagccaccgtacgcaaagcgtcctgagctccctgtttggcccggcagagcgacc

SEQ ID NO: 394772 - DNA, 122 bp, Homo sapiens
catccaagtactgaggcaggattctcccagatctgttatttgggatcctagactccctgccgcactgcggcttctctgcagactctaactccttttgccaagcaatgaggttggagatgagc

SEQ ID NO: 394773 - DNA, 122 bp, Homo sapiens
acccggaattgtgccaggctgcatctgtcctccaagagccaggcccagggctaggtgtggcgcgtgggcggctcctccgcgcaggcctggtcagagtagggggcagcggtgactgcccctct

SEQ ID NO: 394774 - DNA, 122 bp, Homo sapiens
caacttccaaacaagcaaacacggtgccgccctctttcacactcccccgacctggatccccgatcctgaatccaaacttcatgacgtgtctgaagattgttttcaaggctgttctcttggtc

SEQ ID NO: 394775 - DNA, 122 bp, Homo sapiens
cagccatgggcaggatcgcgggtaggtgggtcagccgggtctgggtcagagcgcagtgggcggtgggcggggctacggctgtatttctagcgacccgggtgggggcggagccagaggggcag

SEQ ID NO: 394776 - DNA, 122 bp, Homo sapiens
tcttttctgcaggggatattttccaatacccccagtggatgactgaaactgtggatagtacgaaatccaattatcatcagtataaacatgtttctgttcatgtcttacaccccaaaatttaa

SEQ ID NO: 394777 - DNA, 122 bp, Homo sapiens
cagcctgggcgacagagcgagactccatctcaaaaaccaacaaacaaaaaacccaaaaaccgaaagactacaaattgggttcagtgtatactgctccagtgatgggtgcaccaaaatttcac

SEQ ID NO: 394778 - DNA, 122 bp, Homo sapiens
tggatcagcttccagttggccttgtagtaggtgagcagctcctccaggccgggaaagagccgtcccttctgcaggtagaggctgccatcagctgccatggagacccggtagtggcagacctt

SEQ ID NO: 394779 - DNA, 122 bp, Homo sapiens
cccgtccccacctgcgcagggctagtaccactttaaggagtcaggcgccgccggggtaggcgtggtcgccgcgagcgggggggggggcgctggtgtaggacggacctgattggccggaggcc

SEQ ID NO: 394780 - DNA, 122 bp, Homo sapiens
cactcctactgggcagaagtccattccagagtcccggaaccttccctccaggcagcaccacgtgcagaggttggtggccaggaaccccaccccgggtgtttgcataaagctcacccattggg

SEQ ID NO: 394781 - DNA, 122 bp, Homo sapiens
cgagatcatcctggctaacacagtgaaaccccgtctctactaaaaatacaaaaaattagccgggcattttataatatacaaaaaattagctggtgatggcggctgcctgtagtcccagctac

SEQ ID NO: 394782 - DNA, 122 bp, Homo sapiens
agtccggggagtccaggtatggaatgggaggcagaaagttcaatcaagggactgggatttcggaatgaataatgaagggagatggactgggtccatgccgaaggtttctccctggtttctca

SEQ ID NO: 394783 - DNA, 122 bp, Homo sapiens
gctcaaagatgagcccagtgacatgaaacccgaggcaccagatttacagctaatgagtggcgaaatcagatcctcttcctcccagtctatccttcctgaaaacagtgaataacctggtctca

SEQ ID NO: 394784 - DNA, 122 bp, Homo sapiens
tcccagcccctgagatgcgggagcccgcaagagggaacctcttgtctgaagaggttgctgcgctctggagtcgtgctctgggacagatgggcaagctccgctcttggggccggaagcgtgta

SEQ ID NO: 394785 - DNA, 122 bp, Homo sapiens
tgaaggcgccttcagggtgggggagccagtccagcctgagccagggccctagggaagttgcgggagggggcagggtgtggtccccagatctttatcagactaataagctccttcctcctgcc

SEQ ID NO: 394786 - DNA, 122 bp, Homo sapiens
gtggctgttttcactcctgttttacagatgaggaacctgaagaattaaacacttgcccaacgtcatgtaggtaatttgaacaggagtagcatgaagcttttacccaaggtcgatgtggcaaa

SEQ ID NO: 394787 - DNA, 122 bp, Homo sapiens
gtcccgctggccgcaggaacacaatgacatctctcgcccaggagggcggttgcagggaaccgaaatcggacacaacagttgcagtgaacccgactcagggttgagcgcatcagcgctaaacc

SEQ ID NO: 394788 - DNA, 122 bp, Homo sapiens
ttctagggtcctcacgtgagttcatagcccccagcctgcttgctcttccaggaggagctccgcctcataatttgctcccaacaggcacctgtggaccccagattccatccttctggctcagt

SEQ ID NO: 394789 - DNA, 122 bp, Homo sapiens
gtatccacgcggaccgggctgtccggcggtggccaggcctggggctgggggtcagcctgccgggcctgagctgcctgcagctcctgcagcgccttcttgagctgggtctccagcacagcgac

SEQ ID NO: 394790 - DNA, 122 bp, Homo sapiens
aggtgtgggcccgaatgctgtgcaagtgcgacatcaacttccactaataagggtcacaaccgcccttcaacgtagaagcaaccatctcggtgcccaaggtcaagagagacaccgaagcccgg

SEQ ID NO: 394791 - DNA, 122 bp, Homo sapiens
tctccaagagagttctccaacttctgtccgaggactggagacgcagagtactcacaagtccggcacttgagtggctgcggctgcgacggcaatttagtgacacgcggctcctttatctcccg

SEQ ID NO: 394792 - DNA, 122 bp, Homo sapiens
tgaggacggggacacagccgcaaatagacctggtgccttcctgagtcagcccctttgaggcgagggtgaccgtgggctcctcctccctctcagagcctccccatggggtctccctccctcct

SEQ ID NO: 394793 - DNA, 122 bp, Homo sapiens
cggctcgcgcagctccgctcttgcgccccgcgcccggctcagcggacggactagcgcgcccggtcaagaatcctggggaacccgctccgccccctggctccagcgccctccaatgatgtcgg

SEQ ID NO: 394794 - DNA, 122 bp, Homo sapiens
tgccggcgtcgttgagcgattgtgtatggccggtggggggcccttctgggctgactcagccgcgccaatgggaacggcacctcggcagcggcgcgtctgagcgccagttgtattctgcctgc

SEQ ID NO: 394795 - DNA, 122 bp, Homo sapiens
agcctctcccagccatgctgcccgcctctgtctgcggcttctttccttagcagagtgagacgcgaacacacggctcccggcagcatggggacccttcgactctcgcgacagaaccataactt

SEQ ID NO: 394796 - DNA, 122 bp, Homo sapiens
cacttgcacaccacctttacagctgttgccctatcttcattccacatgtcccattgttcccggaccaaatcaatggtcaggctgcttattctcaaggcccaataacgagatgcagatgaact

SEQ ID NO: 394797 - DNA, 122 bp, Homo sapiens
ttaactctgacctagagatgccgagcaccctgtcctgcggaagccgctctggtctctgcccggcttacatttgctgcgtgccaggcacttaggctggagcattggcacgcattgtgccactt

SEQ ID NO: 394798 - DNA, 122 bp, Homo sapiens
tcagcccgcaatgactcagcaagggccggtgggattctacatggtcctgcgatatccaggcgacggagtctcgcctctaaagtggcccggggagcaggaaggtatgagcctcagctgagcga

SEQ ID NO: 394799 - DNA, 122 bp, Homo sapiens
acaacagaggatttggctgaccagcttgcttgtccaacagccttattttgttgttgttatcgttgttgttgttgttgttgttgttgtttctctactttgttttgttttaggcttttagcagc

SEQ ID NO: 394800 - DNA, 122 bp, Homo sapiens
cactacatttgaagctggtttcctctttgatttggctgctaggaagctcagagccagatgcgtggcccacttctgaaaactgaaagattttaagatgaataaaaaaaattactaggtgtttt

SEQ ID NO: 394801 - DNA, 122 bp, Homo sapiens
cacaggtagaaggaagccagggcggccgcagtagaatgacagaggcgccggtcacgtgatcggaggcacgtgactgctgcggaaggcggaagccgggagactccaaagcagcaagaggaggg

SEQ ID NO: 394802 - DNA, 122 bp, Homo sapiens
ggtgcgcaccgcttctcggtcgggggctcacccagagaggcgctgtggccaactcgtgagcgcacctgtgtttaacaggttggagtaagtcatggttcttgaccttcatgaagtcacagacc

SEQ ID NO: 394803 - DNA, 122 bp, Homo sapiens
gtgcggcccctccatgctgggctccgatgacaggggcgactgagtcatcccggggacccacgggccacgactgtccccgccgccagcgtttctgtctccggcttgggggactgcggggacga

SEQ ID NO: 394804 - DNA, 122 bp, Homo sapiens
aaggcaaagctgcccatttcccggctcagcgcctggggctctccgagggcctcctccaagcggcctttttcctgactgtggctgcagcctcttttgagtccgtgcctgcggggcccaggaca

SEQ ID NO: 394805 - DNA, 122 bp, Homo sapiens
tttggatctgaaagagatagggaacttgtgggagggctttatttactcttgtccagactgcgtctaatgtttctaactgtagacttctctgctaacatgacagccatgtaatctccagtatt

SEQ ID NO: 394806 - DNA, 122 bp, Homo sapiens
tgagaactccgctcagggcccctgccaggctgtgctgcgaacacgtgccggggtctcgggcggagctggctggcacagaagacagctggtgcgagcctaactgcaaatggactcaggttctt

SEQ ID NO: 394807 - DNA, 122 bp, Homo sapiens
tcaccctggttctgcggctcttagcagatgaactacaactcccaaaaggctatgcagcggcgggcccgcggagaaaagcgttttctctttggtgatcaacgcgaggatgttgccgcaaagcc

SEQ ID NO: 394808 - DNA, 122 bp, Homo sapiens
gcgccgggggagggcagccagggcttgggaaactctttcctggggcacctcacgcttcagcgtcaaaagacaatatagatagatgggtgccgggcggtggcgggggggactgttgccacgac

SEQ ID NO: 394809 - DNA, 122 bp, Homo sapiens
ccaactcgaggtccttgtggacatgggccaccccggtgcctggcacgttaacacatgcaacgtgcccataggggaagaagacagttcccatccgggaggggtgaaggactccccgggcatct

SEQ ID NO: 394810 - DNA, 122 bp, Homo sapiens
ccctcccaagacccccgggagccaccggtccctcacagcctctctgctacccgcgcaggccggggcggagaacgcatcccgcacgtccagggtatgtcccaaatcttgattcacgtgaatcg

SEQ ID NO: 394811 - DNA, 122 bp, Homo sapiens
taaagcccagaagtaaaccagaagtaaactcctctttgcctcttcttaccatttttgagacgtagcctcactctgtcgcctaacctggtgtgcagtggtgcgatcttggctcattgtaacct

SEQ ID NO: 394812 - DNA, 122 bp, Homo sapiens
ctgggacagctctggaggctgctaagtaacatgcacggtgtgggtgagctgccaacgctgcgggaggggcctgccgcctgcacggggctgggcattttcattttatattaaagtgctgcgtg

SEQ ID NO: 394813 - DNA, 122 bp, Homo sapiens
cggacagagcggccccggagtcgcgagcgtgacgggcttgcttggagggcacttggtggccggtagcaccataaaggccataatttggtgtgtgggtgtgggggtgtgtgtgttaacggcat

SEQ ID NO: 394814 - DNA, 122 bp, Homo sapiens
ttctctgagaattctgtcactctttgaggtgattcctatattccctccttgctagactgtcgctgtgtgtatttcaccctaggactggtggagagagttgttaagctgacctctggagtcta

SEQ ID NO: 394815 - DNA, 122 bp, Homo sapiens
cggggcgcccgcctgggtttggggcgcaagagcagaggcggagccagggcggagccagcgcgccgggtcccccctgaatcgaaagcgaaacaggggccggggaggaagggcggagccggccc

SEQ ID NO: 394816 - DNA, 122 bp, Homo sapiens
ttcccctgccttcctgacccacctacatagccagagaggtttttcctctctactcaaacacgctagggaaggggcccttctttcaaacattccctgctactgctcctcagaggtgggaaagg

SEQ ID NO: 394817 - DNA, 122 bp, Homo sapiens
tgatagcagaactgcctgaagcgctgacgagagagttccctggtataagacaaattcctacgtagggctgattcctgatcccaagtgtggtcttcttctttaacctttactttgataatctc

SEQ ID NO: 394818 - DNA, 122 bp, Homo sapiens
cccactccgccccttgcccctgccagacccgcgggagcagcaggtggcgtgggtgccagacgctgccggtgcgcaccgagtgcagcgctgccccggctcgccccgggggtcgcgtgggacag

SEQ ID NO: 394819 - DNA, 122 bp, Homo sapiens
gcggaggacgctgtgtgtgcataaatttcagcaacgctgaatacaggcactcaactgaggcgttctaactctggagatgaacactggattggaaactcgggttgaaaaacactttgattctt

SEQ ID NO: 394820 - DNA, 122 bp, Homo sapiens
ccaaacagttatcattcgggggggtgaggaagtgatactgtaaaaataaatgcgtttctccgactagcatcctttgtccttgtgtgttcttgcagtgtgagaagggcttgctgcccgcggct

SEQ ID NO: 394821 - DNA, 122 bp, Homo sapiens
cccaccgcgagacccggcgaaggccgagggccgggtcccgagaacaggtgcgcccagacccgccctgaataggaagctgcccctggagagggagcgtctgtttctaggcttgcgatttgctg

SEQ ID NO: 394822 - DNA, 122 bp, Homo sapiens
gctcttatctccaaaacacacctctctgcctacttggttcattgaccctgaccctgagtacgttgtttgatttggaacaggaggacagaggcttacgtgggtcatttaaaatcaaagtttaa

SEQ ID NO: 394823 - DNA, 122 bp, Homo sapiens
ctttcaacacccttgttttgtctagtgagtttttagtgcaccttcgttctccgaaatctgcggagagcccgcgcgcctgtgtatcaattttggctttggccgcttcgtccagtaggtgggaa

SEQ ID NO: 394824 - DNA, 122 bp, Homo sapiens
agcttccctgtgtcaagaggaacagatcaggggagtgaaagaagccacagtctacaggatcgctggcctggcactcgaagcccacccactgccttttcaccaactggcagagtcaggctaac

SEQ ID NO: 394825 - DNA, 122 bp, Homo sapiens
aaaacaattatcttctctacttggattatgagataaccttttcttggaggaaagaaacaccgctttacaaaggcatgactctggcggtggtcctaaggaagcatgagcagaaaattcataaa

SEQ ID NO: 394826 - DNA, 122 bp, Homo sapiens
cgtcctccgagcctgagctgctgccgagacaccctcagcgttcggtgattcccatagctccgcagagcctccgctcccacaggtgagctgggtgggccttgctctccgctcctggccagggc

SEQ ID NO: 394827 - DNA, 122 bp, Homo sapiens
taacactggggtctttcactgagaaatctgggtcatgcacaatccagcaacggactgaaacggccctggcattctgcagacgctgtggggcctgggtccactgggcctggtgcttggtcgct

SEQ ID NO: 394828 - DNA, 122 bp, Homo sapiens
gagatgaagaatcaaacttgagttttgagatttaggatgtggggactttgaaatgcccaccgggtaccgcttggatgccaaatcaaaaataggaatatgcagcacgattttaaaccaactcg

SEQ ID NO: 394829 - DNA, 122 bp, Homo sapiens
acacaaataactttatgtttcaatttcctcaatgaagcaaagcaaacaagtgacaaggctcgaagccctgacggcccagagactgcacagcgggcccaggagcaggtgcgccccctcgaagg

SEQ ID NO: 394830 - DNA, 122 bp, Homo sapiens
gtcggccttaggctggaaaatgcaggttcctgtttctgcgctttttaaactagccgataccgagagccagccaactctagctaaaaacgaaactcaagccaggcggggtggcgcgcgcctgt

SEQ ID NO: 394831 - DNA, 122 bp, Homo sapiens
ctcctgcgcccacccgggagagcaaacaatggctcacctgcgcccacccgggagagcaagcgtggctcacctgcgcccactcgggaaagccagccgccatcctgtgctgcaggcagggagcg

SEQ ID NO: 394832 - DNA, 122 bp, Homo sapiens
aagcccgcgcccccgcaggccggtctcaccttgccaggcaccccgcgccactctccaaggcggctctcaagtactttgggcagctttttggccataactcgccaaacccaaatttcatttcc

SEQ ID NO: 394833 - DNA, 122 bp, Homo sapiens
cgccggggcggcgccgggttgctgagcggcgtcacagatgctcccgcgggtccgctcccgcgggtccattcccaggactttgggttctcggacagaggccttaggacacggggcgggaagct

SEQ ID NO: 394834 - DNA, 122 bp, Homo sapiens
ggtcctgagctatgcataagccgtttgaccacgcatggagaattttaccacccagagacacgcgagtggccctgtgcaagtttcaactgcgcggggggcggggaattccgcagacaggattc

SEQ ID NO: 394835 - DNA, 122 bp, Homo sapiens
cctgtaatcccagctactcgggaggctaggctggaggccgaggctgcaatgagtcgagatcgcatcactgcactccagcctgggcgacagaatgagatagtgtcaaggaaaaaaaaaaaagg

SEQ ID NO: 394836 - DNA, 122 bp, Homo sapiens
gcgtctcctccgcgggtatgagcagtatgcctacgacggcaaggattacatcgccctgaacgaggacctgcgctcctggaccgccgcggataccgcggctcagattacccagcgcaagtatg

SEQ ID NO: 394837 - DNA, 122 bp, Homo sapiens
ggctggcatccctccctgtccacccccatcccctcaggacacccctgaggactcactgagcgaaaggctgctgacaccaggttggaagggaagatatttctgcagagacagacacacagagg

SEQ ID NO: 394838 - DNA, 122 bp, Homo sapiens
tccagcgcctcctggggcagctcacgcaggtggttggaggccaggttgagcaggagcaggcggcccaggccacggaaggcgccctcggccaccagctccacctcgcagtggcgcaggtccag

SEQ ID NO: 394839 - DNA, 122 bp, Homo sapiens
tttctcaagtatttcttgcattcctacagtatgccctgtctatactggatctgaataagacgaaaagagtcctcacaacctaactgtgcaaagatcaagccaaccatattttagaaaagctg

SEQ ID NO: 394840 - DNA, 122 bp, Homo sapiens
gcgacgctcgatggtagtgaggctcggaggactgggagcgagaggccggaagcccctgctcgccaaacccagaggtggttggcagaaggtcccacaccttggctccctccttttagctaacc

SEQ ID NO: 394841 - DNA, 122 bp, Homo sapiens
aaggtcgggcggcacggcccagaactcaaatatgatccacaaccgaggagcaagcagctgcgggcggcggggagggggcggcgggtgggcaagggggctggggggacagcataggcagctgg

SEQ ID NO: 394842 - DNA, 122 bp, Homo sapiens
taggtcaccaaaaatatattttacctgacaaattaattaacatgggttagggtcaggatgcgaggcaaagaaacaggagagtgctttggacaatgagaattaagtcactgatctctcattct

SEQ ID NO: 394843 - DNA, 122 bp, Homo sapiens
accctcccacctcgcgggtagaggaagtccttcagttcaggcacaaccctgagcgtcccccgcagtctccaactccggcgccagtcaggttgtggggtgggggcggcggagggcggagagcg

SEQ ID NO: 394844 - DNA, 122 bp, Homo sapiens
tcctaactgctccctttgattaaggtcagagtcaaagttaaatacctcctttgacccagccgataaagctcatctaataattaaataatgacctgcaaaactccaatggcattttatgaaaa

SEQ ID NO: 394845 - DNA, 122 bp, Homo sapiens
atatcagcacacattcacttgctcttcagtctgaaggcatcaaaatgaattcagatttttcgtgctaaagatggcacagatgggttacatccaggcaaaacttgggcattaaaaaaatacac

SEQ ID NO: 394846 - DNA, 122 bp, Homo sapiens
tgcaggccagcctcccagcttcacttctgcgatctggccctgggtaccgtggctcacacccgcacacccgcacagagaccgccccgtcttacgcaggccatcccggtaggaggtgcgagcat

SEQ ID NO: 394847 - DNA, 122 bp, Homo sapiens
cagatcttaatgttcttgcatattaagactatttcttgacacctatttcgcttgagttcacggaggcaataataatctccacttgaggaaggctgaaaggaaatgggcttggaaagtggagg

SEQ ID NO: 394848 - DNA, 122 bp, Homo sapiens
ccgcctttgcttttccttcctgggcgtctggagggccgtgcgcctcaccggcagacctgccgcattccggacctgcccctgcccccgccccgagttgctcacctggatcctctgccccctgt

SEQ ID NO: 394849 - DNA, 122 bp, Homo sapiens
ggcgcgaaggcggccagggcgagcaggagcccccacatggcggggattgagtgccaggggcgcgcgggctacggcgggtggcgggtcggtctcttcctgccgagtgcgccgagccccccgcc

SEQ ID NO: 394850 - DNA, 122 bp, Homo sapiens
ataccctggtctctcctccatttctcctctggcacctagaaccaagtcaccctgagccagcgccagagttcctgcccactcgtgagtaggacaacatacccaggagatactgctgcagctgg

SEQ ID NO: 394851 - DNA, 122 bp, Homo sapiens
ttggggcagaatgtggccagcaggccccgtgtttgagatcctttcatagaaaaacgatggcgggaagcatgcaaacactcaggtgggtgcaagccgcgcacagtgagtcacccgggctcctc

SEQ ID NO: 394852 - DNA, 122 bp, Homo sapiens
ggatgttttatttcttcggtgagaaatggtatctccttctgttatcctccttagtacttgcgtctggaaaattgtgaagaaacttgaaagccatgttaaagagttggacttagcccaggatg

SEQ ID NO: 394853 - DNA, 122 bp, Homo sapiens
acctagtcatccatgctacatgattacaaaacatctgcaaaacatgcatcacacaatctgcgcacaacagttaaacaatactagaattaaatgttttaagggcataagaagccaaatacctg

SEQ ID NO: 394854 - DNA, 122 bp, Homo sapiens
cttccgcccagcgtctgagttttccgggctgaaatcggcacagaagccgtttgggattggcgcaggtgaggtctctgcacagctttcgaaatgtgtctgatccgggtacaggtattcctctg

SEQ ID NO: 394855 - DNA, 122 bp, Homo sapiens
cggccgcagtgtgccgcccgctgcgctatgcggggctcgtctccccgcgcctatgtcgcacgctggccagcgcctcctggctaagcggcctcaccaactcggttgcgcaaaccgcgctcctg

SEQ ID NO: 394856 - DNA, 122 bp, Homo sapiens
tacagacactgcccctttttatataagggacttgagcatttgtggagtttggtgtctgcacggggtcctggaacccctcctcacacataccggggatgactgtacttctcctcatgctcgca

SEQ ID NO: 394857 - DNA, 122 bp, Homo sapiens
aaaggaggcagtgaagagctttttccagcagagggaacaccatgagcataggccttggggcggacgtcttagaacattctagaaacggaaaggaggccagtgagaaaaagggagctcaggag

SEQ ID NO: 394858 - DNA, 122 bp, Homo sapiens
cgcgaggtatttaccttcgaaaagtggtggcggctgcaggtaccggaggagtggggcggccgggaggggctaggtctaccggggctgcccgccacgcagatccgagcccagggaaccccctc

SEQ ID NO: 394859 - DNA, 122 bp, Homo sapiens
ccgccagcctcctctaaccccccttttcttagaccggcttctgggaggagaaggatgaggcgggagagatcaatctttgaagctttcctaacaaagataaagccaacgattttctgtcttgt

SEQ ID NO: 394860 - DNA, 122 bp, Homo sapiens
aaagattaactccatacctttctgaaacttttcacaaatgaaaagagtcatttccttagtcgtgtgaggacatattgtcatgttgaaacccagggaaagcatatgctaccttaggaagagga

SEQ ID NO: 394861 - DNA, 122 bp, Homo sapiens
tgtttaatctttcctattgccctttttttttcctttaaccacttagactgtgtgcactttcgcagacatgttgattcttcccagaagcagcacctgctctgtgccaggctctgtgtgggtac

SEQ ID NO: 394862 - DNA, 122 bp, Homo sapiens
gagcagggcactgtgtccggcggagccaagtccactctgggggagctctggcggggaccacgggccactgctcacccactggccccgaggggggtgtagacgccaagactcacgcatgtgtg

SEQ ID NO: 394863 - DNA, 122 bp, Homo sapiens
caaacttttagccgaactttcagcccttgacttgttctgggacctactgtacagcagtcacgggtggcagaaatcggagtctgatgaccccttggtcctggtttgttaagaatgggaaaacg

SEQ ID NO: 394864 - DNA, 122 bp, Homo sapiens
gagacactgaggaggatatgggagcacatagcagagacaacaaacatagtcctaacatctcgagggcttgctggaagaagaggtcttccacctgagactagaaagatgagtagaaccttgac

SEQ ID NO: 394865 - DNA, 122 bp, Homo sapiens
cgaactgagtgcggggattgccacttctgccgagacatgaagaagttcggggggcccgggcgcatgaagcagtcgtgcctgctccggcagtgcactgccgtgagttctgcccccacctttgg

SEQ ID NO: 394866 - DNA, 122 bp, Homo sapiens
gccgcccactgctgaggaaacacgagccggcttacggtcagcctgtcgaagaggtcgtcccgggggtccttgttctccataaagagctgtaagttcttgtacacctgaaggagaaagaagga

SEQ ID NO: 394867 - DNA, 122 bp, Homo sapiens
ttagagtccagagctcccttccccacatgagcctggggagcttagctctgataagtacatcgttgccttggcaccatctgccctggaggaccaggagatgtttggaatgccagttgttgtgt

SEQ ID NO: 394868 - DNA, 122 bp, Homo sapiens
ccggggcaagagatgggcaggagacaccccagaatgcgacagccgcaggcccgcgcacctcggccctccgcagccggcgtcacttacttctcgccctcgaagagcaagaacgactcgaaggc

SEQ ID NO: 394869 - DNA, 122 bp, Homo sapiens
cgaaggagaaggcaaaagatattttaaaagtttccaactctccaaccctcctagcagctgcgagctgatgtacacgtaggttctcatctgcaatgtggttcgcccgggttgaggcctaggct

SEQ ID NO: 394870 - DNA, 122 bp, Homo sapiens
cgctggctgccttggcatccttgtaaaagccgaggctcccacgccgcaggacacagtacacgttctgccaggacctgcgagggacgcggtgctgactggccggcctcagtggcgcccgcaac

SEQ ID NO: 394871 - DNA, 122 bp, Homo sapiens
gcttaaaggagcaaacagggaaaacgaggccttagtaagtgaaatgtttaccactagtcacgtggccagccaggcacaggcctggcactggacctgggtcacctggctgccaggccgatgct

SEQ ID NO: 394872 - DNA, 122 bp, Homo sapiens
gaggccgatgccagcaccgggaagtgagaggaaggagacccagatagcagcagggccagccggagcccattccggatgccaggctggggaactggcaggacttcccttgctcacacatcctg

SEQ ID NO: 394873 - DNA, 122 bp, Homo sapiens
gcccggttccagcgctggaggcccggggggagcccacccgcccaccccgcacgccgcccgcggcactcacaagtagctgccgctggacaggaggagaaagatctgcgggcaatagacggaga

SEQ ID NO: 394874 - DNA, 122 bp, Homo sapiens
ggctggaggatcgcttaaggccaggagtttgggaccagcctgggcaacatagcaagatcccgactctacaaattaaaagaaaaagaagaaagaaaactcgagccagaagaatggagggtaga

SEQ ID NO: 394875 - DNA, 122 bp, Homo sapiens
aggagccggggccacggccacacgcggcctagcgtaggttggacacgcctcccgggctctcggagctggcctgcttggtgggagccggcttctgcaacctacctaccgccccctgcgctgga

SEQ ID NO: 394876 - DNA, 122 bp, Homo sapiens
acctctgttgctttttgagaagactctaccggccgaatatgtgtacgtttgttggcggggcgggggtgggggagtggggagagtcctacctggccactgccccctaccggatctcgccctcc

SEQ ID NO: 394877 - DNA, 122 bp, Homo sapiens
gtctggatccgatggggctggtgatcagtgtagttgaggtccctgctctgtcctaggggccggcagctgctgtagtagggcagctcagctctaacaagctgtgtttgtgcctcccccagggg

SEQ ID NO: 394878 - DNA, 122 bp, Homo sapiens
tctgcccggagctggttcatgttccgtagcgttgcggcctcgtggccgggcagctggaagcgcaggacttccaccccagaggccattgtggcgggggtgggcaaccctggttgggaaggaaa

SEQ ID NO: 394879 - DNA, 122 bp, Homo sapiens
caagatggtgcaaatgttaacttttcccatttgttggtagattttaatattgccaaaggacgacgtgccaacgatgaatgcatgaaaaaatactttcacttgtgacatgaacaaactcaacg

SEQ ID NO: 394880 - DNA, 122 bp, Homo sapiens
tctccagcgcggctcttcccgacctcgcgatcctgtcccctgcccgggcccccagccgcccgctggtcccatatattacagcagcgacagaaatatggtagtggtcgccacgttagggtccg

SEQ ID NO: 394881 - DNA, 122 bp, Homo sapiens
cctgcctcacgcgagccgaacgaacaaaacgctcaggtccggtttgtgcgaggggctcgtcgcggggcgggagcggagggcccggggcctggcggtcgccctcggtgatctcctggtcctgg

SEQ ID NO: 394882 - DNA, 122 bp, Homo sapiens
ccacgcccgggtttgacagttctgcgcagaacttagtcccgcccccgcggctggtctcgccggtttcttcacttggaaaggcgtttgtgggaaaaggaaaccgttctgctttttcttgctcc

SEQ ID NO: 394883 - DNA, 122 bp, Homo sapiens
ggacaaggagtctctcagttcaattcccccttcctcagcccatttcaccaaagcctgaagcggaagagaaaaacacgagccccagcatggcgggcgcagccaccccctccttccaccaccag

SEQ ID NO: 394884 - DNA, 122 bp, Homo sapiens
gggtggggttcccggcacccccaccctgtgccagagaagctcgtcttcattgcttgccggcgagggcctaagtgtttcgaaagtctggtctggggcttctgcccagggcattgtccgcagta

SEQ ID NO: 394885 - DNA, 122 bp, Homo sapiens
tctgagagcccaagcagggttacccggcgaagacttccggggccgatgcgcatgcgcggccgatttgcacatgcgcaatactcgcgctgcctccgtggtccctgcctggctgaggtggcagc

SEQ ID NO: 394886 - DNA, 122 bp, Homo sapiens
gccgacccacgcgagccgctatggttactagcccgccgcccctcgcgcccacgcccctttcgctatctcgcgacagctggagaagcctcgcttccggccggctcacttacggacctagcgtc

SEQ ID NO: 394887 - DNA, 122 bp, Homo sapiens
accagggggtggcagccaaaggtctggggctggcacagcaggcagtcgggcgggatggtgcgtggcgggcagatgcactggcccgtgagctcgtcacagaggcgggcaccgcagtcacaggc

SEQ ID NO: 394888 - DNA, 122 bp, Homo sapiens
tttgttttctttacactccttttacattttaagtggaatctagtgaatgtgtcttttcagcgttcccaatttcaccattttcactacacctcgtgttgccattttaatgaagcatcattttt

SEQ ID NO: 394889 - DNA, 122 bp, Homo sapiens
gacctcggactcctcaaaggcgcgccactttctcctcggttggagggaagaggtggcgctcgcagagcaacctgcgggggaccacttctgttggtgctaagctttggggagagtctcctccc

SEQ ID NO: 394890 - DNA, 122 bp, Homo sapiens
caggagctcccggagcccccgatgctgcatggcccaaatgaaaatgccttgcagtcacgacgactccgtgtctgtcagaagcctgaggctggttccattctccttcccacacctcatcaacg

SEQ ID NO: 394891 - DNA, 122 bp, Homo sapiens
gaagacaagtagatatttttgcactagagtctgctgcttttagcgtgactgtctcaagagcgtgataggaaatgaaggtagtagttactgcaggtagaagacactgaataacaggcatgaat

SEQ ID NO: 394892 - DNA, 122 bp, Homo sapiens
tcaggcctaggttctcctacatccctgcagaaccttaactgagttacttaacctctctttcgtttacccctgcagtggggatgtcaacacctaacccaccctatcgtataaaattaatgtat

SEQ ID NO: 394893 - DNA, 122 bp, Homo sapiens
caaaaggcggagccaggcagaagaagtcccacggcgaagcgctcgccctctagcctgaggcggaagacaggaagtggattctagttcccaagccgcaccgcctaaatactgccggagtctgc

SEQ ID NO: 394894 - DNA, 122 bp, Homo sapiens
ggcgggaccggggcggggaggtttaagagcgcgggacactggtgctgcgctgctggactgcgccgccggagcgacgggcttcgggtcggtgcaaggcaggcgcacggggaagggcgcgccgc

SEQ ID NO: 394895 - DNA, 122 bp, Homo sapiens
gtacgggccccgcccctcgcgcgacgttttttgttgacccggaaacggattctccggagccgaggtccgctcgggtgagtgccctccgctttttgtggccaaacccagccacgcagttccct

SEQ ID NO: 394896 - DNA, 122 bp, Homo sapiens
cattttcttctgcacttctgtctggagaggtctgtagccactgagggccccggtcggggccgctttgcaggtccctagtcaggaccgagcaggggagtaggataggaatccccgccgcacct

SEQ ID NO: 394897 - DNA, 122 bp, Homo sapiens
gaatgctatgacattcccagagcttctcctactcttagctcacatttatagatgagaaaacggaggcccagagaagggaagtgacatgctcaaggtaacactgctaaccagggtcagagcta

SEQ ID NO: 394898 - DNA, 122 bp, Homo sapiens
aggaatgaaaaaactcaggattattgatataaattttagacttcttatgaatgctcatagcgactatgaaaacaccttggatgtctaggcatgcctgtgatagctatctacattattttgct

SEQ ID NO: 394899 - DNA, 122 bp, Homo sapiens
gcacagggcgggaggtgggcggaccagagggcggctccacctatccgagagctcgggaggcgggccagaagggacccgtcactcccgggttagagtgagaccactccgccctcgccgcccgc

SEQ ID NO: 394900 - DNA, 122 bp, Homo sapiens
acatcctaatgatgcaattacgtcatcacccagctgattccgggtggttggcaaactcatcgtgtctgtcctgagaggctccacaatgcccacccgcatcgccattctgtagtcttcagggt

SEQ ID NO: 394901 - DNA, 122 bp, Homo sapiens
tccatggcatcctgactctcagcggccagcacgtaggtgcgcgcccgggtccccgcaaagcgcacagcgaaggcgaactcctcggcggcctccaccagctccacagtgcagccctccaggat

SEQ ID NO: 394902 - DNA, 122 bp, Homo sapiens
cccggggtggggccccattgtcccgccccgtcgcggcgggaggcccgggcggcggcgccccgcctcttcccgccgacccccaccgctgattgtctggggacccaggatcgcctgggctaccg

SEQ ID NO: 394903 - DNA, 122 bp, Homo sapiens
ctctccgtgaaactcgaggagcctctgccagcagccgctcggcgcctgcctgctcagaagcggccccaacacctgccacgctgcggctgccggacacctggtcacagggagccacggggctg

SEQ ID NO: 394904 - DNA, 122 bp, Homo sapiens
cccacgattggcgcttctcgagagccaatttgattaggtgttgtttgacaaggccgttggcgcattccacttttccagaagactgcggatggtatggagtgtgtagcttccagttaacgcca

SEQ ID NO: 394905 - DNA, 122 bp, Homo sapiens
acctggggatacccgctattcgcggggacacgggagggggtcagaaagtcaacacacgcacgcacacacacaaaaagacgaggaaggtgaaaagagaacaagcgaaagatggatgaagtggc

SEQ ID NO: 394906 - DNA, 122 bp, Homo sapiens
ctcccaccggtgccaaacccagcccctgtggccgtcaccccgccagcctacattgccagccgccacctggccacacgggcttctgcttgctagctgggagtgcggacaccatgttcccagct

SEQ ID NO: 394907 - DNA, 122 bp, Homo sapiens
cctccttcccggctcggagttggaagggtttcctcagggctctcatttcctgcagcccggcgcctccacgcgggccagatcccgtctctgcagcctccccccggcccgcgcccattccccgc

SEQ ID NO: 394908 - DNA, 122 bp, Homo sapiens
gtgtgcatggagttccagtaccaggccacgggcggccgcggggtggcgctgcaggtggtgcgggaagccagccaggagagcaagttgctgtgggtcatccgtgaggaccagggcggcgagtg

SEQ ID NO: 394909 - DNA, 122 bp, Homo sapiens
ctgattatggcaacagcaaataacagagcagtcaaaggactgcctcatttacagctcacccgcacaaggtgaatatagatgaaggacgatgaggtgtaaatctaatttttaggccggagaac

SEQ ID NO: 394910 - DNA, 122 bp, Homo sapiens
aggtcattcaggtggtcatggcccagccaggctttgaacccgggctgtgcgattccacagcgggcgctctggcctgtgtgcctcatgatcatggacacagcatctattcttattttttcctg

SEQ ID NO: 394911 - DNA, 122 bp, Homo sapiens
tctcaggtgatctgccacctcggcctcccaaagtgctggcattacaagcatgacccaccgcgcccgcttgtgtgcatttttaaagataaatttctgcaattatgtagatattttaccacaaa

SEQ ID NO: 394912 - DNA, 122 bp, Homo sapiens
aaggtccgcgtgggaagtgtggatcccccggggcctctcactcaatcgccccttccccaccgtcaggagcttcccacagctccaccgtcccagttgggtggcttcccggctttgctcctctc

SEQ ID NO: 394913 - DNA, 122 bp, Homo sapiens
taacagtatcggcctttgtcttagtcaagctttcgaggagcaactcagcaattctgttaccgataatcacctaacaggtaaacaagatggcagggaggaaagtccacgtctcgccccacagt

SEQ ID NO: 394914 - DNA, 122 bp, Homo sapiens
ctgccgtcaggggccggaaggactgggcccggttgtccagtacaaacagagggtcaaccacgatccccacattgaagccctcacgcaccaaccgggtcttcatcagtttgaacgtgctggtg

SEQ ID NO: 394915 - DNA, 122 bp, Homo sapiens
gctgcccgttctcagcactcggtatgcaggggtgaaccagaagaaagtcctgtctgaacacgagaagaaattactgtctagcccgtggggctcacagcctgggtgggaggcaagccaccagc

SEQ ID NO: 394916 - DNA, 122 bp, Homo sapiens
atttttttttttttttttttacttattccacatacttccagtgctgtgttaaaatagaagcgttgagaatgggcataataaacttttgcattggtgtctgtgagtttgaaggagcaaacacc

SEQ ID NO: 394917 - DNA, 122 bp, Homo sapiens
ttatctaagctgaggttctctgaggcaagataagggggcgcgggagaagcttgctgaggacgaggctccaggtggctgtcaacctgtccctgatacaaaacgctgacagccttggggctggc

SEQ ID NO: 394918 - DNA, 122 bp, Homo sapiens
ccctcgtcttctaccactgaactgtttgtaaacaaagttccagtcttcccccgctctctccgcctccaccaaaccggtatttctcccaaattcgctccatcagtctgggatcgttacacagg

SEQ ID NO: 394919 - DNA, 122 bp, Homo sapiens
gcgcctggggatccaggccagttcccggtacccgcccatgcccagcccggcggcctagggcgttaccttgagctgagagctgtcggacactgttcacgaactgctccagggcagacgccatg

SEQ ID NO: 394920 - DNA, 122 bp, Homo sapiens
agacactttaaaagcgacattaacgggcttcggtgcctttggattcctaaattaggtttacggaaaaggaaagacttcccaagaacagtgagaagaggaactgcagcccctccaaggccgct

SEQ ID NO: 394921 - DNA, 122 bp, Homo sapiens
cggagctggaggcggagcagggctggggccggggagagggaaggtagagctgcggaggagcgcccacctcacccgagctcagcggcagcagaaaaagcagcggcagcaggacgcggcggctc

SEQ ID NO: 394922 - DNA, 122 bp, Homo sapiens
acggagactctcaggccttggcaggtgcgtctttcagttcccctcacacttcgggttcctcggggaggaggggctggaaccctagcccatcgtcaggacaaagatgctcaggctgctcttgg

SEQ ID NO: 394923 - DNA, 122 bp, Homo sapiens
atttccataggaagttagggagattactgttccagcagtggctacattccggaaaacagccgcagaagaaatgagaggcttctcaagtcctgcattttctttttttttttttttgaaatata

SEQ ID NO: 394924 - DNA, 122 bp, Homo sapiens
cgcctggcagggaagtggcggcgccccctagcggcggccgcttgtcgttcctggggtcatcgctttgagctgaaaaccacccaggcccccagcggttgtggtttaccttggaaatttgtcgc

SEQ ID NO: 394925 - DNA, 122 bp, Homo sapiens
gtgggcagtctcgaccttcattgcaagttcctgctccagctcctctgcttctgccatctccgtggcactaccacaagcccagggccagaaattttaacaatcacagcattgtttatgatggt

SEQ ID NO: 394926 - DNA, 122 bp, Homo sapiens
ggatgctgggagaaatggtagtaaacagggctcagagtcagagtagctctgggtgacttacgcttagagactccttccctctctctatgtgcctggcctgggcttcacttcgctgcctgcat

SEQ ID NO: 394927 - DNA, 122 bp, Homo sapiens
tggggcgcagagctggccccgtggccggccaggtcaggagccaccacctcatagcctaggcgcacaaagaagtccagctgctccttccagatggccagggaaccgccgacaccatggatgaa

SEQ ID NO: 394928 - DNA, 122 bp, Homo sapiens
ggacaagagcttgagaatttacttggagctggtgtacttggtgacggccttggtgccctccgacaccgcgtgcttggccagctcccccggaagcagcaggcgcacggcggtctggatctccc

SEQ ID NO: 394929 - DNA, 122 bp, Homo sapiens
cattttgccccgcaggggaacctctataccccgcgattgaactcgaaagactcctcccggcggatgaaagccgctactccctggctggctgagctacagctcccgcagcgcgcccaggagtg

SEQ ID NO: 394930 - DNA, 122 bp, Homo sapiens
gggttcaaattccagcttcactatcgtttacctctgtgaccttggacaacattccctgagcgctttatgccacagttttctcatttgtaaagtgataaaaagataatagtgcctacctcaaa

SEQ ID NO: 394931 - DNA, 122 bp, Homo sapiens
ccaggacacagagcttgtggagaccaggcctgcaggggatggaaccttccagaagtgggccgctgtggtggtgcctcctggagaggaacagagatacacatgccatgtgcagcacgaggggc

SEQ ID NO: 394932 - DNA, 122 bp, Homo sapiens
catacaactcagaatgacccctacctgttcccagagctcaggtgggtggagaaaaatccccggatggtccctcaaaaggacagacactgccccatttctggctgagctcctgcaggttctag

SEQ ID NO: 394933 - DNA, 122 bp, Homo sapiens
tctcctcttcgtatggtggatgcgtctttgtctgtcctgttccccgaggtcctggtgcaccgtggaaggaacagaccttgggctgggatccaccgggggtgccgggggtgcctggtgccttc

SEQ ID NO: 394934 - DNA, 122 bp, Homo sapiens
cgaatgacagacctgcctctcgtagagctgtgggcgggaggcagcagggacatggggcagcgtaccctgggtcaaggtcatctgggcatcctggtctcccccagtctcttctgtccctccta

SEQ ID NO: 394935 - DNA, 122 bp, Homo sapiens
atgtgctccggattggtcaggcacggccttcggccccgcctcctgccaccgcagattggccgctagccctccccgagcgccctgcctccgagggccggcgcaccataaaagaagccgcccta

SEQ ID NO: 394936 - DNA, 122 bp, Homo sapiens
cctagagtataagtttcaagagggtggaggcatttgtttatttccttcagagatatttctcgagtacctagaatggggtcaggcacagtcagtttcctgggactgattatgcagccacctca

SEQ ID NO: 394937 - DNA, 122 bp, Homo sapiens
gttgggggaagggcctcgggtgctggagtgagtcctgggggagaaggaaagggctgcgggcgggacatccagaaagtcccacatgctgtaccatatggccatggctggtgtcccagtgcttg

SEQ ID NO: 394938 - DNA, 122 bp, Homo sapiens
ctaggtcgccctgcgcgagcccagcccagccctggactcatacaaaggctccagagcttgcgcccgtgcgaagccgccctgccggctttgggcatctccgaatccccacaaaagctatggct

SEQ ID NO: 394939 - DNA, 122 bp, Homo sapiens
ggctcagagacaccaagccctgtagggccctttagggaccacttctttccatctgtgcctcggaggggccggctgagagccgggctaccggcggaacttgtccttgcagcaaaaatgtgttt

SEQ ID NO: 394940 - DNA, 122 bp, Homo sapiens
aatgtgcttgatggcttgggttgtctgagtgcaagtgaagtagggcgcaggcctggtttccgcattccctgtctgctcagccttttagctcctaaccccatccactccctagagctggccag

SEQ ID NO: 394941 - DNA, 122 bp, Homo sapiens
cactccagcggccacaggaaacagtcattcgggagctgcagcctcagcagcagccccgcacgatcgagcgcagagacttgcagtacattacagtcagcaaagaggagctttcctcgggggac

SEQ ID NO: 394942 - DNA, 122 bp, Homo sapiens
ctggcagccaacggcccccggggctcaggcggggagcagctctgtggtgtgggattgaggcgttttccaagagtgggttttcacgtttctaagatttcccaagcagacagcccgtgctgctc

SEQ ID NO: 394943 - DNA, 122 bp, Homo sapiens
ccgcagtggtgaggacgcgtggacagtcccgcgggggcggcgggagacctgcggagtggccgcactccaggtccgcgccaaggccgggcagctccgctttctgctcagtctccgcgaggtgt

SEQ ID NO: 394944 - DNA, 122 bp, Homo sapiens
tggaacattcctgcaaatggtttcaatatatgcagatgtctcaatataggaatgaaattacgtctttggaacaacttaaataagtcaaatatacttggagctttaaaaattaaaaggagaga

SEQ ID NO: 394945 - DNA, 122 bp, Homo sapiens
tagagcttcttcatgtagtgcaaagctctggagtctggctgcagcctaggtgacccacctcgcccaacagatagaactttgaaaagcgcgggaaggaggccagctctgtctctctcatctat

SEQ ID NO: 394946 - DNA, 122 bp, Homo sapiens
tccgcccccctttcttgttgcatggcaacaacaaacacttgctcctgcggaccagatccccggaggagttgttgctgggcggagtcagagcagttcttgaggttcaaggaggcgggggagac

SEQ ID NO: 394947 - DNA, 122 bp, Homo sapiens
cgcgagggtccctgggcttctggccgctcttcatttcgcaggggctccgccggccgcgcccggaaagccctatctcagatttggcggctgctgatcccctgaggccagtctttgtttggact

SEQ ID NO: 394948 - DNA, 122 bp, Homo sapiens
tacctcggcttagtcatctatagaataggagtaatagtggtatatacttgacagagatgtcgcattaaataattcatgtgaagtactccaagcagttgctgctttctcataagccttcgata

SEQ ID NO: 394949 - DNA, 122 bp, Homo sapiens
gcagcagtccagccacctggcgcatgtccacccgaggcctgcctccccgctccctctggccgcagtgcccacctgtccactcaggagggcactggcagttataggtgttgacgccatccacg

SEQ ID NO: 394950 - DNA, 122 bp, Homo sapiens
ttgactgtcggggtttggacaagtggctgcgacgacactaaggtggagaccgggatgtagcgaggactcccagagttgggagacgttgtacgcttactgggacctaaatcccgcacgagttc

SEQ ID NO: 394951 - DNA, 122 bp, Homo sapiens
tgaacatggcaaggctcaacgggacagctgccggactcatgcacacgttcaatgcccacgcggccactgacatcaagggctttgggatctggggccacgtgcagaacctggccaagcagcag

SEQ ID NO: 394952 - DNA, 122 bp, Homo sapiens
tcgggctccgcgcaaaagatggggttggggtacggcgcgtagagatgacgtcgggttctacgcgcagtggtgacgtcacgggagcgccggcggctgagaatccgcgttgttccgtgttgggg

SEQ ID NO: 394953 - DNA, 122 bp, Homo sapiens
gggtgttcccatctccagcctgtgtgccagacaccctgagaaatgcagagagaagtgagacgcagcccacggccacagtgagcttcatatttagtaacagggaaaagagaaatatgccaata

SEQ ID NO: 394954 - DNA, 122 bp, Homo sapiens
ggagcagggggcggcgctcatgcaggaggcttgggccgtacaggagcccactgcgggggccgggggaaggctcaggcatggcgggctgcaggtcccgagccctgccccacgggaaggcagct

SEQ ID NO: 394955 - DNA, 122 bp, Homo sapiens
ttcattcatttttcttgcctattttgtgccaggcactgtgctaggcctcatttgctcttccgacctgtttttttgggaggaagaacaaatcttccgttcatactccccagagtgggaaagag

SEQ ID NO: 394956 - DNA, 122 bp, Homo sapiens
ctcggcaattctccttcccaaacgtgtttcagtttacctcctcagtaagctggggcaattcgggcacaattccgcttttataaagaacgttccctggccgggcagggtggctcacgcctgta

SEQ ID NO: 394957 - DNA, 122 bp, Homo sapiens
cacactgagttcggagccggctaagaagttacctgcgtgtagttgtaagcgtcaaacgagcgggcacagagcagccagcacccttgaatcttacgaacagtcggactgggtcccagagaggt

SEQ ID NO: 394958 - DNA, 122 bp, Homo sapiens
gccatctcccttcttccctctggacgtgcccattcgggacacatcacgtgagcaggatcacgccgtccgctccgtgtgcctggcttttcacttagcatgatgtctccaagtctgtgtcgccc

SEQ ID NO: 394959 - DNA, 122 bp, Homo sapiens
cggggctgcggggtccgcggtgcactctgtaagttcaccgccggtcgggtccggccgccgcgctgtccagctcctgagaccttgctgtccgccggtctgccgtctgcgcgcctcacggtgag

SEQ ID NO: 394960 - DNA, 122 bp, Homo sapiens
ggtcatgcctcattctacaaaattttgttgtgcgtgaagctttgggtgttgttgagcacacgcagatgaaagacggttcctgtctccaggggcttgtagtagccagatgtgtgagagccgag

SEQ ID NO: 394961 - DNA, 122 bp, Homo sapiens
gaattaggagaccaaggcttaaagctgggttctgttatttgctgttaatagctatgggagcgtggacagtattaattcagctctttgtgccaggcaggaagctaaatgttttaagggcatcg

SEQ ID NO: 394962 - DNA, 122 bp, Homo sapiens
gcagcttaaagtaaacagtatctttggatcatctctatccccagctactgttaaatgacccgcaattatgatgttttctgactccgggtctcgggcctccggctggtattcctgcccctttg

SEQ ID NO: 394963 - DNA, 122 bp, Homo sapiens
aaagttaagcatttctttatgaaagaacttctggaaacttccatgtgataatgtgcattgcggatctctaggaaggaaatgatagtgtatagtattttctaaatacttgtgattcctaaagt

SEQ ID NO: 394964 - DNA, 122 bp, Homo sapiens
gcagcgaaacctgaagtggaccctgtggaaaatgaagctgtcgccccagaattcaccaaccggaacccccggaacctggagcttttatctgtagccaggaaagagcggggctggcggacggt

SEQ ID NO: 394965 - DNA, 122 bp, Homo sapiens
ggacttctgctgtcactcaggatgcagggggcggggcctggcgctccacccaatcagagtcgccggggtggggcccggccaactgtttatccgcgggtcacattgccgttcgcctcagtctt

SEQ ID NO: 394966 - DNA, 122 bp, Homo sapiens
gccggccgggtggggggagggcaggggccctcgacccttgaggaccccaggtcctaagcccggactctccaaagatttggaaaactttacaaaaccaagtggaatcaagcggataggctcag

SEQ ID NO: 394967 - DNA, 122 bp, Homo sapiens
tgagactgcgggctccttggggtggggccggacttgatctcttgggatccccactgggcccggcaaaagtgggtactgaccctgagccgcagcgctataaggggaagtcaggctgctgtcct

SEQ ID NO: 394968 - DNA, 122 bp, Homo sapiens
gccgacagcaggctgccctgccagtgttcctgccaccactgggctggctgccctgagccacggggcacaggccatagccccggtcttacacaatggaccctttcccagaagctgaggctgtt

SEQ ID NO: 394969 - DNA, 122 bp, Homo sapiens
tctcagacgatgggcggccaggcagaggtggtgctagacgtctaggtggcacttcctagacggggtggcggccgggcagaggctgcaatctcggcactttgggaggccaaggcaggcggctg

SEQ ID NO: 394970 - DNA, 122 bp, Homo sapiens
gaaagaagagacaataaagtgatctttctttaccatctaccaaggaccaggtggtttacacgtcagttcattttcaggaacacagcagcgctctgaaaactacagagcttcctgggcgtagg

SEQ ID NO: 394971 - DNA, 122 bp, Homo sapiens
cagctgctggcccgggtgctaagcccctcactgtcggccggccgctccgagtgcgggacccgccaaacccacgcccggggaactctaccagcaagcgctgtgcgcagccccggttagccccc

SEQ ID NO: 394972 - DNA, 122 bp, Homo sapiens
ttacctctaatctcccttctgccctggggctcctcttcctgtgtccccgccacgatccctcgtctccacccacgccctgtgtcctgtttaagttaagcctttgcgtttctagggcttttccc

SEQ ID NO: 394973 - DNA, 122 bp, Homo sapiens
ccacaaaaccccaactctgggctgagccatcatctgggtcctatggaaagaccaccaactcgacggaaaaggccatggagacccagtgcggggtcagtggagaaaaggccgccgacgtggag

SEQ ID NO: 394974 - DNA, 122 bp, Homo sapiens
tttttgatccttgattggttgaatccctggatgtggaaccctcagatacagggggctgatcgtatgtcactaagagaatcagaaaatgatgtaaaaatcaaagaaaaaatctatcttgctaa

SEQ ID NO: 394975 - DNA, 122 bp, Homo sapiens
aatgtatccaaaacataaattgaattgatgaaaggataaagggatagatgggtgacaagacgtatgttcaagcaataaagcaaactattgattgtagaatctaggtggtggcttatgggtgt

SEQ ID NO: 394976 - DNA, 122 bp, Homo sapiens
tattgggagtcatatcatcctctctccctgtggatattaggaagagtatcacagggctgtcgaaacccccagcggtactgggagtaatatcatcctctcgccctctggatatgaggaagatt

SEQ ID NO: 394977 - DNA, 122 bp, Homo sapiens
taaaaagtcaagttttgttgccaacttttccccctctgaacgtgcaaaagaatgattttccgaagctgtggaggaaagaaagaactctccttctgaacatctcaggtggtttatgctggaaa

SEQ ID NO: 394978 - DNA, 122 bp, Homo sapiens
gcccattaaaagcccacattgtaatgccttggaggggggctgcctttccctgcaataccccgggaccgtcggtaaagcaggctttgtcatcgtctgcgttttcgccgcggcgctgtcctgtc

SEQ ID NO: 394979 - DNA, 122 bp, Homo sapiens
ttttcttaactcacaagttaaacaaaggctgcaggctccatgcggagctcaggcacccagcggtgaccgatccagaccaggtcctcccggaagcccggcctgcccgacagagccttaccaca

SEQ ID NO: 394980 - DNA, 122 bp, Homo sapiens
tcctgggccagccagaggacccccatgaggcggcatgcaggcggggagcaggccacagaacgcaggtaaggagaccttagcctagagtccttggggtctgtcactggccaccctcgcatccc

SEQ ID NO: 394981 - DNA, 122 bp, Homo sapiens
ctcctttccagagacaaaacaggaataatagacatcattaaatatacatagggccccaggcggtcggcgtggtgggctgggcctcccttccccataacactgagctgctctgctgggccaac

SEQ ID NO: 394982 - DNA, 122 bp, Homo sapiens
cttcctccagtcagcctggatcctctcatccggcagaactgtcgccttgcttctctgaagcggtgaatgccctggggctggggacgcacaggctcgctggcccacaaccaaagccgcttcct

SEQ ID NO: 394983 - DNA, 122 bp, Homo sapiens
gaaaacaaagacctgaaagggcacataaccctgagctttcaggatggtcttaaatcaggacgcaggtcaaagattcccaaattaattcaggaagtaatggtcacgcatttctcaaacgcaga

SEQ ID NO: 394984 - DNA, 122 bp, Homo sapiens
catctggaataactgccaaacgtccagagagagatcccggagtgacttcggtattcaaggcgaagagatctcggaaagccagaatatttgcaaggactaggaaaaagatgcgggtttttttc

SEQ ID NO: 394985 - DNA, 122 bp, Homo sapiens
ctctaaggcgcttcttttagccaagaaagcgttctttgcgtgctgtgacgtaaaaagcagcgccggaagggagagggcggaacttccggctgagccccagcgaccgctctggtcggctgtgt

SEQ ID NO: 394986 - DNA, 122 bp, Homo sapiens
ctgttcatctttttctttgttactggattcagagtgaagccaccactcgctctcgaatcgcgcggacgctgggcctgcgcaggcctgttcacagcagctgcatcccgtcagtgttgaagcca

SEQ ID NO: 394987 - DNA, 122 bp, Homo sapiens
agactgtccatatagggttctttttgtgattctttattataatcccctgaggaagtcagacgagcctggggttactggagacagtgtcttgcttggcgtagttatcatccacaaatcatctg

SEQ ID NO: 394988 - DNA, 122 bp, Homo sapiens
gcaaaactccggctgtgggactctttccaggatggggtctgcctcaggcacaggcagcagcgtgatgtaccgaccgcgtccgcggcctcgaggcttcctgctccgctccagtgcagtcaggc

SEQ ID NO: 394989 - DNA, 122 bp, Homo sapiens
catgagccccttgccccttcttccttccctcctcctttctactggctggggacacagacccgatgaatatggctcaagcagccatctaggaccacaaagcagcagcctaagtctgcaggaac

SEQ ID NO: 394990 - DNA, 122 bp, Homo sapiens
ctgaaaaaagaagagtgattggttcccatatcactggaaatgttatggggtctgacttttcgaggcaagttctagaattgggaggtgacttcccaactcccaagaattccctatctatggaa

SEQ ID NO: 394991 - DNA, 122 bp, Homo sapiens
tgttgtttatcatcactatattctttccccagggcgggggttcagctgagcggaggaccacgcccagtgcttgggcagaggcttgggctgtgacgctggctctgggtgtcacctggttaagt

SEQ ID NO: 394992 - DNA, 122 bp, Homo sapiens
acaggtgcgcgcggggctgtttggggccggggtcgggatgggggtcagggcaggtgttaccgttgggatcgagatcgggaccaggtttaaggttgcgatcgggtcgggatctggggtcgccg

SEQ ID NO: 394993 - DNA, 122 bp, Homo sapiens
atcccgcactagctcggcttgctgagaacccggccaaggcaggtatcaaatacggtaacccgagaagagaggaatttcgacagccccgtacacaaggagagcatgatccagcacccggcgcc

SEQ ID NO: 394994 - DNA, 122 bp, Homo sapiens
ctgagaggagctcgcctcggccccttggttggggggatgggagcgtctccggaaggccctcggccgagcagctgggcctgcacccctggtcccttccagttcgtttctgctgcggcggcaag

SEQ ID NO: 394995 - DNA, 122 bp, Homo sapiens
agtgactcatttacaacagcctcttggctgactcccacaaatggctaaccatagccatcgcggatggattttactagcttaactcagacagcagcgcatttcaaagctcaggagtaaacggc

SEQ ID NO: 394996 - DNA, 122 bp, Homo sapiens
tttcagtacaagttgccacagaaggagggtttcagattcaaccatgcccatgtgcaagggcgctggtccctggccagggcacataatcagagaagtgacgcggccatgccgaggtatacgtg

SEQ ID NO: 394997 - DNA, 122 bp, Homo sapiens
agtagtcgccccttgcgtccctccccctccggggcgcatcgccccttgcgtgcaaagccccggcaccgccacgagtctcgcctcgccctgcacaggtaaacagccgctggccgccggccggc

SEQ ID NO: 394998 - DNA, 122 bp, Homo sapiens
gtggaagacttcacagcctgccaatacccaggaaaggtggtcagagacctcgtgggccaccggagcccccctagacaccttcctggagagacagttgggagcagcaggtggtgggcggccag

SEQ ID NO: 394999 - DNA, 122 bp, Homo sapiens
ttcatctcctcgatgttggtgatcatgacaatgatgggcgtgtgctcctgccacaccatgcgccagaagtcggcgaccgtgctgacgatgggtccctgagtggcgatgtacaccttctcctc

SEQ ID NO: 395000 - DNA, 122 bp, Homo sapiens
ctgctccgggcgtgggggatgcaactgatgggatcatacgcgtgcatctgtgagtgtacacgtgcgtgtgtgaggatgtcgcctccacactgcatggatgtggcgtgtccgtaagtgtgcac

SEQ ID NO: 395001 - DNA, 122 bp, Homo sapiens
ccgcgggccgcagcccccctgccggggagggcccagaggcagccccgggaagggcgcgcgcggcttcgccagctacaaatactgagcggaggcccttgcggtggtggccccgaccccccggc

SEQ ID NO: 395002 - DNA, 122 bp, Homo sapiens
gcaatttgcaagtggagatttcaagcgctttgattccaatagtagaaaagggaatatcttcgcataaaaactagacaaaatcattcccagaaactgcatagtgatgtgtgtgtttaactcac

SEQ ID NO: 395003 - DNA, 122 bp, Homo sapiens
tcagcccccttctgggcctcagcttccccatctatcccaaggagccggggtaggcctgggcggcgcggggacccccaccgcgggctcgccgactccgcccgccggaggcccctcccgcgtcc

SEQ ID NO: 395004 - DNA, 122 bp, Homo sapiens
cgcgcgttctctcccctcccggtggcaacagggctttccgcggggccgcgccagacttttcgagaccgtcaattggtcgtagtcccggccacccggcagccaatcaacaaggggaaaggtga

SEQ ID NO: 395005 - DNA, 122 bp, Homo sapiens
tggctgtctcctggcgcctgccccgtcagacaggggccccatcccactcgctaccctgtccggtgagtttgagccctggccagtagatacccatcatctcgccttggcccccctcaggaaca

SEQ ID NO: 395006 - DNA, 122 bp, Homo sapiens
accccggccacccagtcactggccaatgggctcctaggaagatcaaatgtcactataacacgagggtgtgagccgggcgccagtgcctgcagccggtgctgtccacagggagctccagccct

SEQ ID NO: 395007 - DNA, 122 bp, Homo sapiens
ccactttcggccggcacctggtgaagaacatccggctggagcagccttgtagctgcaaagcgggtcagaagaagtgcacctgccaccggcctggcaagaaggagacgtggctcttctcccgc

SEQ ID NO: 395008 - DNA, 122 bp, Homo sapiens
gttggtgagaaagttggcaggagctggtcaggcaagaattgatttcctgagtgtccactgcgtgctcctctctgtgggaggcacaggtagatgcacggtcacagctccactgggcatgtgca

SEQ ID NO: 395009 - DNA, 122 bp, Homo sapiens
tgagccctttctaatgaggcctgacctggggcttcccgctctgtcctcgtgagggggagccgctccactgggtgaaaataccggcacatcagcgtcatgggagccctgccggccatcagccg

SEQ ID NO: 395010 - DNA, 122 bp, Homo sapiens
actgggctgtactcgccccttctcggccgccgtagtttttttttttttttaaagaaaaaacggttacccagcaactagaaaaacaaccggaaccggcggcaccagctcggagagaaaggagg

SEQ ID NO: 395011 - DNA, 122 bp, Homo sapiens
agatggcggaggggcaggtcctagtgctcgatggccgaggtcacctcctgggctgcctggcggccatcgtggctaagcaggtgctgctgggccggaaggtggtgatcgtgcgctgcgagggc

SEQ ID NO: 395012 - DNA, 122 bp, Homo sapiens
cgtgggccttgagggaaccggggggcaagacacccacccagcattcgcggaatatttcctcgaattatttcggggaggggtgaggccggggcagggtggggccttcttcggagggggcgcgg

SEQ ID NO: 395013 - DNA, 122 bp, Homo sapiens
taatgagcagttcagggactgcaggccaatttattcgttgttgcaacaatgagcacctaccgtatattagatctgtaccgggtgagataaaatcaactgtctttacccagagaggacttgct

SEQ ID NO: 395014 - DNA, 122 bp, Homo sapiens
cggtaaatatattaaaaaataccaaatacatgtatgtagttgtccttagcaacatgtaatcgtctcattatttgtcattagggaaatgcagaccaaaactaaaatgagatatcacttcacac

SEQ ID NO: 395015 - DNA, 122 bp, Homo sapiens
attcattactcattctacaaatatttattgaccccttttgatgtgcaaggcactatcgtgcgtcccctgagagttgcaagtatgaagcagtcatggatcatgaaccaaaggaacttatatgt

SEQ ID NO: 395016 - DNA, 122 bp, Homo sapiens
tctgctcaccttggggtttctctgactgcatcttgtccccttctctgtcgatctctctctcgggggtcggggggtgctctctcccagggcgggaggtctgtcttccgccgcgtgccccgccc

SEQ ID NO: 395017 - DNA, 122 bp, Homo sapiens
gcgttccagggacgccaagatccgtggggcccagcgcaggggctgctggtaaggcactttcgtctgtgggggcactcaggtccccctccgcagttgctccgttttttttccttccacaggtg

SEQ ID NO: 395018 - DNA, 122 bp, Homo sapiens
cgggcgcggacgggctacagagcgtttaaactgtgggtggaatggttcccctgacctagccgggaggacactacgggctgattctgcccctcccagtgccttgagcttactgccgctcgctc

SEQ ID NO: 395019 - DNA, 122 bp, Homo sapiens
agctatttggtagtgtcttgttatttctaggtgtaccttagttaaagaggaaaaataaaacggaaaaaagcttggaaatcagtgatgtgtagttatttggcaagttatacataatcagcagc

SEQ ID NO: 395020 - DNA, 122 bp, Homo sapiens
tgttctcgccccgctgccccaggtgcagggcatccgcaccgagttcacggtggaggtgtacgagacccatgcccggatcgccttggagaaggtgagctggcctctgcgggcctccccagccc

SEQ ID NO: 395021 - DNA, 122 bp, Homo sapiens
aagtttggtgatcttatgtcctgcttaggcgcagcgttggagaggttggcgctgcaatgccgtcaataacccccgatgaccattagagggcacactgattccacagcagtctgcaccggggg

SEQ ID NO: 395022 - DNA, 122 bp, Homo sapiens
tttgctctctttccatctccttcacgaatttccatactacatcagaccctcaaatgttgacgttccctacagtgttcattctggtctctttccccttccctcttccctccgcttccctctat

SEQ ID NO: 395023 - DNA, 122 bp, Homo sapiens
ctcgctcctacggtaagagcggcatcacctccgcgctcgggtgggcagtgtggaggtcgtcgagttctgacagaatttcgaggatggatcgggacgagggaggagagcggtcgtcgggatgg

SEQ ID NO: 395024 - DNA, 122 bp, Homo sapiens
ttgctgcagttcagactctctggccaggcaaatccaaattccttcaggacgggttcacagcgtctcttgactgaaagacacatgccgccgcatgggccaatggggatgttgatcttctctgt

SEQ ID NO: 395025 - DNA, 122 bp, Homo sapiens
gctcatgtcccagctgcagccccacacctggtgtgaatcccagcaccaccacctattggccgtgtgctcatgggcatatgaatacaaggcaggccagcccccaaattcgggcttagcccaga

SEQ ID NO: 395026 - DNA, 122 bp, Homo sapiens
agggatgggaatgtttgttcataaataattagacattttctatagatatttgacattctgcgaaagcaacaagcaaactgaagaccaactcctatgagaaatattatgatgtttatgtaata

SEQ ID NO: 395027 - DNA, 122 bp, Homo sapiens
agcggggtgtggctcccctccaaagacggtcggctgacaggctccacagagctccactcacgctcagccctggacggacaggcagtccaacggaacagaaacatccctcagcccacaggcac

SEQ ID NO: 395028 - DNA, 122 bp, Homo sapiens
agtttgtaagaccattttcctgattctcttccccacggttgcggaggagcaggtcagggccgccatgagggcaggatcccggtgccggcgccggcaccctgaggacgttggtttgggtcagg

SEQ ID NO: 395029 - DNA, 122 bp, Homo sapiens
aggagggaactcgggaccgcagaagctgctgcgcctctgggagcctgggtgggcctgggccgggagcccgggagctgctcccgaccccacgcaggcccgcgctggggcagccgcttcggcgc

SEQ ID NO: 395030 - DNA, 122 bp, Homo sapiens
agaatcatttcaaaggcaagagattacaatgatatttgccttgttaaggctgtgtctatacggtgccagcaaacccttgattaggttgattcactcaagcaaccagtcgatttcgtgaaaca

SEQ ID NO: 395031 - DNA, 122 bp, Homo sapiens
ggagacgacccccgcgggcgctcccacccccatctcgcgcggactcgctttaggtctcggcgagtttctctgatatgcgctcgcgggggtgctgccatttcatctcttccgcgcgggctcat

SEQ ID NO: 395032 - DNA, 122 bp, Homo sapiens
agaggtcacggggctccttaggtcacaggcggcagggccagagaaactcccccgcccctacgtttaactcgcggaaacaagggcccagagagcccagacgccagcccaaggtcacacagcga

SEQ ID NO: 395033 - DNA, 122 bp, Homo sapiens
tcccgccactccagtcacttgtgcccagggtctggggagtcccagtctgatggctggacccgcccctccttctccacgcagcagtcacctaggaggctccagagccagtagccagttctatt

SEQ ID NO: 395034 - DNA, 122 bp, Homo sapiens
taccagcatttgcattttacttttagatactaaagagtgatatgtcacctcatatcttagcgaccactttgtggggttgtaatacactctgtattacacaatacaccagaataaggaagctt

SEQ ID NO: 395035 - DNA, 122 bp, Homo sapiens
cgctgtcactcagacatggggggcggggcctagcattccatccaatcagaggcattgtggcgggtccctgcccactgttcctccagacactgagggggtcgcattccttacctcacctttgt

SEQ ID NO: 395036 - DNA, 122 bp, Homo sapiens
tacagccctatgagcccgcggaccccgccctggactggtggtgaggcgccctcgtggccgcgggactggccccggggggccccctggatcccaggccagcgctttgctctcctgctccgtct

SEQ ID NO: 395037 - DNA, 122 bp, Homo sapiens
cttctctgcacgcgtgtgctgcttcaatgtcatttggtcggcggttttcactagtgattccgtgtcctcggtgtttgcggaaatgtgctaccccaagactggggcgaggctaaacagttttt

SEQ ID NO: 395038 - DNA, 122 bp, Homo sapiens
tgataaacgtaattaattgaaattccataaaagctagttttcgttttctgagttttcagtcgttcattcgcatagacactccctccaaagcctaaaattaaggtctggccagcaacaaaaga

SEQ ID NO: 395039 - DNA, 122 bp, Homo sapiens
gacaccttcagcttttttacattaacaggcgaggaactcatggtgagggccccgattcaccgctaggcgctgcctcaaactcggctccgctcactcggccactggtggcggctgctgcggct

SEQ ID NO: 395040 - DNA, 122 bp, Homo sapiens
ctccctggacgaacatgttcctcccatgacgctgtcaccactccctggccagcatggggtcgttccggccttgatttttatatctgccattttgaggctttaagaatgttatttgtccctgc

SEQ ID NO: 395041 - DNA, 122 bp, Homo sapiens
tgggctgtgctcaccgtgcaggcctatgcccggggcatgatcgcccgcaggctgcaccaacgcctcagggctgaggtgagggagcaagtccatagcacccacagctctgacccctgggcgag

SEQ ID NO: 395042 - DNA, 122 bp, Homo sapiens
tgtgtccccagcctatgctatgtgcccagggctggaggagagctgtaaagggaaggcctccgggactacactcgtgaaaccatcccctgtgggggccctgtcctcacagcccaggccccttc

SEQ ID NO: 395043 - DNA, 122 bp, Homo sapiens
ataagagttgtcgaaaaaagttccttctcacccaatcaaaacaaagcttccaagatacagcggttgagtacagccgttataaaagggaggcgaaggcccattccgccattttctctttgtgg

SEQ ID NO: 395044 - DNA, 122 bp, Homo sapiens
caccgcacaatcgttggctacttcagttattctatttcacctgaagactttatttgcagccgagcctcccctccggagcagggcaggccccatctgtcggacagtttgctccagcgtctccg

SEQ ID NO: 395045 - DNA, 122 bp, Homo sapiens
ggtaggcgaacgggtcgccggcggccgcggccaggctcagacggccctcgtgcagcagcccgtaggggtcagcatagaggccctcgcctttcaccagcaccatgccgcccgccttgctcgcc

SEQ ID NO: 395046 - DNA, 122 bp, Homo sapiens
gcaggcccgccggggtctagaggggcggctgccgtgcgtccagcctgtgcgcaggcctttcgccgctcggcgccccaggcagcctcagtttcctttcctctgtttgcgccccagtgaacctc

SEQ ID NO: 395047 - DNA, 122 bp, Homo sapiens
gacccctcacctggatccagtcgactgcggggcttgcccctcatgtgggctggcctccatcggccacgtccaaagctgtcactgctactgcttcaggctcacatccccccgacctgatggcg

SEQ ID NO: 395048 - DNA, 122 bp, Homo sapiens
ccggctcgagctgagctcctccactggagacccggggctggctgtgcgccgacaggcaagcgcatctgctaccctagagccggccacctgggtcccccgggaggagagtgagaggggacgct

SEQ ID NO: 395049 - DNA, 122 bp, Homo sapiens
ggaagtgccctgcggtctgtttcccctagcagagactggccttgtggcggaagacccccgcgcgtagggagggccggtgcggcgactccgggcggggcgcgctgttggtgtccagggcgcgg

SEQ ID NO: 395050 - DNA, 122 bp, Homo sapiens
cgcgcgccccgacggacggagagcactcgcacgtccctcctctccggcccagccccggcccgcagtccagatccgagacccaaactccgcccgccccgccgcgcgactctcacggtccggcc

SEQ ID NO: 395051 - DNA, 122 bp, Homo sapiens
tgattggctgctgatgacgcaactgggagggctgcgctgtgataggtggtccctcgggggcgtggggcgcaagtcttgagattggcaggggcaggtggctgctgcagagggaagtcggggtc

SEQ ID NO: 395052 - DNA, 122 bp, Homo sapiens
cactgccgttcgctcagagccattgtgcacgtttgtttctctgatcactaacagcctgcacgtttccagcgtttccagtttccagcgttgtatggggatttccacgtgtttcagtcgcttat

SEQ ID NO: 395053 - DNA, 122 bp, Homo sapiens
acatggagttacaaatatactttccaaggctgtcatcagaaatgcaaaactactcaccttcggcaacaataacaaaaaggaaacaaaacaaaaaactgaagaacaaaagattatatataatt

SEQ ID NO: 395054 - DNA, 122 bp, Homo sapiens
ttattacagactgctttctgctttgcattttcgttagtaattacaaaggtctttttaaaccgtaaatgccttgagacggcatggaccctgtcttatccctgtagttccaggaccttgcacat

SEQ ID NO: 395055 - DNA, 122 bp, Homo sapiens
ttcaaatgtgatgccgcagaccctcgctctgagtgtcacagttcttaaaggcagcgtgtccggagtttgttccttctgctgctcggatgtgtttggagtttcttccttctgatgggttcgtg

SEQ ID NO: 395056 - DNA, 122 bp, Homo sapiens
accagcagccccgtttactaggcgaccacagcacgcatgcgttcagcgcacctccgccatcgactactggaagaccaggcgcacacgtcactacttccgcgcgcccccattggctggtcttc

SEQ ID NO: 395057 - DNA, 122 bp, Homo sapiens
tatccagcgctcccgttgggtctctgagcgtccaaagtttgggctgagcccacggcagaacgtgaacaccctctggcactgggggcctccgcggtcaacccaaatgccaccggcgtgctgag

SEQ ID NO: 395058 - DNA, 122 bp, Homo sapiens
aggaagatgtgtctgtcggtcagtcctctccgggtcgggagagattggtgaggatctggacgaggccagagcttcatctagcagtcaggtcctgtccctgaagttcctggtgacaagtctac

SEQ ID NO: 395059 - DNA, 122 bp, Homo sapiens
gataaacgctttttgttacaacacatcacagataacgcaacttcgcctgactgaacccggcgtggggagactgcagagatggcgctctgcagccaaaacaaagggtgggggaggggaggggc

SEQ ID NO: 395060 - DNA, 122 bp, Homo sapiens
gagccttcaggctcatcatgttgctgtcctggaggacgatgccctgggtgatgttgtgggcggagcccccaaaacggcttgtgggtcccacgggtgtgaccagcgggtccagctggtagctg

SEQ ID NO: 395061 - DNA, 122 bp, Homo sapiens
tgagtccagcgccattcccagcattatgcaggtgaggacactgaggtcccggggatgaagcggcttgtccatggtcaccctggcaaaggctaggactggaactggaacacagatctgctggc

SEQ ID NO: 395062 - DNA, 122 bp, Homo sapiens
gaggcagggctgaccacaggggtgggttcaggttttcctgcatccttggcctccttcagacgacagcacatagttctgcttgtggcctttgccagcgtgccgagcactgctgttgatggctt

SEQ ID NO: 395063 - DNA, 122 bp, Homo sapiens
tttgcattttagctttggaactagactctggataaatattccagtggaggtcaattttcccggttgtttccagcttctaaccctgtacctctcagtttatcttttcatttagacatgtccca

SEQ ID NO: 395064 - DNA, 122 bp, Homo sapiens
ggggggggggagccgcctgaacacgggaagaagcgccgcctctgggggtggcagctacgacggacagggaggatggaggagtgggccaaatgcagtttcagaccaactgacgaccctaactg

SEQ ID NO: 395065 - DNA, 122 bp, Homo sapiens
tcacagtagcttggtaattatatcagcctgggggatggcagacagtgcacgtttgcacttcgaccttgagctccttttatagagtcaaacaggtctggaccctccgagcaaggatgattcat

SEQ ID NO: 395066 - DNA, 122 bp, Homo sapiens
cggatcttccccacagggcagggctgatccagctgtgggtctcttggttccctctttcagcgcctgcaggatgaaagctctctgtctcctcctcctccctgtcctggggctgttggtgtcta

SEQ ID NO: 395067 - DNA, 122 bp, Homo sapiens
ccccttcaggactgcagcactcatttctcttgatgctggtagcgtttcctgctgatgttgcgcacttaaggctctctcctgaaattgccttagaccatgaggaactgcctcactgacggcta

SEQ ID NO: 395068 - DNA, 122 bp, Homo sapiens
aaatccccgagtcaggagagagccgagtggcggatggcgagtgggggaagggagaaagaccggtaggagactaaagaacaaaagaagaaatccaagaaagggaaaaggaacgctgggaccct

SEQ ID NO: 395069 - DNA, 122 bp, Homo sapiens
aaaaaaagctaaccttctattagaaaaggggacaggggaatgagtaaacttcttttattgcggacaaatgtgcacatagccgctagtaaaactagcctcaaacaggatgctcatagcttaat

SEQ ID NO: 395070 - DNA, 122 bp, Homo sapiens
gaattgtcttgaagctccatgtgcataacaaacctactgtgcttgctttaacccatgtcccgttttgcaccgagaatactgcactggcagtgagctgcactttttttttttctaaatgggaa

SEQ ID NO: 395071 - DNA, 122 bp, Homo sapiens
cagccagagcgggtcgcactgttagttcctgtattttctcctcctgcctctggtttcttccgttccgttctagctgcctgaagacccagcccgacagcgatgcctgtcagcccgcgtcgccc

SEQ ID NO: 395072 - DNA, 122 bp, Homo sapiens
gggggagggggcagctagctgcctcttaaagggatagctctgcccttgggggcagtgactcggccgaagaggactcctagatgtgtccccgggagcttcggggatccccgaggggaccatgc

SEQ ID NO: 395073 - DNA, 122 bp, Homo sapiens
ccggcaccactcaaaaagtctcagcagtcgttgcttttcaatttgctcccctaacgagaccgcataggtaaacagacctccctctaacccccgaccgaaaaaaaggcttattttcatgcacg

SEQ ID NO: 395074 - DNA, 122 bp, Homo sapiens
cgttagcgcaacttccggtattgttgcaagatggccgcgcccagtgatggattcaagcctcgtgaacgaagcggtggggagcaggcacaggactgggatgctctgccacccaagcggccccg

SEQ ID NO: 395075 - DNA, 122 bp, Homo sapiens
ggaggatgggagtcccatcggtgaggggtctgggagggatgtgcacatgcctgtcaagcccgtccgggcaaggggctaggggctaataaggtgcgaaggagggggctgtaacggaaggagga

SEQ ID NO: 395076 - DNA, 122 bp, Homo sapiens
cttttgtttctgctgtgcatgacctgtgactcttctctttttacctgcagccttcgtgtccgaggccagcacaccaagaccactggccgccgtggccgcaccgtgggtgtgtccaagaagaa

SEQ ID NO: 395077 - DNA, 122 bp, Homo sapiens
ttcctgggccccagaccagctctctctttgggttaaaaccccggcgtcccggagctgaggcgcacgtggctatgcttggggaggagagggcggggccggggaggaggcgcttgcaagtctgt

SEQ ID NO: 395078 - DNA, 122 bp, Homo sapiens
ttcccctgtgcctcgccagtgcctggcagacagaactgtgggggactctcaccaaattcccgtcaggggacggagggattattaagccgtgtgcctagcaatgcaggccattgtggcaaact

SEQ ID NO: 395079 - DNA, 122 bp, Homo sapiens
gagggcctttcccgggtcagtcaggctagcgagccggagcgttctgtctttctgcgcacgcgtagagcacacaggccggctctggggctctgcgctcctcggattacgcatgctcagtgcaa

SEQ ID NO: 395080 - DNA, 122 bp, Homo sapiens
gaggcagcagcgcaccgtgaccctggcttactacggtaagaaagcggagaccttttgcttcgaggcggttggtggccagtagtcttgatcgacaagctcaggcctctgaactaagcagccgc

SEQ ID NO: 395081 - DNA, 122 bp, Homo sapiens
gagcggttttatccctccggccggcaggctgggcgcgcaggggcgcgagcccccgcccggcgcgcagcagcaccatgggcacggtgctgtccctgtctcccagctaccggaaggccacgctg

SEQ ID NO: 395082 - DNA, 122 bp, Homo sapiens
gggccgaggctgaggatgctgcagcaggggacaggtggaagatgttgcttgggcgtcgcacgcttgtaactcggatgactgaatgcttcatagatctcattgcgcagagtgggcgctcggtc

SEQ ID NO: 395083 - DNA, 122 bp, Homo sapiens
tcgggaaggacaattgtcagggcttccctgtgtggtccttttgacaaacacaggatatcccggcagggcaggaaaggtccatgcaggatgtgtgtccaacctgcgttccacctgggagtttc

SEQ ID NO: 395084 - DNA, 122 bp, Homo sapiens
ggccttcaggtgggaggaattctctgctccccaggggagtggcagcctctgtattccatccgggccttcagtgaattccgcaaggcccacccgtgctagggagggtagtgggtttgagtgac

SEQ ID NO: 395085 - DNA, 122 bp, Homo sapiens
tgacctcatgatctgcccgcctcagcctcccaaagtgctgggattataggcgtgagccaccgcaccaggccactgggggactttttaattcattatttcaaagcctgtataattatctgact

SEQ ID NO: 395086 - DNA, 122 bp, Homo sapiens
taaaaataaagagatggcgtcacttgaaaccaatcccagtgaatgaactcagcggagccccggggaaaggaggagacaggcgagggcagggcggtgggcgccgggcggggccgcgcgctcgc

SEQ ID NO: 395087 - DNA, 122 bp, Homo sapiens
acaagggtaggagtaacggaatctcggtttaaccaaattcgattcagtctgccggaaaagcggctgccgtatttcagtgcttttctgaccctcttctgcacaaactatggggacgacagtgt

SEQ ID NO: 395088 - DNA, 122 bp, Homo sapiens
catgagccgagcaaaccgtcctcccatggctgcttcctgtaaaccggctcctaaggccagcgggcgtttgctctcctgacggcacaggaagtcaggctcagcgaattccagctcagagcggg

SEQ ID NO: 395089 - DNA, 122 bp, Homo sapiens
ggaagagcaggaagagcagggtgagcagcaggtcaggcccaaagtccccagcccagggcccgagctcgaccagcgtcctcatctccaggaagcaggccccgagctgcaccgcgcccaccgcc

SEQ ID NO: 395090 - DNA, 122 bp, Homo sapiens
aaagaaagagagagagagagagagagagagagagagagagagagagagaacgaacgaacacgaaccagagaaccacgtagcctactgagcatgcccaggcccctgctagacccatggaaagc

SEQ ID NO: 395091 - DNA, 122 bp, Homo sapiens
aacccttttatgagtaggaaggacagggactattgcttgtcttgggaacgacttgtgtcccggtcctgatacactccttgttcattaatctacatgagatcggccaagtcattgagcctctc

SEQ ID NO: 395092 - DNA, 122 bp, Homo sapiens
tgctataggaatgtataccagggagacaaactatctggggtgtcaaatgcaattacaaaacggaacacccttaccctgaaacaggagcaggggaagggagagtccccagaagaagtgtcctt

SEQ ID NO: 395093 - DNA, 122 bp, Homo sapiens
cccctcggctccacctcgcatggacaaagccaggacgtgcaccaggagctgactggccgccgaggccacaaacaggctggagtctccctgcagggagaagatggtgtcgaccgcacctgggt

SEQ ID NO: 395094 - DNA, 122 bp, Homo sapiens
cagtccagagcagccagaaccaccagagctcatagtagtaggtgcagcagccagtctccccgcagcagtgaacactctcacagaggtagggctggttgttcactcctgggcacagctctcga

SEQ ID NO: 395095 - DNA, 122 bp, Homo sapiens
aacaggcagactccacagctcccgccaggagaaaggaacattctgaggtatgctctggggcgctggtggtaccggagctctctcctgaccccagacccagaatctgctccgtggaggctgtt

SEQ ID NO: 395096 - DNA, 122 bp, Homo sapiens
aggcctccaggctcggtgcgcagagccgggagcgctcctccagctccaggttgggggagtcggggtgggaggaggttcgggaaatcgactgatttagaggctgggggtgagtagcctcgatt

SEQ ID NO: 395097 - DNA, 122 bp, Homo sapiens
gtaaccatgttgtgtcatggaaagtggggaactacattacccagaaagctctgctttaaacgacagccggtcagagccagtgagcactcggaaagaaggcatttccacgtgtgcacgtaacg

SEQ ID NO: 395098 - DNA, 122 bp, Homo sapiens
agttttactcatttggatatattaagatgcacacagtgaagcaaattaaactccactttacgctggaatgctttctttagcatgaaaataccaggtccttggatttgggattttaatttcct

SEQ ID NO: 395099 - DNA, 122 bp, Homo sapiens
ctttcgtgtgaatgctcgtgaggggccatccttagagtggaaatgctcctgaggctccagcgaatcaagaccctcagacccccgggctgtccccaccccatgaccacatgttccgcaggcac

SEQ ID NO: 395100 - DNA, 122 bp, Homo sapiens
ccccacgaggaggaggctgccctggggtcagaaactccgacggaaatgaaggggagggggcgtaggttccctggcacagctcggcctggagaggcagcctgggggcccaaactcatctaggg

SEQ ID NO: 395101 - DNA, 122 bp, Homo sapiens
cctccctagggagaggctgcctttctccccttctgctcttcctcttgtctgactctatttcggggcgactgcctctttcctctccagcgttcggattctaaatctgtcttccaagagagacc

SEQ ID NO: 395102 - DNA, 122 bp, Homo sapiens
tgatcaaaaagaagaaactggttatgtgaaggtacgaatacttgactgagaaaggcgtctcgcctacggcttgtttacgcacagctagtgagagcttgcgtggccccagcaagggcacagat

SEQ ID NO: 395103 - DNA, 122 bp, Homo sapiens
aggagccacgggtgcaagcccgtgtgtctggcctctttcctcgtgaagacgatgtgtccccgccagaaaaagtgggctccttctgcagccccgtgagctgagcccaggctgcgtagtgacca

SEQ ID NO: 395104 - DNA, 122 bp, Homo sapiens
tctgttctattcttcttcctgatctaattgtgcatctgtggcaatgtttatacacttccccggttcaggacaactcggttgccgcagcaaccggtacgcgccaacgctataatttagagatc

SEQ ID NO: 395105 - DNA, 122 bp, Homo sapiens
caccgggcaccgccctccttcccggctccgcccccgtggcccaagtccgtggacgcggagcgggtgtcagccctgaccaaccatgaccgagagccggacaatggcaaggaggagcaggaacg

SEQ ID NO: 395106 - DNA, 122 bp, Homo sapiens
tgtgagacgttgattaccagacccagagagaaccatctgtgctgaaaaactgagaccaaccgagaggaaggaattcattcagggtcatgcaccgagtgagaaaaggggctcggcttggaatc

SEQ ID NO: 395107 - DNA, 122 bp, Homo sapiens
tctgttttgtggcctagagattgtccccgcgttgctccacggggatctctggtcgggaaacgtggctgaggacgacgtggggcccattatttacgacccggcttccttctatggccattccg

SEQ ID NO: 395108 - DNA, 122 bp, Homo sapiens
tgtgaccccccgaagagccccaattttaccttcccctccgcctgtggtacgcgcatgggccgggtgcccaggctcactcttggcatgtgcgcccacattgccaaggtgcgagtcattccagg

SEQ ID NO: 395109 - DNA, 122 bp, Homo sapiens
agtcaccgcggggcgcgctgcgattgggggtcatcgccctcattgtgcgaggaggaaacccggctccgagaggcgcaagagtgacccccaaggtcactgcctgtcaggcagggcttgggctc

SEQ ID NO: 395110 - DNA, 122 bp, Homo sapiens
gcggggcgaatccaccccgccaacccctttcggggagcttctgctccatcccaccgtctccgggccacccctgcctctgggtctcctgattccttggcctcgtcccctgcacagtttctgcc

SEQ ID NO: 395111 - DNA, 122 bp, Homo sapiens
aattgcttcagagcttgaattactctgtgtagtaattcctgatgcctggagctttctatgcgagatgacattggggagatttcctatgtgctctggtcttcagaaaattggtcttgtgattt

SEQ ID NO: 395112 - DNA, 122 bp, Homo sapiens
ctcagctttggggctaaacagagaaacactggggattagcttttctgtgtgtgaaggccgcgatgctgacgattgtgtcagagttgtggtggaatgatgtgacagtccagacccaccctgaa

SEQ ID NO: 395113 - DNA, 122 bp, Homo sapiens
aagggaaacaaaagcacacagattagtcagtggtgagtttcatgcagtttacaaatgtgtcgctacttcagtgtcctgttccttcccagaggatgaagccccatggtgccatgtaagtagca

SEQ ID NO: 395114 - DNA, 122 bp, Homo sapiens
acctcttgatccgcccgcctcggcctcccaaagtgctggtattacaggcgtgagccaccgcgcccggcctattgtcagactcttaatcaagcctgacttttgggtttagctctggctccagc

SEQ ID NO: 395115 - DNA, 122 bp, Homo sapiens
gacaggtccttaagtttcccctcttcatccttcaggttgtatccttcgggccttttatctcgttcggtaatcttccataatttgatagttttatctttaaaaacagaacaaaataaagcgag

SEQ ID NO: 395116 - DNA, 122 bp, Homo sapiens
aaggagtaagccacaatgagcagggctttcaccgtggggttctgggactcagcgccgtagcgcctcctgcccacaaagttctgccagtcggagaaggtgtagttgttccaagagaagaagtg

SEQ ID NO: 395117 - DNA, 122 bp, Homo sapiens
ccatgaggccacgatcggcctccctcgttgactttcagtttggagttgtcgccacagagacgattgaagacgccctgcttcacttggcccagcagaatgagcaagcagtgagggaggcttcg

SEQ ID NO: 395118 - DNA, 122 bp, Homo sapiens
ctactccttaaacacagggattctgtgtcctgacatgagagattctcacgtgctatatcccggatgcagccagagatgtgcatttcaacagggaattcagaggtgagtgctcgcattgccac

SEQ ID NO: 395119 - DNA, 122 bp, Homo sapiens
ttgcggtcatgtgtgctggagagaatgtgatcaaagccctggaccttctccctaggaaaacgcaggtaaacagaattttgcatatttcagggactttggggacacctaagacccatctactg

SEQ ID NO: 395120 - DNA, 122 bp, Homo sapiens
ctcttcctgagaagtcttcctagatgtgtccaggttggagaggattcttccccaggtacacgagggaagcacatcccccttctggaaccctcagtctcttccagttcccctcaggacctggc

SEQ ID NO: 395121 - DNA, 122 bp, Homo sapiens
tgatatggctgtcatactgcattaacaggaagaggggcatgcaccaagaaacaaccctgccgaggttaaaacaccgagacaaagaagttggaagtctgtagggcaggcccatcaggaagaga

SEQ ID NO: 395122 - DNA, 122 bp, Homo sapiens
tttgttttcctggggaaatcccgggccttgttgaaaggacctgcagcagctctgacttcccgaacactcacaggtgcccgtgttgaggttcccaatggcgtctttcagcccctgggccggct

SEQ ID NO: 395123 - DNA, 122 bp, Homo sapiens
gagcgaccccacctcacttcccggaagaagccagagccgcagctgtgatggagagacacccggggcctggccacgctctggggcaactggcaccaggagctgctacacctgggtaggagaga

SEQ ID NO: 395124 - DNA, 122 bp, Homo sapiens
gagatggccgcggctgttgttaccgggcagttcatctccggctctgggatgaggctgggacgccagcttccaacttccagaggaaattttagcatccgtccaggtgctatcaaagcaccaaa

SEQ ID NO: 395125 - DNA, 122 bp, Homo sapiens
ggagagttttacagcgtggaggctaatggttttaataataaatcaccctgagccatcacccgtttgcctgcctcccttctctgcctcttgtctctcccgtttttgggtaatttagagcacag

SEQ ID NO: 395126 - DNA, 122 bp, Homo sapiens
ttctcgcctccttttaaaagaaccgccaaagtggtcaccgaaaacggaggaggaagagaacgctcagctgcagcaaaagaaaccaatgggcaggaaagatgaagagaagaaactttaacgga

SEQ ID NO: 395127 - DNA, 122 bp, Homo sapiens
tttcaacttttaggcccaggggtccatgtacaggttgctatataggtaaattgcgtgtcacgggggttgggtgcacagattgtttcgtcacccaggtactaagtggagcaccggataggtag

SEQ ID NO: 395128 - DNA, 122 bp, Homo sapiens
gcgggagacggtcaggctgagttagcacaggcactcggggagctgccgcaccccgggacacgtgggcactgccacttctgctctgagaggcctacaggtactgggatgttggaaagcgctag

SEQ ID NO: 395129 - DNA, 122 bp, Homo sapiens
cggggccgccgctgccggcgctccgggggtgggcaggggttccggaggggggctccctcgcgctcgcccctcgcgttccgcaatttggccgccgtcgcagctcgaaccgtttttaaatttcc

SEQ ID NO: 395130 - DNA, 122 bp, Homo sapiens
tgccggggagcgcttttgaaccggccagggcgacggcctttcttttcatcataggtaatgcgggagcctctaagtggtgttgccagcatctcagatagcatccgacactgactcttctgcag

SEQ ID NO: 395131 - DNA, 122 bp, Homo sapiens
ctccacgcctgcgcggctagcggatgaggacattaatctcggccacactggtctccagcacgttctcggcggtggtcttgccgtgttgctccttgagatgccgcctaatggcaggcttgtgg

SEQ ID NO: 395132 - DNA, 122 bp, Homo sapiens
gggcagaagaaataccttctctttttatttgggaagggatgccctgttcatgcacttttacgtttgtctatctggtaaatcgattgcatgtagggatccagtttctcatgcctcttatattt

SEQ ID NO: 395133 - DNA, 122 bp, Homo sapiens
cgtgtgagatgctctccattccttcttccccacccttcaagatgctgactctcccacccccgtcaagataactttattttggagaggaatacccctcatggcacttggagatttgaaaggac

SEQ ID NO: 395134 - DNA, 122 bp, Homo sapiens
ctaggaggtaaggcatcttggaaggtgatgctcagagcacttggaagttccaaaggaatccgtactctaagggctggttgcacagtcaacaatggtgatatttactcaagcatgtcaagagg

SEQ ID NO: 395135 - DNA, 122 bp, Homo sapiens
tactgatgaacgtcttagagctattagggtcactcattaagtgacttcagtaaaaccacacgttctcccatgtggaaacttctgacaagaacaggccgccagcagcaaagtccacgccacca

SEQ ID NO: 395136 - DNA, 122 bp, Homo sapiens
gctttcagccattgcgtgcctcccggggggggcagccttgctccaggctttttgcatagacgcccgggcaactgaatacaaaaagggcaggcctcctgcgccctccttcccaccccccttcc

SEQ ID NO: 395137 - DNA, 122 bp, Homo sapiens
ctcccatagaagactgaccaccatccacaactgcagtcataaagtacacttgaccttgatcgtgaaaaagtgagttttgacaattcacaggacttgaatgctccgtaagagattaggttttc

SEQ ID NO: 395138 - DNA, 122 bp, Homo sapiens
gggaggaagctctagtgcaggcctcttaggatctggggtccaggatgctgatttcagggccgggaccttgggcaccgtccctctggtctgcataagacccactatgggcaaaccttaaacct

SEQ ID NO: 395139 - DNA, 122 bp, Homo sapiens
aaagaactttagggttagacaggttggagatgagaaattggaccatgcaggaagtactgtcggaggcgtgttcctgactttactaccctgagccgcccacggctggggcagtccccgaggtt

SEQ ID NO: 395140 - DNA, 122 bp, Homo sapiens
tgtcgatgcctttagaagaaagggctccaaagaatcgtgtctcgatggttggtcagcgcgcgcatctgcggcactggctaaatcccgggaagcagcgcggagaaacaaaaagtgcttttctt

SEQ ID NO: 395141 - DNA, 122 bp, Homo sapiens
tgggaccttcatcaaaagaaatgcgcccagatccagattctaccacttaattaactataacggagtccaattacttaatttatctagcatcagtttcactgtttattaaaacatgggtaagt

SEQ ID NO: 395142 - DNA, 122 bp, Homo sapiens
gggcccagcctgggggaggccatttatacccctccccctgggcccaccagcccaactcgccgctgccggcctgacctcgctcccagccctgctgcccagattctaggtgaggcccagcccgg

SEQ ID NO: 395143 - DNA, 122 bp, Homo sapiens
gaggagtggtgaaaaagtttgagtctcaggacagacgtttcccattgaggtgaaaccaggcgatactctattttggctcatactgtaagcaggtgtttttcatgatttatttagtgcaatga

SEQ ID NO: 395144 - DNA, 122 bp, Homo sapiens
ccacggttcccgctgttcccacgaagacagtgtctgcggccaggcgctccgagagagatgcggccttccccgggccgggcctggccgcggcctgcccgtggtcccccgcagctcgggcccgc

SEQ ID NO: 395145 - DNA, 122 bp, Homo sapiens
tctttcttcctcatttctttttcaccttccttctgccgtcacaatcgccttcagtgatgtcgaagctcacggcatagaaatgggttataaatggaggcaacccattgggttacgtctttact

SEQ ID NO: 395146 - DNA, 122 bp, Homo sapiens
cctttttattcctttctgtggccacttctaggaatgtgctttaaggaaataccagagatacggtctctgatagaaacacttggatgttcatcccaacaacacaaggctcagccagaagggat

SEQ ID NO: 395147 - DNA, 122 bp, Homo sapiens
gggggagtcccagggatagagagtgcactgtgcagttaaaatgatggagaggagaagctgcgaggatctatggaggaggaagaacaattctggaggacatgtgagggttctggagaggaaag

SEQ ID NO: 395148 - DNA, 122 bp, Homo sapiens
gacaaccgctggggattcggcggccgagggccgcgggaaagctgctgcggggtgcgggggcgggggagtggccggcgggacagcgggctaaaggggcggggaagtgcctttgaatgaatcgc

SEQ ID NO: 395149 - DNA, 122 bp, Homo sapiens
ccttgctgtttagaaccactgtgctgtgagcgctgagacggcagaagagaagccatcccacgcagcacttgcaaggcgatccgagcaccctgtcactcttgtaaactagaaagggcttcttt

SEQ ID NO: 395150 - DNA, 122 bp, Homo sapiens
tcaccaggacaggaagtgacagcggaacgccggaaaccgcagatccacggaggtcagggccgcggagagctgtagttccccggaaccggaagtgatggcggacctccggaaaccgtagattc

SEQ ID NO: 395151 - DNA, 122 bp, Homo sapiens
atccaatggggaggccagcgagtaaacaattcggtggaacatcatgccacaatgacacagcgcagtgagtgccatcctgcggtgagcaagggaggggcctctccttccatcctgggtggggg

SEQ ID NO: 395152 - DNA, 122 bp, Homo sapiens
tgagcagagtagcagaagagctgtgtggcagaggagagaagagaaggaacatgtgaacgtcgaaagttcatctggggacagtcagggaggagatcagccatgggatggccaaactccagggg

SEQ ID NO: 395153 - DNA, 122 bp, Homo sapiens
attctctcccatcaacagctttctttctctgccacacacagcataacattcatgagaagtcggatggcacggagggcaatcctccttatataagaccctaggaatgcacaaagccgtggaca

SEQ ID NO: 395154 - DNA, 122 bp, Homo sapiens
cgaagtgagaaatcaggatcccagtggcccaaaacactccttttttaaaacactaaaatccgagttttaatgtcaaatctgatttttatatatcggcaaccaaattaaaacagccagcacgg

SEQ ID NO: 395155 - DNA, 122 bp, Homo sapiens
cgggcccccggccgcggactcggcgtcgctgctcagcgccagctccaggcccagcaggcgcgcctcctccgacgcgcagtccgacacctccgagctgctatccgtgaggctggggggcggcg

SEQ ID NO: 395156 - DNA, 122 bp, Homo sapiens
aaataaaaatttgcaactgaattggaaaaaatctgacactgaaggatgaaatgtagctttcgtagcatgagatttgtggcacaaactgaccagaggaaggaaatctgatgatctagatagat

SEQ ID NO: 395157 - DNA, 122 bp, Homo sapiens
caagagatggtggagcagagtgttttttaactcccccagggaaagggagactccttttcccggtctgttaagtaacgggtgccttcccagttactggcgctaccgctagaccaaggtcggct

SEQ ID NO: 395158 - DNA, 122 bp, Homo sapiens
tgctctgcacgtgactgaggagactgtgggtcccagggtggcccctccctgggtcccagccgagcttcagcccggcaagctcagaccacgggtggactgcaggccccgtccacagggcgtcg

SEQ ID NO: 395159 - DNA, 122 bp, Homo sapiens
gtggccgggcccagttcacgggctgctcgagccctgacgaggcagctgggggctgtctggcgtccacgctcacgttctgggccggcggaccccgtaccggccaggccgtggcggccacgggg

SEQ ID NO: 395160 - DNA, 122 bp, Homo sapiens
ggtagagaaacagctgatctcgtgttagccactgggtacaactgtgcctgcgtaaccctgcgcttttaaaaaacggaagtcaacgcaaatctcttcctcaggaaattgatatttagactgtg

SEQ ID NO: 395161 - DNA, 122 bp, Homo sapiens
gcttccgtgacgaagtctttcaaaccatgagcttgcaacctcccattttatgattgctttcgtcttcttccgcttcagccaatagcggagctgttccctgctccccgcccactgcgccccac

SEQ ID NO: 395162 - DNA, 122 bp, Homo sapiens
agatgagggaagaatcaagactgatgataagattatttcaactcaacataccagtaaaaccggctccaagatcaagacagagaatatttccagccccgagaagctgccctggctctccttct

SEQ ID NO: 395163 - DNA, 122 bp, Homo sapiens
agccctgatttttgcactaaaatagagatcaacaagcaatgattctgtgtcgtgcacgcacgcagaaacgcgatgacgtcagggttgcttggtaacagaagggcagaaagccacttgtggat

SEQ ID NO: 395164 - DNA, 122 bp, Homo sapiens
gggctggggtcggcaggtgaaccagacctggtgccgggtgctggtgctgccagggaagaacgtctccaggtcctggcgctggcaggaggaaggtgtccctggagttgagggcttgtgctcgc

SEQ ID NO: 395165 - DNA, 122 bp, Homo sapiens
caccgctattccagcgttcccaacacagggacgctcagcgctattccagcgttcctgacacggggatgctctccagtattccagcactgacatggaagcccatgtaaaccaggaaatggggc

SEQ ID NO: 395166 - DNA, 122 bp, Homo sapiens
taaaacccgaggcttcagccttccaggatcagcaaattcctcgggaagcgtcagctcagccgctgcactgaggaccctcctttctctttcacccctggtggtttccttgtctttttggtaac

SEQ ID NO: 395167 - DNA, 122 bp, Homo sapiens
acacacacacaaatcacacacattgtacacacacacgtaaatcacggcacacaccatacacgcacatgtaaaccacacacacacaaatcctatacacgcacacacaccacacacgtcaacta

SEQ ID NO: 395168 - DNA, 122 bp, Homo sapiens
cggtacatgaggccgggcagggcaggtgcagggaaggtggcaagggctgcggcgccacaacgccaggccgggagcgccgagccgcgccgcggttgtcccgccccgtgacacactacgcaggc

SEQ ID NO: 395169 - DNA, 122 bp, Homo sapiens
tgctggccgggctgccaggctgctgggacctgctgggtcaggctcagcttccagggctggcgtccggaatagcctgcccaggctggttaaaaggtccactggcccagcctcccagcctggaa

SEQ ID NO: 395170 - DNA, 122 bp, Homo sapiens
ccgtgaaagaattatttttgtgtttctaaaactatggttcccaataaaagtgactctcagcgagcctcaatgctcccagtgctattcatgggcagctctctgggctcaggaagagccagtaa

SEQ ID NO: 395171 - DNA, 122 bp, Homo sapiens
agccgggccccgccctggggagcatggctacgtttgtccccaccttctggatggggaaaccgacgatgagaaagcagggagagggctccctgtgacgccagtcaggcgggacatgggctcca

SEQ ID NO: 395172 - DNA, 122 bp, Homo sapiens
ccgcgagatagaggagaaaggctcatcctccagttggccaggcttcctaagacgctcccccgcgtggccaagtgtgcgccagcatctgccaaggagatcttcctccagcaacaagggtggga

SEQ ID NO: 395173 - DNA, 122 bp, Homo sapiens
tttacaagctacaggtcacaaggtcactgcaatcatgcataatggttcataccccactagcgatgtatgggctgagcctctggcatgcccactggtcatttacaacccagccctatacagta

SEQ ID NO: 395174 - DNA, 122 bp, Homo sapiens
caagccctaggatcttgagtccagaaggaactacaagtaccgtgaggccaagcggttcagcgctagaggagaggaggaagaggacggcaacaggaaaaggggcgaaagaaagatggtgactc

SEQ ID NO: 395175 - DNA, 122 bp, Homo sapiens
ctttccccatcatcaccatcacttagtccttaaatctaaattacccataggctccaatgtcgtctccctaccctaaatctcctctcctcttacctcctggtcacagggactcccaaatcacc

SEQ ID NO: 395176 - DNA, 122 bp, Homo sapiens
atattctggatgatgaagctcctacgggcgaggtacaacctgtgcatccgcccaaacctgcgctcgagcgggaggtaggccctgtcggcctgggcgctcacggcctccgcctcccactggat

SEQ ID NO: 395177 - DNA, 122 bp, Homo sapiens
ggcgtctagacataacgtcccatctcctgaacccgtcaaggccggtggcacccaacctggcgggctcatctaggaccagtccacacccaaggccccaagacccaaaacctcctgggctgggt

SEQ ID NO: 395178 - DNA, 122 bp, Homo sapiens
aacacttgtctgtttacattaaccgagcagagcttagtcacccatcactggattcgacctcgagcagacagctctacctgactcagggtcggaagagtgatacaaggtgtgcaacatatgaa

SEQ ID NO: 395179 - DNA, 122 bp, Homo sapiens
tcacacgtaattcccagttttgacatgcattggttgtgtgacctaggagatgtcacttcacgtctctgagttccagttttctgaactattgaaataggactaggagtgccctccttgcaatt

SEQ ID NO: 395180 - DNA, 122 bp, Homo sapiens
tgaacctagtttggctgggactcgccttcaggcggcgcggaggatttcgaggccctgaggcgcggcccttaatttccggaagtgggggccgcgccgcgccgtcaagatgtgctcgacgcccg

SEQ ID NO: 395181 - DNA, 122 bp, Homo sapiens
agatctaggaactgagactggcgggaaaacctggctgggagtgccggcggctgagagctgcggggcagcccctgtcacgtagcccttctaggttcctgtgtatggcggattccctccagttt

SEQ ID NO: 395182 - DNA, 122 bp, Homo sapiens
caaaccagggcctctcccagacttccacaggtgcttagagctgacctcaatgatgctgaccgtggctccaagactgagcagttgggggacaagcagggccggagcctcacccctcaggagct

SEQ ID NO: 395183 - DNA, 122 bp, Homo sapiens
tcactatgggaggtgtgaggctgaagtcaagcccttggcgggtgtacagcacagagaatgcggacaagcttgtggccagcgtcctctgggttcagggcgtcttcaccttggcagggatggca

SEQ ID NO: 395184 - DNA, 122 bp, Homo sapiens
cgcgggctgctgggcggggcgacctgggatcccagagcctggcggcgcgagccgggcacccgggccgacgaaaaggcaggaagcgcctgacttcagacaccacccccgactgccagcgccgt

SEQ ID NO: 395185 - DNA, 122 bp, Homo sapiens
agactggggcaccctgagtgggcctgtgttagtttgggggcgtggcttagagtggggtaccgtgggactgggcctgtgggagcctgggggcgtggcttagagtggggcaccctgggactgga

SEQ ID NO: 395186 - DNA, 122 bp, Homo sapiens
ccgagggcaaggagcaggtagggcgggttgggatccgggagggtgaacctgaatggaagccgtgggggaggggatcttcggcgggaggacccgggctggagctttggaggggtggggtctga

SEQ ID NO: 395187 - DNA, 122 bp, Homo sapiens
cctcgaaggatgaaggagtaacgctcccattggctgccagacagccccaaccccaacccgcgctcgccctaactttgggtccgcccggccctcatatttgcatacggggccttctaggcctt

SEQ ID NO: 395188 - DNA, 122 bp, Homo sapiens
gtccctgtccggccaattccagcactgccgtgcaccacgactggccttgcatgcatgatgcgttcctgcttatggtgcacctcctccaggaagtccagcacacccctggggtcaatgggcac

SEQ ID NO: 395189 - DNA, 122 bp, Homo sapiens
gaggctgcgggagggccaggtggcatgcaaggagttaagcggtaggcagtgctgtggctccgtgcgaggagcgcgccgggctgaggcgcgctgctggtggcggcggcggcagcggcgcggga

SEQ ID NO: 395190 - DNA, 122 bp, Homo sapiens
tctcagaaagaggagaatgataaaatgcccctcttaattttcctaagcattcagtgagtgcgcgtatgacgcaagaacacacagaggttctgcgtgtcacccatgaaaatgtgacagcaccc

SEQ ID NO: 395191 - DNA, 122 bp, Homo sapiens
tagcttctgtacgtggtgccttccccgctagtattgtgttttcttcttgactgcatagttcgagtacaagacacaatgtcctgtgtgcaggtagcttttctatttaaagttcatcttacgta

SEQ ID NO: 395192 - DNA, 122 bp, Homo sapiens
aggcagcagtaaggagctgccagggtgaccaaagttgaagctcaaaagtaaacacactggcgtagcctactaccacatgacctaagcaacaagttagaggcatcatgaatagaaaaagtttt

SEQ ID NO: 395193 - DNA, 122 bp, Homo sapiens
gattactgtgaaatcttcttgtaaagggaatatcacttcctggaatcgtgaggatgaagtcgaactttcccaggcagctgtttttgaactaggaattgagccacgtggcctagaatgacaga

SEQ ID NO: 395194 - DNA, 122 bp, Homo sapiens
tttcccagcttataaactgcttcggctgctggataaaaatagcggtggcagcggccaggccgggagccaggtagagtctgagcaggcaggggggccgcgcaggactggcctgctgggccagg

SEQ ID NO: 395195 - DNA, 122 bp, Homo sapiens
ccttattccttaaaaccccaatttagaactcatcccatcaagaagagaatccaaccatagcgtagaaagcctgaattcccatgacctgggtttcacaatctgcctctcctgccaatcccact

SEQ ID NO: 395196 - DNA, 122 bp, Homo sapiens
gagaggcagatgagaagtggaggtctacactttccagggttccaccctcaaatcccccgccgaggttggcaaaacaaagattctgccccctactacagtgacttgtgagtggaaagaaagtc

SEQ ID NO: 395197 - DNA, 122 bp, Homo sapiens
ggtctggctgtgaccccaacgccggtgcccgtggtcgggagccagatgaccagacaagcccggcgcctctacgtgggcaacatcccctttggcatcactgaggtactgccctcccctgcccc

SEQ ID NO: 395198 - DNA, 122 bp, Homo sapiens
ggaaagctcactggcgggattctctcgtcaggaagcctcctgagctagaacgtggagcatcgacctcaacagagcaccacgcgtgggtgaagtcatctgggagctttgagctgtcatcaact

SEQ ID NO: 395199 - DNA, 122 bp, Homo sapiens
gtggcagagttgagcagtgacagtaaaatacttacagagaaggttcgcagacctctgctacgtattttgccaagaagaaaaataaaataaagttaaaattgaaaatatgttgcccgctgggc

SEQ ID NO: 395200 - DNA, 122 bp, Homo sapiens
gtcttttctctttctttccttttttctctctgcctcctccaggatttaaagggacagccccggcagaggcgagggggccaggcggccgccgtttctccggtctcctgacgccctctgcggcc

SEQ ID NO: 395201 - DNA, 122 bp, Homo sapiens
agtaagaaaatcaaaggtcaccaaacggagcccttaaagggcaatgctctgcgtgtgccacggtgcccaacagcatctcgtgccagctgagctgcggtgtgtggacccggggaatggaccgg

SEQ ID NO: 395202 - DNA, 122 bp, Homo sapiens
cccctcccgggcaacccactagacgtcccctttctaatttggagtgcgggtgcgggcgcacgcgcactgccgagcttccgcgagggcgcgaccggacggcggaggaggacccgtcgccgcag

SEQ ID NO: 395203 - DNA, 122 bp, Homo sapiens
ggagctgacaggaagaacacagatgtcaggacgggctcagcaacacaggtcccaggtgtccggggtctcctgaactccaggaagcagtgacacccccgagggctgctgtgggtgggttctta

SEQ ID NO: 395204 - DNA, 122 bp, Homo sapiens
ggaccgcatatcgcctgtgtgagccagatcgctccgcagccgctgacttgtccccgtctccgggagggcatttaaatttcggctcaccgcatttctgacagccggagacggacactgcggcg

SEQ ID NO: 395205 - DNA, 122 bp, Homo sapiens
ttcctttaccgtgaactacaaggctcagccaaccacaggctttacgtcatttctcggcgccgggaaacctgccattcttcgctgctgatcgcgggattctttttggatagggttgacgttcg

SEQ ID NO: 395206 - DNA, 122 bp, Homo sapiens
tacagcaccaggatctgggccggcagcgtccttcaccggagggaaattctaaccctggggcgggacctgggcacgtccgccggggaggcccagtccctgcacctgtaaaatggggggcgggc

SEQ ID NO: 395207 - DNA, 122 bp, Homo sapiens
gaccaagtccagatacgggctgtagacagagatgagctgcggacagtgatgagctgcagacggtcaggagctatagatcgatttgcaatttgctcttcaaatgcgctaccaagtgccatgct

SEQ ID NO: 395208 - DNA, 122 bp, Homo sapiens
agagcagaaggctcgggggcctgtctagggcatggcatcccacgtgggtgtcagcacggccgcagaagaaccacttctctggcccacccatgcctgctaggccatgcttcttcagaagtggc

SEQ ID NO: 395209 - DNA, 122 bp, Homo sapiens
gtaagtgcacccagcagcctgggacaatgatgttggcgctgctggagacagggacaggtgcggacctggagaggagagtgttgtggtgtgaggctaagtgactcaacgcagagacctggctg

SEQ ID NO: 395210 - DNA, 122 bp, Homo sapiens
ccagcagccccagctggttggacatgttgcgcaggttcctggccaggggctcctcgctgccgtacaccatgctggcgtccacgaaggaagtgagcgcgttgatctggttgcggatggtgatg

SEQ ID NO: 395211 - DNA, 122 bp, Homo sapiens
gcggggagtggggcctagctgcagccggagcctgggagacggtaagtgtgggctggggtccgcggcggcgacagcggcggcggcggccgggggtgagtcggcggggcaggcgcgctggtgcc

SEQ ID NO: 395212 - DNA, 122 bp, Homo sapiens
acctcatgatccgcccaccttggcctcccaaagtgctgagattacaggcgtgagccaccacgcccagccgacaagtgagtttcaactgcccaaacgtcagggcacattattgcaagattaat

SEQ ID NO: 395213 - DNA, 122 bp, Homo sapiens
ctgcgcccaggggacgcttgctgggagcagccattttcaaccctactgccgtagagcaggcggagtccctcttttcgcgccttaagacaggtaggttctgacgatgaaaagcaattgaaaac

SEQ ID NO: 395214 - DNA, 122 bp, Homo sapiens
gagcaccccgggagagggcggagcactcccgtgccccggggcaggagtgcagggagctcccgcgcccggaacgttgcgagcaaggcttgcgagcgtcgcaggggggcactcgcgagggacgg

SEQ ID NO: 395215 - DNA, 122 bp, Homo sapiens
cgtggatcccgagcagggtgcgatggcggattgggaggtcccatgtcactctcccatgcccgcctttgaagctgaggcgctctttagttaacaaactacaagtcccagcagggaccgggacg

SEQ ID NO: 395216 - DNA, 122 bp, Homo sapiens
caggaggccacggtccagatgggtttcactgagctgaagtcagggcttgggtgggccgcacgctctggggcggctcctgaccttttctggcttgtggcacctggctggacttctcggcgtgc

SEQ ID NO: 395217 - DNA, 122 bp, Homo sapiens
ataatttcaattgttttcaagtttgctcattccttctttaacctgctcaaatctgttgagcgtcacttgtgaattttttttttttttttttttttttaatgagacaaggtgttgctctgtta

SEQ ID NO: 395218 - DNA, 122 bp, Homo sapiens
actcttggcccagcaggccagtgggcagggccgcgggaaggacgggcgctgcaggggctccgcgcgctcaaggtgctcgcgggctcccgggcccagccgggctgaggtggcgtgggcgccct

SEQ ID NO: 395219 - DNA, 122 bp, Homo sapiens
gactggagtgcagtggcaagtcacaggagccatcatagcgcattacagcctggaacttctcgtcttcagggatcctcccaagtagctgggatttcaggcatgtgccaccatacctggctcta

SEQ ID NO: 395220 - DNA, 122 bp, Homo sapiens
gcacgtgtgaggggtgcatgcacacgcacctgtgtgcacatgtggatgttgccgtgtgcacgtgtgcacaccaagtgtccgtgagtgcacgggaacagccgtttagaagtgccttaatcttc

SEQ ID NO: 395221 - DNA, 122 bp, Homo sapiens
caggatgaggggcaggctggtcagtgggatcacagtagtttgggtaaaatcccaaagccccggtgtcaggcagaggcacccggctgtgcctccctggtgtgcaccgcctttgccctgcaggg

SEQ ID NO: 395222 - DNA, 122 bp, Homo sapiens
gctgagataagtctggagaactctggcaagcctgtctcttggctcaggcttggaggcctccgagcagcaacatcgtcccaattataccccgttggagcatcttcagatcttccactcttttc

SEQ ID NO: 395223 - DNA, 122 bp, Homo sapiens
ctcagtgcaacagaattctttgtccagaaacagactctagcatgggaacttaatattaaacgggaagagttcatgacaagaaccccaggggaaaaggctgttcactggttgatgggttttgt

SEQ ID NO: 395224 - DNA, 122 bp, Homo sapiens
agtcaccaccctgccggctgccacggggacacgtggcctggttcctgctggtcaccaccccgccagccacatcttgaacggcgtccgttctgcagtcgcttgtccttagtgttccagcaaca

SEQ ID NO: 395225 - DNA, 122 bp, Homo sapiens
gttatttaaccaagtgctagcattaacatagatgagtaaaaattacatttttagcagctgcgttaagaaggaatttaggacttgagcttactcattttctaatggccggtttctaatcagag

SEQ ID NO: 395226 - DNA, 122 bp, Homo sapiens
gagatttcacaatactctcttcctgcccctcttccccctcccctcccctctctcagagcccgggccgatgactcagcacatttagacttccaagcttggggaaagaagagaccagcaggggc

SEQ ID NO: 395227 - DNA, 122 bp, Homo sapiens
ccagcagctgaacagcagcctcacttaggagtggccttgaacgacagtggtagaggaaaacgtctcaaggggtggagtgaggaaatggattttcatcttgtgtagaaagagaagtggcttga

SEQ ID NO: 395228 - DNA, 122 bp, Homo sapiens
ccgtgtgtttgtgtctcgagtgccctcatctcaggagcaattttaataacttaacagttgcggtcacattactttgaaaatacaaaaaacgtagaaatcagagtagcaaagaaaattatgga

SEQ ID NO: 395229 - DNA, 122 bp, Homo sapiens
cttaattggactatgtaagtgcttgtggtctttttagatctatgcgagaggaaacatggccggtccttcattgcgttcttctgagcgcactggatagatcaatttttggaggccctctggtg

SEQ ID NO: 395230 - DNA, 122 bp, Homo sapiens
gagacataagagtatagaggtaaaaaaaaaaaacagagaaacctcaatcataaggaaatacgtgaagaaatgtagaatgaattatgcagcttactggggaaagtgagagaacagcaaatgca

SEQ ID NO: 395231 - DNA, 122 bp, Homo sapiens
aggagagctgaagctagttattgggtgcagatgctggctctgacccctgccccttcctcccgggctcagcttccccatctgtcatggagtaataacaacccagccttctggtccactgagga

SEQ ID NO: 395232 - DNA, 122 bp, Homo sapiens
gcatgtgttaggtttatatgtttcacattttacggaatgcccctcatgcagctggtcagccgcctgacgagggaagcttggccctttggagaagtggccgtgcctcgtggtgagctgctgac

SEQ ID NO: 395233 - DNA, 122 bp, Homo sapiens
ggaagagcgaggtgagcgcggacgtcagagtggagagcggaaggtcagggaggctcggagcggaagtgagactagggagtctgtccgccattgtggacccgagaagcagagagcgagagggg

SEQ ID NO: 395234 - DNA, 122 bp, Homo sapiens
atatttgtgtcacataataggttgaattccatgtttgggtgctttgtgaatcattctcttcgatttttctgaagatgggacttactgttttatttcggtgatctttagcatactttttaaat

SEQ ID NO: 395235 - DNA, 122 bp, Homo sapiens
cgcgtccacccggcaggctcccaccccagtgccccgtgtccacccggcaggctcccaccccggtgccccgcgtccacccagcaggctcccaccccagtgccccgtgtccacccggcaggctc

SEQ ID NO: 395236 - DNA, 122 bp, Homo sapiens
tggcctaaacaagggaaaaaagaaaaattaaaacctaaaagttaagaaaaattagtcatacggttagagaggtcagagcttatttctgttatacactggaatccagtttgaacataaaacct

SEQ ID NO: 395237 - DNA, 122 bp, Homo sapiens
ttcagagatgacagcatttggccccaggaggagcctgcaattcggcctcggtcttcccagcgtgtgctgcccatgggaatacagcacagtaaggagctaaacagaacctgctgcctgaatgg

SEQ ID NO: 395238 - DNA, 122 bp, Homo sapiens
ttgtgaaaataaccatctgctgctggattcacactgaggatttactgtctgtaaataagacgacccaatgctgtccaaaaattagtgtttttaaagtaagatttgtaaaaaatgtatcacat

SEQ ID NO: 395239 - DNA, 122 bp, Homo sapiens
ggtgattagatagatttagatgagatcgtgagaatggtagaacacttatgatgggattagcgatgagattagaaggagagacaccagagctgcttctctctgccatgtgaagatactgcaag

SEQ ID NO: 395240 - DNA, 122 bp, Homo sapiens
gggggcggtaaggggccgtgggaagtaattgtcgctctttcaaacgtggtgggagcgcgtcgcgccaagcgcccagggaaatgtagttttttttttgtttgttttgttttgttttttaagat

SEQ ID NO: 395241 - DNA, 122 bp, Homo sapiens
ggggggtgggtgtgggactgccgctctgcgcggcgagaggtggcctgggaatggccgggccgggggtgggccggagccgctgtggcggcggcggcggctgggggcggtgagcgcggcgtggg

SEQ ID NO: 395242 - DNA, 122 bp, Homo sapiens
cgcggtccgggcggggcgctggtctttctggacaatgaggcgggcttggtgcacggctaccgggtagcaggcatgtgggacaagtataacgagccgctgttgcagtcagtgtgcgtgttccg

SEQ ID NO: 395243 - DNA, 122 bp, Homo sapiens
tgggagtcctgtccggcctgacttaggccgagcgcggcgtgcgcgtgcccccagtccccgcggcggtctcccgcctggcccacgcccaccatgcgcatccacccctgtggcggccgggccgg

SEQ ID NO: 395244 - DNA, 122 bp, Homo sapiens
gtttgtgaaacccgacgggatgaagggctaggctcgcctccagagtagtgtagtttctcccgccgtgggcacccggccccttgctaccccgcaaaatctcgcgaccatttactctggccatc

SEQ ID NO: 395245 - DNA, 122 bp, Homo sapiens
agctgccgctgccgctgctaccgctgccgctgctaccgctgccgctgctactgccgccgccgccgccaccagaactcttgctgctcgctgagcccgcccctgcctggggatgggctgagctt

SEQ ID NO: 395246 - DNA, 122 bp, Homo sapiens
agcgccccagaagctcatctcccttttcctgagaggcctgcccaacctctggcaatgtcccgagaggctgccagaggctggcaccccacacccctcaggaggaagcccgcaacctgctgcag

SEQ ID NO: 395247 - DNA, 122 bp, Homo sapiens
gtgaaatgtgtgcgtgggttgagatgattatctctgaggtgtggtgcattccatgacctccgagaagctctacacggccacccgcgggccccagggcgtcagccgttcctacaccccgggcc

SEQ ID NO: 395248 - DNA, 122 bp, Homo sapiens
atcaacaagcccttccttagtatatgcctgcaggatgcgtgtcatcccagtggccagcaccgtggtctctgtgacactctcacaggccatactgcagcagccaggagcctgggaaccctgtg

SEQ ID NO: 395249 - DNA, 122 bp, Homo sapiens
atccaacccacctccgcacccaaacacaccacacagggcaagaccaaatcctcaggttgtcgtctgcataggagatttcacacatatgacaggagcaggtggcactgattctagactccctg

SEQ ID NO: 395250 - DNA, 122 bp, Homo sapiens
tggcctcccaaaatcctgggattatagatatgagtcactgtgtccagtacacttaaaatacgtgtgcacacacacacacacacacatgtgagccatatgtctcaccacttgacatagtttgt

SEQ ID NO: 395251 - DNA, 122 bp, Homo sapiens
caggcgaggagtgggtagcagcgcctatgtgaagttaggtaggtctgatgtcgtataaagcgcggagagggtgcccgccaatggctgggtgggtaaagccgactgtgaatggagaagattcc

SEQ ID NO: 395252 - DNA, 122 bp, Homo sapiens
aatggataattcctacagtacctgtatcaggcccaccctgttcacctcattcttcttcctcggttctgatggcaagtggtttccaactcatagctgtggacctacgaaacacttgcatggct

SEQ ID NO: 395253 - DNA, 122 bp, Homo sapiens
gtgtgtcctggatattggggattggtcaatgggggaccaggtcggtggagacctggtcatcggggcccatttagtgagggccaggtcatggaaggcccgggtgatggggccctggttgcctg

SEQ ID NO: 395254 - DNA, 122 bp, Homo sapiens
gggcgcgttctgcagtcaccaaacggcccccgagacccccgcagccggaaaggctggcgccgcgggactccaggcgcccgggaacccaccgccagccactagtcctgtcccacggcgcggga

SEQ ID NO: 395255 - DNA, 122 bp, Homo sapiens
acagttagagacttctgaggccccaatggtgtgagttgagcactcccccgggccctggaacgtgtttttaagaccgaaagaggctttggggcttggatttaggacaagctggagcaagaata

SEQ ID NO: 395256 - DNA, 122 bp, Homo sapiens
ctaaaatggtgagcgagagtcaccatgaggccctggcagccccgcctgtcaccactgtcgcgactgttctgccaagcaacgccacagagccagccagtcctggagaaggaaaggaagatgca

SEQ ID NO: 395257 - DNA, 122 bp, Homo sapiens
gggagaccctttcggcctcagtaacatctgtttcatgttttaaacttttgttttcctactcggtgcaaatttggatgagatgttaactttttttttttttttttttttgagatggagtctcc

SEQ ID NO: 395258 - DNA, 122 bp, Homo sapiens
cgcattttgccatagccagcactttaaccacgagggagtcaaaaagtcaccatctgaagacggaagtgaacaacatttgaagaagagtccttggagtcgagacggcctttgtgctctctcaa

SEQ ID NO: 395259 - DNA, 122 bp, Homo sapiens
gttgaagccgagcgggttctccggagccagtgagaggtggctccgcagccccagggtccgcggccggcctcccacccagtgccgccgcgtagtgggtcttaaatggagctgaaccctttcgc

SEQ ID NO: 395260 - DNA, 122 bp, Homo sapiens
ggctgaaggccttggacaatattgtcactcaattcaacgcctatgaagatttcctggactcgcagatcactactgtggacttgtactacctggaggtaagggcggagcgcggcagagtagcc

SEQ ID NO: 395261 - DNA, 122 bp, Homo sapiens
tttagaagctgagccgaccacttttattttactcgagtgcttttaaccccctgggatccccgggttgatatgctccaaacattttcagcttactttcctctaccttgcatagagatccatgg

SEQ ID NO: 395262 - DNA, 122 bp, Homo sapiens
aggtaccccggctctagagctactaactgatcgccggagaccctgggccttggaagaagtcgcctccccagatctctaagcaggccgcgcgaccctcgagtctcaggtaagcgggaaatccc

SEQ ID NO: 395263 - DNA, 122 bp, Homo sapiens
ggtgttgggcagggcctggcggtgtgtggggtaggcggggggcgtggccgcgattagccgcgcgcggcgtgggggcgtggtcgggttgcgggggtgcgcgcggccggccgggcgcgcgcggc

SEQ ID NO: 395264 - DNA, 122 bp, Homo sapiens
cctgccccacacgtgacccacctgtccctgcaggtagccgggctgagaggccctgtgctgcgcctgcgggagccgctgggtgtgctggctgtggtgtgtccggacgagtggcccctgcttgc

SEQ ID NO: 395265 - DNA, 122 bp, Homo sapiens
acctcaggtgattcacctgcctcagcctcccaaagtgctgggattacaggcgtgagccaccgtgcccggcctagaagtgaattattgatgcatgcaataacttaagtgaattttagtggcat

SEQ ID NO: 395266 - DNA, 122 bp, Homo sapiens
ccgtgcccggccaggtctgtctctttaagacagatttgttttctttgccctaacccattccgggattcagctttgccttctctcatcagcataaaccttttcactagccaggaatgtgaaaa

SEQ ID NO: 395267 - DNA, 122 bp, Homo sapiens
tctgctgccgcggagagcacgcaccaggtccctcctgcccggcaacaggcgcactccgagcgagcccagcgcctctgctcaccatgccaggtcccgctgccagaggcctagaggagaagccc

SEQ ID NO: 395268 - DNA, 122 bp, Homo sapiens
gcttggctagcgatccccgagcatgcagtcatgctgggcgcaggtcccttaagcagcccccggctcctgcagggcgtgggccagcctgcccgctcaccagcacgttgtccactgggctcatt

SEQ ID NO: 395269 - DNA, 122 bp, Homo sapiens
gactcccggctttagttcctcttacaacagccccttctcacttcctttggcgggaggggccgaggccatgggggagggaagctgggtgtggaggggggcggggagctggctgtttggggctc

SEQ ID NO: 395270 - DNA, 122 bp, Homo sapiens
aagcactgaaaattcataaagggaccctgggcatggattgctggggttgtgtttagaaaccgatgagtttgtgaggcctccgggaggctcccgagggcgcggggactacgtttcccaggagg

SEQ ID NO: 395271 - DNA, 122 bp, Homo sapiens
gtgcggggcggtggcggggattggagggcgggagctgtgctgacttaggattggcaaaatcgctatcagccacgcctctaaaacccggaagtaacctccccggtagtcccacgtgtagcgga

SEQ ID NO: 395272 - DNA, 122 bp, Homo sapiens
atcagctggcaacatgcttaatgtgtgcacgactgtttcagatgcgggctccccggcacccggacagtcttgctatttgggatctccatcccacagaagccatcgtccaggctctatggcaa

SEQ ID NO: 395273 - DNA, 122 bp, Homo sapiens
atctgcccacacaaagttctaatgccctgggcatgacaggttcggtacatgctaagccctcgcatctcctcggcacaccattctccataggtgctgagtcccagcatttctattaggcatgc

SEQ ID NO: 395274 - DNA, 122 bp, Homo sapiens
cctcacctttagtgatgctgagtgtgttatcaccacttgctacaaaatcataaagtgcaacgaagagattagggtcactctcagtggctccgagcaagttctccttggagctccacctgata

SEQ ID NO: 395275 - DNA, 122 bp, Homo sapiens
gacacagggagggaggaggggctggcaaaggagcccttacctcgtgcccacttgctggggcgggttggggcaagggatgcacgtgaaagccaggggagattttctgacctccacctggcact

SEQ ID NO: 395276 - DNA, 122 bp, Homo sapiens
ttgatattttagaaacgctattttgtttgaattcacaacagctgtgtaagtggcaccccccgcccccccccccccccccagtttttcagatgtgggaagtgaggcctcaggatgtctgtgac

SEQ ID NO: 395277 - DNA, 122 bp, Homo sapiens
tttgacaagaggtgaaaatatgttatccttagcagatatgcaagtcccctttgtatgcctcgtgagatccttggcgtgtgccccaccccgcccccggcaggcactccaattttcctgcaggc

SEQ ID NO: 395278 - DNA, 122 bp, Homo sapiens
accagaccacagttactcatgagttggctgagcaaggagcccgggaaagcaagtgaaactcgggggtttgacctgttctcagactgcaacaatggttaaccttaacagagcacttattaagt

SEQ ID NO: 395279 - DNA, 122 bp, Homo sapiens
ccctcccttgtgccactgccaggggaggaaaggccttgatgttccagacaataataaatgcgcctgtgacttagccttggtgtcagtctcttgcggacctgacaacccccatctctccttcc

SEQ ID NO: 395280 - DNA, 122 bp, Homo sapiens
gctggcaggcacgggactttgtagtgacccggaggaaccgcaggaaccagctgctatcatcgtcaacctgctgcgcaaatacatgctgcctcaggtgggtggccctttaccccaggttatca

SEQ ID NO: 395281 - DNA, 122 bp, Homo sapiens
ttcaggacagttacatgggcacagcctcctccgtcctggcgcagggtcaggctccgcggacgacgcctggagacagctgccaatgccaatagctttagccctttattcccacttagatgatg

SEQ ID NO: 395282 - DNA, 122 bp, Homo sapiens
actgacccctggtggcaaaccttcctcatcctcgtgagcccttagctgtacttccctgagcgctgatggagctgtccagggtcctgacgtgcagcccacttggggatgtgcagacccctgcc

SEQ ID NO: 395283 - DNA, 122 bp, Homo sapiens
gtgggagctcactgaggttacaccacgtgcagggcttgcacggcttggagctgaccacgtcgttgtagaagcccggcccgcacggacggcacaccgtgttctgggagcggctgcagcggctc

SEQ ID NO: 395284 - DNA, 122 bp, Homo sapiens
tgtctgcactcccagatcacccccacccctgggttctgtccaggaaattttgtgttcggtcgaaacttcagctggaagttttcttctccctgtggtatttccccaattctactggcagccct

SEQ ID NO: 395285 - DNA, 122 bp, Homo sapiens
gcagtcataggttttgttgtccaaatcccaacaaagccctttcccacctccaccccaccccggaagttatatagggttccttgaagggacaaagcctctagaaaaagaaaagtcactgaaag

SEQ ID NO: 395286 - DNA, 122 bp, Homo sapiens
ggccgggccctgctctggaatgcctggggcagccacatcagagaacagattccagaagcacgcagcccctcgcttgcagagcctcattcattactccatgggaaggggggcatgggtatcgc

SEQ ID NO: 395287 - DNA, 122 bp, Homo sapiens
aaggaggaggctgccctgcagcatggctagctgggagagcatctgaagatgtgtcaatggcgagggatgtctgctcagagccctaggggctgtgcctgggatgtcctgctgcagccaacagt

SEQ ID NO: 395288 - DNA, 122 bp, Homo sapiens
tgcggggctggccgcactggccccgggcctggcggggtggtggagtccgaagcggcgaggcgaggaccccggggcccgctccccccagtcgccctcccgggatgtggccccgctgcagtagc

SEQ ID NO: 395289 - DNA, 122 bp, Homo sapiens
agagctgcggagcctgtgtgcggtcctggctcctctggattgggcacccagaagggctctcggtgcctcctgtagcagcgcgctggttctcacctccctgcctgggaacccctcctgctgtc

SEQ ID NO: 395290 - DNA, 122 bp, Homo sapiens
gtgttatctccctgagcaacctgtggaaagccgctgagcaacctgtggaaagccgctgagcggttatcctctcggggcataaagacaaagaaggcaataaggagactttgctcctcagaggc

SEQ ID NO: 395291 - DNA, 122 bp, Homo sapiens
atgtaaaaactagcgttttaataaacaaatgtgaatattttattaaaataagtatctttacgtagattgtcacttgacaaaaccgtaagcgttcaaattcagatgagaagaaaggaaggaaa

SEQ ID NO: 395292 - DNA, 122 bp, Homo sapiens
ccagtagctgcagagctcttcgtcttgtattcatggcagatgcacagcgagtgactgacacgttccagggacggcgaatgggaaagagcgcgggcggccgggggagggtgtgtagtggcaga

SEQ ID NO: 395293 - DNA, 122 bp, Homo sapiens
ccaacttgatcccctgtctctttggctccaaaacctacactcagtcctgggagcgattagcgccaacagctcagagaaaacgtgacgaaaaccagtctgtaaaacccgagcctgggagaggg

SEQ ID NO: 395294 - DNA, 122 bp, Homo sapiens
gcagaggccactcacctgctccgccgccgccgccgccgccgccgccgccgccgctgcctccgcctccccgtgcgcacccggctcggccctccgcaaactccagaccgggcctctcccgcagc

SEQ ID NO: 395295 - DNA, 122 bp, Homo sapiens
ctgtgtggggagggagcggggagcgtcggggaagaaggaggggcccgccccgtgagactgcggccaggtcctgcccacgtgcctgctctgctgggcttgcagccaggccacctccctggccc

SEQ ID NO: 395296 - DNA, 122 bp, Homo sapiens
cctgtttggcttataacgcttctgtgaattccttcccgaaggtcagatgtgtcaaggacacgtcgtccaggatgagccctaaggtggctgctcgctccgtaaggtcgttgttcacctgcctg

SEQ ID NO: 395297 - DNA, 122 bp, Homo sapiens
cctagggcttaattgccagactgacttaccggtgcctcctagcctttgttctgcctctcacgctgacatcagggaagcagtgatgtagaataaagcaggggtgggctaggttagtccagtgt

SEQ ID NO: 395298 - DNA, 122 bp, Homo sapiens
ggcccgggcaggtcggagtcaggtgaccccgaaggtccaggcccggggcgggggcggaagcgcctgcagccccgcggcgcccgtcgttttccatttgcagccactctgcctttcccgctcgc

SEQ ID NO: 395299 - DNA, 122 bp, Homo sapiens
cagggtgcaggcagtacacggctttgtatgtatacacgtgtcacacccagaaacctgtgccgatgtgcatgtgagtgtccgaccacaagtctgcgtgtgcacggagaggtgtgtgttgcagg

SEQ ID NO: 395300 - DNA, 122 bp, Homo sapiens
aaattaacagatacaatagcatgtgatgaggaccacacgggaagccatggcagcggctaccgcccagccagcgcttccatttctcatttctaaatcctaccctaatctgtcaggggagagtc

SEQ ID NO: 395301 - DNA, 122 bp, Homo sapiens
cgctcaagtaagggacttttgtttttagctttgtaacttgagtgacatctcattttggttcgctgggggcggtcttaattatttaaaggcgaagggaagggggtaaactcagaacaagaaga

SEQ ID NO: 395302 - DNA, 122 bp, Homo sapiens
ttcaggatcacgtaacagactacacagccagcccgttaactaattctctagggttagtttcgagctgtcttgcccagccataacctgtttggagaggctgaggagagatagagaaagcagca

SEQ ID NO: 395303 - DNA, 122 bp, Homo sapiens
cacccgggccagcagcagcagcagagggtgcgccggatcccccagcactaccggcccgcccgcactgcgctcaaattcttgctgggccttagctgcctcccctcggggcagggctggggacc

SEQ ID NO: 395304 - DNA, 122 bp, Homo sapiens
actggcccattctgcagatggggacatcgagtcacgggctggctacgaactcctcgggggcgaaggtggcggagagggatgggttccaggacgtcctggcgcccggggaaggctcggcggga

SEQ ID NO: 395305 - DNA, 122 bp, Homo sapiens
gcgtggtggccgaggtcagagctgggagcagggtcaggtcagggtccccccagtccgccccgcccggggcgatgtccgccaatgctcccgccagcctgaggccggccaggttcccaaggcgc

SEQ ID NO: 395306 - DNA, 122 bp, Homo sapiens
gttttggggtggtgggtggcctagcattccatcaccacctagatcaaaagcagagcaaggcggggaccctcccgccaggcccgaaacagcccccttgggcctaagactctgcaagagaactc

SEQ ID NO: 395307 - DNA, 122 bp, Homo sapiens
caccctagctcctccccagtccggatgtctcgggaactgaagaaggcgatgcgtggaaatcgcaggtcttggtgcagcatgaagacccggacgggaatgatgttggggtcacacaggtggtt

SEQ ID NO: 395308 - DNA, 122 bp, Homo sapiens
ccagttcctggctttggaaatctcaggcaaataattgattcttaatgcacacttaggagacgtcggtagtacgctcgagagcctctctgtcccagagtggctgagagcacgcgccagacaca

SEQ ID NO: 395309 - DNA, 122 bp, Homo sapiens
cccgtggctgcatctccggtactgtgggtggcccctctcacataggctgtgtgggggccgcgtggcctgatgcctttctaactcctttcagtgtggcttttttattccaaatcttgcgatga

SEQ ID NO: 395310 - DNA, 122 bp, Homo sapiens
gatgacaggggcactgtaatgcagggccaggcctagcctttcacccaagatttacccacccgtgtaaacttccaattgcccatttggcacactcctgatttgtccatttctacatccattcc

SEQ ID NO: 395311 - DNA, 122 bp, Homo sapiens
ggcgcccagcgtgtggtctccacggcccatgaagatgtggcggaacggggagtcggctggcgacacgtactgggaaaggaagtagaactccacctgcgcagagagggggatcaggtcagggt

SEQ ID NO: 395312 - DNA, 122 bp, Homo sapiens
gaaggtccctttggaggactttgcagtcgggagcagtgagcatgcgcagacgccagagggcgctcctggccaggggctgagcaagcccggaggggacagggcggagcctgcggcggaggcgg

SEQ ID NO: 395313 - DNA, 122 bp, Homo sapiens
gtttgggagcagcacgagagccccaaggcaggggactgctgaggtacatcctggagcatccgtgtgatggggcacacgcagtcattcccagatcagtgcagagcacacacacccacatgggg

SEQ ID NO: 395314 - DNA, 122 bp, Homo sapiens
acacacacaaccctatacaaaactcttagcatatgccccacacactcctagaaatgcgcgcgcacacacacacacgcagtaggggctcccgtcttagatatttttagagaaagcaatttcat

SEQ ID NO: 395315 - DNA, 122 bp, Homo sapiens
ccaagtaggtggacaggcgacagaggccgtccctgcctgcggttcgtagcatgggggtgccgtgagccccaaaggagaggacctggaggctgagatgctcctatgcacgggacacagggcga

SEQ ID NO: 395316 - DNA, 122 bp, Homo sapiens
gcagcacctggagaagtatcctgactacaagtacaagccgcggcccaagcgcacctgcatcgtggagggcaagcggctgcgcgtgggagagtacaaggccctgatgaggacccggcgtcagg

SEQ ID NO: 395317 - DNA, 122 bp, Homo sapiens
gccgccccccatccgcatcagacacgcgcgcctctggggacccgctggggactccgggcccggcacacgtgcgctcggggcacaactctggcccccgaagcccctcttacccgcgtcgtgac

SEQ ID NO: 395318 - DNA, 122 bp, Homo sapiens
aataagattgttccagctataggtcatactttaaacagggacattgatggcccaaagggacgtcatcagatgtgagcagcagaacaaattaccaatgaaagggaaggtcaaagagaagacgg

SEQ ID NO: 395319 - DNA, 122 bp, Homo sapiens
tgggatgatttaacaccagtctttgcatgaggtagctccgggggcttccaggctaccacccgtccgctgagagttagtgtacccaactctgcagatatccagtacttcatcttactggaatg

SEQ ID NO: 395320 - DNA, 122 bp, Homo sapiens
actggtcaccttgggttttccaggttgctgctttaggacagaggcaaatacgaatcgctgcgggaagccttgaacctagatctggcaactgggaattatcagcaaaacgttatcaagatatt

SEQ ID NO: 395321 - DNA, 122 bp, Homo sapiens
gcttcaacctgggaagtgggaattgcagtgagccaagataacgccactgcagtccggcctcggtgacagagtgagagtccactcacccaaaaagataaggaaagaaattattattaacttgg

SEQ ID NO: 395322 - DNA, 122 bp, Homo sapiens
ttgtcctcgcactgtcactcacgcatggtattagcatttctaaagcccccttctccgcgtcgccgctgtggcccagccaaaaaggggctcactttgaaacgtaagttttgggaaggggtgct

SEQ ID NO: 395323 - DNA, 122 bp, Homo sapiens
ctgcagagataaccaggtagagccacgctcacgagaaccaccagccactctgagctaggacggggcacaggcaaccacgttcccacaaacacagggtctggaggtctctccgctggtcacgg

SEQ ID NO: 395324 - DNA, 122 bp, Homo sapiens
tgaagaagtggtagtcggttggtgagaagtcaggtgaatatggcggatgaggcaaaacttcgtaacccagtttgctcaacttatggaagcattggttgtgcaatgtgcattcgggcgttgtt

SEQ ID NO: 395325 - DNA, 122 bp, Homo sapiens
ggcatttcctgcatccgtgccatatatctatttacagtttgctctgatgaactttctgagcgaatccagaaaaatcctcattactctagtactctaggcagaatatatatgtcagctgatac

SEQ ID NO: 395326 - DNA, 122 bp, Homo sapiens
atgagcaaaagattactgtttgtcctttcaatggaatgctggatgttatctacaggactccggagtgttgtgaaatttacagtcgtctgcaccttacttagactgactttcactaggctatt

SEQ ID NO: 395327 - DNA, 122 bp, Homo sapiens
ttcgcatccgcccggccacgcctcccaggtgtggccacgccccccggcgttcgggattggcgagttgcaagaaatatgacactccgcgtttctgggctgcccggcccagcggcgtccgtcca

SEQ ID NO: 395328 - DNA, 122 bp, Homo sapiens
tcatcttcaagaggtgcctcaacatccagaacttcagaagtatgagaaaaccaatacattcgtagagttcaattttgacagtgtcactgagtccaccaatggcttttatgactgtaaagaaa

SEQ ID NO: 395329 - DNA, 122 bp, Homo sapiens
atcctgcagacatttatctagtcccttctctgtactcttaaatgctagggatttaaaagacggataagatacaggcttattatgtctgtgttccagacactggactccaaacataaagcaaa

SEQ ID NO: 395330 - DNA, 122 bp, Homo sapiens
cggaagctggggtctggttttgagtctcggctttgtcttaacctgtgttgggcgttgcaccgggcgacctcagtttcttcctgtacaaggaaaagtactgaccaaaatgagttctacataca

SEQ ID NO: 395331 - DNA, 122 bp, Homo sapiens
gcccctccctgggggagcctcaggcatcgcccagagggattcccggtgctgggggtggcccgcgcgcgctgcgcggggcggcccggcccctccttccttcccccgcccctcccagccgccgc

SEQ ID NO: 395332 - DNA, 122 bp, Homo sapiens
cattagtgttactatcaactttattagctcattttctgccaaatgaagccaagtgttttccgtattgctttggtcaaatccagtgtgctcccaagagcacctgacctcacacttacttagca

SEQ ID NO: 395333 - DNA, 122 bp, Homo sapiens
aggaaaaaggaggagaaacaaatggggttgggggatttttctttaaataaaatcttactgcgctctcctaacagatagttagaggtggacaccaagaagacagtactggaattggaggtgct

SEQ ID NO: 395334 - DNA, 122 bp, Homo sapiens
ttgcaaagataatgagtatcccctcctttgcctttttaaaatttccctgcctcagttgagcgtttctacctctgagtgggatgagcatgcaccctccacgtccgtggtcatgtttcatagtg

SEQ ID NO: 395335 - DNA, 122 bp, Homo sapiens
atggagccgctgggcgtgaaggggtccgtgtctgtgtccgtctcaccctcggcgaggtaccgcttctccctcatccagctcgaccccccattggggccgaacacataatcatctctgtcctg

SEQ ID NO: 395336 - DNA, 122 bp, Homo sapiens
aaacccacacacgtcatcaggtctgtccagcagcgagagcctccctcccgggaaacccaccgacgctcgcgcccaccctgatcagccccggggagcagctcccccaacaaagggtggatgtg

SEQ ID NO: 395337 - DNA, 122 bp, Homo sapiens
cagaggcacattcttcttttatgttttctttcctttctcctcctatttttagggccagtacgtggaaaatgcggaaattggaacttactataagtaactaattcagaaatcaggctggcaga

SEQ ID NO: 395338 - DNA, 122 bp, Homo sapiens
agcctgtggtgagaacaacaacagtgcctgagaatcccacggctctggggaagtgagccccgaggatgaggctgctcgcctggctgattttcctggctaactggggaggtgccagggctgaa

SEQ ID NO: 395339 - DNA, 122 bp, Homo sapiens
ataaggaaacatctggcaggcttggtggcttgtgccagtaatcccagaagtttgtgagatcgaggcaggaggattacttgaggccaggagtttgagaccagcctggctacatagtgagaccc

SEQ ID NO: 395340 - DNA, 122 bp, Homo sapiens
ctgggactgcggggtcctgggaaaggaggggccgagggcctggattcctgggtcttaggacgtgctgtagtttgcagcaataacaagggaacagagggatattttgaggaggggttttgagg

SEQ ID NO: 395341 - DNA, 122 bp, Homo sapiens
gctcagccctggaggtgaggtgggtgcctctggcctgtaggatgggaagctgtactggtgcgatgcacggacagacaagattgaacggatcgacctggagacaggtgagaaccgcgaggtgg

SEQ ID NO: 395342 - DNA, 122 bp, Homo sapiens
ggcagtgtgttcccaccacactcaccacctgggtctgacactcaggggctgagcaagacccgggcatggtatggatgccaaggggagccaagaaccaagaatgggccacagtccccattttc

SEQ ID NO: 395343 - DNA, 122 bp, Homo sapiens
gcgtcggcgctcgaggccggcaggggcgccctgcaccctcccgcgcccttccccgccctacgcgactcccggctgctcttcccgccactcccctgggctttgcgatcttccctacgcccccc

SEQ ID NO: 395344 - DNA, 122 bp, Homo sapiens
tggaagagtctgaactgactcagggcaaacacaaacgctcccgcaccgggtccgttgtggcgtaagcgggtgactggagcatcttcctcagatacagttacgagttcccagtgggtcaagtt

SEQ ID NO: 395345 - DNA, 122 bp, Homo sapiens
atctgcccacctcagcctcccagagcactgggattacaggcgtgagccaccaggcccagccgaatagttctgtatcacatcattcagctttggggggtgtctactgaaaccagggcaagcaa

SEQ ID NO: 395346 - DNA, 122 bp, Homo sapiens
ggagccgggcccgcagcctgcactgtgcccgggcaggcgagtgtgtggaggcccagctaccgcgggcggccttgagcgtccagcccgagcttcagggcttgggggcggcaggatcgtacctg

SEQ ID NO: 395347 - DNA, 122 bp, Homo sapiens
gcaatggtctattcaaaattccaccgaaagccagatgaagatgtctgtagtttcaggccccgggaggcattggcatgtttcatgatgacacttgccagcagctcatcgtttgtgctgaggaa

SEQ ID NO: 395348 - DNA, 122 bp, Homo sapiens
gcccgtcccgttgcccgcgatgactcggttttgtccagcataaatcaatgaccaccgtcccgggagccttggagcactttgagccattcccgtcccacccacgccccaaggaggtcccagcc

SEQ ID NO: 395349 - DNA, 122 bp, Homo sapiens
taggctaattgtgcaattaaaaaaaaaaaaaaattgcaaaaaccgcaattacttttgcaccgatctaatagctcgcccactgtaagtaaagcaggtaaagtcagcctttttcttctgggacc

SEQ ID NO: 395350 - DNA, 122 bp, Homo sapiens
cccgcccgcccccggcgcccttcgcattcccttcttcggccctggcccctcggaccggagcgcccaggccagctcagggtgttcccgtgggggtctccggaaacaatggtgagcctgtgctc

SEQ ID NO: 395351 - DNA, 122 bp, Homo sapiens
tggccccgccctatgcaaatgaggcctctccgtggggctcgctacttgggccagtcggagcgctggggagggtccgggctcctacaggattgggtgtcccggccgctccggaagacccgcct

SEQ ID NO: 395352 - DNA, 122 bp, Homo sapiens
cctccccgctgggggacacgcctgagcatgtccacttccttcctgggggacacgcatgagcgtgcccacctccccccaccccacaggacacacctgagcacgtccgcctcttcctccgtggg

SEQ ID NO: 395353 - DNA, 122 bp, Homo sapiens
accacttcttcagcctaaacttctgggagaattcaaccattttatgctgctcagtttgttcgttccctaggtagcccttaagtatattactgccttattccaaatttaaagggcataagata

SEQ ID NO: 395354 - DNA, 122 bp, Homo sapiens
cacagcaggaaccgcagtagcagccggagcgcccacgcccggggtcgcctagcccaggaacgccttagttgcaaccctgcgtcgaggcccagctccgtgcgcagaaagccgaggccaaccag

SEQ ID NO: 395355 - DNA, 122 bp, Homo sapiens
caagggacaagtctcatgtgtgatgtgcgtgccatacagagagttcaccagaatatctaacgccacaaccagggacattcaaactgcaaaccaggttgagaatttgctaactgcatgccgtg

SEQ ID NO: 395356 - DNA, 122 bp, Homo sapiens
ttgactctggacggaggtgtgagtctctgggttcaagacacctcgcagggaagtaatcgccgcatggaggggcttactcttcaggaccctccccactcccgagacgacaagcccccatctag

SEQ ID NO: 395357 - DNA, 122 bp, Homo sapiens
ccccacggcgccgcccgccccgccctacccgcggggatccggcgctaacgggacggctcccgcctgccattggctgtgagttctgccagtcttccagagaccccgcccctcgccgaacggct

SEQ ID NO: 395358 - DNA, 122 bp, Homo sapiens
agatcactgcttgaccattaactacttggataaccttgagcaagtcacttaatctctccacgcctacttgtacaaactagttaacctcaaggttctgttgaagtcctagtttctcaccattc

SEQ ID NO: 395359 - DNA, 122 bp, Homo sapiens
tgaagggtcagggatagcaaatgagagagcacgggtggatttaagtaagtatagtaccaccgtgggaacagaaaccttaaatccattctttatgtcgcctggagtaacattttcatatgcaa

SEQ ID NO: 395360 - DNA, 122 bp, Homo sapiens
tgttggtacaggctaagtctggtggaaagttaaggtaattaaccagatgaatcaaatttacgaaaaaagttaagtatactgagtgcagggcttgaatgcacagtttggcttcctgcaagcat

SEQ ID NO: 395361 - DNA, 122 bp, Homo sapiens
catgtgctcaatggcagtttctaggccattgcttccttttctctcctcatcctccaacctcgattaaaaggtcaagggctacatccaaggaatggtggggcagaaaggaggaaggagcctgg

SEQ ID NO: 395362 - DNA, 122 bp, Homo sapiens
agcgaaacctgccccgcaggccccgaaatagcttgttgtggaaacacttggggataaatacgcccaacgaggctgaaaataccttgacacccaatccgagaggtttgctcatttcccttcgg

SEQ ID NO: 395363 - DNA, 122 bp, Homo sapiens
gggtcccagtccgggcgcggaacccagggagtttctgggacccatacttgtccgcttctgcgtgggtttcactgcccggcggccttcgtttcgcaggtcgctagctgccggtctttacccgc

SEQ ID NO: 395364 - DNA, 122 bp, Homo sapiens
attttcagaggcagcaactgaagcagagagcaagttgccagaactcagcacacgcaggaccgtggtgtgcgtgcagctggggccaaaggctgtgcccggcattggggttggtgcagggctct

SEQ ID NO: 395365 - DNA, 122 bp, Homo sapiens
gcccggcaggttccggagccactggaagctgtggctcgatggctgggaactggcagggaccgtctggcctcggaagagaggcaggcaggcaggcacggagccgccttcgggccagcactccg

SEQ ID NO: 395366 - DNA, 122 bp, Homo sapiens
ccaggccctccacactgcgtgctggcctccacctggagccacgggcccatcctgaggggacggaaatggtttcacctgaaggaggccagctttttaactggcctttttccctggagggacag

SEQ ID NO: 395367 - DNA, 122 bp, Homo sapiens
aaaggacaatcagcgggaaagagcccagctattctaagactcaggtgggcctggctgagacgtcctccttctctgtctccactcacaccctttggttggaacttttctccctgggtcccact

SEQ ID NO: 395368 - DNA, 122 bp, Homo sapiens
attttggcatgaaaagccttgctatttaaaagaacgtgaatgcttcctttctttgaatgacgctttctgtatttcttctttttctatgttcagaaacactgaatttccggcaaagaaaggca

SEQ ID NO: 395369 - DNA, 122 bp, Homo sapiens
tttgaacctcactgaatagaatggatgggctgatgtgtcattcagcctaattccagcactcgttttttaaacatctatatatggaacactgattttaatctcgggatgtttctaatatagct

SEQ ID NO: 395370 - DNA, 122 bp, Homo sapiens
actaaacaggtattcaaactcaggtttgacaaccttctcttttgcattctggcagatttacgggcaatgtcaagctcaaaggcatcattataatgggagaggatgatgactcacacccctct

SEQ ID NO: 395371 - DNA, 122 bp, Homo sapiens
atataactgtattttaaagggggaactgtattttaatctgtaccctgggaatgaaaccgacgggaaaagactaactcagtctttgcagatatttattcagtatgagatatctgggttaattc

SEQ ID NO: 395372 - DNA, 122 bp, Homo sapiens
gctccactgatccggcccccgggggtgggcgggcacgtttgcctcggatggtctaacaggcgtcggggagagccaatggtgtggcttcatggctccacccccttccattcgattggccggcg

SEQ ID NO: 395373 - DNA, 122 bp, Homo sapiens
aaaagagagaaaaatgctgataaatttaaatctatttctgccatctaattttgtacttcccgtttgtttcttctgatctgtttttttctttcacttttgcattctttaggattactatttat

SEQ ID NO: 395374 - DNA, 122 bp, Homo sapiens
cccaaattacgcccgctctcgatccttaataatgggaaggggcttccacttgtcgccctccgcctcctgcacctcagtgacttccctgaccaaggaggaagaattggcgtgcagcctgggct

SEQ ID NO: 395375 - DNA, 122 bp, Homo sapiens
ttgcatatgtactttccactgttatgacatgtgactttccagttgccttttgcagcaacccgagggcctgcagggccggcgcatgcccacatgcctcgtttccttggcaagtgtttacatcg

SEQ ID NO: 395376 - DNA, 122 bp, Homo sapiens
acccgggaagggcagtgccgtgtgccagcctcccagttggcaccttcctttcaccttagtcgtcttcgaggcgatgtttcctcgggacaagtcattttcatgaatctgctgtaaaacgtctc

SEQ ID NO: 395377 - DNA, 122 bp, Homo sapiens
acccgtgctgtacctcctcggtccccgcggctcttcctgccgcggccgcgccccttctcccgcagccgcccgggaggctccctcactgcttagcaactcctccttgtgacctgggcgacact

SEQ ID NO: 395378 - DNA, 122 bp, Homo sapiens
gcataagtaggtttcaactcttatcataacattaataattggtagccactgtctgcagagcggtggtaagaatgtctctgagagtacttacggactcagcaggaaacagtgctatgatctgt

SEQ ID NO: 395379 - DNA, 122 bp, Homo sapiens
gccaccttctcgggatcgtggatgtaggggcagcgctcgccacggttgcacctgccgaagcggttgtagtacatgcagtactccttcctcttctccctgcgctgccgcgcctgccggatgat

SEQ ID NO: 395380 - DNA, 122 bp, Homo sapiens
ttaaacgcacggcagcgagctgcgcaatagagttggtacccagaggaggacggagaacgacggtcagggctttaagtacctttgcccacgtcagctcctggtcacgtgagggctgcatcgcc

SEQ ID NO: 395381 - DNA, 122 bp, Homo sapiens
gtattgcagagaggaactgtagaggaagaagagatctcaaaggcagagtggaatcattcacgtagttccttgagaactagagtaaggattttggattttactctgaaatgagaagtcaatag

SEQ ID NO: 395382 - DNA, 122 bp, Homo sapiens
agtgtgggaggtgacgagacctgtgaactcgggaccctcccttgggtcagaggccaccgccgcctcttggagtcaagcctctggtgccacctgtgggccccgtgggctgttttgggcgcagc

SEQ ID NO: 395383 - DNA, 122 bp, Homo sapiens
catgttcttaggaatgccccagcacctctcccgtcacactccgccagcgcgacccaacagcgtctgtcttccaggtcatcatccacgcccgacattacaaagcttgaatgacacttcagcgg

SEQ ID NO: 395384 - DNA, 122 bp, Homo sapiens
gtgcccgctgcctccccgagcggagacgtgacctggcttggggccgcacgcagggggaagcgtatccaacaccgcaggcccggcccctccccacgcgcgccagacggtccccaccctgcgcc

SEQ ID NO: 395385 - DNA, 122 bp, Homo sapiens
cttgaattcctgacctcgtgatccacctgcctcggcctcccaaagtgctgggattataggcgtgagccaccgcaccggccaaatacaggtttttgtccctctgagattagcatctgcagtca

SEQ ID NO: 395386 - DNA, 122 bp, Homo sapiens
ggcgggtccctgtgccgctgacgtcccgagcagtgctgggaagtataggctgtgttgtcacgccggtgtcagtctgatgaagattggcatcaggtaagctgtcattcatttccatgtcagag

SEQ ID NO: 395387 - DNA, 122 bp, Homo sapiens
gtccagccggccctcatttccccgcgtagagttgacctgtctctgtgtcccccgacctgccgagtcccagaagctgggttgaggactctcccgctgctgagctttcccactcacacgcacac

SEQ ID NO: 395388 - DNA, 122 bp, Homo sapiens
agagaacaccgccaggacttccaggacttggtctccaggactgaggtcaactgacgtgggcgtggtctgactgtgtgggcgtggccagggaatgaactcacggctctggcttaaggggtgtg

SEQ ID NO: 395389 - DNA, 122 bp, Homo sapiens
ctcccaggagctctggccgcagccccgggctctcccgtacccaccgttctcccagcccagcgtctgtccttcaggaaccccgccggccccacctccgcggtctccatcgcgggtcccagcac

SEQ ID NO: 395390 - DNA, 122 bp, Homo sapiens
aggcgtcaacagacacgtccagcgaacaagcacagggtgggccgtccgggagccttgtgccgccaggaggaaagccgcaccgagggcagcaggtagggagaggtgatccgtgctgggcccgg

SEQ ID NO: 395391 - DNA, 122 bp, Homo sapiens
ctgaagacccagctttatcttccaagggtaacaacattcccaagactcagagctggaaggcggcaagagtggagccaggagagacagatcgcatccactcctgaggccgcctcgaatgtctc

SEQ ID NO: 395392 - DNA, 122 bp, Homo sapiens
ttatgggctgaattgtcttcttggacacttatatgctgaaatcctaacccccagaacctacgaatgtgactgtacagtatttggaaatatagcctttaaatgggtaattaaggtaaaatgag

SEQ ID NO: 395393 - DNA, 122 bp, Homo sapiens
tccttttttccggaacgccggaacgtaagacgtgggtcacgcaacaagagcaactagtcccggaagcaaaaagcaaagaggcggagaagaagacgggaagcagagcccgcgtccgggtcggc

SEQ ID NO: 395394 - DNA, 122 bp, Homo sapiens
tcgcaacttctggcggcggattacccagggcttttgcgtggtgacctgagcggctcggggcgtcccagcgacgcgggaaggggcagggcgctgacctgctgctgagctggctgggctggacc

SEQ ID NO: 395395 - DNA, 122 bp, Homo sapiens
ggcctgggactcaggctgaacattggttctctgtgcggggcggtggcggggattggagggcgggagctgtgctgacttaggattggcaaaatcgctatcagccacgcctctaaaacccggaa

SEQ ID NO: 395396 - DNA, 122 bp, Homo sapiens
tgggcgacagaagctggcctcaaagtacttcaaaggacttattcctcctgcaaactttttcgtaaccctgaagttattatctcctcctgcttgataaagaaacagtacatcagcagtttatg

SEQ ID NO: 395397 - DNA, 122 bp, Homo sapiens
tttgtctcccatctccccatttggtttcctgtcatttctaagaaggctaaagctggcacccgccaacctcgcagtggggccgcaagttcggattgcatttcagggggcgagaaggcaaattt

SEQ ID NO: 395398 - DNA, 122 bp, Homo sapiens
ggcgtgatgttcccagtggggcttttcctagcaatggctttttaaactctgctgcgaggacgcccagcatcagcgacatccaactccctggaacggcagggctgccactgaacttgtgtggt

SEQ ID NO: 395399 - DNA, 122 bp, Homo sapiens
tcagctccctcggggactcccagggaagcttgttactgagaaggacagtggaggcggaatcgtgtctcccaccatgttaagtgtgtcctctgctgccaaggaccctcgtctacaccttagac

SEQ ID NO: 395400 - DNA, 122 bp, Homo sapiens
gagcccctggggctgtatttatctctgaggcatggtgtgtggtgctacagggaatttgtacgtttataccgcaggcgggcgagccgcgggcgctcgctcaggtgatcaaaataaaggcgcta

SEQ ID NO: 395401 - DNA, 122 bp, Homo sapiens
acctgactcgggcccagtaactagtgaggttttgcccaagggtgcgtggagtgggggaggcgatggagatcgaaatctgtcataatccgtggctctgctcttgagggactgcggtctccggc

SEQ ID NO: 395402 - DNA, 122 bp, Homo sapiens
ttttgttttggggtaaggaccagaagcggagatggacttccaagagaacgagagcgggaacgtgggtctggttcgaggcactcacccttcagaagttgtagctccactgtatcccgcaggtg

SEQ ID NO: 395403 - DNA, 122 bp, Homo sapiens
tagggtaaaaaatgcggaggctcaaatccatacgctccgatgggtcttcccgctttcctccggcccagtacccagcgatgctctcgctcacccggcgtccacaaaatggcagtccattttta

SEQ ID NO: 395404 - DNA, 122 bp, Homo sapiens
ccagccacgccgtcacgcaggcctgttctatgggcgagctgctgcagtgcggctgccaggcgccccgcgggcgggcccctccccggccctccggcctgcccggcacccccggaccccctggc

SEQ ID NO: 395405 - DNA, 122 bp, Homo sapiens
gctgggggtggaccccttcagctacagacccaaacaagaaaatgtaagcctagatgctgccggggcagggaaatgcgaaggctgattaaacgccttccgcggggccttaacctccagctgct

SEQ ID NO: 395406 - DNA, 122 bp, Homo sapiens
acctcttccacctcgccgccgccacagcaccaggagcctggcttgctgtgcggggagcggcgggccagggcctgacctcaaagacgcaggggcgggttccctgcagtcctgagaggtttccg

SEQ ID NO: 395407 - DNA, 122 bp, Homo sapiens
gccgcaccctcggagcccagcgcggagagggcgcttagtgcgtgagctaccgtcgttccccgcgactcagccgagcggcatccgcacaccctgctagcctaggaagcgcatcgagggagccc

SEQ ID NO: 395408 - DNA, 122 bp, Homo sapiens
cgaaccagggactagaactattaacaaagtcatttttctggcacagctttccgggaaaggcgtttcatatgggacggagttctgcctggggggcgggggtcaaacccttccagctcagcccc

SEQ ID NO: 395409 - DNA, 122 bp, Homo sapiens
accctccctgtagagctgaagccagggatgacatcacttctagaaggctctgagcctgagcggaggcagctagtgcctccccccataccctctctgccaggctgtgggaaaatgtctctact

SEQ ID NO: 395410 - DNA, 122 bp, Homo sapiens
cctcttggtccggctgaggcgctctgtcccggctgggtgggtccctgagtgctcatttttcgttttccgtcagaggccgacctttttctctggaacgcacaagccaggtccaaaagttcctt

SEQ ID NO: 395411 - DNA, 122 bp, Homo sapiens
tctctgagcctcagctttgttccgtgtgaagcagcggtaacattgttattagaagcctcccggccccagcacaccgacgtacatataagtggatatccatcctgcctgtgaggggtcgtctt

SEQ ID NO: 395412 - DNA, 122 bp, Homo sapiens
cttgaccccttggatgctctcgtctgtgagggcagcaatgagaattcctgctctcccggccgctgggcagatgtgccctcgcagatgagtgggtgtctgaactgggggcactgaggaccaca

SEQ ID NO: 395413 - DNA, 122 bp, Homo sapiens
acatgccatacttcaagcctgttcacgtttccaggctcttcagatgccctgagcagggtgcgaggagagggcagagaggctcccgcggcgtgcgcacactcgcgctcacactcgcccgcgct

SEQ ID NO: 395414 - DNA, 122 bp, Homo sapiens
gcctccccacggtcacctccggccgcagtgtggggctgggctggcagctggaactccaagcgtcctgtcccgtccctgcgcggcgactgcggtcccagccccggagccctctctggacaact

SEQ ID NO: 395415 - DNA, 122 bp, Homo sapiens
agccgtaaggaggacggaagctctgacgggctacgacgtaggtgagccttgagaatacggcgctgagtgaaagaagccagacacaaacggccacctagtgtatgaccccgtttctatgaaat

SEQ ID NO: 395416 - DNA, 122 bp, Homo sapiens
ctataaatgtacattttccattgcagcatgagcttcttcagatcagactgccttccccaacgactatgtcagaactgtacccctccttcaagacctcaaagaccacttcttctaaaaaatgt

SEQ ID NO: 395417 - DNA, 122 bp, Homo sapiens
gcttgtcgttctgctccttgaaggtgcccttgttgagctgcttgaggcagaaggcacagacgaagtgctcggggtggaacttcttggccatggcggtgatgcagcggccggtgatgggcttc

SEQ ID NO: 395418 - DNA, 122 bp, Homo sapiens
gcggtgattggccggttggccggaagaactctgtctctgattggcaggagagtcacgaaccggtcagccccgggtcaggggccgcaagtgaggacactacaagtgtcgaggggcctagggga

SEQ ID NO: 395419 - DNA, 122 bp, Homo sapiens
atctctgcgggagccggccgcacgctgacccgggcccgcccttctgtgctgacccggagccgccggcctccctgggatgtcattttagcacgtgaggctcaacctcttttccgttcggtccc

SEQ ID NO: 395420 - DNA, 122 bp, Homo sapiens
gcgttgcagcggcgcggtcacctccaggctccacccccgagacgcgccgccttggcccgtcggtcccgaacttggcgacgcctccccaagtccggctgcagccttttcaccgggatgggccc

SEQ ID NO: 395421 - DNA, 122 bp, Homo sapiens
tggggggaatgtttttccaaagcactctgaatcccccagagttcaccacagtctgttccccggctggatagaggacatttaagacaattgtgcttctaaaaggaccggtttacatggaattt

SEQ ID NO: 395422 - DNA, 122 bp, Homo sapiens
ggggcgtccgcggggctaggaggggagggaaactgaggctcgagcgggtgctcgcgtcctcgacctctgccggaatggggtctaggacgagattcctcaccctccgagcctcagtttcctca

SEQ ID NO: 395423 - DNA, 122 bp, Homo sapiens
gaccgcccatcgcggtgtacgtagagggtcccagggaggtgaaggggttggaggagagggcgtctgtagctcctgcgtgcccaggtccaacaggtgctgtcaaacacttcgatgttttttct

SEQ ID NO: 395424 - DNA, 122 bp, Homo sapiens
gatccggtcctggccctgacaaaaacagtccatttggatcctggccagggttgaatggatcggctaaagatgaaggtcttggccacaagcctaagcctttgtaaaatggtgaaggtggggag

SEQ ID NO: 395425 - DNA, 122 bp, Homo sapiens
ccctcctcacccttcaattgtcagaatatcctcattcttcttcaatgcagaacaagaactcgggaaccaccaaatgcaggtatgagctataacacagccatatgtgcaagtcaggcacagac

SEQ ID NO: 395426 - DNA, 122 bp, Homo sapiens
agccgctgccgatcttccggcccagccggtacctgttcccgactctcagctccatggcggcggcggcccgattcgctcctgccctcccggccgcttcctgggtctgaactctgggaggcggc

SEQ ID NO: 395427 - DNA, 122 bp, Homo sapiens
ctcccggccgcccacggacgccgccacccactccaggctcccggccgcgcacggacgctgcgacgcacaccagggtcccggtagggcccttcgtcctcacttgctttgaacatcacacaaat

SEQ ID NO: 395428 - DNA, 122 bp, Homo sapiens
tatgtgaagaagaaacagacttaattcaggttccttcaggaagtataactaaggtcaatacgtgaaagggagggagcagactgtagtagtaatctaaaaacatttctggcaaccaagacctg

SEQ ID NO: 395429 - DNA, 122 bp, Homo sapiens
catcaggacaccggtctccttaaaccgtaatataaacgcactattatgctttagctttaccgtgctttcttgagaagacaggttaaatgctaatatatcctcataagccacagacacaggtc

SEQ ID NO: 395430 - DNA, 122 bp, Homo sapiens
ggcggctgcagaagggcgcaggtgtctggcaggcccggcgcggaatgaatgagcccgggccgcgccataaagggggagggcagaggtggagcgatggggctggtgaggcggggcctgcgcgc

SEQ ID NO: 395431 - DNA, 122 bp, Homo sapiens
ggcagaggaaccggaggcgacggggaaaactgtggcgccccaagggggcttctggcacggcgccgccaggcaactccccagggcacgcgtcctaggtcgtctggagcccggggataggaggc

SEQ ID NO: 395432 - DNA, 122 bp, Homo sapiens
tgcgtgctgcgcccaaaagcgctcggcctgcactcggcggaaaggttgttgtccaagcggcgttccggggcaaggcccgaggtgtgtcccgctgagcagtgggtcgtccgcgtctgggctgc

SEQ ID NO: 395433 - DNA, 122 bp, Homo sapiens
cagtttgctcggaaactcgtgttgaggactcatcttagccctgggaaggtacccagaagccgaagggacacccctgacagggacgggccctgagaggctgtcgtttcccttggcagatgaac

SEQ ID NO: 395434 - DNA, 122 bp, Homo sapiens
ccgccccggacggcagcccccaccacggcctctgctgctccacagggcccgcttcgaggacggccgcccatcgccacgttctctgccaatccggaggcaaaaggtagacttcacgtagttgt

SEQ ID NO: 395435 - DNA, 122 bp, Homo sapiens
gcctctgcttctcgctcctcctgcccgcagcccgggccacctccaggagggaaggtgagtcggcttccacaaggaaacatctcagccctgggctgagaatctgcctttctctgcagaccgtg

SEQ ID NO: 395436 - DNA, 122 bp, Homo sapiens
tcttatgattaagttatcctatctggtcctagggaaccttaacattctttagggcggccgcgggggacaaagggcgggcggatccgcggggagggggcggggcgcggccaggccaggcccgg

SEQ ID NO: 395437 - DNA, 122 bp, Homo sapiens
gcggcgccggcagcagcggggctagagctgggctgcgtcaggctgagcccattcacctcgcggccacaggagctcagcgccggcgccgcgccgcccagccccgccgagaggggcgcactcgc

SEQ ID NO: 395438 - DNA, 122 bp, Homo sapiens
cttagagagcatctagttccacccgctccccacacagagaagacagtggagccactgagacggttaatgactcaccagttgctggtggacctgagatgtacccatatttttccttacacaag

SEQ ID NO: 395439 - DNA, 122 bp, Homo sapiens
caggcccactcccctagatggcagcagatacaggcagaagtggtgatcctaggggtaagacgccatgtagggaagcagggaggcactgccaagttcagtctgaggctggaagcggggtcacc

SEQ ID NO: 395440 - DNA, 122 bp, Homo sapiens
atgacacatggtggcgtgtggctggataaggtcgaggcagagggcagtgatgtctggggacggcctccctgggcagcctttatacctgggcccaggcatccccacagcacagaagcacacct

SEQ ID NO: 395441 - DNA, 122 bp, Homo sapiens
gctgtggtgggtggtcctcacgctcacctggttcctggccgccggcaagaagtggggccacgaggccatcgaagccaacagcagctacttccacctggcagcctgggccatcccggcggtga

SEQ ID NO: 395442 - DNA, 122 bp, Homo sapiens
gcggggggagccaaggaggctcggagcctcgcggcgcgcgggcgggcggcggagggggcgcggggagccccccgccccacgaaggaggagtctggctcccacttgcagcctcggacgcgcgg

SEQ ID NO: 395443 - DNA, 122 bp, Homo sapiens
aattaccatttcctttctattttcctacaattgatttgttttttaaaggtatagaataaccggtcaatataaatagatcacaaagaaacaaaggatgtattaaatgcaattcagagaaattt

SEQ ID NO: 395444 - DNA, 122 bp, Homo sapiens
tagcctgccacactcctcgcgcttggtgaagtatttgaagccattggctgcccgccgctccgccttctcatgcttcttgatgtgccaggggagcttggtggtgatgttggtcacaaaatagc

SEQ ID NO: 395445 - DNA, 122 bp, Homo sapiens
tgcctatataaactatacatctttaccaagaattgactgtgttcttccagacccgtgccacgtatagtcagacttccagtcacaagcttcgactgaagctcaaagtggatttgggagggact

SEQ ID NO: 395446 - DNA, 122 bp, Homo sapiens
tctatataatgtaattgaagacctcttttctcccaccttcctgaactttacagtgccaaacgatcaacaccaaaagtttgtgtgttgctttggcatttcttttaataacccttctttacaca

SEQ ID NO: 395447 - DNA, 122 bp, Homo sapiens
tgacctcgtgatctgcccgcctcagcctcccaaagtgctgggattacaggcgtgagccaccgtgcccggcccaggatggttttatcttcagtgtagagcatccctaattattataaaacaag

SEQ ID NO: 395448 - DNA, 122 bp, Homo sapiens
ggggtctcggctacttctctcggtggggaagcagggacagtcaccccagcagcccagaatcgttgtgaagatcgacgtggcccgtggccggagcccggaaccgggagggaagtgggaccagg

SEQ ID NO: 395449 - DNA, 122 bp, Homo sapiens
tgcccctgccgcgacttccgcaagggccaggtggccttgtgccagggctgtctgtgaatccgcctctgccgccctgcctggcacccacgctggctctctcctgccgcgggagaaagcaccag

SEQ ID NO: 395450 - DNA, 122 bp, Homo sapiens
aagttcaccttcaaggagctcaccttcaagatggtggacgtgggggggcagaggtcagagcgcaaaaagtggatccactgcttcgagggcgtcacagccatcatcttctgtgtggagctcag

SEQ ID NO: 395451 - DNA, 122 bp, Homo sapiens
aagacttaagagagataagcctatgtcagggtggaggaggagaaaactcgcctaaaaatacgctgagggcatctggggcagagcagagaaccggggaatcaaacagtgataacagctcattt

SEQ ID NO: 395452 - DNA, 122 bp, Homo sapiens
agctgccttcgcccctgccttccccgtgtactgcctgttccgcttcctgttggcctttgccgtggcaggcgtcatgatgaacacgggcactctccgtaggtctctgacctggcgccatgcag

SEQ ID NO: 395453 - DNA, 122 bp, Homo sapiens
tgtggtcacgccagaactccgtgcggagggcctccacaggcgccgaagagcagaggctgccgcgggggagcagcggctccagcagcacccgtccggggagggacgttcccctgcagcccagg

SEQ ID NO: 395454 - DNA, 122 bp, Homo sapiens
ctaaaactaagtatctgcctgcctgggctgccctccagatgtttcccattactggagcttcgagctcacgcacatgtctaagatggcaatcacaacatcatatcaggccaagaggaccctcc

SEQ ID NO: 395455 - DNA, 122 bp, Homo sapiens
gttagagtccaaatcccctgggttgctactcttaaacctccaaaacaccatcacttcagacgatgcactttcgaatccttcatgcaaaaatatactttaacacataattatttcaagagtgt

SEQ ID NO: 395456 - DNA, 122 bp, Homo sapiens
tcactcagcgtgggcttcagaggccggcaggcaaggccaaggccttgggctccgaccctgcgagcaagcgtgtgcctgaaaacctctgccccgactctaccctgctgggaggcctctccctc

SEQ ID NO: 395457 - DNA, 122 bp, Homo sapiens
cccgggtcagcgtctccacccaggccggacacagacatgagacaaaagtgcaccgaggcacgctctgccccgtgtttgacgagacctgctgcttccacgtgagtcagggatggtcggctggg

SEQ ID NO: 395458 - DNA, 122 bp, Homo sapiens
cagtagacacgtctgttcatcgccttcacctatggttcaaagctagaagctctggttgcacggcaagcccctcctttcctgcgtgaacacagacccctgctctgacccgcggctgcgtaaga

SEQ ID NO: 395459 - DNA, 122 bp, Homo sapiens
tgtactggtgaccgacagggacgtgtgaccaatagaaagcccagatgtccaggaagagtccgcctatcagccaatgaagagacagcagtgagagcggttgcgcagtgaaggctagacccggt

SEQ ID NO: 395460 - DNA, 122 bp, Homo sapiens
ccaaacagtgcctgagtgagaactggagttgggtacatcctgggttggtcctcacactgccgcctggctggggaccctgtaccatctaaggccaggatgtcctgtgtacgaccaggttccta

SEQ ID NO: 395461 - DNA, 122 bp, Homo sapiens
tctggtctccagaagacgccggaccagggcaggatgagaactggctgggagggctggcgccggggccgagggacggtggagcttctgcccgtgcggacgtgctgggtgtctgctgaccggtc

SEQ ID NO: 395462 - DNA, 122 bp, Homo sapiens
gcggggcgctctgcagaccccgggtactacttgttgcatttctgtataaaactgtttctccgggtgcgcgtcggcgggcgggaggagggagcaagacccggcgctttttgtttgcagctgag

SEQ ID NO: 395463 - DNA, 122 bp, Homo sapiens
ccggcccggggcagcccggcgttgagagatggagcccaaagaccagccactaatggtgagcgccctccctcgtgttcccgcccccccagtctgcgagtgcccgacgccgcctcccaagcctg

SEQ ID NO: 395464 - DNA, 122 bp, Homo sapiens
ttttaaaatagacatcacacaaccaacagggtcccctaggttcaggcggggaggtgaggtcgagtgagaggaactgcttagcatacgcggggatgctcctcccatctcaccccaccgcgcta

SEQ ID NO: 395465 - DNA, 122 bp, Homo sapiens
gaaccaggtcaggcagcggcagcaatcggcccgagaaggctgctggaggggcccagggcgcgcgaccgccgagctcagacccactgccagcttcaggaccgctttgatcaaacacctaaatg

SEQ ID NO: 395466 - DNA, 122 bp, Homo sapiens
accccgcttcgcagtagacggacagaggagtcgtagcggtcgaggcttttgcggctccggcgtgccggaaagtgcgtgagtgccgccgccggggagttttgttccatttcccggatcctggg

SEQ ID NO: 395467 - DNA, 122 bp, Homo sapiens
taagaaatcaggagttgaagagtattcagaagtgcaagtgtgcatgtgcatgcacacgtgcgcgcacacacacactcacacacaaatttccaaatgcgaccccatctgtgtacattgactgg

SEQ ID NO: 395468 - DNA, 122 bp, Homo sapiens
ctctggagaatcggggagcagagtcacgcaagcagaggcagcgtttccttccattcacaccgaggtggcctcctgtggacacggggcctcaccgaggcgctggcggctctggggtgcagctg

SEQ ID NO: 395469 - DNA, 122 bp, Homo sapiens
taatacccgcattcccaccttgctctggccctgtgtcccctccaacgtgcatcctgagctcgcaccctgtgtggaacccaaccagctgcttatcaacatttaagtccacttttatgacactt

SEQ ID NO: 395470 - DNA, 122 bp, Homo sapiens
ccgggtagcccaagccgcagggcagggggttcggcaagctggggctgcggtgggcgccagcgcccggctcctagtccagggagcatggctatgcctgtgtggacggggtctgcaggggtctg

SEQ ID NO: 395471 - DNA, 122 bp, Homo sapiens
gtccaaaatctccaggttgtagagcggtgggtctccttcctccagggagcatttatacctcgtccatggagggtgtggacacgtaagacaaccccttttttttttttttttttttgctcatt

SEQ ID NO: 395472 - DNA, 122 bp, Homo sapiens
ctgggttcaagcagttcccctgcctcaacctcctgagtagctgggactacaggcgtgcaccgtgaccacgcctggctaattttttgtattttagtagagagggtttcaccatgttggccagg

SEQ ID NO: 395473 - DNA, 122 bp, Homo sapiens
ctactttcagtaagttgtgaccagtatgtctggacgtggcaagcaaggcggtaaagctcgcgccaaggccaagacccgctcttctcgggctgggcttcagttccccgtgggccgagtgcacc

SEQ ID NO: 395474 - DNA, 122 bp, Homo sapiens
aaacagtgtgaacttactcggaaatgcaaaccgagttcaactcacccaggagcaaacaaacgacagcaagacaaatcagccaccgcactcgcggcttcccagaaagggcctcatgaatgaga

SEQ ID NO: 395475 - DNA, 122 bp, Homo sapiens
gtgaaataaagagggcggcacccggggggacctgtgcgtcattgagggaccggggagaagcgcagggcgcacggggctgcagaaggagaagtaggaacgagaagccggagggggcggccgcg

SEQ ID NO: 395476 - DNA, 122 bp, Homo sapiens
ggggcgcgcgcggaggggtaggcgcgggggcggggcgggcggggggcccggcagtaggggcgcgcgcgcggtggcgcgcggcgggcgcgagtcatcaattatgcaaggactcgggcggtgcg

SEQ ID NO: 395477 - DNA, 122 bp, Homo sapiens
cctcccctcctcccaccgatgaaatgttggtaattcaatccacggagaagcccgatgtcccggggagaggctggcatgggcagtgtgtgtgtgtgtgtgtgtgtgtgtgtgtgtgtgtgtgt

SEQ ID NO: 395478 - DNA, 122 bp, Homo sapiens
cacccctaggaaagcttataaaggctttcctcttggttctctttcaatcttattttgttgcgaggttctgagcgttgtctgtgtttaaccttgatttcagtcatgtctggtcgtggcaaaca

SEQ ID NO: 395479 - DNA, 122 bp, Homo sapiens
tagcgtgtttctcctgtttctataggcagtctaagaaaaacgctaggtggtaagagcacgcggtgtcactgtccgtggtcctgaaacatggttgcgtgctaagattcttcttaagccaatat

SEQ ID NO: 395480 - DNA, 122 bp, Homo sapiens
ttgtgcccaggagttctccaaacccgcgctgcggagtgagtgaccaagttccggccagttcgacctcgaggatccagaggtggagacggtactacctcccagctctgttttccatccccttc

SEQ ID NO: 395481 - DNA, 122 bp, Homo sapiens
cggcgttggcgtcttcgtcctgttgctggtctccgtccggtcgccggccgtctaggtctccggccctccccagccgctcctgcgcccttgccggccccgccgcccgcagccctggcgctccc

SEQ ID NO: 395482 - DNA, 122 bp, Homo sapiens
ataactgttattgttaatacaattgtagtagggaattgtattgtattgtaatagggtgaccgttgctcctgggctctgaaaaagcacctcttgttgtcacccctccagtccaaggaggtttt

SEQ ID NO: 395483 - DNA, 122 bp, Homo sapiens
caggcccgccgctaattgacctgctgttttcttcatttcctggttgatggcttttcttcccgagccatctgggaccctgcggggagagtcccgcccctccccgagggcaccagccggctctc

SEQ ID NO: 395484 - DNA, 122 bp, Homo sapiens
aaacaggttcaaagaagttgtgtcttggaaaaaaagtgacaatgcttttgaaaatgatgacgaaaaaggcatcttgtctgttaaccacagcttgctttaatagaatcctgggagggtgattg

SEQ ID NO: 395485 - DNA, 122 bp, Homo sapiens
acaacagcctcccgatgagcccccccatttccattcctgcctctttctacccattctccacgatgcagccagggttatcttttcagaccaaaaatctggcctgctgctcttcaccctcaaac

SEQ ID NO: 395486 - DNA, 122 bp, Homo sapiens
tcgcgagacgcagttctgactccggctcacgactccagactcctaactacccttagcgaccgcccactctcgtggctgccccgccctccgccccagggattggccctgcatggtgatgggcg

SEQ ID NO: 395487 - DNA, 122 bp, Homo sapiens
atgggccccagggtgctgtccccaccaggtgctcttgtggggaggcgggggaagggcgcccgtgtgggtgtcagcgtgctaaccctccaggctaccgcatctgccccgggtactgagtccct

SEQ ID NO: 395488 - DNA, 122 bp, Homo sapiens
gtgacctgtaccagggctcccggcaagcaaagcaaaactagaataaaacctcaagtaggccgggcgcgtggctcaccctgtaatctcagcactttgggaggccgaggcggtcggatcatctg

SEQ ID NO: 395489 - DNA, 122 bp, Homo sapiens
acaggttctactcccgactcacctgtgactgagggcaagaatgctttcttctcagagactcggtgtccccttttgtaaaatgaggctcattctgtccttccccaagggcttcagggaaactc

SEQ ID NO: 395490 - DNA, 122 bp, Homo sapiens
taactagccatattgaaatcgggatgcggtgctgaaggctttctctcctccctctgcctccgcgctctcgctctgatgtgctgcattgatgcaatagcagctcgcctcaggcttccaccttg

SEQ ID NO: 395491 - DNA, 122 bp, Homo sapiens
ttccctgatcccagggaaggggaaggaaatgaattctgacgagccacgtagccgcctgctcgtgcattctagcatttgttttcagcagccttacgacttcaagagatttttataaaaaggga

SEQ ID NO: 395492 - DNA, 122 bp, Homo sapiens
cagaagacagcctttgtcctaacagaagcactgggagcacgtaggaggggccgcgccagccgtcctcccggcttctcatcactggcattgtttcagaagacccccaccaccaccttcgtccc

SEQ ID NO: 395493 - DNA, 122 bp, Homo sapiens
agcaagcagattgccccagaggggccggtaataatcacgtgagggataatcagattcctgcgtattcagcatcttctctattcatgtggagtgaaagctggtttttatacaggagatacgta

SEQ ID NO: 395494 - DNA, 122 bp, Homo sapiens
tctggcacccatggttgggaatatgtttaacctctaaattggggttttcctgctgaactgcgtctgaaagactgcttctctgagctagctcatgtttttgctttttctctctattgattcct

SEQ ID NO: 395495 - DNA, 122 bp, Homo sapiens
tgtcgagggatgcacaaaaacccagcatgggccaggtgtggaggctcatgcctgtaatcccggcactttgggaggtcaaggcgggcagatcacgaggtcaagagatcgagaccatcctggcc

SEQ ID NO: 395496 - DNA, 122 bp, Homo sapiens
gcgtggagagaaagggtgcgcgaggccagggctcgaagaaacgcagcagagggcaaagggcgaggtccaacggcccagccccagcaggggactctcgagcttcgggattccgcctacccggt

SEQ ID NO: 395497 - DNA, 122 bp, Homo sapiens
accagtatcgcggcccctcggccgaccggcgaccacagcagtggctgcgacggcgtggagcgtacccgagcgatgtcccaggagctactgggtaacacaccaccccacccgcttcccggctg

SEQ ID NO: 395498 - DNA, 122 bp, Homo sapiens
tcttgaccagacagtgcacacacatatataatagagagaactatacagcacagaccccagcgcagcgcgagccggggaggagccggcgctaggtctacacggaggacgacgcagacacacag

SEQ ID NO: 395499 - DNA, 122 bp, Homo sapiens
tattgtatcagaagtctttcatgcagcctggcctttcatgtagctctgaagcagctttatcgatgtatgctaagtaaacatagctttgtttttgtcttccacccaccgctccctcccggcac

SEQ ID NO: 395500 - DNA, 122 bp, Homo sapiens
agcccagcgcgggcagcccggcgactgcgagtcctggaggaacaggagcaggtgagggagcgtccgcggcagaggcccgccccgcctgcccgagatcctcgccctccagacccacctcctcc

SEQ ID NO: 395501 - DNA, 122 bp, Homo sapiens
ggcggttcccactagcacctcgggaggatcccttcactccgccggtccccgcagggcaggcggaccccacgcggccagtccgggactacccgggactacccgagactttgcatcgcgtggcc

SEQ ID NO: 395502 - DNA, 122 bp, Homo sapiens
ccgccccccacgcccgggctgctgcgccccaggagggactagcgggtattcagggatgcccgcactctcgggggcgagcctgcagctgtgtgccctgtaggggcttcctgcggggcaccgtg

SEQ ID NO: 395503 - DNA, 122 bp, Homo sapiens
ggagcctctcgcaggccttgggctgcccatccaggcgtggcctttccttggccctttggacgacgacgccgcgttttcctcttggtctcggcctccctgcccaccatgagagtggacatgag

SEQ ID NO: 395504 - DNA, 122 bp, Homo sapiens
agacggaaacagaaaccctgcaaaggtgcaccgagtccttaagctgcttgtagctctgcgcgagtgaggagactgcatgagtgggggaagggtgtgtgtgtgttactagtgtccttggtacc

SEQ ID NO: 395505 - DNA, 122 bp, Homo sapiens
ttcctccgcaggcatgggggacgcgctctgccgatgtgggtgtcctgggagccggcactgcggcctctcagcttcctttcccaccaggagtatccagggcggaccgcaccacagacatccca

SEQ ID NO: 395506 - DNA, 122 bp, Homo sapiens
tttcattgcttatatatttttgtttctgtgcataagcctcccgagggagccgccgctgttcgatttattctatagctagttcctcgccctgagtgtaagcctcacgagagtggggctgtcct

SEQ ID NO: 395507 - DNA, 122 bp, Homo sapiens
gccggagcatcccttgcccaaggttctgaacttgggttcccgtcacctgcaagtcagtgccggcggcgcccctaagcgcgctcagcccacgccgcggtccctctggatgaggaccggcgcct

SEQ ID NO: 395508 - DNA, 122 bp, Homo sapiens
aaggccccgcgctgctgagctgtgagcacggctgccccgtccgtccgtccgtccagcacccgcccggagagtgaggccagagcacgccccagccgtgtctaaatcaaggctcggggcggtac

SEQ ID NO: 395509 - DNA, 122 bp, Homo sapiens
cggaagtgaaagtgcggggatccgccggcccaggagacgcggcttctagcgcccggttcccgggaagctctgtgacgcgctaagccccgcccccacccgtcacctgacccagcgcagcctcg

SEQ ID NO: 395510 - DNA, 122 bp, Homo sapiens
tccgaggcttgctgggaagtgatgacttaggtaacatgttcaaaggctgggcagtcaggacgaaaggtacactgtcccggatatgtcatcgcctcaccagatttcctctggatggaactctc

SEQ ID NO: 395511 - DNA, 122 bp, Homo sapiens
gcaggtcggtctcacgcgtgtcctctgacaagttggtgacacggatggtggcgttgtcgtcggctgtgtgggagaggggaggtggctgtgagggggaggacactgcccagccctcgtgtgct

SEQ ID NO: 395512 - DNA, 122 bp, Homo sapiens
gagtcgcggacttgggccctgcagtgagctctgaaggacgctgcctccctccttctaagtcgcagacgtgggccctgcagcgagctctgaaggacgctgcctccctcctgaagtcgcagacg

SEQ ID NO: 395513 - DNA, 122 bp, Homo sapiens
actagggctgctgccgctgctgctagtggaggcggcggcggcgccccccgacggtccctccgcctcacaccgcctctgggtcactgacatacactcgcaaggaggggaggggtctagccggg

SEQ ID NO: 395514 - DNA, 122 bp, Homo sapiens
taacagcagggtgggactttgatctcatactcctaggtatgggtgagtcacagtcctaggcgatcacaggggttcaacacgtctgctttctggtccaggtctaactgggtctgtgactggac

SEQ ID NO: 395515 - DNA, 122 bp, Homo sapiens
ggtctccctacattacctaggctggtctggaacccctgggctcaagtgacttgcctgccccggccttcctaagtgctgggattacaggcatgagctacctcgccgggccccaaaattatttt

SEQ ID NO: 395516 - DNA, 122 bp, Homo sapiens
ccgttactcatccaagtttgtcttgagactgggctgtgagccggcactgcagtgaaacgccgcagatgaggaagtgcccaagtcttccttcgggaagttctcgtttagaggagtcaggagaa

SEQ ID NO: 395517 - DNA, 122 bp, Homo sapiens
caaattcaaggctatttagctgacaaccgcttagagtagtaaaacaggttatcaagaattcgaaggtgtggctgggcacggtggctcacgtctgtaatcctagcatttgggaggctgagccg

SEQ ID NO: 395518 - DNA, 122 bp, Homo sapiens
acaggacggtaagcccgccctgccacgctgagctgtcccctcctcccagagggagacccgcgtggcccccgggcagtgccgaccctgtctgcctgtctcgtagggcagcagcatttcagatg

SEQ ID NO: 395519 - DNA, 122 bp, Homo sapiens
ggacctcctgcctcctgcttctgatccctgcaagccgcccaccctgcgatcgccgggtcccgccctgacaatgccctgccgccagttccagccccagtgcagccgtcgccggtcctgtgcgc

SEQ ID NO: 395520 - DNA, 122 bp, Homo sapiens
agtttgtgatatgtttgtaaatgatttcgaatgacccctcgccctgcccttcaccattagcgcgccggcctcagcccaaggcggctcggtgcctgtgagcagcgcctgcctcggggtctgca

SEQ ID NO: 395521 - DNA, 122 bp, Homo sapiens
tttggctaaccgaattattctttcggtttgagccagctcccctttttgagtcagatccggcggcagggccagaaaagcgctttctgaaaccccagcgcggtcctcggtgggggtggaatggg

SEQ ID NO: 395522 - DNA, 122 bp, Homo sapiens
ataggaaattgtaaatccacattgctggggaagtcggataaactcaggggctgacaagggcgggatcttcacgtggtcctggggtgcctcccacacaggacatattttagttcccggggaac

SEQ ID NO: 395523 - DNA, 122 bp, Homo sapiens
atgactaacacagctatagatccgggcattgcaggccgtcccagagggccggctttacaacgtggccattgatccagcccaggtgtgcacagcctcggccactctcatttccccttcctgcc

SEQ ID NO: 395524 - DNA, 122 bp, Homo sapiens
ttttacacagttgccttaaatgaaagggggtttttctgcttttaaaatcaaaggagttttcgtaccattgcccaaggaaggggcagaccaacaacacagcaacaaggccagagagagggagc

SEQ ID NO: 395525 - DNA, 122 bp, Homo sapiens
agtgggcccgaccctcatggccctgagcaaagggctgcggctgctggggcgcctgggggccgagggggactgtagcgtgctgctggaggcgcgcggccgcgacgactgcctgctgttcgagg

SEQ ID NO: 395526 - DNA, 122 bp, Homo sapiens
ggccctccggactgacgcggcctgagcagcagcgagtgtgaagtttggcacctccggcggcgagacggcgcgttctggcgcgcggctcctgcgtccggctggtggagctgctgcgccctatg

SEQ ID NO: 395527 - DNA, 122 bp, Homo sapiens
gtggtgttcattcaacatgtccagtacagcctgttactgcagtttccaagttggagggtccgtgagtctactcccttttttgaacagaggggtacatggggaagctgagcctctgatgaatg

SEQ ID NO: 395528 - DNA, 122 bp, Homo sapiens
gagtggcaccttccagggccaggagaggcactggggaggggtcggtcacaggatgccacgcgggcacctagaagccacagctaccctctacagagcggcactgcaccatgcgcaggaatgtc

SEQ ID NO: 395529 - DNA, 122 bp, Homo sapiens
ggcaggaaatgttgcaaactgtcaagagctgtcagcgggcgcctgccccaatcaggtaagcggcgcgcgggcgcctgcggcggagacacactgacccctagtggccgaccgggccctcgcag

SEQ ID NO: 395530 - DNA, 122 bp, Homo sapiens
catggtaaatggggttgtataagaatttgcacatcccaagttgctatgtgaataggaatgcgtttccaggggaaggagaaagagacattacagagcagacagctctatgatgtttactatac

SEQ ID NO: 395531 - DNA, 122 bp, Homo sapiens
ctgcctcccagagaagactgttgcggggagacaggctgcgctggggtcagggtggaagcccgcggggccagcggcgttgagggaaggttctccggaagcagccgctgttctggcttggcgca

SEQ ID NO: 395532 - DNA, 122 bp, Homo sapiens
attctatcttgcagatagaattagaagccaggggatgaccttggaaaatacagtctatttcgtccaattgttcttgcctgtctactccatgtaataatgaagaatttgctcctttaggctct

SEQ ID NO: 395533 - DNA, 122 bp, Homo sapiens
cgaatactcagaggcccggagtgaaacacagtgcactttattggcgacagaccggaggggcggagggggctgtgtgctatatacatcagagctgtagtgagcatcccacccagggaggggac

SEQ ID NO: 395534 - DNA, 122 bp, Homo sapiens
ggccgggatcatctgattccggggcctcccgaaggcctcctagctgggttttggggggaccgaaacgagcgcatgaagctcgcgggcctgggagtggggtggggcgggagcccagtggtggc

SEQ ID NO: 395535 - DNA, 122 bp, Homo sapiens
gcagcctattcctaggagccgcttctgccctgcctaactcaactgctttgtcttccatggcgtctctctctctctcttttctttttttttggctctctcagctagaagtttattcctctctt

SEQ ID NO: 395536 - DNA, 122 bp, Homo sapiens
aggtgctctgcccacaacaagccagaccccttcccgtctcagccctggccttgcccaccccgttagacaagttggtgggtatcctcctggggatagcagcaccagccgcttgtgtgcggatc

SEQ ID NO: 395537 - DNA, 122 bp, Homo sapiens
cctgtctgggtagatgctgggccttggcgccctgtccgggtagatgctgccgggccttggcgccctgtccgggtaggtgctgccgggccttggcgccctgtccgggtagatgctgcggggcc

SEQ ID NO: 395538 - DNA, 122 bp, Homo sapiens
cccggctcctacaacctcaaagacttcttagaacagctgcgggagaaaccatgtagcacccgggggctgctcagctctggggaggttcgcttccgaggactcactggggtaggtgttctcat

SEQ ID NO: 395539 - DNA, 122 bp, Homo sapiens
attatcaggcagcctcttccactggaaagattctctgttgcactgaggtctccggcttcacgtgctgcacaagaaaagcacagctattgtgcaaggagaatgagaggagcaaaaatgaatat

SEQ ID NO: 395540 - DNA, 122 bp, Homo sapiens
gggagagggagagggagagggggagggggagagggagggggaaggagagggtgagagagacggagagcctgggagggtcgcatcagccctctgtggcccctatgggtcttcctggttgacca

SEQ ID NO: 395541 - DNA, 122 bp, Homo sapiens
ttgtagaagcacgtcccccacgctgcaggtaccacagcccctggcagcagtgaagaggcccgggcatggtctcagttacttctcaaagctgggactcctcacggcctccagtccggtgacaa

SEQ ID NO: 395542 - DNA, 122 bp, Homo sapiens
cctattattattgttgttgttattgagatgtagtcttgctctgtcaccaggctggagtaccgtggtgtgatcttggctcactgcaacctctgctccaagggtcaagcaatcttcccacctca

SEQ ID NO: 395543 - DNA, 122 bp, Homo sapiens
aaaactaggcctgtcacccgtgctgtctgtgtacacagatgggcttcagagcctgtcacacgtgttgtccgtgtacacagatgggcttcggggcctgtcatacgtgctgttcgtgtacacag

SEQ ID NO: 395544 - DNA, 122 bp, Homo sapiens
aagcctggcggtccctgcccgctgcagatgctcatttgcattcatttgcatactgttccccgcccctctgggcccagctgcctctggccctccagcccgcgccgcgccccctgccggcagca

SEQ ID NO: 395545 - DNA, 122 bp, Homo sapiens
ccactgcggcaaacaagccccgcccccagagggtagccgggcacgccggcgccgcgaggccgatggcaccccgcaggaaggggcattttcgcagcccccagacccagcccaggaggcccagg

SEQ ID NO: 395546 - DNA, 122 bp, Homo sapiens
aactcaagtagatggcaacatttatcacgtccacagaggtttaaaaaaaactgcatataccgatcaaccttgggatggctcataacaaatcatcaggttggcaaacatttggctccgcagac

SEQ ID NO: 395547 - DNA, 122 bp, Homo sapiens
accctcaaaccacccagttatgagtaagaccagaacaatccctttcctccgacagtcccacgtttgcttccaggaatcaaagagcatgccagtggcagctatctgtggcagttttgggaaag

SEQ ID NO: 395548 - DNA, 122 bp, Homo sapiens
tgtgagccaccacacccagccaggctagtaatttttaaatatttgctcaggggttgcaaacgtccagagcctaggcatgtgagataaatgagcagtgccggtcaggaaggggctaagcctct

SEQ ID NO: 395549 - DNA, 122 bp, Homo sapiens
cagagaaggactttaaaccttcagaggtcaaagggaaacccactggggtctgaggggccgcgcgcgcaaagccgggagggggagtttctggggcaccggcaggggtcgttgggccgactggc

SEQ ID NO: 395550 - DNA, 122 bp, Homo sapiens
tcatattgaacgtttaagcacattcccaagcgccaggattcccacacccactttagtgatcggggtggcttcatgtttgtgttttaccaactggccctctgttatgctttcacttgacaaaa

SEQ ID NO: 395551 - DNA, 122 bp, Homo sapiens
caggaccgagtccaagggtactttgcgtcctttgccaaagcctacgaaacggtgtgtaagcgccaggacaaggaattcttcgggcttcgtgactactacagcctcatcaaaatggtctttgc

SEQ ID NO: 395552 - DNA, 122 bp, Homo sapiens
agaaagtcagtgtcttaaaacacaaaccgtggctattacatgaggccctcagaatagtcccgagcataatacatttattcagtgctgtagctgcttcccagctgaaagaggaataattgact

SEQ ID NO: 395553 - DNA, 122 bp, Homo sapiens
ccctaacccccatgctcttgtgccttccccctctggccaggcctctgggctccgtgggggcgccccttcttggaaggcagggctggacactgatggacagcaggcagggagacagtcccctg

SEQ ID NO: 395554 - DNA, 122 bp, Homo sapiens
tcctctggcaaccagctctcatcctaaaactatctaggggcttccagccatcagttatctcgttaacataaactcaggtatggttgaaaggagcttgttatgaataacaaaagatgctcctc

SEQ ID NO: 395555 - DNA, 122 bp, Homo sapiens
tttgcctggggagtgggtacagaggtgagataggaaaagtggaaaggaagatcatcttgtcgggataagtgaatgaagtcctcctgcagaaagattttccgcaggtggtaggtcgcgagctt

SEQ ID NO: 395556 - DNA, 122 bp, Homo sapiens
tgaatcgcagcgcggagcctcccaactcgccctccccgactccaccgccttctccttcctcgcacaaaatttccctacacacgcagccgcctgcgagtgattttatgtgcatatatattaca

SEQ ID NO: 395557 - DNA, 122 bp, Homo sapiens
cacggggctgactttctagcagggcagacagacaaccaaccactgtgttaaaatgcagagcgtggccagtggccacgagcctagggagaaaacccacggaggggggcctgtgggggcaaggt

SEQ ID NO: 395558 - DNA, 122 bp, Homo sapiens
ctcggcgctgctcttcagtctcctgtgtgccttcttctggatgggcttgtacctcctgcgcgccggggtgcgcctgcctctggctgtcgcgctgctggccgcctgctgcgggggggaagcgc

SEQ ID NO: 395559 - DNA, 122 bp, Homo sapiens
cagcatggtacttcttatcacacatggagtccacacacctgatgccaagtctccagttggcgcttgtccttaggccacactgccacccacaagagactcagggcgcaggggcaaacaagcca

SEQ ID NO: 395560 - DNA, 122 bp, Homo sapiens
gcctggctgccccttctggacactcttggcttggtcagtacctggggtgatttaacttggcgtctaacagtgaagcttcctttagttgtatcttctgctgttgcttcacattgagcttgcca

SEQ ID NO: 395561 - DNA, 122 bp, Homo sapiens
gggcggaggcttcttggccccgcacagccggcgggggcctgcggggcttgatggggggggcgacgagctccctctgggctgccggagtgcctgggctaggtgccacaaagtcccgcggcaag

SEQ ID NO: 395562 - DNA, 122 bp, Homo sapiens
taaaacaaagtttgacttctggacaattatccagggagagggcggggaacacaccttgcccggactgtctgggaatcccattgacaggtcatctcaggttcaccatcttcctgtcgtgggct

SEQ ID NO: 395563 - DNA, 122 bp, Homo sapiens
ataagaaactgccaagaatattttccacagtggctctactatttcatatctcaccagcaacgtatgagtggtccacttatccaatttctcttgcatcctagcaaaacaactctaaaatttat

SEQ ID NO: 395564 - DNA, 122 bp, Homo sapiens
ccgcagaggggctcggcagcggagccctgtcctgctcccaggaggcgggtggcggtggcccggtgggcactacacacgtggaactggaagagttcctgagaccctgcttcgaagagatttcc

SEQ ID NO: 395565 - DNA, 122 bp, Homo sapiens
ctctgtaaataaagggcaggtggcctctgcaggaggcacactgggccaccttctgcggagcgagactgcctctggcaggtggcttggagccctgaggctcaccacagggtggaaacacccag

SEQ ID NO: 395566 - DNA, 122 bp, Homo sapiens
gcttgggaatccttagtaatgtgtaccccacctgcaggaagaccgctttcccctcctgcacggatggttttcctgcgtccctttcctccacctcctcctgactgggttttgcacttccctac

SEQ ID NO: 395567 - DNA, 122 bp, Homo sapiens
aggtgtgtctgcttggcgtccctcagctgcaggggaccctggcttccacgaagttggaggcgttcatgctggcacttcccagctggcaggacctgggggacatcctggtggagcaggggcct

SEQ ID NO: 395568 - DNA, 122 bp, Homo sapiens
cgcccggcccagggtctcctcttttctaacagctcgggtacctttctgggaacccagagacgcttctcagccgggagaaagccagccactaggcgagcaggagcctaaaaacccctaagcac

SEQ ID NO: 395569 - DNA, 122 bp, Homo sapiens
ccacccactctattctagaaatgctaacacgcagaaactgccaggctggagccccttcaccgggcgtcctcttccctcttatccctcccagcggctctcgcaactgcaggtggctcagcagt

SEQ ID NO: 395570 - DNA, 122 bp, Homo sapiens
caagaagacaagaccatactgggacctgggacctaaggaagataagaaaacaccagatgtcggtccttgaggaagccaagagaatacctccttgtcctgagctcccaaggaagatgagagca

SEQ ID NO: 395571 - DNA, 122 bp, Homo sapiens
cgggtgctctggggtgtcgctttgggttcagcaatacaaatctgccagctggagattaggcggggcacgccggggagaggtgatgcactgccgctgaagacccaggtaggccggtgcgttcg

SEQ ID NO: 395572 - DNA, 122 bp, Homo sapiens
cgagcgcgagcgcaaccgcgtcaagttggtcaacctgggctttgccacccttcgggagcacgtccccaacggcgcggccaacaagaagatgagtaaggtggagacactgcgctcggcggtcg

SEQ ID NO: 395573 - DNA, 122 bp, Homo sapiens
ctacttatgatttcctaacaagccaccacagaacatcacattcccaaacatgctcttcaccgtccctgctgtccccacgtgcctagccctggtgtgggcaggaatgagtgggattgggatgt

SEQ ID NO: 395574 - DNA, 122 bp, Homo sapiens
gctgaatggtgtaggtgagctggtactacttgagactgttcacgaatggcatgggcagaacgttcacttcagaggcaacaagagctcatccaagtgagctgctgggctctcacaatgaataa

SEQ ID NO: 395575 - DNA, 122 bp, Homo sapiens
tgcatttagtcattttcagtttttttccaagacttttggcaagcctttctccacatgttccgggctggatctcagggtcggaaggggaacagagccagttttggggcttaggggaaacagcg

SEQ ID NO: 395576 - DNA, 122 bp, Homo sapiens
ccgtcagagccaatgagggctcggaaagaagcatttccgtgtgtgcgcctaatgtagggccgagacttccggggtcctcttgtagcggccacgttgatctgcgatacgcgtgtttgcccagt

SEQ ID NO: 395577 - DNA, 122 bp, Homo sapiens
tgagacagcagtgaagccgccggcacctccgctgccgcagatgatggaagggaacgggaacggccatgagcactgcagcgattgcgagaatgaggaggacaacagctacaaccgggggtaac

SEQ ID NO: 395578 - DNA, 122 bp, Homo sapiens
ggggccgctcctgcccgggtctctcctcgggctcggggtcagctgctgggacacccggggcgcctcttgccctggcttctcctgggtctgcacttgggagaaagatcttgattttcactgtt

SEQ ID NO: 395579 - DNA, 122 bp, Homo sapiens
aacaaattctcatctacatatgacactttctagccagttgtgttgagaagtgcaaagtgacggtttaaacatgtgttgggatttattgaactaattttaaaatttactattcaaactttatt

SEQ ID NO: 395580 - DNA, 122 bp, Homo sapiens
gggtagcgggcttgcagcggggatgccttggcggcctcctcctttggtgtcgacggggaccgagagtcgcaggaacgagggcgagcgtgggaggccaagcctggaggggaacgtgggggcct

SEQ ID NO: 395581 - DNA, 122 bp, Homo sapiens
gaaccaggtaatggaagtagcctaaggagatggcattttacaatattttgactatgaccacggtttagctggttctttagaaacaaacaaacaaaaaaattggcctgttatctggggatagg

SEQ ID NO: 395582 - DNA, 122 bp, Homo sapiens
gcaccgagcggggctccaccgactcgcgacctccagcctccgcctcaagggcagggagcgcggctgggtctctggaaagccatttttaaatcactgcctctgctgcccccatgtgaggtcgg

SEQ ID NO: 395583 - DNA, 122 bp, Homo sapiens
ataaccaggaagagagccctcacgaagaacctgaccatgttggcaccgatctcagaattccggcctccagaattatgagaaataattatttgttatttaagccaccaagtgtttggtattct

SEQ ID NO: 395584 - DNA, 122 bp, Homo sapiens
gaggctctgagggtgcctctgtgggtgccgggcccaaggcctccctctgccgtccttcctcgtgtcgcgcagtcacacaattgcattctgtgcgcttctgcgggactcatcacgaaaagggt

SEQ ID NO: 395585 - DNA, 122 bp, Homo sapiens
cggctgcccaagtgacgcacttgtaggcggattcggaaactcgtgctcttgagccggaggcggagcccccagactcagaccgaccccccagaaccgggcggccttgcccgaggcatgaaggc

SEQ ID NO: 395586 - DNA, 122 bp, Homo sapiens
tggctccaacaacctctgcagatgcagatacacaaaaatccctgcattgagccgagatcgcgctactgcactccagcctgggcgacagagcaagaccccgtctcaaaaaacaaacaaacaaa

SEQ ID NO: 395587 - DNA, 122 bp, Homo sapiens
cccttaagaggatgaggagggtgaggcatcagcaggctgagcgccttgctcagggcaggccgtgggaccctgccgaacagcacgtggctgccccacgcctgcctggagcatcccctatcccc

SEQ ID NO: 395588 - DNA, 122 bp, Homo sapiens
tgaggactatgattttgaagatcgggtcagcgactcgggttcatattcctcagcgagtagcgattatgagtaaggttttcaaagagggacaattaatcccatcccatcaatccagagaatat

SEQ ID NO: 395589 - DNA, 122 bp, Homo sapiens
cagcgggggcggcggcagccccagcgaggcctccggcttgggcctcgacttcgaggactccgtgtggaagccagaagtcaaccctgacatcaagtcagagttcgtggtggcttaggatcttc

SEQ ID NO: 395590 - DNA, 122 bp, Homo sapiens
aaattctcagacaagcacaggacctctgtatgactgcacaggtcacaggtcgcacactcacgaagccagcccagtgctcaatactgtattttagaataagcaggaatcagtttagggctgcc

SEQ ID NO: 395591 - DNA, 122 bp, Homo sapiens
aacatgtcaggacttctggctgattcctgcagggcagactgtctgttcatcctcagggggcgtttgttgagtgaatgaacaagagatgtaggagtctggtcacctgtcctgtgcccacacac

SEQ ID NO: 395592 - DNA, 122 bp, Homo sapiens
cctcccgtctcgggatccctggcccctcacgctcaccattttccgaattcctccgtgtcccgggggcctctctgcggctcccacgaccagtgcaggtccctgtgtgacagaggctgccgcag

SEQ ID NO: 395593 - DNA, 122 bp, Homo sapiens
ttggtgggggagggactttgaggttgatggaagaagaagatatatataatgtaaatgtagcgaattctgtgctaatgatgatatgtataaagtactatgagagattgtgatgaatccaggga

SEQ ID NO: 395594 - DNA, 122 bp, Homo sapiens
gggttaacaaaagaactaatccacactgcatcaaaaataattatcattggcctagacatccggtttttttttttttttgagacggagtctcactctgttgcccaggctggagtgcagtggcg

SEQ ID NO: 395595 - DNA, 122 bp, Homo sapiens
ccttcacgtgttcctggaggactttcggttagcaagcacttctccattctcccaacgtctcgggcctggtgagtctggatgtgagcgcatcccacggggcccaaggcacagagagagagaga

SEQ ID NO: 395596 - DNA, 122 bp, Homo sapiens
cccgtcatcatcttcactcactgcatcttgaagcatatggatgaaacccagcaggcttatcgcatagcttgtggtctgccctggggagccaaggaccaagagccagagagatgagaatcaag

SEQ ID NO: 395597 - DNA, 122 bp, Homo sapiens
gctggagacagacacattcaaattgcactgctaccagacactgacaggtatgcatctccacggaggccagaggagtgtgatggagaaggtggggaagagatactgataagtttgcatctcca

SEQ ID NO: 395598 - DNA, 122 bp, Homo sapiens
tgctggttgttatttttggtcgcctggtcgagaattcagtcctccaggccaccaagggaacgtggagtcgcccttgcgcggctcggccccagtctcggcccccttactgtgcaagaggagag

SEQ ID NO: 395599 - DNA, 122 bp, Homo sapiens
ggtcactggcccctgtcgggtcctcgaaaaatggctgctgatactctaggccatactccccggtttgggagggtgaggagttgtggtcaagtcccagtgaatgcctcgaggcttcctttgca

SEQ ID NO: 395600 - DNA, 122 bp, Homo sapiens
ccgggcgcccgctctctctctcttgcatggctcaacctcaggggtgcagttgccatattccgggaaacactgtgttttaaaacaagcctgtgtggcgagggatggaggccgggcagcaaacc

SEQ ID NO: 395601 - DNA, 122 bp, Homo sapiens
actcgatgctgattctcttctcaccggagcgtgggcagccaattgtaacagaagcaacaccgggggccacgtacccccaatcccccaccacgatcctgtcaccaagtaccaagtcccaatcc

SEQ ID NO: 395602 - DNA, 122 bp, Homo sapiens
cttttcgccggcttccatcactaacctcccggaggtcatcaagccaaatttatgagtggccgctcgagtcacgtgactctatttaaggctcccttatttgggaagagcgcataggataaaga

SEQ ID NO: 395603 - DNA, 122 bp, Homo sapiens
gccgcggcctcgacatggcctaacagtgagggcaggcccgagtttgccgagtgcagtccccggtactgaaggcgtgaagagggaactccccgcggggcgtgctaacggctcgccagttccct

SEQ ID NO: 395604 - DNA, 122 bp, Homo sapiens
tgcgcagaagcgtactggggacggcgtccaattgggtaagagggttcggtttctacggtgcgtctccggcccaccggccaaccaccaaaccgaacaaagactacagcacccaggatacactg

SEQ ID NO: 395605 - DNA, 122 bp, Homo sapiens
ggctaaccctttcttcgcaaaccatcttccccgacgccttccacataagatgccctcctgcgggccctcaccttttgacactgcctcccaccgcactggggtcaactctcacccaagggttc

SEQ ID NO: 395606 - DNA, 122 bp, Homo sapiens
cgtaaaccagaggcgggcgcggtacggccgttccgggctccagccggtgcgggggccacgcgcacgcgcacttgcagtgccctgggacacctcttcagtccgtggactttcccgctgcacac

SEQ ID NO: 395607 - DNA, 122 bp, Homo sapiens
ttgttgacaccttgtcccttggaagctatcatgagaatttctctgaagtccatgttgggccgaggcgggagagactgggccaggcactcggaaaggactgacagcgcacctaaccgaggcgc

SEQ ID NO: 395608 - DNA, 122 bp, Homo sapiens
cacagtcatgcccattccacatccatcatccccaacaaagaactccagccccaaagtgctcgtaacaaagaaattttaatgcataaggcacagtgagaggctggaatcattaagcatcctca

SEQ ID NO: 395609 - DNA, 122 bp, Homo sapiens
ctccgtccatgcagccattcctggcagtgtagtcaccgagaagctacagttgatcagaagcgtcttggcgtggaccctggtgctccgcagggggcccgaacatctcagggaagcaccttcat

SEQ ID NO: 395610 - DNA, 122 bp, Homo sapiens
gcagcagcatccagcgccaggactggagtcatatacgaactctggcacctgggaggcgcgcgtcctacgtcagttccgctcgaccccaccccccccgcccccccgccttctccccacgcgca

SEQ ID NO: 395611 - DNA, 122 bp, Homo sapiens
gccacctccctgctcccgccccggccctgggggcctctgttcagcctccaccagctcagtcgcccacggagactcccgaactcttaaatcccagccctgtagtcaaaaccactgcattaatt

SEQ ID NO: 395612 - DNA, 122 bp, Homo sapiens
tccctcctctgtcttggaaatgtagtctcgagggaggagcttggtcatccacccagacttcgtgaggcccccgggcttggggctgcctgttgagagtgggagggagagaatgtgtgaatgtg

SEQ ID NO: 395613 - DNA, 122 bp, Homo sapiens
tctctccactcccactccaggctacgacttcccggccgtgctgcgctggttcgcggagcgcgtggacctcatcatcctgctctttgatgcgcacaagctggagatctcggacgagttctcag

SEQ ID NO: 395614 - DNA, 122 bp, Homo sapiens
acaaccgctcccctcaccctccacccctacccccgcccctcctccttcctccccggcatgcgccatatggtcttcccggtccagccaagagcctggaaccacgtgacctgcccatttgtatg

SEQ ID NO: 395615 - DNA, 122 bp, Homo sapiens
tgaggttactatctgtaactattttcctaaagatcaatttttttaaactcttctactcagcgtattcagaacattaccatttgacatcttttttttaaagagtttcttaaatcctaaaataa

SEQ ID NO: 395616 - DNA, 122 bp, Homo sapiens
gttcagacagaggaacacgggcacgcacccaaatacacattgttgtcacgccgtcttagacgttttatttatttgttggattcctgcccagagccgcttttccacgggcgcagagtctccca

SEQ ID NO: 395617 - DNA, 122 bp, Homo sapiens
ttcctgtcttatgcaaccacatgtctcttcttagaaggatccaggttttttcaaatcacccgttaaaattattcatccataaattatttttattatgatctaaaaggctttaattctgtttg

SEQ ID NO: 395618 - DNA, 122 bp, Homo sapiens
aaggaatctgcctgtttagcaagcactcagatcattctgatgcaggtggctcatggaccacggtaaaaacatttcagctccaaaaaaaaaagtcttgctatgttgggggtgtacataaataa

SEQ ID NO: 395619 - DNA, 122 bp, Homo sapiens
gggcgccccagagtcagaaggtcgcggggtctcagagctggagccccaggaagcccaggtcgaggcctccacccctgccccggagagaaaggaaaggcccccggcctgagggagagatttct

SEQ ID NO: 395620 - DNA, 122 bp, Homo sapiens
aacctgctgtcaaatatatggccagagctctctttaggtaggtaagtatcagaactttcccggcctacatgtgtataggaatacattcataagagctacgtatttagtccgaatctgttgag

SEQ ID NO: 395621 - DNA, 122 bp, Homo sapiens
agaaaagtatatattagctaacaaggttttcttttttagatcaatattgacttccgcactcgagaatctacagccaagaagattaaagcaccaacccccacgtgttttgatgaagcacaaaa

SEQ ID NO: 395622 - DNA, 122 bp, Homo sapiens
caaggctgcataatcactaaacaaaatgaaacaaattcagtcaactgacctttcaagttacgaaagatattcctgttgtgtcaggtaatcaaagagggtggatcagtaattaaaaggttgaa

SEQ ID NO: 395623 - DNA, 122 bp, Homo sapiens
tcagcccaggttctcttcgcccactcagtcctgacttcacgcttccacctccagctcaggcgccccctgagcccggctacccctacgcaggacgagctcagggccggctcccagcctcactg

SEQ ID NO: 395624 - DNA, 122 bp, Homo sapiens
tccccagtgcttgcggaagatatcccgctaagagagagacatgtcaaaggtagggtagatcgacatttccaggcaccaaagatggagatgttccaggaaagactgcagggcccctgggcacc

SEQ ID NO: 395625 - DNA, 122 bp, Homo sapiens
cgactttacgtgctcactttaagttttcgacctgtgtttggtatcgttggggtgatcactcgcggccatgggcggacactgaacatctcgttcatgcctctgtgcgtagaggtaccacatct

SEQ ID NO: 395626 - DNA, 122 bp, Homo sapiens
gccctgggaagaagaaagcagtgcttccacgagcccctcctcagatgcagcctcagcttgcgtcaggggaacgcctggtttccaggggccccatgttgccctctcacttttgcacagcctgc

SEQ ID NO: 395627 - DNA, 122 bp, Homo sapiens
aggttgtaaaagttgctgaaattctccaggagagagtttcgtagcaggcatattttggggcgtaaattgattgttgtgtcttaaggcaaactcctggtgggtgagggttttgctctggagct

SEQ ID NO: 395628 - DNA, 122 bp, Homo sapiens
agagctccttcagtaggcggacctcccggtggcaggccttgagctgcttgtagtctgggacggggacctcgaacaggcccccggacttggacagcgcctccatgatgccttccatggcggag

SEQ ID NO: 395629 - DNA, 122 bp, Homo sapiens
tggtgagctaggacgtttggactcagggttccgaggaaccaggagcgatccttagtgggccgagacttccgaatttgatcaaaggtaaagagggactggagagcggtccatctgacttctgt

SEQ ID NO: 395630 - DNA, 122 bp, Homo sapiens
gcaccctaccccagaggcactgtctagcccctgtgaccaaagtggggacccagtttctcacgctagggtcgggcgggcctcgagggccgtgttttcctaggccatctggaggctcctccatg

SEQ ID NO: 395631 - DNA, 122 bp, Homo sapiens
gtcctcccccacagagagccatgccctctcccagcttctagagagatcagtcactccacccgctccccacctggaaggaccctctgctcatcttgaaggcgctgctgtttgctgtctgcccc

SEQ ID NO: 395632 - DNA, 122 bp, Homo sapiens
cagatatggaaccactccagaatctaaccctcagctcatcggaccctcgcagcaactctccgtgggacagaagcccctatctcccaaggcttggggagcacagggttcacagagtcacactg

SEQ ID NO: 395633 - DNA, 122 bp, Homo sapiens
gggcatgtggccgggcataactgctatcctgtgggacgcccaagccctgtgcctgaccggcggcctgctctggagcccccagggtggctttccctgactctcccggaggaggaggcaacgtt

SEQ ID NO: 395634 - DNA, 122 bp, Homo sapiens
ttaatcaaagtataagttcttaattttaacgcactttaactgtcattttccaccatggcccgagtcgcggagtccgccttcctggcagagcgttgcgtggtcacagctgaggtctggggagc

SEQ ID NO: 395635 - DNA, 122 bp, Homo sapiens
tgccataacatgcacctaatgggaaatgttgcttggatcactggttatggccatcattcacggagatactgaacccggagttttctttaacatagcctttaccctgtagaaacatttaaact

SEQ ID NO: 395636 - DNA, 122 bp, Homo sapiens
cctgaaggaacaaatgtgcagcaccaattctgttttatgaccttgtctgatgctggaacacgtagagaggacaccaggtcatcctcggtgcaacagggacataaatcaggcagcgtcctgct

SEQ ID NO: 395637 - DNA, 122 bp, Homo sapiens
tgcccttttgctgtgctccacagcacctcagtagttgttagacatctagcttctctagaccgtgagttctgatgggcagccaccatgtctaactcgtccactttctctcagtatatggccct

SEQ ID NO: 395638 - DNA, 122 bp, Homo sapiens
gcaagagatcatgtagtcccgcctggctatgcctgggtcccagggcctggtaagtccatccggggtcttcacagggtactgccctagcaccttactggaggccaggcttacggcaccggcgg

SEQ ID NO: 395639 - DNA, 122 bp, Homo sapiens
gcggcacgggcggaagaacgggcgcgggccggcagggggcggggcgcaagtgcgtgggggcgtgcccagggggcgggcgagggggcggggcgaagcgagggtgcgcgccgctgttcgccgcg

SEQ ID NO: 395640 - DNA, 122 bp, Homo sapiens
caaggaatagtccagagacacacagtctgcgctgtcaccggcgggttctcaaatttggcccgcagggtcggcggcgctggggctcccggcccgcgattgccacgcccaccagacccgaggtt

SEQ ID NO: 395641 - DNA, 122 bp, Homo sapiens
tgaggcccagagaggttaagtaacttgtccaaggttatacagcatgtaagtggtagaggccggttttgaacttagctagtgtgactctagtagctgcacctgtaaccgctgcatcagcccac

SEQ ID NO: 395642 - DNA, 122 bp, Homo sapiens
tggattctaagctcttagatgccagagcctactggatcttttactgtatgtgaagtcacccgtactgccaaggatcctgaagtgaacatgctgacccctttgagagattcttggaaatatga

SEQ ID NO: 395643 - DNA, 122 bp, Homo sapiens
ctgaacgaatcactacagctaaaagcattgggatttaattgttgcccggtccccagcacacggcagtcttccacatcaggtgagagccagcatcacagagcttaggggatttgagcttgcct

SEQ ID NO: 395644 - DNA, 122 bp, Homo sapiens
gtagtattacatttaagatattaacgcccgacctggctcacaggagtgtgggaacaggggcggggaagggccttagcactgagagccgaaaagtataaaacgattagtttcggcgtcaggcg

SEQ ID NO: 395645 - DNA, 122 bp, Homo sapiens
ctgggcacccaccaggccctgggctatctatttaagtttattatccaacttcatcccggccgtattccagatctttccatccccattctattgacgaggagcctgaatcttagaggagtcaa

SEQ ID NO: 395646 - DNA, 122 bp, Homo sapiens
aactgttcatttctcactccacctagctcctggcaaccaccattgcactctttgattctacgaatttggcaattttagataccccacataagtggaatcatgcagtttcgtctttctctgag

SEQ ID NO: 395647 - DNA, 122 bp, Homo sapiens
gtacccaataggtagtttttcaacacttgcttcccccaccctatacccacttatagtccacggtgtctcttgttcccatgtttatgtccatgtgtacccaatgtttagctcccacttataag

SEQ ID NO: 395648 - DNA, 122 bp, Homo sapiens
aatgcccccctctggaccttgagccacctgtttctctcccctgcactcaccgtggggccccgttctccccgaggccctgacttccccgacaggccctggtgggaatgaagcagagagaacat

SEQ ID NO: 395649 - DNA, 122 bp, Homo sapiens
gaaaatatctcctcaagagcttcccgccaggaggcgagagggtcacactcccgtaggctccggagctgcagccctacccaccaggcgtccccgcggcctctagaatattgtagaatcttccc

SEQ ID NO: 395650 - DNA, 122 bp, Homo sapiens
attttggtggcctgtgttccccttggtgagctctctactcttcgctataccaaaaattggcgaggtggggcaggaccattcttggaacaaatgaggcgtatagatatggcataatattcccc

SEQ ID NO: 395651 - DNA, 122 bp, Homo sapiens
cagctccagggaggggctcagtcagcacagagcactaggggctgcacctgaactgccaggcgcccggcgagtcctccaagcatgggcaagcgctggggtgggggcagctccgtggcagcgac

SEQ ID NO: 395652 - DNA, 122 bp, Homo sapiens
agccctgcaaatcaggctctcagctattggctgcctcggtggccaggagggcgaactgggcggagtcttggggggctcgacacgatggggcggggcttggcggggaaagaagcggaggaggg

SEQ ID NO: 395653 - DNA, 122 bp, Homo sapiens
cttagcgcctaggccagcagctgctgtgctccacttcccgcccggccttagctgcctccccgcagggcagagctccggacctgcagccgccatgcctgagcctcccccctgccgtgggctcc

SEQ ID NO: 395654 - DNA, 122 bp, Homo sapiens
acacgtgtgagtggacactcctcggtgcgttgatgggagcgcggtgcctgtgtgcgcacacgagtgagtggacactcctcggtgcactgatgggagcgagatgcccgtgtgtgcgcatgtgt

SEQ ID NO: 395655 - DNA, 122 bp, Homo sapiens
gtcgaactcagcccaggagtttggggattcatcagcctctgatggaaaggaagggcttaacgacaacccccaagctctggagctaagtgtgggtctgaatctccccgcgagggtccaggcct

SEQ ID NO: 395656 - DNA, 122 bp, Homo sapiens
ccaccgctcttggcccctctgccttgggcactctgccactcaccaccagaattgaggaagcgcttccccgtgcccacctcagggtactgctccgccagcccccactcgggccagcagaagct

SEQ ID NO: 395657 - DNA, 122 bp, Homo sapiens
ccatcacgttttcagtggctttcctttgagtcttgaacgttttccactgggtgttatagtcgagagtcccccacctcctgaggaagcaagacctggcaaacccaagacgatgcgctcttact

SEQ ID NO: 395658 - DNA, 122 bp, Homo sapiens
aagcattacatggtaaacatgggcacagggagaatgacttaaaggaaaaacgtcaggatacgcaaccaagtagagtactaatgaatgaaaaatgtgatcaatgttaatgaaggtgatgtaac

SEQ ID NO: 395659 - DNA, 122 bp, Homo sapiens
taatggatctcctccttagttcctgttggatatcttgggatggggtcatgagggtagaagcgtcaccacgaggactgcttttactctcagggtcacctgcctagtaaattgtccagcaggga

SEQ ID NO: 395660 - DNA, 122 bp, Homo sapiens
ggctgggcggaggtggggtcagtgagagccgctttcaaccgcgcccccgctcagcctccgcggccctcagcgcatcgtcctgagcgcaggaccttggcagttggtaggcctcctgcccctct

SEQ ID NO: 395661 - DNA, 122 bp, Homo sapiens
actccatctcctacttgtgtcaccagggacatatttttttccatttgtaaatcagacaaacgagatttaaggatttcgagggcagtcctgagcacttggttggtagtattttctttgggcag

SEQ ID NO: 395662 - DNA, 122 bp, Homo sapiens
ctattcctacttgtttcacacatgtcaaaagtgaggtccactaaagataaattccctgcccgatctcaccacaataattaagagtagaaacaggaccagaaactatgtatttaattcccagt

SEQ ID NO: 395663 - DNA, 122 bp, Homo sapiens
gctgtccaattgaattccttcagagggagaagattgataagggttgctaggaaacaggagcgtctgcctcccgcctgacccagagattgttctgcacaaaccctctccaggggctcgcagtg

SEQ ID NO: 395664 - DNA, 122 bp, Homo sapiens
cgatcggctgctccacgtttagctttttttaatttcccccccactcctgttcgctcgcaccgtgtttgctgcctgcaagtctccgactgcagaccggccgcttgctccacactccaataata

SEQ ID NO: 395665 - DNA, 122 bp, Homo sapiens
ccatgaggaaactgaggtgcagggaggtcaggcaggttgtgaacaggggtttaagaaaagcgttaaattactggctgcgccaagatgctctgcaaggtgggaacctgttgaagaaataaaac

SEQ ID NO: 395666 - DNA, 122 bp, Homo sapiens
aaccacagctccaaaccacttcccatggcccctgaagagaagaataagaaagccaggcttcgctctatcttcccaggaggaggggataaaagtaaagtatcagtggccgggcattgaaaatg

SEQ ID NO: 395667 - DNA, 122 bp, Homo sapiens
cgcgcccagacccggaggcggggccgtcacgtggggcagcgtgggccgctgccttggaaacgcagagcgcgcgctccaggtaaaggctgctacgcccaggacagggttctcacggtggagga

SEQ ID NO: 395668 - DNA, 122 bp, Homo sapiens
agcaatgccagccgactggcgctgtgctggaattctcgccgggcctcagctgcctccctgcggggatggactcgggacccgcagccagccatgcctgaccctcccacgccacccagggctcc

SEQ ID NO: 395669 - DNA, 122 bp, Homo sapiens
ggccgccccacgacagcagccagccaggccgcctaggacctgccgccaggtgttcggtggcgtcccaccgccccgtgagaggaaaaagcggatggtgcttcctgttgcccccaaggttgtgc

SEQ ID NO: 395670 - DNA, 122 bp, Homo sapiens
cagcactacatcctctgagcagcaggtgccaagtgggatgaactggataaggactgcattcggggaaacgcccgtgtgaaaggaaatacacaggaaggaggtggcaacgggtgggaagccac

SEQ ID NO: 395671 - DNA, 122 bp, Homo sapiens
aggactcaggcagcggaggagtgtctctacggaatccctcacaggacaagcttctctatccgcggccgcttttgtttcacggcaaggaaatgctaggttaacccttttatgagtaggaagga

SEQ ID NO: 395672 - DNA, 122 bp, Homo sapiens
attaggcagggcaagtgctctttggtgccctgcagccccttcacttccccaggtatgctccgtgcgagtggagtttggctgcttgcctggtctatgaaggcatttggtctcaaccctcaaag

SEQ ID NO: 395673 - DNA, 122 bp, Homo sapiens
caacttcaatttttggtttttcctttaatgacacttctgaggctctcctagccatcctcccgcttccggaggagcgcagatcgcaggtccctttgcccctggcgtgcgactccctactgcgc

SEQ ID NO: 395674 - DNA, 122 bp, Homo sapiens
cgagaactgcccctcgccggcggactacaagagggcagccgggcagagcgagcttcctctcggcagctcagcggtgccccttctgcagctttgccgccgggcacatttttatagcagcggct

SEQ ID NO: 395675 - DNA, 122 bp, Homo sapiens
ctcaggtaatctgcccgcctcggcctcctaaagtgctgagattacaggtgtgagccaccgcgcccggctgaaacaatgatttttaagacattagacatcaggcaccaaaggacagtgatccc

SEQ ID NO: 395676 - DNA, 122 bp, Homo sapiens
gatcttccaaggccctttccaaggctcccaaaatcttggaactttactcgccaggcattgcgggctttcgtgacattgctggctttcctgacattgcttttcagtggtgcaggagcagagag

SEQ ID NO: 395677 - DNA, 122 bp, Homo sapiens
tttactgctgggaaaagtgtactacatgaaggatgcttggggctttgctaacctgctcaccgctaaccctccaagtctaaccatccccagaggccacacaaaccaagtgactcctgtagttc

SEQ ID NO: 395678 - DNA, 122 bp, Homo sapiens
tctgatttagaggaaaacctggctcacagccagctccatttccctgctaggaggtgcagccggggcttttggctctttgtcctccctcccttctgccggacctgtcctgtggtcaggaacct

SEQ ID NO: 395679 - DNA, 122 bp, Homo sapiens
taaagtcacgccctcacttcccattggccagggtgggaccacgcctctgcactgggatctcgcgtttcttcttttcttcgcgtttgcgagggagggggtagaagcaccggaggtgggtggtt

SEQ ID NO: 395680 - DNA, 122 bp, Homo sapiens
ggggaaggaggctgcaagtgcaggcggcccgggggctgtcacaggactcagcgccgggggcggggcgcgggaggccccgccccggccccaccaggcccctcccctcgtctgtcagacccgcc

SEQ ID NO: 395681 - DNA, 122 bp, Homo sapiens
ctggttttgctgtaggactctggtgattctagatttctacttggaaggggcggggaagggcgggctcgaccctgtgcgtttctttgcagcttcctgtggatctagaattctttacaaataaa

SEQ ID NO: 395682 - DNA, 122 bp, Homo sapiens
tcctccatcttcagctgcatcttgcccaccatcacctggcgcttccactcgggcttgggacggccctgctcatcgtgcgtggggatgagcgcctccacgtccagctgcacccccggcgcagg

SEQ ID NO: 395683 - DNA, 122 bp, Homo sapiens
gcggcgctggggctgcggcgagcgggactcccctgacgctccagctgcaccgccccggggcggggactaatccgccggcctggcgtcttggtcttccccgcaagcagtaatctcctgcaacc

SEQ ID NO: 395684 - DNA, 122 bp, Homo sapiens
tggccagccacggggcctggccatgaactttgcgtccgggccaatgctgcagtggccgggcggtggtgagccttccgttccccgcctgtccctcccggcccctcccctcggtctccgcagct

SEQ ID NO: 395685 - DNA, 122 bp, Homo sapiens
ttccctgagcagggccagccagggccagcggggtgggggacggtggaccgggaggcccctcgccgggttgataaatggcaagtggcactcagtgggtagagaaatcaataaaacgaacactt

SEQ ID NO: 395686 - DNA, 122 bp, Homo sapiens
caggggtggggctcagtggtaagaaaatccaggcaataggggattcccgaggtctttctgcgaagtgcagcagagtgcgagtggtcacgagctcagcatccacccatagctggagaaccagg

SEQ ID NO: 395687 - DNA, 122 bp, Homo sapiens
atcattacaattagccgtgacgacaggctgcctatgatcttaggacgcacagtggttctgcgtcatcacagacagcaaggggttcaggaggcggccggtcggcagcggacaggacatggtga

SEQ ID NO: 395688 - DNA, 122 bp, Homo sapiens
ctggcgggggacactgagtgccccacctgctcagactcttcatgccatcaaggggccagtcggggggcaggtgtgagtgtgaccctgagggccctgacctgccactgcaatcctcacactct

SEQ ID NO: 395689 - DNA, 122 bp, Homo sapiens
aggaagcaggaatgggaacgagacgagtacgcctgcgccgggtctgagcgtcagacactgcgcctgcgcaagtgggccgagcgcagacattgcgcctgcgcagcaatgccatcggttaaagc

SEQ ID NO: 395690 - DNA, 122 bp, Homo sapiens
caaaccttcccagttgagaaccatgatgcaatcctgcccttttgacagtaccccctgaggcgctgatcctaagagcattccccaataaacttcctgcatacaaatcaccagatctgtagcgc

SEQ ID NO: 395691 - DNA, 122 bp, Homo sapiens
ggccttccctaggggaggaggtgaatgcagacacaagtgcactgggtgtgctgtgtgcctcgtgctgtgctaggtcccaaggacatggaaggcccagccctccggcatcctgcaatctggct

SEQ ID NO: 395692 - DNA, 122 bp, Homo sapiens
tcctcctggagcagggcccctttgctcaccccagcatcctggtgctgtgccagcagccagcgagggggaaagagctagctgggccagctcaccctcgcccacacctcggccccaccctcccg

SEQ ID NO: 395693 - DNA, 122 bp, Homo sapiens
atccattaattcggagcagactgacagatgcggagtaaagagtttaggcaaaatacctctcgcactcagctctccgccatcatcttgctccccagaaacatgggactttctccggaaatttc

SEQ ID NO: 395694 - DNA, 122 bp, Homo sapiens
gggctcttctcctctcaacagtaaacagagcggttcacgaatcaccaaggctcagaacggcgggtctggccacaggggtgcctcagacgcctcccgggcatctgcagcaaacagtgccacct

SEQ ID NO: 395695 - DNA, 122 bp, Homo sapiens
gcagcgtaactggaccggcctggatggctgttgtaatgcgtcacggaagagccagaagagcgtctctaaggaggtggaaggtggaaaaaagaaagtggaacaggggcaaagacataattttc

SEQ ID NO: 395696 - DNA, 122 bp, Homo sapiens
atgttctatactgtgctgtccaattcctgtggccactaaccacatacgcagctcttgaaacgtggttactgcaactaacaaatagaattttttactttcttaatgttcattaaatttcagtt

SEQ ID NO: 395697 - DNA, 122 bp, Homo sapiens
tcactgttgcttccttccaacatggattaagaaaaggttctgttttagtgcaattttccccgcaaaggaaccaggaagaggtggaagaggagatcccatgttccagccccaggggtttggga

SEQ ID NO: 395698 - DNA, 122 bp, Homo sapiens
gtcgtaggtgttgatggcatctgagtaggggtacgggttgtagtctcgcgcccgcggccccgggaaggcgcgcggaggctgggtgttgagtagtgaggtcttgttatccagagctgtccggc

SEQ ID NO: 395699 - DNA, 122 bp, Homo sapiens
ccctccgctgccctgcatggggactcaaaccacaaacagcagctcggaaacaagcagacacgcgtcggactctggttcacggggaagagcgctgtttaggagatggacgtgctccacgcaga

SEQ ID NO: 395700 - DNA, 122 bp, Homo sapiens
ttaaaagcaaacagatcaccaaacagccagactcactctcattagaaaaaagctgtgcttcgtttgttaaacaaagatcagtatcttcattctgtattcagcaagttatgaatgtttcactt

SEQ ID NO: 395701 - DNA, 122 bp, Homo sapiens
gatatttcatttttccatccttgaaaaggcgcagtttacgctgtctagccagagtttcaccgtaaatatgatttaagtccacctagaaaatgatgaaaaaattttaatttgttgctgttgaa

SEQ ID NO: 395702 - DNA, 122 bp, Homo sapiens
tcagcttgggctggtctgcgttctatgtgattgttggagtactccacaatgagcaatgcacggccggcagccagaattcttttttatcaagtactcctacactcatcagtatgcagctccat

SEQ ID NO: 395703 - DNA, 122 bp, Homo sapiens
tgtcacacttgatgatcaaggtgtcacccaggtgggcctcccaggcacgctccttgtactcgccacagttgaggaaactcaggttgaagacattgtgcagcttcttggagttcatgcagtac

SEQ ID NO: 395704 - DNA, 122 bp, Homo sapiens
aggaaaattctcttcctcctcaagtcaagtctccccaagccaggtctcctgccctctacccgccccaaactgccccagcaggtgagctgccactactgagaaagagagccatcgcctgcctc

SEQ ID NO: 395705 - DNA, 122 bp, Homo sapiens
ggacaagaccagccgtctggttacaggcttggtgccgcctttctcataagaggcacagtccgcatgggctggactgtcaaatgcatgttataaagatgatgtttttggtaacttgcgaatgg

SEQ ID NO: 395706 - DNA, 122 bp, Homo sapiens
tgcaagtcaggttcctttacgctgagatcccttacatttttacttttaggaaggttttttcgaggggtggggggatgacctcattccttcgcctttggccctccctctacccggccccacaa

SEQ ID NO: 395707 - DNA, 122 bp, Homo sapiens
tcactttgtgggaaagaaactgcctgacttctcaatgctatagggtatagaaaacactgacgccagggttggacccatcagttagtaccgctgcagctgaagtcacatggatcacaattgcc

SEQ ID NO: 395708 - DNA, 122 bp, Homo sapiens
ttgttttccctaaggggtgcagcatcagttcagaactgaaaatctccctatcccacttctcgaagccattaatcagagatttcaacagggttcaccgctgatgacccatctaactgctcgtc

SEQ ID NO: 395709 - DNA, 122 bp, Homo sapiens
tcaagggcctgggtccacctcgccatttttctgaaggttggaggctctgtccagggacagcggaaattcgaggttcttggcggaggaggagcatttgccaattggggcgggcttttgcccct

SEQ ID NO: 395710 - DNA, 122 bp, Homo sapiens
tgaagccagccagtcctcccatgggaggaacgtggggaagcaaagccgctgcagcctgcacgcccggcgctctgggccctgcctgctgcctgctaaagagctggaaagcccgggaaagtttc

SEQ ID NO: 395711 - DNA, 122 bp, Homo sapiens
gccggactggctgtgaggcggtcctgcctcgctgccttcagtccctagtgtctgggtccccgccctccagccgcctttgagtcgtgcctgggtcctcgcccttgcctcagaaccgcgaagaa

SEQ ID NO: 395712 - DNA, 122 bp, Homo sapiens
cagctccaaaccccgctgagagtatatgcatgggaaaactttctgaaatcaaaaatattccgaattctggcaacatactgggccccaagtctttcggatttaactctgcctcggccgtttta

SEQ ID NO: 395713 - DNA, 122 bp, Homo sapiens
aataactctcgccgagtgtcagtacaagggtccgccccgctctcagtgcccagctccccccgggtatcagctgaaacatcagctccgcccctgggcgctcccggagtatcagcaaaagggtt

SEQ ID NO: 395714 - DNA, 122 bp, Homo sapiens
gagaaagtggggctcggtaattttgtgcggttcttacgtcccgaattcgaactaatagcgcgtcaaagccagccaatggctctgcaccgccttgtacaggtgggaaagctgagaccagtaga

SEQ ID NO: 395715 - DNA, 122 bp, Homo sapiens
agagcgaccgcgggaagcatccaccgtccccgccggccctcaacaggttcatccgtgccccgccccccactgacaaaggcgacctgggaaaaaccactggcggcaactctggggatttccgg

SEQ ID NO: 395716 - DNA, 122 bp, Homo sapiens
agcgagctccctggagacccatgcagcgggtcaggtgccagctgccgccaggtctgtgcgcggggccgggccaccagcgtgcggcttcccgctctggagagtttatggcccctgtcctcgga

SEQ ID NO: 395717 - DNA, 122 bp, Homo sapiens
gggcatcacgccccgccccctcaggccctgagtgacaggagctgtaatcagacaatgggccgaatgagacagcaaggacaggtgctggccgcgatcttttggagcggggcttcctgcctgcg

SEQ ID NO: 395718 - DNA, 122 bp, Homo sapiens
gcgcgctggcttctcacatgacttccctccagggcccagctgatgctgccgggaaaggaccgcagggtcccacaccccccccgggcgctccgctgcgccgccgagcgcctcccggtcctggg

SEQ ID NO: 395719 - DNA, 122 bp, Homo sapiens
cacggcagaagtgggagcaagagagagtgggaggggaggctcccacttaaccagatctcacgaatactcaccattgcaaggacagcaccaagccccgaggaatccaccccatgaccaaaaca

SEQ ID NO: 395720 - DNA, 122 bp, Homo sapiens
aaaacagtgagtcagagtatgtgctgcctccttaagggttaggaacgcataacctaaaagcgtgactggcaaaggtggagcgtgggcaaaattctctctctctctctctctctctctctctg

SEQ ID NO: 395721 - DNA, 122 bp, Homo sapiens
ttgaagcgattctcctgcctcagcctcccaagtagttgggactacaggcatgcaccaccacgcccctctaagttttatattttcagtagtgacggggttttgccatgcctgcctcagcatcc

SEQ ID NO: 395722 - DNA, 122 bp, Homo sapiens
aagggcatgccgtagaaatagtcaaatccgtggttcagggggtggtggcagtgatccccgcgggatgcacaattcacaccctggtgccattttcctaaaagaaacgcaaatgttcaacagag

SEQ ID NO: 395723 - DNA, 122 bp, Homo sapiens
tatgtcttctcaggtcttctcccagtgcacacagcaacaacagactgacctgaacacctccgcccacacacaccaagcctgggcaaggggaaggtaaaactacccactttgggcctacatgc

SEQ ID NO: 395724 - DNA, 122 bp, Homo sapiens
ccaggcaccgttgggaactttttaggatcgtgatgtctttgaattctcaggacgtttctgcgaggtggtgggcggtatcatcctggtttttcagggagaagtcaagtcactggcccaggtcc

SEQ ID NO: 395725 - DNA, 122 bp, Homo sapiens
ctgtttccctgggtttgggtcaaggctgagctctggccagtgcctggtgaggctgtgggccggacctgggactcgtgagctttaggccaagtcgacagcttgtgtcctgctggaggtcaccc

SEQ ID NO: 395726 - DNA, 122 bp, Homo sapiens
cttgtttcagggcacagagcaacagtgatgtaaacagaatgattactgaggggaaaagtccgaagcaggagaagtgatgccactgtaggagaccttaggatcccagatgcctacaatacaaa

SEQ ID NO: 395727 - DNA, 122 bp, Homo sapiens
aggaccgaactggaggtgccagctgacccaagggaggcaaagctgcttctgtctggggctcgggagtctgaacagcccagatcagcaaccaggtcaaatctcacaaacatgcacctaggggc

SEQ ID NO: 395728 - DNA, 122 bp, Homo sapiens
cgcgtcccctggggaagcccatctcgatgagactctcaagagccgtcagctccgccatggcgccgacaccgcggcttccgcggggacctggtgtgtgacgagaaggagggcgggaagggtca

SEQ ID NO: 395729 - DNA, 122 bp, Homo sapiens
cccttggaaaaaaagcggagggggcatcaagtaaaagtttcttgccaggcagagccagctcggcgtcccccgcacatagctggggttagcaggggttgcttctctgccgggcacagcgtctc

SEQ ID NO: 395730 - DNA, 122 bp, Homo sapiens
ctccccctccctggcccccggtaacggggtcggcttcctgtgctgcggctctaccagttccggtcgtttcccctgcggtgaatggaaccaacactctgcggccttcgtgtctggctctttcc

SEQ ID NO: 395731 - DNA, 122 bp, Homo sapiens
tccaacagcactgctaagcaagagcctaataactcagcgtttcgcgacatctcttggcggcgttgaccgtttgcccgggacactggtttagaagcacggcatagggtgtctctacatcttag

SEQ ID NO: 395732 - DNA, 122 bp, Homo sapiens
cggaaggtgcgtccgagccatggccgctgccaacccgtgggacccggcgtccgcgcctaacggcgctgggctagtgctaggccacttcatagcttcggggatggtcaatcaggtacgtgggg

SEQ ID NO: 395733 - DNA, 122 bp, Homo sapiens
ttattgcttttgtatggagtaggtatctgatctccccaacacctgccagctccgcctctgcgttctttcccttccttgtacacccagcccctgcctcccaccctggcatctccctcccttcc

SEQ ID NO: 395734 - DNA, 122 bp, Homo sapiens
aatggaagcattatccctatagaacctgactgtgatgaagagcccacgccagtttgtgaacgagaagctgaagttgtcatgggcatcattgataaatggacctgctgttcaaaggaagtttg

SEQ ID NO: 395735 - DNA, 122 bp, Homo sapiens
tcgggacgtcccgctaataagtgaccctctgtaaatgttaggaatgagtcaagtttactccgcgctgcagccttcccgttagcgggtggcgccgccgatgcccgggggagcgcagggcggga

SEQ ID NO: 395736 - DNA, 122 bp, Homo sapiens
cagtttaaactgacggtctgtttagccttagctacagatacccactgactgtgtacccgccgcctttcaacccccgggccggccactgagccagccagataaccattactattatttagttt

SEQ ID NO: 395737 - DNA, 122 bp, Homo sapiens
ctcagcatctgtccctgttcattacatgtcattgagtaggtgggtagccctgatgggggtcgctctgtctggagcataacccacaggcgttttttctgccaccccatccctgcatgcctgat

SEQ ID NO: 395738 - DNA, 122 bp, Homo sapiens
acgccgaggaaaggaaaggccggagccctccggctccctcccctgggacacttcctgctccgctctaggactggggaggtctccgcatctcagtggttcgctcccccgccccccggccgagg

SEQ ID NO: 395739 - DNA, 122 bp, Homo sapiens
taaggctctacaagcacagtgagtgagctgagtaagaaggagttgtacaaaatataaagccgggatagccacccaaggctcaaacaaattgacaggaatccataatctgggaatgcaacccg

SEQ ID NO: 395740 - DNA, 122 bp, Homo sapiens
ccctctccataagcatgacatgattctgctgaaattcgtttctaaaaataacctaggatccgatccagctgctaaaaagcccctttgttcccttgaaaccaaaatatggaaagccacagcag

SEQ ID NO: 395741 - DNA, 122 bp, Homo sapiens
taccttgggaggtggtggggaggggagtcgggagcatcagggaaaacccatctcaactcacgcctctcaggggttgcgactggaaagtcttgcgttttccatcactggtgcagaaagaactt

SEQ ID NO: 395742 - DNA, 122 bp, Homo sapiens
ggacataaggaggcagatgtctgtgtgggggtgagatgtctgtgtggaggtgtttgtatgcgtgatttctgtctgggccttcttaggcctgctggtataaaataatatgggaaatgcagatg

SEQ ID NO: 395743 - DNA, 122 bp, Homo sapiens
tggaagccacgccacgactcaggggcggaggggactcgaatccgcgcgatcagatgccgccgcaggtgcttaagacctgcagcctacagagcaagcctatcttatccccactttaggaaaag

SEQ ID NO: 395744 - DNA, 122 bp, Homo sapiens
gctgggggcggctcgcggtgggccagcagcaacacgcccctcctcgcggccctggcgcgacgcggcgctccgccccggcccagctgcagctcctcctggtccagctccagaactaaccctag

SEQ ID NO: 395745 - DNA, 122 bp, Homo sapiens
ctctctaatggttcttcggactcctttttccggagctgagaaaccctaaaacatagcacccgtttacgtctagacatgcacaggtgctgtgaattgaccccatttttgcagttcatagttta

SEQ ID NO: 395746 - DNA, 122 bp, Homo sapiens
ttctgtttaatgagcagccattgaagcctcccaatggcgagaatgagcctgcatctttaccgaccccactccacagacgaggaaactgaggctcaaagaggcccgggtcgcctctggggcag

SEQ ID NO: 395747 - DNA, 122 bp, Homo sapiens
tagcggatgaagtcaaacgcgcagtccacaaacattgcgctccgggtgaatcctggctcgcgccgatttccagctgctgctactaaattgattgcaactggaatctatctagtgtcagcggc

SEQ ID NO: 395748 - DNA, 122 bp, Homo sapiens
cttcacagcgttcttacaggcgtgggagagtgagacccggaagtcagcgtggaggagggccgacctggggaacagcagggattatgagggagatgccggactccttgaccccaaagcccaag

SEQ ID NO: 395749 - DNA, 122 bp, Homo sapiens
gagcacgcacggccccagcgactcggacatggtgaggggcgcggaggctcggggtggacccgaggcctccacacatgtggcaggctgcagcaacccgccacccacgaggactcgcccaaggc

SEQ ID NO: 395750 - DNA, 122 bp, Homo sapiens
gtcccagctcccacctgcctcttcccaccccaccacacacaaacctgtaccctcaccagccggcctgattccacggaaacggctttggcaccaccggaagtcagccaacaacagcgaattgc

SEQ ID NO: 395751 - DNA, 122 bp, Homo sapiens
gtgactgaaatcttgggcttctttttaactctgaattggatccagcattctactttgcttcgtatgtaccaatcttgttgggtgagacatatacattggaatttggcaagtgtttgtatacc

SEQ ID NO: 395752 - DNA, 122 bp, Homo sapiens
taaacgcagcgagtgtttggggttttattcagaccgggctgacggtgtgtgtcgccgccacgcaccgctgcctgttcgaacgcatggctgagctgccgaccggctcgctaccccaaacaccg

SEQ ID NO: 395753 - DNA, 122 bp, Homo sapiens
ctgcttctttcacactttagttgggagctgcgcgccgcgctcagttactggagagctggccgcgcgccgccgcctcccgcacgcttgcacgcgggcccggcttcggggttttgggttcttac

SEQ ID NO: 395754 - DNA, 122 bp, Homo sapiens
tggcggtgaaagtgttgtgtggtccgatgagtggcattaggagggcagtgacttctgcttcggccaccaaggcagaattcccagatcctgtttctccggtgattgtgggggagacagagatg

SEQ ID NO: 395755 - DNA, 122 bp, Homo sapiens
ggagggagcgcactaacagagaccccctgcctccgagaaccctggggccagacttgtgggcggggtgggggatcccccacccccgagaagccgcccagctgcccggatccacagtgctgcaa

SEQ ID NO: 395756 - DNA, 122 bp, Homo sapiens
caccgtagggccatggccgcccgcggcgacccgcgctcccgcaccgccgggggttctgggcggcccccacccccgctccgacaggtgagagcccggcgccctctgcgcagacaccgcccggg

SEQ ID NO: 395757 - DNA, 122 bp, Homo sapiens
ccgggccgggacttggagccggtgtcgggctccagaggctggggctggcggccggggcagcgtccctcccgcccccggcccggaatgtcaggtgcgccgcgggccgggcgcgcgggtggccc

SEQ ID NO: 395758 - DNA, 122 bp, Homo sapiens
acctatgctctcgtgtggtctggatctgccctctgtgtgcacagcctgtgcctggcccagcgtgagtgactcgtggatgctctgcaggtgagacctgaggtgagtgtcctggcaccgcccgg

SEQ ID NO: 395759 - DNA, 122 bp, Homo sapiens
ttattcttttctctggggccctttctttaacatctttatcctcagagttacctggttgtccgtaagatacctaagcaacaaagagaataaaaacaatcatataattctattattctctcttg

SEQ ID NO: 395760 - DNA, 122 bp, Homo sapiens
ctggatgaagcccctttcctgttcctgcctacattcttctttccctggacgccttacttacgtaaaaactacatttcccatgagcacccacaggcgtgcacgcagcgcagccctccgtcgtc

SEQ ID NO: 395761 - DNA, 122 bp, Homo sapiens
gagcaggtataccagacctagagctgggtcaagtcaagcatcccacttggagttcgccaccgccctctggtggtcaacatgaatatctctttcctgcttcactcccagcccgagaatctcct

SEQ ID NO: 395762 - DNA, 122 bp, Homo sapiens
tgcagcgttcggttgctagttgtcatgcttcaaaggcagatcctgatctgatcggcttagcgggggctgagaatttagaggactgatagaccgggctccatccttttaggccccggggagcc

SEQ ID NO: 395763 - DNA, 122 bp, Homo sapiens
gaggccagcactagttgggaacagacatggccattcatcagggtctcatagcggagtggtcggcagattgccaggtaacgatccagagacatgacggccaagaggaagaagtcagtggtgcc

SEQ ID NO: 395764 - DNA, 122 bp, Homo sapiens
ttggctgctatggaaaccagctgtttgtgcaaataccttgaaaactttgaaacttgaccccggacaggcctggtgccaggtcctttccgacttttgtgttttctttccacctttcactactg

SEQ ID NO: 395765 - DNA, 122 bp, Homo sapiens
tcaaggaagggtgaggggactgggctcagcctgggtctcggaggagagcggggccagccccggggatggtagagtcaacctgccaggcactgtgcactgctggccaggcccggccaatgaga

SEQ ID NO: 395766 - DNA, 122 bp, Homo sapiens
ccagcgggtggaggaggtggaccagggccggggctatgacggcgactcatccagtggctccggccgctcctgggacgagcgctcccgccggccgaggcctggtcgccggggccgggccggca

SEQ ID NO: 395767 - DNA, 122 bp, Homo sapiens
tgcggttgtctgctcagtaacctagcgaagcccgcgactgccctgcctggtggagacgggcgcgcccctccctcaagctggtcgaggaggtgctaacacaggacttcgtcaatgaagcaaga

SEQ ID NO: 395768 - DNA, 122 bp, Homo sapiens
cacctggaccaagagctggggctgggctgccgcgcccccggctctgtccccgcgaggccccgctcccagccccacctgggacacccgggactcccgggacacctgcggggcggggcggggcc

SEQ ID NO: 395769 - DNA, 122 bp, Homo sapiens
ccatgttcatgttccttttttccctctctcattgtgtaagataagaattttgttattatgcgacaatagttttattaggaataaaacacatgtaggttcatatgcctccagggcaatcgcat

SEQ ID NO: 395770 - DNA, 122 bp, Homo sapiens
ggactgccaaaaccaaggaccgcaaactgggcggcttgaaacaacagaagtgtcttctctcgcagttgccagaggctggaagtccgagatcaatcagggtgtcggcagggctggttgctttt

SEQ ID NO: 395771 - DNA, 122 bp, Homo sapiens
tcccgccgccaacgccgagaacgtcgctttcgtcgttacttgtctgcaggacggctggtccgggcccaggccctcctccagcgacacccaggcctcgatgtagatgctgggcagcccccacc

SEQ ID NO: 395772 - DNA, 122 bp, Homo sapiens
gcgcgcgagcgagcgagggattccctctgacgtcattgctaggataccaaacaaacactccgccgcgccggccgagctccttatatggctaattgcgtcacaggaactccgggaaggcgggg

SEQ ID NO: 395773 - DNA, 122 bp, Homo sapiens
cggcgtttgacggcggcgggggcgtggcggggttttatctgtgtattgacgagagccgggcgcggagggaaagagtggggcttggccaatgggagcgccgtgagcttcgtagcaacggagga

SEQ ID NO: 395774 - DNA, 122 bp, Homo sapiens
gtattgtttttatccctctggtgcctagcggagcatctggcacatggcttactaattgctcgttagtttagttattgactaatggagagacagaaacacatgtggtagtttttaatggccca

SEQ ID NO: 395775 - DNA, 122 bp, Homo sapiens
aactggcaggcagcctttctggggtgtagctgcgctgcaggttgcacaaaagagtctcaacgcccctcctgctacccaggcctagccctcgcagcactaaatgggtacattcttgacaaata

SEQ ID NO: 395776 - DNA, 122 bp, Homo sapiens
tggctggtttagactcatcaggacttgctgggagcatgcaggaggggtacttgaacccatcgagagtcttgttagaaagaaaggtggagagggagatgggtatgaagcaggctgcctctggg

SEQ ID NO: 395777 - DNA, 122 bp, Homo sapiens
gcactacagtgtggcaaactgggggtgggtaaaggtttcccaaaggaggtgaggcctgtgcgaccaatgcaggcacaaaggaaaggaaatgaatgcaaacttggactgtgtgggaaactgcc

SEQ ID NO: 395778 - DNA, 122 bp, Homo sapiens
aaatccagcagcattttaaaagaataatgcccggtggcaccagggctctcagggaggctgcgtcctgccggggaaagtgcttgggctctgagtcagtcggggctcagctctctagcgctgga

SEQ ID NO: 395779 - DNA, 122 bp, Homo sapiens
atgttgtttgttggcacatgacaaatcttgtgtcattgaattgtcacagctaccctaagccgtgggggtggggggggcgcgggtatgacgattcttattgtacagatgagctgcgtgcattt

SEQ ID NO: 395780 - DNA, 122 bp, Homo sapiens
cctggtggaatgatccacttctcaggatttgataacgatagggctgatcagttggtctatcggttttgcagtgtgtccgacgaatccaatgatctcctttaccaatactgcgatgctgagtc

SEQ ID NO: 395781 - DNA, 122 bp, Homo sapiens
ggaggctggcggtgctcaggcagaccgtggagtctctcgtgtttgtgctgagtggaggggcgaggagcaggcttgagcccaggtcttgggacgacagtaggcccctctgtgtactcattggt

SEQ ID NO: 395782 - DNA, 122 bp, Homo sapiens
gggggaggagctgttgggctctgccggatcatccatcattcctgtcacccagagtctgcccggaggagccgtagacgcaatctcccttctgtctctacaccgaaactattaatattaaaacc

SEQ ID NO: 395783 - DNA, 122 bp, Homo sapiens
ctaatgttcctgtgctaaccttcgtgtctctgtgacatgactgttgaaagacggagagtgcggaatctttggagttttaagcttgccaactgtgcggcctagcagaatcctgggagacggaa

SEQ ID NO: 395784 - DNA, 122 bp, Homo sapiens
cctggagctagcgaacagcgagcccctctaacctgaaacggagcctcatccactgcttggcgctaatcctctgcacaatgaaagccgaactaattcactgggtaaacaccctctccagttac

SEQ ID NO: 395785 - DNA, 122 bp, Homo sapiens
cctctccggcttcgtcctctaccctccctctccgcagttaccctcccacacgcccctttccgccacgcggctttggcacgcactgttccctcggtctagcattctcttccccctctcgactt

SEQ ID NO: 395786 - DNA, 122 bp, Homo sapiens
aaaggcttggagctaaaggtggtggccaagacccttcttctcggccccttcctgttggtccgtaattccctggcgcagctccgggaagaggtgcacgaactgcaggcgtggtggttccccag

SEQ ID NO: 395787 - DNA, 122 bp, Homo sapiens
tccctcctttagatgtgtttgcacagaagagtgcccagtgaagagacctactccttggatcgctttgcgcaaaatccaccccttttccctcctccctcccttccagcctccgaatcccgcat

SEQ ID NO: 395788 - DNA, 122 bp, Homo sapiens
gttggtgtgcctgccaactgttctgggctctgagtgaggctggagagaccatcgtggaggcggttttaggttagaaaagggataaaatggacccttcatgccagatgggtggccacctagtc

SEQ ID NO: 395789 - DNA, 122 bp, Homo sapiens
gtctgctacgggattggggtaaattggcgctggatccagagtgcgcgcgagaggcactggcgggcgggcttggcaccggcgggcgggcttggcaccggcaggcgggcttggcacccacgtgc

SEQ ID NO: 395790 - DNA, 122 bp, Homo sapiens
tggggttctctctgcagatttgggggagtctctcccgcgggatgagggggggctctccgccgcacccgcctatgatggcccagaggacccgagctcgggtcactcccgtcgccctcggggct

SEQ ID NO: 395791 - DNA, 122 bp, Homo sapiens
gttatcaagtacaacaaggggacccggctccctccctgggctctcccctccgctaccccccgcaactctgagttatgggcgatcagttaattggaatcggtggcatgacaggaccaccccta

SEQ ID NO: 395792 - DNA, 122 bp, Homo sapiens
ctggaacacttccggcgccgctagcgctgcgagatattcagggcagaagttacgataactcggggcggaaatagcttctgcccagcgactgggaagaggggatgtgacgctatagcggaagt

SEQ ID NO: 395793 - DNA, 122 bp, Homo sapiens
gggcagctctagtggacgtataaaacccagactcaacaaaatccgattcagaacccagatcgtccacaccacaccctctttcagggacccagagcagccgctggagggcaggggggaggagg

SEQ ID NO: 395794 - DNA, 122 bp, Homo sapiens
ggggggctttgtgtgagaagaaggaagcgcggagatgcgcggaatgtttcttctttcgtgcgtctggggagtgttgaagtgagtccagtaaccagacggctacggattgttttcatagtgga

SEQ ID NO: 395795 - DNA, 122 bp, Homo sapiens
gcatgcgcagccctcgggccggcccgggcgcaccttttctgtctcctgccacattgtgagcgctccgccgcccagataaccgccggctccccgcgccgcccccgccttctcccactccgccc

SEQ ID NO: 395796 - DNA, 122 bp, Homo sapiens
tggccgcgccgccctaggtgtcgccgcctggcggttacgaggaggccgcctcctgcttgccggcctggcggtcctactcaacaccgcaagatttcaaaagggaaattcctccagggctgagt

SEQ ID NO: 395797 - DNA, 122 bp, Homo sapiens
cagacccccctagccaggcttccagcccccttccacccccgccccgcaccactcactacccgggatggccagagctaagcaggggagtctgttactagggagaaaatctgaaacagagctcc

SEQ ID NO: 395798 - DNA, 122 bp, Homo sapiens
agcgtgcaggtcttcacggggtaccgtgcaggtcttcacgaggcagcgtgcaggtcttcacggggcaccgtgcaggtcttcacggggcggcgtgcaggtcttcacggggcggcgtccaggtc

SEQ ID NO: 395799 - DNA, 122 bp, Homo sapiens
cgccgaggcccgaagtaggggacatccagcattttcccctttccctgctggcttggcctccgccattttgggtacagtggcgcggccacctcggcttcccgcccttccccgctctttttact

SEQ ID NO: 395800 - DNA, 122 bp, Homo sapiens
ccgagggtgaaactgaatccgggacagtgacacccgggctattttggggctgggctgggccggcctggccggcacagggggtggggtgggggcgggcccaggcttctccagctgacagtgtc

SEQ ID NO: 395801 - DNA, 122 bp, Homo sapiens
gctcccccggtcggtatggcctcatcttcctgcatcagacggcttccatccaccgagcgccgagtcttcttgggcatctgaatgggcagtggctggatcacctcgcctgggggaccctgggt

SEQ ID NO: 395802 - DNA, 122 bp, Homo sapiens
cagtgagtcaacctcctccggtgttagaaacagccaccaatgtagaaatggcaagttgctcgcaacctggatggttctaggcctacgtgggcatagctggtcctgatccatgggcagcagga

SEQ ID NO: 395803 - DNA, 122 bp, Homo sapiens
cgccccacccgtgaatgtacccaaggcttccttatacacaccaaaaagtccccactgcaacgctgggagggttaacagagctggtaccccagcctgccagctcaccaaaggagagagcggtg

SEQ ID NO: 395804 - DNA, 122 bp, Homo sapiens
gcctgcagttactgcctcaggacgcctttctggaaggtgagtttcttggccaggggatatcgcacatgcactttggagcctctgagcctttgcacaggctggtccctttgcctggctgcccc

SEQ ID NO: 395805 - DNA, 122 bp, Homo sapiens
aattgcttgcccaatctaccagccacactctctcgggaccttgccccgccaacttctcttcgccagagaaacgcccaggagagcgggaacattttctagggcgctcccaagttggaattctc

SEQ ID NO: 395806 - DNA, 122 bp, Homo sapiens
tttaagaatgaaaaagtaaagtatcagtcccctgtcatgctctcccataaaactgagtatcgctaatcagttgacaagcgaagattggtgattgcttgggtagttaattagcatacttcatt

SEQ ID NO: 395807 - DNA, 122 bp, Homo sapiens
cagctcctttccccgcccgggcgctataggtgttgtgacccttgggacagaagttcagagcgagggtgggggggggggaatacacatcgtgtatgaaaaccgactgcagattctagataatc

SEQ ID NO: 395808 - DNA, 122 bp, Homo sapiens
aggtacatgcaagaagagatgtgaatcatgaacaggtagaaaaatatctggtctctaatacggaaaaaatgggatgtttcacagtatcaacagtgcttgctggttctaaaaagtagccccag

SEQ ID NO: 395809 - DNA, 122 bp, Homo sapiens
tgccgtctcccgtcttgctgtccttgtcccggtaagaccggggaccctggaccagggaaccgacggagggccactcccatgtggatgcccaagggaccaacccaagaaagatgccgccctta

SEQ ID NO: 395810 - DNA, 122 bp, Homo sapiens
cgcgagcgggcgacaaggattcccagcagctggtaattaattgcgccgtggctcagcccacgacggaaccccagtcaggcctcccgccgccctggcagcggcgccacccctgagtcacagcc

SEQ ID NO: 395811 - DNA, 122 bp, Homo sapiens
gcagtgactatccgtccttgctctgaacagaagtttttatatccattactttatgtctcccgtatcacaacactgggaggtagatgttatcattgtcagtttacacaagagaagcctacgcc

SEQ ID NO: 395812 - DNA, 122 bp, Homo sapiens
aaggtcaacattatacaaccaaaggatttccagatgtgtgtgtgttgtcaccctgagtaacgggagtgatcataattcacctatgtaattcctagggtgctctctctactactgtttttcat

SEQ ID NO: 395813 - DNA, 122 bp, Homo sapiens
aatgccaaattaagagcacggctattttcgggagccgccgggtcaaaagaggtgtaagtccgataggcctcctggaggcgttctaaaaacgctcccggtgactcatcaggccctgtgcgact

SEQ ID NO: 395814 - DNA, 122 bp, Homo sapiens
gcagccaacaggtaatgcgccaggcgggactggggctcggggcgtggtgtttgtttcctccgaaggggcagcagaagctggagcagagacaacagcccagaggggtttgaggactcccgggc

SEQ ID NO: 395815 - DNA, 122 bp, Homo sapiens
acgtgacaaatgtgaatggagtggtggctgagttaacttccaactgtgtaaatccttacacgtataaaaatggattccattaatctttgaagagatgaaatgtcatcaaattctgactctaa

SEQ ID NO: 395816 - DNA, 122 bp, Homo sapiens
ggccgggccgccaggcactgccttacccaggctggcagggccccccaggtgggcacacgccggcagaggtccctcaggaccctgatgacgatcacgcatggctgcaggccgctggctcgagc

SEQ ID NO: 395817 - DNA, 122 bp, Homo sapiens
ggtggcgatgcctgggtacaggttccactaaaagcacgctcacagggcctccctttcactcggggtccaaacgagtctccttcgccgtcctcgtcctcgggcttccgcagggagacaactgt

SEQ ID NO: 395818 - DNA, 122 bp, Homo sapiens
actacctgctctgtgtgtggggggggaggggggaggggggtacgcatattcacttgaagtcgaggttcccagggcatttccatgtgctccaggcctgactacccatcagggtggaggagctg

SEQ ID NO: 395819 - DNA, 122 bp, Homo sapiens
ttattgcaattcccctgtcttgataaatcagctctgtctaggaagtggacaaggagagcccgttgggtggttacaataggacaaaccaataaaatataaagtattagagacactacctgggt

SEQ ID NO: 395820 - DNA, 122 bp, Homo sapiens
caggtgctccgggtgctagcaaagctggggtgggcggcgccgggcaaggtctgaagactgcgaggacccagctgccaggcgcattgtgaagtggcccgagcgtcacaggcgacccggacctc

SEQ ID NO: 395821 - DNA, 122 bp, Homo sapiens
gtcccgtgttccaccaagcatgacaccataaaacactggcgaacgatcagggccaggccccgtgttccaccaggcatgacaccacaaagcacttgcaagtgattttatgagagtcatttttt

SEQ ID NO: 395822 - DNA, 122 bp, Homo sapiens
ctcgctgtgccctcaacgctcagccctggtgcctctgccagggctctctgcatgaagagtcgccttccccttacatcagggctggctttgtgttgtctctgaaacttcttggaccttgccag

SEQ ID NO: 395823 - DNA, 122 bp, Homo sapiens
aaaaatacaagcaaggcagtaaagtgaaacaagaaataaaaccactcaccactcacgacacggaaattccaactgtaaagactcaagtcttttctggagggggatcacacatttggctctga

SEQ ID NO: 395824 - DNA, 122 bp, Homo sapiens
cgctctgggctagtgcgccggcgcggacgtccgccgccttccgagtggccagcgaggactcgctctgtacacagctcgatcttgggaggcttctcagagggacccaaaaggagggggaagca

SEQ ID NO: 395825 - DNA, 122 bp, Homo sapiens
ggaaatttttgctaaccttccgagttgtctcagagccaaacgtagtaagctacctgtcaccggatgtgcttgagctaagggcgctgaaccacctctgtcagagacggtgcatcccccaccgg

SEQ ID NO: 395826 - DNA, 122 bp, Homo sapiens
cgcacctgcactcctcagcccttgggcggtcaatgggacagggcatcacagagcagggggcggcgcccatcagggaggctcacccgtgtgggagcccaccgctggggggctggggcatggcg

SEQ ID NO: 395827 - DNA, 122 bp, Homo sapiens
aactggtcaataagctcatagcacctggcctccattctttatgactttaagctttggtcacgtctttttggagcaagtcttaatctttttggcctggcctcaaatttccactgtaattgttg

SEQ ID NO: 395828 - DNA, 122 bp, Homo sapiens
aatatgcttggtggtgagggtaaggggacaacggtgatgcctttccacccgggaccgttgcggccaaggcgatcccacacgggctgcctggagtcagacctgtccagcaaggaagcttcggg

SEQ ID NO: 395829 - DNA, 122 bp, Homo sapiens
cggagcggcgcccggcgcgccacggcccgtagcagtccggtgctgctctccgcccgcgtccggctcgtggccccctacttcgggcaccatggacacctcccggctcggtgtgctcctgtcct

SEQ ID NO: 395830 - DNA, 122 bp, Homo sapiens
tcccaggctgtccttcgaataaagtccaggttgcttatcagactttccgcaggcttatcacgctgcatctccccggccgcaccctgccacgctgaccccagagctttgcgcccgcaccggcc

SEQ ID NO: 395831 - DNA, 122 bp, Homo sapiens
cctgggtgacctcgcagggcatgctgggaaatgaaatttgcggtgaaaaggtcaggaccacgatcctagggcacgctgggaaatgtagcccacagggccacacccctaaaagcacagtgggg

SEQ ID NO: 395832 - DNA, 122 bp, Homo sapiens
tttattgaatgcaccacagggtagagacttttgctgggtgcttagcagactagcaggagccggtgtactatggccctcagcctccccagggcaaggactgtcagagagctaaagggtgtaca

SEQ ID NO: 395833 - DNA, 122 bp, Homo sapiens
ggttttataaatgtgtatctatgtgtgtttgcatctttcctgtggcagagtgcctagacacgggcaagtcatctgtggataacagcatgcagcatgtgacatgaaaaatcacacattgtatg

SEQ ID NO: 395834 - DNA, 122 bp, Homo sapiens
atcacggttccggggagcggtcggcggccgggggaggtgcgcctgggaggcggtgcagggcgccccgtccgagccccatctctcgactccaccgatttactccatattggattctcaccgcc

SEQ ID NO: 395835 - DNA, 122 bp, Homo sapiens
tgtggattacattttcccttcagttggaaatctttccttttttttctgctatctgtcactcgtctcatctcatttctctgctatgtttagtcccttaaaaaaagcataaatagatctctgtc

SEQ ID NO: 395836 - DNA, 122 bp, Homo sapiens
gcagaggattgtgtgtgcagaattgggaaagaaaaaacgtggtgcgaatgaatatgcacgcgaggcctcagtcctgtgaactcgctgatctggagaagcccttgtctgcactgtccgcccga

SEQ ID NO: 395837 - DNA, 122 bp, Homo sapiens
gaagagggagggagcgggcggagagctggggccaagtgcattgtgtctggcggcggcgcgcgagcccaccggcggctgcggcggggcgggaagccatggagccgcgggcgctcgtcacggcg

SEQ ID NO: 395838 - DNA, 122 bp, Homo sapiens
gccggtcctctcgggttcgcgcctaccatctgtccgtccgtgggtccctccgggtggcttcggtctctttgtgcctctgggtatctgcagccagccgacacaaactgcctgttcttagccgc

SEQ ID NO: 395839 - DNA, 122 bp, Homo sapiens
gtccatgcccagcagaccgaggtgttccggcagttctgccaggagctggtgaccgtgcaccgggacatggccaacagcatgcacgtcatcggccaggccatggccgagctgaccagccgtgt

SEQ ID NO: 395840 - DNA, 122 bp, Homo sapiens
cgggactttgcctccctccaattggctgatgcacatgtcactcattattcaattggctttcggttggtgcgctctaccgtccatcagtgacattgcacagacctattggtcaaatcaacgtc

SEQ ID NO: 395841 - DNA, 122 bp, Homo sapiens
gcagcacgccgtggagctgaagcccctgtgcggctgccacagcttcgccgccgccgccgacggccctaccgtgtgctgcaacccctaccacttcagccggctctgcgggcccggtgagcgcg

SEQ ID NO: 395842 - DNA, 122 bp, Homo sapiens
aggggtgaaggaaggtctgcaaagttaaaggtgcggtttccagagtcagaaggggtgaagcggggctcctcctgggaatgtcaaggttggaagagctcaagggggttaaagataaattaggg

SEQ ID NO: 395843 - DNA, 122 bp, Homo sapiens
cctgaggactgggcgctgtgtgccctattaccaggggccctccaagacctgcgaggtgttcggctggtgcccggtggaagatggggcctctgtcaggtgcacctgcgccccggcctggggcc

SEQ ID NO: 395844 - DNA, 122 bp, Homo sapiens
gcgtctgcgtttgctttttaatgccagcgcccagcgagggagcagggccctcctagcgtgcgcggagggggcttggggtggaaaggggggggaaccccgaaacaggccgccttttgacaggc

SEQ ID NO: 395845 - DNA, 122 bp, Homo sapiens
gagtggagcggttgtgagattcaccatcagcaaaaagtgaagctgagcacgaggcggatccggaccactaaggggtccccacgaagctgagcacgaggcggatccggaccactaaggggtcc

SEQ ID NO: 395846 - DNA, 122 bp, Homo sapiens
caattgctgaacagtaattccttttcgagcttatattcatgattatttaagttttacttccgcaaacaccctgcggtcaattcaaatcaataaatcactgaatttcacatttaatttttaag

SEQ ID NO: 395847 - DNA, 122 bp, Homo sapiens
gggattcacgtacaagccactgattccgagggcagtgctgttcaccagggtccacacggccgcctttaccctgcacatcctttccggggcgggccaaaagttatactttactgagggcgtcc

SEQ ID NO: 395848 - DNA, 122 bp, Homo sapiens
tacattgcagaagaatgtaatgtgggcttcttcccaggcgacctcacaggatgtcaacctcgggcccccgggccttaagaaggccggtgccagggacagagatagcatctactttgaaggca

SEQ ID NO: 395849 - DNA, 122 bp, Homo sapiens
cagaggaggaaggctgcttgcggttagactgggtgagtcaacgaaacaaacaaatgggcccgatgaggtcagctttttggaaaaggaacaaagaaaactgcacccaaatgagaggcagctta

SEQ ID NO: 395850 - DNA, 122 bp, Homo sapiens
ttcccccgttatactccaatcccagtcctaaaacagattccagcccttctagcctcctgccggggccaagctgtttccactccgccagactctgtgaccctgcccctgtcacactgcctcct

SEQ ID NO: 395851 - DNA, 122 bp, Homo sapiens
ggctcgagggtccctaggggtggtgggacgcaaggcccatgcccgtctatggcctctcgccgccggcagctcgcagccacccgagcatcgcctcggcgcgggccgcgacgctctccgccccg

SEQ ID NO: 395852 - DNA, 122 bp, Homo sapiens
tggcccgggcgccgctggactcctaggtaacgtcgcaggcggaaatgacgtaactcaatccgttctgtcccgccccattgccctcctagccccgccttctaggccccgcctttcctctattc

SEQ ID NO: 395853 - DNA, 122 bp, Homo sapiens
gcctcttggggaaggccatggggacctgaaacattgccccatggaaatgtcgaccctgtgcggacattccgcatactgccatgaagacggtctctgtgtcctcagctcaagaatcctgtagc

SEQ ID NO: 395854 - DNA, 122 bp, Homo sapiens
acaaaacagaagaaccaactggcttttctaaggccatgatttggcatgaaccccatgactcggggagcactggtccaacttcaggactggacctctgggaggagggtagaggggatctcttc

SEQ ID NO: 395855 - DNA, 122 bp, Homo sapiens
accatcaaagtgtgacatgttgggttttggatagaccagatgtagctaagaggggaaatacgaggcaaagatttcaagttttgagtaatgactttctgatgagaaactgtcctgtgggggaa

SEQ ID NO: 395856 - DNA, 122 bp, Homo sapiens
agatacgctgctgtggggatgccgtgaacttcgtggccaagaacatgagagggcaggacacgagaggccaggacgccatcggcgaggttggacaggagccagaggcggatggagcgcggcag

SEQ ID NO: 395857 - DNA, 122 bp, Homo sapiens
agtgaagcagcgaagtacgactccaaccccgcccagagagtgctactagcgctggctgcacgccaagtctctccaggggtccaaagcgagagggatttgttttaacccatctctacccgtcc

SEQ ID NO: 395858 - DNA, 122 bp, Homo sapiens
caaataaggcactccctcccggggtgggacttgcttaggggacttaagggtttctgcaaccggcgagggggtctgttttcacccccgctatcttgggtgcgcagacactctctgacaccagg

SEQ ID NO: 395859 - DNA, 122 bp, Homo sapiens
gactaagacttcttaccttcctttcattgttttttacctaagctctaggcagtctccagacgcagaaatggtgtatgaagcagttttgctatttggaataaaagtgctttgttacgtaaggc

SEQ ID NO: 395860 - DNA, 122 bp, Homo sapiens
acgagacgcgatggacgtgatcgccgccctcatcttctgcggcgaacttctagcgggtgacgctgtccaatcggaaagcgcctttccgccggctgggccctccgtctacccccagcggcgag

SEQ ID NO: 395861 - DNA, 122 bp, Homo sapiens
gctcagaaaagttgattgtgcttttctccaattccacacttggtgatgtcaggttagtagcgtcacatcaggcatagtgggagtatttactgacaaacattacaaaccaggatttctttttt

SEQ ID NO: 395862 - DNA, 122 bp, Homo sapiens
ggtcccgtttgtggtcagcacggccttttactttctggccgtgactggcaactgcaccaacgtcctcctctccctcccactgcacactcccacttcctcagcgaccgggcccttctccacct

SEQ ID NO: 395863 - DNA, 122 bp, Homo sapiens
ccccgaaaagtccatccatcactgcaagcctctgcggtgttttgcattttaaatcatttacgggaacacggacagcctcccccctccgctcccccggagcagctttgaaacttacagactcc

SEQ ID NO: 395864 - DNA, 122 bp, Homo sapiens
acagcaaacaaaataacggcaatttattattcctgtccactgctgtccacaaagggccggcgttatctgttggtgtttttctcaggtagctcagactaacactgctgcgccccactggggcc

SEQ ID NO: 395865 - DNA, 122 bp, Homo sapiens
agtcatggattaaagacctctctgggcagcgttgagaaccagcgaccctaaacttggctgcgtttccatggtgtcgatcgcggagccgtgggggcgggctcacgcaagcgccaagggaccgg

SEQ ID NO: 395866 - DNA, 122 bp, Homo sapiens
ccagggtggaagaccaacacacacctccccagacagcccagcacgccagaaacggccacccgcaggccctgccagccgctcacgaggctgtctacagggagggcaagcccagcaccccggag

SEQ ID NO: 395867 - DNA, 122 bp, Homo sapiens
tctgaataataacaatgtgcagttttcactcaccctcgatgtagaggggctccaccacgtcgtggttaatcaactcgaagttctcatgtccgatccagtgctccacgtttctcttcctgccc

SEQ ID NO: 395868 - DNA, 122 bp, Homo sapiens
cagccagagtgagagtgtccctgctgccagaggactacggcgggctgggcgcggggtccccgcctctcgctcaccacacagaccccgcgcctcctctggcagccgcggtggtggcggcggca

SEQ ID NO: 395869 - DNA, 122 bp, Homo sapiens
aggggaccccggagcccaccgctctggagtccccgttcgtgcagcagtgctcacgtacctcgtcccttccgcacacctgctggatctggaaggaagcaggtgtgagcaaatttgggggcgtg

SEQ ID NO: 395870 - DNA, 122 bp, Homo sapiens
gactgggtttttgtttggattcagggggcacacatgcaggtttgttacgtgagtatattgcgtgatgctgaggtttggccttctaatgattccgcccccctaggtggcgaacatagaacctg

SEQ ID NO: 395871 - DNA, 122 bp, Homo sapiens
tgtgacacgcgggcaagacgcccatgccaaccagtgagtgggcagccccgggacctcctgcgcagccgccgcagccttgcctgcaaagcagttcctgccgggcaggctgggtagccggactc

SEQ ID NO: 395872 - DNA, 122 bp, Homo sapiens
caagatgcggattgggtcggtcatgaacttgttggtcatctccagaatctcgtgtggcagcgtggcactgatgagaaccacctgtgtggctggaggcaggtacctgtatacatcgtaaatct

SEQ ID NO: 395873 - DNA, 122 bp, Homo sapiens
ggtgcgagttgccctcgaggggggaggtgccctgcggagaggccccgaagccccaggacacgtctccaagcgcccgtcgctgcctcccgtcgcccaacgtgcttttgcccctcgggctcctc

SEQ ID NO: 395874 - DNA, 122 bp, Homo sapiens
tttgacaaagctgtgatcagccccacagcagaggccgtgtgtttcttgacctggctttcccgtgctgggagctgggcttgcatcgaacccctcctgctccctcagcggctgcggcccttccc

SEQ ID NO: 395875 - DNA, 122 bp, Homo sapiens
tccacaaaatatggtgcctaaacacaaccataagcaaattgacccaatggacccgtgtctcgttatagggaacattcaacaagaggtggctgagtgaagggggtcatgagttggtagaaaag

SEQ ID NO: 395876 - DNA, 122 bp, Homo sapiens
cttgttagaaatgcaaattcttgcgccctatcccagacctactatatcagcaactcttagcgggtggggagggtagggctgagctctgtaagtcatactgaagttgagacccactggtctat

SEQ ID NO: 395877 - DNA, 122 bp, Homo sapiens
gaccttgtggccaagggcagctgccacatgaggctgtggaggcaggggccagggtgtgtgcgtggcgtggcagcaggaatactcaccgtggggcactgggggttcttaaacgtgactttgaa

SEQ ID NO: 395878 - DNA, 122 bp, Homo sapiens
agaggctgctgtggccactgaggctgcctcccagaatggggaggatctggagaacctggacgaccctgagaagctgaaagagctgattgagctgccgccctttgagattgtcacagggtaag

SEQ ID NO: 395879 - DNA, 122 bp, Homo sapiens
tgaactcctgacctcaggtgatttgcctgcctcagcctcccaaagtgctgggattacaggcgtgagccaccgcatccggcctcatgtcacttttatgctctgcttgtcacgaagtaaccttt

SEQ ID NO: 395880 - DNA, 122 bp, Homo sapiens
gcacatgttaagatttctccccatttgttcccagagttctacgtctagcgttccttcttccgggaaccacgggcttgggatcacaagagtttgcattgcaacagtttgtctagcatggatga

SEQ ID NO: 395881 - DNA, 122 bp, Homo sapiens
ggctccgaagcctgtctctgcaggtagcagccgcttcacagctttcaggccggtgctcagcggaggctggtgcatctccactaggaatccacacccagctgggactgctgtgaagctgaagt

SEQ ID NO: 395882 - DNA, 122 bp, Homo sapiens
gcccccctcgctgtggctgtgtgtttgcaggcgcccctcagactccaactggaatgtgtccgtgatggtgggaggccgggctgtggtgctcctagtagggctatggtggcaagctttaggac

SEQ ID NO: 395883 - DNA, 122 bp, Homo sapiens
gcgcctgtaatcctagccacttgggaggctgaggcaggagaatcgctttaagccaggaggcgaaggttgcagtgaaccgaggtcacgccactgcagtccagccctgcggacagtgcgagact

SEQ ID NO: 395884 - DNA, 122 bp, Homo sapiens
gagagcaaggtgatttcctggctgggtcacgctgaggaacaatacaggctttattcctcccggccttgtcctggtttgcaaaatacttgcaggagcagcccccgttaagcttccaagttgct

SEQ ID NO: 395885 - DNA, 122 bp, Homo sapiens
cgcatggtctggcgttcaaacctgcctaggacaggtagtgtggggacctacctttttggtcgctgtctgctccaagaggacatggtagctctgctcttttgcttctgggttgtcctggcctg

SEQ ID NO: 395886 - DNA, 122 bp, Homo sapiens
tggaagaatatgcacatacacaacttagcggcacttggggtggctgcgtccatgtagaatcggcttctgacgagttaactaaaaaggataaaggggccaggcgccatggctcacgcctgtaa

SEQ ID NO: 395887 - DNA, 122 bp, Homo sapiens
ttgcttaggcgcggtggagatgttatcgtcattggcctggagaaggattctggcgcccagcggggccgagtcattgccgtcttaaaagcccgagagctgactccgcatgggtaagactgagt

SEQ ID NO: 395888 - DNA, 122 bp, Homo sapiens
gctgcaggaggagtggcagcagccaggcagcccagcttcgcaaaggctctcggcatgctgcggcccgcaggcacctggcacacgtcctccccgccaccaggatgcccgagaggaaggtcagc

SEQ ID NO: 395889 - DNA, 122 bp, Homo sapiens
cactggcagattgacagtgcattcatgatgtattttaaaaattaactttcgcaggactatcgctcatgactaattttgccctttattctcagtacctggaaatacattttgtttctgctaat

SEQ ID NO: 395890 - DNA, 122 bp, Homo sapiens
ctccatgttttataatgcccagagtggtgcgtgcttccccgctggggtaactgaagttgccggagctgggttcactggggatcgtaagggagcttcccgggcggggccatccccagctgggg

SEQ ID NO: 395891 - DNA, 122 bp, Homo sapiens
attcaatgttttacaaaaaggcccacaaacgaaatacagacaacgttcaatttattaatacgtttcaatccccaaatctgagagaggtgaagcaggtttcccagggcctcagaagcaggatt

SEQ ID NO: 395892 - DNA, 122 bp, Homo sapiens
tgagaatcacagacaaccaagatgcaaaatcccgaagtcattattcctctgagtggagcccgcatctggaatgcaccttttccagcagggagtagtttataggtcatataatgtcatttcag

SEQ ID NO: 395893 - DNA, 122 bp, Homo sapiens
atagtaacaagtcaacgtcggttttcaggttttgcagtgggagaagctggtggaggtacacgggactctgctatttttgcagcttcctttggatctataattatgtcaaaataaaatgcttt

SEQ ID NO: 395894 - DNA, 122 bp, Homo sapiens
gaggctgagatgggaagggacaggcccagggtcacgcatctattagaggcgggagcctcacgccggggcagggattttggaattagacactttaaaacgcctcatattctacttttgccaaa

SEQ ID NO: 395895 - DNA, 122 bp, Homo sapiens
aggattgttgtaatgattaaatgagtttacccatatgactgtagctataatttagaccagcgcctggctcatagtaagagcttgatggatatatggttctatgacaatgatgatgatggtga

SEQ ID NO: 395896 - DNA, 122 bp, Homo sapiens
ctcagggacaaacgtgtcctcaaacaggctgaggatctgctcctgcttgacttccttggacggggtgtgtttgggaggcggagggactggtgggcctttccggagctgtgggtcggcggcgg

SEQ ID NO: 395897 - DNA, 122 bp, Homo sapiens
ctgcctggcccctcccgctccagcgcccccagccctcaccccgtctgggaaacgatctcccgcagcacccgcacggcatcgtcattgctcatgttctcaaagttcacgtcattcacctgcag

SEQ ID NO: 395898 - DNA, 122 bp, Homo sapiens
atgaatcttgtgaaaaattcatgatgcttctctgcagtctgtcttcaagtttcatggaggcgtgcgttccgttggtgcctgggcagggcagcttctcctgacccaggctcagaaatcagagg

SEQ ID NO: 395899 - DNA, 122 bp, Homo sapiens
gaagaaacgcggggcaagcggccgctgccattggggacctggggcacaggggacgggagtcggggtcgaggcggatatgggcggaggaatcgcctggtgcctcacattcaggctagtgaatt

SEQ ID NO: 395900 - DNA, 122 bp, Homo sapiens
atccctgtttagtgccggcctggaaaggtgcagttggttaaggaatttttcatgggcctgcgcaaggcgactctgtcaaacccggcagcctcttgaagagggtgcagtgaccggggtctctc

SEQ ID NO: 395901 - DNA, 122 bp, Homo sapiens
ctgcacttgtgcacagaatgttcttacgtttgcaaacagcgtgcaagccgccgcgcgcggcgggactcaagggggagacacatgcagccactggaacgctctttccagtcgtttctcctcga

SEQ ID NO: 395902 - DNA, 122 bp, Homo sapiens
gagacaatttaaaaggcgttctcatacattctcactttgatacaacaaccctgcaaagtgcgcacggaaggtgttattaactccgttttacaggtaaggagatcgacccactgaggtcagga

SEQ ID NO: 395903 - DNA, 122 bp, Homo sapiens
gctgcgctcggcagagacctgcttaggcttccccaagtcctgcgcctaagtcctgccaggcgcccgctctcgcctggggctgagagcttctcagggcgtcctgcgggaggctgttcgccgcc

SEQ ID NO: 395904 - DNA, 122 bp, Homo sapiens
actgaactcacagccttaggagggaggttcgagtttatgcccattttacatatgaggacgcgttggcaggtggtactgctgttcatgggatctgtaaagagtgaagaaggagtctcagctct

SEQ ID NO: 395905 - DNA, 122 bp, Homo sapiens
ggctgcgagctgctctgctgcggcaggggccaccgcacgcgcacgcagcgcgtcaccgagcgctgcaactgcaccttccactggtgctgccacgtcagctgccgcaactgcacgcacacgcg

SEQ ID NO: 395906 - DNA, 122 bp, Homo sapiens
atccgagggcccgccgggaagcaggtcagcctgggccaaagtccgcctcctccctcgcggcgagaggctcccagctaattaccgtaattgcggtgggagagctgccggatgcgcgggggctg

SEQ ID NO: 395907 - DNA, 122 bp, Homo sapiens
tcaaagtgaaattccgcttctccgggtcttagcggcggcttggagcagagtaggctccatcgctggggtggtggttgggggtgggggtgggggtggggaagggggaagtgcgggggagacac

SEQ ID NO: 395908 - DNA, 122 bp, Homo sapiens
tggctgctccctggttgctgggtgcaaagtgctgggttctgggtttctggattcgcgggccgttcacacgtagcctgtgccggctcctcgggtgagtccgtccgcgcgcggtgccccgggac

SEQ ID NO: 395909 - DNA, 122 bp, Homo sapiens
ttggtggcgtcagaaacacacccagcaccttgcctggagcagggcggctgggccctgctccgtgaatcccaagtgccctatgggagcctctccggccagggactgccagcctagaggagggg

SEQ ID NO: 395910 - DNA, 122 bp, Homo sapiens
cgctgtaacccgccggactcccgtcctgactgacacttgccccctccccactctctggaacgccgagcttagggcctttggccccgcccccttgccgcgtctctattgggggacacctacga

SEQ ID NO: 395911 - DNA, 122 bp, Homo sapiens
aatatgagaggtggaagtggcactcgagttctgcccgcaaaggtgtccctgggttcttcccgcagcccgggtcttaccgtgctgagctccacgccgtcgtcaggcagcagcaccagcaggct

SEQ ID NO: 395912 - DNA, 122 bp, Homo sapiens
gaactgagcaaggggcaaggtttaggtcccccgcaagaggctgatgaatgagcttacggacggttcagaggtgtgaaaaatgagcttctctgtctccagaaaataggagaggctgtcttctt

SEQ ID NO: 395913 - DNA, 122 bp, Homo sapiens
tgctgtgtgggaagcgcttccaggcgcagagcgcactgcagcagcacatggaggtccacgcgggcgtgcgcagctacatctgcagtgagtgcaaccgcaccttccccagccacacggctctc

SEQ ID NO: 395914 - DNA, 122 bp, Homo sapiens
gctcgctgttaaccgtcaaaccgtcaaagcatttgtggaggaacctggggcaaagttccgcgccgggttctccagctgtgggttcatcagcttagcccaccactcccacgtaacaccagttt

SEQ ID NO: 395915 - DNA, 122 bp, Homo sapiens
ggcccctgtggaggagctggaccgggaggggcagcggctgctgcagtgcatccgctgcagcgacggcttctcaggacgcaactgcatcccgggcagtgctgacttccagagcctggtgccca

SEQ ID NO: 395916 - DNA, 122 bp, Homo sapiens
atgccaataagtcattagaaaccagaacggcaaatgtgaggttgccatggagaccaacaccggggagctggcagccctgggggccggccggtggctcaggtgtgtttcagggagagctggga

SEQ ID NO: 395917 - DNA, 122 bp, Homo sapiens
cggagcctgcacacacacacacacacacacacacacacacacacacacacacacacactgcggagtccccccatccaggcctggaaggagaaagagaggtcatctggtgtccatcccacaac

SEQ ID NO: 395918 - DNA, 122 bp, Homo sapiens
cgggtacgtttctgctttatcaaaacaaactgggcaattattcagagacagaaaagggaacggggagctctttgttcaccacgctattcatgcctggtcacggagcccaaatccagcacaaa

SEQ ID NO: 395919 - DNA, 122 bp, Homo sapiens
acactttgggacttgggagctggggctgaagttgctctgtacccatgaactcccagtttgcgaattatagagacaatctattttgttacttgcacttgttattcgaaccactgagagcgaga

SEQ ID NO: 395920 - DNA, 122 bp, Homo sapiens
cgcccagcagagggaagagagcgcagccacggcttccagctgctcctctctgctgcatcccggcagctcttcagatgcttgcacaccttgtttacagctcccggtaacgacacaggtaacac

SEQ ID NO: 395921 - DNA, 122 bp, Homo sapiens
tggtttttcgccccttgacagcttgaggctccgccccgctttgccccgcccccccagctccggccgacgcccaccggaactacagcccccatgatgcagtgggagtccgagcctctgcgtcg

SEQ ID NO: 395922 - DNA, 122 bp, Homo sapiens
tgtcagccactcactcagtgccgcatggagctcctcggacagcgcaacgtcaaatgtcttcgtatcctgagagctcgctccttgaccagaaatctcatcataagaggccaggagacatactg

SEQ ID NO: 395923 - DNA, 122 bp, Homo sapiens
ccctggatccatctgaggagagaggcagcagatggtttctaagagaagggggagagcccacgcagcccatgcctcctatagcctcgctctgtgccctagcatggggctttggtcttttggct

SEQ ID NO: 395924 - DNA, 122 bp, Homo sapiens
tgcggtggtgtcacgccctcgcaccgcgggtggagaagcgtgtctttcagacagaccaagcgatttgctcaaggtcacagggctcagaggacacaatattaagcccaagaagctcacagcgt

SEQ ID NO: 395925 - DNA, 122 bp, Homo sapiens
ggcagccaccctccacccctagcccctggatgcccggttccagccaccctgcaagggtagcgtttcctgaaacttctatcgctgtagccccagggccctcacctggcgggtcttctccccca

SEQ ID NO: 395926 - DNA, 122 bp, Homo sapiens
tggcagggaaggtcaagacaaagctgctgcagaatggggtggacgtcggggtcaaatactcggagaagcaggagcggaacttcgacgacgccaccttgaaggccagccagtgcctcactgag

SEQ ID NO: 395927 - DNA, 122 bp, Homo sapiens
gagacaaacccctgtgataccacctgttaccccactggccccaaactcctggaagaagcgcgaggtgcccccagtgcagggtgcatccggatcctagatatcccccaaatgacatttgttcc

SEQ ID NO: 395928 - DNA, 122 bp, Homo sapiens
tccctccgctctggggaggcagcgctggcggcggggctggggccactgaggaaatccatccgcgccgccgccgccgccgccgccgccgccgccgccgcctccgccgcggaggaagacagcgc

SEQ ID NO: 395929 - DNA, 122 bp, Homo sapiens
cgttgcggtcgtggtggaacaggtggagcttgcctcgttgccttctgggaaacgaagtctcgctgaagagaggcggaactttgagtagcaggtggatccatagccaatgaagacgcgggtcg

SEQ ID NO: 395930 - DNA, 122 bp, Homo sapiens
tgccttctggtgcctgcacgttttaactaagatgtgtcgccaattacttttaattactgtcgtccacgctattgtcatcagcatttcacaagtttctcggaagcccatcacgcagcccatac

SEQ ID NO: 395931 - DNA, 122 bp, Homo sapiens
tgatctctggggaaatatagtccagaggatcataatcaccttgagtctcagagaatgtcccgttggcctattacattgatagcatcaaacaaattaaacctcggagagcagaaagcagcaag

SEQ ID NO: 395932 - DNA, 122 bp, Homo sapiens
agggggaaaagaataatttacagtggagaaacctgacaaacacgacttcagcccagtgatcgaggtcaacagcaacagtgataaaccatgtacccttgatagaatgtggtgtgtcactgata

SEQ ID NO: 395933 - DNA, 122 bp, Homo sapiens
ctttggagagcgagaggtcgcggggaggtctggacagaactgagggccagaggatggggtcgaaaggccaggcggacgtgcatgcttggaccatcagatcacccctgccccaacggacccag

SEQ ID NO: 395934 - DNA, 122 bp, Homo sapiens
cttttattccctcctccatggtcctgcctctctgtgaaattaacaagccagctttgtccccgcatccccaccgcccccaccccgccgcctccccaggcccgtggcagtcccaccacgcgccg

SEQ ID NO: 395935 - DNA, 122 bp, Homo sapiens
gtatcactgagccccgaatttgtcgacagctggcgtctgcacccaagctaacccttcactcgcctccccacccaacacacaaagagcagggagcccagtccaaccaggcttgcagaccgcgc

SEQ ID NO: 395936 - DNA, 122 bp, Homo sapiens
gagcagcaaaatatcccctgcacctcagcttccttagctaatatgatttctccaccccagcgctctcctctggatgtgtttcatccgtgtcccttgcagattgaggctctggcatggatcac

SEQ ID NO: 395937 - DNA, 122 bp, Homo sapiens
tggccagggaagccctgcgtaagcaacgcccctctcttcaaagggatgccccgctccctccgcccactcccagccttccagccttggctcccgaggacacgactccgggccctgccaccttc

SEQ ID NO: 395938 - DNA, 122 bp, Homo sapiens
atttgccaatcttcctctgcactcttgccttctgcagtctttcctcttccataaaaatatcgcttataatattctttttttgaaatgaagtctcactctgtctcccaggctagagtgcagtg

SEQ ID NO: 395939 - DNA, 122 bp, Homo sapiens
tctcctccttggtaattagaccaccttttgttacaaagaatcctataaaccatttaaccacgagtagctgtaaactactcatattaaaaaatgggtgcttctgctcttaagaagttgaatag

SEQ ID NO: 395940 - DNA, 122 bp, Homo sapiens
cagacgcctccgctcccaacgctgggctcaaccctgtcttccccagctggtctcccagcacgtggcctggagcccagcctcccgccccgctcggtcacgtgagcctggctctcacccgcgcc

SEQ ID NO: 395941 - DNA, 122 bp, Homo sapiens
tacttcattgggctaggtaaaggtctatcagtcttcagggaggccctggaccagaaattccgtacctattggctacgatcaagcgcgcagttaattttgataggtccaggagggtgtacgtc

SEQ ID NO: 395942 - DNA, 122 bp, Homo sapiens
accgcccaacttactcagtcatccattcattcaacagtcttgttaactgagtgccaattacgctccaggcgctgcgaatacgagtgggtctccaccaccagaatggctaaagtgaaaaagac

SEQ ID NO: 395943 - DNA, 122 bp, Homo sapiens
tgcagctctggcctggctcggctgggttttctccagggtgggggcaccgagtggccagggcggctaagacaggtcggccatcacggatgtagcggggaacgtcgtaagtgctgcctcaacaa

SEQ ID NO: 395944 - DNA, 122 bp, Homo sapiens
tatccccattttacagttgggaaacagcctcagagaggttctcacttgcttgaacacagtcgtctgaccctggggcctgggggctctctcatcctcacgcccctgggtccccgcagcgggga

SEQ ID NO: 395945 - DNA, 122 bp, Homo sapiens
caaaggcacaccctcctcgcggccgcgaacccagcgccgtcctcgcagcgcggcaatgcacggccaccgctgcccccagcccgcccgccgcagccgcgagcacccaaacacctaccctgcgg

SEQ ID NO: 395946 - DNA, 122 bp, Homo sapiens
atcctaacctgctttggttttatcagagcctaaataacatggaggaaaggaagtactcaacgctagccagttttaatcttccacttggaggaagggaaatactcaattccagccccctctag

SEQ ID NO: 395947 - DNA, 122 bp, Homo sapiens
taatacgtggaaaacaatagccctcgctttaaaaccctgtgctttgctgtaatgttaggccgctgtagtagtttaccactgtgggctgagggaatactgtgttgctggtgccctcttgtggc

SEQ ID NO: 395948 - DNA, 122 bp, Homo sapiens
aggtagcacctggtatccagcagcttaaaaaatccagactctaggcaggctctctgtagacgtgtgttctcctgtctcagactcttagggcaggccttgggggtgggactgaaagcaaacag

SEQ ID NO: 395949 - DNA, 122 bp, Homo sapiens
agcccatccagaatgtacccgctgctgggagtaaaaatagcagctgacacctcctggaggcggagggaggaccttgcctccttctccaagcacgtcctctgcatcctggcctccttcagcct

SEQ ID NO: 395950 - DNA, 122 bp, Homo sapiens
tttcagcccagcccagctcatgcctcccggcggccttcccaggccccgcttctgactttccgcggcctctgcaggcccccgaacttgacctccagtcggcctctgcaggcctggcctcctgc

SEQ ID NO: 395951 - DNA, 122 bp, Homo sapiens
ggcacacagagcatgcagacatccaactaaccaaatgtcaccctgtattccagagttgctcggaatatattccaaagaccacttgtagcaatatctcttgcaatgctcaattaaaagcctgg

SEQ ID NO: 395952 - DNA, 122 bp, Homo sapiens
ggggcggctgacaaagcgagtccgggtgggagggcgcgggcaggcacgggggcggggcctcgtcgcggctgggccacgcctccctgagggctgcctcacaaagccgggcgggcccggggggg

SEQ ID NO: 395953 - DNA, 122 bp, Homo sapiens
aacacgtgacacacacttccggcctcctctcccgccggcccgccgctcatcgcggggctccgccccgtcttaaagggatagtgcccttgagactcggatctcagcctctcaggcgaacccga

SEQ ID NO: 395954 - DNA, 122 bp, Homo sapiens
attttaactctaaccactagccaaaataagtcagtcagggtcaactaaaagaatcactttcggcctattatttatttttggactgttctgactgtagtgttgtctggaagctatatatgcgt

SEQ ID NO: 395955 - DNA, 122 bp, Homo sapiens
agcaaggaccccaggccagccacactctcacacgtgtctgcactcccggtcaggcacctccgttccgaggccccctcatcagggccttggctgggccctgtctgcgacgctggcacagtgct

SEQ ID NO: 395956 - DNA, 122 bp, Homo sapiens
agcggccgttgcccagaaccggatctactcgactcccttttattcgccacaggagaatgtcgtgttcagttccagccgggggccgtatgactatggatctaattccttttaccaggagaaag

SEQ ID NO: 395957 - DNA, 122 bp, Homo sapiens
gctgcagcccgtcctcaaggggcccagacctcacaataccgcccagtggttgccaaaggacgaccaagggctccctgctgtgcccccacgtggtaaggacagggttctgtatctagcatctc

SEQ ID NO: 395958 - DNA, 122 bp, Homo sapiens
tttgattcctcggaaatttgttctgcctgatgaaagcaaaagctcgaactcccctcagggcgcgaggtgtgagacccttgggttccatttgcatttctggtttgtcgttggcgggttcctga

SEQ ID NO: 395959 - DNA, 122 bp, Homo sapiens
gcttctgtgtctcggaatcactcacccggccctgcggtcccttgatggtggaaggttccgcgatctttctattaaccctaaagggacagagggctgacaggaagttgcccggggaacggtgc

SEQ ID NO: 395960 - DNA, 122 bp, Homo sapiens
ggcctggggaggtgaggccaggagtggggccagaggtcagaggtagggctgccgactcagcgggcggggtctgctggcgcggggtctgtggggtgggcggacagaatcagtgtggggtatgg

SEQ ID NO: 395961 - DNA, 122 bp, Homo sapiens
aggcgctcctgctgttccgcaggggtggggcatccccctccccatacaacccccctccagcgggccatcaggccagtgggaggagctgcccgtgccccccctgagaccgcagggctataaag

SEQ ID NO: 395962 - DNA, 122 bp, Homo sapiens
ggtgtcaggaaaaaacagagcctgagtgggaagaaaccgacatatggtacacacaagaggcgcatgctaattgtggaaaaatgagaaaatatgggggagtccaaggaaggaaaaaatatcca

SEQ ID NO: 395963 - DNA, 122 bp, Homo sapiens
gagacgaggagaaaggcctttaattgtcctgagtgaacagccatgccacctgtcctcagacgaccacaggaaatccccaccctcctcaaaataaccttgggccttgtcccatcccggggtgt

SEQ ID NO: 395964 - DNA, 122 bp, Homo sapiens
aacccaggtgtccccactctctgggcctcttcccaggcagcacagccaggtccagccatccgtgagaggcgggagcagggcagccatcactactgacctggctggtctccaactgataatga

SEQ ID NO: 395965 - DNA, 122 bp, Homo sapiens
gagctgcaggttacgttagtgtctgcctcgctggagcattcatgtgctcttccaagggtgcgcggcaccttgaagaaggtgctggtgtgggctttggtgtgtctgaggcgtctgcagccctg

SEQ ID NO: 395966 - DNA, 122 bp, Homo sapiens
actcgaaaatacaggttggggccatcttttctcctcccgtggagctgccgccatgaaggtcgagctatgcggtttcagccggtacaaggtctaccccggacacgggaggcgctacgccagga

SEQ ID NO: 395967 - DNA, 122 bp, Homo sapiens
gagcgagcgcggtgcagccggagcggcgctcggggggaggggggagcgggcggaaaaggccgactcagccgctccccaacctcatatagagggcacgtccctctacgtcatcgcccgctgcg

SEQ ID NO: 395968 - DNA, 122 bp, Homo sapiens
gtcaggatttgaatccagacagtctaactctgcaatgagtgcacttagctacttctttcacgttgccttttaaacagggatcaattatgaggcaacataagccctgctgaatttgactcctt

SEQ ID NO: 395969 - DNA, 122 bp, Homo sapiens
tacggtattccgtgccggggagggccagcactcagcccccagctgcttccctgaaccccacggtctgaggctgtgtcaaagcttccccagtgtttcctggaagacgctcctccatggatccc

SEQ ID NO: 395970 - DNA, 122 bp, Homo sapiens
cctacccactggccttcctccccagatacccagagcagcaccagggcagcccggcttgggcggccccccaagtccttgcctactccctgccacagctggacgacctcttccggaattcagac

SEQ ID NO: 395971 - DNA, 122 bp, Homo sapiens
aggctggagtgcagtaatgtgatcacagctaattgcaacctcgaacgaactcctgggctccggcatccctcccacctcagcctcagagtagctggaccacaggtggatgccaccacaccacc

SEQ ID NO: 395972 - DNA, 122 bp, Homo sapiens
tgggccgctctgtttgtgcaggctgtctaaccgcagtaaccccgagcgtctcttaaggagcgtggggagaggcggctgggagcaagctccgccgtgagaatgctttcgtttgagtgaaggcc

SEQ ID NO: 395973 - DNA, 122 bp, Homo sapiens
cctcgatccgcctcaacccgcacctctggatggaaggcgtggcaggagtctggtcgccggcggagcttctgggagcgcatccggtcacatttgacagaggcattatgtgcagaagccactgt

SEQ ID NO: 395974 - DNA, 122 bp, Homo sapiens
aaagtatgtggctatcaaattccaaagaagccccattttattacagagaaaatacaaagccgtttcctcacagggaaaagtacagtttcccttctccagggtgacagatgagccttttccga

SEQ ID NO: 395975 - DNA, 122 bp, Homo sapiens
caggcggtcgttgaggttctgcatggttagcttctcgttgcccgccagcagcccgtcggacgcggtcaggacgccgccgtagccgccgccgtaggcccccgaggaggacgaggacacaaagc

SEQ ID NO: 395976 - DNA, 122 bp, Homo sapiens
ctgcttttcagctttttcttaataaactggtctcagaaattggaccacagaagctgctggcggcaatctcttctagtaagtgggtaaagggaagctgagggagaaatggcaagggtcagaga

SEQ ID NO: 395977 - DNA, 122 bp, Homo sapiens
ggcgcgtggggagaaggggtttgcgcggcgggaggcgaggtgccggctaggcagcccgagcgctctgcaggtgtggtggcctcgccgcctgcgctcggggccccggcggctgagacgcgcgg

SEQ ID NO: 395978 - DNA, 122 bp, Homo sapiens
tacgacccacgtggcagacgggggcggggaccggtcgcgtggccgcggccttggctcttgcgcctgcgcgctgcctcccgctctaggacccggatttaaagagacaggcgctccaaccgtcg

SEQ ID NO: 395979 - DNA, 122 bp, Homo sapiens
ttgctaataggagaaaacgttcatgttggattatatcactcttgtcctgcataaataacacgaccaaagcacagaccagaggcacacagaaacctcccaagagccaatttattttaggcaca

SEQ ID NO: 395980 - DNA, 122 bp, Homo sapiens
tggatgagcagaaatacctaatcgcttgtgaaatccctggcgtgctgggacagcttcctccgggccctggtgacaccgcagtccttgtcagcattacccggacaggaatcgacaagccgagg

SEQ ID NO: 395981 - DNA, 122 bp, Homo sapiens
tcgggactcctcggcgcgcggaggaaggatatctgtgtggaggatcggtgtgtgcgcgcgcggctttaaagagggggcagcggagggtctccccgcactccgctgctcaacttcgaaggcct

SEQ ID NO: 395982 - DNA, 122 bp, Homo sapiens
aggtggcttggtctaacttttcaaagcaatggccactcggctgcatcaacctgcatgccacgttcctggctttgatcattgacatgtgcctggctctgctgctctcagctcctggcctcaaa

SEQ ID NO: 395983 - DNA, 122 bp, Homo sapiens
gagagcccagcctccccaggacagcagcctcctcaaaaccagccagtcactctctgcagccgggcgtgccttttagagcagtctgacctcccctgctaaaaactcttggatgtcaacaccca

SEQ ID NO: 395984 - DNA, 122 bp, Homo sapiens
tttaggtggtgacatactatgaattgaattaggaagacaggaagcatcaagtgctagctacgtggcagtaaaaatagtctctacttgaaatgatgaacagtgctgatggcaatgagactgaa

SEQ ID NO: 395985 - DNA, 122 bp, Homo sapiens
cactgttggtgggagtgtaaacttgcacaaccactttgaaaaagaactcggtgggctaggcgaggtggctcatgcctgtaatccagcaccttgggaggctgaggtgggcagacagcctgagt

SEQ ID NO: 395986 - DNA, 122 bp, Homo sapiens
gctccgtggggaaactgagtctggacttctcgtgcccgttcgggagaaggacgcgggaggcgcggccgagctgcggggagaggttgggctcaccccgggccagagcgagttcgcgcaaacgg

SEQ ID NO: 395987 - DNA, 122 bp, Homo sapiens
accagctttccctcagaagtaaatttttggtcatgatttaaacagaagagaagatgaaagcgttggacaatctgtcagagcagatttattctacattttgcaattagggggactctgaaagg

SEQ ID NO: 395988 - DNA, 122 bp, Homo sapiens
actccgctggcagggctggtcatgggatgagtcagctgacatagcccccaaggcctgtcccgctgtccgggtgtggctccggagggcagcgccagatttctgcggacagacctgccctggcc

SEQ ID NO: 395989 - DNA, 122 bp, Homo sapiens
tgacttctgcctcgtcctcgcccctccgcagggtctgaaccggaagcgggcgaaggcagacgtgggaaccagcagaccgcgttgcccagagcaacagccgggctcctctcaagcggggtgag

SEQ ID NO: 395990 - DNA, 122 bp, Homo sapiens
gtggaaagacactcaattccggtacagcgtggagagcgctttgatggaggaaatacaagccgatgtagtgttcccgggaaaacctgatccagaaggcttccagggagaggagattttgcgcc

SEQ ID NO: 395991 - DNA, 122 bp, Homo sapiens
catttttacattggtcaataatggtacatttaaacaatggacgactatatccattaaaatcgtgttgtggaagaatattcagtgacatggaaagattgactcaagggtgagggaaacgtgtc

SEQ ID NO: 395992 - DNA, 122 bp, Homo sapiens
gtacctggccagcaggtggcccggagggagtaaggtacacttcctgtggtttctcagggccgctgatgcgaaaggtctcctgggagctgaagtccccgtggtgccccgggcctgacagtttg

SEQ ID NO: 395993 - DNA, 122 bp, Homo sapiens
gtgggggtctcgctatgttgcgcaggctggtcttgaactgctggcctaaagcgatccccccgcctaggcctcccaaagtgctgggtttaccagcgtgagccaccacgctgggcttcctgcat

SEQ ID NO: 395994 - DNA, 122 bp, Homo sapiens
tcgttccttccccagccctttagagaagggaccatgatttggaaacgcagcgccgttctccgcttctacagtgtctgcgggctcctgctacaaggtaatccccgccccggcgcagggaacat

SEQ ID NO: 395995 - DNA, 122 bp, Homo sapiens
gagctggaccgctggctttaccacctggagaagcagacggccctcctcggggggccgcggcgctgccactcggcacccccacaggtcagtgccggggaccccacccccctccccaccctgat

SEQ ID NO: 395996 - DNA, 122 bp, Homo sapiens
tgttcgtttccggactcactgcttcttacagttacacttggctgtgacgcgaggggagtgcgaaggtctcagcgttcctgggccggaaacggtcgcacctcgggggtggaaaccactggctt

SEQ ID NO: 395997 - DNA, 122 bp, Homo sapiens
tctacagaggctattctccaacggccaggacatcattaggtaagacatttcaaaattcttcgtgagggcacgattgcttcagaggactacaaagtgacacattaggtcgtcataaatcaccg

SEQ ID NO: 395998 - DNA, 122 bp, Homo sapiens
ataaagctaaataaaaccctgaccttggtctcaagtgtgactaacaggcacttaaaagatcgtaaagcaaagagatggaaacagtaatacagacaatgagcaaagtgctacggatgatgaga

SEQ ID NO: 395999 - DNA, 122 bp, Homo sapiens
gaggctggcggggtcgccatcgagagcgctgactgagggtggcctgccaggtgctgggcgcgtccagaagaagaggagcagcagggcattccaggccacaaagaggatagcgccccacagca

SEQ ID NO: 396000 - DNA, 122 bp, Homo sapiens
cgcgggtgccggatgatgacgtatccttgcacctggcgatgattggttcgcgtggagaggcgtcgtccgacaacgcgactcggaacccggacctatgttctcgcgagagttagcggcctccg

SEQ ID NO: 396001 - DNA, 122 bp, Homo sapiens
tgaatgatttcaaattactaagagacaaatcctacatggctagggagttaggaacttacccgttgacagctgatccttttgttttttctgggagcttgccctgtaaagtggtggggaactta

SEQ ID NO: 396002 - DNA, 122 bp, Homo sapiens
ttgacttactccatcattttgccgcctttcttccctcctctcgctatacaaaaattttctcgtgttatggaaaatgagacatcacttaccccttgcttctctaaagtaatgcttctcagact

SEQ ID NO: 396003 - DNA, 122 bp, Homo sapiens
ggcagatcccctcccctatctggtccatggcctcccaatctgtgacatgaaggcgtggaccggatggtcactgaggcccctcccagcttggccatatgtccagccttgaaccacgtgtagac

SEQ ID NO: 396004 - DNA, 122 bp, Homo sapiens
ttaaacatcgagaaatttcaggaggatctttcagaagatgcgtttccaattttgagggggcgtcagctcttcaccggagacccaaatacaacaaatcaagtcgcctgccctggcgacacttt

SEQ ID NO: 396005 - DNA, 122 bp, Homo sapiens
cttaatatttcttgttgtgcactgcaggtctcacacacacactcttacccctgataaaaacgctatttttttgaattccttttcagtgacctgacccaatttccctgacttgggacattccc

SEQ ID NO: 396006 - DNA, 122 bp, Homo sapiens
tcacatctaggaagtgaggagcgtctctgccccgccgcccattgtctgagatgtggggagcgcctctgccccgccgccccatctgggatgtgaggagcgcctctgcccggccgagaccccgt

SEQ ID NO: 396007 - DNA, 122 bp, Homo sapiens
agcaggaggctgggggcacccagcgcgtgggggcctcgcggctgcaggaacaaatacacacgccccacttcggccagttttcggtctgcccggctctccatatacagtggagcgcccaccag

SEQ ID NO: 396008 - DNA, 122 bp, Homo sapiens
attcccctccccaaccaacaggaggcgccgaggggccatggcctccacggactcccggctcgcgttctctgtggcgctcgttttacgtcacttccttcacggatctctctccgccccgtctt

SEQ ID NO: 396009 - DNA, 122 bp, Homo sapiens
ttcaacctggaagatgggaatccccagcgcacttcgggcagcgctgtaaccaagggtaaccgcacctcggtttacaccggtgtgaagaccagcctcttccccaaaccaggtgtatctacggc

SEQ ID NO: 396010 - DNA, 122 bp, Homo sapiens
ccagggcccaaagggggcgagcagtgcagacaggaggcgggcagagcgcggccacgtgcacgtcagcaccgggcacagccacaaagtgactcacgcgaaggctgaggcctgagggcggcgcg

SEQ ID NO: 396011 - DNA, 122 bp, Homo sapiens
tgtggcagtgcctcttccttctagtcctccagcctggcaggagaagctcctgctgctgaccgctctcctactgctctatcgccactaccaaccgcagcgaggtagtgacccaggctccaggc

SEQ ID NO: 396012 - DNA, 122 bp, Homo sapiens
gggctccagggctgggccgggcgattctggcccctctgccgggagagcgagtgcggagttcggcctggctgggggcggcaggacatccctcctgtccccgggcgcccccgctacagcacacc

SEQ ID NO: 396013 - DNA, 122 bp, Homo sapiens
ctgcacagatcacacacatacacacacacatgtgcatgagtgaagaagcacatggtgactcggtgccttgttcgctctaggttggccacggttcagggcccgggagacccaggccccatctc

SEQ ID NO: 396014 - DNA, 122 bp, Homo sapiens
cagaaagagttgatgaggatggagggagttcacgaggggaaagcgcccagtgtggcgttgcgtgcaccagagctgccctgggagatgcctttagctgggcccagggaaggagcaggtgtgcg

SEQ ID NO: 396015 - DNA, 122 bp, Homo sapiens
gtgttttgttcactttttctgcactgactttgttgcctttgcctttggacaagctatactcgaccatgtcccccagttccaggctatcaacatcaccagagaactcactaaggagaaaggaa

SEQ ID NO: 396016 - DNA, 122 bp, Homo sapiens
catcagattggatgagattaccagaaactgatggcagatggagaagaccagtggttcaagcgctgattctggggacactccaaagttcaaaagtctgttctgtagcactgagacacatgcag

SEQ ID NO: 396017 - DNA, 122 bp, Homo sapiens
tgattggctccagctgcaggggtgtgtctgtgtccgcggcgaacgggaagtgagcaggcgcgcgggctcggcgcgcgcaggcgcgactagggtgcagcgccaggtccggtgttggggtgtcc

SEQ ID NO: 396018 - DNA, 122 bp, Homo sapiens
cctctcgctccggcccttcccgggaggagctggccgagctaggatggggggcagggagaccgagggggcagtaactgtcaaacctcgccgcttggcgccattatttaaatggaacgtgcctg

SEQ ID NO: 396019 - DNA, 122 bp, Homo sapiens
ggcaggagcaatgaatgtggggaggcgcgggagacgggagattggtttcggagccaggtacggagccaagcagtcagagagaagcaaaaattgacgcagcaccgagaacagctgctagtgga

SEQ ID NO: 396020 - DNA, 122 bp, Homo sapiens
ctgaacacccattaaagctgatgctgggcaaaaaggtggtcaggcagttgctgcaaaaagcgcaggacacgaggatgtgctcggctctaaccaggacagtgggcgcatggtttcacggcgcg

SEQ ID NO: 396021 - DNA, 122 bp, Homo sapiens
gaggagctactcccacttggggaagagctgctaactttacttttccgctgctgttggttccggttcaaagctcggtttgggaagtaagaggaggactcggagactttgaccagagcactcca

SEQ ID NO: 396022 - DNA, 122 bp, Homo sapiens
tcacaggcctcagcagggccaggaaaccaaacccgagtggggtgggcaggcggggcgcctcgggctccagggaggtcttgacccggagcagcctcccaggcggggctgggggtgagccagtg

SEQ ID NO: 396023 - DNA, 122 bp, Homo sapiens
ggattcagggcaggcagggccaggaagtgaaggagcccaagttctgcagcccagggcccccggactgatggctgcgagggtggcagcctgtttccagccctgctcctgctcgctgcctgctt

SEQ ID NO: 396024 - DNA, 122 bp, Homo sapiens
agctgggattacaggcacccgcgaccacctccggctaattttttgtatttttagttgagacgaggtttcactatggtgaccatggctggtctccagctcctgacctcaggtgatccacccgc

SEQ ID NO: 396025 - DNA, 122 bp, Homo sapiens
tgttataagtaattaaaaacaagcttttatgcactctttttaaattcacttaagctacaccgtagtatcctcaaaaaaggctttgaaattaagattactgtccacatattggattagttatt

SEQ ID NO: 396026 - DNA, 122 bp, Homo sapiens
aggagggagccacgggcttgccccacccgtggcctcggcatccggccatcccggccccaccggccccggcccggccccaccctcgtggaactcagcatcgcgacctcccagtctccctcgag

SEQ ID NO: 396027 - DNA, 122 bp, Homo sapiens
tcttcagcttcttcaaggtatcactgagattatccatgttgctccccgagggcgaggaaccggcggggcgaggcgaaggtctctggtgcgggcggcgcggctctgtgtcctccctctacctc

SEQ ID NO: 396028 - DNA, 122 bp, Homo sapiens
cgcagctttttgaacgcacacactgaacctccccggctttgttttctaggaaggacgtggcggctgctgcccaactttgaacggaggagcacaggaggagctccaaggcccctcaggagtcg

SEQ ID NO: 396029 - DNA, 122 bp, Homo sapiens
gtagccataccatgtttgtcttggctaagctcgaccctctgaaaataaatgaaacttgggcgcaggatttaggtgccaaaatatggagttcttcaccgtcccgcgctatccctgaatacttg

SEQ ID NO: 396030 - DNA, 122 bp, Homo sapiens
agccagtagactcactctgctgctgctcagggtctataagaggaggagctgagtgaggaccgggccccctggccccttctgaaggcagctcctgccagccacggttccctcagaaaaattcc

SEQ ID NO: 396031 - DNA, 122 bp, Homo sapiens
tacccagtgggaaaggtttgtagagaggaaactcgcgctaagcttttgggattccggggacggccagagcacattgccatcctggaggacctaagctctcagcttctaaatcagaagcttgg

SEQ ID NO: 396032 - DNA, 122 bp, Homo sapiens
gggtgcggggtgtggctgtgcggtgggaacacggactggggaggggattgcagccgggcccgtgcctcccttgctcagctccaggtcaggccagggtagagccaggctgctgggttcgacct

SEQ ID NO: 396033 - DNA, 122 bp, Homo sapiens
ctccctgaccccttgcgcttcccaagtgaggcaatgcctcgccgtgcttcggctggtgcacggtgtgcacagccactgaccttcgcccactgtctggcactccctagtgagatgaacctggt

SEQ ID NO: 396034 - DNA, 122 bp, Homo sapiens
cggcgcgcctgcgcagttaaaagaacggtggtgcgcaggctctaacactagtgcgccagccggctgcgagaggcggggcctagctttgggggcggggctggagcgccctctgcaggctcaga

SEQ ID NO: 396035 - DNA, 122 bp, Homo sapiens
acagtaagcaagacagcatggtgctggcacgggacagacacatacatcagtgacatagaccggagaccacgtgtgtctatgttcacataattttcaacacggtgccaaaactattccatttg

SEQ ID NO: 396036 - DNA, 122 bp, Homo sapiens
cagcacaggcctccctgcctgtcacacatgtcatgcatgtggctccagcttgtctggacacggatgtggccacagttcctaggcaggcggggtgggggcagtagctggcagtatttcagaat

SEQ ID NO: 396037 - DNA, 122 bp, Homo sapiens
gcgtctggaagatgtcaagagccagtgggtccggccagccagggctgactttagtgacaacgagagtgcccggctggccacggacgccctcttggatgggggttctgaagcctactggcggg

SEQ ID NO: 396038 - DNA, 122 bp, Homo sapiens
ccgccagctcccctcccacccttcctttcgaggttgttttttccttttagctgagacaaacgcttagatctttcattcatagacctgagacactgactcatgtgacttgtctctttactaag

SEQ ID NO: 396039 - DNA, 122 bp, Homo sapiens
aggacacggaaattgctgttgcccctgaatgtgtttctcagggtggaggaactctcaggccgtactcttgggtgcatttccctaagggtgcatccacacagaaactcgagctccccttcctt

SEQ ID NO: 396040 - DNA, 122 bp, Homo sapiens
gataactgagaaagcaggaaaagatggggagatacgtttcctccactgtaaaaggagaaacgaagaaagtaaatgttgagcttccctgggggagtttcctaattcctcatttggtgtattta

SEQ ID NO: 396041 - DNA, 122 bp, Homo sapiens
agcttaggagcagggcatcccgcttggctcctgccagctgcacgctggccatggacatgacgttgccaaagaaggagaaggaggcagcaagctcgagcttctcccggtgggccttcccctct

SEQ ID NO: 396042 - DNA, 122 bp, Homo sapiens
ggcctgctgcagccagaggcctgggagatgggcgcggcctggtcccctccccgggcccggcggcggatttctgccccgctcctgcccaaccgccgctccctgggaagcgaggcggggtgggg

SEQ ID NO: 396043 - DNA, 122 bp, Homo sapiens
ccggagaaggtaggggtctcggtgtggccggagcgattcactgtctggcacccacgataccggtctcctttgctttctttccattttgcagcatgagtgggaaggaatcagagcgcaggagg

SEQ ID NO: 396044 - DNA, 122 bp, Homo sapiens
cactcctgagcgagagtccccgagagggaatctgtgcagaggccagaacaggtgcccagtcgtcgcgcgcgcgcgcgcgcgcgcgcgacaagcgccgggagagtcctgcccctgtggcttgc

SEQ ID NO: 396045 - DNA, 122 bp, Homo sapiens
tcactatgatgccctcgctgagggcacctgcccactcccctgctgccagaactgcgggagcgctgaccgggggacctcaggacctggattctcctccaggctaccctgtgtgaccttgagca

SEQ ID NO: 396046 - DNA, 122 bp, Homo sapiens
caaagcatgagggcacagatgttcacaggagttctgcatatgaatggatacatatgtacacggacatgcacacaggtgaaacccacagattcatgctgtcacacacactcaggagttaacac

SEQ ID NO: 396047 - DNA, 122 bp, Homo sapiens
ggggctggggccccgggggttgggaggcacagtgggagcagcagattgcgggctgaatggcggaggaggtgccctcccaccaagacccagacccctgacctgaggctggccccagccggccg

SEQ ID NO: 396048 - DNA, 122 bp, Homo sapiens
agatgtgcggcgagtgcagaagggcggacccgggatgtcccgggttttcgagcggggagccgcctgctgaatgcccttctgctgccctccgttcccgcggctcccctaggagccccgccccg

SEQ ID NO: 396049 - DNA, 122 bp, Homo sapiens
aggccaagacttcaggttacctagcacagggaaccagaggggcctctggtcaggtgtccccgctggcctccgggcccacagccaggggctgcttggtcagccgttccctggcacaggccaaa

SEQ ID NO: 396050 - DNA, 122 bp, Homo sapiens
tgtggagcccacacacacatgcattgcacgtgcacacacgtgcacacgcacacacacacacgcatgccctcctgtttgaaagcagagttgggcaggaagtagagactattcacattttaaag

SEQ ID NO: 396051 - DNA, 122 bp, Homo sapiens
agctggggaggggatgagagccccgtcttaatttcttgcttccctcacaggtacaagaagcgctgtgtactctctggcattgtgggagcttgtgctgacttcctcatcttgactcataaata

SEQ ID NO: 396052 - DNA, 122 bp, Homo sapiens
ctggctaacatggtgaaaacccatctctactaaaaaacaaaatttagccgggcgtggtggcgcgcgcctgtagttccagctactcggattcaggagaataatcacttgaagctgggaggcgg

SEQ ID NO: 396053 - DNA, 122 bp, Homo sapiens
ctgggaatgctgcaggttgtgcctcggccaggagaatgtgtgcattggtgtgtgctctctcgtgggtcttgtgagcctgggtcagacccaatatgcaggcctaagtgctaaccatctgtccc

SEQ ID NO: 396054 - DNA, 122 bp, Homo sapiens
cgccgctgactggatggggctccaggccccaccccctcaggtcttgagtgacaggaggtgcgatcagacactgggccgaatgaaacaagagtgacaggtttttgggtgcagcccttttgaag

SEQ ID NO: 396055 - DNA, 122 bp, Homo sapiens
gcggggataaaaaagctcaggaaccctgagtgttgggccgattctatatggttgcacctgcgtggaccaggccagcaggggtccatccacaatggttcagttgcttaggagactaaactctt

SEQ ID NO: 396056 - DNA, 122 bp, Homo sapiens
cactccttgggctcgggttcccggacccacagccttccaaccaggtggggaccccacccacggactcaccggaactgctccgagtgcccgtcaagagttacttccggtttccacggagctcc

SEQ ID NO: 396057 - DNA, 122 bp, Homo sapiens
cctgctttgctatttttgtacctccgtgacagaaaaacaaaaccctgaggaaaagtcaggcgacttcattccctgccgtccgcgccggggcctcgactactgctggcgtccgcggctttcgc

SEQ ID NO: 396058 - DNA, 122 bp, Homo sapiens
tgtttccttgaagccctgacccctgctaactatgatatttctcctttagttgagacaggacgactggagggggctggaataagaggaatttcttttccctagctggaataaggctctggaaa

SEQ ID NO: 396059 - DNA, 122 bp, Homo sapiens
aacaaaatgtgaaattcacataaaatgcaaagttgcaagtatcactaaagctgggagagccgttgctgcatattttagatggactagtgtatttatggtttttgtacacatactgtaaaatg

SEQ ID NO: 396060 - DNA, 122 bp, Homo sapiens
agatgggcacttttgccctttaggtttatgaaaaatgccaacttttgtgaactacacaatcggaatcttgatttggttttcccggataacttatgtcataagaaatttggtaactcctttgg

SEQ ID NO: 396061 - DNA, 122 bp, Homo sapiens
ataaaaagccccgcactatttaactatgattttatttaaaacatttttaatttcaaaaaacggcagtacaggaggtttataaatgacatattaagtgaagaagtggctataattaaagagta

SEQ ID NO: 396062 - DNA, 122 bp, Homo sapiens
taagccctggaaatcacagctgcctgtttgggaataaaagggaggcagttttgtgtgacgcgggtcccaagcttaaccttccctgtggcatcgtgagtttggggtcttgagagtgtgtttcc

SEQ ID NO: 396063 - DNA, 122 bp, Homo sapiens
aagagcttactgtcatatccaaggttatgtggttggttacagacagagtctgaatttgaacgcagacagtctggcaccagagccctccctccaacatgtcagaaactcctctctaatttagg

SEQ ID NO: 396064 - DNA, 122 bp, Homo sapiens
aagcgggaaagtcttgggggccgctctgcgctccaagacagacgcccacaatctcttctacgtcgtgcaacattcaagcaggcggcctccttcccgcgctttcgcgcccacaggctgggcca

SEQ ID NO: 396065 - DNA, 122 bp, Homo sapiens
atggaggggcagacaccggcacccgctgcctacgtcaccgccctcagtgctgcccacaagcgggtgccccactgggtcccgccaccccaaatcccagtgccggagcggggcccggctctgcc

SEQ ID NO: 396066 - DNA, 122 bp, Homo sapiens
acctgtcggaccctgggtgaactactggctcaaggtagtcacagtttcaacattccattccgctacattccctttgatgacagcatttgtttgtgaaactgggtattggccgttgctatgat

SEQ ID NO: 396067 - DNA, 122 bp, Homo sapiens
ttctcggggtgctcttccttagcccccagtttttgcggtggcttaaggctctgcaggagtcgggggtacccaggctccactccttggcccgactccatgctgttgcggctctcatctgctgt

SEQ ID NO: 396068 - DNA, 122 bp, Homo sapiens
gggagtggcgggaaaacttgaagatcctgaagacgcggaagacccggagcgtgacgaaggcgccggacacgtcctcgttgttggtcatgaccagaccgatgtagtagggcatgatggccacc

SEQ ID NO: 396069 - DNA, 122 bp, Homo sapiens
ttctacgcatccccacagcctgctctgggtgtgcctgcgattttgatccagccattctagcggatctgtaatcgcgtctcactgggattctgatgtgccgttccctgtgggcgaatgatgct

SEQ ID NO: 396070 - DNA, 122 bp, Homo sapiens
ggcaaaagaaaactgggtgaagtcctatgaagctaaacacctagcagtgcatgcagggaccgcaagttgctgattccctcctttgcctccccctaattagctgcaggcttactggtaaatct

SEQ ID NO: 396071 - DNA, 122 bp, Homo sapiens
ggccgagctcacggacagtgcctggatcagcagcaggagggacagcggcaccaggaggcccgcggcggacacggccaccacgatgctgcgcgggttaaggaaccgggctgcgggacccccac

SEQ ID NO: 396072 - DNA, 122 bp, Homo sapiens
cttataaactgccatttaccggaggtcaagaataatttataatggaccaattgtaatgaacgtttattgtattttaccctttacaggtcaggaagtatggtgcgctcatcaaaactgtgagc

SEQ ID NO: 396073 - DNA, 122 bp, Homo sapiens
aaatgtctttaaagggaagaagacacctaggaagagggagttaggaggtgagtttgtaatcgaacttctcagtgtgaaaaatctaacagactttagttttaggggttaggcttaggttacaa

SEQ ID NO: 396074 - DNA, 122 bp, Homo sapiens
tttgcgggctttttccctctccaccctctgctgatcaaagtaggaagtttgcatgacaaccgcagtgaaaggggctgaatcacaaatgaactcgatttctgcagtgttgatctatccagcct

SEQ ID NO: 396075 - DNA, 122 bp, Homo sapiens
ctgttacagtaaaaccttatgaactccaggtccactaattctccatgttgatccttctgacggggtgagcggaagtttacctttatttaaggagtgaaagggttgacaaaacaaataaatat

SEQ ID NO: 396076 - DNA, 122 bp, Homo sapiens
gaagcagctggtgggtggaggtagaaaccaaatggggtgtgagagtttgaggagggagggcgcagcgataccttgcatactaaggcagtgaaggtcttagataaatgtgacttaagtcaaag

SEQ ID NO: 396077 - DNA, 122 bp, Homo sapiens
gtggcaaataaagtggtgcgcaaataaacaaacgcctggaacaaatcctgcaaaggagagcgcctgtgtgcggcccactgtctaactaggtcagcctcgggcacagctccttttgacagttt

SEQ ID NO: 396078 - DNA, 122 bp, Homo sapiens
ggacaggcgaggcagcggcgagtgcggggccggcggtcggggagggcggtgccatggggtcgcggagggcccccagccggggctggggcgcgggtgggcggtcgggggcggggggcgacggt

SEQ ID NO: 396079 - DNA, 122 bp, Homo sapiens
gggactcaggcactggcctcttctttccctaggatttctcagttcacagctctgatgctgcgtgacccacccctttttcctgcaggatgaaggaactcctctatctttttatgtttgtttgt

SEQ ID NO: 396080 - DNA, 122 bp, Homo sapiens
gggcatatacccaaaagaattgaaagcaggaactcacacagataattgtacactcatgctcgtagcagcactattcccaatggccaaaaggtggaagcaaccgagtgtccatcggaggatga

SEQ ID NO: 396081 - DNA, 122 bp, Homo sapiens
cgtccacgtctgcgcccagaaccatgcataagtctagaaccacgcccgcgtcctctaccacgacaactttcagaaccttgtttgtatccagaaccacttccagcactacgtccaacaccgcg

SEQ ID NO: 396082 - DNA, 122 bp, Homo sapiens
tgctctgctgggaggaggagtctgccttcatgggagactcggtccctgccccatcggtaccgggtgcctggagtccacctgcccctcacggagagatttctggcctcttgtccttgaactct

SEQ ID NO: 396083 - DNA, 122 bp, Homo sapiens
gggagaagagaggtgcaggattcagccacttgtccatgaccacaacggctcacctggactcgggcgtggaactgtccaccgtacaggatcgttacgggttcctggtgaggagactcccttct

SEQ ID NO: 396084 - DNA, 122 bp, Homo sapiens
atttttatccacatgtggactcacgcattcataaccacaatcaggacacgcggcggcttacgtggcccctcacacccgtgctgctgtgcccccagcaccccggggatggctcctcagggatg

SEQ ID NO: 396085 - DNA, 122 bp, Homo sapiens
cgatgagtgggggaaggaagggcccagcgtcactgagctcctctgtgagtctgtgcgtggcgctcctcttctgtctttgcagcagccttgggacggacgtaacggcaaccccgttttccagg

SEQ ID NO: 396086 - DNA, 122 bp, Homo sapiens
tggcgcgccccgcagagcccgtaagccggctccccagccctcgcgtgtacctgaaggagccggggatcgaggcccatgtgttcgaagcccagtgcttcagagtcctccatggcgctgctcag

SEQ ID NO: 396087 - DNA, 122 bp, Homo sapiens
aacatgttggttatgtaaagtcaataccctgacagcaaaactgtttgagaaactagttaacgcctccttttcaaggtaaccacagaatcctaggttctcgttttggtggcctctcaaaacgt

SEQ ID NO: 396088 - DNA, 122 bp, Homo sapiens
gtatcgaaacacaggttatcagagtgggagaggaaaacgagccgggacgtgtgttccacgcgtttcccaggccctcgctgtccgtgctcctgggctccctcttgtggttgagaacccaagac

SEQ ID NO: 396089 - DNA, 122 bp, Homo sapiens
tgcgctccgcctcggccaacagcgccatcgcctccgcttccttcccggaattgtccatggcggccacaaagggactcagcaaagcgcctgaccctgaccctgggaagactcagccgcggccg

SEQ ID NO: 396090 - DNA, 122 bp, Homo sapiens
ggccttcctgggaaggcggccttcgccctccctcgctgcagggaggcagccggatgggcacgagccctgctttctctgctaggacccctggccaggcccgggcagcctccgacctggcccag

SEQ ID NO: 396091 - DNA, 122 bp, Homo sapiens
tccaccaggagcctcgcgggggggcgccgtgggcaccgcagccaggtgcaggcgcctccgcgccctcactccccacgccgaggaggtggccctggctccctgcggccgcagccggggaacaa

SEQ ID NO: 396092 - DNA, 122 bp, Homo sapiens
aaaagatgcgtggaaactttaattgctggtctcttctactcattgtgaccatttactatgcggcaaaatgtgtcaaagcgcctttagaaacttactaaatcatcagtttccttacggggtcg

SEQ ID NO: 396093 - DNA, 122 bp, Homo sapiens
cctgcttggagctggaatcctcatttaaggagtgacttcttcacaaacatcctttcatgacgagtcgctgttttctggggcaaagtgaacccgtctaaagttttatagccaggtgttcctcc

SEQ ID NO: 396094 - DNA, 122 bp, Homo sapiens
ttttcctttttagttttggctcttggtgctctgagagctaccacttcctgccagctggttcgttaccgcagggaaaatgagggacttttgggggcagatgtgtttccattccactatcataa

SEQ ID NO: 396095 - DNA, 122 bp, Homo sapiens
acgggccacctttacctagtgagtgagggccgtcttgcctcagtgtggactgcacagaaccgagtatagatgggccgcctttacctagtgagtgagggctgccctgcctcagtgtgggctgc

SEQ ID NO: 396096 - DNA, 122 bp, Homo sapiens
cagcaatatggctaagtgttttcccattacagacaagctatgctcacccacctgtaaactcggccttgggaaaggacttttcattcagttaattaaccttccagccagacacagattcagag

SEQ ID NO: 396097 - DNA, 122 bp, Homo sapiens
gtctattttgtaattgtaccttaccaaattcagccattcaacagagacattaccaaatgtcgatcataacagcatccaccctgaatgagtctactctttggatgcttccagctttaggctct

SEQ ID NO: 396098 - DNA, 122 bp, Homo sapiens
cggagtacaagttgaaaaccacacagcaaagtaaggcacttattctcacacacaggcgcacgcacgcaatctgcttgggacaaaaagtctacaggggttgccaagcacgaaaggctacatgg

SEQ ID NO: 396099 - DNA, 122 bp, Homo sapiens
tgaagccaggtcagaggcttttctagaaggaggcaggacacacggactcaccttcacagccgtttacaacctgggaaggtggccccagctccttgtgccgtggggccccttctctcccgggc

SEQ ID NO: 396100 - DNA, 122 bp, Homo sapiens
aggcaggggcatattctctgcagttagatcagagcccaccgcctccccttgcattgtacccgccctgtgttctgagtccctttgtgttgcagaaccttgtaggtaggtgttattagcccatt

SEQ ID NO: 396101 - DNA, 122 bp, Homo sapiens
ttgcgcggattcccgttcacctctgacccccgaagcagttggaggcaggtcggggacccccgcccccgccccgccccgcctcgggccctgcgatcagcagtaatagcgattaattccgactg

SEQ ID NO: 396102 - DNA, 122 bp, Homo sapiens
tgtttgaataagagaaaggtggagagcacatctttttatacttctctccatgcagttgtacgaatttagaaactggggtttatcaaaagttaacactcctgtttagcagtgcctggggcaaa

SEQ ID NO: 396103 - DNA, 122 bp, Homo sapiens
tgagcacggagtctggcagcgggatgcagtggcgcaccatggccccgtacagcccgtactcggccatcacgctgctgccgccccagcgcttctcccgcttgcgccatttggccctgcggttt

SEQ ID NO: 396104 - DNA, 122 bp, Homo sapiens
gcgccgctctcggtcgcgcggagtgatcgtgtggaatcgcgggtcgcggacgctcgccgccggccatagctcagcctagcgccgccaaggccgacggccctcagcctctgccatggacttcg

SEQ ID NO: 396105 - DNA, 122 bp, Homo sapiens
tgaggggcgccctccccaccacccaggcaaggagtccaaggagaccagcggagcagaccacgcggcatttattgttgggcccgcgtccctgcccgccccgggttagcggcagccgcactcgt

SEQ ID NO: 396106 - DNA, 122 bp, Homo sapiens
ctgccctcgcctctaacgttgctttggagccctggcagtcaaggctcaccctcccgcctccggaaagcgaactttatttttattggtgaaaggacatcttcctgtacacttgattgggcaag

SEQ ID NO: 396107 - DNA, 122 bp, Homo sapiens
atagcgcttttcaaccctgggagagcagggaggccttcaccagaaggtgggaacccaccacgaagcgccttcaggaggccccaggattccaaaccaattaagggcctcctcttccgaaaacg

SEQ ID NO: 396108 - DNA, 122 bp, Homo sapiens
ataggcacaatattcacacagtatccaaacaacattcaaaagactcggaagggcattcagcggtaggttagtcagcctctcgcccttgttccaagccacccaattcctctccgcctgcggca

SEQ ID NO: 396109 - DNA, 122 bp, Homo sapiens
cgcttggcatcgcgtcaggggagttagctttccttcagccgggtctggctagttattgggcgccgggtagatgcatatatatatatttttttctaactatagcaagcaagaagtggcagggc

SEQ ID NO: 396110 - DNA, 122 bp, Homo sapiens
cgcccccaggccgcaggtgctcctgctgccgctcctgctggtgctcctggcggcggcgcccgcagccagcaaggtgagtgggggctgcgcgacccccacccccgcacttccatccctcctcc

SEQ ID NO: 396111 - DNA, 122 bp, Homo sapiens
tgtcaattgtgcgctgctttggcttgtgtttgcagccacaaacacaagtggagttattaacgccactcactaaacacaagtggaagttattaagagtggaggttccctcctccactcttaat

SEQ ID NO: 396112 - DNA, 122 bp, Homo sapiens
ggccatcggactaggctttgggaagtgccgaatgggtccttcctccctcctggccaaagccgcccagggccttcgcctcagctgggacaccaggagcgcccatccggctctggtccaggtgc

SEQ ID NO: 396113 - DNA, 122 bp, Homo sapiens
cgcggcctctgaagagcgcggccgcgggagacacccaggcacctggacaggccggactcacgtgctggggatgtgcgtccctctgaaagattcccccggaagctgaagggcgatgtggcgtt

SEQ ID NO: 396114 - DNA, 122 bp, Homo sapiens
ggggggtgggggcaggaccagagacccacagtggcctatgatgccttggatgggatcctacgtctgtgcattttaaaattagttcatcgtcttgtgctctggaagtgtgttccttacattga

SEQ ID NO: 396115 - DNA, 122 bp, Homo sapiens
tcctttttaaggctgaataatgtgtgtgtgtgtgtgtgtgtgtgtgtgtgtgtgtgagcgcgcatgcgtgtatcacattttgtttatccattcatatgtagatggacacttgggttgcttcc

SEQ ID NO: 396116 - DNA, 122 bp, Homo sapiens
gaccaggcacttaaacccgtagaatctaatagacagaaagcccctgctttaccgcctttgcgccatccgggttgtctggccacgcctggggcggaaggggcggggagtaagagagagagaaa

SEQ ID NO: 396117 - DNA, 122 bp, Homo sapiens
ctgggatacggcctttgccgacgcaccttgctcttaggcagactgtcttggacatgagcccgcgcaccgctggggacaggccacgctgcggcagcgtgtgcacacggcatgaggtccgtctc

SEQ ID NO: 396118 - DNA, 122 bp, Homo sapiens
agggtatgtgagaaaagaaccttaagccaggtctccccgcggcgtcctggctagtcccggcgccctgggcgggtgcatcgctccgccgcagcgccccttgccacccaactctgtccaacttt

SEQ ID NO: 396119 - DNA, 122 bp, Homo sapiens
gatcagcaggcctaaagggaagtgtgtttgatccctgtgtccacatgactctttcttatccgctgcacagataccccttctccatagcagctatctgtcctcctttaccccaccatcatcct

SEQ ID NO: 396120 - DNA, 122 bp, Homo sapiens
cgtcctcgtctatcctccggggtttcattttggtgtagtctacgggcaagtcccagcagtcgccctcgcccagctggaaacaccggttgttcatcactgcctgctgctggggggacatgggc

SEQ ID NO: 396121 - DNA, 122 bp, Homo sapiens
cattctgcgcctgaatgagcgggggctgctgtgtcgacgcggatttgccatatggttgcgcggagccaggaagaatgggcccctgtgtgtgcgaccgggacgcagcggcgcgggccgtgcca

SEQ ID NO: 396122 - DNA, 122 bp, Homo sapiens
gctgttcttggggtccccttgttggagcaggacaggcttcgaggacagacatgtggaggacgcacattctcgcacttcctcggtttccactgcagcagcatctacctgtttctcaccgcaag

SEQ ID NO: 396123 - DNA, 122 bp, Homo sapiens
gccccctgccacgtgggcatccaggattgcatttaccggggctggaaccgccccgccacgcggacatccaggattgcatttaccggggctggagctgcccctgccatgcgggcatcgaggat

SEQ ID NO: 396124 - DNA, 122 bp, Homo sapiens
tggcatagctgatagaaaaggtaacctgacatttggcagcattaaaagaagtatggcttccggagcaagggaggtgacattcctcacactgtggcctgacctgcagcctacctgtggtctga

SEQ ID NO: 396125 - DNA, 122 bp, Homo sapiens
tttgtgtcatggaggagaaagcattgcactgagggtcaagaatcctctgttctggccgggcgtggtggctcacacctgtaatcccagcattttgggaggccgagggaggcggatcacctaag

SEQ ID NO: 396126 - DNA, 122 bp, Homo sapiens
ccgggctgcagttcccggcgagcggcgccccgactgcggggccacccgcctgcgctccgccgacgcccttggaacaatcggctggagccctgaaacccgacgtggaccttctgctccgagaa

SEQ ID NO: 396127 - DNA, 122 bp, Homo sapiens
ttaaaacttttttaaaaaaaatcttcgcagatctttgatatcgtactgaggtaacttccacgtagccccttgccacgcggcaccggtgggccttgggtccaaaactgtggctcagccacatc

SEQ ID NO: 396128 - DNA, 122 bp, Homo sapiens
cttgttgataactgggtttcgattctcgaaacctcgggaagcgcgccggggagctctgggcgagcccgagaaggcgcgggggcggcaccacgggcctcgggcgtgcgcggctcctgcgcacg

SEQ ID NO: 396129 - DNA, 122 bp, Homo sapiens
taccaaagcacgacagaggattaacaagaagcacaatcgtcagagaaccacagcaggagtcggccatggctatgctatgtgcgtaccaccagtctagagccagccttcggtggagagcctgc

SEQ ID NO: 396130 - DNA, 122 bp, Homo sapiens
aagtagcaaacaaggccccacctgcgacagttgtagtgattccggaagacctgctcaccacgaggtgctggggtcgcttgcagctggcagtctccggtggctgcagtttaaataaatctcct

SEQ ID NO: 396131 - DNA, 122 bp, Homo sapiens
agtgtcaaagaggaaggagtggagggctgctgaggtgacagggtgtggtctgtgagggagcggacgaacccggagaagagagcagagagacccaccaggactaggaggcagcggggagcgtg

SEQ ID NO: 396132 - DNA, 122 bp, Homo sapiens
acagtgtaaccatgacgacacactgggcagtgtagtttctaatctatcctatgatttttacgggctttccatttaaatagtataaaattgtgaaacagtttgagaaagacgcctttattaca

SEQ ID NO: 396133 - DNA, 122 bp, Homo sapiens
ccactcactcaaaaatgtgttctattaggagtcaggttctattcctgaccctcttagtcacgctgggcaaggcatttccattttccttagctttatcttaaccatcttggaatgtctcctca

SEQ ID NO: 396134 - DNA, 122 bp, Homo sapiens
tatttggacaaataacaaaatacgcacatccaggcgtgctcacacacaaaccagagcagacgcgttccgtaaaatcaatttcttatcatcttagctaatgttgctgacagcatgtgaaacct

SEQ ID NO: 396135 - DNA, 122 bp, Homo sapiens
ggcccacctataaaggccacactttatggtgattgtcctgaggctggccgtgataaatatcgattgacaaggaagggctcacatgattagttcattcattccctaaatgtttgccaagggct

SEQ ID NO: 396136 - DNA, 122 bp, Homo sapiens
ctccctactccctgggagccacgtgctggccatgtggccagggacggcatgagcaggaggcggggacgtgggggccttctggtttggtgtcaacagctcacaggagcgtgaaccatgagggc

SEQ ID NO: 396137 - DNA, 122 bp, Homo sapiens
cgcgggttctccaggccaacacgcggcggcgcaccctccctcgcgccgcgggcctccccgcgccgtgcacgtcctcgtcccgcgcctccgcccctcgctcgctcgctccttcccgccctccc

SEQ ID NO: 396138 - DNA, 122 bp, Homo sapiens
gacaggtttggtctggggagctacggtcacccgcatttcctagagtgccccagctctaatcggaaggtacggcccacttctgggccgtggagaacgaagccactgggaccgtccggggagtg

SEQ ID NO: 396139 - DNA, 122 bp, Homo sapiens
cttctcccctctcctagtctgaacgtgggccttgactaaaacttgagatctgggcgcggtcggcagcgtttctggaccccagcctgtgtttgtcgcttgtggtggtggcgccagacctctgg

SEQ ID NO: 396140 - DNA, 122 bp, Homo sapiens
aaaaggatggggttcctaactttgatttctaaggacttttaggcttctcatgtaaggccccgttttaggctccccgctggcccggagtcagcatcagtgacgtatacacctaaatctggtcc

SEQ ID NO: 396141 - DNA, 122 bp, Homo sapiens
ggagcaagtgttttggaccacagtgatcaaacacggagcccgtgggaggacgtgggaggacgtgcggggctttgccgggcgagcccgatgctgctcacggcacctggagtgttcgggccgct

SEQ ID NO: 396142 - DNA, 122 bp, Homo sapiens
tggagtggcgggaggacttctgctcccctggtccttatcctgtccttcttttgactgttacggttcgatgcaactttacttggctgatcatccaaggagtagctaagaagtcgggtttacgg

SEQ ID NO: 396143 - DNA, 122 bp, Homo sapiens
aagtcaacaagaactccaagttgacgcccgggagcccaggttcccagtgctgtggccaggcgtcctgtcggaggactggtacccccgctgaccctggtgggtggggaaggagaccttgggct

SEQ ID NO: 396144 - DNA, 122 bp, Homo sapiens
aaacagacacctggccaatcttaaatattttaaatttattcgggagtaaaaataagaaagcggctaggattacatcacagttaaaattatttggcatggggaatatacctaattcaatagtc

SEQ ID NO: 396145 - DNA, 122 bp, Homo sapiens
gtgctggcagctccggcgcaggtgcgcgcggcgcatgtgcggaggttgttgccatggagacgccggaggttgggttgggcgggttccgggaggcgttcgtccctcctacaacgtccgcagcc

SEQ ID NO: 396146 - DNA, 122 bp, Homo sapiens
caaggatagtggggtggttttagttgggagaccaccacttccaatgccccatccccgactcgccctgcatctccctgctcaccttttcatgtgcaccctactcatagtcacataatttgtca

SEQ ID NO: 396147 - DNA, 122 bp, Homo sapiens
atttgcggaggaggagccggtgctggtactgagccctgaggagcccgggcctggcccagccgcggtcagctgcccccgagactgtgcctgttcccaggagggcgtcgtggactgtggcggta

SEQ ID NO: 396148 - DNA, 122 bp, Homo sapiens
tgatgtatttcacccttagtcatttaaactaaacacagatgtttttataggcctgattgacgcttcagccattgtgattttgctctaggttccaacgaaattctataaacctgtcagattaa

SEQ ID NO: 396149 - DNA, 122 bp, Homo sapiens
cgtgccggtcctcgatgatggggtcgaagagatccttgaacacttcgtaggactcctcgtcgcccgccacgcagcccacggtcatgatgtacgggtggcctgggggagggggcgcgggacgg

SEQ ID NO: 396150 - DNA, 122 bp, Homo sapiens
actaacggagaatttagattaataacattcaggccagagaagtaatttcctttgagaaagcgatttacatgcgctctgccagagagagccgtggccgctctcttgtcatgtcagctcaaata

SEQ ID NO: 396151 - DNA, 122 bp, Homo sapiens
actatcgttcacagtattattacaaatacaaccattaggaaaacatgcagagcatagccccgaactcacgagctgcgccggcccgcgcgtgcgcgacaggcgggcggagccagggcagtcca

SEQ ID NO: 396152 - DNA, 122 bp, Homo sapiens
aatatttaccgcgggaatcccacctttttccaaagtgaccccgtctctgtgtcagaaccacgggaaaaagaaaaatggagcagctactccttgaaatacttaatgtttaataagcttttcgt

SEQ ID NO: 396153 - DNA, 122 bp, Homo sapiens
ccccattggctgcaggcccccccacgccagggctccccccagctcccccccacatcggtccgtcctgcttccagctgctgcagcgcgccttcgccgccaaagcatccagcagccccctgctc

SEQ ID NO: 396154 - DNA, 122 bp, Homo sapiens
cctgggctggaggagcggatgcaggtgagaaggcgtcaccggcctttgggaccaggccctcgggctgccacctgcaggcagccaccacccgcctgtccttcacacagagctgggtctattcc

SEQ ID NO: 396155 - DNA, 122 bp, Homo sapiens
cccggaccccggctgagcctgccacggctgggctctgtgtgtctgtgacctgcagagggacgatggaaaacaggaaacctgccatgggctgtcaaatgtggttgatgaatcttatatttcat

SEQ ID NO: 396156 - DNA, 122 bp, Homo sapiens
ctttatttgtattctgtgggtggcttttgaagttcctggaggttttcagaagacaaaaaccgaggttcctggtgattagttaaggccgagaacatggtgtcaacactcaaaatagaaactgg

SEQ ID NO: 396157 - DNA, 122 bp, Homo sapiens
ttgtaagacattattgaaaaggcgttgccggcacatgtctacctatgtaacaaacctgcacgttgtgcacatgtaccctagaacttaaaatagaataataaaaaagaaaaggccttgcctat

SEQ ID NO: 396158 - DNA, 122 bp, Homo sapiens
gccataggccttcttggtgacagaagtgatgaaccggaggttaagcagagagtaggtaggcggggctcaaggggtggggccaagccaaagggctctcacactaagtgaagcttctccattct

SEQ ID NO: 396159 - DNA, 122 bp, Homo sapiens
aagcaagcgcagaccctgcagtaggccggccagacagaaggttctgctctgcaggggtcccggaaaagaggaggcagataggtgccttccccaagggtcctaggctgctgtctgtggggttg

SEQ ID NO: 396160 - DNA, 122 bp, Homo sapiens
tcacagttgttgcaaagtgctcagcactaagggagccagcgcacagcacagccaggaaggcgagcgagcccagccagcccagccagcccagccagcccggaggtaaggaaacggtgctcggg

SEQ ID NO: 396161 - DNA, 122 bp, Homo sapiens
gcggggggactggccgggcgccgccgggatctgctggccaagcttcccgcgccgcagactcgctttcccgcggctcccggggccccaaccagaccccgaagctgggattcttcccctctgcg

SEQ ID NO: 396162 - DNA, 122 bp, Homo sapiens
gctccccctttaggctaggatgaagagggggatggtgtgtgaccaatacctgcctaaacccgtaactccgaatttacagaacagatttttgagtatatgaggtgttacataaagatgaggct

SEQ ID NO: 396163 - DNA, 122 bp, Homo sapiens
agtgacagttaaagactctgtggctttctctgcagtcagttgtgggtgtgaccaagcgaacgggtacttatatatgttagtatatgtcatcatgggggaaaagaacaataatgctctactat

SEQ ID NO: 396164 - DNA, 122 bp, Homo sapiens
atctcagacaggaaaaacaggacccagatggctcagactgttgggttagcatctggccttcgacaggtcaccctggcccgccagatcagccccaggcctgacaaaagcactacaggataaag

SEQ ID NO: 396165 - DNA, 122 bp, Homo sapiens
ttaagtttggctccacatggtaacttccttgctgacacttgatgagcagagtgtgcaccccggaccccctcgctgcagtgtcccccagtgttgagcacagagctgggtgtgcagtaggcact

SEQ ID NO: 396166 - DNA, 122 bp, Homo sapiens
tgttgaccttgactgcgtttttcagcaagaaggaaaggctatttgcctgataaatggaatcggagctcagcgtctcgctcctaggccccctagtggttgtcttttgcaattaaaaaaatgaa

SEQ ID NO: 396167 - DNA, 122 bp, Homo sapiens
ggagaacaggaaggcaagtttgatcaggcccgtaggtgaacagcgggatactctccttggcgacgctggcaacttgcagccggtgctccaggatgtggagttccatcgtccgcccgcgcccc

SEQ ID NO: 396168 - DNA, 122 bp, Homo sapiens
cgccgcccccgctctgggggccttggaagcgccggcgctggcaggtgcggaattggggcgcgcagtgagtccaggcccggacggccgccccgcgccggtgcccagggggcagtcagggctca

SEQ ID NO: 396169 - DNA, 122 bp, Homo sapiens
aacgatttttccaacagcatgtgctcactttctttctctgtataacattttggttattctcgcatatttcaaacattttcatcattcttatatctattatggtgatctgtgatcagcggtcg

SEQ ID NO: 396170 - DNA, 122 bp, Homo sapiens
aacggatgacataatgaattaagagttcgataggcggcaggcacaactaaaagccaaactcgacctaagtcttatgaaatcctacttaatgagctttcttgactactgctagcctcacttat

SEQ ID NO: 396171 - DNA, 122 bp, Homo sapiens
tacatgaagctggatgccttcctcccaactttattataatgatccttggattgggtagaacgtatccaagacttctgctgtcaacacacaagtgaattatccatcacatggcacctgctgcc

SEQ ID NO: 396172 - DNA, 122 bp, Homo sapiens
gagggcactcacccgagcggaccttggctccggataatccgtttccgggtcaacaaaaaacgtcgcgcgaggggcggggcgcgtacgtgcagggaggggaggcagagaaaaaggcggggccg

SEQ ID NO: 396173 - DNA, 122 bp, Homo sapiens
ctgtaatcccagctactagggaggttgacgcacgagaatcgcttgaatccgggaggcggacgttgccatgagccaagatcgcgccactgcattccagcctgggtgacagagcgagactccgt

SEQ ID NO: 396174 - DNA, 122 bp, Homo sapiens
agcacaaaaattgggggatgttaaaagatagttgtgtggaagctataaggttctgtctgtcgtgttactctctgtggaaatgagaggggtctcccatttacactaagcaaatttccattggt

SEQ ID NO: 396175 - DNA, 122 bp, Homo sapiens
gcctcccaaagtgctgggatcacaggcgtgagccaacgggcccagcctgtgtccctccctcgtttttacaaatgaataaagagatgctggataagcccgaggtcacaagctttgcagtgtag

SEQ ID NO: 396176 - DNA, 122 bp, Homo sapiens
ctcgccaggcggcgctgtgcctgggaggactttcccgctcatcgcgggggctgcacgtggcgctgaagccggggtcccacccccaatgtgctcgtcctaccacagccaaggctgggattcca

SEQ ID NO: 396177 - DNA, 122 bp, Homo sapiens
agtgcaaataaaagtgcggagctgaaatgtcaggaaactgagccactctctgatccagcacgcgcgtgaccgaggagcccccgcaaggtcacagcggcatgagaagcagggaagcttccacc

SEQ ID NO: 396178 - DNA, 122 bp, Homo sapiens
cgggcgacgtgcccattggtccgggccgctgccaacagcgagagccgccccgcctctgaacgctccggacactggtctgtagagctttgcacgtgagtcactgttctctagggagattccga

SEQ ID NO: 396179 - DNA, 122 bp, Homo sapiens
ttgctagggacagagaagcaggtgccaccacctctggcaagaagaatctcacagtctagtcgggagaaaggattgtgtattgagaatggaggtaaaaaagcagcacctgacgcccgggcgcg

SEQ ID NO: 396180 - DNA, 122 bp, Homo sapiens
gtcgggggggggcgggtccaatagaaaggcggaagccagtgtcccaggcgttctcacgcccgcaacaattcctgagtagggccttgcttgagttcttcggaaagtctcatccacccccacat

SEQ ID NO: 396181 - DNA, 122 bp, Homo sapiens
tgccaagactgtgccgcccccacaaccaaggcgccaaagggggtcgccgggcctctgggccgctgccctcgctttgtcttcgttgttgcaagcaccgtccactcaggaggcgccccgcaacc

SEQ ID NO: 396182 - DNA, 122 bp, Homo sapiens
gtctagacataggagacacagatcaataacaagcaaccattgtgtaatatgacaggtgggcgattaatgttatgtgcagagaacagagaaggattaacccggcctggggtggccaggaaagg

SEQ ID NO: 396183 - DNA, 122 bp, Homo sapiens
aacgctccgttagcgacgatgtggaggcccgggcgcgcggagctgcgtgggggaaggaaacggcgcccctggcgccggcccagcccccacgctcaccgtctcgccccaggaccccgaggccc

SEQ ID NO: 396184 - DNA, 122 bp, Homo sapiens
tggaaccaggacgaccttgcccctcgccttcatcaaaagctgccggaaacgccccggccccgacacatacctgaaccgcctgggggcccaagggaaactgaaaggccggtgggctcccggga

SEQ ID NO: 396185 - DNA, 122 bp, Homo sapiens
agggcgtccctgggacggcctccctgcagctccccaagataggtgacagagtggggcaggcgggggcgcgggacggtggcacggagctgaaggcgaaggtgaaggtgaagctggacggggtg

SEQ ID NO: 396186 - DNA, 122 bp, Homo sapiens
ctgtaactggatggagtttaggaaacctgttatgatttcatctacaaaggcgggctgcatcgcaccccactgtgctgaattttaagatgcgatgtggtgttgttgttttgtctttttttatg

SEQ ID NO: 396187 - DNA, 122 bp, Homo sapiens
aacggccgcataacgtgagtggcctggcccagcagcagtgctcgcacccagccccgggctcgcctctcctggaggccaagcccctaaatgccctgcaccagacactgggtgggacgctgccc

SEQ ID NO: 396188 - DNA, 122 bp, Homo sapiens
gagacagagccatgaccaaagcaaacagaatcctgccccatcgtccttacttccagagggcgggatcatcaacaagagtcacaaatgatcaaacgcacatggggagtaaatagtgattgcgg

SEQ ID NO: 396189 - DNA, 122 bp, Homo sapiens
ccgtgagcccgtggaatcacattgggagacccttttaaaatatgcatgtacccagtccctcgaggcgaattttcccccacgaacccttggaaggagctaaggttaatctttgagtgctggag

SEQ ID NO: 396190 - DNA, 122 bp, Homo sapiens
ctctagtgttgccgggcaacctcccgagcggagaggggagggcgctgggcggctgggccccgctggctcatgcacgcagggacacttcaggcacatccccctaggctgcctgccaccccttc

SEQ ID NO: 396191 - DNA, 122 bp, Homo sapiens
aagacccacgcggcccccagagtcataaagcgtgtgttttagcgggagagacccgtgttacggacgcgggaattgggcagttgcggggatggcagtctctaggcatggagtgggactggcac

SEQ ID NO: 396192 - DNA, 122 bp, Homo sapiens
gctagataccatacaagttgaccacccctcaagtacagttatcagattctccaaggtcaacgtgaaagaaaaaaaatcttaaaggcagctagagagatgagtcaagttatataccaagggaa

SEQ ID NO: 396193 - DNA, 122 bp, Homo sapiens
gtcagtcgtccccagctgcacacggggactgctgagcgctgcgctctcacgggtctgttccggacagagggtggcaggggtgagccctgatcccttacaaaaaataccagcttcccagggag

SEQ ID NO: 396194 - DNA, 122 bp, Homo sapiens
cggggaagggctcccaggtctggtcccccggctgtggggctctgggaagcggatgctagccgcgaggtggcgctcgcaccggactcggtgggctcaggagttgcttacgcgctggtgggtgt

SEQ ID NO: 396195 - DNA, 122 bp, Homo sapiens
ctcccgactgccgtccgccgcctccgcccccccggggggtgtgtctccgaagtacgggggcgcgggaggccaagggtgcccccagcctccgaccgagaccccctcccgagccggcggcgaat

SEQ ID NO: 396196 - DNA, 122 bp, Homo sapiens
catgttatgcaactactcacttcctcaactttaccttcaggggaaattgaaaaccttcttcgtgcatggatacatcacctaaggacaagggagcatgttcatgcatatattttgaccccttt

SEQ ID NO: 396197 - DNA, 122 bp, Homo sapiens
cacccccatccccaactttccctggaccggtgccgcccccacttgatgcttgctcaaggccggggactggagcgggctacttgtatatttcgttgtcagtctgcagaatgtgtttgattttt

SEQ ID NO: 396198 - DNA, 122 bp, Homo sapiens
ttcccattaccagaagcaaagctgctgctaacccaacatctggcacataggatttgtactcggtaaatgttagttcttttctccccttgaggtcagtaataaatacaaaaaaatcatttttc

SEQ ID NO: 396199 - DNA, 122 bp, Homo sapiens
cctcggaaagccttcccctccggaaagtttggccaagaggaggggcttgagcaaatcttgcgccacgcttggtttcaggccggttacaagtcgaacccctccgctgcatgagaactacggaa

SEQ ID NO: 396200 - DNA, 122 bp, Homo sapiens
gacccactgcccagccacccagcatggagtggggcactctgcacacctcccggcaacctccggatggtgtcaccacatggctggcccactgccaccaggccctgccctttgaggactcagta

SEQ ID NO: 396201 - DNA, 122 bp, Homo sapiens
ccattgaatattgccatgtctggcatgaaaagtagattcattctgacttttcgccttcctcgcagacaccaaccttggcatgtatacaaatctttcctgtatgtccagcatcagttcctatc

SEQ ID NO: 396202 - DNA, 122 bp, Homo sapiens
tgtgcggagccattcgctgcgctgaagcagtgcgcatgcgcactggacgcttcttaccagcgtcctgactacaatacccaggacgcacccagcccgccgcctctcggagcccttttcaaacc

SEQ ID NO: 396203 - DNA, 122 bp, Homo sapiens
gatttcgagggtgcttgacaagatctgaaggaccctcggactttagagcaccacctcggacgcctggcacccctgccgcgcgggcacggcgacctcctcagctgccaggccagcctctgatc

SEQ ID NO: 396204 - DNA, 122 bp, Homo sapiens
tctcactaggacaaatctactggctactaaaaaagtgtgaaggctggggacagtttgagtcgtcctgcttgcaccttaagcgcctacaagagtgcccggctataacaaccacaataccaata

SEQ ID NO: 396205 - DNA, 122 bp, Homo sapiens
agggaaccctgggcctgctcacccagccgcaggtcaagcagcacaaagaaagggccagggcgggtcttgttttcagcttctgtggctcagtaaccccacccactggtaaactggccaactga

SEQ ID NO: 396206 - DNA, 122 bp, Homo sapiens
aacaggagaaaccgaccttccagggaggcccagggaggcagcggagagcgaagtcctgctcggcggagagacctcgaggagagtatggggaaaggaatgaatgctgcggagcgcccctctgg

SEQ ID NO: 396207 - DNA, 122 bp, Homo sapiens
aaaatgaccaggctcccaggaagtgaatcatttaggattgacagcggcgagcccgtgcgccgatggaggcgaatcagggagcagatgagtggtgtggaaaacgcggagccaggctcggtcgg

SEQ ID NO: 396208 - DNA, 122 bp, Homo sapiens
tgtcccctgtctggggtgcacctgcaaagccagggctttggggtcagcatctgagctatgcgcaggggccagctcagcctgtgttccgggtgcccacacagtcagtgcccgagggacctagg

SEQ ID NO: 396209 - DNA, 122 bp, Homo sapiens
gttgcctgatgtcccagactctctgttgaaacgccacaactctgttcagtgatgggttgccgtgggcctgtgcccacggctgtgttgccatggcagctcaccagggcattcggctcaaagct

SEQ ID NO: 396210 - DNA, 122 bp, Homo sapiens
cgagaaccggtgtgtgcagcttcgctttaggacgccttccccttggaaggtttaggttgtcgcgtcctgtaaattagtcatttccccatccacccacgggaaaatatttttacataggctaa

SEQ ID NO: 396211 - DNA, 122 bp, Homo sapiens
acacaaggtttcttccccaagcccaggcgccccgcagctggcaccaaaccctgcagggcacggaaaccgccccgtgaattcccaccgagtcctcagatcctgccgagccaggggaggcgacg

SEQ ID NO: 396212 - DNA, 122 bp, Homo sapiens
gacggcggaggaaaatcccccggcggtgctcaactgcggctttctctctcggctgtgagccggctccgccctccggcttccagagcaagtggcttctgcgttcaccgccccccgccgtttgt

SEQ ID NO: 396213 - DNA, 122 bp, Homo sapiens
cttacctcagcttttccattcgccaccgttcggcccccacacgccacacccacaagtcggcgaagcccaggagaccaccgaggagtttaatcgagagatgttctggagaagactcagtgagt

SEQ ID NO: 396214 - DNA, 122 bp, Homo sapiens
gcctaggcgctagctttctagaacaactggaaaatagccacagctgccttcccagctttgcgtcacagaaagttaattacttgttgcatcatcagcactgtcagaatcatcctgggggcggg

SEQ ID NO: 396215 - DNA, 122 bp, Homo sapiens
gtgtaagttgcccgaggcaaccagctatggcagaagaagataggtggctggaatttattgcggaagtaacatttatttacgtttgggatcccactaatgttcgaatccttgcttctgtgctg

SEQ ID NO: 396216 - DNA, 122 bp, Homo sapiens
gccaatcaactggcttgactggtttcctcactaaggtggttggagtaacctggacagggccgtgtcagctcagacaaggactgtcacttgcattgagcaagactggagccgttccagggtgc

SEQ ID NO: 396217 - DNA, 122 bp, Homo sapiens
gagggagggtccaggaacgaggcaggtggactgggaccttgagggcagggtgggcctgggcggtgccaacaggctgccgagggtggctgctgtcccgtttctccagcagccagggccgtgcg

SEQ ID NO: 396218 - DNA, 122 bp, Homo sapiens
tctgaacttccgccctgcccttcagctcaccaaccaattgaattccaggtttcgtgggtccgctctaggcggctgatagtactcaatgctccggcagtcctgctccttcccggttacgtccc

SEQ ID NO: 396219 - DNA, 122 bp, Homo sapiens
aggatctcaagccagccccctccagctcatgacactgtttggcctttcttggggagaaggcggggtattcccactcaccagccctagctgtcccatggggaaaccctggagccatcccttcg

SEQ ID NO: 396220 - DNA, 122 bp, Homo sapiens
gagtcccgtaagtgttggttatcttccccaagcgcaccgggtgaacctgcgctgtcgtggcgaagcatactcattcagcacgcgcgcgaggggctgcgggggtacagagacgtgcagcgtga

SEQ ID NO: 396221 - DNA, 122 bp, Homo sapiens
cgccgttgcactgtaggactctctccacgtcccctaatcccatcccccgcctctgggtgacgctacaggagccccgaggacacagacgcccccagaccttaccacgttagctcgacctcaac

SEQ ID NO: 396222 - DNA, 122 bp, Homo sapiens
cgggctggccaggcagggggcgccggcacgtggagagtccgtggaaggtccagactcacccgtaggggccaggcgggcaacggcggagcgctcggagggagcagggccagagagaagtcccc

SEQ ID NO: 396223 - DNA, 122 bp, Homo sapiens
ctcaggctgtggaatggggtggcgagtctttggaagtcacagagcccagggtcggtggcacgtgatgaggcgcaggcctggctcagggggtggtgcccacggccctcggctcctcccccggg

SEQ ID NO: 396224 - DNA, 122 bp, Homo sapiens
acctcctctttgtgctccatggcttagagcatctcaacctcgacttccggctggcaggcacgggactttgtagtgacccggaggaaccgcaggaaccagctgctatcatcgtcaacctgctg

SEQ ID NO: 396225 - DNA, 122 bp, Homo sapiens
gtgagggacatggtcccagggagctggtttattggaggctggctcctctgaaggaggggccgggtgtctgtggccaaggcaaggggcacgcaccttgtcataccagcaccggatgctgagct

SEQ ID NO: 396226 - DNA, 122 bp, Homo sapiens
ctggggtggatgagaagctgaatcgattggttgtgtctgattcggaggcttatttagctccgaccccctgtggggagataaggtgactggtggttgtagcctcttggctatggtgtataact

SEQ ID NO: 396227 - DNA, 122 bp, Homo sapiens
ttcaagagagctcaaggctgccagagagtgatccgagagatggatgacttcgcaaagccgcgcccacagacggcccagcggggtgagcgcgtcgcagcccgcactcaaggaggtcttggggc

SEQ ID NO: 396228 - DNA, 122 bp, Homo sapiens
cccctcttcatacactcctgctgaaaaatgttaatccaaatacacatttaaacttagggtcggtccttattctgatttgagtattttaatgtctcagtgtgctgatttggtagttggaagaa

SEQ ID NO: 396229 - DNA, 122 bp, Homo sapiens
gcagggtttgagccttggcttcctcttacgtaacatggagctggcactcacatcacagggcggctgagaggaatcagtcagatcatggaaaggccccgaaagcactcaataaaaatggtaac

SEQ ID NO: 396230 - DNA, 122 bp, Homo sapiens
ggagcggggcgcccagcccgcccggagccgcatacggagcccaccccacagccctcccggcggctcccactcacccaagggcgtgactctgatctcaggcatcgtctccgccgcgctcccgg

SEQ ID NO: 396231 - DNA, 122 bp, Homo sapiens
ggtgtatgcaatattgtttgtaatatccagggagggagaggatgatgcatatccccataacgcaaagggtgtacacaccccctgcgatattatccgtaatatccagggagggagaggatgat

SEQ ID NO: 396232 - DNA, 122 bp, Homo sapiens
ccgctcggcgccggaagtgagtgagcatttccggcagccatccccgcggtgctgacatcccggttgttcttctgtgccgggggtcttcctgctgtcatgaaggacgtaccgggcttcctaca

SEQ ID NO: 396233 - DNA, 122 bp, Homo sapiens
ccacgcccagccaggaaaacctggggcgggcggggtctgtacctgagaccgctctcaacgcggcttccgtgtcaggatgctcgctcacaggaatgctcatcacaggcttgaaagcctttgcc

SEQ ID NO: 396234 - DNA, 122 bp, Homo sapiens
agctaaaattgaggcaggtaggaaaatattattgggggcataagcctattagtgtgtaaacgtatttttatgaagtgtgcctccagggagccattaaaaactgacctctcaaccacagaaat

SEQ ID NO: 396235 - DNA, 122 bp, Homo sapiens
cgaaagcgcagattcattgacgcgcaagtgcactccgcggctgggagcggctcgagcaagcggctcacgagcccaactgcagtgttctttagggttcttatgaagctgaaggaatttggtaa

SEQ ID NO: 396236 - DNA, 122 bp, Homo sapiens
agcttgaggactggggccgtgggggaaggagaggcctcgacaaaggccaaaagtcccccacgtcagtcttgttaccccagcaccagccgtccccgcatttgtgaggtgggccacactggcgt

SEQ ID NO: 396237 - DNA, 122 bp, Homo sapiens
gtgggtgacatcaatagtaagggagcgttgaatccctagatgagattgcctggtttcatccgaagtctggctcccagccagaagtttgagaggcaggataagaataatctgtcctttccctg

SEQ ID NO: 396238 - DNA, 122 bp, Homo sapiens
caaaagtgactttcctcactcccgtgaagtcggcggaaccctccactaacggcgtctgagcggacggctccgatgtgtaaatcccactcctcgaggcctctggaccttgcaccttgaacgac

SEQ ID NO: 396239 - DNA, 122 bp, Homo sapiens
agctggggcgccgcactaactaggccgcctctcttttcttgctccagtgacaggctcagacgcatcgggaccggacccgcagcttgcggtcaccatgggcttcacggggttcggtgagtgac

SEQ ID NO: 396240 - DNA, 122 bp, Homo sapiens
acggcgatcggggactccgtgccaccctactccaggcccggggctggctgcccgcccacacgagccgagtctcgagagctcttccagaagagaatcccaaaccccaggcaaacccgaggcga

SEQ ID NO: 396241 - DNA, 122 bp, Homo sapiens
gggatgctgaatcctgggacccaaagaaatactcaagtgccagagcaattagccatgcaccggaggatgtcttagaatgtcagcgggctctgctgtgacaactggctggaggccatttcctg

SEQ ID NO: 396242 - DNA, 122 bp, Homo sapiens
atcctaaaagtagtcagcagaagtaaggctgcaaacacatgaaagaaagagaataaccgacggttaatgaggaagatccataagaaacaagctctaggaagatggagcattagctttagccc

SEQ ID NO: 396243 - DNA, 122 bp, Homo sapiens
cctacgtgcgcgtgcgccgacggagccgggcgcgcggccgcagagagggggatcccagcccggcttggtgcagctcagcttcccttgggttcctgccaccaaccctgcctagatagaaccca

SEQ ID NO: 396244 - DNA, 122 bp, Homo sapiens
cgccttgcgctgggagcttcagaaaaagcgcaacaggaaaggtccccaaccccctagcaacgtcgccgagaacctactgcacaaggccactccatagcccatgtttcctgtactgcggggtc

SEQ ID NO: 396245 - DNA, 122 bp, Homo sapiens
gacccagtcggagcccctcttcggtggcaagaaccaccgtcaacccgggcgaaagcccaacgtcttccacggcagccccagcgcagcatgggcgccgccattgtaactccagggtcttggtc

SEQ ID NO: 396246 - DNA, 122 bp, Homo sapiens
acccacacgcaggcttctgtactcgaccatttctctccctcgcccttcctcttcctccgccgagcactttgctcggctcctgctgttgatgcttgtggttttgcagtttgggatgggatgcg

SEQ ID NO: 396247 - DNA, 122 bp, Homo sapiens
agcacccactgtgcctgtccttccagagagccgctaccttcatctggacggcagcagatccgatgagcagcagggagtctccgtcccagacgtcaatctgcagggtctgcacggccaggtag

SEQ ID NO: 396248 - DNA, 122 bp, Homo sapiens
gagcccttccaaaacagcttgaggctggttggaagccaggaagagtcccagcccctcccacgtcagcatccctgtgggcgcacagcccggcgggcggcgtgtggcctgccgggagatgtagt

SEQ ID NO: 396249 - DNA, 122 bp, Homo sapiens
ctcctgccttcagcacgtggtcactgccctgccctgcctgcaacagcagccaccagagagcgtccgctgggaaccacaacgcgcccgcaccccagcggccatcctcgggtcacgcagcctca

SEQ ID NO: 396250 - DNA, 122 bp, Homo sapiens
ccttccccatggctggctgggcgcacggcggtgctgagctggtggggcggcggcgctgagcgggtggggctgcggcgcggcgggctatatagcaggagggctgctgcgttggcaagaaccgc

SEQ ID NO: 396251 - DNA, 122 bp, Homo sapiens
ctgttggctccgggctgcaggccgtcctgggaggggtcaaagccggccagctggagctcccggtccaccacctgccccaccatgaggcaaagcaggctgaagatgcccacggagacatgccg

SEQ ID NO: 396252 - DNA, 122 bp, Homo sapiens
actccatgctactgtggtattcaaatttccgagtcgtcaggctcccctcttcgccggcaacgcgtacactcgcgcatgcgcgacttccccggaacttccaaatccacagctggcgcctcagc

SEQ ID NO: 396253 - DNA, 122 bp, Homo sapiens
caccgccgcccccgcctcctcctcgccccgcgcccaacgccccgcgcccagcgatccaagcggcccctctagccccggcggctcctttgtgccggccccgaacccgccctctcgggccgagt

SEQ ID NO: 396254 - DNA, 122 bp, Homo sapiens
gttggggggggtggtggtgggagagctgtcacgtgactcgtgcaggggctgctgggagtgcggcgcgcttcccacctccacccccgaagtccgagcaccccgcgcccggggtcttcactccc

SEQ ID NO: 396255 - DNA, 122 bp, Homo sapiens
aacagctggggcctccttcctgtcacctctccccacctgcagggacacgaacactcagggcgttcatgtcctgctgcccccttggccgggcgcacgcctctctcaggagccctgatcactcc

SEQ ID NO: 396256 - DNA, 122 bp, Homo sapiens
tgaactccctgccccaagcaatccttccaccttggcctcccagagcactcggattagaggcgtggtattttatactgtatttaataacttgttgttaataacagttgttataactgcaactg

SEQ ID NO: 396257 - DNA, 122 bp, Homo sapiens
cgggtggctttcaccccacggggacagagccccagatgggcccagggacctctgagcagccgtgggccatggggtgacagttgggggttggtgggacccgtggctgtcatataccctgggta

SEQ ID NO: 396258 - DNA, 122 bp, Homo sapiens
ttccttagaaaaggggtggttcaggacaaattactcagtgtgtgctcatgcctacatacacggatatgttggaaatacttgacctgttaatgtaactttcttggcctctgttttctcacatg

SEQ ID NO: 396259 - DNA, 122 bp, Homo sapiens
tgtcccagccaatccattatcaccggtttattggggaaccaaacgccacgtccccctgggcgaactccttggctttattcgttcgcgctgctctaatgactaaatatgttacaatgagatta

SEQ ID NO: 396260 - DNA, 122 bp, Homo sapiens
cgacggcaggaacggcctggagaaggcttcctcctcccatctgctcaggaaggacctcagcgccagactaaacacaggccggcgcggctgcggtgtgcgagctcgcgcgccggccgccggcc

SEQ ID NO: 396261 - DNA, 122 bp, Homo sapiens
gagggggcgacagactaggagtttgcgctctcttccccatgcgctctgcgcaggagttctcgagtgtgcgcagtctggcacgtgagtcagcgcggggtctacgcggattggtgcgggggaag

SEQ ID NO: 396262 - DNA, 122 bp, Homo sapiens
gaagtggtttttgctaacatcatggtgcgttctttccagctttaatgctatctgattgagcgtgtctcccctcagatttttgtgtagggtttagaaatggaaatgaccatgcacatcagagt

SEQ ID NO: 396263 - DNA, 122 bp, Homo sapiens
ggagctctggtctggatgttcccagtcaggagctgcacccacactcatttctgctcccatcgccctatcttcattgctacttcattcctcaccttaaagcttcaggaaaatccacagaaggt

SEQ ID NO: 396264 - DNA, 122 bp, Homo sapiens
cactcacactctcacgcacacacgtgttcacaaacccaccctatccccacccaagctagacggtgctgtaaagagaatgctttggggtctggaacgttcgctgccatctaaaaatgctcttc

SEQ ID NO: 396265 - DNA, 122 bp, Homo sapiens
tgcccccaacaccacttcagcttctgccagacagatggaactctccagcatgaaaatctgcgcagccattccaacaagcagggtaggtgaaacttgaattaaaattctcccctctttatttt

SEQ ID NO: 396266 - DNA, 122 bp, Homo sapiens
gtaggagccctgtgcaatactgcacgtgtctggtgaagtgcacgaaggtaggtgggccggcggtgcagtttggggctgctatgggctctttctctgcactctgtggtttcttcggagtgatt

SEQ ID NO: 396267 - DNA, 122 bp, Homo sapiens
tttcttttccagcctgttccaagtcagagttgagtattagtgttaatgatatgtcctctgcgttaaaatcattgtgttgtggctaagagcaattctgcaaaatggagcataggaaccatctt

SEQ ID NO: 396268 - DNA, 122 bp, Homo sapiens
gcaggggagagggagattgcctcagttcccatgtgcttgttttacccaattttactcctgcggaagaagcaagctctcctatatgtttttaaaaagtaaaatcgtgcttcatgttgttactt

SEQ ID NO: 396269 - DNA, 122 bp, Homo sapiens
agcccctgatctgtcttatactgggggtattctcacagacagagattgcagatccagacacgttccttgcaacaaatacaatggaactactgagatgataaaaagtgttgtagtgtgcccat

SEQ ID NO: 396270 - DNA, 122 bp, Homo sapiens
ccagaagcattcaggtggcaggaagtcacactgagacaggattaagaatttggcacagatcgctggccagatggggagactcacacctataatcccagcactttgggaggccaaggtgggta

SEQ ID NO: 396271 - DNA, 122 bp, Homo sapiens
gaccctgtgggccgcctggaccgcgcgcaggagggctgggattgcggtggctgaaccctgcggacctctcccatctgctccaccccgaccgcctgcggttccgcgcccaaggctggacagaa

SEQ ID NO: 396272 - DNA, 122 bp, Homo sapiens
acccagctccaccctggaagcccccgcggccaagtagcagctgagagccgggtccggcaccgagaaggaagagctgccacttccaccagagaaggcgcctgcttccgcccagacccggcctg

SEQ ID NO: 396273 - DNA, 122 bp, Homo sapiens
tgcgtgggggcagctgcccccggcagaggctcgggctagcggggcccctgacgcgtccggcgttgaccacggctggtgggcgcggggagggcgaccaagggactacagcgttagggcgtcca

SEQ ID NO: 396274 - DNA, 122 bp, Homo sapiens
tgatttagtgtcatccagcatccataacaggtcctgttttcattttcttttggaaatccacgctcacctattcttaggtcatgtggttcagatgcacaccagctctcccgctgctcccaaga

SEQ ID NO: 396275 - DNA, 122 bp, Homo sapiens
taggaagagccgagagctagcggccggggcctcggcgggccaggggcgcggagaggccgccggagaaaggactaagacaccggtggaccgagcagttactcccggcatgctcctcctccccg

SEQ ID NO: 396276 - DNA, 122 bp, Homo sapiens
aagtggcttgctctgtactgtccgccagcgagttagcggcagggctggtactgagttatacgtccagaacgcttgcctgttctttcactttccagacatatgggacttgggattcagctcca

SEQ ID NO: 396277 - DNA, 122 bp, Homo sapiens
tggacctagtccagagtcaagcaccactgagggcagggacctgcccaggggtgctgctgacgtttgagatggagtggttcttcacagcacagaagtgttccatcactgtgggacatttaata

SEQ ID NO: 396278 - DNA, 122 bp, Homo sapiens
ccacggcccaccgggcaggaagcttcccactgtggctgactcttccccgcacctgcactccgggaaggatgtgcagggacgcagccctccagatgggctttgcaaaccaaggggacacctag

SEQ ID NO: 396279 - DNA, 122 bp, Homo sapiens
tacaacatggacaaacgacgtaaagagctatttccctgacgaggacacgcagaaggcaaacgtgcacaggaacagatgttcgacaccacgcaccctcagcgttccgacactagaaccacggt

SEQ ID NO: 396280 - DNA, 122 bp, Homo sapiens
gcagccccagggctgtggtgggtgggatgagtctgcccagctccttgggagcagagtgggcgtggagctgcacgctccctgtggactgtgcgaggcccgggtggttggggttttgtgcttgg

SEQ ID NO: 396281 - DNA, 122 bp, Homo sapiens
caccacagtggatctaagcaccaagatggccgctaggtgactcaccggcggggagcgctgcgcagcggacaagctggagaaagggacgattcacgtctgcgttaggatggggtaaggcgtga

SEQ ID NO: 396282 - DNA, 122 bp, Homo sapiens
caaagggacaaagccacatgtcaggaaagtggccaggcagttgccctgagggctgagcatcgtatctggagcccttcagggacctgcactattcagttggtcagccctcctcacagcggttc

SEQ ID NO: 396283 - DNA, 122 bp, Homo sapiens
cgggtacccgggcgcgccgagtggcgcggagagccgggctgcaaggcgggcgtggagtggcggctgtcaggaagagaggccagcatcctccccggcctcagaaaagcactggggcctccgcg

SEQ ID NO: 396284 - DNA, 122 bp, Homo sapiens
ggtcatttttgcccttggcgtctcttccttggcgcgtcctcacctagtagagaatagaggcgcagctcaggagtaaacttcagcctggccgttcaccactcgatgtgtgttacagccgagtg

SEQ ID NO: 396285 - DNA, 122 bp, Homo sapiens
aagtaggcaagaaagacaaaagcaaacaaatgtagggacaaagaaatggatgcagtaacacggttactaaaatatgtacaccatgaagatctgtttacttactataggtgggccacagactt

SEQ ID NO: 396286 - DNA, 122 bp, Homo sapiens
gcaggggcggcttgggcggctcacgcgtccctgcccgcctcttagggcctccggctgaaccgttccctgctctggctgtccctggcccacaaccgcatccaggacaagggcgccctgaagct

SEQ ID NO: 396287 - DNA, 122 bp, Homo sapiens
gtcggacgggacgctcgggattcagggactgcctcggcacacgggaagttgccctacaggcgcgggagaaagcgcaggcggcggcttggcagggagaggcaggctgcagtgcacattgggtc

SEQ ID NO: 396288 - DNA, 122 bp, Homo sapiens
cactccccggaccaccactgcccacctgctgtgtgtgagggcgtgggcagggggcagctccggcgatgccagacccccgccctggccacgaggggccacacagatacccaccacgaggaagg

SEQ ID NO: 396289 - DNA, 122 bp, Homo sapiens
agggatctctgagcagggcctcagagattgattggggttggatcagtttagcccagttagcgatgcagacgttcctggaatctggcctccagggtgacaaaggagagcttttggcctggctc

SEQ ID NO: 396290 - DNA, 122 bp, Homo sapiens
cgcatcctgggaagcaagctgagctcctggcagcgcaaccctgcactgaagctggcagcccgcctggcacacgcctgcggctccgactggatcccggcgggcagctccgggagcaagttcct

SEQ ID NO: 396291 - DNA, 122 bp, Homo sapiens
gcagctctttcacttttggaaactctgcagccccggctgctgcacccacacctgcacctccgtccatgatcaaggtcgtgcctgcgtacgtgcctacgcccatccatcctatctttggcggt

SEQ ID NO: 396292 - DNA, 122 bp, Homo sapiens
cacacacacacacacacacacacatcctctataaaagaatagcaaatacaaaatttatagcgcttactatatgcgctggccactgcattaagcactttacctatattatctcattttatcca

SEQ ID NO: 396293 - DNA, 122 bp, Homo sapiens
ttcagacatgcacactcgggtagggaatcttatgaacagaaccaggacagggaggctggccggaggttcctgcagagggagcgtcaaggccctgtgctgctgtccctgggggccagaggggt

SEQ ID NO: 396294 - DNA, 122 bp, Homo sapiens
caaaagatgagtggttgcctgaagaaatgaaagttggagtgagaagaaaagaattataaacgggcataaataaaatgtttgggtgtagtagggtgcgatggctcacacctgtaatcccagca

SEQ ID NO: 396295 - DNA, 122 bp, Homo sapiens
agcccaaagatgtgttaggaaaacaggccgatatctatcgataaggaaaactggccggcacgatggctcatgcctgtaatcccagcactttgggagaccaaggcgggccgatcacctgaggt

SEQ ID NO: 396296 - DNA, 122 bp, Homo sapiens
agaccttcttacttggtagttccataatcttggaaaagtatcttaacaattccccacctacgtgtatttacctccaaaagggcgagaaaacatccatgttaagaaaacagcccattttctgg

SEQ ID NO: 396297 - DNA, 122 bp, Homo sapiens
gcagcgtcccgtctgcttcagggggcacttccagcctcaccctctggttgccggcactgacgtaggacaccacaaatcggtccacctcagcctggggacgcagccagccaagctccagtgtt

SEQ ID NO: 396298 - DNA, 122 bp, Homo sapiens
cgatcatggggaaaaaaaacaagcttgtctttgacacggaaagggtccttggaggccattcggtccacttctctcatttcctgggtcaacatgtcacaatgaattaaccacatactgccact

SEQ ID NO: 396299 - DNA, 122 bp, Homo sapiens
gcaacctatccaccatccctcagctctcatcaacgtatgccctgtagttggtgatttccacggctaaaaccaaaattacacactctcccactaagttgtgttgactccaatcacaacttcct

SEQ ID NO: 396300 - DNA, 122 bp, Homo sapiens
ctgctgtgttctacagcaacagattctggccctgcccctgcccgtgcccgtgcattggaccgggtgagaaagtgtgggtggcgtagacactctacacccgagaaaatcaagctcaaagcaca

SEQ ID NO: 396301 - DNA, 122 bp, Homo sapiens
cagcatcttcagcttctttatcggccactacctggtggtggtcctcagcgacttccacagcgtgcgcgaggcgctggtgcagcaggccgaggtcttcagcgaccgcccgcgggtgccgctca

SEQ ID NO: 396302 - DNA, 122 bp, Homo sapiens
gctgaggctgtggtccgtccccctttccaggtccttgtcttcctcccgtcggcctgggggcgcccgctcacgcggcctctctattgcagagctcttctctatggttttccctcccggaccgt

SEQ ID NO: 396303 - DNA, 122 bp, Homo sapiens
gtgggagtacccaggcacactttcttggccgcgctgatttttttccttccacagctgcctcgacctcctctttcaagccttgacttcccttatgtgccttcttcccactttggggtgccccg

SEQ ID NO: 396304 - DNA, 122 bp, Homo sapiens
gaattcaggagccaaaagcaaaaacagatgggaaattgcaaaggtttgttcttgtgaggtcgataattaaggctagaagaaatccattggaaagttctggggttggaggataacatcatctc

SEQ ID NO: 396305 - DNA, 122 bp, Homo sapiens
cacgaacccaccagaagaaagaaactgcaaacacatccgaacatcagaaggaacgaaatccggacacaccacctttaagaactgtgacgctcaccgcgagggtccgcagcttcattcttgaa

SEQ ID NO: 396306 - DNA, 122 bp, Homo sapiens
gagtgggaagcggtgagacctccgcgggaggagactttcctgaacgctgttgaaattggacgcttgccttaggaggtggataggtgacttgaaggagccctttgcagtttggagtagtaata

SEQ ID NO: 396307 - DNA, 122 bp, Homo sapiens
cgcgcgcgcgcgcgcgcacacacacacacacgtacactaaaaaactcggaccagccgcgccgcagctgctccaatccctggaaaaggcaatcgagcgccctccggaccgctgcgcacagccc

SEQ ID NO: 396308 - DNA, 122 bp, Homo sapiens
gggcgcccaggccactgggctccgcggagccagcgagaggtctgcgcggagtctgagcggcgctcgtcccgtcccaaggccgacgccagcacgccgtcatggcccccgcagcggcgacgggg

SEQ ID NO: 396309 - DNA, 122 bp, Homo sapiens
ccatgtctgttgctatgcgtgtctgttgttgcgcaggcgccttgctgcccgtcttgtgtccgcacagaggtctgcaaggagagagagtgtcttcattctttccgccatcttgattctttctc

SEQ ID NO: 396310 - DNA, 122 bp, Homo sapiens
tcccagagcagaagccgtgcgtttcttgtcgcacggagtggggctctgtgtggcccttcacgggagggagagagacagcatggagacacgtgcattctgttttcccctgggaagaacggaaa

SEQ ID NO: 396311 - DNA, 122 bp, Homo sapiens
gccgcggcgccgggaggctgggggcggagggcggcgcgggaggagcggcccgagccgcagcgctacggcggcccggcggggcctccagcgttcgcctgcagggcggcgtggggcgtggcggg

SEQ ID NO: 396312 - DNA, 122 bp, Homo sapiens
agtctctggaagcccggaattgaggatgcaagcatgttcatgcgcgtggtgtaggatcgacggggaaggaaatcgctggagaccttccgctccctcctccacctggggctgggccgtgaaaa

SEQ ID NO: 396313 - DNA, 122 bp, Homo sapiens
cggtgagtgccgcggggtggccccctgagggggaccagggtgccaaggatggggggctggcgggaaggggtcacctcctgtctgcctggaactgaatgaaccctcctaccggaactgaaccc

SEQ ID NO: 396314 - DNA, 122 bp, Homo sapiens
ggttttgagccttttcctgaatccaagtttttctagcatgcgatcgttctgtagacaaggcgctgtgtctcggagtccgcggcgaccgtgcccgctgggagcgtctcccaagtccagcaaaa

SEQ ID NO: 396315 - DNA, 122 bp, Homo sapiens
aatcaagaccctgtaggcccttgaagttaggctaagaaatgtgtattatcctgaaagcaacgggaaggccaggaagattctgaggacagaaataacacaatctgatatgcgttttaaacgtg

SEQ ID NO: 396316 - DNA, 122 bp, Homo sapiens
ccgcgcctcccgcccgccaggcccacttccggccgcctgcggccgcggcccgccggggaacggcctagagattcgaaacctttcaggccgaccccagctcgcccgcctccctccgctggccc

SEQ ID NO: 396317 - DNA, 122 bp, Homo sapiens
tttcttgttgctccttaccatccttttctttcagactgaagaactccttttaccatgtctcgtaagacagttctagtgttgatgaaatacctcagcttttgtttgtctgggaaagtctttat

SEQ ID NO: 396318 - DNA, 122 bp, Homo sapiens
ggggtcccgggaaaggcggggtctggcagggggtcctgggcgctgggtcgttcagaagcacggctttactccagttaccctctttttatccaaggccggggttccccgggtgcctggtagca

SEQ ID NO: 396319 - DNA, 122 bp, Homo sapiens
actgggtggggtcagaagctgctcccctgcccttctttcctaggaacctaggaaataactcggaacctgtaacgtcccactggtttggacatattcctctcctgatctggcctcatctgttc

SEQ ID NO: 396320 - DNA, 122 bp, Homo sapiens
aaaaagggggcaagggataagaaagaatccatatttaataaccaaagaaaactttaaacccggagcaaaacaatgttcctcaaatgcaaataggaaaggacagccatgattataacgttttg

SEQ ID NO: 396321 - DNA, 122 bp, Homo sapiens
ttgaagaacaatccagtaggcacttatagctcagggtctcgccattcagtcttatctatgcgccacagcaattttcctccgggccccaaagttgataaccgatttcgcgggacttttttttt

SEQ ID NO: 396322 - DNA, 122 bp, Homo sapiens
gccagagtggaatttgaccttttcaacgaatcatggatgtgagagccaacattctgtgcacgtaaagccagttggggacaggtttagcatttgggcatgtaagtaaggcagatttgttgact

SEQ ID NO: 396323 - DNA, 122 bp, Homo sapiens
tccggagcccgaagcggctccccaggaaggcggcgccgtagcgccactctccctcccaggcgaattctggagaccgcggccccaggcgtctcacccattttctccgctggggacccgctggg

SEQ ID NO: 396324 - DNA, 122 bp, Homo sapiens
ctccgggtagatcactatgggggctcaggacgacctgaggaaggtcacccagagtgcctacgcccaggtaagggtgggcatcccccggcacgggccgcaggaggctctgttgggcgcaggct

SEQ ID NO: 396325 - DNA, 122 bp, Homo sapiens
tccagcgtgggacaggtgactcctcctctaacctgggcatggagcagatgggctggcagacgcagaagtgcctggaatggcaagaacccctccccccacagaccgaggttatgcaagtaagg

SEQ ID NO: 396326 - DNA, 122 bp, Homo sapiens
aggcgcctcccgggcccttggaccggcctgacggcccccttcagcccaggggtcccgggacgcgcagcctggacaccctgctcattgtccctggacacggcagtcttccctccgcccgcagc

SEQ ID NO: 396327 - DNA, 122 bp, Homo sapiens
gtgtagcacggaaacattctggatcaggtattgatggaaccatcgttaaaaactggagcccggggtctgcgtggtgtgggtcaggccccggggccccaggcctggcctggcatgtcccttcc

SEQ ID NO: 396328 - DNA, 122 bp, Homo sapiens
taaccaaataactctactaatttgaggtctcttactgaatttacaaacctttgccaatctcgtgggtgaaatacgagttattattttaatgcttttctccacatggtgcatgatgttctgcc

SEQ ID NO: 396329 - DNA, 122 bp, Homo sapiens
tttgcagatgcatccaccgcatatttatgcacttgctttcatatgcaaagaagtggctaccgagaagagacacctcatcaagaaagcttacagctgagttcttttgatgatgacagatttat

SEQ ID NO: 396330 - DNA, 122 bp, Homo sapiens
taaaagaagcccctaagtgattatttactttaacttttcatattctgatccttaagctcacgcctgttttttaaatgtcctgaacacaactgatttactttaacctttcgtattctgatcct

SEQ ID NO: 396331 - DNA, 122 bp, Homo sapiens
ggccccaagtgaggggtgcagccccaggtaaggagcacggggctgtgacgcgtggacatgcgcggtgaggcctcaggaatccagcgccagcgccagctcgggtcgcgccctcgcccgcctcc

SEQ ID NO: 396332 - DNA, 122 bp, Homo sapiens
cgtctccccgaccctggaagtgagcgacactgggggcctccaagcggctcgcggggacagcggggactcggaggcctccccgaactccccctatagctgccccccactcacccctctcccgg

SEQ ID NO: 396333 - DNA, 122 bp, Homo sapiens
ttacccacttattacaagttctcaatcttctacaaaaatattcatcgtgattttgaaatccgaggtgccctccttcttcccaacaatcctctctatcacacttaccttttcaagatacaaaa

SEQ ID NO: 396334 - DNA, 122 bp, Homo sapiens
ctctccggaaatcttcggtgactctcgcagccggctttgggggcccacctctcagttggtcgtctctttccggaaaacttcggcgcctctcgagaaaaacgtcggacgcgctttgctctctt

SEQ ID NO: 396335 - DNA, 122 bp, Homo sapiens
aaatgcgtaacaatcccccacttcagtgaatccaaagaaaacacagagattacaaagcaccgtttgaggccgggatcaggaggcaaccaagacaaataggtttctgtccatttggacaggag

SEQ ID NO: 396336 - DNA, 122 bp, Homo sapiens
ggcgcgcgccgaggagggtgccggggcggggacaagaagtgtgcatgcggattggttcctcgcggctgggggcggggccgcgcgggccggcggaagcggcgggcttcgggaggggcactgcg

SEQ ID NO: 396337 - DNA, 122 bp, Homo sapiens
ccagggctggaagaagcggcacccgggggcgctcacctgtgaaggtgaggctgggtcttccgggccttgcgggaggcgcgccccacggagctggggagctgggtcgtcggtttgagtctgaa

SEQ ID NO: 396338 - DNA, 122 bp, Homo sapiens
cttcttaaccaacaatctacccgaaaccgtcgtttcttggttagcgcttgcgcagacaggcgagaaaggtaagttttgacccagcttagcagccgtagtcagccgggagtgctgtcgtgggg

SEQ ID NO: 396339 - DNA, 122 bp, Homo sapiens
agaatctgtcctcagtatgtatcctgttctatcctacacactttcaatcaatagtgccaccgtgttgggtcaggttccaagctctccctctccttgcctttctatgaccagtgacctgtgca

SEQ ID NO: 396340 - DNA, 122 bp, Homo sapiens
actaagcacacgtggctattgaacgcttgaaacgtgatgagtctgcattgagatgtgccgcgagtataacacacctggatttcctccctccccaggtgcaacagtgacccgtgacgcagtag

SEQ ID NO: 396341 - DNA, 122 bp, Homo sapiens
actgtcgttcccagtttatagctgaagacataaggcacaaaggcacagaatgagcaaaaacgatccagcaactcagccgcagagctggcagaacccaggtctctgttcctcatctagttcac

SEQ ID NO: 396342 - DNA, 122 bp, Homo sapiens
ctgccccatgctttgccttcggagctgctggagacaatttaatccaactctgcccattatcgcctccactcccagtcgccgacccgctctcacccttcatccctaaacccatcgacgggacg

SEQ ID NO: 396343 - DNA, 122 bp, Homo sapiens
acttccccaagcgccggggtttgcgcagcggcggaaatgggcagggcggagcgagcgctgcggctaaagcgaaggcggggaccctacccatccctagtcctgtcggctcctcccaccccggg

SEQ ID NO: 396344 - DNA, 122 bp, Homo sapiens
gtgctgggattacagatgtgaggcaccgtgcccagccatattttttttaagacagagtctcgcactgttgcccaggctggagtgcagtggcgtgttcttggctcactgtaacctctgcctcc

SEQ ID NO: 396345 - DNA, 122 bp, Homo sapiens
gcactttccagcctgccaattgcttcccctctgtgatctcatttcatctgcactgccatacgtggagtgagcaagacagggcttaccatcctgtctaccagatgaggaaatggcagttctga

SEQ ID NO: 396346 - DNA, 122 bp, Homo sapiens
cctcctagtgcctcaaactcggaaccggttgaaaccggttcagactgggagattccatctcggttgagttttcagcccatggcgccgcggagcgtttggaacctgggcctccgcccccagcc

SEQ ID NO: 396347 - DNA, 122 bp, Homo sapiens
cgtgtgtaactcaggacgcggctgcgctgggcgcccgagcgcgttctcaggactgcggcccggagttcactgcgaggactgggatcacccatcaccccgccctggtctacggaaaatgacaa

SEQ ID NO: 396348 - DNA, 122 bp, Homo sapiens
gcggcggagcggcgggttggggcgtcgcacggtgagaaaggccggggcctgagaacaaaccgccgcggtcgccggggcaacgggacggggcacgtgccccccccgccagagccggaagcggc

SEQ ID NO: 396349 - DNA, 122 bp, Homo sapiens
cacctctaagaatttaacttcagaaagacaaacgcgggggagctggtgcagggcccgtgacggggactgtgacgtaaataaaacaacagacctggacaccaccctagggtccccatggggcc

SEQ ID NO: 396350 - DNA, 122 bp, Homo sapiens
gctaccattcacccagtaaaatcagattccaatgcctcctccaatcttgtcctgtctcctcgcacttcctctcagggtaaggaggaaagagctacatctagagacagaacctctctgaatag

SEQ ID NO: 396351 - DNA, 122 bp, Homo sapiens
ccatttccttgcctcgaacgcgaggactttccatcccccattcacagctggctcaacccacgaaagacaagagccccttggcggccaggctacaagacactcaccgggaccggggcctccgg

SEQ ID NO: 396352 - DNA, 122 bp, Homo sapiens
cgccaaacctgaccaatgaacggcgcctctccaagagccccagcccacggaaagggatttcgcgccaaatgcaaagcccttctggagaaagcccatctgcctttgcgcctgcgcagtgtagc

SEQ ID NO: 396353 - DNA, 122 bp, Homo sapiens
gtctagatagaaaggtaatttagattttgagggaagagaagaggaattataaaggagatacgcagtgcagccacaaaacaatcaccaaggacaggaattttgtgtctggctgttcttgttta

SEQ ID NO: 396354 - DNA, 122 bp, Homo sapiens
ttccagagcccccagggcgcccaggcaaggccgccacctctcccacctgggaggacgcctcgagcaccgactccacagccacggccaccgctcctcggctcccgtgacaccggcgcgcctgc

SEQ ID NO: 396355 - DNA, 122 bp, Homo sapiens
agtggggggaatttacattttaaccaagcacccctaagaggctgctgaactctggccgggcgtggtggctcacacctgtaatcccagcactttgggaggctaaggtgggcggatcgtctgag

SEQ ID NO: 396356 - DNA, 122 bp, Homo sapiens
gtccgggcgagaggagggttccgggaaaggcacctcataactcaatcagcgcagcacacacggcggcggcgagctcgggcacaggcacttgacggggacgcgggtggcagtcacagcatctg

SEQ ID NO: 396357 - DNA, 122 bp, Homo sapiens
tggcttggaccaggacaaggtgttgaacgcctaacttaggtctactaaggtgtagaaatacgcaaggctgcccctagagaacgtttgtctggggaataatgtaagtttttggagcggctctc

SEQ ID NO: 396358 - DNA, 122 bp, Homo sapiens
gggctttagaggctgcccagataattggaggcatccactgtgtccctgggggtcactggtcgcctctgcaccattcatcttgctgacagaccccagctagggtgtctatgtaggctgagccc

SEQ ID NO: 396359 - DNA, 122 bp, Homo sapiens
caatcgtcaacgcgaaagcctgacgctctagccggctctatctcgctgccccgccgcgggcgcagagctggcgctctagcccacggagttggttaactcctctcaccggcccctggaaaggg

SEQ ID NO: 396360 - DNA, 122 bp, Homo sapiens
acagcaatgcgtgctcctcgtgcagtgccagggaaacagcagctatgaatccataaaacacgccctaaatccatcccatccatattgactggtacctttagcgttggccataaagtggcttt

SEQ ID NO: 396361 - DNA, 122 bp, Homo sapiens
caataggggttaaataattactagctggattggtggttttaatttttagttcaggaaatccgatgttatctgatgtgatggaaggaaacaaaaactctgcaaggagaatacacattgtccca

SEQ ID NO: 396362 - DNA, 122 bp, Homo sapiens
ctgtctctagaatatgcaacgccataatcaaggctgcagtacccaaattcattgatcatacggagcctgttggctgcttcaagtggctttccatcatggagccactccaccaccatcgttgg

SEQ ID NO: 396363 - DNA, 122 bp, Homo sapiens
gcaaacacaatctgcaggtaattaacattattgtttcccattttagggagcagtcatgcacgcagatgatcaaaggttggtttctggacaacataagtaaacaagcctgtttgagataaatt

SEQ ID NO: 396364 - DNA, 122 bp, Homo sapiens
gctgcccgtcgtgctcgaagaagctgccgttcacgaatggcgtgaagcattcctgccaggcggagagaggggctcagggagctgcccctcgggctagagctgcaccctgtgtgatggggccg

SEQ ID NO: 396365 - DNA, 122 bp, Homo sapiens
gaatgggcactggggagaggagcactccccattcagtagaatagttactcaaggtgaccccgctcctcagtcctcaggcaatctttgaaaggaactaaaattgaaagcatacagagaggcag

SEQ ID NO: 396366 - DNA, 122 bp, Homo sapiens
aaagaggaactggattacaggctttcatagcttcgggctggctgagagccaccccacattcgcctacactctctggctcatgtttgctgctgatggcttatactgcaaactgcaccagtgcc

SEQ ID NO: 396367 - DNA, 122 bp, Homo sapiens
cgctacacccgtccgagccctcctcgagggcctcaccaccgggcggggggagatggaacccgggagagaagtgcagaccgccagtcccaagaaaacactacacttcagctgctgcagcccca

SEQ ID NO: 396368 - DNA, 122 bp, Homo sapiens
tggggacgcggacttgcaagtgcggcaggacgtccggaacaggaccctgcgggcggtgtgcggacagccaggcatgccccgggacccctgggacttgccggtggggcagcggcgcaccctgc

SEQ ID NO: 396369 - DNA, 122 bp, Homo sapiens
cccgaagaccgtggaccaaggtgacctgcgtgggtgagcgatccattagccgaatgacagcgctgccgcagaaagccagaaaaaggatatgcgtgggaagcgcaaaagcgtgggctgggcct

SEQ ID NO: 396370 - DNA, 122 bp, Homo sapiens
caccgccgccgcctgctcctgcgcccgctcccgcgcctgctgcctccccgccgccgccgccgccgccgccactacagatccgcagacacacagccaagatccctgactcttaacaccaactc

SEQ ID NO: 396371 - DNA, 122 bp, Homo sapiens
tcccctctttctcctttcttcctgccctctgttgttgctatctttcttcaaagctgtgatcgttgtcagccatgatgcccgactcatcacagaaaccaattgccagctgtgggtggtggagg

SEQ ID NO: 396372 - DNA, 122 bp, Homo sapiens
ggactggggcagcggtggcggcggcagcgcagtccgaggcggcgggtgggaagaggactacgatagggtcctgcgggagacccaagggttgtacccatagaggtcctgtcatcaggaccttc

SEQ ID NO: 396373 - DNA, 122 bp, Homo sapiens
tggaagccccggcggaaaaggccgtacccggcaggctggcgggcgggcaggcatgcgagccggcgttctacttcctagaagcaccgctggggccaaaatggcgtctgcccacgaccctcaaa

SEQ ID NO: 396374 - DNA, 122 bp, Homo sapiens
atctctcgtgagttggatcgggagaggatcgcacggtttccacctgacggagccacgtcacgtcggccacaagggccccgtgctgggcgctgggttcggttcccggccgtcctcttgtggcc

SEQ ID NO: 396375 - DNA, 122 bp, Homo sapiens
aaccattcagaacaccaaccaagcaattttgggtcaatagtgccacctgaaggctggcaacggtagaactgtcagatccaacgtccacccctccctccccaccatctgcagatcacctacaa

SEQ ID NO: 396376 - DNA, 122 bp, Homo sapiens
acttttaggaatccttttccgtgcgaaaggctgtttgagatcaggcgcaacaacttctcccgctcaggttaccctcagaaaggctatggaccccggactccgccccagattgcataacaact

SEQ ID NO: 396377 - DNA, 122 bp, Homo sapiens
gcggcccggccctcaggcgttcctcggcgggatttaaagggaccgagctccattcctgcacgccaggccgcgcgcggcaggagttgggcttccgggaggaccctggctgggggcttagcaca

SEQ ID NO: 396378 - DNA, 122 bp, Homo sapiens
gatgccgacatcgaccccacgatggggacagaccctggggatgtgtgatcctgagtcggccggggccccgctgttctttgggagctaaaatctgccatttcgcttagcagagaccccagttc

SEQ ID NO: 396379 - DNA, 122 bp, Homo sapiens
cacaaccaataatgtttgagtgcctactgtatacccagcacctactctatcctttagctgcggaagatgccacactaagcaatacaaaattgcctgaatgcagcttcaatcctaccattgaa

SEQ ID NO: 396380 - DNA, 122 bp, Homo sapiens
ccttcctggggttctggggcctgggccaggacagttaggctaaactgactctaggccacgcggaccccgtggggcggggcggaacctggcagggcgccagtgaccgctggggccagagccct

SEQ ID NO: 396381 - DNA, 122 bp, Homo sapiens
gggcaatgccacgagctctctgaggggcgttgagtggagcgacttgtccccgctccacagcggagcaccagcccagtggacacccctgggtgtgaatatgaacagcacagcccgcccccagc

SEQ ID NO: 396382 - DNA, 122 bp, Homo sapiens
gcctagaagggcgcccggccacggcgacccccaagtactggctgaatagtgaatgaactccgcttggccgcacttcagtctatctgggcactgaaagatgcgacccgtggagccgcctaaga

SEQ ID NO: 396383 - DNA, 122 bp, Homo sapiens
tgaagccgcagaccttcacagtgagtcttatagctcttaaagccacagtgagtcttatggcggctccagagttgtttgtttctcatggtgggttcctggtctggctggcttcaggagtgaag

SEQ ID NO: 396384 - DNA, 122 bp, Homo sapiens
catcagctctatgggtctccagcacccctccagcttctggcaggcgtgtgaagaatgggccggcccagggccaatcagccagctcgtcatcacagcgagggtggccaggcttgtcccggaag

SEQ ID NO: 396385 - DNA, 122 bp, Homo sapiens
agcaacttcaaaacgtgcacatttggggttttctcataaaaacttttttcaataaatgtccgttactgcctcatttattaaatattccagttagggctgccaacagccacgctgagcagcca

SEQ ID NO: 396386 - DNA, 122 bp, Homo sapiens
gtgcagtgcctgggccccatggctgagtccttactcgcatgcttgccagggcattgctcccggcacgaggccgcccgcctgcagcaggcccgcaggggcacggtgggtccccgcccgctcct

SEQ ID NO: 396387 - DNA, 122 bp, Homo sapiens
accctgactttgcctccagagcctggattactattgttgttgtatatctaatatgtgtgacgtctgcttaaaaatgcatatcctctgacacaaaagatagccctaattttgcactgtaaagt

SEQ ID NO: 396388 - DNA, 122 bp, Homo sapiens
agggctactcggatccctgccgccaccgttcttctctcctcttttgcaaagtgtagaaatcgccttttagatatacataggaagataaatgaccagaaatacagctgtggtgcggggctgtg

SEQ ID NO: 396389 - DNA, 122 bp, Homo sapiens
accaccgttggagcatcggaggagcatcggaggagccctagctctggcctcttggctggacgtcactgtttcaggccgagcagataaaagcagaaggcattgaccgtgagccaagagctcag

SEQ ID NO: 396390 - DNA, 122 bp, Homo sapiens
gggcacactcaggtacccagtgaccaaccactatagggctgggtctctgcccctacctgccgtcctgcagatttgaaacagggccactgtccacccacctagtggcccctctgcctatgacc

SEQ ID NO: 396391 - DNA, 122 bp, Homo sapiens
ttagctggtttttactgaatttacgcttagcagagacctacagaaaaatgagatccagctcgccgctggagggaacagctctggcctcccagtgacgctgatatagacgcgaggctggagtg

SEQ ID NO: 396392 - DNA, 122 bp, Homo sapiens
ggaactgcagggtctagggtgttgtcggagtggcagttggtccgaatttctcccgaagcccgcggaggagcgggtaagagccccgcgaatccggccccaacctcgggaacgggatgggaggc

SEQ ID NO: 396393 - DNA, 122 bp, Homo sapiens
gaaagagacatctcgctctttctctctccctcttgctttttattttttcctttccagttgcgtctttcccaattgtaagactgtcatctcttggcatgaaatgcatttgtttttatttttaa

SEQ ID NO: 396394 - DNA, 122 bp, Homo sapiens
tatgagctgtaacactcaccacgaaggtctgcagcgtcactcctgaagccagcaagacaacgaacccaccaggagggacaaacaactcccaacaggaggaacgaacaactccagatgcgcca

SEQ ID NO: 396395 - DNA, 122 bp, Homo sapiens
gccgagatgctagtcggttcttggtgcacttgttcacttgctttatggccacaggaacaccgcggtaagtcgccttgtacaccgagccaaaccctccagctcccagcctctgcagcaagcac

SEQ ID NO: 396396 - DNA, 122 bp, Homo sapiens
tgagaaatcagcctctcacttccggactacaagcccctgaatgcaatgggcagcgaaacgcggccgaagagcaacttcggatgtacggtttcggcaacactgatcaacgtgtcttaaagtca

SEQ ID NO: 396397 - DNA, 122 bp, Homo sapiens
cggacgcccaaagaccgcgacgggctggcgccgggcccccagcgccccacgaccttcctccgaatctgcccccgcaggctccgcggctcccccgccccgcgccccagccccacggccccgcg

SEQ ID NO: 396398 - DNA, 122 bp, Homo sapiens
ctagtaccagaagcaggggcacaggccctcccacaactacagccactactacaggaccatcgaggacctgcgggacaagattcttggtgccaccattgagaacgccaggattgtcctgcaga

SEQ ID NO: 396399 - DNA, 122 bp, Homo sapiens
acagctaacactgatggcctgcaaagccaccttgctccactagagacaaagtttgctgaccgctggcatagaagataagagcacaaattctgaaaccaaactgctagagtttaaatcccagc

SEQ ID NO: 396400 - DNA, 122 bp, Homo sapiens
tcccgcgtcccagcaccggtccagaaagacgtctttcccgcgtcccagcacctcgggccacgctccttcgtgagagcgccctctccaaggaggccggccctggatatttcacccaaaatatt

SEQ ID NO: 396401 - DNA, 122 bp, Homo sapiens
aaagaggtctacccgagagtgcgacgcgcaatgggcgggacttccggcgtctcccctcggcggttgctttcgctgccctcaagagaactcagcttgccggaagctggttgttcgctgcggcg

SEQ ID NO: 396402 - DNA, 122 bp, Homo sapiens
agatgtgggagatacccagctgccctcaccttgctctctctcacctccgtgggagcactccggccaccccaccttgttcccgagtctacctccatagcctggcgctgcctgtccaggctgtg

SEQ ID NO: 396403 - DNA, 122 bp, Homo sapiens
gagatgcaatactactcagttacgaggtgtgtagtgctagcacgagaaacttggaggacgcgctgacaagccgggctgcagtctccgggtcgccccgccccgccctttccctgccgccgtgc

SEQ ID NO: 396404 - DNA, 122 bp, Homo sapiens
cccaccccgcgtgggactcgctgcgggactgccctcttctcgccccaaccactggtcctccgctctgtccccaggggccctcaccagcttcccgcccggacacgccaggtgtccagatccct

SEQ ID NO: 396405 - DNA, 122 bp, Homo sapiens
attatgcgatcacggatcagtcagagcagggtcaggagacggggctgacggcacgggtggcggggacagacgtttgggacttggccgcgactctctgcttctctccagctctcaatctgctg

SEQ ID NO: 396406 - DNA, 122 bp, Homo sapiens
ctacggaggcccggtagggccttgatttctccaaccgcaagcaggcagcggtgcgggtgacggccgtactgcaaactcggtgcggcgaaggtttagttcaatcacccggttctagaagccgc

SEQ ID NO: 396407 - DNA, 122 bp, Homo sapiens
atagaagtgatcaataatacaactgttcagcttcatactcctgagggctacagactcaaccgaaatggagactataaggaggtaattctgatttggaccaagttgtttttactcaatatgtt

SEQ ID NO: 396408 - DNA, 122 bp, Homo sapiens
ctggtaaaaaaggagctgagccttttagtttttggatgtagggtattccgaggaaaggggcgtgacttggccaggggagtgtgttcagcgaaggctgagttccttctgctacccacatgcac

SEQ ID NO: 396409 - DNA, 122 bp, Homo sapiens
cccgccgcccgtcgaccccgcttccatgtccctggcggacacagctcccaggaacctccacgcccatggccactaggcagagggaatcctctatcacctcctgctgttccacctcgagctgc

SEQ ID NO: 396410 - DNA, 122 bp, Homo sapiens
cttctgctgcggttttccatgctccatcagcatccctgggttccttgtgttcttccagtccgccctctgtcaccttgcagacggctttctctccgaatgtctgcaagtgtcagaggcgagga

SEQ ID NO: 396411 - DNA, 122 bp, Homo sapiens
ggagggtggtcactgtttggcttaggccaatcagcacatcctattccccttggccacagtcgttggttccaggatggtcaggtgacctaggcagcccaatcagggtgactttcagggctatg

SEQ ID NO: 396412 - DNA, 122 bp, Homo sapiens
tttttttttttcttctcaaagtcttgccctgtcaccgaggctggagtgtagtgaagtgctcgtagctccactctgcagcctcaaactcctgggctccagtgatcctctcacctcagcctccc

SEQ ID NO: 396413 - DNA, 122 bp, Homo sapiens
agggtcagaatgagcacgtacacaggaatggaaggtctcaccctcaaggccaaaggcctgcgacacagagagtgtcacaagggcttagaagaggaggaggatgtggctttcctaggtaagca

SEQ ID NO: 396414 - DNA, 122 bp, Homo sapiens
tcagagaagcaaagatgcagctcagaagtagcattaggatcttcgtcccgttctcttttgcgtagcttcaaaaaggcgtaacagtgacctgggaggggagatgaagagctaggcctttcaga

SEQ ID NO: 396415 - DNA, 122 bp, Homo sapiens
ggcagggctgggatttctctcctgatggcagggataaatttgatggaattagcctgcaaacgagttatttagggaaggtgaagcgggggttggtggcagggtcctcctatctcctattcctg

SEQ ID NO: 396416 - DNA, 122 bp, Homo sapiens
ccctggctggccatttgacatggtcctttgctgcccctgtaaccttacacataataccagcgcctttgcccctcaggcaacatgtttggtgtgtactcccagcccacaatcctatgttccta

SEQ ID NO: 396417 - DNA, 122 bp, Homo sapiens
cccttcctagcgttgctccctgcttggctgagcactgcggagtttcacgcctctaaaccccgcctcttcttgcaacctgtgttggcctcatctacccagcaactgtcgacgtcacacgacct

SEQ ID NO: 396418 - DNA, 122 bp, Homo sapiens
tgggtggtggcggcgatgtcttctctccgcagaactgtctcagcaaacagcagctcctctcggccatccgccagctgcagcagctgctgaagggccaggagacacgcttcgccgagggcatc

SEQ ID NO: 396419 - DNA, 122 bp, Homo sapiens
cctcccggcccgaagagcagcagccaatcagaggcatcgcctctgtgacggatgggcagccgaacccttcagtgcagccgcagaaaagaagggggtgggccccaggccgcgccggcaccggg

SEQ ID NO: 396420 - DNA, 122 bp, Homo sapiens
ggtgaagcgcggcgtgcacgtgcatgccggtgtttgcacgagggagcgggtgtgtgagtgcggctctcccaagtgtggcatggtattgcgcgccgcgtgggttaatatggggaggggtcccc

SEQ ID NO: 396421 - DNA, 122 bp, Homo sapiens
tcatcagtgaaagtcccttaaagaaagacataggcattccttgaacaacatttaaaatagcgaatgggactgtaatcttccaattgccccctactgacttgggaccaaagctttgaatcatg

SEQ ID NO: 396422 - DNA, 122 bp, Homo sapiens
cttccttttggggacatggtgtctgaggccacatccttgctgaggtccttttgtgttaatcgcctctccttatcactgctgcttcggagtgtaggaaagggagaaggagagtagggtaatct

SEQ ID NO: 396423 - DNA, 122 bp, Homo sapiens
cgacccagggtgtggctggtggcgggcagcagggctcaccaggaagtgtccccagggactcgggtggtggggggatgggagccagggatctgcagcttttccgcagggatcctgggcctgaa

SEQ ID NO: 396424 - DNA, 122 bp, Homo sapiens
gtgggagctctctaggcagaaccctcagtctctgaaagtcgggttcgtcgtccgggtctgcgcagggcatggatcttgagcgcttggaatgtgacttaactgagaaacgctactttatttta

SEQ ID NO: 396425 - DNA, 122 bp, Homo sapiens
tccaggcttcccgcccccggctagagcccatcccactctgctctctggcttcaaaagcttcggccttcacccccgagtctgccctcaggggtgtcccctttggtctggcagctcactttaaa

SEQ ID NO: 396426 - DNA, 122 bp, Homo sapiens
gaggctggagggtgtaggggtgggtctcggatgacgatctcccgggtcaccgggttcacccggtggtactggtagtagctccgcactgaagccaccacagtcagagcgatcacctgaaggcc

SEQ ID NO: 396427 - DNA, 122 bp, Homo sapiens
cgcgccgccccagattgggatccggggagggcagaggctccctcagccaggcctgggctccgcctgctgccctcccccagcccaggcccttgtggttgccaatgaaggccgagagccctagc

SEQ ID NO: 396428 - DNA, 122 bp, Homo sapiens
tcaaatccacagatgtcccacacatttaattctttttaacaaaatttctgggccgggccccgtggctcacgcttgtaatcccagcactttgggaggccgaggtgggcggctcacttgaggtc

SEQ ID NO: 396429 - DNA, 122 bp, Homo sapiens
gcagccccagggagtggcgcgccaggcgcatcacgtacaggatgcgcagcgcccgcagcacgcgcagcaccagccccaccttgtccaggtagctgttgcccgcgccgggcttgcgacggcct

SEQ ID NO: 396430 - DNA, 122 bp, Homo sapiens
ccactctgtttctctgcagcctcttgtgtcatttcagaagaaagtgccatatgcccattgcgtgatttgaagcgtgtattcccagcctgactcttggtcaccactcgttctgttatttgcag

SEQ ID NO: 396431 - DNA, 122 bp, Homo sapiens
cctcagagatttttcacctcaccagggcgcgagaatcttggaaacagccaccagggtgggcggggcaagggctggtgctccaccaatcaccgagccagcccctggaagcgctgagccgtggc

SEQ ID NO: 396432 - DNA, 122 bp, Homo sapiens
tgtcacccgcagccaggctggccaataagcacggggggcggagacacaacggccaattctcggcttcagggacgggactaaagtctcgaggcgggtcttggacagtcagcggcccaatagtg

SEQ ID NO: 396433 - DNA, 122 bp, Homo sapiens
tgctgcacggggccaactgtggccatagccccactttacaggcggggaaactgagggtcccgggagaaaccagggcccctaccccttctccagcatgtgacactctggccatctccgggctc

SEQ ID NO: 396434 - DNA, 122 bp, Homo sapiens
tctaacaagatatcaaataggggaaaagttggggttggactggaaacctgggagcaaacacgtggtgctctggggatcaccttggagagacaaggctgagtgacccccatggaacactagta

SEQ ID NO: 396435 - DNA, 122 bp, Homo sapiens
ctgatcgcttggttttccttgcagtcgcctgctgctgtcgtcgggaggtgggtgaggtgacgcaaacagccccgttgttgccctccgcgtatcccctcaccacctttgcggccatccacgac

SEQ ID NO: 396436 - DNA, 122 bp, Homo sapiens
ctctaccaggaaagccatcttgtctgacttctgtgataacctcattgttaatctggaccacgcctagtgtccttcatggtagccctacttttaagtggcaggggtatgaatgtaaaaaggac

SEQ ID NO: 396437 - DNA, 122 bp, Homo sapiens
ggttcccttgtcctcctcgaagggcgtgcgatgaggatgtggctcacttcttcagtgccccgcttctcaagcctctaggggaacatacagacaggcaggctgaggggctcccaccccacggc

SEQ ID NO: 396438 - DNA, 122 bp, Homo sapiens
attaagaaaaggcaacaaaaacactaccaggccgctaggaggaccgcctcaaaatgccgccggaagtcagaggtttgccctgttcctctgtagacccaggcagcttccggccgtcagattag

SEQ ID NO: 396439 - DNA, 122 bp, Homo sapiens
ccccgcgccgccccgcgcaggcgcccccgccccgccgtcgccgccgccgcagccaggagccgctgcaccatgccccgcatagatgcggacctcaagctcgacttcaaggatgtcctgctccg

SEQ ID NO: 396440 - DNA, 122 bp, Homo sapiens
gtgggtagagtatgacatgactgccaacatagcaatcaaggtacagccactcggtgatatcgctcctaatattcacggaagaagcgtatgatattactcccaatatcgcagggagtgcacac

SEQ ID NO: 396441 - DNA, 122 bp, Homo sapiens
tgcagaacgccatagcgacggatgacgcctgccggggaatcgccgtagcaaccagagacgcgctagatccaccaccaagcttgcaagcagaagaggcagcaagtgatgctgaaggctgtgct

SEQ ID NO: 396442 - DNA, 122 bp, Homo sapiens
gctcatcgggcagagccgagcggagctgagcagaggtccacaaggttaatttaagttacacgcattcaaacaaaattcttgctccgggacaaacctttctgccctggggaagcccactcagt

SEQ ID NO: 396443 - DNA, 122 bp, Homo sapiens
cccccgcgctctcacgccccagcacgtgcacagggagactcgcggcaggggtctccgcaacggcggcgagtagacaaagacacccccacgctctcacacgccccagcacgtgcacacagaga

SEQ ID NO: 396444 - DNA, 122 bp, Homo sapiens
ctgggcacgagtgaccgcaagaagcgatgggaatgacagcaacagcacgtgttgggcgttcgtgggaaggggtgccgtggggccgggaggaggggaccctccctgaacttgaggtcaaagaa

SEQ ID NO: 396445 - DNA, 122 bp, Homo sapiens
atctcaggccccccttcctgggggtgccctcggctctgtgccagaccccaggtgaggaggcgggtgcgcatcccctgggagcccgcgtggaggctcgcggacccggccctgcccctgtcgga

SEQ ID NO: 396446 - DNA, 122 bp, Homo sapiens
caacacgcgggttgggcttgaggttcggcacccgggcagcctcaccccccgcgtcaggcgcgcgcacacagtaggtccgcgacccttagccctccactaggcagcccgcggggatgggtggc

SEQ ID NO: 396447 - DNA, 122 bp, Homo sapiens
gggacacgcccgttccccgcccactccccgcccctgcctggcctgcccacgcccccggcccgctcctgtcccgcctgggccaccggcgctggttccaggttttgccagctactagggacgcg

SEQ ID NO: 396448 - DNA, 122 bp, Homo sapiens
aacaggttgtacccactggcagtcagagtgacatactagccaaagattgctggagacctacgggcatgggcatctgcctggtgcccaagcctgacacccagctctggttgggaacgcagtgt

SEQ ID NO: 396449 - DNA, 122 bp, Homo sapiens
aagggaagcccccctggagggagccgccggtggaggacagtcccaggcccagaggggaagcggcaggggagccaggaagggccggtggcagggcaggagtgagaagccctgggccagaggcg

SEQ ID NO: 396450 - DNA, 122 bp, Homo sapiens
caccattctcctgcctcagcctcccaggtagctgggactacaggcgcccgccaccacgcccggctaatttttttgtaattttttagtggagatgggttttcaccatgttagccaggatggtc

SEQ ID NO: 396451 - DNA, 122 bp, Homo sapiens
gagcgacagcaagcaaccaaatggctttgctggaggccccctgcgtgcacgggtaaagctcgttgcaaaatacagtcctttcatttattcccatgttgctatttatgagacctgtcaaggct

SEQ ID NO: 396452 - DNA, 122 bp, Homo sapiens
taaggaaattaaggtccagcagctgatattctctaaattcttgttcagtggccatcctgccgtcacttgaacacgctcctgggaaattgccaaacccatttccagctccctacaacttttag

SEQ ID NO: 396453 - DNA, 122 bp, Homo sapiens
ccagaggccgggagggactgactgcaacatcaggttcactcactcctgccagggcctggccgagccctgaccacgcgagcaacgccggggcggtgggtaaacttccctgcgtgcccatggca

SEQ ID NO: 396454 - DNA, 122 bp, Homo sapiens
tcgggcttagaccccactgactcgctcccgggcaaagcaaacgatttgatcagatggccacgtgcattcttccttttcctgaaaccagcaccatagggtaaaagattatttctacttggttg

SEQ ID NO: 396455 - DNA, 122 bp, Homo sapiens
cgaatacgatggctccacaattccgagtcctatctgtgtgtgaacacgtgcacattggtgcgacgcggtgcccaccgcagtttgctgccatcccacctacctgccctgcacaaccagtgcca

SEQ ID NO: 396456 - DNA, 122 bp, Homo sapiens
ccctcccctaggccacaggcagccccgtgtccatcttcgtctatgatgtgaagcctggcgcggaagagcagacccaggtggccaaagctgccttcaagcgcttcaaaactctacggcacccc

SEQ ID NO: 396457 - DNA, 122 bp, Homo sapiens
ggaggaggcggctggagctgcgaccgcgggaccgggcgcgaggcggctgcggctgctgtgcgtgccactgacggacaaccccctgcggccccgcccacgccgcatgacgaaggcaggccccg

SEQ ID NO: 396458 - DNA, 122 bp, Homo sapiens
gccgtccattgtccctcgcatttgttctcagggcagcgaggggggtcggtagcaatcacgcgctctcttcttcataatcactataattagcgtcataatctgagctgggtgagcttggggca

SEQ ID NO: 396459 - DNA, 122 bp, Homo sapiens
ccggaaatcctgctgcgctgtttaaacctaaggtgacctaacggatggcgggagcggccgcgcgagccttggagcagggcgcggccattggtgacgcacgccggggagcacggcgcccacgt

SEQ ID NO: 396460 - DNA, 122 bp, Homo sapiens
cagagtctcgctacgtagcccaggctggaaaaccacatctttactaatgtgcgcaacccacgttaacatcctgtgagacagcaatcacatttatctcatcttcattgtatatcaccagcacc

SEQ ID NO: 396461 - DNA, 122 bp, Homo sapiens
acttagcagattcttttggctagcaacaggacaaagtagtatccttagatgcctgaaacacgtgtagggggacagagataaaaggattaaaagcatctaaccctatttctggctctggacta

SEQ ID NO: 396462 - DNA, 122 bp, Homo sapiens
gcgggagtggggagggagaccctggaactcctgagggatcggtggggctgcccctcagggcgcgggacacgcggaggaggcgggagataaccgcgagcgcgatctcccgcgcccgccagcaa

SEQ ID NO: 396463 - DNA, 122 bp, Homo sapiens
ggaggcagggagctctgcggcggccgcggcagcagtaaatggcgtcatgtggatccgaggcggaacagagcagttgttgtcccagaggatatatcgcatccggtcccagctcattggctccg

SEQ ID NO: 396464 - DNA, 122 bp, Homo sapiens
gacttctgacccagtgttgagctaaaaatgccccgccccaccctacgcagattcaccccgcgtcccacccaccagtgactgagtgactgggcttctgctgcctagggaagggttcttggctt

SEQ ID NO: 396465 - DNA, 122 bp, Homo sapiens
ggtccagagcagtgcagagacctagcggacagttttccggtggcagcaatgctcatttcccggacacagatggtttttggcccctgaagaactctttaatccctgcgttttgtagcgctcgt

SEQ ID NO: 396466 - DNA, 122 bp, Homo sapiens
catccctggttcctggaaaatcccaacagccctcccaccctctgctccagacaccgggctcgggattactgttggcttggggcctgcctgtctcagcacaagtccgtcagtgagctcttggg

SEQ ID NO: 396467 - DNA, 122 bp, Homo sapiens
aagaaaaccaaagtccctgctcttgtcaagtttacagtctaggataggaggcaatgaaatcgcaatttaacagtaacaatcattaatggtaataagtactaaagggaggctcagggtgctat

SEQ ID NO: 396468 - DNA, 122 bp, Homo sapiens
ctttattaggaatttactatgttcccggcactgtgctattgttatccatgcccaattccccggaagagaagtggaaagattccatacatcactgggatacctttaccctgatgacaaaggca

SEQ ID NO: 396469 - DNA, 122 bp, Homo sapiens
cttgcaaagcttggtgctcaggctttgcatgacttgggtctaggcatgagcctgtgactgcgggagagctacatggagggaaaaatgaggtcctttcgtatccaacctctccccttatccaa

SEQ ID NO: 396470 - DNA, 122 bp, Homo sapiens
tgaggggagtgacaactcgcgcccggtcctcgtacctgcagcgggaagagtaagtatggacgcttacctacaactgggggcggccaggctagtttggaaaatttttaccacagcaaaggaga

SEQ ID NO: 396471 - DNA, 122 bp, Homo sapiens
gtgggtaggaccacctgtcagaggtcagaggtcaggccaccaaggagacccagtgggatgcgccttccaaaggtgggggtacggatgggacccatgaaacctgactcctctcagactctagc

SEQ ID NO: 396472 - DNA, 122 bp, Homo sapiens
agagcacaagttactgctaccctgtgactcagagagggaaagtcagcacccaacactccacgcaaggcctggccaccagaccatgtggtctctccaccgtgggttgtgaccagctgtaaaaa

SEQ ID NO: 396473 - DNA, 122 bp, Homo sapiens
gctctggaatgcaacaaagtggtagaaaccactaaacaccgggaaatgtcaacaatgaggcgggaatgcatgggcaggtggatgcagcatttctaggcattttctcagacaaggcaacaaac

SEQ ID NO: 396474 - DNA, 122 bp, Homo sapiens
tccgctttctcctgaacaggtgtcaggagaccaagctttgacctccagctccctggcctccgggcgcgggccctgggctgatctggcggtggacgtgcagggcagcgggcccgcgcccacca

SEQ ID NO: 396475 - DNA, 122 bp, Homo sapiens
cttcgtcctggccccgcaccgcgtcgcgctcaccctgcgcgtgcccccgcggcgcctgggcgtcttcctggactacgaggccggagagctgtccttcttcaacgtgtccgacggctcccaca

SEQ ID NO: 396476 - DNA, 122 bp, Homo sapiens
ctgagccacaaggccagttggtccatgacaaagttgtgcaaaactggtaaacgtctgcttcggagcttgctgcttaataaatgttggtggaatgaatgaatgaattgatgctgtggtttgat

SEQ ID NO: 396477 - DNA, 122 bp, Homo sapiens
tgccggctctgcgccctgttctccgcgacgtcggggctgcctccgccgcctccccgcgcgcgtcctgccgcaaacttccagggacctccggggacaaaaggcgcagtccccagcgttgcccg

SEQ ID NO: 396478 - DNA, 122 bp, Homo sapiens
gggcgcccacggctagccggagcgccaaggcgcctcccttttctcttggtagcgtcggtccgcactccctgtgacccaggacgtcatgatgcctgtctgttttctcaatgataacttggcag

SEQ ID NO: 396479 - DNA, 122 bp, Homo sapiens
gggaaggtcttgttgccgaagcgctcgaagttgaagtggtccagacgctgctggaagaagcgctcctggaagccggggtccggggccctgcgggctgtggggggacgcgaacctcagaggcg

SEQ ID NO: 396480 - DNA, 122 bp, Homo sapiens
ctttttaagggtactcctgagataagagaacattatcttgactctaaaaaagacgtagaccgtcatctgaaatcggcctgtgagcagtttattcagcagcagaccaagctgtttgtagaaca

SEQ ID NO: 396481 - DNA, 122 bp, Homo sapiens
tacaggtgcgtgcggtgcccccatgcgagcacaggcctgtggcctgtcgcagccaagcgccggtgtccaggcttaggtctgcagactgctccggacagcagagatgaaactccttctgcttg

SEQ ID NO: 396482 - DNA, 122 bp, Homo sapiens
cagagagctggaagctgacacaaaactagttggagcagccctgtttgtcttaaagcaaggcgggtggaattccaaatgctggagaggggcatacagtgggttcccccattctacaagcttag

SEQ ID NO: 396483 - DNA, 122 bp, Homo sapiens
ccgcgtgcccggccccgcttactctaggcagttaacacactctcggcaccgggccggggccgggggcacctcgggcagtgagtcaggcaccacccttgccccaggcagcttgccgtcgggcc

SEQ ID NO: 396484 - DNA, 122 bp, Homo sapiens
tccccagcatgacagatggagcttggggagctcagccaagaagacaattggcagagagaacgtgtcccgggggctcgggaagtgctagctcagcagtaggttgggtaatcacactacctgca

SEQ ID NO: 396485 - DNA, 122 bp, Homo sapiens
gtagacagtacagttgagtcttggtgaaatgtttcttaaagtgcccaactgggtcacttgcgcactacctcctctgccaactgagttacttaccaaagttcaaaggtgtttggtaccaaacc

SEQ ID NO: 396486 - DNA, 122 bp, Homo sapiens
gaagacacgtgccccctgcggtgccactggaggcagagggaagacacgtgccccctgcggcgccactggaggcagagggaagacacgtgccccctgcggtgccactggaagcagaggctttg

SEQ ID NO: 396487 - DNA, 122 bp, Homo sapiens
tgaaaggcatctgatttcactgccatgtctttgaacagcagtgcacagtgcagtcttcttcgtggctgaacaggtatcttgtgatctttagggaatgtctattaattcattaaacaagtatt

SEQ ID NO: 396488 - DNA, 122 bp, Homo sapiens
taccacatagttttgagtacaaaataagataatatggaacaatatatttagctcagtatacgttgctatgctctgggaaaggatgataaagactttcacaattctgttttttgtctaaagca

SEQ ID NO: 396489 - DNA, 122 bp, Homo sapiens
ggctgtgtctgtggaggcgggtatgatcgcactgcgcaggggtgccacggagctcacccacgaggactacatggaaggcatcctggaggtccaggccaagaagaaagccaacctacagtact

SEQ ID NO: 396490 - DNA, 122 bp, Homo sapiens
ccaccgcagattctcatctcctcgctaccgtaagagagatgtaaagaatcagacgggttacgcgctcaggcaccctcatgaagcagaggacctgggcttaaaactcattcagtatcaggaaa

SEQ ID NO: 396491 - DNA, 122 bp, Homo sapiens
ggcggttttgcacgtatccttagtgaccctgaaggcccagcctctgctggctgcctgagccgagggttttacttcttttcatttaatcactttattggtccttgccgggagggagcccatgg

SEQ ID NO: 396492 - DNA, 122 bp, Homo sapiens
aaaaagattgaacacatgatttttacagcatttaaagcatccagaacacttttgcagacacgttcccatttgacagtcaacactctgacaggtgggacaagaaccgctttccccattttatg

SEQ ID NO: 396493 - DNA, 122 bp, Homo sapiens
cgtgtcaccccctcctagaagccctctcacattcctcagtctgaattagatccccctttccggggcttgccaatacacctgatgtgctgaccggcaattctgttgtttgcccctccctcttg

SEQ ID NO: 396494 - DNA, 122 bp, Homo sapiens
gtgacgaagctgtgattcacacaggcctgggtgactccagcatggctttcctctccaggacgtcaccggtggcagctgcttccttccagagccggcaggcaggtgacctcaccctcctcaga

SEQ ID NO: 396495 - DNA, 122 bp, Homo sapiens
gtgaattgtgttttcctaaagagcagttaaaattgagttgggagggaagtgtgactcagacgaacagaaaagagatggggtgagaacaaaaccttttccatatgaaacatattagaggcatc

SEQ ID NO: 396496 - DNA, 122 bp, Homo sapiens
tcccgaggtgggggctgagaatcgaagagcagcgccccccacactgggattgggggtggtcgaggggctacagatgcccgcattgggcttcttagcggcctaggctgatgcctggaggtagg

SEQ ID NO: 396497 - DNA, 122 bp, Homo sapiens
actctcccacagatgagtctcatcatcagatagtgaaaggggcaaaggagaaaacacagacgttgaaagttgggaaaagccaggccagaagagcctgggagccctaataaaggtggggattc

SEQ ID NO: 396498 - DNA, 122 bp, Homo sapiens
taaaaaggccagcagcggtactctgtgattagagtccaattgaggagctgcaggagtcatcgggcgagagcccagtctcaatgaggctgtgagtggcttcacagctggccaggaaacctttc

SEQ ID NO: 396499 - DNA, 122 bp, Homo sapiens
caccagatgctgactgcttgttttgcagtgttcaggaaacaccattttcctggctcttaacgcttttgtattggtatggaaaagggctggcagctatagaacaggagatccatagcattttg

SEQ ID NO: 396500 - DNA, 122 bp, Homo sapiens
ccagcaatatcccaaatacagactgctggtcccaggatggaaaacttagagcaaagctaccggtagcccacaatgtgagcaagaactgaactttagtcattgtaagccactgagggttttgg

SEQ ID NO: 396501 - DNA, 122 bp, Homo sapiens
ccaggggttttgactggcctgaccccaccttgcccttccagatcgctcaccacatcctcccgaaaagtgtgtggaggaattcaagtccctgacttcctgcctggactccaaagccttcttat

SEQ ID NO: 396502 - DNA, 122 bp, Homo sapiens
tctggacccttagagttgtaggactgcttgcggttcgcacctccacgttctcctgggccacgtgtgtcacacagtcgtgcgatggggctcccacgcgcgttgacgccagcctccgaatcaca

SEQ ID NO: 396503 - DNA, 122 bp, Homo sapiens
gcgttcccctgagtcattctcacacccttctccctgtcaacatcaacccaccctgacctccgccactgccaaacgtccaccgccctgcgttctgaatcacgcggtctagcacatagggtggg

SEQ ID NO: 396504 - DNA, 122 bp, Homo sapiens
gaggctcgcccagccgcagccttgaccaacgtgaaccaaaaaacggcagcaagcctcatccgccttgaggccccagggccgttcagcaagttcacaactgacggggagttgacgagggtgca

SEQ ID NO: 396505 - DNA, 122 bp, Homo sapiens
aaaagtacaggagatatggggtggatagctggagaatgctgtgaccacattatcatattacgagacactgactggcatgccactgattgggtgcagggactaggtatttattgagtagctcc

SEQ ID NO: 396506 - DNA, 122 bp, Homo sapiens
cacgccgactgtgcgccggcctgtcaatcaccgggagcagcaacagggagcacatggcaacgggctgcgggcgagctggccagcggcccgcccggggtcccagcccttcgaagaaagggaca

SEQ ID NO: 396507 - DNA, 122 bp, Homo sapiens
ggcctagtgtggggagatgggaacattcaggcgtcactgcctggctgccttgtgaagttgcggattaaccagtgatgcagcggctggtctagccgtctggtccctgcagatggatggatgaa

SEQ ID NO: 396508 - DNA, 122 bp, Homo sapiens
acagtcaccatgttctccatagacacgtcagtgttgcgcatgccacagcacttcttaatgcgcttcagcaggtagcgcacgaaggtgttcatgcgctcgcccaggctctggaacatgaccag

SEQ ID NO: 396509 - DNA, 122 bp, Homo sapiens
gcagtgagaacagaatccagcacacagtaaatgctgcttacctgtttgctatgtggaatacgccactacactgttgctcggccctcaggaagggtctgctgagactttctacttcctgctca

SEQ ID NO: 396510 - DNA, 122 bp, Homo sapiens
atgcagtgtctggacatacatttcagctgggcacatgaactggctggctccatcaaccagcgtgtattgagcacctatgtcaggagcactgtagaaatggtgtggcctagggcaactcagga

SEQ ID NO: 396511 - DNA, 122 bp, Homo sapiens
gcagaggaagttggagacttaccttcaaaaccacttcgctgaagaagagagaagcaagtacgactacctcatgatccttcgcagggtggtgaacgagagcaccgtgtgtctcatggggcatg

SEQ ID NO: 396512 - DNA, 122 bp, Homo sapiens
acacataaattcacagttgtaactggtgatttcaataacccttcgcaataactgacagaacgcgtagatggaaaataagtaagcatagggaagatgagaacaacactatctaccaccttgac

SEQ ID NO: 396513 - DNA, 122 bp, Homo sapiens
agcattcttagttgaagtttcgctttaaagataatgatacagatgcttgcggaggacaggcgttatgcaaagattggcaatcctttgacgagcccaggtagtacagcacgtctcccccgtga

SEQ ID NO: 396514 - DNA, 122 bp, Homo sapiens
ctgctctcctccctgccccgtccctccctaaccttgaggcttcttgaggtgaaaacctggcgtgtctgacactggtgacgaagttcgtgcgccaggcttctgctggcacttccagttcctct

SEQ ID NO: 396515 - DNA, 122 bp, Homo sapiens
ccgtgacagcggcagtgcattgtggggcttgtagtgcgggactgggtctgggtgggtgggcgcggccgcagcagtcgcagcggggccatcttcggcgggcgagtgggctcggcctgtgcaac

SEQ ID NO: 396516 - DNA, 122 bp, Homo sapiens
cccaactaaatcaaaaggtggcttgcactgggatctttttgactttacaatgggtttatccggatagtaaatgcatttttttacttgagaagggtttatcctgacagtctcatcataagtca

SEQ ID NO: 396517 - DNA, 122 bp, Homo sapiens
aattggtgggttcttggtctcactgacttcaagaatgaagccgcggaccctcgcggtgagcgttacagctcttaattaaggtggtgtgtctggagtgtgttccttctgatgttcggatgtgt

SEQ ID NO: 396518 - DNA, 122 bp, Homo sapiens
tgagcagctgaggtgggatgttaagtcaaatccagttaggctcttgtctggccaggctcccgctggcccaatgctggatcagataaaattacaggtggggtcctatgggacagcccagcagt

SEQ ID NO: 396519 - DNA, 122 bp, Homo sapiens
gtgtggatatcacttacacttccaataaaagatgacagcaacgtggactcgtcaagtggacgccatggtctccaggtgaagccactttctattcagcaaaagagaggaaatggagggtgata

SEQ ID NO: 396520 - DNA, 122 bp, Homo sapiens
ccacccggggcggacgcattgcacgccgggagacaaaatgtctcaagaagccttgagaggcgggattttggaacccgggcgctgacgagcttccgccattggtgtgatcgcggacctagaaa

SEQ ID NO: 396521 - DNA, 122 bp, Homo sapiens
gccctcgggcccatcctcccgggcctccccggggctgctgctggcgttccagctgttggacgctattgtgctggttgctctgggctctgggcctgagcccactgggcggctgagcctggggg

SEQ ID NO: 396522 - DNA, 122 bp, Homo sapiens
tcaggtctcccccgcagggcgcacaggagcctccgggtcggcactcccggcagcggagggcgtaggtgaggtcctctcggccaccagactccaggggggcactccattccaggtgcagggag

SEQ ID NO: 396523 - DNA, 122 bp, Homo sapiens
atgaaatggtaaagcagcagactgtaaggtctttagagattttttttttaaggttcaggccgtaggttcctcaaggaatctcttaagttttgcccaaagactggtacttcctttcagtaggg

SEQ ID NO: 396524 - DNA, 122 bp, Homo sapiens
attttcttcatcattttgttacagaaagctgtaggatagttttaaaggatatcattttctcgagctgtagtttctgtctgttctgttgtgtttttgtgaataatgaggcacagctgaggagc

SEQ ID NO: 396525 - DNA, 122 bp, Homo sapiens
ggccaccgggaaggggctgggggcacacgccggggagcgggggacggagttcggcggcggcgattccaatataaagtgaaacaagctcccagcgccgaaggaggcaggaaaaacccagcgtc

SEQ ID NO: 396526 - DNA, 122 bp, Homo sapiens
gaagctcgttctgactgacaagtctacggaacctcggagtcaaaagaaccgccataagctcgcgcgctggctcctcccctggcaccatagccccgccccacctgacacccggggcggagaga

SEQ ID NO: 396527 - DNA, 122 bp, Homo sapiens
ccatcaccaggtccctgctgcatggaccgtgtctctaatgctgggctctcgctggcaaagcggggagtctcggggcgccacggagtagctcagggctggctgcagggagtctggctgaggca

SEQ ID NO: 396528 - DNA, 122 bp, Homo sapiens
gcccgcccgccgggcttcgggaggcaaaggtggcggcggcgcaccgcggagtaggggctgcgggaccccggcccctcagggctgcggccgggccccctccccggaaacagcaatgcaccacg

SEQ ID NO: 396529 - DNA, 122 bp, Homo sapiens
tgccctgggctgggggtctggcccagggtctcacccagggtctctggctgctgaggctggcgagggggcgcggggggggctccccctgcagccgaggtcagcaggccgcgggccgggacatc

SEQ ID NO: 396530 - DNA, 122 bp, Homo sapiens
gctctgttctccaccctagggaccagaaggagccaggagtaaagaactggcttacttggccgccactgggaaattctgggtaattcgagacgccctggaatttggacccactccgctgatag

SEQ ID NO: 396531 - DNA, 122 bp, Homo sapiens
gcggtcggtagtctctcctccccgcccatgggcggtggttggaggcaggggtgcggaatccggccgacctcgctgtcctcgccctctaccttgtggcgtcggtggggttggggagatgagtt

SEQ ID NO: 396532 - DNA, 122 bp, Homo sapiens
cggctcatggcgttggtcactggcaggctcagagacattctgctgtgggcgcagggagcccggccccccatgcagccatgactggatgcgcccccatctcgggggcttgctgcactgcttgt

SEQ ID NO: 396533 - DNA, 122 bp, Homo sapiens
aatgaaactctgtctcaaaataaataaataaataaataaataataaaggtaataaacttacggggaaaagagcagattgggatgtgactccatttgttacatcacagctaagctgcaaccac

SEQ ID NO: 396534 - DNA, 122 bp, Homo sapiens
ggcggggaaggctggaggctggggacgcagccaggaaagggacctgtgagtttcgccggccgcttgccaagacttggctcaaggaaagtggtcccctgaatcaatgaagaatttgttaaacc

SEQ ID NO: 396535 - DNA, 122 bp, Homo sapiens
ggcatcattattgggaccatcttcatcatcaagggattgcgcaaaagcaatgcagcagaacgcagggggcctctgtaaggcacatggaggtgagttaggtgtggtcagaggaagacgtatat

SEQ ID NO: 396536 - DNA, 122 bp, Homo sapiens
gacaggggactggagagcaggaagacaggagaacaaggagatttctcctccttcagcagccgcagcagcaacggcgtgtcctccacagttaactggaagaaaaagcctgagtcctggtctcc

SEQ ID NO: 396537 - DNA, 122 bp, Homo sapiens
ggtgccaaagtaattgcagtttctgccactatattcacagagcccatcacatgtctgctgcgtggtcctcggtagtgacagtctgttcaatagggtcaccatgagggcaggctcctgaaacc

SEQ ID NO: 396538 - DNA, 122 bp, Homo sapiens
ggccagccgcggtccagagcgcgcgaggttcggggagctcggccaggctgctggtacctgcgtccgcccggcggtgagtccgcgggcccccggccgggacgcccccgccacctgcgcgcacg

SEQ ID NO: 396539 - DNA, 122 bp, Homo sapiens
gacttagaggactgtgggatcgtggattcccaactcagcgccatcctgcctgccctgagccgctgctcccagctcagcaccttcagcttctgtgggaacctcatctccatggccgccctgga

SEQ ID NO: 396540 - DNA, 122 bp, Homo sapiens
tcggtctcaatggcagtgggaagagtacggtagtccagcttctgcagaggttatatgatccggatgatggctttgtaagtgcagctagcaaaaccatgcacagtccacctaatggaatctgg

SEQ ID NO: 396541 - DNA, 122 bp, Homo sapiens
ctggggtctctccgcttaggctgcaggctgggcatcctttttcaaactcttttagcacagcgaagtcgagggcactgggtggagggtgcttgcttgccctcagggtgagtcacagtgacctc

SEQ ID NO: 396542 - DNA, 122 bp, Homo sapiens
cgtctcccaatgagagggctctcaaaatgaagcttttaataaactccagagtaaggaactcgggattgtgcggcaaaggccgcgcattgcactttgtgagcaatcggtaaatatgcgcaacc

SEQ ID NO: 396543 - DNA, 122 bp, Homo sapiens
cctttggtgaatcgaggcagaagtggctggtggataactgggacccaagagttatctcagcgtcgggcaggcatcgacagctccaggagccctttccctgcaggcgggctggcgggtgagcg

SEQ ID NO: 396544 - DNA, 122 bp, Homo sapiens
aaccccgccgccggggacatgtccaacccctgaagccggaggaacgggccagtcagactgcgcccgacaggtgatggggagcggcggccgggctgggcagccgccgggtgggcgagctggcg

SEQ ID NO: 396545 - DNA, 122 bp, Homo sapiens
tggtcagtgtctgtctggagcatgactttaccaccttttgcagtgattctagtactaatacggcattcactcttcattcatgcatgcattcattattaaaaaatgataactgcttggaagga

SEQ ID NO: 396546 - DNA, 122 bp, Homo sapiens
ccacgtcgggcgcagggagccaggggtcagggctgcgccttccccagaggccgaggagcccgggcgggtccggctggggcaggggcgcagggagccaggggtcagggctgcggcttccccag

SEQ ID NO: 396547 - DNA, 122 bp, Homo sapiens
gtggtgggggcgggggggattgaaggatactgggaggggaggcgggggtggtagggaagacggagcacgaatggttggggttctaagcagcacgtccgatgaaatgtcttttgcctcctttt

SEQ ID NO: 396548 - DNA, 122 bp, Homo sapiens
ccacgccgaggatagattgagcgcagaactaaccgcgctctgaaaggttctaaatgtctgcggggctcagagccggatgtcacgtcgtcctcctctgccggttttctcttgggtccttttcc

SEQ ID NO: 396549 - DNA, 122 bp, Homo sapiens
acttctctttcctaagagtttcggaataagccctgaaatttggctttgactggggcaattcggtccacatgctcatgtccaaaataatggctttggtcaggcgaatgggatatgctggtcag

SEQ ID NO: 396550 - DNA, 122 bp, Homo sapiens
acatgtgttgattattgcacttcattcttgcccatcttaacatgctaatatattgtactgcgtggcagtgcttgtgccaagatgtaaacacaaattaccagtgtgtcccagtacataatgcc

SEQ ID NO: 396551 - DNA, 122 bp, Homo sapiens
tggatctccagttgttatctaggtgctgcaggtttagagaggattgccaggagaacacatcgatttttcaggcctgtgatgacgtatctcttgttgaataagtaaacccttccagtaaacag

SEQ ID NO: 396552 - DNA, 122 bp, Homo sapiens
tcctcacttctcagacggggcagcccggcagagacgctcctcacctcccagaaggggtggcggtctggcagagacactcctcagatcccagacggggtcgcagctgggcagaggcactcctc

SEQ ID NO: 396553 - DNA, 122 bp, Homo sapiens
cagcttccctgttgctaagggaggagagaggcaagcgcccagggtctggagaagcggaggcgctactggaaccgagcctgcggaagctggaagtgaagccagcttctacccctttttctggg

SEQ ID NO: 396554 - DNA, 122 bp, Homo sapiens
tgcctctgctttggacagatttaggaccacagccgggaaaaatgttggagaccccggaaccgccatgaacagcccccaccaaggagcggcacttccggccccgcccgctacgtaatcagtcg

SEQ ID NO: 396555 - DNA, 122 bp, Homo sapiens
ttcacaccattctcctgcctcagcctcccgagtagctgggactacaggcgcccaccaccacgcccggctaattttttgtaaacagcatctttggaaagagattttggtttgttgaataatat

SEQ ID NO: 396556 - DNA, 122 bp, Homo sapiens
agcaggaggactgctgggagaactttgtggtgctggggcggagcaagtccagcttgaagacgctcttcatcctcttccggaacgagacggtggacgtggaggacattgtgacttggctcaag

SEQ ID NO: 396557 - DNA, 122 bp, Homo sapiens
aaaattgtatgatttgctgatttctctaagataactctctggtgcatttctggcctcagacgttcacagtttcctcacatgttccttcccccaaatgtctgattttaaaaagcagtggtttt

SEQ ID NO: 396558 - DNA, 122 bp, Homo sapiens
gaagtgacgcaccgcccccctcctccccagccttagccgcggccccgcccccccgggccccgccctccgcctgcgtctccagccccacggctttcggattggggcgccatcttgacgatggg

SEQ ID NO: 396559 - DNA, 122 bp, Homo sapiens
gctgttctgggtcaggcatggctccagggacttgcattcagcctctgcctgtatgccccccgtgacaggatgcttgctccttgctgaggcagctcacaccatcctgggttagctttggcatt

SEQ ID NO: 396560 - DNA, 122 bp, Homo sapiens
taggagggccgggagcggtcagctgccgctgccccggggctgggaggaggccagggactacgacggcaaggtcttctacattgaccacaacaccaggaggaccagctggatcgacccccggg

SEQ ID NO: 396561 - DNA, 122 bp, Homo sapiens
tgctcccctgaccgcaacccctacccccgcccaccagtatggcccggcacgtgttcctaacggggcccccaggtaaccctgaggggatccccacctccaagaggtcgagggggtgggggcgc

SEQ ID NO: 396562 - DNA, 122 bp, Homo sapiens
gccggcctcttcctaaatcccgagcgaaagcccaagctgaacatgaactctgcccggaggcgacgggctgcggcggagggggagagagaggaggacaggctgcgaccccgggctggggacgc

SEQ ID NO: 396563 - DNA, 122 bp, Homo sapiens
cccaagaggaagcgggggctgagcaagaaggagggctggaggctgggctcctgctagggccgggcctgcgggtgaggccttgtggctcccactccagaactgggaatgttgtctcagcggga

SEQ ID NO: 396564 - DNA, 122 bp, Homo sapiens
acacacataaatactattgttattgcagcagatgccttttgaatccattttccataattgcggatagtcataaattgcttgctcaatttttagtaattattgctgttgacaccagcgttgta

SEQ ID NO: 396565 - DNA, 122 bp, Homo sapiens
cgcaggccagttttttttaaatggggtaaatgattgtccaagcgcctccaggcaggctcacgtgcacactctggagtcagtgaagaaggtgaacagctgacaggagcagcctcccagtcaga

SEQ ID NO: 396566 - DNA, 122 bp, Homo sapiens
ccgatttaacttcattctggcgagtaccaacagcgaccagctcttcgtagtgaaccaggtcgaagtcgaaggctccaagtacggcatcatcagcctgcgaactctgaagatcccttcgttcc

SEQ ID NO: 396567 - DNA, 122 bp, Homo sapiens
ctagggctgccataacaaagtgccacagcctgggtggcttcaacaacagaaacgccttgtcgcccagttctggaggcaggaatttgagatcgaggtgccagcaggttggttccttccgaggc

SEQ ID NO: 396568 - DNA, 122 bp, Homo sapiens
tccgcacctctctgctcctcctattcgacagacagccacatcttcttgtgcagtgccagccgcatccctaagacaccatggttaaagtgaaggatggagtaaatggttttggccgtattggg

SEQ ID NO: 396569 - DNA, 122 bp, Homo sapiens
aggccaaattagacaaccaggactctgagaccggtaaccaaccttgagcctggggccagacgcaggccttggcaatttaaccaagagcatcctctgagtgggagggaagatggctttgatac

SEQ ID NO: 396570 - DNA, 122 bp, Homo sapiens
gagtggagacgctgcaggcccatttacggctggggagacggaggctttcgcttgggtcttcgggaagccgagctcccagcgccggccgcggcggtcccgccctcgcgccctttgagctgcgc

SEQ ID NO: 396571 - DNA, 122 bp, Homo sapiens
acctccgcccccctcccagatgaggccacagagtttctggctcctggaggaggtgacgggcggagagggaaaccaggcggctgggggaggggcgttgcctgcacctggcccttctccgccgc

SEQ ID NO: 396572 - DNA, 122 bp, Homo sapiens
gagatcctaaatgaagagggaggtgagtcctggtggccccctacccccaggagagctggccgcaaatccatgatctgtgttgggccctcggggctcagtcatcggccagggtgatgacgtcg

SEQ ID NO: 396573 - DNA, 122 bp, Homo sapiens
aatggaaaaaatatccccagaagatcgtggtgagaatattgggaaacacaaagtgttacccgcagtggtagacattgagaaaatacatggaacaggactagaattgaccactaaacaagggg

SEQ ID NO: 396574 - DNA, 122 bp, Homo sapiens
tgtgtactgcacatctgtcagattttctcaagcacacccgtgtttcctcttcacctcccacgtggaagtgatgaattggccaggaccatgttggtgagggacaatcatcatctcatgttaac

SEQ ID NO: 396575 - DNA, 122 bp, Homo sapiens
ttaggagacgtcactcccgcgcataactgacatggggccctcttggtcggcgtttccgggcgggtccttccgacggccgccgcggtgattccatcactcggctttcttcccggcctgcctcg

SEQ ID NO: 396576 - DNA, 122 bp, Homo sapiens
cggagggggccggggcggggcgctgcgggatggtctggtccggtcaggtcctcacagtggcgcctgagggctgaggctcccgctccagcactgctccgctccggccgcatccaggccccgcc

SEQ ID NO: 396577 - DNA, 122 bp, Homo sapiens
tagggggatgggattatgctgattaagagtaggtccaaccctttatgaactctggctttacgatgaatgaggctggcattaatgcctgcaaaaatggacaaacttgctgtttgaatttattt

SEQ ID NO: 396578 - DNA, 122 bp, Homo sapiens
gggatgtgggagtggggggttgggggaggtggatggggagatgttggtcaaaggatgcagcgtttcagttaagaggaatagatgaagagatctattgtacaacatggtaattatagttagtg

SEQ ID NO: 396579 - DNA, 122 bp, Homo sapiens
gtgactcttttttaagggggagctggacagctctcgtcggccttcaccaagcgcccacttcgtgtccggcctcaggccacacaaccagaagggcccgggcctagaagcccgagggctcgggg

SEQ ID NO: 396580 - DNA, 122 bp, Homo sapiens
ccctcagacacgagcaatccttctggccgctgccagtgtcctaataagggaatgaacaagcgcctattggtgagggaaggggagtcaggcggtggatgatatttttgctgattaaagaggat

SEQ ID NO: 396581 - DNA, 122 bp, Homo sapiens
ctccgccttaccctctccacccacgggttcggagcccccaggagcagtcagaccgatcaccgctcctgcagcctcatttgtttccggagagacacccacaagccagcccacggagagtctgg

SEQ ID NO: 396582 - DNA, 122 bp, Homo sapiens
accgtatgtacggggagaagcgttttgccgacgcagcttctctccttctgtccttgatgacgtctcggattgcccctcggtctttctggatgactctgctgacagacgccttgccccttttg

SEQ ID NO: 396583 - DNA, 122 bp, Homo sapiens
ggcctggtcccaggggctgttgtggggagttgaagaacaccctggcctcctccatcatgtcggccaagagggcagaattgaagaaaacacatctggtaaaagagagacattgctggacagtg

SEQ ID NO: 396584 - DNA, 122 bp, Homo sapiens
acacaggctgcaggattccacctctgctcgctgggtgccatccaggccatgttacacccccgttgcttcttggaatgtgctatcctgtctccagcagagcagggctagtctttggctagtct

SEQ ID NO: 396585 - DNA, 122 bp, Homo sapiens
aggcagggtaagagaccaggggacctgcacggaggagcgctctaggggaggctgctgcctcgggagctagggcgcgcccggaccacaccgcacggcgcagaagcccagcgcgcacgcgcgcc

SEQ ID NO: 396586 - DNA, 122 bp, Homo sapiens
ccatctcctggcttgattccttgtgctataaaaaatcttccactggccctttgcatctctcgccctccatcccccaaagccactatcgggaggggacaaaaataatttctgaggggccatgg

SEQ ID NO: 396587 - DNA, 122 bp, Homo sapiens
gggctctgcctcgtcttccagaaccgttcaaacatctggatgtgtttagcccttttgattcgagttgagcaaatctggagcttgctttttgtgcctgttgaagggcaaaccttcctgtgtct

SEQ ID NO: 396588 - DNA, 122 bp, Homo sapiens
acagtactcgcccaaggtcacgctgcgagtaagtggtcatctgtccattccctagagcctcggtgaggggggttgtcgggcatatttacacagttggcatttcccctttacctactatggga

SEQ ID NO: 396589 - DNA, 122 bp, Homo sapiens
cagggtgactaagcgagttagtgactgcgcggaaaacgggcttccaaggttcacaaggctcgtgctgcggctccgggagttatgtcacagtaagcttactatcatcctttgggcatctgctt

SEQ ID NO: 396590 - DNA, 122 bp, Homo sapiens
ggtgaagcaatttgcttaaaggaatgcatggcattcaacaagtatttactgagctggtatcgtctgccaagctctgcacggtgctgtggacacaggcagtgagccaatgagcccctgttctt

SEQ ID NO: 396591 - DNA, 122 bp, Homo sapiens
atgtgagtggctatatatgttccttcctttaggatttgcaaggctggagcacaaagacagcgattgttacccaataagcagtagtcacacacttctaccaatcgccttaggagggctggtta

SEQ ID NO: 396592 - DNA, 122 bp, Homo sapiens
gagccgccccccatcaccatcaactggctgcctgccctcagtagaaaccccgagttaatccggaaaacgtggggggaggacgggaggggagtagggattgagattagggaggtggagaagac

SEQ ID NO: 396593 - DNA, 122 bp, Homo sapiens
ctgacgctattctcagagaccaccttgcaccaggtaacaagtattggggagtgtgacacacgcagcccccggggcagggcaagagctgatgaggagctcaggctccagcctcccgtcccaac

SEQ ID NO: 396594 - DNA, 122 bp, Homo sapiens
ggtcgtggcagctacaagttaacctgaggggcgtgccacctctggagcattctctgtgctcgaactaatcccgggatttacagttcctgtgctcgaagcctgtccttgaaagtgaggagtgt

SEQ ID NO: 396595 - DNA, 122 bp, Homo sapiens
acaaaaagacggcagtctcttccctgagcctatgccaacccagccttaaagccagtggatcgaatcaagccatttgtggcattatctattgctgcgtacgaacttagcctggcacaatgcct

SEQ ID NO: 396596 - DNA, 122 bp, Homo sapiens
ggccgcggggggcgtcggtggcgcggggccgggcctgggctgcgggggtcttgagggtggcggtggcgccggccggagccgggggacggatctcggaggtgtctgggcttgggaccgggatg

SEQ ID NO: 396597 - DNA, 122 bp, Homo sapiens
acccagagcaaagatttctaggaccaccccccgccgccacctcctggagcgggagatctgcgggtgcaggagaacacaccaggagctcggggcctggcattcccctgggcatgggtgtcgag

SEQ ID NO: 396598 - DNA, 122 bp, Homo sapiens
tcagataaaatctgggtaacacactttcaacgcttcaaccccctcgggcgcaccgctctgcgctcattgcaactttgaaagcaggaaggaagaaatgcgcaggctccagccgcgtccccgca

SEQ ID NO: 396599 - DNA, 122 bp, Homo sapiens
attgacgttgctaggcaactccggaggcgggcccagcgccaaaagaacagggcgaggcgtcgtccccgcatcccattggccgttctctgcggggccccgccctcgggggccggagctagaag

SEQ ID NO: 396600 - DNA, 122 bp, Homo sapiens
tcttaaagcatctttcagtgggttctgtgttcgtttgttctgcctagctgaagtcagagtcgacacaaacacagtgtgttatgtgtgtactagaagaaagagtcagtaatatgacaaaggta

SEQ ID NO: 396601 - DNA, 122 bp, Homo sapiens
ccgggcgctcggcgagcgggggcagggcggggtgaggcgtggccggggatgccgcgaggccgcgcctccagggctgtgcgcgggcgggtgttgctggggagaaaagcgcggcacggccccgc

SEQ ID NO: 396602 - DNA, 122 bp, Homo sapiens
ccaagaaagaagggaggggctcaagaaaggtgcaatgcgtgggattctgctgcaaagaggcgccgggaggagctgcagggaggcccccacaggaagggagagcacgggaggtgggtctcggc

SEQ ID NO: 396603 - DNA, 122 bp, Homo sapiens
caggacaggagcagctccacgacagctgcatggccacggcggcaggccaggtgcaggggtcgctgcttgtcctggtccgcagcatcagcgtctgctccagctgaaagcagcaagctgcacag

SEQ ID NO: 396604 - DNA, 122 bp, Homo sapiens
cctgttcctggacgctcctccgtccttgtgaggttgtgtataataatcgctgtataatcgcgggccattgcagtacagttgctgcctcttacttgtcctgttatctgacagcgttccttttc

SEQ ID NO: 396605 - DNA, 122 bp, Homo sapiens
aaaagtgactgaggacacaagcagtgttctgcgttccccgatgcccggagtggtggtggccgtctctgtcaagcctggagacgcggtaagggctgtgtgtgtctctctgcaggacatgctgg

SEQ ID NO: 396606 - DNA, 122 bp, Homo sapiens
gacaccaaagtgaagccttgcgtgaggacacgggcgataaggcatcagtgcagccaggcgcggccccagcctctcggaagcgaggcgagcctccatccccgctccagaggaaattagtaaag

SEQ ID NO: 396607 - DNA, 122 bp, Homo sapiens
aggccgagccgggagagcccccgccccgggaggaaggggaggaggccgagtgtttcctggcgcattcccggccagcccgagtgactcactcggccaaggaaactcccagggcccgcccagga

SEQ ID NO: 396608 - DNA, 122 bp, Homo sapiens
catttaaacctgaactaaaaactttcaccatgaaagcacacagcaggagcaggcccagagcgtaaggcgtgcccggcccggcgctccggcggggcctgcggagggggagggggtcgcggctt

SEQ ID NO: 396609 - DNA, 122 bp, Homo sapiens
gccactgccgttgatgaaatgcttgctgttttcaaagtcaaataaaacatagagacaaatcgctaaatttaaaacattgtattcgggaagcaagaattagaatttgggggtaaacacacaga

SEQ ID NO: 396610 - DNA, 122 bp, Homo sapiens
acagcactattggaacctggaatgtctatttttctttattagaaatgaggatgtatatgacgacaaccaaaatcttaggctggggaaaattgtaatgcttcccgatttaagtaaacctcttt

SEQ ID NO: 396611 - DNA, 122 bp, Homo sapiens
tggcctggggcccgcttggctttgatctcgtggggcttcgtcttttggacgtcctgggtgcgcctccactgtggctcctgggttccctcacgcacccgggtgtaagcgccactgcctgtgtc

SEQ ID NO: 396612 - DNA, 122 bp, Homo sapiens
gacgcctctctgtgcactgggatggcggactggcctgccggcgcaccaccggccacccagcgcaggacaccaggccctgtgagcagcagctgctgtggccgtgggttagacatgcgtctgtg

SEQ ID NO: 396613 - DNA, 122 bp, Homo sapiens
tgtctacaatgcatctaataacgagctggttcgtaccaagaccctggtgaagaattgcatcgtgctcatcgacagcacaccgtaccgacagtggtacgagtcccactatgcgctgcccctgg

SEQ ID NO: 396614 - DNA, 122 bp, Homo sapiens
gagctgagcagcctacgagcctgggacggggcgaggtggcgcagcggctgcttgggggagcgcgggagcattgagtcgggggcagagagcctggggcgccggggctgggcgcagcgaggcgc

SEQ ID NO: 396615 - DNA, 122 bp, Homo sapiens
agaactcccagatggttcatcattctgcccatagactcccgccgttcagtccacagactccggttatggctcaccacagacccctgagtcggccgacagaccccactgttgccaaccgaccg

SEQ ID NO: 396616 - DNA, 122 bp, Homo sapiens
cacactcagggaaagaccggaggaaccgtggcgggggtcgaggccggcgtggggtgggggcgccaggggggcgggcggggcccagagcccgggacacgcgacgaggggccggaccccgagga

SEQ ID NO: 396617 - DNA, 122 bp, Homo sapiens
tacagcttccaaagggcgctgagagaagccaagccccctgaggtgggcacgggtggggcccgaggctgccctcactcgccggcctcaccttgattccctcgatcctgaaccccagggtggcc

SEQ ID NO: 396618 - DNA, 122 bp, Homo sapiens
ggtgggagctaggtcgtgtgtctggcctaggaggttggtcaggttccgttggtttaagcgcgtgctcgacctgagtcttggaacttcccgcgtcggtatccgctaactgcagctatatgagt

SEQ ID NO: 396619 - DNA, 122 bp, Homo sapiens
gtccggctctagcgctcagccgccgcccgctcctgtggagtcttacgcaaggggctgactcgcaagctgctgtcttcttcaatctggcctggtggctgcgcatcaacttcccctacttctac

SEQ ID NO: 396620 - DNA, 122 bp, Homo sapiens
gcgcttacctcggagaactccgggcatgaatgtgcgaaaggcaggaacagacgtccacggcggctttcatcctcatggcgcaaacgggacccctaccgtcagcaatggagccgtgaaggagc

SEQ ID NO: 396621 - DNA, 122 bp, Homo sapiens
gatggcgtaagcacgctcgggacgacggcgtcctcttgatcgcccttgaaggcccctttccgggctgtctgacacgatgcaagtgtcagcttgtgttggccggttgcctttctttcgcaaga

SEQ ID NO: 396622 - DNA, 122 bp, Homo sapiens
cttttcttattcttgtcatttctacaggatacggtaaatccctgaatcatgaccaggacacgagggaacattctctgtgtctatactcctacagaaatcaatgaatacctctcacctaagat

SEQ ID NO: 396623 - DNA, 122 bp, Homo sapiens
caaccttaataccattaatttagagactaaactacttgccccattgtcccagagtagttacgtgtcacgtgggtggtagagacaggttagcccagttagtccctatccccactgagccgact

SEQ ID NO: 396624 - DNA, 122 bp, Homo sapiens
gtacctggaagtcttgagctctggacacctggaagggatccccatgggccagggccctggcgcggctggagagaagcttaaggttagcactcacttggtccctcccctgcacacgcacacgc

SEQ ID NO: 396625 - DNA, 122 bp, Homo sapiens
accaggggacctgcacggaggagcgctctaggggaggctgctgcctcgggagctagggcgcgcccggaccacaccgcacggcgcagaagcccagcgcgcacgcgcgccgcctgccgccccgc

SEQ ID NO: 396626 - DNA, 122 bp, Homo sapiens
tttgctcgtagctggctggctggatccctgcatggattgcccttggacaaccctttgtgccggatgacctggccgccgtgtattgagagcgcacacagaccaggcgctgtgcctgtggtgtt

SEQ ID NO: 396627 - DNA, 122 bp, Homo sapiens
tggaagcctctagaaatgagaaggctgggtgtgtgggactcatgctggtgccttcccagacgaaggagagggcccagaggaggcagcttcctggagcagagacggcagcaggagcgcccgtg

SEQ ID NO: 396628 - DNA, 122 bp, Homo sapiens
ttttgcatttcaaaaaggagcctgttcttcctcgccttgcttcttcctgtgctgagtaaacggaaggcacacccttgtttccctccctattcacagctcctctgtccgccacaaagacaacc

SEQ ID NO: 396629 - DNA, 122 bp, Homo sapiens
gagccccggcccggaggtctgtcatgctgttcccgctccaggtggccgctgtaacctcttcggtccgcgacgatcctctagagcactgtgtgtctccccggacgcgagcccgctcccctgag

SEQ ID NO: 396630 - DNA, 122 bp, Homo sapiens
aagaaaggtgaggacggcctgctggagtcccgccagcccctcccaaaggaacttcgagcccggccccccctactggggtctacctgcggccgcggccctggctcccaaggcaggagccccgt

SEQ ID NO: 396631 - DNA, 122 bp, Homo sapiens
acatcacagagcagaggcggtgcccacggcagggtgcggctaattcctcagggcggctaacgcccttgacagctgttcctcctggcttcacacggagctctcgcccggcagaggcacccttg

SEQ ID NO: 396632 - DNA, 122 bp, Homo sapiens
aaatcgaaggagctgagtcgcaaacagagtcaacaactagaattgctggaaagcgagctccggaaagagatacgtgacggtaggctccaaaattgtgtttgtagaaaaacaagccttttata

SEQ ID NO: 396633 - DNA, 122 bp, Homo sapiens
gacgctggtcttgcctcccaggcgcctgaactagcggagttggggtatcgggtggagtctcggagaaccaatccaatctgagggggacgcctgtgggagtcctaagtatccagcgcagctgg

SEQ ID NO: 396634 - DNA, 122 bp, Homo sapiens
ccagacagggcattgcagccccatctctgttgttcccttaaccctctagggtccctaacccgatcagtccaaccagtcctgggtactaactacccaaatgtgggatggctcctcttgggaag

SEQ ID NO: 396635 - DNA, 122 bp, Homo sapiens
gaaagcgccgcgggtggcacggtgcctctggcgacagagtagatggacccgaaagagacccgaggtgacttcgggctgggcaggacacccccgggagttgccagcggctctcagcgggcgcc

SEQ ID NO: 396636 - DNA, 122 bp, Homo sapiens
tggcctcggcagcagatgctctctgcaagcagttgatccacacgccagtggattttgtctcgagggagacctaagatcactttgtgctctggctagtgatagcctctaattcttgttctctg

SEQ ID NO: 396637 - DNA, 122 bp, Homo sapiens
ggcgggggactggggagctccggcctcctgggctgctgtggcgtcggtgctgcgggagcacggcctgcggactcacagctggttgagcatgcgctgcatctcctcgttgatgctgagggctg

SEQ ID NO: 396638 - DNA, 122 bp, Homo sapiens
ttagccctttcaaaagtctacacacatcaccaagaaaagttcccgggcaacagagccacacgttctggccaagataattttttcccccctggactctaattttcatcaattctctttgctgt

SEQ ID NO: 396639 - DNA, 122 bp, Homo sapiens
tggagcgcaggccggtgccgtctgggccgccctctctcccgggcgtgctctggaccgtctcgtcccctccgggcgcgtcatcctgctttcggaacccccgtgtcctgaagtccaggcatatt

SEQ ID NO: 396640 - DNA, 122 bp, Homo sapiens
ccgggcccctgggtttttgcggaggttgggtgaggttgtgttcactctcctcactgaccccgccgtgtggtcgccggctggtgccttgtctgtctgccccagccccgaatgccccgagactc

SEQ ID NO: 396641 - DNA, 122 bp, Homo sapiens
tttcaaatggaatattcaaactgatcactagatccacttcacagattttgtccagggcctcggcttgtcctaatgtcctaggaaaaccatcaaggagccagtgctggccacgcctattctcc

SEQ ID NO: 396642 - DNA, 122 bp, Homo sapiens
cggcgccgagtgctactgcggccacaagatccaggcgacgaacgtgagcgaggcagagtgcgacatggagtgcaagggcgagcgaggcagcgtgtgcggcggcgccaaccgcctctctgtct

SEQ ID NO: 396643 - DNA, 122 bp, Homo sapiens
acgtgctgctcggccccagtctaggtgctgggctctccccttgcttgggtgttaggtggccgagagactggtactgtctgcaggtgtggggacacggctcagatgcttcccagcgctcacta

SEQ ID NO: 396644 - DNA, 122 bp, Homo sapiens
aagaactgagctccaaaacacacaccgtcaactccatctatccccagacctctggattaccggtcagtctgagtcagacccagacctctggattaccggtcagtctgagtcagcggagaggc

SEQ ID NO: 396645 - DNA, 122 bp, Homo sapiens
ttcgggggcgtgtgtggctggggacccacggagaggtggcagggagggccggcgtgtgcgcgcgtggggtatgtgtgcacctagctgtgtgtctatttctcgctgactgtccacagggcagc

SEQ ID NO: 396646 - DNA, 122 bp, Homo sapiens
gggacgcagtgggcgccgaatttgcctggggaaggggaaatccgctctggcccacatctgcgcactcctagttccgcccctcagcctcaatgtttgttattgttgttcgggttcaggttgct

SEQ ID NO: 396647 - DNA, 122 bp, Homo sapiens
tcggtcttccaaagtgctgggattataggcgtgaaccaccacgcctggctgtctgccccccgcctgtcctaagcactttaaatgtgtcaactcatttggtctctttgaaaagagtggccagg

SEQ ID NO: 396648 - DNA, 122 bp, Homo sapiens
cacctggtagatcttgtcacacatgaaggtctggccccccaggatgagtagcgtgtggcccgccttgcgtggccgggcacaggggctggtgaccacgccatcattctgcaggatcctggtct

SEQ ID NO: 396649 - DNA, 122 bp, Homo sapiens
aagaaacggctggtgtagcggcgggcccgggcttgggagccgacctagggcctaggtgcacggagccggctcctcgggaaccctgagagtggccgtcccccggagatgaagggacgagggcg

SEQ ID NO: 396650 - DNA, 122 bp, Homo sapiens
cattatttctaaacatgaaagagatcacatcagaaattctgcaacattcataaacacagacggtgtcagcagacttgatacagcataaatagaacaaatgcagtgaactagacagcacccag

SEQ ID NO: 396651 - DNA, 122 bp, Homo sapiens
ggggactccttcgaggagcttgatgtgacccctggctgggggcttccagctgcagaggcgcgggcgctgtggcctgcgcagcctgttgtgatgtgggtgctgggcgctttgctggggagctg

SEQ ID NO: 396652 - DNA, 122 bp, Homo sapiens
aagcagtccacgctggtattggtggtggcggtgatgggctgagcaggccagtccccagcccgcagttgacacatgtgggtggataccagctgtggtggtagcagcagattgagtgagcccaa

SEQ ID NO: 396653 - DNA, 122 bp, Homo sapiens
ccatagcctcccgacccctggccggtagctctcagggaacttggaggcttggcacagggacggccagaaccagggttataggaagtgggcggggcctgcacagctacctctgtgatctcatg

SEQ ID NO: 396654 - DNA, 122 bp, Homo sapiens
gctgcaactcggcgcgcgtggacagcggctgctggatgctctatgagcagcccaactactcgggcctccagtagttcctgcgccgctgcgactatgccgaccaccagcagtggatgggcctc

SEQ ID NO: 396655 - DNA, 122 bp, Homo sapiens
tgggatagtggcggacctgaagttggcctctgtgaaggctgagtcctggggaaccgggaccgagaagatttcgaaggtggaggagcgtgtctcaagattggggctacctgttctttcgtggg

SEQ ID NO: 396656 - DNA, 122 bp, Homo sapiens
gaaacccgctacaaagtagcggcgtgtctgccctagggaggcaaagcgcaaacttgttaccgcgccgggacctgccccgggattctcccagcggctccgcaggacgcagcgcctgtgcctcg

SEQ ID NO: 396657 - DNA, 122 bp, Homo sapiens
ttcgaatcctagcccagcccccttcccctctcggtctcttggtttatcctgcgaacggggcgtcacccgcccacctagggctgctgcgcggcctgctccgcccgggcccagggcaggcaggt

SEQ ID NO: 396658 - DNA, 122 bp, Homo sapiens
ggcgcccgctcagcgcgattgtctccgaccggagccgccgcaagcgccccctgcaggcggcgcgccacaccgctggccctccggcaccgccccctcccggccccgctccgcccgccgccccc

SEQ ID NO: 396659 - DNA, 122 bp, Homo sapiens
cacacacacacacacacagaagcagagaagcccaagttctactctgagtaagctctagaccgaggagagtcaaatatagttcaagaccaagtccaagacttaaggcagaagattgatgtcct

SEQ ID NO: 396660 - DNA, 122 bp, Homo sapiens
gcaccgcccactgacagcgtgttccaatcagaggcggagaggaacaaaagaggcgaggtccgggagacccatacagggcggtttccacagagaccccagacgcagtcttggctccaccctca

SEQ ID NO: 396661 - DNA, 122 bp, Homo sapiens
ctggttccggtccagcttccgccactgtggcccctggagagctgggccaaagaaaccaggcggcgaggaggcagcggcgcgaagacacgtgggggctaccgggcaggagcgccccactatgc

SEQ ID NO: 396662 - DNA, 122 bp, Homo sapiens
aacaagtatttactagttcttgggcgtacctactctggttgggtggaggcttatctaacacgaactgagaaagctcatgaagtaacccctgtgcttctttgagatctgattcctagatttcg

SEQ ID NO: 396663 - DNA, 122 bp, Homo sapiens
ctcctgttgttgagcagaataaaagcccattttgccagggcccgcagtcctggcggcccccgcagctgcggccctgtaactttaaacctggcctgagatcatcgttttggcgccggccaaac

SEQ ID NO: 396664 - DNA, 122 bp, Homo sapiens
tctttgtcaaagagatgcactaagctgcaaagacacatgtacaaagatggtggccgggggcggggtattaccaaggttttatgttcccctctgacctcaaactttgtttcaatcctaaaaat

SEQ ID NO: 396665 - DNA, 122 bp, Homo sapiens
tagataagacatgatgaaaaaaaaatcaagaaagaaaagtcctttttatccccttttatacgcaattgaatgggttcttgactggaagtgtctgtaggcagagaatcattcaacatgcttag

SEQ ID NO: 396666 - DNA, 122 bp, Homo sapiens
accctgctgagaagtaatgggtgcagaataaatcgagtaagaaggaatggacttttctggcggatgcttactgatctaacaactggatgactgaggaatgcggtcctaagtgaccccgggct

SEQ ID NO: 396667 - DNA, 122 bp, Homo sapiens
ataaatccagtcctggggacctcatgaggcttggaggcagctgtccatgcccaaaggtgacggggcgcactcctcctgctcgggacgccgcctgaggtctgggacagtgctaacgcagtccc

SEQ ID NO: 396668 - DNA, 122 bp, Homo sapiens
caatgcccataacagagatgtgggcaaatagggtccactgcttttagtaaaattccatcgcggtctggtggcttgaatttctctttcttcctccctccttctccttcccctgttcccccaat

SEQ ID NO: 396669 - DNA, 122 bp, Homo sapiens
aactcctgtcctgccccacagaccttcggcctccgccgagtgcggtactggagcctgccccgccagggccctggaatcagagaaagtcgctctttggccacctgaagcgtcggatccctaca

SEQ ID NO: 396670 - DNA, 122 bp, Homo sapiens
ccacccacaaggagacaccctcgaggtgctgcgggagctgtggagagacagacagatggccggccccatggacagacagttcccagcaaatctgtgctaatgcttggcccttgaagggccca

SEQ ID NO: 396671 - DNA, 122 bp, Homo sapiens
catttgcattttaataatgatgcacttgttttaatgaatatgagaaaagtactgagtttacgtttgaaaagttccctttaaaatatacttatgtgtgtaaaatgtgaggtgtgcaaaagaga

SEQ ID NO: 396672 - DNA, 122 bp, Homo sapiens
tcaggcatggcgggctgcctgtcccaagccctgccccggcggaaggcagctaaggcctggcgagagattgagcacagcagctgctagcccaggtgctaagcccctcactgcctggccagtgg

SEQ ID NO: 396673 - DNA, 122 bp, Homo sapiens
aaaagaaagacggtaccaagaagggacgtgttaatggggcccagacctatggattgaaagcgtgtgctttacccatctgctgtcttgctccatctgagaccagagccaagatctgcccagga

SEQ ID NO: 396674 - DNA, 122 bp, Homo sapiens
ccacagataacaagaatatcaacaattaacatgtattgaccacttactatgtgctgggcacggtattaaaccctttttgtgcgttggtctcccgataactctacaggctagccaatattaac

SEQ ID NO: 396675 - DNA, 122 bp, Homo sapiens
tatgtcaggagctatctcctccctgcaaagacacatgtacctttctgtacttcactggcacgtctgggatgtttgccagtgcgttcatttttctgtgcagagttgtccatgttagcaaaatt

SEQ ID NO: 396676 - DNA, 122 bp, Homo sapiens
tcgggcgcagcagacagttgtgagcccgggggagcagctgattggtgcatttccttcgctcggcctcagctctccaccccccgccccgccacaccgccccccgtttccctttgtttcattga

SEQ ID NO: 396677 - DNA, 122 bp, Homo sapiens
gatattatgaggctgttgtcattagggcgattgcggtggaatcgctgaatcttgactcggcggtggttggctctccctctcctctctccctctccctctccctctctgtctcgggttctctc

SEQ ID NO: 396678 - DNA, 122 bp, Homo sapiens
gagaggaaagcagagggaccctggctgtcttttcctttctttcaacctactagtaaaagacgggagctgtccagcatggacctcctgaagttggagtgccgctgcagggacgaaagcctgct

SEQ ID NO: 396679 - DNA, 122 bp, Homo sapiens
gctccccacccagacaggggctggaatggcaggctgccggccgctgataacggaacacatcggagttgggtcgcgagacagcaatcaaaagacaaaaagagtctgattttaaatggtagcaa

SEQ ID NO: 396680 - DNA, 122 bp, Homo sapiens
aataagttctttcttgcttgtattcctgaagatgagtttggccctgtgactctgaagggtcggctattgactgagacatcctctgtcgggttgccccccgtgttatatttcgccatgaggga

SEQ ID NO: 396681 - DNA, 122 bp, Homo sapiens
gctcgcgcccctccccgtgcgccgtcccccactctccagcagccgacgtcggcggtgcttcggtcgccatggtgaccaatccaggctcgggcccgcccccgcccccctgccccggccccctg

SEQ ID NO: 396682 - DNA, 122 bp, Homo sapiens
tgcacgtggcagagccctcctgcacagccagctcctcacccccgtggcgcgcacccccaacgaaagtggctgtgatgagccccacagccctggcgttgcccactccttctgccacgtcccag

SEQ ID NO: 396683 - DNA, 122 bp, Homo sapiens
tgaatgagaaagagatttcacatgtgctgagcgggcatcacctcatttcatccttacatgcgtcttctgggggctgtgatatctttagcccactctgcaggttggcatactgaggcttctta

SEQ ID NO: 396684 - DNA, 122 bp, Homo sapiens
aggacaggcacacccagacacgcacttgtggtttattacacacagtgatctccatctacacggaaatggaaggcaagcagccaggatggagctggttgctgggaacacttgctggaggtgga

SEQ ID NO: 396685 - DNA, 122 bp, Homo sapiens
tcacatacccaggaacactgtgggctcagaacattatttcacaagcaggtattgctggcacgttgtttgtgtcacgtttagattccgattaaatgacatcattttgttcctcagatcctgac

SEQ ID NO: 396686 - DNA, 122 bp, Homo sapiens
gcctgcctggagcctgctgatgctgagtcaccacaaagctcattagcctgacttggctcacggaggttttctgcctccaaatgaacatacgtagctctctcttagatggggaacaccttgag

SEQ ID NO: 396687 - DNA, 122 bp, Homo sapiens
cttgtcttcatcaagttggtgctacaagggtccaccggccatctactgtttctgacctgtcgccgctcttcagagcacacccaaggccaccaaaaggggcatttaaacaacctaacgatcaa

SEQ ID NO: 396688 - DNA, 122 bp, Homo sapiens
agtcacgtgattaaggatgcgcacctgaggaaggaaaccatgcacaggtgaggcagggcccggcccgctgggcggtcggacttcctgagtgccctgcactggttcccacctttccatcatag

SEQ ID NO: 396689 - DNA, 122 bp, Homo sapiens
tggcgagccatgagctggaagtgctctgggcagggagccaggccctggggctgggaatcccggcagcctgtctgaatgggggtcacccacagagggctgcccatggccccttccagcaccca

SEQ ID NO: 396690 - DNA, 122 bp, Homo sapiens
tcactgcttgcttttataactgtctgtcctttcaaggaagtaactgaagattcacatactcgtgagaatccaagtctattccccagagccagccccaggcaaaattgttgaagagctgaagt

SEQ ID NO: 396691 - DNA, 122 bp, Homo sapiens
attgcctcctctctgctccaaaggcgaccccgagtcagggatgagaggccgcccgagccccggattttatagggcaggctctgtttgcttaaagagcgttagataacatttgcctaaggagg

SEQ ID NO: 396692 - DNA, 122 bp, Homo sapiens
agtattgacgctgtaagagcatcaggttggttcccattgtatcttctttactaatacgttcgcgtttttgacctagatttctttcttctaagataaatactgataaattaacagggtcaggc

SEQ ID NO: 396693 - DNA, 122 bp, Homo sapiens
gagaaaacgccgacaggactcctggcaatgtcaggagctgtggaggtcctcactagtccgcgctgggccgcagctttccggagcgcagaggaagctggccagcctgcagatagcactgggaa

SEQ ID NO: 396694 - DNA, 122 bp, Homo sapiens
gcgcgaggcagagaaggggaccgggctgggactgtacactgggcctcagtccctcaaatccgggaccgggcgtccgcagctcggctggccgggactcccttcgggacgctgaggaggaaggg

SEQ ID NO: 396695 - DNA, 122 bp, Homo sapiens
acgttggtgaaagggtgcaaagcgttcgttagctggagctgtgggcttcaaggtcagccgcgctgtgtggcggccaccactgccgttaaccacagtacacagggtgctcggtaagtgcagtt

SEQ ID NO: 396696 - DNA, 122 bp, Homo sapiens
ccgggccaagtttcccaaagcccgtgtctccgcagcaaagtctgcaagaagttggggggacgcccgggcccgcgtgggtctcccaccgacccccgggccgcgcccctgcagcggctagagct

SEQ ID NO: 396697 - DNA, 122 bp, Homo sapiens
gagcctctgaagccgtggctggggcgctggggtggcagctgccgcgggagcatcagctaccggcgtgaggcgaggcagggcacgcgcgccgtccgcagccccgttgcctgggctgcaggtcc

SEQ ID NO: 396698 - DNA, 122 bp, Homo sapiens
acagcctcttttccacatggcagccagagtgattcttttagaagtcaggtgacaccaccacgctcacaaccctccagtgatttccatctcactccaaagtaaaagaccaagtccttaaaatg

SEQ ID NO: 396699 - DNA, 122 bp, Homo sapiens
gcggctgcagcaggcatggtgctggagcccaaggcttctgggaaagagtccaggttttcgcggagggagcgacggactcacgcgggatcgcaggcactgctgcaagacgccgaacaggctga

SEQ ID NO: 396700 - DNA, 122 bp, Homo sapiens
aaaggccaggaagagcctagcttggtctcttaaataaatttcaggtgtgtgggtggactacggtcacttctgtaatcaggcctcaagtatgcctagctgaagattttatcagctctatatca

SEQ ID NO: 396701 - DNA, 122 bp, Homo sapiens
actcgccacctcctcttccacccctgccaggcccagcagccaccacagcgcctgcttcctcggccctgaaatcatgcccctaggtctcctgtggctgggcctagccctgttgggggctctgc

SEQ ID NO: 396702 - DNA, 122 bp, Homo sapiens
ctccaataccgcaggagggcggtcttccccggctcgccaactcggctgctctgggggattcgtgcgcggtaagaagctgcgcggtagcgcggtgaggtgaggttctcagccaccaaagctgc

SEQ ID NO: 396703 - DNA, 122 bp, Homo sapiens
accctagagaggttaaagacttgcccagaaacacacaactggtgaggagtaaatacgaatcgctgtcattcactaaatacttgccacataataggaaccatgctaggtgctttatattgtta

SEQ ID NO: 396704 - DNA, 122 bp, Homo sapiens
agaggaagaagggacttgctccattctgtaagcatcatgccagcagcagctgcattttaccgtggcaggagcaattgctttagccaaaaggtggttttaatctctatcctttttccaacaat

SEQ ID NO: 396705 - DNA, 122 bp, Homo sapiens
cggtgcttcagagcagcagagccaggtccctctctggctcctcccacaggcaggtgacagcgcccccgtgcgggaagcttcccgcctcctggccctccagcctccagcgcactctccgccac

SEQ ID NO: 396706 - DNA, 122 bp, Homo sapiens
agataccctgtgctctcacacaggtcgtgctgatggcggggaaccgggactgccgttgtacgtggcctggagctcacttccgctctccccctcgctggacctctgaccgcaggtctctgagt

SEQ ID NO: 396707 - DNA, 122 bp, Homo sapiens
gtccaacccagagaagataactcttaacactgttttatcttctctgtttatgagagaaaacgaagtgttaatggctggctataaatgttccagtggaaagatgtactttcatacatgtaata

SEQ ID NO: 396708 - DNA, 122 bp, Homo sapiens
ttcatcccagcccagacaattcaaatctgccttctatcaggacctagaaaggatgtaaaacggccgggtataaatatcccctgggtctggggaaactgtcaggagcagtgacatcacaggaa

SEQ ID NO: 396709 - DNA, 122 bp, Homo sapiens
cattgatatgtacagcaactcttccctgttgatcttcactcaaggtttaaatcctcaggacgctcagttttggttccgttttgtttgttaatggagaagaggtgagtagaggaagaggcctg

SEQ ID NO: 396710 - DNA, 122 bp, Homo sapiens
ggaaacgcctcgtcctgctctcaggccagaaccatgaacccgggcggcagcggcggcgcgcgatgctccctctcggccgaggtgcgccgccgtcagtgcctgcagctttccaccgtgcctgg

SEQ ID NO: 396711 - DNA, 122 bp, Homo sapiens
agatttcctcgcctatgatgtccttgacctccaccgtatatttgagcccaactgcttggacgcctttccaaatctgaaggacttcatctcccgctttgaggtgatgcccccatcctcctttc

SEQ ID NO: 396712 - DNA, 122 bp, Homo sapiens
tatgttgctatggctaactttgctatttataacagcatcatccacatttcagattctatacgagagggatctgcaactgctcggctggtgtcattgctaatagtattattagttttgcttcc

SEQ ID NO: 396713 - DNA, 122 bp, Homo sapiens
gaaccaactctcctcccagcgatactccgacctctgagcaccccgggcggggccacgccccggaaatggagtcaggtctccaggccgcccgctgaagtgccttccagccactccaagcgggg

SEQ ID NO: 396714 - DNA, 122 bp, Homo sapiens
agataggaaactcatactgtggcttaaaataacaaaggtttatttctcactcaggctacacgtgcgttgtggtcaaaaagggagttcttatttttgtcattcagggacacaggctgatagag

SEQ ID NO: 396715 - DNA, 122 bp, Homo sapiens
gaagagaagttccagttccatgacaggcaacttgtcaggataagcatccagaaactgacccgccatcagtggcactttgacaactgtcttcttaattcaaggttcacttagcataggtctca

SEQ ID NO: 396716 - DNA, 122 bp, Homo sapiens
tctgaagaggctggatgcaggatgactctactcagaatttacaggcgagggcggccgggccgagggttgtatggaggcctgggattcgaactcaggactgtggcgcggggcctggctcctgt

SEQ ID NO: 396717 - DNA, 122 bp, Homo sapiens
agcccgggacccctgacaaggtgttgattagggtgtggctaagccccaggcgggagaaagcgttggcatttataaggccagggtctggcgcggtggcctcattccgtcttgaagtagaccct

SEQ ID NO: 396718 - DNA, 122 bp, Homo sapiens
tccggcccccgcccgcccccagctcggcccgccccgcagcaccgcccgcctgcgggcccgcggactcccagtccccgcccagacaacgcagggaggcctccgagcccgcgcgacccccaggg

SEQ ID NO: 396719 - DNA, 122 bp, Homo sapiens
cttgtctcccagcaacgaggttctaggtcttttcggattcgctcaccctctgtaaggccccgcccacgtccctttctccctgtgtgctcacctgagccccaccggcccctcccctgctcaat

SEQ ID NO: 396720 - DNA, 122 bp, Homo sapiens
ataacactgagcgtttagattcagcatgtactctgggccaggctcagctctaagctggtgcggatcaccacgatgacctctagagtctcctctgaggtgggttctactgttagcccatctaa

SEQ ID NO: 396721 - DNA, 122 bp, Homo sapiens
tcagatattggagttctggttgacaagtcagcgatgagtccaaggtgagtctttcgatgtcgttgaaacatgcatctggttgtggcaggcccttgctttgtagtgggataccaacctggggc

SEQ ID NO: 396722 - DNA, 122 bp, Homo sapiens
ttaggttatttggtgttggaagcctatataaaggaaaagaacttctcaaaaacaatgtcccgtgcagttggaataatgaaatctttactcagtctctgttggtgttatttgctgcaaaggca

SEQ ID NO: 396723 - DNA, 122 bp, Homo sapiens
cttcctaccttggtttcctgctgtaaaatgggtacagtgtccattacgccactaccccttcgtgtttactgacgcttagaccagtgctggaaaatgccacatggtcatgaaatagatgtcag

SEQ ID NO: 396724 - DNA, 122 bp, Homo sapiens
agaaagggctttgcaacaagatggcgaggaggcaccgacacacacaacaagggaaggagccgcgctgcccccggccgccgcccccgctactacaccggggccacagccaaagcccggaccgg

SEQ ID NO: 396725 - DNA, 122 bp, Homo sapiens
ctaaatgaggaaatcaagtcattgattgtgatatggaggatgatggggactgaggtgccgcgtggactctggctgagtctggcacgacagttacctgctcctgggaaatttgcacggggttt

SEQ ID NO: 396726 - DNA, 122 bp, Homo sapiens
ccaaacccactatcagggtctgtgcctgggcaccaaaggggcaggcaggggcagtgccctcgtttgaaactaggtctgtctggttgggggcctcctttgcaggtccatatgccttttcacag

SEQ ID NO: 396727 - DNA, 122 bp, Homo sapiens
cagccatgccggataccaaacgcccacacttaagagcctgaaatgacctgacgccacctccgcatgctttacctactgaggttacgcacatgtggttcccagactacatgttctgattggat

SEQ ID NO: 396728 - DNA, 122 bp, Homo sapiens
aagaagtagggtgtacgtgtgaggggaagaggacgctgggctccaacgtttcagtagaagcgcttaagacttgcaaacacccttggtggggacctggaaccccgggagatgccgacgagcaa

SEQ ID NO: 396729 - DNA, 122 bp, Homo sapiens
tcctgcagtctgggtttctgggcacgtggcctgcgcgtggcgccattgtggagtgtcccgcgcccatgtccttcgtgccttccaagcgcccagaggccaacggtcccccagccatgggcgct

SEQ ID NO: 396730 - DNA, 122 bp, Homo sapiens
aacagccatacagggaaactgcatattagcgttaaaaggtttctacgttctgtacgttcacgtttgtcagcggaacccctgcttctgcgcggattgtgcgcagctgcagccaagcgtaagct

SEQ ID NO: 396731 - DNA, 122 bp, Homo sapiens
acccccgccggggcggagcctgaggggtggctgattcatgcacggggactgtcaccccgccgcccccgcgctgcaaactgtgtaagagggagaggaattccccgccaagttgaaaagttgaa

SEQ ID NO: 396732 - DNA, 122 bp, Homo sapiens
gccttgccggcgggttaacgcctgcaggggcggcacatggaggggctgatgactgttgggcggccgcgcgccctgggtctgctctcgtggggagcagaggcccacgcgctaccctggggagg

SEQ ID NO: 396733 - DNA, 122 bp, Homo sapiens
gaccttggaacgaaaagctgccctgtttgggatcaatgctcagggaacccagtccactcccgcactcacgtgttcccgccttgccctccagctagttcccccgcgcgcaggatcgcactact

SEQ ID NO: 396734 - DNA, 122 bp, Homo sapiens
aataatcctcacaatggttacagtgggttatgcacacacatgcatttaagtgtgcacatgcgtgcacagacaccctcccagatttgcctccccacctaacttctgactcccacaaactaggg

SEQ ID NO: 396735 - DNA, 122 bp, Homo sapiens
ggccggattgtgatttactcttccctcacatggagggaaattacacagaagtgcttcctccgctcccactaataagtctccagatgcaagtatttctaatgagatttgttctgaggtagggt

SEQ ID NO: 396736 - DNA, 122 bp, Homo sapiens
gaggcactcagtgaggtattggcagctgttagcaagacagcagggacactgttctctgaacgtggatgtgctgttggatttattgcctcctgttatctgaggattctgtgtatgtgtgtgtg

SEQ ID NO: 396737 - DNA, 122 bp, Homo sapiens
cggaaagcgcaggaggaggcagtgttaggccttaggccgggtgggccgggtcaggagagacgcgcccatctttcgccatccggggtgcgcgaggtcctctcgggacccggccggcgacccgt

SEQ ID NO: 396738 - DNA, 122 bp, Homo sapiens
cccttaccagataaactgacacgtagactccacaatgtccccacagggtgggctccatcacgtgccagacagcttaccagggtcagtcacgagcccagagtcaaaccctgcaagggcttgtt

SEQ ID NO: 396739 - DNA, 122 bp, Homo sapiens
agattttgttttccaaggaaggagaaaggcccagaatttaagagcaggcagacacacaaccgggcacccccagaccctggcccttccagcagtcaggaattgacttgccttccaaagcccca

SEQ ID NO: 396740 - DNA, 122 bp, Homo sapiens
tgacctagccctcctcctcctcctcctcctcctcctcgaagtgggcttgcttcttccggacgttccaatgcaggcactgggcgaggctctcaaaccagtcgctcacggggtcccgcacacag

SEQ ID NO: 396741 - DNA, 122 bp, Homo sapiens
ctgactttgtgatttcaatactaaggaagctgtcggcacattatcaaggaaaacggggatcgctgctccccaacgtacacattctggtgtgccccagtaaaattctgtattcagcctccaaa

SEQ ID NO: 396742 - DNA, 122 bp, Homo sapiens
aacgacaccctactgggatccttagcgaacatacagccacaagtagtttttaggtaatctcgacagagctgaattaataatgtatttctggtttgggtgaataatttcatacttcagcccag

SEQ ID NO: 396743 - DNA, 122 bp, Homo sapiens
aagctgcttctgtctgtgagtttccatggtgttgacgttccactgccacattagtgtcctcgcttccaacgggttgtcccgggtgcacctcgaagtgccgggtccgtcacccatcgcccctt

SEQ ID NO: 396744 - DNA, 122 bp, Homo sapiens
gtgggtggtgtggctgcaggaggaagaagagatttacagtcaagaaaggcaccaacagcccgcccacaggagggatgaggccccactggaaggtgtactgagcaactgcgatgggcctgcct

SEQ ID NO: 396745 - DNA, 122 bp, Homo sapiens
gtagggactgcaggttcctctccccgtcccgcaccagcccttacctgcccagcccaggtgcgccgagctcacgtcagcgcctcgccccaggacgccgcagccttcgcatccgcccggccacg

SEQ ID NO: 396746 - DNA, 122 bp, Homo sapiens
agcttttggcaatgtcagccaggcagaaactcagcccacatggagacatagtcaggagaccgctgaggccaccggtgtgcactcctgggccggtccagccggtccaggcagtgctgagctct

SEQ ID NO: 396747 - DNA, 122 bp, Homo sapiens
ggtctctggaaacctcaggagtctaaggaataactccgcctgattcttaaaagctagtcacgtgtgctaacattggtttccagaactcagcgtcttgactcattggacaggcattttccctc

SEQ ID NO: 396748 - DNA, 122 bp, Homo sapiens
ctcccctgacccatctcccacgccctgggcaggtagtgcattaccagtgcgcttgcctcgcgacacggtacaaagtttgccatttgacacaggtttctcacgactagccgagggtgagcgta

SEQ ID NO: 396749 - DNA, 122 bp, Homo sapiens
cgaggagggcggggtgggcagggccagcctctctcccgccctctgcaaggcccaggcaggcggaatggctctgcccagtcaggcctggcccatgcccaagggcaccacagtccaacagccgc

SEQ ID NO: 396750 - DNA, 122 bp, Homo sapiens
tagctgaggatgcggctgttgcacactagcaggctcttggtggcctccagagcctgctctcgctgggagcaggctgccagcagcttacaggccccttccctcatccggatctcatggtctag

SEQ ID NO: 396751 - DNA, 122 bp, Homo sapiens
gagaaagcgtgcaaacccgtcaactgctcccgccgttcctctccctcctcaacccaggctcgctacagaagaagggagtagggtctgcccccttgttgtatctattttccccttctccgcca

SEQ ID NO: 396752 - DNA, 122 bp, Homo sapiens
tgtttcttgtctgcctttctggaaccaaatccaaggaaattcatgggtttggggagacagcgatgggaacccagcagggcacaggatgctaggataaagctgtggcgccccaaaagtggcct

SEQ ID NO: 396753 - DNA, 122 bp, Homo sapiens
ttttgcgtatgtcggttttcaggatggggttcagatgggtcaaagccctgtgcaggtccacgggggctgcaggaggtaaaatggaggaggagacaggcggacaagctggggtcagtggtcca

SEQ ID NO: 396754 - DNA, 122 bp, Homo sapiens
cgtcggtgcacagcccagcgcccagcgctctccatgcgagcgtcgctgtggccccgacggcgcctcaggcctcggcgcctcgggctgcgacgctcacagcttccacttccgttcacccatgt

SEQ ID NO: 396755 - DNA, 122 bp, Homo sapiens
atgtcctgcttaggagatttgacacttatattggactgtatgtaggcagttacagataaccgtctgtcaagctaggcaagataattaataagaactaacatttagtaaatgctgcataccaa

SEQ ID NO: 396756 - DNA, 122 bp, Homo sapiens
gcctcgccttgccttgcagatcaccctctacgaggaccggggcttccagggccgccactacgaatgcagcagtgaccacaccggtctgcagccctacttgagccgctgcaactcggcgcgcg

SEQ ID NO: 396757 - DNA, 122 bp, Homo sapiens
tttcctaagttcagggggcttgtctctctgtcccctcgactaatttccctctgtcgctggcgctgcccggtgccctcggtcgcttgggccgcccctctccgcgacttttttttttctttctc

SEQ ID NO: 396758 - DNA, 122 bp, Homo sapiens
aagtgtaggcagaagccttcaaggcaggcatgctctttcctctgtgggctggggcttggccgtgagcccactcctgcagctcctgggaaatgcaggcagcgtccacacggggctggacttag

SEQ ID NO: 396759 - DNA, 122 bp, Homo sapiens
ggaagtcccgcccccttgtcaagagaccaaacagaagaccgctgccggtctccccgcgagcgagcgctaagcgtagtcccgactccgaccttaggatgcccttcccccaacctctcactctc

SEQ ID NO: 396760 - DNA, 122 bp, Homo sapiens
gtagaggaaggttgcagtcttgcggtataacaaaacccttcagtagtgatcccacttgaacgtgttctcgggcctcatctggcccatacctcagtgtcttcaacatctccctgtgtgctatg

SEQ ID NO: 396761 - DNA, 122 bp, Homo sapiens
taacgtggatggcagcaggcagggagagggcttgtgcggagaaactcccgcttttacagccgtcagatctcgtgagacccattcactctcacggggacagcacggggaagacccaccagctc

SEQ ID NO: 396762 - DNA, 122 bp, Homo sapiens
tagtaagggacactaagatcgcgtacagagcttgtcggaggggcttggtcttctgtctcacgctcagggttgtctcctcgttacaggagaccttgctcttaaacgtttcagagttcgctttt

SEQ ID NO: 396763 - DNA, 122 bp, Homo sapiens
tgagaaaatagccttttacaaatgcttttaatatgtagcttatagttctctaatctccagcgttaggaaattggaatgcgtattctactaaattgagtacggggaggtcagtataagggact

SEQ ID NO: 396764 - DNA, 122 bp, Homo sapiens
ggcccagcacagaggcggatccaattccccttgggtgaggcccctgcacccacctgatgacgcgggggctccacgccctcacctggaatccgctcgacctgcagaggggcgcggcgcggcca

SEQ ID NO: 396765 - DNA, 122 bp, Homo sapiens
tggccaggaggcacaagactggagccagcccacttaagtataggcctaacctttcataaacggtatctcaaaggatgagtccttaatcactttggattcagttttctcccctgttactgaga

SEQ ID NO: 396766 - DNA, 122 bp, Homo sapiens
cgcctgtaatcccagcactttgtgaggttgaggtgggaggatcgctggagcccaggagttcgagaccagcctgggcagcatggcaaggcgcagtagctaccaaaaaaaaaaaaaaaaaaaaa

SEQ ID NO: 396767 - DNA, 122 bp, Homo sapiens
caacaagactctgaccacgggcgaccatttcggcatgaaggacagcctggtgtactgccgcgcccacttcgagaccctcttgcaaggagagtatccaccgcagctgagctacacggagctgg

SEQ ID NO: 396768 - DNA, 122 bp, Homo sapiens
acaagaatcacccataggggctgactcaattacatctttcaaagtaaattcttggctactcgcccttccaataggctgccaaaagatactagaaggaatttctaccttctgctaacatttct

SEQ ID NO: 396769 - DNA, 122 bp, Homo sapiens
tgatctcctgctcaaagacctcggggggccgccgcaccagctgggtcatggactgcaccacgcggatcagcgccatctcattgtaacagcgactgttttcatagccttcctgcaggcctcgg

SEQ ID NO: 396770 - DNA, 122 bp, Homo sapiens
ttggccgctggcattcctgcgcgggcgggagctgcgggcgctcgggggataaggcgaggacgcaccagcattaatggaataggagaactcccgaagcttttagggccctgggaaagggggcg

SEQ ID NO: 396771 - DNA, 122 bp, Homo sapiens
tttgccactgcttctctttaagaaaaattaaaacaatgcccaaggacgttttggggctaccgtaggtattttcagaatgaattaaatcaccccaagtggggctgctgggaaaatcccacaca

SEQ ID NO: 396772 - DNA, 122 bp, Homo sapiens
agttgaacaattaaaaccaggtagcagcatagttcaaatcaaaacaaagtgatgcctaaccgactttttaattttattcacaagtaagttgaaatcaatgctttactgcatgccaactgagc

SEQ ID NO: 396773 - DNA, 122 bp, Homo sapiens
gtgagcacggacccacctccccagcctttccatgacgtgactgctggggcggggatggggcggggcacacccagctgcccaaatcagcatgaccccaaaagagcaagcgagttcctgaaatt

SEQ ID NO: 396774 - DNA, 122 bp, Homo sapiens
tgacctcgtgatccgcctgcctcggccttccaaagtgttaggattacaggcgtgagccaccgcgcctggccaagcacttaattcttagtggaccaaagttacttggcctctgaaggccttag

SEQ ID NO: 396775 - DNA, 122 bp, Homo sapiens
cagaaacgagccctgagaagggggccacattggccgccggccacggcagcgatccggccacggcagcgttccggttggtgtcaccctgtcccggcctgagcccagctctcagatccgagcac

SEQ ID NO: 396776 - DNA, 122 bp, Homo sapiens
gggcggggcaccgggggcggcccggggatgggggttggagagggagggaccgcactggggcgaagggcatccaaccgggcccctgtaggattgtccagcacccacatgctattcacggacct

SEQ ID NO: 396777 - DNA, 122 bp, Homo sapiens
gctcccctcggctccacttacctgctccgaagagtggccccagctctgcgcctcttcctgcgaccccacacacagggacagccccaggcacagccccagcagcaggagcatggcggggcgag

SEQ ID NO: 396778 - DNA, 122 bp, Homo sapiens
gtgaggggtgggtacgggatagtgtgatagtagtgtctgtgaccggcagctcacccagggcgtcctggttgtgacctcaacgctccagccggcctagcctccagtgccttcccccattcagc

SEQ ID NO: 396779 - DNA, 122 bp, Homo sapiens
gaagaccgggttgtctcccacctctgccttgccctaggagcgctggttctagggagtcaccggggtccctgtcccctccctgagtgtctccaaagatgggaatgggggttggagaaggggtg

SEQ ID NO: 396780 - DNA, 122 bp, Homo sapiens
ccccaagggacggtcttgtgtgttcagaggctggttttacaggtgaagagaagaaacagccgcagaagttgcgattgtccaaggtcacttaataagtggcaagaattaggatgttaagtgtt

SEQ ID NO: 396781 - DNA, 122 bp, Homo sapiens
agggaaacagaaactcaatcatgcaggaaactagatactgagaaaacagttgtagctcagcgtggctacaagtaactgtggtgtggaagcagagtagagagaaaacttgttcctcattagag

SEQ ID NO: 396782 - DNA, 122 bp, Homo sapiens
gcaggtcacagggaaggggagggtggctgctgacccagcaagagaagcatcaggaagcatcgggggacctcactgtacccctataccttgaagacaggcctggctaggctgattttaatggg

SEQ ID NO: 396783 - DNA, 122 bp, Homo sapiens
agacgaccacatgaagacacagggagaagacggccatctacaagccaagaagagaggccccggggagaaacccaccctgccgacaccttgatttctgacttccagcctccagaactgcgagg

SEQ ID NO: 396784 - DNA, 122 bp, Homo sapiens
cccgtcacgccccgccgcctggggctgggcagtgaccgtaaagctgttcgctcggtgcgacgcaagtctcagctcagcgcgcttatcctgggtccaccggcgctaccgccccccgacgtgag

SEQ ID NO: 396785 - DNA, 122 bp, Homo sapiens
cacctttgccgctgccccttaacccctttcaggcttcaccccattaaacgcctccagccacgggtgaggctcatctgctactggaacacccccgaatccttccaagtccccagctggaaggt

SEQ ID NO: 396786 - DNA, 122 bp, Homo sapiens
agttcctttgtctttccatatacatttaaaaataatattgcctgcatctataaaaaatcacgctaggattttgacaagaattgtgttaaaggtgtacattagtttgggaagaattgacttct

SEQ ID NO: 396787 - DNA, 122 bp, Homo sapiens
cactatgccagactctcagaataatcaaagaggaagatctctgccctctagacattttcacgaaagacctttagcacaagttcactgtcagtgctgcttgggggtctttaggaatcctaatg

SEQ ID NO: 396788 - DNA, 122 bp, Homo sapiens
ccacggccaccgcccgcgccctcccggggactccggcgccccgtccgcccctcggcctcgcgcacctggagggagcacgtggccgcctctgggacaaacctcaccaggccgggggcccagga

SEQ ID NO: 396789 - DNA, 122 bp, Homo sapiens
tggcgacccgaagcaggggcctggggcctcctctcccctgacttggcgccgcaggaggcccggggtctggatctcagctgctctcacgcatcccacccctgagcagagcagcggagacctgg

SEQ ID NO: 396790 - DNA, 122 bp, Homo sapiens
cctggctcttgggggacttatgaaagacccatctcagtcaggatggtcctcagtttcactcgcaattgcttgcccaaccaggacttgcctgggcttttggcctctcctagtttagcccttgc

SEQ ID NO: 396791 - DNA, 122 bp, Homo sapiens
gttggatgcattttgttatttgcctcaatggatgtttcacattaatttttagttgcacaacgaacgcgcgggaacattctccgtgagagaaaaagcacgggtggggggcggttaccggtgct

SEQ ID NO: 396792 - DNA, 122 bp, Homo sapiens
atctcaacagacaagcagggctgagccgaaccatgagccaggcattcgtgatggaggacgcgggtcacatttcttgccctcaaggaccttgtccttgtgggagggacagggttgatcaaaga

SEQ ID NO: 396793 - DNA, 122 bp, Homo sapiens
aggggtgttttgacgattaaactggacaatccaaataaactcgcattagccctccttggccgcacatctttctgactttgtacgaaactctggaatgcctgtaggtggggaggcaggcaggc

SEQ ID NO: 396794 - DNA, 122 bp, Homo sapiens
ctcataaatttgtgatggatcaaattagcatatatgtgtaatcccccgtggaatgcacagcgacccttgaaaggaaatagttttgttaattcgagcttggagtttggaaggaagagtggaat

SEQ ID NO: 396795 - DNA, 122 bp, Homo sapiens
catcagtagagatgataatatgtttatttttaaccttcattctgttaatgtgatgttttacgttggttggtttttgtgtactaaactatctttgcattccaggaataagtcccacttggtca

SEQ ID NO: 396796 - DNA, 122 bp, Homo sapiens
ttccagttacataggccaatacatttcctttttggttaaactcatttgagttggcttttccgttagttgccgctgaaagcacgctaccagatacagtaagcattataatccctacttttaca

SEQ ID NO: 396797 - DNA, 122 bp, Homo sapiens
gggaccggagcggtgcctttgagggagggctggtatcccagcccttccagggccctgtggcggctgcgcaggctcccttcccctcccttattgatctccacgcccggggcagaaataggatc

SEQ ID NO: 396798 - DNA, 122 bp, Homo sapiens
gtgtgagccaccacacccagcccacctcaaggtcttgataacaaaactgcaggccaggcacggtggctcatgcctgtaatcccagcactttgagaggccgatgtgggcggatcacaaggtca

SEQ ID NO: 396799 - DNA, 122 bp, Homo sapiens
gattgcaggcatgagccaccacacctggcctggttctcaaattttatcatgcatagaagtcggggagatgggggcagggagtgagggggaagcatattaaaatgcagattccaaggccccat

SEQ ID NO: 396800 - DNA, 122 bp, Homo sapiens
ttcaaaacgatgtagcgaaaccaccgcggaggtaaaaggtcgattgttcccagccacagccgctctgtggggacgactttatagcgcagcccggccagtaccgacagggaaaatggcatttg

SEQ ID NO: 396801 - DNA, 122 bp, Homo sapiens
acttcaggtgattcgcccgccttggcctcccaaagtgctgggattacaggggtgggccaccgcgcccagtctttgaggaattttttgaatgaatcattatggctggatgatgaaaagttttg

SEQ ID NO: 396802 - DNA, 122 bp, Homo sapiens
cctgaaatacacagagcagcagctaggcctccctgaaaacctccgaagtgacagccaccacgaatcttcagctgatgcattgcacaaacactgtcctcttggcgagagtgcaggatggaatt

SEQ ID NO: 396803 - DNA, 122 bp, Homo sapiens
atactgctttgctcagccatgctcctagcttctccaacagacatggagtcttgctggtcacgaaatctcttgtttcatacatgttcctcctcttctcctgtgaccctggggtccctcagtct

SEQ ID NO: 396804 - DNA, 122 bp, Homo sapiens
gggccctcggcacccaccccatatgtgattagcagccctcctgtgtatttcatcgcacctcgttgtttatatcaactactccactcaccacccttctgggcagtcctttatctccccctctg

SEQ ID NO: 396805 - DNA, 122 bp, Homo sapiens
tgccactaaaaataaaaaattagacaggtgtggtggcgggtgtctgtaattccagctactcgagaggctgaggcaggagaatcgcttgaaactgggcgatggaggttgcagtgagccaagat

SEQ ID NO: 396806 - DNA, 122 bp, Homo sapiens
gaataaagtaagaccactcggctctggttaacaggcatctggatttgttttgacgtaagacgtgttttcaatataacattttggttgtccgcaacttcttggttcttaaaaccgtcttgagt

SEQ ID NO: 396807 - DNA, 122 bp, Homo sapiens
gcgccttatgtcagggctatttatgacagagggaaatcggtgcgtgtttgagatacattccgtgaagtggaattgcctgatcagagggtgaaggcacacgcagttttgctccccgtaggaat

SEQ ID NO: 396808 - DNA, 122 bp, Homo sapiens
gcacctgagcgcgcggccggccgacgagatcgccgtggaccgcgacgtgccctggggcgtcgactcgctcatcaccctcgccttccaggaccagcgctacagcgtgcagaccgccgaccacc

SEQ ID NO: 396809 - DNA, 122 bp, Homo sapiens
gtgacagaatcaggatagggacaagagcctattttatagcaaagaaaccatcttctccaccggattcctccaattaactatagaaaaggggaaagttcaaaacagctcaacactattatatt

SEQ ID NO: 396810 - DNA, 122 bp, Homo sapiens
ggtcggggctgaaggtgacagtgaagtcttgtgtcttcccggggtccatgacgcccttgacgggggccacgctgaacacgctctgaccgttgagattctgcgtccctgcgggtagggtgggg

SEQ ID NO: 396811 - DNA, 122 bp, Homo sapiens
agccagcccacttgaagaccctgccgaaatgagccaccccgggggctgcgcttgggctggcgcggggctggacggaaagggggcggcgcgcaggtggggcgggccgggggcggggcggcacg

SEQ ID NO: 396812 - DNA, 122 bp, Homo sapiens
gacctggggctctcccggggtaacagaggtacagatgtgacagccctcaatcttctccttcgacagctggggccggatcctgcccatgatggagagagccctgggtcaggcccagctagaag

SEQ ID NO: 396813 - DNA, 122 bp, Homo sapiens
atacctggctaatcacacatttgatagtggggaaataagaaacatttgttggttgaaagacggatgcatgagagtaaaagcagtgttcttccccagtgtgggcagtttccgcataagcatct

SEQ ID NO: 396814 - DNA, 122 bp, Homo sapiens
gcaggaggcggcgatggccctgggcaaggttctggccatggcactggttttggccttggccgtgctggggtcgctgtcccctggggcccgggcgggggactgcaaggggcagcggcaggtgc

SEQ ID NO: 396815 - DNA, 122 bp, Homo sapiens
tagagcaacttcgcggacttccggttcaagccggaagttgtggttaccaaggcgacgcaacgccgcccggccaggtgagcaaaactgatcttacctttggatgccggggctcccctcgagtc

SEQ ID NO: 396816 - DNA, 122 bp, Homo sapiens
taagccctgggctgctgtggacccaaccctacctcccatactgtgaatcagcaggtgccccgaggtgagtagcaaggcatttacatgcactttcctgctttcttggagtgcggtccctcaag

SEQ ID NO: 396817 - DNA, 122 bp, Homo sapiens
gagctcagctgctgcgggccccagacgaggcgacagggatggacttgcgtagacagccagcgccgggccgccgggcgcgcggtctgggagggcgtgccgccgcggcgccgggccgcgctctg

SEQ ID NO: 396818 - DNA, 122 bp, Homo sapiens
gaccgtgtccctgtgcggggaggacagtggaagccgacttgctcggagcctaggcaggaccgtgtccctgtgcggggaggacagtggaagccgactcactcggaaacctaggcaggaccgtg

SEQ ID NO: 396819 - DNA, 122 bp, Homo sapiens
caacccatcactcctgcaccccgacaaacgaacaacagcaccgtgctgcacggcgtcctccggccttgctgcctggcaatgggtagccacctggcgtctgtctcagaataggactccgcggc

SEQ ID NO: 396820 - DNA, 122 bp, Homo sapiens
gggccctctgctgccgcggaggtgctaggacagccgcggacggcccgcctccccgtgccccgggcctcgaggccaataaaaagctcgcccctccagctcaccgggtccgacgggtacggtac

SEQ ID NO: 396821 - DNA, 122 bp, Homo sapiens
tgccagccagactataaagtgcacccaacggtgtatgcgtctctttacttccgggtgtaacgtactacccagccaggccctttcccttgctgtgctttggaacctggaaattacaaacccta

SEQ ID NO: 396822 - DNA, 122 bp, Homo sapiens
agaccatgagcccactgggaggaacaaacaactccagatgcgctgccttaagagctgtaacgctcaccgcaaaggtctgcagcttcactcctgagccagccagaccacgaaccccaccagaa

SEQ ID NO: 396823 - DNA, 122 bp, Homo sapiens
tgcaaaagtgcaattctacccaagagccctgcaggctctcctcctgcagctcagggaccccgctctgtaatgtaaaatgtggggaccccactctctaatgtaaaatgtgagctgccagctgt

SEQ ID NO: 396824 - DNA, 122 bp, Homo sapiens
ctaggatcggtgcatcttccgccgcgctgccagcaccccgcagcgcgtggtcgtgcaccccggaatctgcagcagctgcatatctgaggggggtctcctttgcccgcgccgccttcgctccc

SEQ ID NO: 396825 - DNA, 122 bp, Homo sapiens
ccctccctgaagggccagcgccgtcgaaggcggaggcggctgggggtgggggtcctttcccgcacccctccagggccccacgccccgtccagcccttcacacaccagagacgccccgatgat

SEQ ID NO: 396826 - DNA, 122 bp, Homo sapiens
aatagaggttgctctaattctgttctggtcgggtcaactttgagaagcctctatgtgagacggctgccagggagaaatgacagggtctggggaggcataggggttggggacataggattcca

SEQ ID NO: 396827 - DNA, 122 bp, Homo sapiens
tggtccaaaaagcgtaaaatcagcaatcaaggggggcctggctcgttagcgcaggggatccgagctgggcaggacatgtgagatagtcacagttttccagagatcacgacaagatctaacca

SEQ ID NO: 396828 - DNA, 122 bp, Homo sapiens
gggcctgggcattaagtcagtggttctgggcttggggtgccgcacccagcacgaattccacgtcgcttccccctggcctcgttggggacccctgcacctctccggttcccgcagaggcgctg

SEQ ID NO: 396829 - DNA, 122 bp, Homo sapiens
gggccttagcacaggtgacacacagcccacaggcctgggacaggcaggcagatgagtgcccgagcttggcaccatgcagccctgaggcttcgtgagtaaggcacgattgatcgtgtgagcag

SEQ ID NO: 396830 - DNA, 122 bp, Homo sapiens
cgggtcactgcggagcccgggtcactgcggagcccggtgcacggagtgggagtagggctgcggcgggcgcagccaagcggctccgctgcgccggttaaaacattctcccagggggcatctct

SEQ ID NO: 396831 - DNA, 122 bp, Homo sapiens
agacaccaactggggtggccaagggagtgtttgcaccacccctctcccaaccccaggaagcgcagcttgcagctccaggaaagattctttccttctgcttgagaaagggaaagggaagatta

SEQ ID NO: 396832 - DNA, 122 bp, Homo sapiens
caaacttcaaaaagttgggccagctcccttcccacgtagctccgactgttcttggagtgccgtatactttggacctggtcacggtcaaagcacctgctcagattctagggtttggttgagat

SEQ ID NO: 396833 - DNA, 122 bp, Homo sapiens
agtgatgggggtgcagaggcacctttgcgggaacccaggcagtggtgcattttgagatctcgctttaagcaaaacaggcaataagtgaaaaattctacattaattgaacaaatacccagctg

SEQ ID NO: 396834 - DNA, 122 bp, Homo sapiens
aatgtgtacaataacattaataggatcattagtcataataccctaaaagtggaaagcacccggccctgcacggtggctcacatctgtaatcccagcactttgggaggctgaggcaggaggat

SEQ ID NO: 396835 - DNA, 122 bp, Homo sapiens
ctggggcaggaggatcgcttgagcccaccaggtcgcggctgcagtgagccatgattgcaccgctgcactctggaatgggagtgtgaggccattaaacatgtggccattaaacatgtgactga

SEQ ID NO: 396836 - DNA, 122 bp, Homo sapiens
tttccaggaaggtccaggcttgccaggacttctatgcttggactgctctgtccccaagctcgctggtgcccatcaggagcctgcttggcacctttgcttatttcttcgattgttcctcaact

SEQ ID NO: 396837 - DNA, 122 bp, Homo sapiens
cccccctagacgccggaagagacgcaggactgttgggcgtctacgtccctagcgccgcgccgcccaacgtcactcgcaaaatccccggggggcgggcctttccgcccacttccgtgtggccg

SEQ ID NO: 396838 - DNA, 122 bp, Homo sapiens
ccagggcccgcgcgggcattctggaaggttctgcgtcctttagggttggaggcctgggcccgtaggtgggaggactgacgggctccagtccttcggcaacaccaattctgtctgcactcccc

SEQ ID NO: 396839 - DNA, 122 bp, Homo sapiens
tgctgcatttcctatatgtgcctagacttggtaatgcctgataaattctgtatattaccacgtcttgcatttaatagacaatttgtttaatgatactaactttactcacacttaattgactt

SEQ ID NO: 396840 - DNA, 122 bp, Homo sapiens
aggggcttcgcagaggcgttcagctcaccgctgggagctgttctggggctccgggtcccacggccgtttgcccagccgtttccgaagccgcagccttgctccggattcgcctcgcacttttt

SEQ ID NO: 396841 - DNA, 122 bp, Homo sapiens
ccttttcttcctaacactgaacagtatctgacatactatctaccgtacttttttattctccgctccccaccctgcagaatttaaacaccatgaacgcaaagattttcgtctgttgtcttcac

SEQ ID NO: 396842 - DNA, 122 bp, Homo sapiens
ctcattgttggctggtgagtcagagtcaatacacagtttcccacttcctaggtcaaactgcgggttataagtaataatcaatgtggaaaactagaattccatgggatgactaaataacatag

SEQ ID NO: 396843 - DNA, 122 bp, Homo sapiens
cccgactggctgtccccagcgaggaccactgcagcccctcccttggcacctacaggcccccgcctggcatccagccaggcccactcatggtttcacgcgtccctccagaaaagcagtggaca

SEQ ID NO: 396844 - DNA, 122 bp, Homo sapiens
tacatgctgggtcctgggacctcaccccatcctctacactagttttgtacagtccatgttcgtggcctgagaaggcgtggtgttgccttgaccacgaatctcattggcctttcaaaggggaa

SEQ ID NO: 396845 - DNA, 122 bp, Homo sapiens
ggctggagggagggggagcggaattagcgggcagttggaaagcccgcgaaacgctttttccgcctgggaggccggacgatcgcgattgggcaggaggaagaggaggtgctccccatctgggc

SEQ ID NO: 396846 - DNA, 122 bp, Homo sapiens
cgccggacgactcgagagccaatcgatgaagctgccggctgaaccaatgagggtgctcagcgcccctggctggggcgcctccggggcgggggcaggcacacaaaggggtctgtggtggaagc

SEQ ID NO: 396847 - DNA, 122 bp, Homo sapiens
ggcaatcgtcagtaaaatcttcagtctctttagtgctcaagtaaatgtaaatttaaactgcgtaataacaccttttccacctattggattggtaaggattttcaaaattacccagagcaagg

SEQ ID NO: 396848 - DNA, 122 bp, Homo sapiens
ttcttgagagagccaataaataatcagactgtgttgacctggttatccaatcaggactcacggccacctgtgtgtaggaaggtctggagcctgtggccccagggactgggaaatcagaggca

SEQ ID NO: 396849 - DNA, 122 bp, Homo sapiens
ctaattccactcagcgatctgatgtggggtgagggccagccgcgctagctgcagtctccccgtctgtgacgtggagataatcacagtgcctcactcatgaggctgcagggacagctgttgga

SEQ ID NO: 396850 - DNA, 122 bp, Homo sapiens
ccaaactttttaagacacaaaagtgtgctcacttccaggatccatagtttcttggacccacgctacggacctggctctccctccctctgcaccgggttttgtgggagggagaacgctttcca

SEQ ID NO: 396851 - DNA, 122 bp, Homo sapiens
ccagagggagattctacgtgaccacaacagcattttcagtgatattctgcagacagaagccggatcacagtgagtagaggaataaatacgaagaagtggaaataaatgcagataaatatttc

SEQ ID NO: 396852 - DNA, 122 bp, Homo sapiens
ccgcagggcgacgctcggagaccagccacactgtcccaagtcccggcgaagacccgcccgcggctccgtaggtgcccggcccgcccctcgcagcctcctgacttcccttcctgtcctcagcg

SEQ ID NO: 396853 - DNA, 122 bp, Homo sapiens
tggtcaaaaccctgtctccacctgactggtcagccacaatctgttctagctaaaccagtacgctctggggcccctagagaaactctgtgggtctcactcatgagccgacgcacttttccctc

SEQ ID NO: 396854 - DNA, 122 bp, Homo sapiens
gtcccggacgggaggagggcaggcccgcccagagggaatcggctgctttaagggaagccccgccccctggtggtgacgctccaccaggcccgtccgcgattggctgcggccagagggcggga

SEQ ID NO: 396855 - DNA, 122 bp, Homo sapiens
tctggtttttctggctgaaatattggtcttttgttaaaacaaaggacatcagctccagtgcggctcgtgcacaggacatgttatgtccgggtgagcatcggacctcccactgatggtcggcc

SEQ ID NO: 396856 - DNA, 122 bp, Homo sapiens
cggcggctccggcggccgcgcgccgaggcgttctccggggggcggggccgcgggggccggcgcccgggcttaaaggcgcagcgcctccaccgcccctccccacggggtatgcgggcgcgctc

SEQ ID NO: 396857 - DNA, 122 bp, Homo sapiens
agatgcccacagctctctggggagctaggcccagtgtcctcacctctccagccctccctccggccctggccccatcggacacctgatgctccccgaaaggtgcacctcacccagtcccctct

SEQ ID NO: 396858 - DNA, 122 bp, Homo sapiens
ggttgcagtgagcagagattgcaccaccgcataccagtctgggccacaagagtgaaactccgtctcaaaaaaaaaacaacaaagaaagatagtactaacagtttgcatatatccgatacatc

SEQ ID NO: 396859 - DNA, 122 bp, Homo sapiens
aggcccgcggcggcttcccgtcctcgcaggcgcgatcttaccccggccggacagttaggacgcggttgtgctgacctgaggcttggccctgactcccgtgcacagcgcccgagctccagagg

SEQ ID NO: 396860 - DNA, 122 bp, Homo sapiens
tatttacattttcatatatctactttttaagttcattccaaatggtagattctggagatacggcaatgaagaaggcactctttttgcccttagtgagctcacacgctagtcaaagtgccaac

SEQ ID NO: 396861 - DNA, 122 bp, Homo sapiens
taccatcctagcttcataactctgaaaataaatttcgggtagagatccaggctgaagatacgaccacacacttaaaatgactacagtgcctttaactatatgacataaagaacaccctaaaa

SEQ ID NO: 396862 - DNA, 122 bp, Homo sapiens
tcctcaacaatcacacggggcttgcctcatagaatgttttaaaaaaggaaaggaggctggcgcaggcgccaaccgtctcagaaccctgagcactgccccacccccaccctgcccgccatagc

SEQ ID NO: 396863 - DNA, 122 bp, Homo sapiens
ttctcacctttgggattaggtcttgtactgcccttagaatgatccaaccctccccacacccgacccgacccctgccatattaccaacagaaacttcaggaacattggatccaactccctaac

SEQ ID NO: 396864 - DNA, 122 bp, Homo sapiens
cccgtagtttttacccgcacggttgttggcactcacctgtgggggtgctgttcatgctggcggggctcccatcactgtggcaaccccagaatggcccccggcgggtgggagtgccctcactg

SEQ ID NO: 396865 - DNA, 122 bp, Homo sapiens
atgttaggagacaaaggacaatgaggaaaacaattcatatttcctatcacagacaaacggcgaatctccctgaggtaggctaacaatgctcaatgtttaagcaaagatgtctatatcctaat

SEQ ID NO: 396866 - DNA, 122 bp, Homo sapiens
ggcactctctcaggaccaagagttacacatgaaggatgatatgggtatgagagagagctccgctgtaaaaggtgatttggaatcctacaggcctggggcaacagtagccttttcagagaggc

SEQ ID NO: 396867 - DNA, 122 bp, Homo sapiens
aatcatggcgcccctcggaacaactgtattgctgtggagcctcttgaggagttctccgggcgtggaacgggtctgtttccgggctcgaatccagccctggcacggtggcctgctccaaccgc

SEQ ID NO: 396868 - DNA, 122 bp, Homo sapiens
tcccgctcctcagcccggagcgcagttggccccgggttcggagcgccgcagcacggattccggcacctggcttgagttttccgcgaccaaagttcaccttgttcgggctcgtcccccgctcc

SEQ ID NO: 396869 - DNA, 122 bp, Homo sapiens
gcacagttgccggggctgttgtctgtctgctgaatctttcggcagcccaacccatgtccgcgattttgacttctggcagctctctacccttggccggcttccccctcccagaagccctcaaa

SEQ ID NO: 396870 - DNA, 122 bp, Homo sapiens
gcttgggaggggtcccagtggggcaggcccctctgtctggccacccctctgtcctggccccggaaggccctgtggtcatgtgctcctagctgcacggtggctgctggccacaccacggcaag

SEQ ID NO: 396871 - DNA, 122 bp, Homo sapiens
gtcggagagcgccgcgggtgaatgggccaggcaaggcaggggtaccctagggatgcgacgcggggctcctggggacaaaccctgccccaggccgggagggaggagggagcaggagggtccag

SEQ ID NO: 396872 - DNA, 122 bp, Homo sapiens
ctggtactctcagagaaaaatctatgcacttccccagggcctacagctcacagcaggtggcgggggggcctcctgatctcatcacccaccacttcctggctgctccctagcctctgccttcc

SEQ ID NO: 396873 - DNA, 122 bp, Homo sapiens
aaggtcgggggaaggtcatcccctgacacaccttcagggacccaggggctcgggaagggacgagggtgtctggagaccagcttccagctccgcacccatccctctgcctgtcaggccccggc

SEQ ID NO: 396874 - DNA, 122 bp, Homo sapiens
cacccagtccccagcccccgccacctccctcgtgccaaccggtccccccaagggcaccgccgccctgacttccaacacatcgattcgtctgcccggtcctgtagtttatgtaaatggcatca

SEQ ID NO: 396875 - DNA, 122 bp, Homo sapiens
cggtgaccagaaacaggcagggcggcggggcctctgagcaggacgggccgctacaaggaacgcggctgttgggggagcggtgcggactgattgaagggggatgaaaggcccggccccgctct

SEQ ID NO: 396876 - DNA, 122 bp, Homo sapiens
tccacccttgcgttttacgtggagtgaagcacagcttcacgtgtgcctcgtgggcactgacgtgggactgctcccacccgcctgcctggccctgacggcgctgggtgtccaccagcgaagag

SEQ ID NO: 396877 - DNA, 122 bp, Homo sapiens
tctggacttccctgctagcacttccaaacaagctcagagatgttcctcccctcatctgcccgggttcagtaccatggacagcgccctcgacccgctgtttacaaccatgaccccttggacac

SEQ ID NO: 396878 - DNA, 122 bp, Homo sapiens
tagaacaggccatctttatcttggatgcgatgctcagacacggccagcagcttctctccccggatgtcttcccaatacacctggggctctgggaaccagccccttgcagtgcacacaagctg

SEQ ID NO: 396879 - DNA, 122 bp, Homo sapiens
ggagcccagcagcgggtgcctgtccttggctgcactgtaaacatcgcagaccgcggtgcacgtggccctgaccaggggcagagccaccacacgctgcaccacgttctgcgggaagggtcggc

SEQ ID NO: 396880 - DNA, 122 bp, Homo sapiens
cagaccaaggcatccgggtgcctgtgtgcacacagggctgcgttgtcaatgcatcgcgaccgggcatggtcctgggagtgaattatcccccacaggtcagaggggccgtacgacctcttcca

SEQ ID NO: 396881 - DNA, 122 bp, Homo sapiens
gtcacgtccaacatcacctacgatgaagaagatgcaggaagcttagaggccgaggctaggcggccagacgaagtgtcgtcctctgccccggtctcggccccagggagcctggcacctctcca

SEQ ID NO: 396882 - DNA, 122 bp, Homo sapiens
aaaccgaaccgcagcctggggaggcctttaggaccgaggggagccatcccttcctctagtcgggcagcaaattcctgtcctcctagtcccccgcagctatcccccgcccccagcctctgtgg

SEQ ID NO: 396883 - DNA, 122 bp, Homo sapiens
ccacccttcctgacctgtccttttcccacaggcctctgggggcaggtggcaaggcctggccgggccttccttcctggccttagccacctggctctgtctgcagcaggggcaggctgctttct

SEQ ID NO: 396884 - DNA, 122 bp, Homo sapiens
ctcgccctgtcactgatgaccgctggcttttggctctccgtgctcgctcttcgtgtgtcccggccacgcacggctcaccagctcgttttccccagacgcggaaagtctaccttcggcgtgcg

SEQ ID NO: 396885 - DNA, 122 bp, Homo sapiens
ttacaagtacgagttcagagaagccttaggaaagtcctgccctgctggccaggtgattcacgcctgtaatcccaacacttaggggggctgaggcaggcggatcacttgaggccaggagtttg

SEQ ID NO: 396886 - DNA, 122 bp, Homo sapiens
acaaggcctcaggaaacttacagtcatggttggaaggggaagcaggcacgtctcacacagcggcaggagagagagaggtgagagcatgtttataacatcatcagatctcatgagaattcact

SEQ ID NO: 396887 - DNA, 122 bp, Homo sapiens
gctgggggccgtgggaagtgggtggggcccggggatgtgggtcctgctgtgtgagccaggcgcccccgccctctctgggccccggggactcgggcaactcggacctccgggactcccgggcc

SEQ ID NO: 396888 - DNA, 122 bp, Homo sapiens
tccaacatatatagcagcgataatgactcagaaaaaagtgtttttcagtccagaggcagccgcgggctttccttgatcttcacaccatgctgggtcggaggctctgccaacatccattttcc

SEQ ID NO: 396889 - DNA, 122 bp, Homo sapiens
gtgggtcggagtagccacgatgcgcccaaagtgtttaattcttccagaaatgccggcctccgggaggaatctaggtttgaaactttccccaacagggcattccccggtgacattttgctccc

SEQ ID NO: 396890 - DNA, 122 bp, Homo sapiens
gtgagattaagtgcctcattcgtaggctctgtttatctgtaagaatgaggaagagtctgtcggctgggtctgcatacaagagtcacaatctcagctgttagctaggccttgttatcacctct

SEQ ID NO: 396891 - DNA, 122 bp, Homo sapiens
tgctgagtgaatcctcccagactgagtcagccaacttgaaggaagccatgccaggccctgcgcttgtttatgctttgactaacgggacttacggtatgatgctgaatgtatctgactctgag

SEQ ID NO: 396892 - DNA, 122 bp, Homo sapiens
caggcgctcccgccggcgggcagaagcatgggctggtgcagatgtctcccgcctggggctcgcccccgcctggtctgcggcgctcagctgacagcttcccgccttccggctgctgggcgccg

SEQ ID NO: 396893 - DNA, 122 bp, Homo sapiens
gtcagtgacactgctcatgtatccagtatcagggattcttagttggagaggcgaagccctcggcttgtatttagtccctttgaaggcaaggtcatctatcaagtgtcctgtggtgcagtctc

SEQ ID NO: 396894 - DNA, 122 bp, Homo sapiens
taggccagttgttcattataggtttttccacacagcagttttgtgctatccttttctgtacgaatttgaggagcatttttataagagaaattcatctggatgatctgcctcaccctagggaa

SEQ ID NO: 396895 - DNA, 122 bp, Homo sapiens
agaccagatgcaaggggccctggcacacggtgcggccctggatggagaagtggtacacgccgcgcgtgtggttcagcaccaggcggcgccgcggcagcgacgagatcacgagccacaggccc

SEQ ID NO: 396896 - DNA, 122 bp, Homo sapiens
gcatgtctggggaagcttatctcaaatgcagtttgcacttgcaaaggtcctgtggtatagcgggggagcaggggagatggagtctgggagcggtgaaggctgggtcactagctggctttgta

SEQ ID NO: 396897 - DNA, 122 bp, Homo sapiens
aatgacctcacctccttaagcctcagccttctcttctataaagtgggcataacaaataaccgcctcctaggttatgaggattaaatgagatggttcaggggatgtgggtggtaaccccgccc

SEQ ID NO: 396898 - DNA, 122 bp, Homo sapiens
aaagagaaggtagttaatgcagtagaaagtagtggtaataattcctttttaaaaaaatttcggtagtcatatagtaacattttgctatatgaaaactttggtatattctgtggttacaacta

SEQ ID NO: 396899 - DNA, 122 bp, Homo sapiens
acaccacttgccctggtcagaaccaatcatggcagctctcatttattgagccttatgagccgggcccatgcaattaatcacttcatagcaattatcttatttaaaccttactaccacccaca

SEQ ID NO: 396900 - DNA, 122 bp, Homo sapiens
acgtaaaatggcagggaggaaagcgatgactcaggcggtttcatagcacagtgggcacggcggagcgtccgggcgaggctgctgactctcgatggcaataccaatctcaaattggcactgag

SEQ ID NO: 396901 - DNA, 122 bp, Homo sapiens
gacatctgccactggcatggtctactcactgatggggtcctcctgactccagggcagagacgtccgtgcgggaactgaccgaggcgtggccccaggccccggcatcctcccctcgctgcacg

SEQ ID NO: 396902 - DNA, 122 bp, Homo sapiens
cccaacgccccctaagccagtcttctctgcccccaggacccccggaacaaacacaagttccgcctgcatagctacagcagccccaccttctgcgaccactgtggctccctcctctacgggct

SEQ ID NO: 396903 - DNA, 122 bp, Homo sapiens
ggcaggctgccctttccaccacggccaccccgtgattttctctgaaaactgcgacagactcgcagcctgccctgaattttcttcacacagcctgggggcatccgaatgcacgggagatgttt

SEQ ID NO: 396904 - DNA, 122 bp, Homo sapiens
catttcctgacacctgtatgttcctgtggccccaccacttgaggccaagtcagtgatcaacgtggggaaatcaataatactttggtggatttgcctcactagactgcattcctgggagatga

SEQ ID NO: 396905 - DNA, 122 bp, Homo sapiens
agcgttttctatcagtatagaaaatgtggccagatatcagcaatcccacataggagcaggcggaaataactactccagatccatgctctagaacgtatacaaaggtaccacattacaagcag

SEQ ID NO: 396906 - DNA, 122 bp, Homo sapiens
cggacgtgctgtggtctgacgtggtcagtcacccaccggaagggccatggcagcgcattgcgcccttgcgcgtgctcagcttcgatatcgagtgcgccggccgcaaaggtctgtccccgggc

SEQ ID NO: 396907 - DNA, 122 bp, Homo sapiens
cgccaggtttcccatcctaggcggaggcgggcaggggcgactgctgtgggtccagcctcccgcgccgcgcgtctcttgggagggcagccggccggtgctcctcgtttccgcctgcacctccc

SEQ ID NO: 396908 - DNA, 122 bp, Homo sapiens
agcctggggagggggtgggtaccggccaagagggcggggcgcgggggtgtcacgagcaagcgggggcggggcggcgcagggggcggggcgcgcggcctcgcggagcccgcccctccctccca

SEQ ID NO: 396909 - DNA, 122 bp, Homo sapiens
ttttccacagaaatgacaaggcttcaggctctcaagaagctctcatcatgagaggtcaaacgattttacacacaaacaattccacagcacattctgcatccttcttgcaatttttaagctgt

SEQ ID NO: 396910 - DNA, 122 bp, Homo sapiens
gcctcctctccttgggcagcagtccctgcgctcactttggcataggtgctgatcttctgacggatggaacatcagacactttttgagccctattctgtgccaggtgctgttccacgcacttg

SEQ ID NO: 396911 - DNA, 122 bp, Homo sapiens
cttggttttctgtttcacaacagaataaaagcagaaaattagaaggaaggggtgtaaacacgtaagagaaatcagtgaccaaggatagagaagaaattgttacaattaatctggggctgctc

SEQ ID NO: 396912 - DNA, 122 bp, Homo sapiens
aacgttatttatcagaaaaaagaaaagaacatagctacttcaaatgagaaaagagccaggcgcagtgctcacgcctgtaatacctgcattttgggaggatcaggtgggcagatcgcttgagc

SEQ ID NO: 396913 - DNA, 122 bp, Homo sapiens
tatgcactttggtacttaagtcatgacttgtggagaacgagaagcaatgtattatagcaacggggttcatatctaacaaacaataagagtgttgaacaaatcccttctatgaacttcgtgat

SEQ ID NO: 396914 - DNA, 122 bp, Homo sapiens
ctttgccctctctccctcattctccagccacattgggggttgtggttgatgccatgaggtcgttcctgccttattcaacttcatgtccaaatcttctaatggcaaaacacaacatggtgacc

SEQ ID NO: 396915 - DNA, 122 bp, Homo sapiens
gcgctggcccaggccaccaggcgggctccatcagggctttgggtggtgagttgggggcgccggatttggctcatttcaacgctggccggaggtcacgaggatggaggtgaggtgtttgtgaa

SEQ ID NO: 396916 - DNA, 122 bp, Homo sapiens
acccctaaggatacttcagtaaacaaaacagtcccaaattcttcccctatggagctttctcggcgaaggcgggattggttaggagctgacaatcggcagcagacgattgtaaatgaccggac

SEQ ID NO: 396917 - DNA, 122 bp, Homo sapiens
agcctgtttgactcagagaggtccgggaggtgcacgccaggggaggtctcccggggcgggcgctgtcgccgaggaggccggcgagctgtcacctgcggggggctgtggtgggagctgagggc

SEQ ID NO: 396918 - DNA, 122 bp, Homo sapiens
gaagtgctcgcagggcgtccagggactcctgcaacagctcactgcagaggtccgcatcctcgcctgggcgcacacacgcgtcagaggagcccccccactcccctcactctcccgctgggctt

SEQ ID NO: 396919 - DNA, 122 bp, Homo sapiens
gcaaggatctgaggccctcagaccaaaaaccatcaaagaactaaatgctgccaacaaccacgggagggagctgagaagtggattctccaccagtcccagcctagagatgactgcagccctgg

SEQ ID NO: 396920 - DNA, 122 bp, Homo sapiens
ggcggccggggcagtgggtggcctggctctggcacagcggcaccaccaggctctggggctcggcttcatttcgccttaaacagggaccgtggactcctcagggcgggccgcggcaggtgatg

SEQ ID NO: 396921 - DNA, 122 bp, Homo sapiens
tgccctccgggtcttgggagcacagtagttatcgggagcgtcgcctccggcgtgggctctcgggcgcgagtttcggacgaggcctgggcgcggtggcaggggtctgcccacgccgggatctc

SEQ ID NO: 396922 - DNA, 122 bp, Homo sapiens
ttcacaaaattttattcctatatagtttattgacaataatttcaggttttgtaaagatgccgggttttatatttttatagacaaataataagcaaagggagcactgggttgactttcaggta

SEQ ID NO: 396923 - DNA, 122 bp, Homo sapiens
gagcctttgtaaagatagctgacgcttactggattctggttatgagagattataagtggccgttcttagagtgtgttaaaatacagccaacaagataaatgtgaaaaagcaaggtgcagaat

SEQ ID NO: 396924 - DNA, 122 bp, Homo sapiens
cactgcgctggcagagactgtcgggtgcaccctgaggacgaggcgtggctcaggatgtgtcggggagctgtcttgcatttttttcttgctgtgcatctcgaattttctttagggtgggaaag

SEQ ID NO: 396925 - DNA, 122 bp, Homo sapiens
tctgcacagtgcagccctgaccacctggcgtgagcctccttcccgagcgccatctgcctgcgcccctggaaagccactgggcctgcgacagccagggagcccctcagctcgctggtatcctt

SEQ ID NO: 396926 - DNA, 122 bp, Homo sapiens
ggcactgcaggagcaccctcgagaccccaaccagatcctgatcggctacagccgaggcctcgttgtcatctgggacctacagggcagccgcgtgctctaccacttcctcagcagccaggtag

SEQ ID NO: 396927 - DNA, 122 bp, Homo sapiens
gctggagctccaaccttctcaggacttacctgcctgccaactaggatagaatcttattgacgtctgtaattcctacgtctgatatggtgcttttcatttgtttggttttgacagagctttta

SEQ ID NO: 396928 - DNA, 122 bp, Homo sapiens
agccccttcatcaccctaaaagctaggctgggtaaattttcaaagtgtagcgaaaccccacgtgaaaagttccacacacgccccacacagggaggactccgcggctgctagcagcgccggag

SEQ ID NO: 396929 - DNA, 122 bp, Homo sapiens
atgcagataagggttgcaaaagcctggcacactgggggtaaggaatgtcagtgctttttccgccaacgtggccgcgcgagtcagttgtaacccggcatccagaaccttctccgtaggggcct
